United States Patent Application Publication US 2026/0103690 A1 - sequence listing, part 28

SEQ ID NO: 126451 - protein, 388 aa, unidentified
MSKQTAAASKIDCNEQRATLMMAMELGESGWLLGFASAFGERPLRRKVATRDGEGVLAQITWAKQRLGLSADAPVVSCYEAGRDGFWLHRFLVAHGIENLVIDSASIEVNRRKRRAKSDRIDLVALLDLLARHRAGSAKPVWSVVHVPSEEDEDRRHLGRELRLLKKDRTRVSHRLKGLLANHGCTLDLHADLRTQIEVLRTWEGNVLPSGLLARLHRYVDDYEYLTERICGLDAERRRIWREEEGPALDQARQLYSLKAVGMNTAWTYATEFFGWRNFQNGKQVGAAAGLTPTPYASGKSEREQGIGKSGSRWVRGAAIEFAWGWLRFQPQSALAQWYQERFGSGSKRVRKIGIVALARKLLVALWRFLETGVIPEGAALKTDLRLH

SEQ ID NO: 126452 - protein, 411 aa, unidentified
MEAAVITAVGIDVSKSKSTVAVRRPGGEIALRPFEVHHTNSDLKKLASTLKKLGGDIRIVMEHTSTYWRPIALTLKEAGFFVSVVNAMLIHDFSDNTIRKLKTDRADALKIANYALTFWDTLPPFNNEEETRLLLKMQSRANERITATATALRNGLIALADQTFPGVNIAFDPNTKNANGHEKWVDFFLRYWHKDCVCQYSMEAFTEFYRGWCKRKNYKFRTDTAHKIYLLAQEGVATLPKCESTKMLITQACKSLNAVCEAKQSTQLEMQRLATMLPEYEVVMQMEGAGPITGPALMAEIGDVRRFKNKKALVAFAGIDAPPFQSGAFESKSRHVSKRGSPHLRRTIFIVSNIILTRSNPENAVYCFMDKKRSEGKHYYVYTVAGSAKFLRVYYARVTEFLRSQPSPDAC

SEQ ID NO: 126453 - protein, 386 aa, unidentified
MKEETFVPREYDVFAGLDVDKKSIAATFSSQQGFIRSLHMPYSVDYLLNHVRKHFGDQKVAFVYEAGPTGYGLYDGLVAQGFRCLIAAPSMIPRAPGQRVKTNRLDSRGLSESLRGGQLKSIHVPSPIYRELRHLTQLRDTVVREAAAHKQRIKALLLLEGIGFPPATVGRQWTLRVKAQLRKLRCSRTVRFKLDQLLDSLEFCEKQVVSSTKEIRRFCKEDAELFQSIEYLMSIPGIGWIVASQLLARIGDWREIDNVRQLGSFLGLVPTEHSTGDTVNRGSITRAGDGRLRSKMIQAAWSAIRQDGELREFYRSVCQRNPRGKGARIAIVAVARKLSTRIYAVLKNQRPYIVREPVHSAPLTQEETSPQGTTRRCAEPGETDNS

SEQ ID NO: 126454 - protein, 350 aa, unidentified
MPDRLGITGGVDTHADTHVAAAVDDRGAVLGTASFDATAAGYASLLAWLNSYGPVSRVGVEGTGSWGSGLARHLTNRGVDVREVIRPNRQTRRRYGKSDNADAVAAARAVLSGQANGRPRGNTGVVECLRLLKVARRSAIKQRTMVANQIHGLVTTSPENLRATLRGLTLRRIVGVVSRYRPGPINEPTAAAKLALKTLGRRHQHLTEEIRTLDVEIQTLVDQAAPPELLDMCGVGPQTAADLLITIGSNPDRVSKESSLAALCGTSPVDMSSGNQQRHRLNRGGDRQANAALYRIAIVRLRYHQPTRQYADRRTREGLTKPEIIRCLKRYIAKEIWEQLARQKHTTNPT

SEQ ID NO: 126455 - protein, 337 aa, unidentified
MEKEWFIGVDVSKLTLDFALCHVNDPNQFVYYQFENCLSGFKKMLFSLKKHGITTNNSLFCMEHTGHYTLALCCFLQDENFPFTLISPLHLKKSLGITRGKNDKIDAKRISQFACLHHRMLKPMQLPSTCLLKLKNLMAFRDRLVKTNVSLKNAIKDLNNIADLVDNSFIIKQSAAQHKLIEQQIKDTDKQIEATLKEDEEVQKHFNLIKSVVGIGMITAVAFLIYTQNFTAFNTGRQFACYAGIAPFEYSSGSSVKGKTKVSPLANRKMKALLSNCASAAIQYDPELKLYYQRKVKDGKAKMSVLNAVKAKLINRVFATITRGTGYVELMKYHKAA

SEQ ID NO: 126456 - protein, 471 aa, unidentified
MTVRIIGIDLAVDAAHKAIVLDQASNEFVSRPMTFRTNPADMDRMLRVARKGAPADVPVVAVLEATAMSWFTIGVYLSQQGVTVYRVSGQQVSDLRRVYSRHAKSDRIDARVAAQLYITHPENMYSLHLPSGRQLALQQTCRELSRLSDEIGSRKTRLKAVDKYAWLGLPKSLGSLSPAARWVRGNWYNPWAVIKAGPDTISQAWMTETGCDLDQVKWVQALFTRAQHMCLLYGSPEQLDYQKLQDSMWREQKRLARAEGEAKRLRQETLRPLYRQLYPQRHLESIRGIGQDSAAVYVAFIGNVLRFPSLRQFRSWSGLIPASNQTGYSQSAGLHITQAGPNLIKRTAYINADVARQWDPQIAVIYHRQMMVYGKHHTQAVCACATHLLDRIYVVLKQDRPYELRDIDGTPVTRQQARQLCKENYYVPDEVRRRNNRRTRRHRAEQQVERRYEHKNNRRRPVASQFELTLT

SEQ ID NO: 126457 - protein, 356 aa, unidentified
MANPCDLNKEVVMVTTIGIDPHKATHTAVAINETETILGELTIPADRSQTKTLLDWAQNLDGDGRVWAVEAAGGLGYLLSQQLVACGETVFDVPPVLASRVRLLGSGKSDKNDPNDARSVAIAALRQPGLAVVRREDHTQVLRMLAKRHLELTSLRTQAACRLHAVLTQLRPGGMGRRLSAKQASRMLQGLRIVDPVGEQRRSMARTHLGDIRRLDRELKANKVLIRKAVAASNTTVTDVYGVGPVVAAFLIGYTGDPTRFASADHYAAYNGTAPVEYSSGGKTKHRLSMRGNRMLNHAIHMAAITQIRHDTAGRVYYHRKQAEGKTGKEALRALKRRISNVVYRQLLKDQQTKKS

SEQ ID NO: 126458 - protein, 341 aa, unidentified
MNQVSTVGLDLAKYIFQLHGADSAGAVVFRKKLRRGQLLAFLATLPPCTVAMEACASAHYWGREIAKLGHTVRLIAPAYVKPFVKRQKNDMADAEAICEAAQRPTMRFVALKSANQQAAAVVFRTRDLLVRQRTQTINALRGHLTEFGVIAAKGPVHTSKLIAALEDPASDLPQAARAILAVLVEELRSLDERVAVLDREIARHAKENAVARRLMTIPGIGAVTAAALTALAPPADTFRRGRDFAAWLGLTPVQRSSGGKERLGKTSKMGERSLRRLLIIGASAVARWAARKGVPTGSWLGRMLARKPPMLVRVALANKMARIVWALLAKGGVYRAPVAAV

SEQ ID NO: 126459 - protein, 440 aa, unidentified
MTNSLQVIYPHAAGIDIGDSEHYVATPNDKGSHNVKCYKTFTCDLQRIVTDLKAEGITTVAMESTGVYWLTLYLMLEEAGIEPWLVNAKHVKNVTGRKKDDSDAIWIQKLHAYGLLQKSFQPDEHYRMLRTYVRQRKNLITISSDAVRRMQKAMELMNIKLHTVISDILGKTGMQMISAILKGERDPKILANLTDPRIKASRETIEKSLNGIWKEEYLFMLQQAYDEYIFYEKQIRACEIKIKQQLLQQIAIIREGDISSIPNETTEVKKKGKKNQFHFPLSPYLKELTGVDFCKIPGINEITTLEFISETGADMTKWKSIKHFPAWLNLVPNTKITGGKIISSKMKKKKNKAGQCLRMAASGLSNSKSPLGDEYRRMRAKLGGKGAVVAMAHKLSRIIYTMLKTQTEYNPEIIVGNQTKFRERKIKRIEKQLEKLKNVS

SEQ ID NO: 126460 - protein, 317 aa, unidentified
MSNPDSFVGVDVSKAWLDVAWLGGRTLRVDNTLEAIAGLLEQLRLQPPALVVMEATGGLETELASALAAAGLAVAVVNPRQVRDYAKACGRLAKTDRIDAQVLAAFAAAIRPQVRALPDEHTRALGDLLARRRQLVEMRVQEKLRLQQASPVQRASLREHIAWLDERIGRLDIDLTHALRSSPAWCDKDDLLKAIPGVGSLTRATMLALLPELGSLNRRQIAALVGVAPFNRDSGKHQGGRVIWGGRAQVRRTLYMAVVAGLRCNPIVRGFYDRLRGEGKPAKVAITACMRKLLTIMNAMLKHHSPWTTALDMQHSC

SEQ ID NO: 126461 - protein, 416 aa, unidentified
MTDPQKSSPFERYLAIDAHKHYVVVGGLNAQLEIVLPARRMDMERYPQWAKENLTQQDIVVIEASTNTWDLYDITAAVAGKVVVAHPLAVKLIANARVKTDKQDVFRLARLLAGGLIPEVWVPPQPVRELRTLIAHRRRLIQMRTMTRNRLHSLAHRYNLALPEGGAFADKNQEWWKGLSLSPVEKLRLQQNLALLEFLEPEVKAVDAELARLSNCDPWKEAVPYLLQLPGFGLIVTMTVLSAVGDIKRFPTSKQLAGYSGLGASLHQSGETNYSGHITKQGRKELRYALVEAAWVAVTSSPYWREQYHKLSQRMATNKAIVAIARRLLVAVWHVLSERSADRRADPDMVASKLMIWSWKLNDVQRGGLTSRQFVRYGLMRLKIGQEIAHVKRQGNRPIASVEEVLERLPELNLNI

SEQ ID NO: 126462 - protein, 395 aa, unidentified
MFIVGIDVAKRSHEVCMITSDGQTVQRPFSIRNNCTGYNLMLEKIRKHTNIKSQIVFAMESTAHYWLALFTRLRKDGYHIILLNPIQTSAMRDMFIRKIKTDAKDSFIIAELIRFGHYAESNVAQDRLLALKELCRNRFYLVDMAGDLKRKLIALIDRVFPEYEAQFDTIFCKSSVALLKKYPTPQKLSNAHLDKLTELLWNSSNGHFGEWKARELRELARNSFGVEDCDGAYSTLILLMLDQIQSLSEKADALEKEISRLFQSFDTTVTTIPGVGPIIGAVILSEVGDISRFSSADKLAAYIGVDPSVNQSGEFQAAHAHMSKRGSPYLRRCIWMASQVAVQRDPMFRAYYEKKAAEGLKYMTIIGHVTRKMTAVIFAILRDHKVYEPVLPTAA

SEQ ID NO: 126463 - protein, 377 aa, unidentified
MQETMIQSVKADKLFIGMDLHKNTSTFVVKDKDGKLINSAKVLTDKNDVTRYINSIKRNSDGRDLSLAVEPVSQWYYYADLIENLGVDVHLAHPMEVKAIAHARIKTDKIDAAVLADLLRTNFLPEAYFSPAEVRSWKEQCRFRASLINLRTQVKNKVHAILFKHSLKHTFSNLFGKGGRRWLAGLELKDPFKGNLDKYLLLVDYLTEQIVLAEEIITNTVINCPQAKLLISIPGISYCSALTIMAEIGNIERFISVKHLQSYAGLIPSTYNSGDKQIHGRITKRGSKWLRWIMIESAYHQMNCKRIPGFGAYYNGIKIRKGSKTAAVATARKLLAVVWRLLKDNRPYEVADPRCWKSRPIASKISSVSTVINTTED

SEQ ID NO: 126464 - protein, 437 aa, unidentified
MISDERGWGEDMESTDEPVELVERVAALDLGKAALMACVRVPHEDRPGRRRQEIREYVTLSRSLLELADWLRCERVELVAMEATSDYWKPVYYLLEAEGFTCWLLNAKHVKNVPGRPKTDKIDAVWLAKVVERGMCSPSLVHPKPIRQLRDLTRYRRSLIRERTREKQRVEKLLEDAQIKLSSVIADIFGVSGRQMLEALIAGQRNPRALAQMARGTMRAKTAVLEEALTGHFEDHHGFLLQAMLDHIDALTAQIENLGARIEEVIAPFSEHVTQLDEITGVGTTAAQELIAEIGVDATRFLDAAHLVSWAKFAPIDHNSAGHKRGGNTGRGNPWLAGTLGEIVASVSRTDTFLGDRYRRLARRCGKNRAIVAVGNSVLTIIWHLLVDPDAHYHDLGSDYYSTKVNTRRREHDLIRQLERLTGKKVTLKLNASTPAA

SEQ ID NO: 126465 - protein, 479 aa, unidentified
MKENLRRCCGIDVHKNSVTVCVLAPAGQQHIETKKRKFRTFTRDLKQLRAWLKNCQVTEIAMESTGQYWRPLWNLLEGEFTKLILVNPQHIKGLNGYKTDPKDAQWIADLLDSGKLRGSWVPPRSIRELRDLTRHRVNILEDLNRAKNRIEQLCQSGNIKVSSVATDLFGVSGRKMLKAIVENQHDAGWMADYARGQLRNKRRELELALQGTFTDEQRWLLEKELRQVEWLEGQVEGLEEEIERRVSGFEEAIQRLLTIPGIDRKTAWTIVAEVGVDLSAFADAKHLASWAGLCPGNRESGGKRMSGRTRKANRYVKRAMCQAAWAASHSKNTYLSAFYRRMAIKKGAPKAVMALAHHMIVVIYQVLSRKEEYVEMGGDYYDQRNKPRTIARLVARLGRLGYQVDLKLLENAMPADPTEKDNESEPAIQPDAVPEEGLGAKRKRGRPCKCRQRGIICKHQAAREVNPLIQQQPSEGRFS

SEQ ID NO: 126466 - protein, 359 aa, unidentified
MNTTTVGVDLAKNVFVACVADGIGRVIETREFNRSGFLAWLSALPRGTLVGMEACGGAHCWGRTMQALGLEPRLMAAEFVRPYRKRQAVKNDRADAAAIVAALLAPGMRFIPVKTEAQQHRLAWHSLRLGWIEERTALLNRIRGLLAEFGMVVDTGAARLRRKLAEHEFDTAQPAPIRHLIQGVRDQLDALDLRIAECDRQIAAQQADDAAARRARELPGVGMLTADAVVASVGDATMFHNGRQFAAWLGLTPSQYSSGGKPKLGRITRRGDDYLRTLLVQGARSVLAAALRKARNTPEALTRLQQWIVTLNGRVGYHKTLVAIANKHARQLWAVLAKGEGYNPEAWRQWHDSVEQPAS

SEQ ID NO: 126467 - protein, 312 aa, unidentified
MDNEIIIDKGCGLDVHKETVVACVMGSGIKKEIRTFSTKTNDLLRLKVWLSGLGITHIAMESTGPYWKPVFNVLEDGFTLILANARHIKNVPGRKTDVKDSEWICRLLRSGLLSASFVPPQGIRELRDLTRYRRKLTQSLSAEKNRIQKVLEDANVKISSVLSDTFGASGSQMIEAIMEGKLNEAEIADLAKGKLKSKKEEIREALVGYFQDHHRFMIKASLEHIKYLEKLISDLDQETKKKLARYQKEYELLQTIPGVKEQGATAIIAEIGADMDVFPSEGHLSSWAGMSPGNNESAGKKKVERQPTAIRI

SEQ ID NO: 126468 - protein, 347 aa, unidentified
MKRIAVDLAKSVYQVAESVQVGRVDRRKRLDSRAFAQYVQEQLEPVEWVMEACGTAHHWGRLMQEKGHRVVLLHPRYVRPYRRRNKTDRNDCDAILEAARCQEIRPVPVKSMQQQQVQQLHKLREGWKKSRVQRINLLRGILREAGVDAPNGIKPFLRQACELIERAEVRALRGALQVVLAEVNLYEQSMRECEEQLARWHADDEIVHKLDEVSGIGLLTASALKTAVGKPERFASGRHLSAWLGMTPNEYSSGERRKLGRISCKGNVYVRTLLIHGARAALLAAKRCKARTPERLTHLQRWALDTAERIGHNKAAVALANKLVRICWAVWCHERRFSGNWQSTKPA

SEQ ID NO: 126469 - protein, 412 aa, unidentified
MQRRENYLYVGMDLHKETHTAVLVNCWNEKLDVIVIENKPSEYKKLAEKVNKKAHRLGLSPIYGLENAYGYGRSLSVWLIERGYQVKDINPSLAYDQRKSAPMMRKNDEYDAYCVGTVLINQLHKLPDAKPRDNHWTLSQLVNRRDLLVKDGIRFKNGLHEQVSIVYPSYNKFFSEIDGKSAMHFWKTYPSPLHLQGKTAEELTEEIREISRIFKKSKAEFILECVRTDGNTFREYQESRDFIMQSLVRDLEHQKEELAGIDQEIEKLLLTFEYKLTSMPGIGTAFASKLIAEIGDIRRFRNADKLARYAGVAPVKFSSAGKGKEQSSRQGNRQLHGLFYMLAVTMVAVPKSGRANHPVFHSYYMRKISEGKTKSQALFCVMRRLVNIIYGMMKNGTEYREQIVPNQLQEEQ

SEQ ID NO: 126470 - protein, 364 aa, unidentified
MKQKEKHNTIGLDLGEGRHRFCVLDEAGEVVEQGSLSNERAALGRLTQRYRGALVVMEAGTHSPWISRYLKELGSEVIVSNPRKVRAIYQHERKSDQRDAQMLARLGRMDRALLYPVRHSSEQAQQDLLRIKLRDSLVRARVGLINSVRFSLKSLGYTVRNPSSERFHKVVRETPPEAVRQMISPSVQALAELSARIKVLEREINLLARTKYPQTLWLQQVPGVGALTALYFVLKIEDPQRFENVRDVGAYVGLCPRRDQSGGSDPQLRISKRGDAYLRRLLVSAAQYILGPFGPKSALRAYGLMLAADGSARAKKRAVVAVARKLAVLLLSLWKNRSHYEAFPHWQTIEDKRSGTIAIHRVEA

SEQ ID NO: 126471 - protein, 413 aa, unidentified
MTDLPNRSPEPVLLAIDIAKRSHDVAICWPSGKTKMLKVPNTLEGFQFLLDAVGPEKRPVQAAFEPTADYHRNLAYWLQGKGVECLLASSLACARAREMLFNSWDKHDRKDAKVILYLMRQGVVRPFYDPLVAQAMDLQELSNTYHQISLARTRCQHSLLNHYLTLYFPEMERYYHNSRSEWFCRLLLRYPTPRSITRHRKTMFVKRAWDFVGRKVAKQRFLEELYELAEQSIGLPVEPDSLALRTFKLQLERFLALSEQRAALEAVAEETLSNSDDYQRLRTIPGIGPINALIILAESGDLRRFRHYRQYLNFCGFNLSAVQSGQQQGRYKLSKRGNARLRYAYWLAAVNAVRQRENSFRYKYERYIKKDPENADLKRKARVAVACKVARVAHALVKQKTEYRGFYEYGHGT

SEQ ID NO: 126472 - protein, 432 aa, unidentified
MKRKSNTIQNREDAAHAVPNTALIGIDWADKVHAWHCVDPAGNVSHGELEQSPKEISLWVASIKQQCPDARIEICIETSRGALVNALLEHDVTVYPINPNALANYRKSHAHGGGKSDRVDARLILQFLAERRGSLRPLVQNSPLTRKLAALSQDRRQLVEHRVDLSNELKSTLKTYFPAALELKPAKMYADFMVAFLLKFASLDAAQKAGATKLRKYFFGVGAKAKAQARVELLCDAKPLTTDPVVISTCSLKVESICAMLAALNRSIREYDRLLQELVVTHGDYPIVASFPGAATKMQARMIAALGDDRARYTDTVSFQCATGIAPVTTQSGNQKFVSSRWACTKFLKQTFHEYAGLSISRCCWAKAFYESQIAAGKTPQAAKRALAYKWMRIIFRCWQDGTCYDDQKYMQRLRKNGSHLADKLFPAAKVA

SEQ ID NO: 126473 - protein, 348 aa, unidentified
MIIIGADYHPGFQQIAFVDTDSGEFQEKRLAHGEEAEKFYRALAGQKVRVGMEASGQARWFERLLSELHFELWIGDAAKIRTKRVRKQKTDRQDAQLILQLLLEDRFPKIWVPSSENRDLRQLLWHRHRMVQARTRIMNQLQSVALNEGLRCKKRLWRQHGREQLESFRLAPWASRRRRDLLELLDRLNPTIAELSHAVEQEAEKCPAAQRLQTHPGVGALTALAFVLIIGQADRFDCGKQVASYLGLVPLEDSSGNRRRLGHITKQGSSMMRFLLVEAAQVTVRSVPEWRSKYLHLMMRRGRKTAKVAMARKLAVRLYWMMRKGWDYQQWSKFGSHVGQPGHRDGVR

SEQ ID NO: 126474 - protein, 370 aa, unidentified
MLDTTTFIGLDVHARSIKAVSLDVMTGEVRAATFGYDAGAVAGWVRSVDPRARCVYESGVTGFDLQKRLSGLGVDCVVGAVSKMIKPSADRRRKNDRNDAEFLARMLSVGNVVEVWVPDDECEAARDLTRALEDARDDLSRAKQRLSKFLLRHGLAFDERTPTGRRKGNWTRAHWSWIESIRFAEGADNDVLAYYVDAVRRAAEEKARLEGLVEAEARKPRWRRRVDSLRCLKGVDTASAADLVFEAGEFSRFRNARSFAAWVGLTPSEHSSGESDRRGAITKAGNKHLRKTLVEAAWHYLTCSGRPKEPARGQAPDRGARRHAAKGVRRLVERREALLARGVHGNKANVATARELACWVWAVGLMAEEA

SEQ ID NO: 126475 - protein, 412 aa, unidentified
MTVVIGVDPHKSTHTAAALNAGTNKTLDTIRIDASVSEYRRLLVWARRFPDRRWAVENAWGLGRHLAQWLIARGEKVTDVPSTATARVREPSRGGRRKNDTIDAAAAASVAALHGDAVRVEAEGASTVLRMLDERRTNLTRQRTRTVNQLHAVMRELLPGGVSTDLTANQAADALRRLRPSSPVEHARKELARDLVADVRALDVRLKANQQRMHDTVADSGSSLLDVVGVGPVVAARLLGRTGRASRFRTAGAFAVHTGTAPIEIASADKSRHRLSRHGDRQLNNALHTIALTQVRMPGTKGRIYYDTKIAEGKGHKGGDALSQTPSGRPCLAHHDRRRTPSHGRGGLRRTLGGDYEIPRGRLNPAHQHFGSVTSGTRHRPAYDQTRSSSLTNTEEPPLSRRADYLVPARTR

SEQ ID NO: 126476 - protein, 349 aa, unidentified
MRFYKPHTKFYCGVDMHSRIIYVCIIGEKKEILVHKKINNQDTQQLLDVLKPYQDNIVVSCESTFAWYWLADFCNEHGFEFILGHPYYMKSIGSAKVKNDKIDSEKIARLAQAGMFPLAYAYPKHNRSLRDLLRRRLYFVEFRAKLLTHIKILNYQINEDTIGRISKITHKQLALLDRFKDEAVRMSVEANLKLIIFYNKLINDLEVFIRSKARKFNRKELCLLQSIHGVGDIIALTILYEVGDIKRFETVGQFSSYCRLVRCSHESAGKKYGSGGSKIGNPYLKRAFTEAALFVSKFNPRIEKYHNKLQSKKGKMKAYCILGNKIARVVYYMLHTGRVFDEKKFLKGN

SEQ ID NO: 126477 - protein, 455 aa, unidentified
MPKATTGDRPELKPVNVGAAAIDIGSKMHMAAVNPNCTDLPVRAFGTFTQDLHDLADWFKACGVTSVAMESTGVYWIPAYEILEQRGFEVILVNARYAKNVPGRKTDVSDAAWLRQLHSYGLLRGSFRPDAEIATLRAYLRQRERLVEYAAAHIQHMQKALMEMNLQLHHVVSDITGATGMRIIRAIVAGERSPDVLATYRDVRCHSSIETIRAALVGNDRDEHIFALTQSLELYDTYQAKMLDCDRKLESLIATLTEKGAKPVGKLSKPRVKTKQVITPSFDVRAALYGVLGFALTEIHGLGPSLALKLIGECGKDLKAWPTAKHFTSWLCLAPGNKISGGKVLSSRTRRSSSRAAALLRLAATTIGRSDTALGAFYRRLSSRAGKAKAVTATARKIAVLFYNTVRHGMTYRDPGADQYEEQYRSRVLANLKRRAKSLGFVLQAVPFSAEVAVS

SEQ ID NO: 126478 - protein, 412 aa, unidentified
MRRIIGMDIHRTFGEVVFWEDGRLRPAGRVDMTRTALEGFGKSLQPIDEVVIEATGNCMAVSRVLSPFVKRVVIANPLQVKAIAHAHVKTDKVDAGTLASLYAAGYLPEIWTPDAATERLRRLIARRYQVVRHRTRIKNEVHAILHAHLIPKCPHADSFNGRGRDWLAHQPVPDDERDAIERHVRELDRLAEDLTILDREIATNSLDDGSVRRLLTITGVNLAVAAGLMAAIGDITRFKSPQKLVSYFGLNPRVHQSGLGAAHHGRISKVGRSHARAMLVEAAWAAAKTPGPLHAFFVRIRARRGHQVAAVAVARKLTVLCWHLLTNEEDYLWARPSLVAHKMRGMELQAGRAQKKGNTRGPAYAYNIKQLRDQEMHVAEQAQRRYEHFVEAWRPRPPKEKARGRLNPAGHR

SEQ ID NO: 126479 - protein, 372 aa, unidentified
MAQPTPLLYVGLDVHKDSIAVAHAQGQSAAPPVFVGEIGPRQADLDKLVRRLQAKTPALVFAYEAGPCGYGLYRPSHRAGLRCQVVAPSLIPKKPGDKVKTDRRDAVELARLLRSGDLTGVYVPTVDDEAIRDLVRARDAARLTLKNAKLRLKGFLLRLGLHYVGRADWNPAHQRYLAKVVCPTAAQQIVFQESVRAVDEQVDRLHRLEAELLERAPAWRLYPVVQALQALRGVQWLVAITVVAELGDLTRFDSPRQLSAFVGLIPSEYSSGAARRQGGITKAGNGRARRALIEGAWAYRHPAKVSAHIQTRIDALPKPIQDIGWKAQVRLCKRFRRLTARGKHSNVAVTAIARELVAFMWAIAKEVPITTT

SEQ ID NO: 126480 - protein, 358 aa, unidentified
MDDIETSNIVEAEPSYSEAGASLNKTVPSTAEAYQAWAGIDVSKATLDVCLLLEVGKPAFGKFSNDKQGHSQLFKWAVRLSKGSRVHFCMEATGSYGNAFALYLADVKQMVSVVNPSFIHYWTLSRSQGNKTDKADARAIAEYCRIEKPSLWHAAAPEVRELTALVRHYDNLKEHATQLTNRLGGPDVTSLVKESLTKLLKQVNDEISIVQKLIDEHINNSPTLKRDRDLLITIPGIAATTAAKILAELPEVTQFNSAASAAKYAGMTPSQFESGTSVRKKTRMFKAGNRRLKTALYMPAMTAIRYNEPVKQIFQRLKGKGHTGISALGAAMRKLLMIAVGVLRTQQPFRADYATAKP

SEQ ID NO: 126481 - protein, 387 aa, unidentified
MPQLNDLSRSPVALDQDSTIIAVVEMSQSSWLVAGVLPEIERQPRKKLEPSPERLLAVLHRWQDEAVRAGRTITRIAVAFEAGRDGFWLARWLAARGVEAHVIHASSVAVSREHRRAKTDRLDTELLKRAFLGWLRGERGHCSMARVPTIAEEDAKRPNRERDCLVGERTRIVNRIKSTLARLGIRNFKPTLRKAAERLATVHTPEGMPLPPNTSAELQRDMARLSFVVSQIREIEKARQKRLEQQHETGPHAMVRRLARIVSVGVETADLLVHELLSRPMRDRRAVARYAGLTGSPDESGARRREQGLARAGNARVRRAMIQLAWRFLMFQKESALAVWYRARTADSRSGTRKTMIVALARKLIIALWRFVTTGEPLEGVVLRPAS

SEQ ID NO: 126482 - protein, 380 aa, unidentified
MPEAVIGLDVGKLSHWACVATRDGEILLSAPVANREGDLDSLFGRFPDALVVVDQSRNIGALALARAKAAGMSAAYLPGLAAHGAARLFAGDAKTDERDAMVIAKTALGIPDALLPVGDPGPTVAAARALAAQRNFLTCENTRSKNRLRSILLESCPAFEALVDLSDGPQLRLMASLGGAWSVADAGPRRAAALTRGAARGKIEALVRSTASSTRPDAAAIAAEDRAVRLLARRISENSAEIDVITAEISALLEGDDTYRCLLTVPGIGPKTASELAISIDIEDFPSHDRLASYCGLAPRNRQSGTSISSVTASRQGNKRLKNLLIFSCNCLTRTEGRWGDYYARCRERGMPHGKALKALARKRLKVIYAIMRDRVPYVA

SEQ ID NO: 126483 - protein, 470 aa, unidentified
MTPRKTKNGKMPVRLESLSVLHAHAAGIDLHPSVHWVAVPPGSAPPPAADHSPNLPAHVRKFGTCTADLEALADWLAACHVTTVAMESTGIYWVTLFELLERRGFQVNLIDPRQTKHAPGRPKSDVLDCQWIQRLHSYGLLSASFRPDDQIVVLRGYLRQRLMLLEYGSCHIQHMQKALELMNVKLTEAVRDITGVTGMAIIKAILSGKRNPLELAKLRDPRCQKTEAELARALYGNWRAEHLFALEQAVALYETYQRLLRDCDRELEAVLQGFADKSDGHKIAPRKRPRQKNEPTFAVATLLQRMTGVNLLVIEGISDTTALVVLSEIGFDMSKWPTEKHFTSWLGLCPQHRGTGGKIRSRRVRRGANRAARALRLAAQGCHHAKNALGAFYRRIQARAGGPKAVLATARKLAERIYRLLKYGEEYVRQGIDEYEAHYRARLVKGLARKARELGFALVPQEASPAPATS

SEQ ID NO: 126484 - protein, 371 aa, unidentified
MKVLIGVDPHKASVALAAVDEATGELLERASFPQNRAGLRSLERWAKRFPERRWALENAGGLGRHLAVRLAGSGESVVDVPPKLSARVRLLSSGNARKNDELDALATALAASRNERLATVDPEAASEVLRLLSERREDLVAERTRALNRLHGLLRDLLPGGVTGKLSADRAASILRGIRPKGGASARLRRRLASEVLRDVRTLDRKIADLSGRIEAEVEASGTTLTQIFGIGPILAARIIGTVGDVARFPTKAHFASYAGTAPVEASSGEVVRHRLSLAGNRKLNYALCTWSRYARLGRMPGAESTTARSSRRASPERRRCDASRGVSQMPFSEPSWRIRRRFLAVPLDKEEPRTPFGRSSENNPSTHFGE

SEQ ID NO: 126485 - protein, 430 aa, unidentified
MKKLHKHAAGIDLGSRKIFIGLEGKEVVSFETFTSDFLKASDYLKQNHVTTVAMEATGVYWIVLYDLLVAAGIDVWLVDGRQTKQVPGRKTDVKDCQWIQQLHSYGLLNRCFVAEGVLKTLRSYQRIREDHIRSSAMHIQHMQKALIEMNIRLPEVLSQIHGKSGITMIKEIIDGERNPNVLLSLCDDRLKKNKSEQILKALEGFYTPQGIFALKQALDAYLFYQKQIDDCDIEISTILVKLNPVDVNGKPIKRKPIRHHAPNIKYFGNHMLYLFKGKDATMLSGITDYSWFQIYTEIGSDLSKWPTEKHFTSWLALSPGQNHSGKKKRNARKGHPKAGQIFRQIAQSLIGSKNIALGAFGRRIRARKGPGIAIKAIARKLAIQFWRLMVKGSDFVEKGVENYERILLQQKQKALKRIAKELNVEIVTSI

SEQ ID NO: 126486 - protein, 338 aa, unidentified
MTIVMGLDQHRAQITAEWLDTDTGELSRTRISPAHRAGVRRFCERFRGQDLEVGLEATTGWRFVAEELRRVGAVVHLAEPAETAARRGNKKRAKSDRADARHVRELLMIDRLPESWMPPEHILDLRARVRLRHTLSHQRGEWQQRIQAVLYHHGCSQRRNLMTEESRSWLGAQPLPPTALEQVTVALSMIDALDHQLGPLDKELRAYARRQAGCKALMSQFGVGELTAVTILAELGDPGRFSSSRDAVRYAGLDITVHQSDQRRAAGRLSRQGPPALRWALFEATMTASRLGSPDRAYYVQAAERLGSNRARLSVARKLLKRSYHLLRELGQEALQPA

SEQ ID NO: 126487 - protein, 422 aa, unidentified
MSESEVLRPEPEFAALVGIDWADQKHAWCVQAVGATERESGEVEHTPEAVEAWIGQLCQRFGDRPIAVAVEQVKGALVFMLSKYGPLHLFPVPPAMSANLRKALYPSGAKDDPRDADLLVDLLLQHRDKLRRLSPDSEATRRIQNLVEERRHLVEEKTAQSNRLTNHLKIYFPQMLEWFDRLDTELVCAFLEQWPTLEELQKVPPARLRAFFRKQRCHYPELVERRLVGIRQAMPAIRDRAVIEAKSAVVKVSVQVMRSLIRGVADLDGKIEEAAAAHPDFFIFESLPGAGAVLAPRLLAAMGSQRERYANAAEVQAYSGIAPVTEQSGKQKWVHFRWACPKFLRQSFHEWAGHSIAHSQWARSYYQQQRKRGKGHHAIVRGLAFKWIRIVFRCWKDRVAYDESRYLTALANTAVQINGRLN

SEQ ID NO: 126488 - protein, 343 aa, unidentified
MKLSRVGVDLAKNVYQLHGVDRHGKTVWKRRLRRAQWLQALLDNTDPSCEIGMESCTGAHHWARELQSRGYTVRLLAPQFVKPYVKSNKNDANDAEAICEAMSRPHMRFVTVKSVDQQDIQATHRVRTELKDHRNAKANQIRGLVAEYGLVAAPSLLALRRAIPEWLEDAENGLTDYFRSLLHGLWNDLLSLEDRFKELDKAIETLARNNEVTKRLQQLRGVGPIVATALVATVGTGEQFKNGRQMAASLGLTPRQSSSGDKRRLLGISKRGDVYMRTQLIHGARAVVSQAKNRDDPLSRWATDIAKRRHPNVAAVALANKTARMAWAMLQNETDYDPNLAVG

SEQ ID NO: 126489 - protein, 350 aa, unidentified
MRFYTQTHKFYCGIDLHARSMYLCILDQAGSILIHRNLPTEPQTFLTVIAPYREDVVVAVECIFTWYWLADLCAREGIAFVLGHALYMKAIHGGKAKNDKIDAHKIAAILRGGTLAQAYVYPPRMRATRDLLRRRNHLVRKRAELLAHIHNTNHQYNLPELGKKLGRKSQRDGLLDHFPDPCVKRSIELDQALIDVYDEKLHALEYYLVKTAKAHDANAFVLLRSVPGIGETLGLVILYEIERIERFPQVGNFLSYARLVKCARESAGKRYGTGGSKIGNVHLRWAFGEAACLFLRNNPEGQAYHQRLVNQYSKSKALSIIAQKLARAVYVMLTRRETFDMKKEPPSIGV

SEQ ID NO: 126490 - protein, 396 aa, unidentified
MTLFVGIDVTKNKHDFSVIDSFGTIHLNHKQVKNDREGFTDLQITLESLRKSTNEASIQIALEDTGHYCFNLIRFLRSCGYPTFSYNPIIIREFAKVDSLRKTKTDKSDALTIAKKLLNDLDPSIHEVDPFYQELKFLTRHRSRTTEKRAQLKTQFVRLLDIMFPELAPIVGKANIHSQYIYNMFKAYPSPKKISRCRNKNLFKVLTNHRGRQLTSETIDRIKEASKQTIGFSTTSLELELLQIIETIELYTTQIATIDTETDLLMAKINSPITSITGVKNRLGSVILSEIRNIHNFKSSGQLLAFACLEPSVFQSGQYNREGHMVKRGSTSLRWALIQAAKLAARFSPTFKAYLDKKRAEGKHYSVAITHVAKKLVRVIFHLLKHQIFFEEVKLN

SEQ ID NO: 126491 - protein, 418 aa, unidentified
MKIWTELTHFAALDWADDHHDLVVVDARGQVALELTFAHNAEGWQQAQRALAPWPGLPVAVETSAGPAVDQLLQRGFAVYPVMPKAAARYRERKRPTGSKDDRHDAWSLADALRTDGHAWSALSPLDPLTGELRALCRDEITLIEQRTALVNQLQAALKEYYPAALEAFEDWTVPCTWAFVLAFPTPKALAAAGKRKWEKFLHTHKLWRPQTASQRLEIFARATAFSGSEAITAAKSLLVQSLARLLQTLEQQLANYRARIQALFDQHPDHDLFGSLPGAGAKLAPRLLAELAGVDWSHLSQVQGRAGTSPVTYVSGKTKHVKIRRACTLSLRATLHLWADLSRHYSAWAAAFYRAHRDKGQSHACALRCLAHRWLEIIGGMIRTHTTYNAEHHLREIQKHGSYVLRLINTPDPKHCE

SEQ ID NO: 126492 - protein, 324 aa, unidentified
MATQKNEVSFEEVVARGCGLDVHKKEIVATVSGTDIKKETRTFQSTTRSLTQLKEWLLELGVTHVAMESTGVYWKPVMNILEPGGFTIMVVNARHIKYVPGHKTDKKDSAWICKLLRAGLLKGSFVPCREQRDLRDLTRYRRKLVQQQAAEHNRLIRIFEDANLKLSSVFSNIRGKTCTAVIDAVIAGETDPQKLAELCTHPRLKHTQEDIALAVEGHFTEHHKFMIRAIRKSIKNIEEEIDALDKEIDRRMQPLQGRIEQLCEVPGMQQTSVKELLAEIGVDMEVVPTAGHLLSGAGLAPGNNESAGKKKVHTPTTGTKPRRQ

SEQ ID NO: 126493 - protein, 409 aa, unidentified
MEVLYGKCAGLDVHKDTVVACIRIHQGSEGELKVRTFGTTTRALLELSDWLSEHDVTHVAMEATGVYWKPVWHVLDGTFELVLANAMHIKNVPGRKTDVNDAQWIAELLAHGLIRASFVPPTSIQDMRTIMRTRKQLVRELTQHVQRIQKTLEDANIKIASVISNVVGVSGRAILRAIIDGRTNPIDLLRVTTGRLKASERELQEALRGRIRAPHRFLLKLHLEQIESLERSIAEVDKEVGALLEPFRDKCERLTTIPGVSDVVAEVIVSEIGIDMSRFPTPGHLISWAGLCPRNDESAGKRRSTRLRMGATWLKTTMVQAAWSAARCKDGYLPAQFHRIKARRGPKKAIIAVAASMLTAAFFVLRDDVEYRDLGSAHFQQTIDRDKAASRLVKRLTNLGFTVEIKNAA

SEQ ID NO: 126494 - protein, 318 aa, unidentified
MLIHYIDIAKRNFVIAVSSLSKTKTETNNPKGIAHTIEYLKKHKVALVVTESTGGLEIPAAKAIRRAGIAVIIANPRQTHQFAQSQPLTKTDAKDAKMPAFFAQMTAQKEDSQTMPYQPPTEAEEVLEALVNRRNQPADMRTAEKNRLHQVHETQVGSVKQLIAHFDRLIDELDKQIDDHTRTHFDGKAQVAEQIKGIGSITTATLMAMLPELGRLSHKRIASLAGIAPHPRESGETKFKSRCFGGRSAVRKALYMATVAATRFEPLIRDFYQRLPSEGKPYKVAVTACMRKLLTISNARMRDYFAENDTAENGIRTA

SEQ ID NO: 126495 - protein, 406 aa, unidentified
MLFVGDDWAEDHHDVEVQDETGRRLAKARLPEGISGIARLHGLVGRFLPEDGEAASVMIGIETDRGPWVAALVASGYQVYVVNPLQSARARQGNGVSGAKSDAGDAHVLADLVRTHSHQLRTVAGDSDQAGAVKVLTRMHQSLIWDRTRQVLRLRSSLREFFPAALEAYEDLASPDALELLTKAPEPSSAARLTRAQVTAALKRAHRRGREAKTTEIMVALRTEHLTQPPVIAAAYGATVRALAAMITTSNEQITALEGPVEACFGRHPDAEIYLSQPGLGPILGARVLAEFGDDPNRYQDARARKNYAGTSPITRASGKKKVVLARYVRNNRLTDALHHQAFSALNGSPGARAYYDALRDRDISYNAALRQLGNRLVGILHGCLKTHTPYDEAIAWNQHTQQEAA

SEQ ID NO: 126496 - protein, 386 aa, unidentified
MKKDSIAKLQVTKSQIRRMGAKQRLTVGLDLGDRSSRYCILNEAGEKASEDQLPTTKAGLESLFAKMAPCRIALEVGTHSPWVSRHLAGMGHEVIVANPRKVRLITQSVKKNDRMDAEQLARLARVDPQLLAPIRHRGPEAQGDLAVIRARAELVDCRTALINTVRGLAKPMGERLKSCDADYVKESLADGLNEATQNAIRPLLKSVEEMTKQIGVYDKKIQEIEKRYPETKLLKQVNGVGTLIALTFILTLEDAERFEHSRDVGPYLGLTRKQRDSGDSQPELGISKAGDVLLRRLLVQAAHCILRDGAPDSDLKAWGLTKVQAGAKTGSGKKGSKRRKKKAVVAVARKLAVLLHKLWVTGEVYDPQYNRKAVEAAKGKAKGAAA

SEQ ID NO: 126497 - protein, 342 aa, unidentified
MSTDYDGRQYVGIDLHRRRSVIVRMTPDGEQLDWVRIDNDPVALGLELAKAGPDPEVVVEATYGWYWAVDALAAAGARVHLAHPLGVKGFAYRRVKNDVRDAADLCDLLRMGRLPEAYIATPGERELRELVRHRAKLVALRSGLKAQVHGVLAKQGLLPPCSDVFGVAGMAWLRKAPLDLVYRQRVLSLLALIDAYDEEVETFRVMIAHRFRSHHGYRVIQQISGVGPTFAAIFIAEIGDIHRFARPQKLTCWAGLTPRHRESDTTIRRGPITKQGSTLVRWAAIEACQRTRAGTKLAADRARIIANRGRNIGVVAAARKLLTYIYYGLRDGEIRALAKGVA

SEQ ID NO: 126498 - protein, 445 aa, unidentified
MTQRSIGIDLAIRGDHVAQIFEDGRPLGRPIRFRHDPDSLDAFVARALADLNKADPVQAIMEPTGMSWFPVAHRLADAGIDVARVKGKRVKALRRYLSEHAKTDLADAQVLAAIPGFGGPRLDPVHIPAAKSHALQRLTKQRGRLRDDLSAAKRRLLDLIRWASPELERVLPDLATRLSLALLQRWLDPDAVCSARRATLRTFIAKHASGNHPHIGPFVETLIDGLRHAAHQARALHRHHVDFVELQAEVALEIDIMLSKWAAVSSLESRIATLYEDLDPEALLLSIPGVGKQLAPALLGVLHTVDRFQSVRQMRGFCGLFPRRADSGGKEHPGQPITQGGNDRIKRALFLAADTARKSDPELAEVYWRLMTTKGHHHKQALCAVANRLANRIFSVMRRGQPYILRDLDGSEITITQAKAIITERYTVSENIRAGRRANRSRLAA

SEQ ID NO: 126499 - protein, 394 aa, unidentified
MILVGIDIGKNQHTFSIIDKNTGEILSNPSCFPNNREGFLFLIKKLNTYSKSDLLIGMEDTGHYHFALLKHFLDSRYTVALINPTTTDLTRKLQGGITKNDPLDSLTICDVIGSNQRNKPYRITKVNRFDLYEQKQLTRHHHNLKEELNTYKNRLQKCIDIVFPEFNSLFRSKYGIVYMNVLKTFSSAEKIANSDIRTIRKCFEYNKRGKRISLSAEQLKAAAKTSIGMPSVAEEIQIRHLVCQIEMIEEQLSEIDKKIEEFSLQNNSPILSIPGISHFSGTSILAELGDICNYTKAAQIIKFAGVAPYHYESSQFNAQHTAITKKGSRYLRKTLYQIIFPVIYHNKVFNVYYNKKLAEGKGHRCAQGHCVRKLLRIIYHLLSTGQTFDPALLR

SEQ ID NO: 126500 - protein, 465 aa, unidentified
MTPRQGKRFRTSDQVEDLTVSQRHAAGIDVHAAVHFVAVAPADVPPGFVNPDTKLPAGVRKFAAMTADLEALAAWLKECGVTTVAMESTGVYWIPLYELLASLGFAVILVDPRQTKHAPGRPKSDVLDCQWIRRLHSYGLLTASFRPADEIVVWRGFQRQREMLVRYAAQHIQHLQKALEEMNVKLTEVVSDIVGQTGMKIIKDIVRGERDPRKLAKHRHEKCQATEAQIAAALYGNWRKEHLFALKQALQMYEFYQRQLQACDQEIETCLRGFADKSGGVALPPSPRRQQPRGHAPRFGARALLFRMAGVDLTVLEGISETTALVILSEIGTDLSRFPSEKNFVSWLGLCPQHRGSAGKIFSRRVRRGANRAARALRMAAQGCHHAKNALGAFYRRIQARCGGAKAVVATARKIAERVYRLLKYGQEYVRQAEQAYEEAYRLRTLKAMARKAESLGYKLVPATE

SEQ ID NO: 126501 - protein, 387 aa, unidentified
MPNVVIGVDPHKRSATIEVIDQHERVLGQGRFGTDHDGYKAMLAAGRKHGERIWAVEGCNGIGRHVAQRLVADGETVVDVPTKLSARARVFATGQGRKTDPVDAHSVAVAALRTCGLRQVQADDTTVALRLLVDRRDQLGRTRTEVVSRLHHLLVELIPGGAKKFLSAQQARVLLNTVRPRDLVGKTRRWLASELIHELVTIDKKIKVANAELTDLVASTGSTLQELTGIGPSGAARLIGDIGDIARFASRGHFASWNGTAPLDASSGDQNRHRLSRAGNRRINRALHIMAVVQLRRDTEGRRYYRRKLADGKTPMEAMRALKRRLSDIVYKRMVADARRLETGPGGHVGTTLRSSAADLNPMIDTSEKSLPGPAETHHKADLTAAS

SEQ ID NO: 126502 - protein, 338 aa, unidentified
MSIYAGLDVSDKTTHVCVVDADGTVLKRDVAASDPEVLAKWLSRHCKGLVRVVLETGPLSTFLFHGLHERGIPVDCICARHAKGVLATRVNKSDVHDAEGLAQLARTGWFKRVHMKASATHIDRAALRIRAQLITTRVAMANQLRGLLKLFGLRLGVARTPGKRRERLAALYQQRPDLEPLFAPLVASMEVVEEQLRASNRLLESRATTDPVCSRLMSVPGMGPITALTFTASVEDPHRFNRSEDVGAYAGLVPRRSQSGERDVRGNISKAGDPMLRRSLYEAANIVLCRVQRPFALQEWGRRIAENKGNKRARVAVARKLAVLLHSIWLNETEFRWA

SEQ ID NO: 126503 - protein, 365 aa, unidentified
MTTRQRSTSSSTDPPVRREVVLGVDTHGEVHVAAVVSPLGKILGTESFPATVAGYRRLLVWARRRGTVRRAGVEGTGTFGAGLSRYLLTQQIQVFEVNRPDRTARRLLGKSDPLDAQAAARAVLSGRTRAQAKSGDGPVQGARIYKLAKDSAVKARTQAINQLKAVLVIADPALRERLSSLGNAELFRTCATLSPPDGGGDEDAVTQATHLTLRMLAERIEQLTGQINELNQCLTRLVERHAPQLLVPMGIGPDSAVTLLITMGDNPERLNTEASFAALCGVSPIEYSSGRRITRRLNHGGDRQANAALHRIVFTRLRHDPRTQAYYERRTQEGKTRREIIRCLKRYAAREVFNLVRPVSRAPAL

SEQ ID NO: 126504 - protein, 338 aa, unidentified
MNYIGIDHHRQYSHITLLDEKGEKLKSGRVSNLRSELENFLSGIEEVKAVVEAGRSSYTMVDLLDEIGIDVTISHPKEVKAIVEAKIKTDKRDSWMLAHLLRTDLIPEVYKRSRENHSYQRVLRQRAFYVGSITRVKNRIQALLSQQSEDVQEEISRVKNLFGTKGMKVIRGLSLPGNQKELLEALVKTFSHLEERRTETNGLVEKLYFEIPEARLIHTVPGFGVFLPVLTAVEIADIGRFENVRKFHSYAGVIPSTHSSGERTYHGRIVKEGNRWLRWAAVEAVWPAIRADFDLRCYYERLKRKKGANSAKVATAKRLLTIIYRMLKENRPYIPYKR

SEQ ID NO: 126505 - protein, 340 aa, unidentified
MSLVLQSFLPYPNSCLGTSPHQQTRDTKMATLSFGGIDVSKDRLDVLLLPRGMYFSVRNNAPGWTELVARLRPFRVAAIGLEPSGGYERGIIRTLLAAGLSVRRINPNKLRQFARARGVLAKNDRLDARLIAEYVAAMPTRVVRRDEALERLAEIVTMRRQLCDEHAAAMNQATHLEDPMLRRLSKRRLVRLEADICLLDKRLAELVGADPRLAHRYHLLISTPGVGPTLAYTLLASLPELGQLDRRQIAALVGLAPYDFDSGKLKGHRCIYGGRMPVRNVLYMAALSASRYNPQLKAFSKRLAAAGKKAKVIIVAVMRKMIVTLNAMLRDNTGWRPAIV

SEQ ID NO: 126506 - protein, 372 aa, unidentified
MRFYTTQHRFYGGVDLHARTMHVCILDAAGAVVYDKNLAARPETLLRALEPFRDGLVIGVECMFAWYWLADLCVQHDIPFVLGHALYMKAIHGGKAKNDRIDAGKLARLLRGGTFPIAYAYPKGMRETRDLLRRRTYLVRKRAELMTHLQILNAQYNLAPFPKKLAFAANRTEMKVAERFSDPSVQKSAAVDVAVIDQLDVLIGELELYLVRTAKVDDVQTFHRLRSIPGVGKVLALILLYEMHDVERFASAGQFLSYARLVRCAHVSAGKKLGSGGKKIGNAHLRWAFAEAACLFLRSSERAKQWKQRVGAQRGEGKALAILAARLGRAVYHMLRKRVAFDEARFWNDVPQPTTTVSSSLSRTEEAEHAAD

SEQ ID NO: 126507 - protein, 350 aa, unidentified
MIIIGCDYHPGFQQIAFVDTETGDYGEQRLAHSEGAEKFYRDLAAQGKKVRVGMEASGHARWFEGLLAELAFELWIGDATEIARKRERKQKTDRQDAQHILQLLMENRFPKIWIPSGENRDLRQLLWHRHRMVQMRTRIMNQLQAVALNEGLRCKKRLWRQHGREQLESFRLAPWASRRREDLLQLLDRLNPTIADLTQVIEQEVEKCPEARRLRTHPGVGALTALAFVLIIGRTERFQCGKQIAAYLGLVPLEDSSGNRRRLGHITKQGSSMLRFLLVEAAQVTARSNPEWRNKYFHLAMRRGRKIAKVAMARRLAIALYWMWRKGWDYEQLRKFGSHAGKLGTGDGVQ

SEQ ID NO: 126508 - protein, 315 aa, unidentified
MSHTLYLGIDVAKDSFDVASDPAGLARSFPNDATGRRRLVETLQDQAVALIVLEATGGYERDLVATLLEAGHKVVVANPRQVRDFARGLGQLAKTDRLDAQVLARFAALVKPEPRQKASEQVSQLAELVTRRRQLKDLLTQESNRLPQARHPKVRTSLKKTIGLLERQIEDLDQLIRQNIDSDDGLKRKDQIVQSVKGVGPATSAMLLSQLPELGRLNRRQIAALAGLAPWDIQSGQWAGQSKIWGGRLPVRNMLYMAALAASRSNPAIREFYQRLRSHGKKFKVAITACMRKLLVILNTLVRNDCLWSPQPKNT

SEQ ID NO: 126509 - protein, 325 aa, unidentified
MEEKINYCGIDVSNETLDLYFKNKEGVHQHLQIPNSITGFRKMLKEAGAKTHFVMEATGVYHLNLIFFLQEKNVRFSVVNALQIKRYIQMHLERNKSDKKDAKRIYEYGVDRNPEMYSMPDTSYFECRSLNNAIHDLTKEITKFSNQIHSLKKCPFDAKSIKKSFEKIIKKLKEEKQNLELELQEKLIEWDKETLELVSSVKGIGKRAAAELLIYTQGFKDMNSYKQLISYAGLSPTEYRSGSSIRGRVRICKQGGKQLRHILYMCALNAKKTNAQCRALFDRLVDTGKNKKAAVIAVCNKLLKIVFGVVKNRSFYQENYLQKNA

SEQ ID NO: 126510 - protein, 337 aa, unidentified
MNEAITIGVDLAKSVFQLHGVDHNGKSVLRRQLRRSQMLEFFQKQPGSLIGLEACASAHYWARELGKFGHDVRLMQPSYVKGYVKRGKTDAADAEAICEAVSRPSMRFVPVKSEETQGQLVTHKAREFLVRQQTQIVNAIRAHLGEFGIVIPKGIQNVGRVIEACDSAKLPTAARKALNLLADKLIDTQKKIAELTTDIRADATSNEAAQRLQTIPGVGPIAASAFVATLPDIADFKSARDLSAWLGLTPKPHSTGGKERLGRISKMGNKYLRRLLYLGAMAQVSARRRGEPGDDWLWKIIQRTKPKQAAIALANRMARRIYALLKHGTEYQANYAR

SEQ ID NO: 126511 - protein, 344 aa, unidentified
MEITTIGLDLAKSIFQVHGVDASGNVVVRKALRRSQVLPFFTRTPRCLVGIEACGTSHHWARELIALGHEVRLMPPAYVKPYVKRGKTDAADAEAICEAVTRPTMRFVSVKSRDQQAALSMHRTRNLLVKQRTQIINMMRGLLAEFGIDIPKGLERALLMAREIVDGAAPDVPPEAVKIIGTLSQQALDLHARLREIDRDLLVWQRSSDVARRLMTIPGIGPVGATAFAATVGDASQFRSGRQFAAWLGLTPLQMSSGGKERLGRITKMGDKYLRKLLIVGMTSLVRRAKYKPESVDPRLADLLARKPVRVATVAMANKAARVIWAIMTRGESYRSGHMPALAA

SEQ ID NO: 126512 - protein, 415 aa, unidentified
MIVIGVDAHKRTHTMVAIDAGGRKLGEKTVEATTPGHLAALRWAQTEFGRDVVWAVEDSRAMTARLERDLLNAGGQTVLRVPTQLMARTRTSARGWGKSDPIDALATARAAQREPNLPVARHHPLSRELKLLVDRRDDLVQQRTATMQRLLWRIHELDPAYRIKPGALIWRPHQGALAHMLAGHVGLVAELARDELAEVVRLTPIINGLEKRLADRVRTAAPSLLELYGCGAVTAARIVGETADVGRFPSEAAFARYVGLAPVPQWSGSTRGRMRSYRGGNRQLNAALYQIAMTQIKKGGPAELYYRRRRAERDEHGYAISGVKRRIARTVFNRLRADQQPPLDAVIGALARSLDEWEARIREMDTDPAPPDPPRVRVAGSSPLPESDPRLADLIRINDEWAALLREMAPDAHVH

SEQ ID NO: 126513 - protein, 323 aa, unidentified
MSATTTTATKVYAGVDVSKGHLEVFVLPTGERFSVPNDDSGVEELLARLDEPSSPALVVLEATGGFERPVAAALAVSGLAVAVVNPRQARDFARATGKLAKTDRIDAESLARFAEAVCPAPRPILDEEARALGEILARRRQLVGMLTAEKNRLLTATTRRVKKRIEAHIRWLEKELTRANGDLQEAIEESPVWRENEELLRGVPGVGPVLARTLLAELPELGELKNKQLAALVGVAPLNRDSGILRGRRTIWGGRGVVRAALYMGALVATRCNPAVKVFYERLLAAGKPKKVALVACMRKLLVILNAILRNRTPWSPSHALAP

SEQ ID NO: 126514 - protein, 402 aa, unidentified
MNAVGIDVSKGKSMVAIMRPFGEIVSAPFEIKHTASDIHSLVELINSVEGESRIVMEHTGRYYEVLAHQLSKANLFVSAINPKLIKDFDNDSLRKVKSDKADSVKIARYALDKWQNLKQYNVMDELRNQLKTMNRQFGFYMKHKTAMKNNLIGILDQTYPGVNTYFDSPARSDGSQKWVDFASTYWHVDCVRKMSLNAFIDHYQNWCKRKKYNFSQSKAEEIYGKAKELVPVLPKDDITKLIIKQAVNQLNSASTTVESLRTLMNETASKLPEYPIVMAMKGVGASLGPQLMAEIGDVSRFTHKGAITAFAGVDPGVNESGSYEQKSVPTSKRGSSVLRKTLFQVMDVLIKTHPQDDPVYQFIDKKRAQGKPYYVYMTAGANKFLRIYYGRVKEYLSSLPES

SEQ ID NO: 126515 - protein, 357 aa, unidentified
MESQEVKYVGVDCGKKSIEVVRINSENSLERRQFSTTESGINNLLQWLTLNDIVGLEAGSQSFRIAKSILNKGVQVIVLNPGNLATIYQSLKKTDKEDSLKIARLIQRFPIEELPTVPIPNDEEEDNRRLCPEQENWTKQLTQGKNRLHSLFTQAGLTQITKKHLRTKANREISVALLPSRYQKEAERILKVLDLVEQNLKLIEKEIQEALKKNKAYVQTIMSMPGIGMITSLAIMSYMGDCKRFSSAKQAAYYAGLVPRVDISGDTVRYGRIINLGCHSIRRVIVQAAWSLVRCQHGGKVKEFYQRLYLKKGAKKSIIATSRKMIEVLYVMIRTGKLFDSMPENILNRKLTQYGLM

SEQ ID NO: 126516 - protein, 310 aa, unidentified
MSSAVVGLDVSKAHIDVAVLPADTHWRVANDEAGHTALATALAAVQPGCIVVEATGGYETAVVTALALVPLPVAVVNPRQVRDFAKALGRLAKTDAIDAWVLARFGEAVAPLPRPLDDAATADLTALVQRRRQLVEMLVAEKNRRGLARAAVRRGLDAHIAWLERQVAAAEADIATRIRQSPVWRSREQLLRSVPGVGPATASLLLTSLPELGTLSHRQLAALVGVAPFNCDSGRHAGLRVIWGGRADVRAGLYMAALAGIRCNPVLRTFYRRLRAAGKRAKVAHVAVMHKLLTILNAILKHERPWTLPA

SEQ ID NO: 126517 - protein, 352 aa, unidentified
MKRQRKETKSGEDLFVGIDIHKRTWHVTVQTVDIELFCGSIPGKWEALNRLLNRFKGYKIKVVYEAGYFGFWLYDRLTGRGIDCIVTPPSLIPMEYGNRVKTDRRDSRKLSYFLAKGMLKRVWVPNKEELYHRQVSRRRRQLIKDRVRTQARIKSELQFYGIDIEEPKGKWSRVYVENLHRIRFKNRWMQGSFNRLLDMYDFLDKQVKEQTKLLKELSETDLYRKRVKILQSVPGIGIIIAMEILLELQDVSRFRKAEQIAAYVGLTPSQYSSADKIRMGRITCIGKNSVRAALVEASWKLIRKDGVMKEKYERIKARAGGKRAIVAIARTLLIRTRRMLLDDTPYAVGVIS

SEQ ID NO: 126518 - protein, 325 aa, unidentified
MPKFNDLSRPLVALDHDSTVVAAIELSRSSWLVGAVVPGLRREPRKKLAPDAEALLGLLQRWRDEAIAGGAKIARLCVAYEAGRDGFWLARWLRARGIECQVIHPTSIPVSREHRRAKSDRLDLGLLLWAFLGWLRGQPKHCSMAAVLTVEEEDAKRPIRERDCLVAEATRLVNRMTSLLVLHGIHGFNVKLKRAPVKLASLRTAEGEPLPPNTLAELRSAMQRRQLILAPIAEVEAARLERLKQAPQSGPNVMIMLLARVIGVGIETAEMLVREVLSRQLRDRRAVAGYAGLTGSPDESGQKRREQGLAKAGNSRLRRGLIQLA

SEQ ID NO: 126519 - protein, 385 aa, unidentified
MGSQTFIPRDYNVFAGLDVDKRSISVTFTDHQGFLKSLRMPYSVEHLLNHVRKHFPDKKVAFAYEAGPTGYGLYDGIVAQAYPCLIAAPSMIPKAPGQRVKTNRLDSRALSESLRGGQLKSIHVPSPLYRELRHLTQLRDTFVSEMVGMKQRIKSLLLMEGIEFPPAPAGSQWSFMVKNKLRQLPCSSTVRFKLDQLIDSLEFNEKQVLKTTREIRRFCQNDPELSQCIKYMMSVSGIGWIVASQLLARIGDWRELKNIRQLAGFLGLVPTEHSTGERTDRGSITRTGDERLRSKMIQASWSAIRKDQELREFFRSVCRKHPRQQGPRVAIVAVARKLSVRISVVLMKQRPYVVRGKVHSAPLTQEETSPQGTTRRLREPGDKDS

SEQ ID NO: 126520 - protein, 422 aa, unidentified
MVLKGVPMALKIVYQICCGIDVHKTFVVACIASTNKQGVTTYKRHRFSTFTQGLKELLQWLLDNHCKDVCMESTGKYWIPIYNVLEKDCNIVLAHPKYVKAIRGKKTDKKDAKWIADLFKHDLVAGSFMPPADIRQLRDLMRYRFKLTCFMSSEKNRLQNCLTVSNIQLASVVSDTFGKSSQRILDKILENPDDTSFDIEPLIHGSMKKKLPELELAIDGFITPEQAGKLKVIKKHFEDLESRKAELEKLILALASPYQQELDLILTAPSFKNKFTAIGIISEIGVNMEAFPSAKHLCSWVGLTPTSNESAGKKKSVRVSKAGCYIKPLLVQCANSVVKSEKHPEIRNRYLRLRKRRGHKKAIIAIARMLLTALYNMLKNKEPYNAELYRKSDVLPVNREITIEQAILMAQFQGYKIKSAAE

SEQ ID NO: 126521 - protein, 300 aa, unidentified
MQPMYYIGLDVHKQKISYCVKDSSGKIYAEGWVPATRFDLDRWMKTLPQPWSAAMEATMFSGWIYDHLKPHGAELKIAHPLMLRAIAAAKKKNDRIDANKICDCLRCDFLPECYMAPTAIRERRRTLRYRNLLVRQMVQMKIKTSTLLMEAGVSYNKQKLHQAGYFRELLASNPDIHEGLRPLLRLCRETVVRLSKTENSLVSSLQQDPLLLQRVERLMSIPAIGPITALTWALEVGEVQRFSSIKKAISYCGLCGDEQRSANSVQRTPISKQRNKTSADRANRSGQDGAALQSDTGAAL

SEQ ID NO: 126522 - protein, 428 aa, unidentified
MSGKETVQAEPEFVAFVGIDWADQKHVWCLQKANSRQREAGELEHRPEAVEAWVGELCRRFGYGPIAVAVEQVKGALVYMLRKYECLHLYPVPSTMSASMREALYPSGAKDDPRDADMLLELLVLHRDKLRRLTPDNEATRRVQNLVEERRKLVEEKTAQLNRLTGYLKVYFPQMLEWFAKLDSKLVCDFLERWPSLEELQKVPSAELKKFFRHRRGRHGELTEWRMQGIGQATPAIRDRAVIEAKQTVVQVIAQLLRTLLEGIATLERKIAEAAEVHPDFFIFQSLPGAGAALAPRLLAAFGSQRDRYSSAEEVQKYSGIAPVTERSGKKKWVHFRWACSKFLRQSFHEWAGHSIPQSVWARAYYQRQRERGKEHHAAVRALAFKWIRVVFRCWQDRVAYDETRYLAVLTKRGSYLTSAFVDVAVSM

SEQ ID NO: 126523 - protein, 272 aa, unidentified
MTYVGIDVSKVTFVVAYSSVKTNKTRTFKNTVNGVHEFVQTISASEHNCVLEATGNYSALLVYLLSEAGITISLENPLKIKNFARVMLTVTKTDEIDARLIALYGEKMQPAPYKLRSDAILVLKQKRTVLRQLKKQLVATRNLKGSMEVLPFFDPKCKKTIEKTITFLEKQIKEMEEELASLAQGEYKKQMDLLTSIKGIGVTLAAALIVATGRFSYFDNAKQLTRYLGLSPTYQQSGTSVNVKGHINRNGDSSLRSQLYVAAFSSLRCNTE

SEQ ID NO: 126524 - protein, 356 aa, unidentified
MSQLTQMTFPAKTIGLDLGDRTTRFTVRDRTGEVVARGNLATTRVAFQKFFAKERGTRVVYEVGTHSPWITWLLEQQGCETVVANPRRVKLISQSLSKCDRKDADMLSDFGFLKPSTLSPVKHRGPEGAGTRSMMAARAVMVRSRTAMINCARGMVKSMGHRLPKCDAENFHKKMRIPEELAAALIPLRTQIRSLNEQIGDLDRQIEQVSERDYPETHKLRQIPGVGPVTSLAFVLAIEDPSRFPNSREVGAYFGLAPRVAQSSEADPQLRITKAGKRSVRALLVQAAHYILGVHGKDCDLRRHGQQIAARGGKNAKKRAAIAVARKLAVLLQRLWVTGEVYDPLRNSGAVQEIHV

SEQ ID NO: 126525 - protein, 348 aa, unidentified
MTVYIGVDFHARQQTISYLTTEEGTIQHLVLLHDNPVTVRAFYAQFAGQRVVVGFESSGYAAWFEELLEELGCELWIGHATYIRQFAKRRQKNDRRDADLILELLHTGDFPRIHRYSRTTREMLQQLRYRQRLVKMRTMAMNMLLFMASSRGVSLRTQLQSKRGQAKLQQLALPATLGTQRDELLSLLQTLNEKISTIERWLEQQTKADLAVQRLQTHPGIGLLTSICLRYTLEDAGRFANTRKVSAFAGFDPMQDQSDERNRMGAISKQGSRWLRFYLVEAGQVAIRKDADLQRVYQRVARRGGHAKAKVAVARRLLVRAFIMLRDEIDYAEFQRRGVAARSSRGTA

SEQ ID NO: 126526 - protein, 347 aa, unidentified
MDDYTHYVGIDVSKHTLDVMLWQFDQGTLDKTACQTSNDAPGHQQLTQWLNDHRAPIETTVLCLEHTGRYDDALLEHLTLGGWICALEKTTVLQKVKPEHHRKDDAFDADLLAEYAYRYSDKLLLYQACDPVIEQIRLLYGERRRLVTHRATVKQLQREQGYNRAGRPSQAEAFAHQLWSEQRAFYDGQIKALEQKIDDLVASDQGIRHRYEQVKAIDGFGPKTSLKWLCLFYGQTYLDARRISSRYGFAPHGEGSGTSRRRPGRSTGHGSSEVRKLLTMCARSAGTHHAKYRRYKERKLAEGKVSQLVTNNIINKLIRVACAVWNDDAVFDPNHVSRFAQNEIATP

SEQ ID NO: 126527 - protein, 344 aa, unidentified
MEITTIGLDLAKSVFQVHGVDATGQVVVRKSLRRAQMLPFFTRLPSCLVGIEACGTSHYWARELIKLGHQVRLMPPAYVKPYVKRGKTDAADAEAVCEAVARPTMRFVPVKSLEQQAALSMHRTRDLLVKQRTQLVNMIRGLLAEFGIDIPKGLERALLMARRIVDGEAPDVPMEAARIVSTLSQQALDIHIRLREIDRDLLVWQRGNDVARRLMTIPGIGPVGATALAASITDPHQFRSGRQFAAWLGLTPLQKSSGGKARLGRITKMGDKYLRKLLIVGMTSLVRRAKYNPKTVDPRLADLLARKPVRVATVAMANKAARIVWAVMARGETYRAGHRPALAA

SEQ ID NO: 126528 - protein, 348 aa, unidentified
MLHAGLDLSRRKIDVCLLSAGGEVVEEFASPPDGDGLGGLARRVGGHGLAVRGVIESMTGSRFVHDRLEELGWDVLIADAAKVKGLAPLACKTDKIDARVLAVLSHRDLVPEIWLPDPRVRREREQARFRMHLVKHRSMLKHRIHATLISFGHPCPVTDLFGVAGRELLDRLDVAQPWRGTVDASLRLIDDLDRQIDTINKQLRASGADHPYVPLLLTVPGIGWVLAFTIAAEIGDISRFPSAKKLCGYTGLCPRVYQSGDRDSRGPLTKQGPKYLRWAMLEATMHALRHPAYAERYQHTKRRLGKQRGAKVAQIDVARKLTEAIWHMLTNHEPFAPAPGGSAFRLAA

SEQ ID NO: 126529 - protein, 421 aa, unidentified
MTRRIAGIDIHKNVLMVVVATVLEKEIDGGMEQQIEYEGRRFGSGTQERGHLVAWLRERQAQEVVMESTAQYWKPVWMDLELHFPKLHLAQAHSNKAPKGRKNDFADARRLTRRMAAGELILSFVPDAEQRTWRTMTRGKQQLVRDRVRLQNQTEALLEEMRIKLSGVVSDLFGVSGRRILEALAGGETHPEKLADLGDDRLKCGREALVDALTGHSEPMHLQILKLSMERLKLLDRQIEALEQMAAGALKKHAAAVTRLAGVPGFGVDSAQQVIAEVGSDAKSFPGAGELASWVGTIPGSDVSAEQNHSSRSPKGNKFLRRIFTQAAQAAVKTKGCHFQNVFRRLVPKLGYKGAIWAIAHRLCRLAWKILHDGVSYIEQAAETTPQAKKRRAQRLTQALRRLGFQVALTPIAPKAEVAQG

SEQ ID NO: 126530 - protein, 466 aa, unidentified
MSRLSKRQDSSEIIVRPFDGLARVHPNAAGMDIGAHEIMVCVPGPDSTQAIRAFGTYTVDLYAIADWLQQSGIRTVAMESTGVYWIPLFETLEARGLQCCLISATAIKRFPGRKTDVLDCQWIQTLHSYGLLADSFRTEADLVALRTLLRHREQLIAHRSPHVLHMQKSLLQMNIQLSQVLSDVTGVTGQAIIRAIVAGERDPQKLAAMRNYRCQKDEEEIAKALTGTWRAEHLFVLQQSLGFFDFYTQQIEACDAEIERTYAAIRPHWGDPDNQVSLPPKKAKSHSRNAPKGVQVRFHLRRIAGVDIIAVHGISVSLAQTIIAEIGTDMSKFPTEKNFCSWLGLAPHNEITGGKVIRSYTLKNHNRAGQAFRQAAASVIRSNCAFGAFYRRLKSRLGPAQAVVATAHKIARTVYHMLKFQLEYQTISATEYEQHFREREIKYLQRKAAQLGFALSPSTVSAYAVS

SEQ ID NO: 126531 - protein, 324 aa, unidentified
MARHKQEIPFEEFVARGCGLDVHKKEIVATVSGTDIESETRTFQSTTRSLTELKEWLLALGVTHVAMESTGVYWKPVMNILEPGGFTIMVVNARHIKYVPGHKTDKKDSAWICKLLRAGLLKGSFVPGREQRDLRDLCRYRRKLVQQQSAEHNRMIRIFEDANLKLSSVFSNIRGKTCTAVIDAVIAGETNPQKLADMCTHWRLKATKEEIALAVEGCFTDHHKFMIRAIRTSISNIEAEIDHLDQEIERRMKPLQTQIEQLCEIPGMDATSVKELLAEIGVDMEVFPTAEHLTSWAGLAPGNNESAGKKKARTPTTAIKPQKQ

SEQ ID NO: 126532 - protein, 332 aa, unidentified
MSYCIGIDVSKATINVHVTKNKQDLVVDNNLKGFRSLYSKLKKIYKKEIGNIVFIFEPTGSYSEVLRKYCSEKQIKCFIINPKQFSNYAKALGVEVKNDIEDARVLSQAIHLAKDGQVAVPVYNEDVEQIKELMSYYKFTKKQTTQQKNHLESLTSKNGDKFSIKELTKSISESKEKELRIIEQVQTIINDNNEYRTAYENIISIKGVGQIGGIVLLHLFLKYPDANQRQITSLTGLNPIYRQSGTSIQTGYRISKTGASIYRSVLFMSVFTAVQHDKNFKSFYERLKSKGKHTTSVQIAVMRKIILTAHSLYKTNKKYDENFNNFKESSMS

SEQ ID NO: 126533 - protein, 337 aa, unidentified
MPTLTIGLNIAKNVFQIHGVDRHGKVVIQRKLRRSDVLKFFAKLESGLVGIEACHGSHFWARELTALGHTVRLLPTQYVKPFLIGGKNDANDAAAICAAVTRPGIHFVAIKSAEQQSLQSVHRMRQRLILERTAKSNQIRSMFAEEGVIFPIGLPQLRKGVVALVNDPDSGITTLLRRLGSMYLEQLKALQQWLDELATEIAEIFKSNEACQRLATVPGIGPVIATALVSSVGDPSQFRNGRQFAAWLGLTPMQRSSGGKTRLGGITKRGDTYLRTLLVQGARAVMHFVSRRNDRHSQWIKSVMQRRHVSIAAIALANKTARIAWAILTGNGCFRAA

SEQ ID NO: 126534 - protein, 338 aa, unidentified
MIAVGVDTHKEKHLAVAVDDLGQLLSEITLTADLAGYRSMADWLGELEGQVLVGIEGAGSFGAGLCEYLQAEGVEVFEVERPRRRDRRTGKSDRLDALIAAKKVLAGEGLSTPRGSGTRLALQMLLVAYRSVVGERSRLYNQLQALNVGAPGALRERIGPARNGAKLAERLTGMRTRPKASLQENTTLQVLRDIANRTRTLDAQAESYTREIEELVRSLAPKLMEEPGVGPICAGKLLAFNPARFTSEAAFARANGTAPQPASSGKTIRHRLSRGGDRQINAAIYTIALSRSVHHPQSRAYIQRRTDEGKTKREAMRSLKRHLSRHLYRQLAKTPLTT

SEQ ID NO: 126535 - protein, 346 aa, unidentified
MVEYVGLDVSKEATAYCVKDEQGKVLARGKVASDPDALFEVLKEHCLCPERIVLETGTLSNWLGRELGKRGLPVTVIDARQAHAVLRLQHNKTDENDATVLADLARTGFYRSVAIKSERAQRRRVLLKARAHLVEQHRSRQNAIRGLLGTLGIRFAKGSGKFARRVRTVLVEQPELAAIFEPLVGELAALKSAINQLDRLVEAEAKADPACRLLMTVPAVGAVTALAYLATIDEAGRFGKSRAVGAYIGLTSRRNQSGEMDYSGRISKQGDSLLRSLLYGAANGLLTVVRRAHPLKAWARRLRKRTSHKKACVALARKLAVIMHRMLISGEAFAWPQADTKETATA

SEQ ID NO: 126536 - protein, 358 aa, unidentified
MAKLTEASLVVGGVDTHKDLHVAAVVDNHNRVLGTESFSTTRHGYRLMLAWMKSFGDLQRIGIECSGSYGAGLLRYMKAAGIEVLEVTAPDKQDRRRREKNDDFDAESAAHAAFAERHTVTPRSRDGMVESLRVLKVCRKTAVQARRIALQMIQTTIVCAPDKLRDPLRQMTRMQLIRTLAAWRPDLTAYREVEEAYRIALKSLARRYLELHDEIADLDVMIEAIVKDLAPELLEQTAIGLNSAAQLLLTAGDNPERLKSEASFAALCGVSPVPASSGKTVRHRLNRGGDRAANSAILIIAIGRLRLDPRTQTYIAKRVAAGNSKLEAIRTLKRYIAREVFRIIMRRHKQINQTKIAA

SEQ ID NO: 126537 - protein, 363 aa, unidentified
MEQFIGCDAHKKYSVFVAVNERGEASPAIRVGHDREQYRQFLERLPAGSQIALEAGGHYYWMVDEMEAAGHQPRLVHPLEAKKRMGKTGKKTDKVDANGLGILLRNGTLPEVWIPPSGLRDQRESLRLRMFLVQQRTRLKNRIQGALARYNIQIAGVSDLFGGEGRLRLGQRLGELPEHTRQSVELELVTLDFLEVQLGDIEKRLEELMKVTAEADLLKTLPYVGRILSMVMTLEIGKVERFASAAHLASYAGLVPRVHSSGGHTRLGQICGDVNHYLKWAFIEAGNLVVIHQKRLAGQHVVRLYQRVKRKKNHQKAVVAVARHLAEAAYWILKKQEVYRDPQPKPKAPAQAQAAHALSSTHG

SEQ ID NO: 126538 - protein, 386 aa, unidentified
MDQATASTASANTLHCALELSKKSWLLAIQFPDREQPSLYPITGGDTEGLMAKLTAARDRWAKTSGALPMITLCYEVGYDAFWLARFLKTRAIECLVIDPGSLQVSRRGRRVKTDRVDVKTLLRTLIAWCRGERHVWSLVRIPSIDEEDLRRSHRERSRLVRERTAHINRIKGLLFAQGIRGINVKSRYQTLAVDKLVTGDDHRLPPRLAGEIAREIQRLAMVQEQIAEIERERDAAPTTCEATERKRDLLSQLKSVGPTISAFLSREVYYRQFANQRQVGSFLGLTPSPYDSGEEEHCQGISRAGSGHARAIMIEAAWLWIKHQPKSALTRWFVERTAGQSKRVRKIMIVAVARKLAIALWRYVELGLVPQGAIINPPMTRKARS

SEQ ID NO: 126539 - protein, 343 aa, unidentified
MKLSRVGVDLAKNVYQLHGVDRFGKTMLKRRLKRHQWFKVLLDKTEPDCVIGMEACAGAHHWARQLQARGYTVKLIPPQFVKPYVKSNKSDAKDAEAICEAMSRPNMRFVTVKRVEQQDIQATHRIRAELMTQRTAKANQIRGLVAEYGLVAPKHLSSLRAAIPCWLEDAENGLTGDFRRLLHGVWEDLRLLDDRVGEMDKTIKRLADNNEDCVRLQQLRGVGPMTSTAMIATVGDARQYHKSRQMAAAIGITPKQHSSGDRDRLLGISKRGDVYLRTLMIHGARAVVARAKYKDDRLSRWVTNIANKKHPNVAAVALANKTARMAWAMLRHETDYDPDFALR

SEQ ID NO: 126540 - protein, 341 aa, unidentified
MEEYVGLDVSMKETSVSIRRAGERIWRGKCASDPRIIAELIRKRAPAVRRVVFETGPLSIWFYHSLRTEGLPAICIDARHAKAALDMATNKTDANDADGLAQLAEVGFFREVRVKGFDSMLTRTLVAARTRLVRITTELSNQIRGVMKTFGLLVPAGKGSTFEKNVRSLLADQDGLASIVLPMLEAWRGIRIRAAELGRQLVRDARQSQACRILMSIPGIGAITATAFTTAIERPDNFKKSRSVGAWIGLTTRRYQSGEVDYDGHISRRGDAHLRGLLYEAAAVILTRSSTDSTLRTWGLKLRERIGFKRAAVAVARKLAVIMHTMLKTGELFNPNAGAIA

SEQ ID NO: 126541 - protein, 367 aa, unidentified
MKKVSTAGAKPSKKISQQKLTVGLDLGDRNSWYCILDESGQIQLEQRVRSNAKALREVFGQLPHSRIALEVGTHSPWISRLLSELGHEVIVANARKVRLIGESRKKDDRLDAQTLARLARIDPGFLSPVKHRSAQAQADLMMIRARAGLVRARTALVNTVRGLAKSYGERLRGCNVRNMNPEKADGLSPELQSALEPLLAGIEELSEQIREYNQRIEKLAQESYPQVALLRQIKGVGTLIALTFLLTLEDPHRFRKSRDVGCYLGLQPGRRNSGQSEPQLHISKEGDPYLRTLLVQGAQHILGPFGVDCDLRRWGLKLAERGGRSGKKRAIVASARKLAVLLHHLWVSGEVYEPLHNSRRTAVAAAA

SEQ ID NO: 126542 - protein, 427 aa, unidentified
MTRKDFNRGYAKRQRICETTLIVGLDIGCEFNMMCMMNAKGKVLGEHKVHNSREGFEFFRDVVDKAAKRNRLWDVLVGFEPRETYCRKIVYYAKELGYEVRFVRTTALKHQRELDESAPLKTDRRDAYTIANIIREGKCIDSVIEDGIYRELRSLVNLRENAVRDGTRSKNALRTFLEDFFPELSRLYSSMSAKGLLAILQTCPFPADVLNYGEKRLAELISKSSRSKKIGESKSSKIYAAAQESIGLKRVGSSDRLRLEFYLKGLRKSAEDLKAIDAEMARLLKEIPHAQYILSIPGIGMVTAGIILGEFGNLDNFQGAKQGIKYAGYDPTGKESGKHVGRRRISKKGRWRLRKTLYLSSMRVVRAIPEFKEYYTRKIDGTSGSGRKLARKEALCAVIIKLIRLIFAIVKDGRMFEYREKSKLLAA

SEQ ID NO: 126543 - protein, 416 aa, unidentified
MSSVEDRVVIGMDPHKRSVTIEVMAGDETILGGGRFATDRQGFQQMLACAKAWPNRVWAIEGCSGIGHHVAVRLVGFGDEVVDVPPKLSARTRVFATGQGRKTDATDAHSVALVGTRMAGLRPVVDDEQLAVLRILVDRRRSLGDEHTRMVSQLHRLLLELIPGGAKRDLSAAQAKALLAKVRPRDAAGKTRRRVAAELVSDLERIYQRKKAANKELKELVAETGTTLMDLHGLGPSGAARLLVEVGDITRFPDRAHFASWNGTAPIDASSGDQVRHRLSRAGNRQINRVLHIMATVQLRNPTQGRGYYDRRKSDGKTSMEAMRCVKRRLSDIVYRHMVADAITHMVTGPGGQRGTATDSSVAGSHPNTGTSEKPLPGPATSQGTPPATCGPDPCSPRSRRPVPAPGRSRSQAQFA

SEQ ID NO: 126544 - protein, 355 aa, unidentified
MDSKKYIGMDVHKESISIAVMNGAGKIVMECVIETKASMILQLFDGLRGDLQVTFEEGTSAAWLYDLLKPHVSKVVVCDPRKNASMKEGNRSDKIDARRLRRLAELLRLNPVYHGEHGLRSLKELVRSYLTITKDLGRVMSRVKAIYRSWAIPCTGKQVYAPRHRAEWLGKITEPGVRRRAEFYYQQLDALRTVRQEVRRELLAEGKKHQSWKHLCQIPSIGPIRAAVLLGILQTPHRFRTKRQLWTYSGFGIETHSSADHRNVDGQLQRAKKQVSIRGLNRNCNHDLKNLFKGAAIVASCKPGPFQEFYTALLAKGIRPEMARLTLARKIATIVLMVWKRGVCFDAQHLKPQTA

SEQ ID NO: 126545 - protein, 379 aa, unidentified
MDVIYPRCAGLDVHAETIVACALWEEEGKIQKEIQTFSTFSKGLGDLLEWLEDHGVTHVAMESTGVYWKPVFAFLEGYVDLTLANPQRIKNVPGRKTDVSDAEWIAKLLRHGLIEKSFVPPADIRELRDFTRLRKKWVGQLSSEKNRIQKVLESSNVKLGSVLSDLFGVSGRNILARLLEKGYVDKDELDQCLRGRLKTKKQAVYDSLLGTLTEHELRLLRLLWKHVEELEQLIEEVDQHIDRLLEPYREEVDLLMTMPGIKKQTAAVIIAEMGTDMSVFETPERAASWTGLSPGNHESAGKRKSTRTQRQSPSSISVMRGGMVSSSIQDTSLVPKILVVGGPMREEKSPHRHGSTNVGDHLLHDLPQRVVPPTTTYLV

SEQ ID NO: 126546 - protein, 340 aa, unidentified
MDATTYGLDVAKRVFQMYWVEAETGEIVNRRFGRDELIRFLAQRAPGRIALEACGSAHWWARKIKALGHEVVLLHAKFIRPFVQTNKTDAADARAIWTAVQQPGMRTVATKTEDQQAMLSLHRIRALLVKFRTMQVNQLRGLLYEFGATFRAGRAAGLAEIRARTAELEDALPGTMMCCLQDQLRRIEELQRDIDLLEKRIGVWQKQDAACHAITAIPGIGRLTATALVATMGDAKSFRSGREFAAFLGLVPRQSGTGGKVRLGPMSKRGDPYLRTLLIHGARSVMYHAKVPTPWQKDIQARRPANVAAVALASKIARTAWAILARGQEYQPNYVSMRPA

SEQ ID NO: 126547 - protein, 367 aa, unidentified
MKKISTVAAKASRNISRQKLTIGLDLGDRSSCYCVLDESGGIVLEQRVSTTAKALREVFGKMPRSRIALETGMHSPWVSRLLDELGHEVIVAHARNVRLIGESRKKDDRLDAQTLARLARIDPQLLSPVKHRSAKAQADLTVIRARAGLVRARTALTNTARGLAKSYGEQLRGCNVRNMNPEKAERLSPELQKALEPLLAASAALSEQIAEYNERIEQMAKESYPQTALLKQVKGVGTLIALTFLLTLEDAHRFQKSRDVGCYLGLQPGRRNSGQSEPQMHISKEGDPYLRTLLVQGAQHILGPFGVDCDLRRWGLKLAERGGGSGKKRAIIAVARKLAVLLHHLWVSGEVYEPLQHSQQNAVAIAA

SEQ ID NO: 126548 - protein, 444 aa, unidentified
MALDADRKNGPAARSFAADAYDCIMVRIKRRYRIQILCKCGDNSGKSTSPTTESRERPMHLATTLPIPEQTGIPGDRATLFVSLELSRSTWVATSLAPGSKKMSKHTLVGGNGRELLELLARLKTRAEQRIAAPVKVMTIHEVGLDGFWIHRLLDANGVDSHVVDPASVAVPRRHRRAKTDAIDGETLLRTLMAWQRGEPRVCAMTVPPSPSEEDCRRISRERAALLRERIRHTNRIRGLLFGQGIANYNPLNKNRRERLKELRTGDGRSVPVRLEAEILREIDRLELVLRQISEVEAERDEMLRPAEASSPAALLMRLKGIGAEFATVLYLEGLFRRFENRRQLAAYAGLAPSPWKSGSIDHEQGISKAGNPRLRTTMIELAWMWVRYQPDSALSCWFRQRVGSERGRTRRISIVALARKLLIALSRYVTHGEIPAGAVMKAV

SEQ ID NO: 126549 - protein, 420 aa, unidentified
MFAKDFPRHPMRRCYGASGERGIFSAGHKPMERPMPKPNDCSRSVTAFEQNSTLIAVIEMSLSSWLVAGVVPGIERHPLKKLETDEDALLKLLLRWRDEAVKAGHKIERIAIAFEAGRDGFWLARWLRARGIEAYVIHPASVAVSREHRRAKTDRLDTELLKRVFLGWLRGEPDHCSMSAIPTLEQEDAKRPNRERENLVGQRTRIVNRMKACLIRFGIRNFKPTLRKAPEGLEALRTPEGAPLPPNTRAEMRRDMARLRFVQDQIKEIEATRLQQLEQAPAEGPHAMIRLLARVTGVGIETADMLVNEILARNLRDQKAVARYAGLTGSPDESGKRSREKGLSRAGNARVRRGMIQLAWRFLIFQKESALAQWYRVATKDARGAIRKTMIVALARKLLIALWRMVTIGEMPDGVAMRAT

SEQ ID NO: 126550 - protein, 344 aa, unidentified
MANLNQFCNFTKIIGIDIAKSVFQIYSCDTQTGEITNVQVKRDKVLESFANCGKCLIGMEACGSSQYWARQLQALGHTVRLMDPKLVKPFVRHNKSDKADAEGIYHALVSGVRAVTVKTETERDIQTLLTMRALLVKQRTARINHVRGLLAEYGHVMPRNVNQFDTKVDECINSLEGDAVQLVINMMRDTVKSIRDDQDRIKTLQREISRLANQTRNAKHFLTVPGVGETIMAYMCVLLADPTQFSSARQFAAYLGLVPMHTGSGGKTVTTKIPGRCDKALRAVLVQGAHAVARSKCRTDWVKNILAKKPKKVAMVAIANRMARQCWAVASKGQDWRRMPVTAA

SEQ ID NO: 126551 - protein, 463 aa, unidentified
MQTAKPQKKARARTQCAAPVTPLASRDRARVIPTAKGRAGRRPRSGDAPAKDEKLADLSPLDCPLRQPHALERRNIAGAKERSAVRNVALDLGKKKTTYCEIADGKVVQRATVTRVESLSSLLGPDHPPATVAIEACREAWYVHDLLSGWGNRVLLVDTTRNKQIGVGRHGRKTDRIDAEVLARAVERGGIPVAHLLSPHRRELRRVLGIRRALVESRAQLVTTARGVARESGISLPGCTTENFSTRVRTLAKNEPLLCPLEPLLKTIDVVSAELVGVEAELARLCAAEPIIMHLCTVPGVGPIVAASFVSVVDDAKRFQRAHHLESYLGLVPNENSSGGKRRLGAITKKGNKYLRTVLVQAAWALLRKASPDDPLRRWTEAVAERRGKRVAVIALARKLSGVLWAIWRDAAVYDPDALAQRTARGLRTSARDTQLQAAALEAAASKRSLRRISREATTPAKT

SEQ ID NO: 126552 - protein, 410 aa, unidentified
MTGFNLDQYALFIGLDVGKSEHHATALTSQADKVYDKALPNSEPKLQQLLTSLVAKYGPALLVVDQPATIGALPVAVAQSLDEVEVAYLPGLTMRRVADLHAGSAKTDARDAYIIAETARTMPTALRAIADSDEQIAELAVLAGFDDDLLAQTTATRNRLRGVLTQIHPGLERVVGPKLHHNGVLDALIRWPTPHTLKTAGRGHVRKRIAKHNPRLAAKLTEQVFDALDAQTVVVPGTNAAATIVPMLADQLTELYTQRAAVFSQVEELVDDHPLSAVLTSLPGVAVRTTARLLTEVVGKEFKTAGHLASYAGIAPTTRRSGTSIRGEFANRGGNKRLKSALFNSAFAALSHPPSRAYYDKKINQGKTHKQAIIALARRRLDTLYAMLRDGTFYQDPTATVTAKNFSEAA

SEQ ID NO: 126553 - protein, 341 aa, unidentified
MKPVVRIGIDLAKNSFAICGVNDTGQVVLERTLKRAELLAFFANLPACLVAMEAGSGAHYWARELLKLGHDARIIDPALVAPYRQGGRHSKNDRNDAKAICEAAGRPSMRFVPIKSEEQQAVLVIHRCRRAMVSAHTRTANQLRGLLAEFGLVVPKGVNTLKRQWPKLRMAHAERVPLLAWEELDGLFSQLLEQHQQILRYERKIAALNRENEAAKRLQEIRGVGPITASAIVATVGNARLFKNGRQFAAWLGLTPREYSTGGKPRLGRISKRGDVYLRTLLVHGARSELMHTAKRADGKSQWSEHLKETKSWNKVAVALANKHARIIWAMLAKETAYRPV

SEQ ID NO: 126554 - protein, 473 aa, unidentified
MEKRRKDKREEVTKLLTLQKIRDVKELESYKLSVCHPHSAGIDLGSKEIYVALDPRIAAEMSLPIVHVFNTFTSGLLSCRDLLCSCGITTVAMESTSVYWTTIYSILKSSGLEVCLVNPKKFRMVPGRKTDVLDCQWLQTLHLYGLITGSFHPEEKIAELRSYMREGGRIIKDRGRYVCRMQKALTKMNLLLHNVLDDIMGKTGMAIVRAILDGERDPHKLASLRSGRCKYTEDEIAESLNGYYKKDQLFLLKTNYDAFSFFDNKLTEIDSQITNLLEEFPLKKEKVEETEEKKPKYRKKNKNDIRSEKDLQDMLYHILGTDMTAITGLQPNTVLQIIAEVGTDMSKFPTCNHFASYLGFVPRNQITGGEIISTKTDRVKSSAAQAFKKVVPSISRGKSALAAFYRRIAPRIGTGKAIVAVSRKLAIIFYNTLVHGSQYVEYGQEKYLQQIEEREKRLVIKLAKKHNWEVKYS

SEQ ID NO: 126555 - protein, 350 aa, unidentified
MMIIGCDYHPAFQQIAFVDTDTGELQERRLQHREEAENFYRDLAAQGMKVRVGMEASGQARWFERLLAELNFELWIGDAAEIRSKRVRKQKTDRQDAQLILKLMLKDDFPRIWVPSWENRDLRQLLWHRHRMVQARTRIMNQLQAVALNEGLRCKKRLWREAGREQLEAVRLAPWASRRRRDRLELMDRLNPTITDLTQTIEQEVEKCPEARRLMTHPGVGSLTALAFVLIIGRAERFQCGKQIASYLGLVPLEESSGQRRRLGHITKQGNSLLRFLLVEAAQVSARSIPEWRAKYFHLAMRRGRKIAKVAMARRLAVRMYWMWRKGWDYEQLAKFGSHAGQPGHRDGAR

SEQ ID NO: 126556 - protein, 343 aa, unidentified
MKVTTVGIDLAKNVFQVHGVNEFGKPVIKKQLRRDQMATFFVNLPSCLIGMEACGGAHHWARKLRAMGHDVRLMSPQFVKPYVKTNKNDAADAEAICEGVARPNMRFVPIKNVEQQGVLALHTVRQGFVTARTAQANQIRGLLSEFGLIVPQGIWHITKEVPDLLEDASNELPGAFRLLILRLIDHFKELDIQVHELEAQIVKWHRQSEASSKLAKVPGIGPITASALVASLGDAKNFENGRQVAAWLGLVPKQHSSGGKQNLLGISKRGDSYLRSLMVHGARAVICHAPQKPESCGWINGVLSRRHKNVATVALANKNARIVWALLAHDREFRSDYTTVKAT

SEQ ID NO: 126557 - protein, 356 aa, unidentified
MNQVSKLDFTGQQIYVGMDVHKKSWSISIYTDQFEHKTFSQPPKVEVLVNYLKRNFPGAAYKTVYEAGFSGFWVHDRLQEQGVRCLVVNPADVPTKDKERAGKTDRVDCRKLARSLRNGDIEGIYVPSRPKAEDRSLLRTRHGMVKKQTRCKNQIKSILCFYGIHIPEELTRSHWSKRFISWIESIRMERASGDMALKVHLAELGHIRQTIAELNRAVRALAMTDDYRNNVRILKTVPGVSTLTAMTLLTELYDITRFKTLDKLCSYVGLIPNTDSSGETDHKTGMTGRRNNHLRGVIIESAWTAVRKDPALMMAFNELCKHMTKTNAIIRIAKKLLNRIRYVLKNQQEYVPAVIQ

SEQ ID NO: 126558 - protein, 405 aa, unidentified
MYYVGVDIAKEKHYVCILDDTKELACKPFWIYSDILGLRELLKRLAELSLDMDDFIIGIESTGAFSENFYSYITDADYKVILLNSYQTSKYRDFSTLKKIKNDSIDAYVIAELLASGKYKASYISNEDYHNLKVLNRLKKSLDDKIKTIKREISTVVATVNPEIEKVFPNIFTKTAIAIIKSYPTAMDISKATPEKLTKIFRHIKGNSFNLEKAKYLIELAKSSIYTGRANESRALMIKTNIKILELYIQERDEVEEQIQILIDNQLDDDSSNIENLKSIPGVSNKTVTAILGECGDLRRFESAKSFIGFLGLYPTLYQSGKSLSTGTLAKRGIPIAKHALYMAAVSAVRHNNELHKLFRDKVSSGKSKKEALIIIAKKLASIIYSLFKYDQPYNPNRVLIQHKR

SEQ ID NO: 126559 - protein, 377 aa, unidentified
MATTRTAPRSQLTTKPVDLYMSFELGDKRWHISIGDDRRSVSHYIVEAGHTEEVADCIAKATARSTANKARVHSCYEAGRDGWWLHRWLSERGVDNIVVDPASIEVNRRARRAKTDRLDADKLLAMLIRHHGGERVWSVLREPSPSDEDARRVHRELQRLMHERIAHKNRISSLLVLHNLRPRIVIGGRDWPAWWNSHREQLPPALRAELEREAARLKVVKEQVRVIEAERAKELAEGKQPLVAQLARLRAIGPKGAWVLVKEVFGWRHFANRRQLAGSLGLVPTPYASGDSQIEQGISKAGNRRVRALLVELAWSWLRLQPGSALTQWFNRRFASAGKRMRRVGIVALARRLAIALWRYLQDGQIPAGARFKPAAA

SEQ ID NO: 126560 - protein, 340 aa, unidentified
MNEYAGVADAVVGIDVAKQKVDLYAVRSGKGKSKVFDNTASGHRELQNWLIERGFVSADTHVCMEATGPYSETLATALVSAGWQVSVVNPARIKGFARGELARNKTDRADAALLARFCAAMKPSLWTPPPASYRQLRAWVDRLQTLKDMRQQELNRIEALAASEQPEVLAHVHTHVDWLDREIEKLESDIDDHIDRHPELKTDAELIASIPGIGKTTVAKVLAYAGDVRRFDSAKALAAFIGLTPRQKQSGSSVRGRTMLSRTGHKALRHALYMPGMVARRHNEALKVFGDRLRDAGLAPKAVIGAVMRKLAHFIYGVVKSGRPFDLSKAMPVLDFQDGN

SEQ ID NO: 126561 - protein, 342 aa, unidentified
MTLYIGVDIHARQQTLSYLETEDGTTGQVVLDHEVDDVPGFYRQFQGEVIIGIEACGYTNWFEELVERLGHQLLVGDAAEIRRLARRRQKNDRRDADLLLDLLVHDEFPALYRYCQESREVLRQLRYRHKLVKLRTMVANTLHALALNAGLSLRAKLLTKGGRQQLSALPLSAISQQQRNELLSLADELTRRIQLVEQWLAVQAAGDSRVQRLQTHPGVGLLTSLCVVHTLGEVQRFSSTRKVAAYVGFDPMEDSSAERKAYGGISKAGSRLLRYLLIEAGQTAAKDDEQLKQFYRRLLPRRGKARAKVAVGRKLLIRCFIMWRAEIDYAEFLRRGQKEETE

SEQ ID NO: 126562 - protein, 369 aa, unidentified
MADRITYVGLDVHKESIVVAVASGGLRGEVREYGRIANTATALDRLLRKLGGEGMTLRFCYEAGPCGYGIQRRLSTQGHECVVVAPSLIPKRAGDRVKTDRRDAASLAKLHRAGELTAVWVPDARHEAMRDLVRARLDAVHSLRRARQQLSGFLLRQGCHYGRPAWTKLHRRWLAGLTFDQAVHHLVLEDYIAAVEAAMARRDRLTVQIEAMLPDWTLAPVVAALQTMRGMALVNAATLIAELGDLSRFTNPRQLMAYLGLVPSEHSSGASVKRGGITKAGNGAARRLLIEAAWSYRFPARLSREVLLRQENQPRPIRDIAWKGQVRLCARYRRLTRAAKPANVVTTAIARELTGFVWAIARQVAVSPR

SEQ ID NO: 126563 - protein, 418 aa, unidentified
MEIIYERVAGIDVGKKIIAVAVRTPGERPGKRRQQLRKFDTYYQTLTEMVTWLIAEGVTHVTMEATGVYWRPVFHALCEAERAVEVLLVNARHVKNVPGRKSDALDAVWLAELTECGLLRGSFIPPREIAAIRELARYRKKLIEQRTSELQRLAKVLEDGGIKIDSVASALTTLSARDMIEALINGERDPGVLAELARGRMRRKIPDLRLACAGRFGAQHALMCTLHLEHIDHLTDMIARLDTRIDEASLPFVRQTTSLATIPGISERAAQVIISEIGIDMARFPTAAHLASWAGLCPGNNESAGKHRSGRARKGSKELRALLTECAWSAGRTSTYVGAQFRRFHRRFGTKGGKKAATATAHTLIVIIWHVLAEATTYRDLGADYFTTRINSPDARKRRLIRELEALGHKVTIEPAAA

SEQ ID NO: 126564 - protein, 378 aa, unidentified
MNRIIKIGMDVHTTNYTLCIFEPSFEHDGTVHCLTQVKPEIKNIIHVIETFKKKHENEELNIVCGYEAGCLGYSLYHELKEKGIECVILAPTTMKTEKGGRKLKNDYRDAKMIAECLAYGGYSAVHVPTELDNSVKEFIRMRDDIKESLKSIKQQIIAFLTRNGKQFKGKSYWTRKHIDWINTVSFSEPLLQDTLKEYMIEYNHLCDRVETLDKQIEEISLKEEYVEKVQQLQCLIGIKTHTALSLIVETSDFNRFKKGNMYSAYLGLIPGDDSSGGHEKKLGITKAGNNHLRKLLVEAAQGYTRGKVGFKSKVLKSRQEKCSSEVVAYADRANERLRRKYYRMILRGKRYNVAKTAIARELACFVWGIMTDHIDLCN

SEQ ID NO: 126565 - protein, 422 aa, unidentified
MLEETQETEEIIQRVAALDVGKAELTCCVRVPGQGSSGRRAQEVRTYKTMTRSLLVMVDRLAELGVTRVVMEATSDYWRGAFYLLEAHGFETWLVNARDVEHLPGRPKTDTLDAVWLCKLAERQMLRPSFVPPRPTRQLRQVTRYRADLVAARTAEKQRVEKLLEDAQIKLSVVASDIFGVSGRAMLTALIAGERDPKRLAQLARARLRAKLSLLEEAFSGFFTDQHAFLLAKMLARVDQLDADLAELDAKLQELIAPFVAAVERLDEIPGVGQLAAHLLIAEIGTDMTRFPTAGHLVSWAKFAPGVKESAGKRKGSGSTGHGNPYLARVLGEAAVAASKTDTFLGERYRRIARRRGAKKAIVAVGRSILVIAWHLLSDPEAHFHDLGAGFYDTRIGPERAKRNHIRQLEALGYKVTLQPAA

SEQ ID NO: 126566 - protein, 347 aa, unidentified
MTFVGCDLHTRKQQMAVLDTTTGEIRELQLPHDGDAVEKFYAALPRPVTVGIESTGYAVWFHTLMQRLGHTLLVGDAAKIRAMVVRKTKTDRRDARHILDLLAHDRFPTIWVPDPATRDLRALLTHRMRLVRIRTMVKNGLHAIALNHRLARGSKLLRQAGLAQLQALTLPPHTAQRRDQSLELLAWLNTQIHQLDNAVTTAALAHPDAPRLITHPGVGALTALATVVVLGPVARFSDSKHAVSYVGLAPALNASADKYRLGHITKQGSALLRFALGQAAPHAARADTDLKRTYFTLLHRRGRSKAKVAVARKLLVRLFIMLRDQIDYDEFRRRGRDRLPVPPVSET

SEQ ID NO: 126567 - protein, 371 aa, unidentified
MSIVMGVDQHRAQITAEWIDLASGEITRARVSPADRVGVRRFLERFAGRQLEVALEATTGWRFLVEELRAVGAVVHLAEPAETAARRGNKRRAKTDRADARHHRELLLAGRLPESWIPPDHILDLRAQVRLRHTLIEQHSEWQQRIQAVLYHHGCPQRRQLMKGDGRDWLASLALPAVARQQLTVSLQMTDALDVLLAPLTKELRDYARRQTGCRTLVDRYYGIGELCAVTILAELGDCRRFQNSRDAVRYGGLDITVFQSDRRRAPGRLSRQGPPALRWALYEAAHAARRPGSPDRDYYVQAAERLGGNRACLALARKLLKRCYHTLRELGDDALAEPVAGSGAARRASSGSTSPSEGAANHERVDALAA

SEQ ID NO: 126568 - protein, 414 aa, unidentified
MEVLHERCAGLDVSKRDVKVCIRVPGGRGGRYRNEVTTFGSMTGQILELRAFLLEQQVTLVVMESTGDYWKPFYYVLENAPFELLLVNARHVRGLPGRKTDVSDAQWLADLGAHGLVRGSLVPPPPIRVLRDLTRTHADLTRDRTREYNRLQSVLEDAGIKLTSVATKISGVSCRLMLDALVAGERDPKVLAGLAKASLRGKRDQLKLAMTGRFTDHHAFMVRLHLQVIDQLTAAIDELTAKIEVVTEPFRAQVELLETIPGVSTQIAVTIIAETGGDMSKFRTAGHLASWAGVCPGHHQSAQVTKKAKTRPGNSYLKGALGQAAMSSMQVHETFLQDRHHRLKPRIGGLRTVVALEHSILRSVWHMLTTEQPYRELGAGYHQRRHPKNALRSITRQANRLGYTVRFDPIPQPI

SEQ ID NO: 126569 - protein, 457 aa, unidentified
MSKRRKKAQSKSFNLKSLPKQLQHINLNAAGIDIGSERHMVAVPEGRDEVAVREFDAFTADLIALADWLQQCGVTTVAMESTGVYWIPLFELLERRGFEVKLVDARHVKNVTGRKSDILDCQWIQQLHTYGLLAGAFRPADELCVLRSYLRQREMLTQTASMHIQHMQKALQQMNLLLHNVVSDITGVTGMKIIKAMLAGERNPQVLASHRDNKCHHDSATIAKSLVGNYRAEHLFSLRQAVDLYEIYQTKIGDCDEAIVTQVSAQPDVTDEPPPPEQKRTSARDRQRGGVNVRDLIFQKSGVDLFAIPGLAADTLLVLSSEVGFDLSAWKTVKHFSAWLSLCPGTKISGGKVLSRRVKRNPNRAAQAFRMAAATLSRSQSALGAFYRRIKARSGGKQAITATAHKIARIYYALLTRGTTYVELGQQASEQKYEERRLKYLMAQAKSLGFQLVPSQT

SEQ ID NO: 126570 - protein, 418 aa, unidentified
MQTELSQYTAVIGIDWADKKHDVCVQDMATGKRRAGQVRHRAEDLDEWARSLHRRFDGPIAIAAELSKGPIINVLQKYDFFVIYPIDPSKLANHRKTFTTSGAKDDPTDAEFALDLLSKHTEHFKPLQPQGVGMRTLMTLVEHRRQLMNDRVRITNRLRNALKQYYPQPLEWFDRIDTVLFCDFIRRWPSQPQARRARRATIERFFREHNMNRKPLLERRIKAIKSAMPLTTDDAVVVSHRLRALALVAQLEVTLQCIKQYDAEIASLAPEHPDYELFSPLPGAGPVHTPRLMVAFGEQRERFNNAAEVQKYGGLAPVTKRSGQSTWIHWRWQCPTFLRQTFVEWSAQTINKSYWAGLYYQQQRSKGCSHQAAVRALAFKWIRILYRCWKTRTPYDESRYLRALQERGSPLLKTAEAA

SEQ ID NO: 126571 - protein, 475 aa, unidentified
MEKKSSNKRDEVIKLLARQKIRNVKDLESYKLSECHPLSAGIDLGSKSIYVALNPAIAAEMDKVIVHRFETFTGDLLACKDLLVYCGVKTVAMESTSVYWTTIYFILEEAGIEVCLVNPKKFRMVPGRKTDVSDCQWLQTLHLYGLLRGSFHPPHQVAMLRSYMRERDSIIKERSTFIQRMQKAMVKMNLLLHNVIDDITGKTGIAIITSILEGQRDPKAPASFRDPHCKKSEQEITEALTGYYREDQLYLLKLNYQSFCFFDKQLCDLDRQITKLLKQFPCKKEKKEKRPDNGKSKSKGKNDLRTKENPEDILYHILGTDLSALPGIRANAILQIISEVGADMSKFPTANHFAAYLGFVPRNKITGDHVISSRTDRIKSSAAQAFRKLIPSISQTQTALGAFYRRLAPRIGKAQAIIATCRKLAILFYNTLAFGMAFVEHGEKVYQQKQEDYERRKMLNLAKKYNFTLVANNAK

SEQ ID NO: 126572 - protein, 369 aa, unidentified
MTKNILFIGMDVHKESIEIAIADGSNTEVRRYGKIGGTRDAMRKTLRKLVSLGKPLHFCYEAGPCGYELYRYLVSEGHDCWVVAPSLIPKKAGDKVKTDKRDAVQLARLFRAGELTPVYVPDREDEAIRDLSRAREDTMLVQKSARQRLKSFLLRHDIRYHGKTSWTEAHLRWLADEVRCPSPAQQIVFQEYVNTVTEAQHRLQRLNEQIEHFVEQWRLYPAVEALMSMRGVKMVVAVTVVSELGDLSRFDNPKQLMSFLGLTPSEYSSGERQSRGRITKTGNGHVRRILIEAAWCYRYPAKVSPEIQQRQATLPLSIRDIAWRAQLRLTQRYQHLQRKGKPHNVTVVALARELAGFMWAIANEVKYPR

SEQ ID NO: 126573 - protein, 318 aa, unidentified
MTKRNTVYAGIDTGKDYLDAALHKRSEQLRVRNTPEGHRALSAWLRKHRVKRVGIEASGGYEMNIVAHLRRDRFTVVVFQPAQVRAYAQFHLQLAKNDKLDARLIAACTSAREEEDIHDPPDERLAPLAARLTFIDQIGDDIARHKTRLETCRDARGQAHGKEEIARYKKREKAELALLEKEIRQHDDLARRLDLIESVAGIGMKTALILLVRIPEIGRLSREEVAALVGVAPYDDDSGSRHGERHIRGGRKRVRKGVYAAALPASRLHNPLLKALYDRLRAAGKCHKVALVACARKLLIFANAVVARGTPWQPQGAF

SEQ ID NO: 126574 - protein, 584 aa, unidentified
MAKPTTGHQPAASSPPSGQPAQAQAHRRAYSRRKARAQLKGDALRQREAAHVEALPVQHPHAAGIDIGSRSHWVCAGFTAEAASCLIREFPAHTAGLKAIAAFLREHQVNTVALESTGIYWVPLYELLQAEGFEVLLVDPSYSHQLRGRPKTDRRDCQWIYRLHSAGLLAAAFRPDEKTCQLRAYLRQRGNLVRQASKHVQHLQKALEQMNLKLTEVLSDITGKTGRAILRAILRGTRAPEKLARYREKRCKASEAEIAQALTGTYREEHLFELKLAYEAWQFTLGQVDKVDGQIALQLGRMKCDRALPPLRPKARPKRRANSPRFDVRAALYYVVGLDLTEIEGVSELTALTVISEIGPGVSRFATAKKFCSWLGLCPQWQKSGGRVKSSRTRRGVNRAAQALRLAAQSLHHSQGALGGFLRRMKGRLGTQAALTATAHKLARIVYLALKHGMAYVRRSQEEYEAQMKDKQLKALRRKARQLGLEVVEKPSVSGAPGSRSRCRDRGGQEGISGRGPDGRGEQQGRARKTRRSDSSLAAAGERARPGEPGREITSVRWASWLGGGGSLQPPRATLSSLGLAVFD

SEQ ID NO: 126575 - protein, 442 aa, unidentified
MGRRCIGLDVHREFAQIAVWEDGLVRQAGQVSLTAEALRAFADSLGPEDEVAIEATCNTHAIVRLIEPRVKRVVVSNPQKTRAIAEAKVKTDKVDAEVLCQLLAADYLPSVWVADLQTQALRRQVARRAHIVRQRTRLKNQVQSILHRNLVPRCPAADLFGIKGRVWLGRQPLPPDEELAVGALLRQLDFHAQELRIIDAELGRIALESGEVKRLMTIPGVDATIALSIVAAVGEFRRFRSPERLVSYLGLNPRVKQSGGQPASHGRITKQGRAHARGMLVEAAWVAVKTPGPLRAFFERVRSRRGMQIAVVATARKLACLCWTMIEYDEDYAFARPSLTEKKLRKLELRAGMPSHRGRKGKSAAYNLKEVRRRERELAEQAERSYRQLVADWQANAPAKKSGVAAANGTRLQRPSEGQAARQASVPEPALRSGVDHAHAQA

SEQ ID NO: 126576 - protein, 420 aa, unidentified
MKDFSVDDFAAIVGIDWADKKHDICELPAGTRDYQWSVISSKPDQLHAWAMALEKRYPDQSIAVACELKKGPLIYALSQYRNLVLFPINPSSLAKYRRAFFLSGAKDDPGDAFLQTEMLEKHMDRLRPIEPESPEVRALAQLLEYRRKLVQDRVDLTNGISATLKNYYPQVLDWFNEKDTHIFCDFIIKWPSLAQAKRARKKTLIEFFNAHNARYTQVNLRRIDAIKVAVALTDDAAIIEPNVMLIGILVPQLKHLLDGIKRLDDEIKRRYTSLDDRYLFDSLPGAGAQLAPRLLVAFGSNRARYQSASELQKYSGVAPVIETSGQKCWTHWRYSCPTFLRQTFVEWAGLTVRYSFWARAYYQQQEAKGKPHNTIIRSLAFKWIRIIFRCWQDRKPYDESKYLEALRRRGSPLLQFAVKS

SEQ ID NO: 126577 - protein, 346 aa, unidentified
MTTVDVTRPVTGAVDTHLDVNVAAALDPLGGLLGVAEFPTTPAGHRSLAEFLVSFGTLTRVGVEGTGSYGAGLSRYLRGSGVEVVEVDRPNRQSRRRTGKSDPVDAIEAARAALSGRAQGAGKSRDGNVEAIRALVVAKRSGRSTKIQTLNQIRHLGFTAPEDLRSRLKGISRQHLGAEAAALRPRAGGDPVVFATKTALSLLGHRVLVLDAERERLNLLLGELVEKTAPQLLEIHGVGVDTAATLLVTAGDNPGRIRSEAAWAHLCGVAPIPASSGKVSRVRLDRGGDRQANSALWRVVITRLRSDPRTQAYMERRLKEGRSKPEVIRVLKRYVAREVYQRLPRA

SEQ ID NO: 126578 - protein, 364 aa, unidentified
MKKSSKKQQRSALVESKPEKVVGLDLGDRHSHYCILTSSGEVMEEGRIQTTAASLEKHFGSEARMRIALEAGTHSPWVSRLLKRYGHQVIVANPRKIPTLTKSESKNDRNDARQLARMAAFDPELLHPIEHRSTERQQDLNLVHTRSVLVRARTMLINSARGLVKSAGQRLPACSSEVFPEKAPAAVPPALKAACTPLLEQITLMNQSIAAMDKQIDQLDKKYPEITILRTVPGVGPVVAACYVLTLDSPQAMETNRQAGAYLGLRPRQQKSGDSDPQCKITRMGNTYLRSLLVQSAQHILGRSRPDSELRRWGLKLAASGGKRGKKRAVVAVARKLAVLLLSMWRNHKKFEPFPQSVAQLTTA

SEQ ID NO: 126579 - protein, 341 aa, unidentified
MKYSGIDLHSNNSVVTVIDEEDRVVAEKRLPNDLGTVLKFLAPWQAELGGVVVESTYNWYWLVDGLQEAGYRVHLAHPVAVRKYDGLKHAGDQTDARYLAHLLRLKILPTGTILPKEDRAARDLGRKRIQLVRCRSAQIVAIENIMARHRGMRISGNQIKTMSAQDIDQAAGQLGLDADVTLAVRSQLAVIATLNAEIERLEKRWQERVKMRPEYAVLTTAPGIGRALATTIALETGPLERFASEGKYASYARCVNSMHTSNGKKKGQGNSKNGNKYLAWAYVEAAHFARRYCVQAQRFYERKQAQTNTMVATKALAHKLARACYHMMKEGKPFDVTRCFA

SEQ ID NO: 126580 - protein, 341 aa, unidentified
MQITTIGLDIAKNVFQVHGIDAAEKVVVRKQLRRSQVLKFFAALPPCLIGMEACATAHYWARELRKLGHEVRLMPAKDVKAYVKRNKNDAADAEAICEAVRRPTMRFVEIKSAVQQGRLMQHRARDLLMRQRTQTINALRAHMAELGIVAAQGREGLKQLLTIIADEKDERLPIDARASLIVLAAQLQALQTMIGSIEKRIIAQHRANEESRRVATVPGIGTLGASAITATVTDPSVFRSGRDFAAWIGLVPRQDSTGGKQKLGPISKQGDRYLRRILVVGAHSVLRRAKQEPQKYPWLAQLLARRPFKVVAIALANKMARVAWALLARGGAYRVPALAAA

SEQ ID NO: 126581 - protein, 356 aa, unidentified
MNKRSKLNFSGQAIYLGLDVHKKSWSVSIFTKHGEYKTFSQPPQVEVLIQYLQRHFPGARYHWVYEAGYGGFWIHDRLREKGIENIVANPADIPTQDKERRGKRDRIDCRKLARGLRGGDIQGIYTPARWKLEDRSLIRTRLSMGRKQARCKNQIKSMLLFYGVAIPEQREMGHWSRRFIQWIEGIRMERSSGDVALQLHLEELCHLRQIMAKLNRSILALARTEEYRGWLSLLKTIPGISTLTAMIVLTELSEITRFRSLDHLCSYVGLIPDTQGSGEKEHVGGMTQRHHSSLRWLLIEASWIAVRKDPAMMEAFNEYCKRMRKTKAIIKIARKLLNRVRYVLKNQAEYVTGVIE

SEQ ID NO: 126582 - protein, 391 aa, unidentified
MIYVGIDVAKDKHDCFITNSNGEVLFKAFTISNNQDGFNVLYQRIESVMEDVTKVKVGLEATGHYNYNLLGYLIDKGLTTYVINPLHTNLYRKSLSLRLTKTDKVDARTIAYMLMSDVNLKSYSNTSYHNEELKSLTRYRFNKVKERAKLKTSVSRLVCILFPELEKLVPTLHMASVYALLSEFPGAKHVAGAHLTRLTNLLSDASKGRYGKDTAITFREAARASIGSNMPAKSLELKHTIKLILELGSEIDEIENEIKTIMDEINSPILSIPGINYRMGAMIIAEIGDFSRFDSPDKILAYAGFSPSTYQSGQLDSAYSHMEKRGSKYLRYALYNAAKYVCHWDTIFAGYLAKKRAEGKHYNVAISHAVKKLVRVIYHLVKSNQQYMKVA

SEQ ID NO: 126583 - protein, 363 aa, unidentified
MRFYKNQHQFYIGIDLHARTMYICVINNIGETVFHKNMECSRDNLELVTNTFGKDIVVGVECIFTWYWVADFCAEQGIDFALGHAYYMKSIHGGKTKSDKIDSEKIANLLRGGMFPIAYAYPKAKRAVRDLLRRRLFFVRQRAELSVHLQNTNHQYNINEPLTSSRMRSEVYRNTIPQKFNDPATLKMVNADLEMFQAYHDIITKLEFQIEDSMEVQDPVSYSIINSVPGLGFILSLTILYEIDNIHRFSDVGKFISYCRLVKCSHESAGKKEKGGHNKIGNVHLKWAFSEGAVLFLRNNERGQRWHDKLVQRYGKAKAMSIIAQKLGRTVYYMLKRKEAFNPDKFYGDRKIENKDSGGEHLA

SEQ ID NO: 126584 - protein, 497 aa, unidentified
MPTKANIYSDCNPQVLKLFEQAGHPARVLCVALDYAKTQHMALVCNGLGDLLKGAFAVDNTPAGATQLLQQVRQCAKQRRIPTQQVFFGGEDYPTFAENFLRHLRKEKFLVVRVNAWEAKQQRSNFQASSDELDLLGIARCCLNRRGQSVQDLPVAYANLRIATRDRNELVRLATATSNRIHTYVDRLFPDFLSADKSGLAPFCQASLDLMAERFSPAEVRRRPRGALGQWLARRAVEEPHAVAAQLKELARGALGPAPEQTALLQRTLAQLVGLYRGLEGSISGLDRELAYWLARTPGALLTSISGIGITLAAGWMAELGPPQQWRAVRRICSYAGVVTKTKQTGGPDKEPMPSYVQQRCNKRLKNVVLQAVEKVRQYGPEDLRRSAEELEANGSHTEFGMAKRLVRLAKYLVVTGTIYRPKTLLYPDTPKEKLVLYYQTAWDKFLLKWKGKSDLKDVFAPGHPLGQWRQMVKELYALELRLPQQRAAPTPGASAP

SEQ ID NO: 126585 - protein, 408 aa, unidentified
MKRYYLGVDWADEFHQVWVSDPDGNRVIEKKVVENVEGLTEFGRWLDESRAKGIELWAAIEKPHGRIVDFLLDHGVVVYPVNPKALDRARDRFRMSQSKSDGFDAYVLAEFLRTDHGHLKALVPNSDPAQELKLLTRDQYRLVRQKARLLNQLNRTLKEYYVRPLEMFSDLESNIALDFLDQYPTPHDLSKLTRRQWNRFSKREHHLGEERSKELWEKLNQPQLKIPEHVVRAKARLLKVLLAQLKPLRDAVESYNEKVKSFFASMPAAELVTMLPGAKTGTIIATLWAELGDAKSRWESFRHLQAEAGVVPVTKASGKSRIVQFRFSCNKVLRHAAYWLAFVSLNRSEWANHYYRDQRAKGHSHHQALRALGAKWLKIIFVMWRDHTPYDENIHLANITRQKMRQAA

SEQ ID NO: 126586 - protein, 315 aa, unidentified
MSTSGFYAADVSRSELVIACEADDAEIVRVANRAAAIDAWLDRLPAGSLIGMEATGTYHRLLAARASARGFTVYVVNPRDFHFYARSVGARGKTDPLDARLLARYIAHEHTHLHRYVPPSALCEQLCALLERRAVLVRTRQTLVQSLADLPTLQPHTQVALRALDDLVAALDSQLATLNASDPATASLVRRLRTICGVGPLVSTLLAALLQRFAFRHADALVAYVGLDPRPDESGSRRGRRRLSKRGHPEWRRLLVAAAMSAARTRVWGDYVLGHKNKGLPSTAVHVILARKMLRVAFALYKSGNDFFAPEIKPT

SEQ ID NO: 126587 - protein, 427 aa, unidentified
MTYRIAAIDVHKKMLAVVVADVAGEGEYQFERRKFGATPDQLHLLAQWLCQQEVEEVVMESTAQYWKPVWGALEQYWQPERQKREGARKMSGKLHLCQAKSNRGRRGRKNDFADGERLIKRLVAQELVLSFVPDAEQRLWRTVTRRKYQLTRDKVRFQNQLESLLEQAHIKLSSLVSDLLGVSARRMLKAIADGETDPAALAALADYRLRATAEQLRDALGACGQLHAVYRRLLKMALEELKLMEEQIEQLDGEASELLQQHKDAVQRVAEVPGWGVDSAIQAIAEVGPKAAPFESDKKMSSWVGACPGEEESAGESQSTRSPKGNRTMRRLLNQAAHAAIKVKGSIFEVTFRRLRTRLEYQEAIWAIAHRLCRLLWKILHEGVRYEERGPEVSAKSKRRRTARMIKELKALGYRIEGGQLPAGTPA

SEQ ID NO: 126588 - protein, 454 aa, unidentified
MARKKRGKNRRQQGSLPILKLNAAGVDIGATEIFVAVPADRDPEPVRSFQTFTEDLHRLADWLTSCGIETVAMESTGVYWIPLFQILEARGFEVCLVNARYYQNVPGRRTDVSDCQWLQYLHSVGLLRASFRPDQEVCTLRSFLRHRDNLIQMASTHVQHMQKAMDQMNLQLHHVISDITGLTGLAILDAILAGERDPKVLAQLRDGRIHASEEVIIKSLVGDYRPEHLFTLRQSLEAYRYYQRLIAGCDREIEKQLGRFKDQVDVKMQPLAPPKVRRKKLYSNEPAFDLRQYLYRIFGVDLTAVPGLNVLTAHTLLAEVGPDLAKFRSASAFASWLGLCPDNDISGGKVLSVRTRRVNNRAALAFRMGANALYKSQSWLGSFFRRMRAKLGAPKAITAAAHKLARIVYHLLTRREPYDATVYAKHEKLWRFRAESKLRAQARALGLKVIPVAG

SEQ ID NO: 126589 - protein, 401 aa, unidentified
MNAVGIDVSKGKSMIAIMRPLGEVIATPFEVGHTAAELNELAKFILKISGETRVVMEYTGVYFEPLARALYDAGLCVCVVHAQLIHNYGNNTIRKVKTDKADAIKIANYALDNWDKLKPYAPIDEVRRQLKAYSRQYRKFNKLKTMLKNNFIALTDSTFPGVNELFSSPPRKSDGHEKWLDFAMKFWHAECVCSLSQKAFTERYRKWCHKAGYYFLESKAADIYAAACGHIGLLPKNENTKQLVQQTIIQLTSICSSLSVIENKMTELAGLLPEYPIVMEFRGVGRILGPQIMAEVGDVLRFEKKESLVCFAGLEAPPYESGKFESHNRTISKKGSPHLRAALFQVMDCLLKTQPVNDPVFQFIDRKRSEGKHYYSYMCAGSAKFLRIYYARVKEYLTALE

SEQ ID NO: 126590 - protein, 413 aa, unidentified
MEVVHQRCAGIDISKKDAKVCVRIQGRGRRATTATVSTWGSMTNQILALREHLLAERVTCVVMEATSDYWKPFFYLLEDVLPVMLVNAHNAKTMPGRKSDVSDSAWLADLGAHGLLRGSLVPPPPIRRLRDLTRARTALTRDRGRQVQRIEKVLEDSGIKLSSVATDIMGVSGRAMLAALIDGQDDPAAIAELAQRRMRSKIPMLTEALTGRFTAHHGFLIRMHLTLIDQYSQALTELEARIEEAMEPLAAARELLVSIPGISTTVAEVLLAETGGDMSVFPTAGHLASWAGTAPGSNESAGRVKSTKTRPGNRYLKGALGTAALAASRSKNTYYSAKYRRIASRRGPNRALVALQHSMLTAAWNMLTNGDLYQDPGADYFSARHPARTKARAISQLEALGFHVNLQPLADTA

SEQ ID NO: 126591 - protein, 347 aa, unidentified
MSITMIGLDTAKSVFQVHAVNEAGEVVVRRKLQRSELIAFFEKQASCTVVMEACGAAHHWARALTGLGHEVKLIAPEAVRPFVKRGKKNDAADAAAICEAASRPGMRFVPIKSLEQQGVLALHSARSLLVKQQTMLANAIRGLATEFGLTVGLGMGKLGELMALVDADEAVPEKARQALNALFDQCRALDESTEAFEAEIVAHARHDDTARRLATIPGIGPITSSLIAATVADIGVFQSARHFAAWLGLVPRQHSTGGKTRLGRITKAGNREIRRLLVLGATSMVHRAPGWNSAAGAWTRGVLERRPVRLVTVALANKMARIAWAVMTRKEVYHAKGRVAAAAEAMA

SEQ ID NO: 126592 - protein, 428 aa, unidentified
MADLENATPACNLVAIDVGRYSNAVLIEVASGKRHRFKMANTAADFERLLQFLGSLPGGCRVGLEPTGDYHRPLAHRLLSKGFEVVSINSVALARYREAIFNSWDKNDPKDAAVILEMLRRGDVQRYVDPMVVGSHDLQELAKTYYQVSRARTKVQHSLINHGLPLYFPEMHRYWATTRNEWFVRFLLKFPTPAHVRSLACADFVAAAWDVVGRKVNKRAKLEEIWEMAGATAALPHAPHSLAVETFRITLRRYQELNDLRTELELRAERALATDTDFAHLKTLPGIGSVIAMTILAEAGNLRRFGHHRQFLKYCGFDLAKNQSGTQRGKEQLSKRGNARLRLAFWLAAVAAVHMKENSFREKYERYTRNAPRDPDLRRKALTAVAAKMARVAYGMIKKNQPYRQFFEQSLPSGSIPLSVAVGAHATP

SEQ ID NO: 126593 - protein, 352 aa, unidentified
MNILALDLGKYKTVFCEYNSENGEHDFGKINTTPQDMHDMFVDKDPDRVVMEICSTAGWIVDIAKALGIDTQVANTTHDAWRWKNVKKKNDREDALKLAKLSAMHQLPKVHIPVKAVREHRALIKYRQRLVRQRVGIKNAIRAIFTGQGMPMLKRKGLWSKGGLQWLKEHTKPLDKISDVNEIWRGRLHIELQVLSSISKAIQKVEERLDKIGVSDVRIQKLQTIGGVGPRLSETVVAFLDDPRRFRNIKQVGSYAGLAPRQYQSGQTERQGRTSGQGNKLLRNLLVEICWMSLRVNPWAQATYRRLLRGSSSRSKIAITALARQLLVKCWIMLRDMQDIHESSAREAICSR

SEQ ID NO: 126594 - protein, 343 aa, unidentified
MISVGIDVSKGKSTVCILKPYGEIVSKPFNITHTQKDLSELSSMLFRLNDEVKIVMEATGIYHLPVLTYLQEKGFFVSVINPYLMKSYRNESLRKAKTDKIDSRIIANYGIDHWFKMKDFQTSGEIYEELKLLGQQYRHYMKLHLLSLAELTHLLDLTMPGIKNLLASWNETNRKDKRSDFVERFWHYDVITSMSEQEFTEEYILWAKEKKYVPSQEKAKVIYTLAQESIPTLPSETSSIKMLVTEAVRVLKEVDATLGLILSRMQEIAKTLPEYSVVREMGGVGNTLAPKLIAEIGDVRRFRNGKALVAFAGIDPPPYESGQFVGCNRQISKRGSASLRKVG

SEQ ID NO: 126595 - protein, 315 aa, unidentified
MKETNWVGVDTHKETLACYKDGKFKEFKTNQKGFESAMQWAGSGSKWAIEGAYCFGKPFTAHLIKNGCEAYEVNPLLTSSWRKTIAISNIKNDSGDAKVISLFANKAKLQKISFETIQLKEKITARSHFVKNRTRAINAIKMLFSTRGEHLPFKDLTTLKAGKWLSGHSDLIISHYGKALRDFTQAINEIEKDIEKSLPEKSQKLKQIKGIGTLTAAILYTETKGKVISQESLASYAGIAPVDKSSGKTTKHRNNKTGNRKLNSVFYRLSIHQSIFDTEGKAYFEKKLSEGKTKRHARKCLARQLVRLVFNLLKD

SEQ ID NO: 126596 - protein, 403 aa, unidentified
MDYSTLFVGIDVSKLKHDIAIVNEHKKVVHKPFVISDSRQGYQYLVNKLNWLKQTYHTQRFKIGMEATGDYWKNLYHFLKNQSPYVEVTVINPVQTRAFAKSELRRAKTDAVNAKDMARYMVEKRPAASVARPLIYEYIKDIDTQIYAEKKQLTMSINKLRIELGKVAPEIEHATARLAGQQILALLKHYPTAESIASASVEQLCALRYGEKQWTLPMAFIMKIKTLAENSIAYKIGPGAGIVVQSLIRRIMGHQQEIDALQTQMIQLHQHIKPHKSVLASIPGISCQTAIVLEAYIGDVKRFASAKQMVAYFGMNPTINRSGKSIKRVSYLEKKGSGIVRHKLFMAVLTNIRHKRGPIYEYYKRLVAAGKSKLVAIGAAMRKLLVIIYTMLKNQTEFDPNKK

SEQ ID NO: 126597 - protein, 344 aa, unidentified
MDIVILGIDLGKNSCSLAGLDASGRVILRRRMRRSSLENFVDGLGRCTVAMEACCGAHHLGRVFAAAGHIVRLMSPEYVRPYVKAQKNDELDAEAMAEAATRPTMRFVAVKSQAQSDVQALHRARERLVSERTALINHLRALLLERGIVAPQGRRKLEEELSVFADEDGVAALSPRIRLLIEDLRAEWRALDERIAAFDTEFVRMARDDEAVRRLMTIPGIGTINATALAAAVGNARAFGHGRDMAAWLGLTPRQMTTGGKPRLLGISKRGNRYLRKNLIHGARAVLPYLVERETPLGRWVCGLLARAHKNVVIVALANKLARIAWAVLAHDRPYEAGGEAAAT

SEQ ID NO: 126598 - protein, 363 aa, unidentified
MKNYIFVGCDSHEEILVNKFAHNDGPMEMKKCSAKRAGRQKMIEYFTEQSRRAGGAQVVVVYEASAHGFILCDQLRAAGFICHVLAPTKIERSSKQKRNKNDERDAERLLDIVRGHYLAGTKLPAVWVPDAQTRDDREPVRARQDLSEKLTIVKTQMQMLLKRHGLEKPEEVGNNWTKRHRQWVEALSQEGPPIQLGMRQALKTLLRQLQFLEQEIEQIDEAMRELANTARRKPIVDALMSEKGVGLTTALKYATDIGDFPRFRRGRQIGAFFGLAPSSNESGENNDRKGHITREGSPSARQILCQATWSRVQHDPQEREVYQRLVAKNPKKKKIALIACMRRLAVRLWHIGLEAQLRMEAAG

SEQ ID NO: 126599 - protein, 420 aa, unidentified
MKAYNVNDFAALVGIDWADKKHDICEHPNDTEKYHYSIIKSKPEALHEWAMSLKQRYPNQIIAVVCELKKGPLIYALSKYDHLVLFTINPSTVAKYRKAFTPSGAKDDPSDALLQVEILTLHMGKLNVIEPESAAMRALSQLVEYRRNLVQDSVDLSNKITAALKNYYPQALEWFKEKDTLIFCDFILKWPSLVHAQRAKKQTLLNFFNSHNSHYAQVNDARIMSIKNAMPLTEDTGVIEPNQLLVEVLIAQFKVLLKGIESLDKVIKKAYKAQNDKVIFDSFPGAGPQLAPRLLVALGSNRDRYDDASELQKYAGIAPVMERSGKKMWTHWRYSCPTFLRQTFVEWAGLSIRYSFWAKAYYEQQISKGKPHNSIIRSLAFKWIRIVFRCWKTHTPYDESKYLEALKRRGSPLLKFAINS

SEQ ID NO: 126600 - protein, 312 aa, unidentified
MTELCVGIDVSKDRLDVACGDGLEFTVGNDEAGHAALTERLLELQPTLVIMEASGGLERAVALRLTVSGLALRIVNARQVRHFAKAAGLLAKTDALDARVLRAFAERMQPEPRALASEQVQELQALTARRRQLIEMLVMERNRLRSAHVRVRRDLRDSIRSLERRLARTDDDIGCTLRDCGVWREKVELLESVPGVAQRTAVALLASLPELGQLNRRQISALAGVAPFNRDSGRWHGQRHIYGGRAPARRALYMAALVGARHNPVLRPYYQRLRQAGKPAKVALIACMRKLLIILNSMLRQQRSWRPTDVPA

SEQ ID NO: 126601 - protein, 412 aa, unidentified
MFKSLRRVGIDWGSESHQVCRIDGEEEPKQRGFPHTSEGLNALVAFVVEGEMDPEQIAIAIEVDHGAVVEALLAKGLRVYSINPKLLDRLRDRFSMPGAKDDRRDAFVLASCVESDAHAFRRIEPGNEENARLRAATRLREDLKADLRANANRLWNELREYRPALLTLCPGADDPWLWVLIEKAPSPSEGARLTRARIGAVLKKHRIRRLTAEEVRTVLRGGVLSLRPVYIESHVARVLVLIERLKLAQAQIANIEKQIKTAVAERVKFEEQTERRDLTILLSLPGFGSLTVATALGESGDAFERRDYNALRSFSGAAPVTKQSGGTRYVVMRQVCQPRLRVALHLSALQAIRVDPKFGDLYLRARARGQTVGRAIRNIVDRLLFLAVQLLKKNQLYDISLRQIAPEVAATP

SEQ ID NO: 126602 - protein, 387 aa, unidentified
MKSVTSATAVATTVRANDITLFASLELSKSKWVVTINSPGSEKFSKHVVEGGDGACLLDLLSRSRAKAEQRYGAPVKTVVIQEAGLDGFWIHRLLLANGIESHVVDAASIAVARRHRRAKTDSIDGETLLRTLMAWARGERRVCSMVRAPSPEDEDRRRLTRERGTLLKERIQHTNRVRGLLSGQGVRDYNPLRRDRVERLEALRTGDGRELPPMLKAEIRRELDRIALATTQLAAVERARDALIRTEAEEPNNPAALLLKFKGLGPEFASLLWLESLFRSFGNRRQVAAYGGLAPSPWQSGGVERDQGISKSGNRRLRKTMIELAWFWLRHQPDSALSRWFQARVGAAKGRIRRIAIVALARKLLVALWRYVTQGVVPEGAVFKTA

SEQ ID NO: 126603 - protein, 386 aa, unidentified
MAHSTNIPQHSIDYDQTLILAIELSNKSWVLAAQVPGLSQTKAKRTIEPDKNHLLAAIDGYRSRAAAAGRSVKRVITSYEAGWCGFWLARWLMAHGVEVHVVQPSSVPVDRRMRRGKSDGIDAELLLRTLLAWLRGEPRVCSMVPIPHEADEDARRCVRERSELVSERVGLVNRIGAVLATLGTDDYNPLLQSRRRRLTELRTGLGDRIPPNALAKIGRLLTRLELVLTQIAELELERDAVARADAPDQAGRMIQQLISLRGIGVQSATVLVREAFVRRFANGKALGSYAGLTSTPYSSGGIDREQGIGKAGNRRLRTVMVELAWLWQRYQPGTAQVVWFRERVGSTGRRLRKVMVVALARKLLIALWRFVIDGLMPEGAVTKPSI

SEQ ID NO: 126604 - protein, 353 aa, unidentified
MKSRMESKMSSPVVIGVDIGKDVFHLVGFTADGKIAFRRRIKRLALKDAFEKLPPCIVAMEACLSAHFVSRTLRALGHEPRIIPAIYVKPFVKGQKNDYNDAEAIAEAALRPNLRFVQEKSQDQLDLQACHRVRSRLVSRRTATINQIRAFLIEQGIAVRAGPRALRKSLFPILENRKDEISPRTAKLIRGLYDDWCCLDERIETVTGEIEILSRSEAKCRQLMSVPGVGPLISTAMVAAIGSGEAFERGRDFASWLGLVPRQYSTGGRSILGRISKRGSKYLRTLLIQAAKVLLMRPHNWARYSFGPWLNAASERLHRNKLAVALANKLARIAWSVLRNDKAFDTHLEVAAI

SEQ ID NO: 126605 - protein, 342 aa, unidentified
MDQIIRIGMDTSKHFFQLHGVDAAERPVLRRKLRRNDVVAFFAKLPPTVIGMEACGAAHYWGRELGKLGHEVKLIAPQLVKPYVLRNKNDGRDADGVCEAMGRPRMRFVPVKSAEQQAALMLAGVRDGLIGRRTQLSNAIRGYAAEFGLIAPKGLDKIEPLLARITQDESVPAMARELFAMQGRDYAQLQGELKAVEARLLAWHRANATSRRLAQIPSVGPIIATSLVMKTPDPHAFRSGRLFAAWLGLTPKDHSTAGKTRLGKITRAGDETLRRLLVAGATAVIRQARLGRGQPSRWLVALLRRKPPKLAAVALANKVARIAWKLMATGESYDAARMNAVT

SEQ ID NO: 126606 - protein, 423 aa, unidentified
MMKLKYSICCGLDVHKNVIVATIVITNADGISEYKQKSFSTFNSDIRKFHSWLIENNCYHVCMESTGKYWIPIFNYLENDIEVCLTHPKYVKAIKGKKTDKKDSKWIADLYKFDLVRCSFIPPKDFRQLREIARYRFKLVCMKSSEKNRIQNCMTVSNVGIASVLSDPFGKTATEIMSYLLTHTSDSIDEKAVRRLIKKGAKAKSDEIIEAIRGYNIESDQAKKLELARSHLEYLDGMITQSEVELYVRMKPYYKFVELVSTMPGMTELSSTIVLAETGVDMSIFDDAKHLCSWCGLSPTNNESAGKKKSVRISKAGDYLKPMMVQCALAAIKSKKQPYFAIKYGRVKKRRGHKKAIIAIARMMIVCIYHMVSEEKPFNPIDYEELMSPKNQIERVILNENNVFAYLESLGYDSSKLVKRNDN

SEQ ID NO: 126607 - protein, 373 aa, unidentified
MTDYDAYIGLDVHKDSISVAIADAGRSGEVRLFGAIANEPDAICKLVKKLSSKHGRVEFVYEAGPCGYNVFRQIEALGFVCRVVAPSDTPVRPGNRQKNDTRDAVMLARLLRAGELTFVWVPDVVHEAMRDLVRARSVASHDARKARTLIQLFLLKHDLRYSAKSWTSRHRTWLRNRHFQHHAQQIAFQSYLNRLEQAEARKKELEDQIAVISQTWSLARTVMNLQAFKGIGLVIAATLVAEVGIFSRFDSPRKLMAYLGLVPGEHSSGGSVRPRGITKTGNSALRALLFEAAWSYRVQAKIGNWMHKRRPDVPQAINDIAWKAQVRLSARYRKLVGSGKKSNVAITAVARELVGFLWDVARKTESETMSSAA

SEQ ID NO: 126608 - protein, 422 aa, unidentified
MSCLPALAGVCPPQHQVRRDTIILTESTLIVAGADTHADTIHVAAISLTGAAIGDREFPTTRVGYAGAIRFLYSLGQVERVGVEGTASYGAGFTRALTAAGIAVVEVTRAVKSTRRLKGKSDPLDAYGAARTALAGDGLATPKDDATSGLRALQIARRSAVKHRTAVINQIKAMLVSAPDAVREKYRELTTLRLIEALARCRPDAQSDPWAQSVLTAAKMLAQRVQFLETQAEALEAQIDVLVTAANPGLRAAYGVGSDTAAQLLITAGSNPHRLHSEAAFAALCGVAPVPASSGKTNRHRLSRGGDRSANNALFRIALVRMSHHQPTKDYAQRQLLKGHTRMEILRKLKRAIAREVFKLLTRQIAVPEYTDLRPARQAKNITVTAAANHFGIWPTVISRIERGLQRDDAFADTYRNWLKAA

SEQ ID NO: 126609 - protein, 304 aa, unidentified
MNKPSYIGLDVSKSYIDLHQLPQERVARFEYEKEGISKLVSFLKKRKPALIVIEATGGYETNVAAELASAGLSVAVVNPRQVRNFARALGKLAKTDAIDAAVLARFAQDVRPEARKLPSPEERTLKAFVARRGQLVNMLVAEKNRLSRATSNSVIDSLRRTSNFIQTQIDDLDTEIKATIQNSPVWREKDDLLKSVPGIGDKTSCALLAQLPELGKLNRRQIASLVGVAPMNRDSGMLRGKRIITVGRKSVRDALFMATTAARRFNPTIKAFYLRLRAAGKNYKVALIACMRKLLVILNAMLKN

SEQ ID NO: 126610 - protein, 346 aa, unidentified
MNQIIRIGMDTSKHFFQLHGVDADERPVLRRKLQRKEVLAFFAKLAPTVIGMEACGAGHYWARELRKLGHEVRLMAPQHVKAYVKRNKNDGRDAEGLCEAMSRPTMQFVPVKSEEQQAALMLAGVRQQLITRRTQLGNAIRGYATEFGLITAKGLDKLEPLLVRITQDESLPELAREMFALQGRAYARLQVELKTIEARLMAWHRANADSRRLAQIPGIGPIGATALVMKAPDPRLFRSGRHFAAWIGLTPKDHSTAGKTRLGKITRAGDEMLRSVLVAGATAVIQQARRGRGRASPWLLDLLKRKPPKLAAVALANKIARIAWKLMTTGESYDGARMPGASALAA

SEQ ID NO: 126611 - protein, 345 aa, unidentified
MEHIGIDVHKRESQICILTPEGEMIERRIQSTRETLTAMFRDRPPARVLLEATTESEWVAQTIEALGHEVIVADPNYAPMYPERRRRVKTDRRDARMLAEAARVGSFRPAHRMSAEQRQVRRQLLVRDLLVRARGRTIALARTLVRSEGLRVRAGDADQFGRYVSALELPNALQAAIQPLLALWAQLTEQLADADAQLVATAAANPVVQRLMTAPGVGPVIATAFVATLDEAARFGGAHQVESYLGLVPSEDSSADRHRRGHITKAGNPRMRWLLVQAAWAALRSRRADAAGLRAWAAQLAKRRGRRIATVALARRLAGILFAMWRDQTTFHGAHGPAARLARAR

SEQ ID NO: 126612 - protein, 408 aa, unidentified
MNAVGIDVSKGKSMVAALRPMGEVALLPQEFLHTEVGLEQMAYAIIALGEDTRVVMEATGRYHEPVAAALHEYGIYVSVLNPLFIKQSGGGSIRKVKTDKADAMKIAKYGLDNWVDLREYTPMDTVRQQLKLCSRQYNLYMKTVVSLQNNLISLTDKTFPGVNELFSSPERADGHQKWVDFVMTFWHCDCICRVSEKAFTERYQKWCKRKGYHFSTEKALDLYAGSCGHFTTLPKNDNTKLLITTAAQQLLAGKMTLAALRAEMTRLAMQLPEYNTVRAMYGVGETTAAQLMAEIGDVRRFPRRSSIVGFAGVDPGVDDSGKHSAKSVPTTKRGSPHLRKTLYQIVCTYLRKAPANELVYQFLEKKRAEGKPYFVYMTAAQNKFLRIYYARVKECLAAFDAQQDTTQS

SEQ ID NO: 126613 - protein, 392 aa, unidentified
MQDATGRRLGKARLPEGIGGITQLHALLGVLLPEAAEPDQVVIGIETDRGPWVQTLVAAGYQVVAVNPLQVARSRERHGTSGAKSDAGDAHTLADMVRTDHHQLRRIAGDSDLAAAVKIVARAHQTLIWDRQRHLLRLRSVLRESFPAALVAFEDLTAPDVLELLGKAPDPASAARLGTAQIAAALTRAHRRNVADKAAAIRAALAAEQLGQPPVVAAAYAVAVRAQVAVLAALNAEIEALQAQVSAYFGRHPDAEVYRSQPGLGDVLAARVLGEFGDDADRYAGARARKNYAGTSPITQASGKKKVVLARYARNDRLTDALHQQAFSALQASAGSRAYYDALRARGIGHHAALRQLGNRLVGILHGCLKTRKPYDEATAWPQHADTDQAAA

SEQ ID NO: 126614 - protein, 392 aa, unidentified
MYIVGIDIGKNHHEASIVSPEGKQIGRSLRFATTHKGADSLMSFIFKNIGNSPCVFGMEATGHYWYPIYSFLKAKGYTIYVINPIQSDSLRKMYIRQTKNDSIDSFLIAEVIRFGQFGTTSMADENILAMRQLCRYRDSVISSRTEIKLRIGTIMEQIFPEYEKQFSSLWVSTSMGILEKYLTPENIENTPIDELFEIIKDKSHNRLTRAKAISIKEAAADTFGIKIAQDAFSFQLKQLIDRMNFLDKQIEALNIEIMKYYEQFDCYLHTIPGIGIIGAATILAEIGDISRFKNSSALVAFAGIDPTVRQSGEFNSTHNHMSKRGSPYLRHAIFLAATTCSFHNSPLNAYYKKKRDQGKHHLTATGAVARKLTTIIYAVLRDSKPYEPKKFC

SEQ ID NO: 126615 - protein, 409 aa, unidentified
MRYYIGVDWGDEEHTVWVEDEQGQRVSAGMVSHSPVGFSEWGRQLDEWRAQGLGLWAAIERPEGRVVDVLLDHGVRVYPVNPKALDRARDRFRQSGAKDDLFDARVLAGFLRTDHAHLQALEPSSEGAQELKLLTEDYQRQVRTQTRLVNQLTATLKAYYPRALDVAELTTALAAAFLQAYPTPATLMTLTQRQWQRWAKAHHLSEARTTDLWTKLQQPQLPVPPHVVRAKSRLMQALVTELAAVVAAVASYRQAIDDFFATMPAAAWARTLPVGEHGVTVPTLWARLGDAPGRWESFRHLQAQAGMVPITVRSGKLVVVRFRFACDKQLRYAVDQLAWLSLQRSEWARAYDDEQRARGHRHRRALRALGAKWLKIIFIMWQRHVPYREEHHLATMARQALRHPEKKIA

SEQ ID NO: 126616 - protein, 354 aa, unidentified
MIYYAGLDISMKTTSIAIVDERGKICFETVCKTDPKSIAKTLSYSGCVCEKIGIESGCLSFWLIDEFKKLSLPVICIESRQMAALIDLKINKTDKNDARLIANAMRCNLYKEVFHKSRKSVEIGLQMGVRRVLVDTRTKLKNSIRGFLKAYGIRLKAISHNNFSETVRKSIKIADKTVQDVIECLLKSYEEVGANIDRVEKSLEKSRFKDVEIALFENIPGVGTITALTYKAVIDDPHRFANARNVGAYLGLTPNQYSSGETVRQGRISKCGCSELRTLLIECAVVILTRTKGWTKLKAWGLRIMKRSGIKKAAAAVARKLAIIMLRMWQEEEHFIWGEKKKKEEENQEIALIG

SEQ ID NO: 126617 - protein, 377 aa, unidentified
MNRILKIGMDVHSTNYTLCAMEPVFGADDRIYAKIQVAPDYKNILMFIEKVKQKLDPYDTYDIECGYEAGCLGYTLYNQLTSAGVKCVILAPTTMLTQQGKRTKTDKRDALMIAQCLSYGGYHPVYIPTEDDDSVKEYLRMRDDHKLALKKIKQQINAFCLRHGYYYPQGKWTQMHLDWLSAIKLPPLYQETLDEYMATYFELTDKIEKYDTRIEEIAAQEKYADKVKKLGCFIGVKTHVALSLIVETGDFKRFAKGNAYAAYLGLAPGEHSSSDKINRLGITKAGNSNLRRLLVEAAWGICKGNIGYKSKDLKKRQQGNSVQVISYADRANNRMRSKYYRLIRHGKKKNVAIAAIARELACFVWGMMTDNIEERVA

SEQ ID NO: 126618 - protein, 343 aa, unidentified
MKIIGCDFHPSFQQIAMVDTETGEHEEKRLTPPEAVLFYQQLQGQEVVIGMEASGNTLWLERLLASLGYQMRLGDASKIRAMEVRKQKTDRRDAELLLKLLLEKRFPEVWVPSLEMRDARQLLLHRHKLVGMRRQVKNQLQHLALNQGVQKKRKLWTRAGRQWLEELPLSGWTARRRSDLLRWLDELDQEIAELDRAVEQEARQNAVAQLLQTHPGVGPVTSLAFVLTLGKVERFQHSRQVVSYLGLNPAENSSGGRQRLGAISKQGNPMLRSLLVEAGQSASRGDKELKRAYQRLKQRKHSAIAKVMVARKLAVRLYWMWRTQQPYSAARMQGSPSHGVAER

SEQ ID NO: 126619 - protein, 352 aa, unidentified
MRRPKHQVTREEDLFVGIDIHKHRWHVTIRTVDLELFSASIPGTWEALQRVLARYAGYQLQAVYEAGYFGFRLHDRLVAHGIPCLVTPPSLVPQEYGNRVKTDRRDSSKLAHLLAKGMLKRVWVPSEEELYHRQVIRRRRQLVRDRVRTQSRIKAELRFYGIHLEEPRGRWTQGYFETLRRFRFGNRWMQESFKRLLEQYEFLSAQIDKQTQLLRELSETALYRERVEILQSIPGIGLISAMELLLELQDVSRFRRAEQLAAYVGLTPSQYSSADKVRMGRITGIGKNTLRSLLVEASWTLIRKDQAMREKYDRIKIRSGGQRAIVAIARTLLLRMRRMLLDKQAYALDLAA

SEQ ID NO: 126620 - protein, 433 aa, unidentified
MLKLNYMSTLFVGIDVSSKTNAVYAMDFEENKYISSSFGNNQPGADQLVNMIAECMQKHKNLDTVLIVLESTSVYSVHISNFLSASEVLMPYRPYVFCVNPKAASNYRKSYIGMEKTDPTDAYLIADFGRVGRTKKLEPWRGGQFISLKRLTRHRMHLSECITREKTYMVSNLYLKFSELQLLEGDDKPFGSLYGATSSAVLTEFLSPQEIIDMPEEELLTFLAGKSRNRISDLSKTSELLRKAARDSYRLNKCMYEPLSISLASSFNCIHAYQKEIKLIEQAIEKCINGMNPNALLILQSIPGIGPIWASGILSEIGDITAFHSSDALAKYAGLYWPKGDSGDFTSEDNKMSKAGNPYLRCYLGEAANSVRKHIPEYADFYARKYAEVTKHQHKRALALTSRKLVRLVFGLLVKNQLYTGEKLDTEYNIESN

SEQ ID NO: 126621 - protein, 353 aa, unidentified
MKYIIGCDAHKHYSQFAVYQEKSRVCKQSRVDHEPGAIREFLSEYPKGTPVALESIGNWYWIVDEIEQAGCQALMAHAAKAKAMMGNVNKTDKLDACGLAVLLRNGTLPTVWVAPGEVRDERELPRTRMAFCKVRVALKNRIHATLAEYNLSLDTESDIFGGKWAEELHEAVQALPAETQKCIEQELELLEEVQEQIRAMEERMRERIAMTPTMQLLKTLPGVGDILSIVIASEIGSIERFASAEQLASYAGTVPTVKSSGGKTRYGHLPPQSNHYLKWAFIEAANCISYHYRHPNWKSKHVIRLYERIRRRKGHTIAVGAVARHLAEATYWMMTKNEEYQEPVPRKVLPRQE

SEQ ID NO: 126622 - protein, 414 aa, unidentified
MLLEQPVEPAAILTHLGAIFVSLELSRSKWVITSVSPGAGEKMSRHVVEAGDVAGLLARFAELQRKALARTGRSYPIIVIQEAGLDGFWIHRVLEGEGIESHVVDAASIPVPRRRRRAKTDRIDGETLLRVLMAFKRGDPRVCSMARAPTPEDEDRRHVCRERKQLVVERVEHVNRIKGLLFSQGIGDYEPLHRDRRRALELLHTGDGRPLEPRLKARIGRELDRLELLIAQIKAAEGERDAMLKGEIASEPTVQAPAPVRAEADAEAVAETEAGAAPPPSPAAMLAKLKGIGPEFAMVLWTEAFYRSFVNRRQVAAFGGLAPTPWQSGSIAHEQGVSQSGNPRLRTTMIQLAWLWLRHQPDSELSKWFQARGNTGPGARRRSIVALARKLLVALWKYVTSGVVIEGAVMKTAA

SEQ ID NO: 126623 - protein, 452 aa, unidentified
MVAVMEPQEIDDEEHEQVLERVAAVDVAKASGMVCTRVPHQSRPGKRRTRVWPVDATTNAVLELADHLVAEGVEKVTLESTSDYWRIWFYLLESAGLDVQLVRAQDVKQAPGRPKSDKLDAVWLAKLTERGMLRPSFVPPAEIRRLRDYTRLRADLTCERTRHYSRLEKLLEDALIKVSAVASSLAAKSVRDMLEALIGGERDPKILASLARGRMRAKHDRLVQALAGRFDDHHGELARLLLDQIDTLSAQIGRLTTRTGELIAAIPPAQGIDADGTTGPAAGHGKNAPVLPAVDRLDEVTGIGRGGAQAIIAEIGLHMSVFPTAAHLVSWAKISPQTIQSGTRSRAGHTGKGNPYLRGLLGEAAAAAGKTDTFLGERYRRLVKRRGKLKALVAIARSILVIVWHLLDDPAARYHDLGAGYYASRVDKNRKMRHHVRQLEALGYTVTLTQAA

SEQ ID NO: 126624 - protein, 377 aa, unidentified
MKRIKFVGLDVHAETIAVAVAEPEGEIRSLGMIPNREESVRKLVKKLGPVEELRFCYEAGPTGYVLYWQLTKMGAACAVVAPTLVPVKAGDRVKTDRRDALKLARNFRAGELTAVWVPDAEHEALRDLVRAREAAKKDQLRARHRLSKFLLRQGRRPPVGVRPWTVKYLEWVKRDVHFAVKAQEATLLDYLHEVEHMTARITRLDGAIEEAVKVAPAKMRAVIEGLQALRGIAQISAVTIVAELGEVSRFSKAPELMGYAGIVASENSSGERQRRGSITKTGNAHLRRVVVEAAWAYRHRPAIGFTLRKRQGNLGEEVKEIAWKAQHRLYARYGKLMAKGKNKGVVVTAVGRELLGFIWAIGVRVEAQQKESLRQAA

SEQ ID NO: 126625 - protein, 395 aa, unidentified
MFIVGIDIAKRSHEAIIIAEDGQVVRKAFSFRNNCTGYNLLLEQVRRLTLVKSQIVFAMESTAHYWLALYARLLKDGYAVMVLNPIQSHSLRELYIRKAKTDARDSLIIADLVRFGRCKASNVPQDKILALRELCRSRAYLVDMAADLKRKLIALLDRIFPEYESLFDSVFSKASIAVLSKYSTPQKVKNANLRKLTDILMESSNGHFGEWKAHQLKEAACSSFGIDDSGGVYSTLLGMFLEQILSLTAQADSLEKQISVFFQEINNPLTSIPGVGTVLAATILSEIGDITRFSSADKLLAYAGLDPSVKQSGEFKSNQNRMSKRGSPYLRRAIWLASTVAVHRDPMFQTYYEKKISEGLHYMNVIGHVSRKMTAVIFAVLRDGQPYQPILQSAG

SEQ ID NO: 126626 - protein, 312 aa, unidentified
MKHSTPTSSVVYIGVDVGLKTLQLHGLARRKQLPNTPEGHATLIAALPAGSHVIMEASGGYEYALWLALLRADRRVSRVNARRVRHQAGANGQWAKNDVTDAALLSEFGALHRPRPDVLPSPVCLELQDLVCRRDQLVRQRAQCAVQLQQLHRAALIEQANALVAFLDGQITTLEDNIQQCLDSREMAAKSQRLLQVRGVGPRLCSTLLATVPELGTLSDNQIAALVGVAPYDDDSGQYRGARHIKGGRIKPRCVLYMAAMSASKHNPILRAFHQRLINKGKPFKLAITAVMRKLIILLNRLIREPDFILES

SEQ ID NO: 126627 - protein, 383 aa, unidentified
MSSTTADRDPVIHLAIELSCSTWLVAARLPGDEKPRLHRLGGGDTAALLALISSLRARVAARLGSPIGVICCFEAGRDGFWLHRLLTAHGVINHVLEPTSILVNRRARRAKTDRLDAEGMLRVLAAYLRGDRQACSMVRVPTPEEEDAKRPHRERQHLVQERLRIENRIEALLFTQGIRQRPSLRSWERDLAALRTGDGREIPHHLRAELDRLRRRLVMTLTLIREVEAERDEAGEAEPQDVSSRKIAALCRIRGIGENFAAVLTREVFYRCFDNRRQLASYVGITPMPYQSGGIDRDRRISRAGNPRARTTMIQLAWLWLRYQPGSELAQWFRERVGALAGRTRRIAIVAMARKLLIALWRYVETGVLPAGIEIRAKTAAAA

SEQ ID NO: 126628 - protein, 346 aa, unidentified
MEQYVGLDVSLKMTAICIVDRTGKIEREGMVASDPAAIAAFVRLHAPHVARIGLETGATSTWLWTELNKMRLPVICIDARHAKAALKMQINKSDRNDAVGIARIMQCGWYKEVRVKGLDSHAIKAVLVSRALLVKIKRDLENQIRGLLKNLGLVIGRAKMNMFVVRAAELIEARPELAAAVEPLLKAREVVEKQIADLDRKVMRLARNDVQVRRFMTAPGIGPITALCYLATIDDPTRFKRSRSVGAYVGLTSRRYASGEVDWTGRISKCGDPMLRSYLYEAAGVLLTRVAKWSVLKAWGMRVAKRSGLRKAKVAVARKLAVILHRMWVDGTEFKWSSKEVATQPA

SEQ ID NO: 126629 - protein, 388 aa, unidentified
MQSIAGRHEEPAAIRTDIGAIFVSLELSRSIWLVTSVAPGNGEKMSKYAVPAGDVCALLTRFAELRKKVSDRTGKEVPIIVIQEAGLDGFWIHRTLEGEGIESHVVDPASVATSRRRRRAKTDKIDGEALVRTLLAYKRGEPRVCAMVKAPTPEKEDRRRLCRERKTLTNERVLHVNRIKGLLFSQGISRYEPLRHDRRRRLEEVKTCDGHSLPDHLKRQIERELDRLELLLEQIKIVEGERDALLAVQHETVAAPAAMLLGIRGIGPEFAAILWSEGLFRHFDNRRQVASYAGLAPTPWQSGSIDREQGVSKAGNARLRTTLIQLAWLWLRHQPQSALTLWFKERVQRNGGRLKRTIIVALARKLLVALWKYVTFGLVIEGAVMKAA

SEQ ID NO: 126630 - protein, 343 aa, unidentified
MELIRIGVDLAKNVFQVHGVDQSEKPAWQKRLTRQRWLETVVKTVEPGCEIGMEACTGAHHWARRLQALGYPVKLIAPQFVKPYVKSNKNDARDAEAICEAMSRPNMRFVDIKTIEQQDIQAVHRIRSELIRHRSAKANQIRGLVAEYGLVAPRQLIALRRAVPDWLEDAQNGLSVLFRRLLSGLWEDLKQLESRITELNQEINIIAKTDPDAKRLQQLRGVGPMVATALVATVGNADQFSNGRQMAASLGLTPRQHSSGDKDRLLGISKRGDVHLRTLLIHGARAVIQMAKDKDDRLSRWINELLQRRHPNVVAVALANKTARMAWAMLHNGTDYEPNRHGG

SEQ ID NO: 126631 - protein, 399 aa, unidentified
MPQPNDLSRSLVALDQDSTIIAVVEMSQSSWLVGGILPGIERQPRKKLEPNPERLLALLHRWRDESVRAGRTITRITVAFEAGRDGFWLARWLEARGVEPHVIHPSSVAVSREHRRAKTDRLDTELLKRGFLGWLRGERGHCSMARVPTIAEEDAKRPNRERECLVKERTRLVNRMKGTLARLGIRNFRLTLRNAAEHLAALSTPEGSPLPPNVAAELERDIARLRLVIGQIKQIEEARRQRLEEQPERGPHAMVRLLARVVGIGIETADMLVNEVMSRPMRDRRAVARGACPRAGRRPDPGAGLTGAPDESGAKRREQGLAKAGNARVRRGMIQLAWRFLRFQNNSALAKWYQARTADHRGATRKTMIVALARKLLIALWRFVTIGEPLDGVTLRPAS

SEQ ID NO: 126632 - protein, 344 aa, unidentified
MGEVITIGLDIAKSVFQVHGVDDAGTVVIRKRVSRSKMLEFFADLPPCLVGIEACPAAHHWGRELQALGHTVKLMPPSYVKAYLKRSKNDANDAAAICEAVSRPSMRFVAIKTREQQAALMLHRARQLLVRQRTMLSNAIRGHLAELGIVSAKGRNGTDELLKIIMNGADSRIPLAAGSILKVLAAQYDAISVQIASIGKSILAWHRSCEPSRRLEEIPGVGPIVATALVAEIGDWKAFRSGRGLAAWIGLVPKQHTTGGKDKLGSITKQGNRYLRWLLVAGAMAVIRYAQKHGTKKRPWLGRLMERRPTKVAAVALANKIARIAWAIMTRGERYKEPELLLAA

SEQ ID NO: 126633 - protein, 384 aa, unidentified
MTAIRNEQSTTVEGRLHMAFELGWHEWKLAFTIGHGQPPRLRSIRARDVAALQREIAKAKARFRLPADAAVVSCYEAGRDGFWLHRYLETAGVRNVVVDSSSIEVNRRRRRAKSDRLDANKLVTMLLRYHAGEIKVWSVVRVPSVADEDGRRLHRELRQLKDERTGHINRIKGLLACQGVQLSTLNAGFAERLPTMRLWDDKELGADLRAEVLREFERWQLIDRQIKAVEQERRQRVRSDATPHVAQVRQLLKLSGVGFNGAWMLVMELFGWRRIKNRKQLGALVGLTPTPYQSGSSAKEQGISKAGNRHLRQMMVELAWCWVRWQPESALSQWFCARFGVGGGGTRKVGIVALARKLLIAFWRYLEHGEIPQGATLKVRSPAA

SEQ ID NO: 126634 - protein, 416 aa, unidentified
MGRSKSPKAKCVNDRELIIGIDVAKHQHVAKILFPDGSESQPFGFSNHRRGFETFLAWLFSQREKAHCDSLLVGLESTGHYWEPLAFFLEEIPGIRVVQVSPKHVKKTKEVYDNSPGKTDRKDAGVIAMLIQMGRFQKLVLPKGPFAELRGYARLRERKIVELGVQRNLLHSLVDLVFPEYGSLFPKIEGKASLTILKHYTTPDQILREGLSKLSRAIHQASRGKLSATCAQKIIEAASTTIGLKEGMGATTFAIRSIVASLERIQEEIATIEKELTKVLDQIPYAPQLFSIPGVGKISSAVILGEVGDLRRYHKAEELIKLAGLNLFEISSGTHQGRRHISKRGRPLLRKCLFFAALRTVKTGGAFRAVYVRFTQVNRMQKTKALVAISRKLLMLLFALVRDDVAYRPREKLRAA

SEQ ID NO: 126635 - protein, 315 aa, unidentified
MADTIAQSVGVDISKDTLDVHLHPAGAARRFVNTRTGRSELIAWLAKFTIVRIVFEPTGPYHHAFERHLAEAGLPLAKVNPRQARRFAEAIGRHAKTDRIDAAMLARLAALLEPPIRPAPSQTLDDMAELIVARRARVKDRVAALQRDSVHRSTLLKRQAVQRLAQIERQIAAIDTALRERLAGDLTLRARFDILASIPGIGETTALIMLVEMPELGTLDHRCAASLAGLAPIARDSGQHRGKRFIRGGRSHLRQALYMPALAAVRFNADLKAKYKALRHAGKPPKVALTAIMRKLIILANALMRDGRTWSLKPA

SEQ ID NO: 126636 - protein, 378 aa, unidentified
MNRIIKIGMDVHTTNYTLCIFEPSFEHDGTVHCITQVKPEIKKIIHVIETFKKKHENEELNIVCGYEAGCLGYSLYHELKEKGVECVILAPTTMKTEKGGRKLKNDYRDAKMIAECLAYGGYSAVHVPTELDNSVKEFIRMRDDIKENLKSIKQQIIAFLTRNGKQFNGKSYWTRKYIDWINTISFSEPLLQDTLKEYMIEYNHLCDRVETLDKQIEEVSLKEEYVEKVPQLQCLIGIKTHTALSLIVETSDFNRFKKGNMYSAYLGLIPGDDSSGGHEKKLGITKAGNNHLRKLLVEAAQGYTRGKVGFKSKDLKARQEKCSSEVVAYADKANERLRRKYYRMILRGKKYNVAKTAIARELACFIWGIMTDHIDLCS

SEQ ID NO: 126637 - protein, 314 aa, unidentified
MSESTQVAGIDCGKAFLDIGLFPGADKRRVANTPEGHREVVAWIAARRIILEGLDASGGYARPIRDALRAAGVSVRVFDPARVRFFAKAKGQRAKTDNLDAAVIADFTAAQTTVPAIPADPAREEVAGLLKARRLLVDKRADLSKSITQAPIAAREALTRAVEHLAREVAVLDAAIGQATKAQPALSQTLQALRTAPGIGPVTATTLAVLRPELGRTSGEKIAALVGVAPFDHDSGKMRGRRHIAGGRADVRRALSLAALSAAINTKGVIAHFHNTLIQRGKPFKVAVTACMRKLIVRLNAMLAKGATWEAQPA

SEQ ID NO: 126638 - protein, 335 aa, unidentified
MKHYAGLDLSMESTQVCIIDENGRKLSSEKAESTPDTIADVLRRHGPIERAVIETGRMSPAICLGLRELGVNVVCIDARQAHQSLKAMKANKTDPHDAAGLAQLARTGFYKEVHVKSPAAHGVRSMITARGHLVEARVRLDNMIRGLCATFGYRPGVGQGKAFVERIMEASHIPGLGEAITSLLTVRVQLVEQIKELDLKLRMLAAQSQACQILMSIPGVGIQTSAAFSAAIDEAGRFRQSRNAGAYFGLVPKRHQSGELDWTGRITKQGDSMVRKLLYEAANSILTRSRESFALKSWALKISKRRGLKKARVALARRLAVIMHAMLRDGTLFEA

SEQ ID NO: 126639 - protein, 411 aa, unidentified
MEGLSPLHRRVAGIDVHRMLHVVTVLIEEDDGTISKHQREFGGFKRDMKAMSAWLQELGVELVVMESTGIYWKSAHAHIERVGIPALVVNAHFIKYVPGRKTDMGDSEWLAVLARFGLVRGSFIPPKDLRELRLLSRYRRRVSQMLASETNRMHKVLEDGGIKLGAVVSDIKGVSAREMVAGLIEGKPLGEMLAMARGSLKNKRDDLAASLDGDLSPRHLFVLRQLHEHVTALERQLAQIDAELFQAMTPYHWAWVLLQTIPGMDAIASAMILIEIGDDMSRFGDADRLASWAALCPGNHESAGKRKSGKTRKGNAIVRYLLCECANAARMTKSSLASKYRNLKVRKSHNKCIVAIAHKMIRIIYFMLSRREPYRDPGVNYEAMSARKNAPRWIKALKNIGKLPEATAASA

SEQ ID NO: 126640 - protein, 449 aa, unidentified
MNPHQLDQKREWIKGKFIIGIDPAKDKHQAFIIDGYGYAVGKTFGFAHNARGFHDQLWFKLGKYLEPEFIHPDHLVFAVEAAIDFWQPLVYYLYRQGYSVVIVSPLTTKKSRSLPGHDFTRTDPKDARLVAESAFRGHYHRYIDYPDQIKAMKTLSLTYNKMRKDLAKTHLRLRSAINRVFPEFLSIVPLDTDTAHYLLMKHLHPRDFLNLDVSATVVEMLKVSNQQHGLKTVSDLQKAASTSIGIPRDTHEIIGDRLTINSWLVLITTLKQQLKIISKQLIELARQTPWFDILISIKGISDITAALFLAEVKDLSIYNHYKQIQKLAGLNLRLNDSGRIHGRHKINKIGNRRLRWIIYLMTRETVKYIPEVRIRYLKRQMKPYNYTKNIIACSSQLLQLIMALIKNNQHYEYFPENQSIVGELERHYEKRKKDLNRKRKAPAAISMTI

SEQ ID NO: 126641 - protein, 421 aa, unidentified
MRDESMSRVVDIVRPVCCGMDVHKSFLVACIATTNERNQTTHQIRRYSTFKGDLQRLADWLSASNCKDVCMESTGKYWIPVFNVLEKTCNVFLTHPKYVKAIKGKKTDKKDAKWIAELFKCDLVRSSFIPPPLTRDLRELCRYHAKLTHMNTSEKNRGQNSLTVCNFKLDDVFSDVFGTSATRVLDKLIELGHSDFDLAPLLHKSCKATPEQVKAALDGEFSFAQAHKLSLIRQHMKDLSNLQTTLESTVIKLAAPYQPQIDLLMTVPGIGSQFTAIRILAEIGVDMSVFESAKQLCSWAGLAPQNNESANKKKTTRIARAGAFLKPLLVQCTLAAVSSSKYPWLKDKYQALKKRRGHKKAVIAIARKLLAAIWNMLSKNEEYNHELHQKSNQPPANRMLTPEQAFALLRKQGFTITKIAV

SEQ ID NO: 126642 - protein, 339 aa, unidentified
MIIIGADYHPGFQQIALVDTETGDCGEWRLGHREEAEKFYRDLAAQGIKVRVGMEASGHARWLERLLAELKFELWIGDAAEIETKRVRKPKTDREDARLLLRWRLEDRFPRIWVPSWENRDLRQLLWHRHRMVQARTRIMNQLQAVALNEGLVCKKRLWRERGRQQLESFALAGWASRRRHDLLELLDRLNPTIAELSQAIEQEVEKCPEAQRLMTHPGVGPLTALAFVLIIGRAERFHCGKQIASYLGLVPLEKSSGNRRRLGHITKQGNSMLRFLLVEAAQVTVRSVPEWRSKYFHLMMRRGKKIAKVAMARRLAVRLYWMWRKQWDYGQVKKFGSH

SEQ ID NO: 126643 - protein, 430 aa, unidentified
MTNPQSTPEAVVWVAIDIAKDRHEALIEAPGWKSRKKFRVQNTAEEFRAFAEFLHGLALPVRIGFEPTGNYHRALAYFLHSEGFSLELISSLALARTREAMHNSWDKNDPKDAQVILHLLKGRLTQHFHDPLVHNLNDLQELSKTHHQVSLEKTRTQHRILTHHLPLYFPEIARYHSCSRSQWLWNLLIEFPTPRCITQLPKDEFVRKAWKVVGRKVAKERILTDIYLTAQSSVGLPAEENSEAVTMLRFVLRQLLTLCHLRATIEERANDLLSSNEDYQRLRRIPGIGPISALTILAEAGNLRRFSHHRQFLKFCGLDLATEQSGQFRGLSRLSKRGNARLRAVFWLAAGVAVRMRENSFRAKFDRYMRTDPGSTDRKRKAYVAVAAKLARVTYALIRSGADYRCFHEVAVPSGRTCGPVPLRRFRPRR

SEQ ID NO: 126644 - protein, 385 aa, unidentified
MFYVGIDIAKNKHDLACINETGETVITNFRFANSCQGFHQLKLKLEQLSPITQDVQIALESTGHYNYNIVTFLRDLGYDVFAYNPLIIKEFAKSQSLRKTKTDRKDALLIARKLRSDVTPERYQTDRVLDELKELTRYQNRLIQSRSRCKNLYIRLLDIIFPELHRIVNNLYNQFIYDLLTNYPSPQRIARARFSSLLKIKRLTADKAHQIQETAKQTIGNASPVLSLELVQLIESIKHYDKQINQVQEEINLLMIELNSPITSIPGIGSRLGAIILAEIKNIHNFKNPNQLQAFAGLDPAIYQSGQMDNTGHMVKRGSSYLRYALIQAAKLIAIYSPHFKAYLRLKISQGKHYNVAVTHVAKKLIRVIYHLLKTNQLFDETKLR

SEQ ID NO: 126645 - protein, 404 aa, unidentified
MKGPIVSIDVSKGKSDYQAFKNLNVKYTGSRSIKHTKEGFDEIVNLVREMEKKLETEVCVVYEATGVYHRVLKKVLEDNNIKQFIINPLLSAKTRKNDSLRSPKTDKLDPKSIAKTYYSHSLHNSHKPETIYHELRELSRYYEDILVHIRKDKVAFRAQLDIVFPGYDTLYDDLYGPVALAVIEKYPHPEMLQKKKINTVSKVIQNKTCHRQAVSDTMADKAIEYSKTIYSGCDKDDIEVLILQRFIKKLKEDMAEAERTIGEMIKLAQELPDFSIIKSIPGIGDNLAARIIAELGDMTRFKKKNELVAFAGLDPRISESGQNDGDHMHITKKGNKRLRCLLYLAVTCSIRLKRDDNSIKDFYIKKKQQSNPMCSKAAKTACASKLVRIIYSMCKTGELYQYNK

SEQ ID NO: 126646 - protein, 408 aa, unidentified
MQVLYTRCAGLDVHKDTIVACVRCVSPPMHQEVRSFGTTTAQLLELADWLAEHDCTHVAMEATGVYWKPVWHVLEAEFELVLANAAHIRNVPGRKTDVNDAMWIADLLAHGLIRSSFVPPQAIQQLRDLTRTRKQLVREVSQHSLRIQKVLEDANLKLGSVLSDVLGKSGRAMLDAIVAGQTDPACLAALAQGTARNKTAELREALRGRITDHHRTMLRLHLQVVDALQRTLAELDAAVGKALAPIQQRARLLTTMPGISDLTASVVVAEIGVDMSRFPTAGHLVSWAGLCPRSDESAGKRRSTRVRKSGTWIKTTLVTAAWAAVRVKTSYLRAQFLRIKARRGAKKAILAVAASMLTAAFHMLRDGTEYNDLGSEHFDRQDKSKTIRRLLKRLQDLGCDVPELAHAT

SEQ ID NO: 126647 - protein, 339 aa, unidentified
MKLYSGIDLHSTNSYLAMIDENGKRIFKEKLPNDITVICERLALYSGTLEGVVVESTYNWYWLVDGLMVAGYTVHLANPAAIQKYSGLKYADDKHDAFWLAEMLRLNILPTGYIYPKEVRPLRDLLRKRSHLVALRSSLLISLQNIITRNCGQKMKTNDIKRLRENRVHPLLVGNEDLALAGQVSKDSIDFLTRQIRIIETFIEKKVELNGAYRQLETLPGIGKILGLTIMLEAGPIERFAKVGNFASYCRLVSSQWTSNGKSKGKGNKKNGNKYLSWAFFEAAEFARRFDDQARAYYNRKLRKSNSMVAHAALAHKLARAAYYVIRDQVPFMPEKTFT

SEQ ID NO: 126648 - protein, 343 aa, unidentified
MYYIGLDVHKKTISYCVKDAAGCVHQEGRIGSTRRELDAWIRTLPQPRMIAMEATIFTGWIYDHLLPHAEKVKVAHPLMLRAIAAAKKKNDKIDAGKIADCLRCDFLPECHMASTEIRDRRRTLRYRSLVIKQMVQMKNRVSGLLMESGVSYNKQRLHKVGYFAELMSTSEEVNESIRPLLKLSREMICRSQKLDYALVSSLQRDPLLKERLRRLQTVPGVGPITALTWALEMGEVTRFTSIKQAISYCGLCGDEKSSADKVMRMPISKQRNKHIQRVLIEAAKLAVRECHELAVIRARELERGNPNRATLAVARKMVGYMLAVERRNQDFVPAEKFSRAAAA

SEQ ID NO: 126649 - protein, 577 aa, unidentified
MSEPVYVGIDVAKASFEVAVSGEAQTLSLGNDEAGHAELCQVLVPLAPRLILLEATGGHERLLALALAAAGLRVSVINPRQARDFAHCMGKLAKTDRIDAQVLRGFAALLDAQGHEPRALLDEQQRELTALVTRRRQLVAMLVAERQRLALAHPKAKASILAIMDAIAAQLHDVDGQLREHVQAHHADLAKLLTSVKGVGPTTATTLLAQLPELGHLNRKQITSLVGLAPMNRDSGTLRGQRHIFGGRADVRRVLYVAALVGTRFNPVLKAFYAKLLAAGKPKKVALVACMHKLLIILNAIAHAAGTVSIYEEQYHPVVTWQTFVANLFLVQAWNIFPYLSWNGASWFVSVEFLLCLLFPIYMVLTRGGWLSAAGLIVAGIAGLAILSLTGKHGLDITFHNGIFRGMSAFAVGVGMCVLYSETKQWGDTLPEWAWSLAQALVLVAMGFGIFDNGWSHTPRDIYTVVPMLALIYVLSFDRGFAARFLQTRPLAKLGEWSYAIYMGQTAWLQLIRFFESGYPSNDTLIFGIRFGDLIWWPEPFLLLAVCVAWGALLCTYIEVPANRALRHFFAHAPATA

SEQ ID NO: 126650 - protein, 413 aa, unidentified
MEVLYPRCCGLDVHKSSITACVLLAQAGKPQKHIRRFGSTTRELLELVAWLREFGVEHVAMESTGVYWKPVWNVLEGHCQIVLANAQHIKAVPGRKTDTKDCQWIAELLQHGLLRASYIPSVMIRDLRDLTRARTSLSQEHSRIASRIQKVLEDANIKLASVASNALGKSGRAMLEAIIGGEESPERLADLALGHLRLKIPQLQTALEGRVRDHHRFLLRSLLRQLQFLEAEIELLDGRLDQIGREHLDLAEALDRWITVPGVDRVAAWSFIAEMGIDVTQFPTAAHLASWAGVCPGNNESAGKRISSKTRKGSPWLRRMACQSAWAAARTKNTYLAAQFKRLAARRGRKCAIIAVAHSILVIGYHLQRQRCTYADLGSSYFDRLHADGLKRYLVKRLESLGHAVILQPAPPE

SEQ ID NO: 126651 - protein, 343 aa, unidentified
MQTVTTIGLDIAKSVFQVHGVDAAGQVVVRRQLKRRYVLAFFEKLPPCLVGIEACASSHHWSRELQALGHTVRLMPPAYVKPYVKRQKNDATDAEAICEAVTRANMRFVSTKTPEQQCGLVLHRTRHLFIRQQTAVINAIRAHLAEFGIIAPVGRHGVEELLNVVADPNDKRVPEIARACLLAFGAQLRTLKEQILEFDRMIRAWHRSSETSRRLDDCPGVGPVLATALVATVADPKSFRSGRNFSAWIGLVPKQRSSGGKNRLGSISKQGDRYLRGLFVAGALAVIRYAKIHGTKHRPWLTALLARRPTKVAAIALANKIARMAWAMMAKDERYKEPVALAA

SEQ ID NO: 126652 - protein, 344 aa, unidentified
MGTITAIGMDLAKNIFQLHGVDAKGRVLLRKRLTRDQAPLFFANLPACLVGMESCATSAYWARVIESRGHSVRRIPPQFVRPYLMNNKNDANDAAAICEAMQRPHMRFVPHKSQEQTDIQALHRVRKRLIQGRTATFNQIRGLLAENGIVIRQGACHVRSQLPILLDDLDNELSGVMRELLFSLMDVFRFHDERIAELDRRLRAISKENEVCRRLMKMPGVGFLTATILLTVIGRAGDFKNGREFAAFLGLVPRQYSSGGKNRLLGISKRGDAHVRTFLIHGSRAVLRSMKKGGKPLGDGGRTTWLTELVERRGHNRASVALANKMARSAWAMVASGAEYRLVA

SEQ ID NO: 126653 - protein, 358 aa, unidentified
MKAQVKKIDFTDQNIYAGFDAHLKSWKVTVMAEGTVYKTFTQPPKPEVLFNYLQENFPGGTYHTAYEAGFCGYWIHDKLVSFGINSIVVNPADIPTTDKERVQKEDKRDSRKIARSLSSGNLTPIYVPSIKTQQDRTLLRTRTMLVRDLARYKNRIKSFLYFYGIDFDDSFINPQSHWSNRFMSWLESIDTGETSGKEALNVLISECKNLRSSILRITKQVRQLSQTGPYQEHVILLRSIPGIGLLTSMIILTELETINRFKNIDKMCGYMGLVPSTKSSGEKEKTGDITPRGHSVLRTAIIESSWTAIRNDPSLMRSYLSYRQRMDENKAIVKIARKLLSRIRYVLINKKPYKCSVV

SEQ ID NO: 126654 - protein, 355 aa, unidentified
MSNEKYIGLDVHQATISVAVMDCQGKVVMESILETKASTLLEFFAGLRGSLFVTFEEGTWAAWLYDLLKPRVAEVLVCNPRKIPLHKQGNKSDKIDARKLAERLRLHDLKPVYHGETGIRMLRELARSYLTIVKDHSRVMNRLKALYRGWAIPCAGRDVYYRRHRSQWLEKIPQAGTRRRAEQLYQQLDMLQPLRQQARRELLAESRKHAITAKLGKIPSLGPIGSALAVALIQTPHRFRSKRQLWTYSGLGLETRDSGEYHFVKGQPRRRKKQATIRGLNKDYNHDLKGLFKGAATRASVKPGPFQEFYQRSLAKGIKPTMARLTLARKIAAITLTLWKKGEDFDINKLNSQAA

SEQ ID NO: 126655 - protein, 362 aa, unidentified
MSKSTTIIAFDQHAATTVAAVLLPGQRTPALHSLASESATILRFVERLRRDRSVTCCYEAGPCGFELQRALTSNGVPCDVIAPALIPRRPGDRVKTDRRDAGQLAVLYRAGALTAIHIPTALEEAVRDLLRCREDIRADLLRARHRLSHFLLRHGRRFTATKRAWTKRHTEWLQAQRWPLPALEQTHRAYIRAVDEGVARLQTVDLELRDFLTIEPLRTRVERLRCFRGIDDLTALTIAAELGDARRFSSAPSAMAFMGLIPSEYSSGTRTVRGAITKTGNAHLRRVLVESAWHYRHHPFLGDALRHRQRGAPATVVEHAWLAQRRLHRRYRRLAARGKPKQLIVTAVARELTGFLWAALTQ

SEQ ID NO: 126656 - protein, 426 aa, unidentified
MTAMNNAPSDQPAACIGWDWGHTNHAIALRETGSQEVDNLKLAATPEALHEWLNQTEARFGGRLVAVALEGSKGPVFSQLQERPWIRIYGVHPATATRVRKAFTPSGAKDDRPDALVLLDLVENSRHKLRPLFVLDAATAKVEQLSVMRRDMVERRTQLTNQMDSLLKQYFPQALELVGENMHGELALEFLKRWPSLVELKGSRAETIKRFYYQHNVRSESVVEKRLKLVADAKFVMQDQQRSELWKMNLASLVELVRVANKHLELVEKELAGAVRVHPDAGIFTELPGAGPVFAARLLAAFGEDRGRYESAESLQKLSGVAPVMERSGKSCVVRWRYLAPQFLRQTFVEWARCTVQTSTWAAAYYEQQRGRGKGNWAIYRSLAYKWIRILWRCWQDRKPYNETEYLKALERRNSPLGKRLKIMAA

SEQ ID NO: 126657 - protein, 494 aa, unidentified
MKTEQPGKNQKTQKSNNRSKQASSPSSPTPGKWGEMNRKQRRAMMRKMQSEDVTLEVVHPDAAGIDIGNETHYVAVPPSRDPEPVRCFGCTTAELKSMADWLKHCRIRTVAMQSTGVYWMAVADILEEAGLEVYLVNARDTKNLPGRKTDVQESQWLMKLHTYGLLRNSFRPSPEIRTLRTYWRQRLDLVQAAGEHIQRMQKVLTQMNIQLANVLTDISGVTGQAIIKAILDGERDPRELAAYRDCRVKASEEEIARSLEGNWQDDLLFVLRQEQAGYEFCQKQMGECDRQLEQYLQQMEDRSQGAALPEETRKGRRKKKKGNAPRFDLRALLFRMTGVDLTQIDGIDVMTAMTIFSEVGWDMSKWKTENHFVSWLKLCPDNRISGGKIIGKGRMPTNNRATTALKLSASTLRESKTYLGAQFRRFRSRLGPPVATKAMAAKLARLVYRVLRHGMKYVDQGAEKYEFQHRQHQINSLKRKAMMLGFQVIEAPAA

SEQ ID NO: 126658 - protein, 343 aa, unidentified
MKDTIYDHYIAIDWSIINMAIARMTKKSNKITAIDVPSDIEDLQAYLKNLRGTKILTIEETTTSQWLYTELKEFVDRILICDPNRNKLLDEGPKTDKIDASKLVQLLKAGLMKEVYHSADKFLYLRRIVSGYEDLVKAGVRLKNQRYALLRACGKNGYEKTGSTLDYQGAQFVLGCSDRQIEAYEEEKEGYEKEFEKLARTHPEIRHQKSLPGIGTINAVKIAARVVTPYRFADKGHYLSYTGLIKLEKTSGGRSYGKKNPRYSRQLKSVYKSGVLAAIQGNNPINDYYTHLIQEEGYPEHNARQKACRRLAILSLGVFKSGKKYQPYRRDHVKGSKEGTSGL

SEQ ID NO: 126659 - protein, 362 aa, unidentified
MKGNRNVNQQRMAEPTSECTIGLDLGDRWSRYCVIDSRGVVVKEDRVRSNPEALEETFRVILPCRIVIEAGTHSPWVSRLLERLGHQVIVANARKVRLIYQSDRKNDRLDAQMLAKLGRVDVSLLAPVQHRSAEAQTDLAVVRGRDALVSARVQLINAVRGLVKAMGGRLPASTTAAFAGKVASLIPPPLKQALAPLLKSIQHLSEQIHRCDRQVEELAGKKYPQTRLLQQVKGVGPLISLAYVLTLENPARFAKSRMVGSYLGLQPKQSQSGDSSPQLGITKSGNGFLRRMLVQAGQYILGPLAPDCRLRRWGLELSRRGGKNSKKRAVIAVARKLAVLLHKLWVTGEAYEPLYGIEAAAA

SEQ ID NO: 126660 - protein, 419 aa, unidentified
MSFKILKNNCCGLDVHKTWIYACIGITDSLKRTEYKEARFSSFTKGLNELCEWLSKHNCTDVCMESTGKYWIPVFNVLEKNNIWVTLSHPKYTKPQKGNKTDRKDAKWICDLYMCGMVKPSFIPPADIRELRDLVRYRFKLTCMITGEKNRAHNCLTVSNLKLDDVFSDIFGKSSRSITEQILQHPGETFDVAPFVDGRCKTPVEEIQAAVDGAISKEQAVKLRQCLNHIDELEMHKAEIEREIFRLSDKYESVLSLIRTVPGFDKTPMTAIQVLSEIGGDMSVFPTAKNLVSWAGCCPRNDRSNHKIKFTRISRAGSYFKPVLVQIANALIKSKKHPEFTTRYRRIKARRGHKKAIIAICRMILTAIWHILTDLKPYTPEGFLESRPVKNEKVLSTSQALNLLKQRGYIIKDEPLTTS

SEQ ID NO: 126661 - protein, 370 aa, unidentified
MEKYKYVGLDVHKETIAVSVAEPDGGEVRYLGEVANTADSVVKLVKRLRKEGAKLSFCYEAGPCGYGLHRQLLDLGQVCQVVAPSLIPKKPGDRVKTDRRDSLNLARLHRAGELTAVWVPDGAQEALRDLTRAREDMKHIQLQAKQRLLGFLLRHGKRFEGKANWTQAHFRWFEEVKFGQPVQQIVFQEYVDSVQAITRRVAALDEQMESAAKDSVFWPVIEGLMALRGVKLITATTIVAEIGDLRRFANAPQLMAYLGVVPSEHSSGESKSRGGITKTGNGHVRRVLVEAAWQYRYPARKTAVLQRRAERASEQVQEIAWKAQKRLCARYRLLEARGKLKVQVCIAIARELAGFIWAIGQALPQPVARA

SEQ ID NO: 126662 - protein, 431 aa, unidentified
MNYNQNSKIAQITSETLIIGVDIAKFKHVARAQDCRGIEFGTPCYFENSKDGFADFIKWITLIMQEQGMNKVVVGMEPTGHYWLNLAHILKENGIKFVAVNPLHVKKSKELDDNSPTKNDVKDAKVIAQLVKDGRYAEPTIPQGVYAELRVAKKIRDLLTEDQQTVQGQIHNWIDRYFPEFLTVFKKWEGKAALQFLKLYTLPHELVNFSDEELLIHLRKAVKRSVGLSKIQELKQAAGKSIGLKQGATMAKMELKTLIDKYELIQIKFEELDSKIDTLIDQIPGVQQMLAIKGVGRDTVAGFFAEVGDLSEYSHPRQLIKLAGLSLKENTSGKHKGKTTITKRGRKKLRALLFRVCMILVAKNSAFKALHGYYTQRPDNPLKKMQSLIALCNKLIRILFAIGKKQFEFSEEKMLMDIPHMQDLRKLNEAA

SEQ ID NO: 126663 - protein, 391 aa, unidentified
MIFIGIDAAKDKHDCFIANSDGEVLCDVFTISNTLTGFNDLLSKIKSFSKDLSKTKVGLEATGHYSYNLLGFLLDTGLPTYVLNPLHTNLYRKSLSLRKTKTDKVDARTIASMLMSCQSLKPYTRALYHNEELKSLTRYRFDKVSERAKLKTSVSRLITILFPELEKLVSVVHCISIYALLSEFPSAKHIANANLIRLTNLLYSASKGHYNRGTAIRIREAARNSIGSVMPAKSLELKHTIKLIGELDDEISEIEAAIKQIVDSLGTTILTIPGIGYATAASILAEVGDFSNFETPDKILAFAGMSPSTYQSGQLSNCYAHMEKRGSKYLRFALYNATKYVCKWDSNFAAYLAKKRSEGKHYNVAISHAAKKLVRLIFALEKSRLPYMPVA

SEQ ID NO: 126664 - protein, 346 aa, unidentified
MDKITAVGLDLAKQIIQVHGIDAAGRVVLRKAVRRERLLALLAQLPRCVVGMEACSGVHHWARELRRLGHEPRIMAAEFVRPFRKSLAVKNDANDAEAICTAVVQPNMRFVSIKSVEQQALLSLHRIRQGLIEERTATINRLRGVLAEFGVVLPQSAAVLQRALPAVLADEGRLPALVQRSVQVLREHLHDLDSRVAEFDRDIAQHAKSSAPAQRLVALSGVGPLTASAVVATVGNAQDYRNGRQFAAWLGLVPRQYSSGGKSKLGRITRRGDAYLRALLIQGARSTLQAALRRAPTRHDRLSAWIVQLAQRVGYHKTLVAIANKHARIIWALLARDQALNLAATH

SEQ ID NO: 126665 - protein, 373 aa, unidentified
MPLHAERVHGVLPKGAPQFLEGKDNDMDVYIGLDVSLASTSICVIDKKGKIVTEAQVASTPEALVAFMGKLEHEIAAIGLEAGPLSHWLHKGLTDAGFEAVLMETRRVKAALKAMPIKTDRRDAEGIARLLQMGWFRPVHCKTVSSQEMRALLTSRRSVKDALTDMELSLRGVLRNFGLKLGQVSKGRWEARVRELTAGNPVLEAAAEPILRARAALRRELAGLEKLVRDLAREDPVCRLLMTMPGVGPVVALTFTSAIDDPERFRRSKDVGPWVGLTPGRDQSGERDIVGGITKCGDAGLRAALYQAATSMLNGTAGPNWLKAWALRLAKLRGKKRATVALARRIGVVLHRMWRDGTEFRFTREEAMALQTA

SEQ ID NO: 126666 - protein, 401 aa, unidentified
MRSIGMDVHRSFAQVAVVEDGLCRDEGRIGVKPEDLREWAMTLEPDDEIALEATTNSDAIATMLRPLVAHVVVSNPRKTRAIAEAKVKTDKVDARILAQLLAADFLPETWVADDQTRMRRRLVARRTQLVRQRTRLKNQVHGILSRNLVPTCPHADLFSGVGRKWLFAQDLPADEWRSVEALLRQLDFHGDELAAVERDIAIDALDDPVVARLMTIPGVDVTVAVSVVAAVGDFSRFPSPDKLVAYLGLNPKVRQSGNSPAMHGRITKAGRSQARGMLVEAAFSAARAPGPLRAFYNRIKTRRGFQVATVATARKLTVLCWHLVTKNQDYAFARPSLNAHKRRKLELAAGATSRRGPTAGPSRDYHLKQLRDAEQALVEQQERAYEVLVAHWHAKRPAANG

SEQ ID NO: 126667 - protein, 346 aa, unidentified
MKYCAGLDVSVKETAIRIVDEAGKIFREAKVVTEPEAIVGLLNAAGLEYMRVGLEAGPMSQWVVAGLLEAGLPAVCVETRHMKAVLKAQQVNKSDRNDARGIAQMMRVGLYKAVHVKTLASQQERMLLTSRKLLGDKLQDMENELRGTLRNFGLKVGVVSPGHFEARVQELVAGHPPLAAIVAPLLVVRRVLRQQLALLHKMVLDQVRSDRLCRRLMTVPGVGPIVALTFRATVYQPQRFARSKAVGAHFGLTPRRFQSGETDYDGRISKCGDAMMRTALYEAAQVLLTRTQKWSWLKAWGMQVARRRGGKKAIVALARRLAVILHRMWTDGTEFRWHKPVNTAAG

SEQ ID NO: 126668 - protein, 393 aa, unidentified
MKSQESGRVVVGMDPHKRSVTIEVMTADESVVGGGRYDTDVAGYRAMLKYLRAWPDRVWAIEGCNGIGRHIARRLIVDSEQVVDVPPKLSARARLFATGQGRKTDATDAHSVALVGTRMTGLRPVVADEQREVLRLLVDRRRALGEEHTRKVSQLHALLLELIPGGAKKDLSAAQARRLLATVRPRDVVGKTGKRVAMELVVDLEKIYARTKAADKELKQLVKATRTGLLDLHGIGPSGAARLLVEVGDITRFPDRGHFASWTGTAPIDASSGDHVRHRLSRGGNRQINQVLHIMAVVQLRNPTEGRAYFDRKKSAGKTSMEAMRCVKRRLSDIVYKTLLDDLVTAQKTGPGGQPGNVSVSSVTGSQPSTGSSDKSLPEPATTDPRPTLPTVS

SEQ ID NO: 126669 - protein, 385 aa, unidentified
MTQFARLTPSAADYDSTIIGALELSEKKWVLAVQLPGVKRHSRHVVEARGDELAAFVERLKARCAVAGHNIKRVILTHEAGRDGFWLARFLVRRGVEVHVMQPSSLPVDRRARRAKTDVIDVEMLLRTLMAWLRGEPRVCSMVPIPNEADEEARRAHREREELTGERRSIVNKIDGILATLGVKGFRALRRDRRDQLTSLRQPDGEPVPQMAHARIERLLDRLELVLKLIDEVEATRDAVLKKVAPADDAERMIRSLANLRSIGPDFATLLVREAFVREFRNRRALGGYVGLGGTPFSSGGSEREQGIGKDGNRRLRAAMVELAWMWLRWQPDSALANWFRARLGQPGSRIKKIMIVALARKLLVALWRYVKDGVIPEGAKMKTA

SEQ ID NO: 126670 - protein, 343 aa, unidentified
MGEVSTIGLDIAKSVFQVHGVDGTGAVVMRRRIGRSKVLEFFGGLSPCLVGLEACPSAHFWSRELQALGHTVKLMPPSYVKAYLKRGKNDANDAAAICEAVTRPSMRFVPIKTQEQQTGLMLHRTRQLLVRQRTMLSNAIRGHMAELGIISAKGRNGTAELLQIVGDVADDRIPPVARFCLDLLARQYLTLNAEVYAVDKRIHAWHRACEESRRLEEIPGVGPIVATALVAEIGDWRAFRSGRSLAAWIGLVPKQHSTGGKERLGSITKQGNRYLRWLLVTGAMAVIRYARAHGTKRPWLTRIMDRRPAKVAAVALANKIARMAWAIMVRAERYKEPKLLLAA

SEQ ID NO: 126671 - protein, 428 aa, unidentified
MKKHSFSKLEAITPDTLIIGVDIAKNIHWARFTDYRGITLGKALKVLNNKEGFENILTRIKGVCKQNDLHKVILGLEPTGHYWKPLAYYLVNHEIKVVLVNPYHTKRAKELDDNSPTKNDKKDALTIARLIRDGRFSQLYLPRDVYAELRVLANTRVSLLKRNSSLKNNIRTVLDEYFPELVTVFKCPLGGKACRQILKSCPFPSLILKLGRDKVITQTKKAVKKTIGQKRVEKLFEAAEGSIGVTYGIKSARLKLTMLIEELELLEKQLDQLEQSMQQALINTGLKEIILSIPGVGIISAASFLANTGNPLRFTHPRQISKLAGYNLIEDSSGEHQSKTIISKRGRKQLRNVLYQMARTTVAVNSEMKVLYYYLKTRPRNPLKRKQALVVISKKIITIIHSLLKKKSRYQKELVFNQFRLNQLKQVA

SEQ ID NO: 126672 - protein, 368 aa, unidentified
MKQITTYVGIDAHKKDLYIAMLIGDAVNPVTWQLANEPQAVRRLVRRLERDAPGPVRVFYEAGPCGYALQRQVTTTRVRCDVIAPALTPRKPGERVKTNRRDARKLVELGRAGLLTTVQPPTCEDEAVRDLARARDDAREDLQRCRHRLGKLLLRRGLHFSGRNWTRAHRQWIDTRVWTYAAERAVVDDYLLAIDHTEARLGALDARLAEIAATEPYREPVGWLRCFRGIDTLTAMLILAELHDFRRFASAPALMAYLGLVPGEDSSGEHHRRGRITHTGNALVRRLLVETAWHYHHRPSVGVALTRRRTGQPGRVIAIADKAQQRLCRRFRTLAAEHKPAPKIAVAIARELAGFLWAALQPGPANVN

SEQ ID NO: 126673 - protein, 437 aa, unidentified
MGSDTIDKDFDKACGIDVHRDLLVATILDRGGGKVQGTFSAGYESLSLLKEWIVANGCRSVAFESTGVYWRQLYRVLEPCCSVVVANPRKIKKPSKKKTDRVDSEWIAQLCLNDMIEPSRVFGGVREQLRELTRYRETIVVCIGQFKNRVHKLLSSCCVTLSSVLSDIFGTNGRKILKLVLAGKSVDTILKSIKSKKVRDKEEQLRHALASCLDPLSVRTIQDCLGIIETMEELLDQVDERIRLVVEPWMQEIGVLCSIPGISFVSATTILAEIGEVKDFPSPDHLVSWCGLAPSVYQSAGKLVTGRITKQGSKHVRRMLVQVAHVTARMNNQLSAFYHRISEKRGKKKAIVALSRKLLCIIHHLLINNEKYEEPGKKPKTVKPPKKKDQEPELDLDKAIKIIAKAGKAVIDLYNIKTLKNESQEAYNTNHTTQTTP

SEQ ID NO: 126674 - protein, 435 aa, unidentified
MTEARLQTGIDFGASWVDVCLLNPAGEPLLAHQRFLNALPGYEAVKQLLVETLTARAYTGLDISGEATGMYWLPFFLHLASDPDLAAYDPQLYLLNPRWVAWFKKCFAQDDKSDLKDPYYIAERTRVRRPPVAWQADPPGLALRSYTRYRFHLVEALAREKCFFCAYLFLQANAYRRLKPFSDTFGVTSRAILQEDATLEQLAALPVGDLAARLSELSHGHLPQPDQNAVKLQPVARESFSLDPQLAQAIQHILTATLAHITFLEGQIQQAEAWITTALAAYPPIQQLLTLPGYGPVYSAGVGAEIGAVHRFLAGQKWDRQRTRYRPKNLRDAEDAIAKIAGLWWPQSQSGSFAAEDRHMSTAANRYLRYYLIQGADHLRKRVPEFQRFYARKYAEVPKHKHKRALVLTARKSIGVIVGLLHRNEPYRSEEERRT

SEQ ID NO: 126675 - protein, 355 aa, unidentified
MTMSADDYEYVIGGDPDRDTIDLAVLDTATGSPRAHIEASADGPGYARMLQWAERYAPGRRVWALEGTGSFAAGLAAALSQAGEDVVEVGGFRRARGAKNDRLDAIRAARNAMARQLQASQRARGLRDGIRALSVTRQAVLVSRTKAINELKSLVVVAPEHLRADLRGCSLAKQLDRIEAMTAPDGSAVEHRITIVTLQSITARIRFLSGQLAALDPVLGQLIRQHPAGPALLAEPGVGPIVAAQMLVSWSHPGRVRSEAAFASLAGVAPLEASSGLRTRHRLNRGGDRALNRALHTVAITRMRCHPETRAYEAKRTTQGKTHRDIRRCLKRSIARRLYRVMESAARANTAPAAA

SEQ ID NO: 126676 - protein, 358 aa, unidentified
MTPDFTPNEWFIQCVGIDIAKSTFTACMCMSNVSERQMSEVVTFSNTKQGFNQLVKWARKEAVKGYPIRFLMEATGVYYESLAYHLYRLKQPVYVVLANKVHDYAKYEGVKTKTDDVDARVIARMGCADRNLYAWEPPAPVYRELKQLSRTYAGLKKIRTALSNQLEAVTHAEETLPSIIKHYERAIAEMDKQIEQVQKEIRKKVEQDSSLSAKIKRIATIKGLGEDTIAAIVAETNGFAFITSRKQLASYAGLDVRAHASGQQDPKRHISKHGNVRLRYLLYMPTLVATRYNPSIRLTYERINMRNQNAKRIGVIAAMRKLLLLVYTLWKNGEEYDANKLNNYYKKEVNSACCDLAR

SEQ ID NO: 126677 - protein, 339 aa, unidentified
MKSTPVGVDIAKQVFQIHYVDEHSGKVISKTLSRAKFVSYFVNRPSCLIGMEACGGAHHWAREFQKLGHEVKLMPARYVKAFNTGNKNDAADAQALWRAVQQPCKGVAVKSEAQQAILALHRMRAQLVKFRTMRSNSLRGLLTEYGEVMARGRRALDSAMPTLLVRLAERLPAMLVQMLSEQWQGLARLDEQIEAIEQQLNAWLRETPAVRRVAAIPGVGVLTATAVVASMGDPGAFGSGREFAAWIGLVPRQTGTGGKVRLLGISKRGDTYLRTLLIHGARSVLQHAKDPGAWVRQLQCRRPANVVTVALANKMARIIWALLAHGREYRREHVSMLDV

SEQ ID NO: 126678 - protein, 388 aa, unidentified
MLYVGLDIHSKRISICVLNETGQVVHRSQVRTIDQMMRIFEGLPDRFEVCYEASCGYGHFHDMLRPVAARVLVAHPGRLRLIFRSSDKNDRKDAERLAKLLYLGEAPAVHVPSQEVRTWRELINCRSQVIAKRTRAKNTIRALLRSAGESPPRRPSLWTKKGVAWLRDLNLPTTSQQLRRDLLLEEIETLNRQLRRLEQELNRRAQQTPAVGQLRSIPGVGVRTAEALAAFVDDPHRFRRAKSVGRYFGLVPRQDQSGDKNRLGHITREGAPVVRRLIAEAAWQARRRSPTVRAYFDRVQHGDPQRKKIAVVATGHYLVRVMWAMLKRGTHWQENPTLPKPTPAPARQQQGAPMPLASSRVRRQGPAGLTERATPGDSETSGRGQRGP

SEQ ID NO: 126679 - protein, 343 aa, unidentified
MDHFAGLDVSVKKTSVCIVDDTGKIVREVKVASEPEALLAVLKNPAYQFKRIGLEAGPLSQWLYSALAEAGMPVICVETRHMRAVLKAQINKTDRNDARGMAQMMRVGLYRPVHVKTLRSQKLRMLLTHRQLLLSKAIAIENDLRGTLRNFGLKVGMVGKVKFEARIRELVETLPDLAVLVEPMLIVRRVLREQIVILHRRLLAVVRDDEVCQRLMTTPGVGPVVSLTYRATVDIPARFRKSKSVGAVFGLTCAKYQSGEVDWDGRISRCGDEMMRTMLYEAAQAMLRSKKWSWLKAWAMQIARRRGIKKAIVALARRLAVILHRIWVDGTEFRWTREQAVAA

SEQ ID NO: 126680 - protein, 337 aa, unidentified
MKVARVGLDIAKTVFQVHGVDMQGKTVLKKTLSRGEVLAFFANTPASLIGIEACAGAHYWARELIKQGHDARLMAAQFVSPYRKSGKNDANDAEAICEAVGRPNMRFVPVKSEEAQAVLAVHRVRALTVSERTALVNQVRGLLGEFGIVIGQGIAQARRLLGEIGAGGRQLPPLARETIGDLHDRLRTLDERILAYDRKISALAKACEPARRLMAIEGVGPVTATALVASVGNASTFKSGRQFAAWLGLTPRQNSSGGKTKLGSISKRGDVTLRTLLIHGTRSVLRLTTGRTDRKSVWAEALKERSCTNVAAVALAAKNARIIWAMLSRGTEYQVAS

SEQ ID NO: 126681 - protein, 386 aa, unidentified
MQKLNDLSRSLTALEPDGTLIAVIEMSLSNWLVAGIVPGVERQPLKKLALDESALLKLLHRWREEAEKAGRRIERIAVAFEAGRDGFWLARWLKARGIEAYVVHASSVAVSREHRRAKTDRLDTELLKRSFLGWLRGERDHCKMVEIPTMKDEDAKRPNREHDSLIGERSRIVNRMKAALVRLGIRGFNPKLKRATTRLDGLRTPEGEPIPPNALAELRRDMERRRLVNNQIRQIEEERLKRIEQAPCDGPHVMVRLLARVMGVGIETADMLVHEVLSRNMRDRRAVARYAGLTGSPDESGRKRREKGLARSGNTRVRRGMIQLAWRFLLHQKNSALTKWFRSRTENARGTRKPMIVALARKLLIALWRLVREGIVPDGVVLRAAQ

SEQ ID NO: 126682 - protein, 404 aa, unidentified
MWYVGLDWADTHHDVEVLDEAGKRVGVRRFAHSHEGLHELHQFLLSIAPSPEELACIVETTHGRLSCFLLEAGTPVYPVNPKLANQLRKVAGAKTDRIDAHLLAKLGRLDLAELRRLEPDSPTVAELKTLTRDQDALIQTQTRLVNQLTACRKRYYPAALHLFGKVQQRSTLLFLQAYPTPHAVASAPVEELTATLRASRHTNPTAAAAKIFEEVHRPHLVATEVVVRTKSRLMLSLVKQLLVVIEEIKSYEEAIRTLFLTHDDQELWRSLPGAGKRLAPRRLPEWGDDRTRYADAASVQALAGTAPVPFESGNYTKAHKRFACSKPLRNHLHQFAWQSTRQEAWALAYYQRKRAEGKTHSMALRCLANIWVRIIYAMWVSKTSYQAATFEAAKQAHAPRQSAA

SEQ ID NO: 126683 - protein, 340 aa, unidentified
MKLYGAIDLHSTNNVTVVIDEQDGVVYQKRLPNDLALILKQLSVYQSELEGIVVESTYNWYWLVDGLMEQGHKVHLANTAAIQQYEGLKYTDDHSDARWLAHLLRLGVLPEGHIYPRAERPVRDLLRKRSQLVRQRTMNLLSIQNLMTRNTGSSLSANRVKGLDVPQVDELLTNPDLALAVKANLSVMGSANEQVEVLERTVTQRIKLRPQFSFLKTVPGIGEILALTIMLETGDIKRFCSVGNFASYCRCVGSQKISNSKKKGKGNTKNGNKYLAWAFVEAAHFAIQFNSKIKSFYQRKKAKTKGVVSIKAVAHKVCRACYYIMRDRVAFNVTKAFGQN

SEQ ID NO: 126684 - protein, 389 aa, unidentified
MKIFVGIDIAKLNHFAAAISSDGEILLEPFKFTNDADGFQLLVSKLESFDKNSIIIGLESTAHYGDNLVRYLVAEFYQVCVLNPIKTCQMRKNNIRKTKTDKVDTFVIAKTLMMQDDLRFITFFDLDMMDLKALGRFRQKTIKQRTRLKIQLTTYVDQVFPEIQYFFKSGLHQHAVYALLKEAPSPKEIASMHMTHLANLLKVNSHGHFTKEQAKELRVLAQKSVGANDSAISIQITQTIQQIELLDSQLDKIEAEMTDIMKFNDSVIMTIPGIGYINGGMILGEIGDIHRFSNPNKLLAFAGLDPSVYQSGNFQAKTTRMSKRGSRVLRYALVNAAWNVVRNNATFKAYYDAKRAEGRSHYNALGHCAGKLVRVIWKMLTDEVEFNLE

SEQ ID NO: 126685 - protein, 357 aa, unidentified
MSNIRETVDFSGEQINVGIDVHLKHWNVTIFHNQVYLRKFQQESNPGILIKHLRHHYPNANFRLAYEAGFSGFWAQRIFSESGIDCLVVNAADVPQTDKGIRTKNDVNDSRRIGAALAGGMLEGIYVPSLIQESDRSLVRYRYRIARDLNRCKSRIKSLLYKFGITIPPIFTKGKWTRGFLLWLKSTQLGFEHADLTLERMIRQVEYFQGQLLEISRDLRALLRSTVYAQQASLLMTVPGIGALTALTLLSELGDVKRFRTFYQLNAFVGLCPTEFSSGDSERVGPLTPRHHSLLRSLLTEAAWTAIRLDPAMLLAYNEYKKRMSGKRAIIRIARKMLNRIYYILLKQQGYEKGIIK

SEQ ID NO: 126686 - protein, 322 aa, unidentified
MSYVMKPTAIFGADIAKDEVMVQRHGESAKQRLPNTPKPLSAWLAQLAPGALLVMEATNTYHEMLATLAHAAGVQVVVLNPRCTWHYARSLGVRGKTDRVDTDTLTDFGATQWQRLHRWEPPSAGNARVARLLRRRGKLVHAKVALGQSLSAVKELSSVRRQIERALARMIDRVDLLIVKAVSQDEQLAPLHRLLQTIVGVGPIVAAQLAQALTRMRWRNEDAFVAYTGLDPRPKDSGTHRGRRKLTKYGPPMLRHLLFMGAMAAIKTALYKPMYRALRDRGLETTQALVVVARRIARIAFAMFKTGQPFDPSRLSPAPQNA

SEQ ID NO: 126687 - protein, 355 aa, unidentified
MLSTKYIGMDIHKETISIAVISAGGKSVMECVVETKASTILQFIHGLRGDLHVTFEEGTWAAWLYDLLKPHVTEVLVCDPRKNALLKRGSKSDKIDARKLAELLRLKHLKPVYHGEHGVRTLKELARSYLTITQDLTRVRNRLKALYRSWAIPCSGTQVYTLRHRSEWLGKITEAGVRRRAEHFYQQFDALRPLRQEVRRDLLTEGQKHKAWKLLRHIPGIGAIRATLLIALIQTPHRFRTKRQLWNYSGLGLETHDSAQYCVVEGQVQRSKKPLMLRGLNQNHNHDLKAIFKGAALEASSGAGPFHDFYEALLTKGRKPSMARLTLARKIAAIALIVWKKEVSFDAKHLKQQAA

SEQ ID NO: 126688 - protein, 420 aa, unidentified
MKPWSELTHFAGFDWAKEHHDVVVVDKSGGVVAEFSFENTAAGWQQYYDRMRAYPAVAVAIETCQGAAVERLLQGDATVYPVNPKSAERYRDRKGAAGAKSDRGDAWSLADALRLDGHTWRALVPEDPLIQEMRQLCRDEVALIEQRTAFVNQLRQALYEYYPAALEAFDDWTKPYAWAFIEKFPTPQALAKAGRRRWNTFLHTHKLYRPETYEMRMECFARATEFCGTAPTTAAKSLLAVTLAKVLRALEHQLKEYRRKIRALFDQHPDSKLFGSLPGAGDKTIPRLMSEIGSDRARFDNHEALQCYAGSAPVTYQSGQMRKVRIRRACNKHLRYAVHWLSDLSRQKCPWAQTYYQQKRRENKSHACALRCLGQRWLKIIWKMWQTGTPYDAELHQRNQIKHGSWVLHLAGTPQSASAK

SEQ ID NO: 126689 - protein, 413 aa, unidentified
MTSNIITAVGIDVSKGKSMVAIRRPGGEVVQMPFEVKHNTSNLKDFIQLLRQTGGNIRIVMEHTGIYWYPIARTLNDAGFFVSVVNAILIHNFSDNSLRKVKTDKADALKIANYALSFWDELRQYAPEEETRLLLKTQNRLYKRTTDAGVVLRNGLISLLDQTFPDANKMFASSYRNTSGHYKWVDFVKRFWHRDCVAGVSERAFSESYAKWCAKEGYQYSESDVTRIYSAAKQSVAVFPKSDSVRAIIIQSVESLNAVYDSLQVMRDEMDRLASLLPEYSVVMDMYGVGKITGAQLMAEIGDVRRFKNKAALVAFAGVDAPPYQSGSFDAKSRHISKRGSPHLRRTTFLICSAVLQNSNLDNPIYTFMDKKRAEGKHYYVYMVAGAAKLLRIYYARVMEHLNSIDLTVSLSA

SEQ ID NO: 126690 - protein, 354 aa, unidentified
MTSTKYIGLDVHKESISIAVLNFAGKVVMECVIETKASTILQFIHGLGGDVHLTFEEGTWAGWLYDLLKSHVTELVVCNPRKNALLKEGSKSDRIDARKLAELLYMSKLRSVYHGEHGLRMLKELSRSYLTITKDLGRVMNRLKALYRGWAIPCAGTQVYAPHYRSEWLAKIHEAGVRRRAELYYQQLDALRLVRQQARKELLAEARKHRATKLLRQIPGIGPLRAAHLVALMQTPHRFRTKRQLWTYSGLGLETHDSAQYRVVEGQLQRSKKPVTLRGLNDNHNHDLKDIFKGAAMRASTVAGPLRDFYEALLAKGRKPTMARLTLARKIAAITLIVWKKEVRFDANYLKKAA

SEQ ID NO: 126691 - protein, 338 aa, unidentified
MRLYAGIDLHANNSYLAVIDETDELVEAKRLPNDIESVRRVLEPYRENLAGIAVESTFNWYWLVDGLEESGYKVHLVNTLAAQQYKGLKYTDDKTDARWLAHMLRLGILPTGWICPREKRAVRDLLRRRSQLVRQKTANRLGLRNVLERSGAKRLSGNALKRVSENDLTEWIEDPNVRLSMQASLAVIDTLSEQIERIEKTVAEHAVLDDSYRLLTSIKGIGATLASTIQYETGDIGRFSAVSNYVSYCRLVRAERNSNQRVKGLGLRKNGNAYLSWAFHEAAHFAVRFQPDARRWYEKKRSRTCPLVAIRALAHKLARAAYFMMRDQVPYEPKRLFG

SEQ ID NO: 126692 - protein, 411 aa, unidentified
MHERQKHFYVGVDLHKQHHVAVIINCWQEKLDEIKFENKPSAFSTFLRDIYKHMDDGLTPIFGLEDVGGYGRALAKYLADHEQIVKEVNPALSYAERKSNMTTQKSDSWDAECVARILVNKLDQLPDAKPHDLYWSIQQLVSRRNALVKAQGALKNQLHIQLSHHYPSYKKFFSEVDGKTALAFWKRYPSPPCLEGLSVKQLTIFLLEASSNTCSVKKASEILKLVKEDGNTIREHQETRDFLVKSIVRDISFKKQEMRYVERELKGLMSLLDFQLDTMPGIDLVTASALIAEIGDVRRFPNANKLARFAGIAPVYFGSGGKGREQKSKQGNRALHALFYNLAVQQVQVAKGSKLPRNPVFHAYYQRKLKEGKTKGQALVCIMRRLVNIIYGMMKHKTAYKLPIMKEEEVV

SEQ ID NO: 126693 - protein, 313 aa, unidentified
MAQIVPCVGIDVAKEWLDVAIHPDGTLFRVGNDAAGWHELCRRLRPLAARAIGIEASGGYERGAIAALLQAGLPVRSVNAWKLRQFAKAADFLAKNDRADARAIAFFVATLPTRPAQRDPAGEHLVELVQARRQAVDLRQEIGNQLEHLRDAELRRMSQQRIRQLDLDVARLDRRISDAIAAVPAFAQRHRLLCSMPGVGPVLAATLLALLPELGSAGNREIAALVGVVPYDFESGKMKGLRCIFGGRPAVRRVLFMAAQAAAMCNPTLKAFKQRLRDAGKPPKVAIVAVMRKLIVMLNAMVRDNAPWHAAAA

SEQ ID NO: 126694 - protein, 422 aa, unidentified
MKKIETKKLKFVNDKTLIATVDIGKGLNMGYARCPDHSEVKPFEFANNRAGFDKFWDCLEKARDAKSLDSIVVGFESTGAYGEPLQHFLKNNPVRLVQVNPMHTKRVKELQGNSPNKTDRKDPKIIADIIELGHSLTVVIPEGAAAELRRLTFARERANKRCTALYNQLQDLIFISFPEFSQVIKDVKTKTARYLLQTYPDPQDIIALGLENLGTVVKRVSRGKMKPAKAKGLFEAARTSAGITEGRFSVALEIQATLAAITSSDDFVSRLEKEMSRHLEDIPYSHLLLSMKGIGRVTVAGLIGEVGDFNSFDTQRELLKYAGFDLFEISSGKLRGSRRISKRGRPLLRKLLFFAALNTVRKGGVMHGHYQRHLKKGMKKIKALVAIARKLLGIIFALVRSKQEYQEDYQKIQAAATMPMAA

SEQ ID NO: 126695 - protein, 389 aa, unidentified
MIYVGIDVAKDKHDCCILGSEADKLYPVFTIPNNKTGFDELYEKIFSVTDDKTEIKVGLEATGHYSLNLLGSLIDKGLPTCVINPLHTNLYRKGLSLRKTKTDKVDAGSIAMMLMTDKTLKPYSDTSYHSEELKSLTRYRFDKVQERAKLKLSVARLINILFPELEKLVPNLHIASVYALLSEFPSASYIAESHLTHLRNVLETASKGRYGRDMAVTIRDAAKDSIGSVMPAKSMELKHTIHLIEVMTDEIDEIEASIKSIMDTCNSPIMTIPGISYRMGAMILAEVGDFSRFSNADQILAFAGLSPSTYQSGQLDSSYSHMEKRGSRYLRYALFNATKYVCHWDENFGAYLSKKISEGKHYNVAVGHAAKKLIRTIYRMELTGEAYRK

SEQ ID NO: 126696 - protein, 408 aa, unidentified
MNTLYVGIDVSSKSNVIYLMLPNGDKHSNFSVANSHEGSTQLVKRILSALTSHSLDTVLIGLEATSVYGDNLVYFLREDATLAPFNRKIHVLNPKQVKKFHDAYNDLPKNDYVDSFVIADCLRFGRINKEVYMGDYRYKALQNLTRARFFAVQNLVKEKQRFMNVLFKKYSTMTQEKVFSDTFSTTALAVYDEFESAEALANMDLHELTDFIIEKGKNRFPDPDAVAKAIQKAARSSYRLPKTVNDSVNQVLSISITSMKALESQIKEFDKAIKAQMELLPNVLISIPGIGPVYSAGIMAEIGDINRFNSQAALAKYAGLAWKQHQSGGFEAEVTRLIPSGNRFLKYYLCEAAFSLVRCDKEYSDFYHLKYKEVNRCQHKRALALTARKFVRLVFRLLKDNRLYCPAK

SEQ ID NO: 126697 - protein, 337 aa, unidentified
MRTVYFIGIDISKAKLDYTLCREGEFIKHSKIDNSPSAIRLWFKEMKSAYKAGGQNTIFCLEHTGPYGDVVSRTLDKLNARVWLESPIQIKRSLGLQRGKSDKIDSRRIADYAFHFQNKFRQWQKPSKSIDKLRHLLNLRKTVKGQLRQLMTSKGESIPPHNKSLQKEIGRLCQQILIALNAGLDKINLEIKTLIKNDSELNHLFKIVTSVSYVGEVVAEELLVCTNGFKNFTSAKKFACYCGIAPFEYSSGSSIHKKMRVSKISNKRIKSVLHMPALASINRNAEFRAYYERKIAEGHAGMSVLNAVKNKIIKRIFACVRDDRLYMKEREVNKLVN

SEQ ID NO: 126698 - protein, 339 aa, unidentified
MLIIGCDFHPSFEQIAFCDTETGECGNRRLEHGGEAEAFYRERQGQAVRVGMEATGSARWFERLLADCGHQLWIADPAQVRAAAPRKQKTDRRDAELLLQLLLEERFPRLSVPTAEQRDARQLLLHRHRLVQMRTRVKNQLQALAMNEGVRQKRKLWSSKGRAQLQALALPTWAATRRQDLLALLDDLDRRVAILDGAVQQQAEASDVVRRLRTHPGVGPVVALAFQLILLDPHRFATSRQLASYLGLAPSEHSSGGRQRLGHISKQGNALLRGLLVEAAHVAVRFEPQWRRHHHRLAMKKNRSLAVVAIARKLAVRLWWMWKLGRDYGPMVGSGSHVE

SEQ ID NO: 126699 - protein, 359 aa, unidentified
MSIVTTFVGLDYHQDSIQVCILDREGKILCNRSVENDVAVVVQVATRYGRPRRMAIEACSGAADLAEELATKHDLPIDLAHPGYVARMKRSPDKTDYSDAHLLADLTRINYLPKVWLAPEPIRQLRRLMRHRAQLVRRRKDVKLRIRGLLRENRLKFTGASAWTKAWMAWLQNGAGLSASDRWLMDDHLTELASLATRIQAVEARIKSATADDPLVARLMTLPGVGLVTAATMRAEIGRFDRFDTGKQLARFCGVTPRNASSGARQADAGLIRAGSPDLRRVLVELGHRLLRTSDARWGNFAAGMLRRGKPKNVVIAAVANRWVRWLHHELRREPAVATTSAPARQKGSAPTAFAVTSA

SEQ ID NO: 126700 - protein, 392 aa, unidentified
MNRSNKKTNSKNSSNSQALKSPAPAASKAKTIKLGIDVHLDLFVVTRIIDGSTPQPAQRFKPQDFLLWCAKQLTLAEQVFSCYEAGPFGYTLHRTLEKMGISNYVVRPRDWDEYGQKVKTDKRDATALADCLDRHVSGNRRALGVVRVPTEAEEQKRSLARQRESLQKEKQRLAAQGRSHALYYGHHLQGEWWRDGLWERRVLPLSSIVVNLLEPLRRLIRAVEIELTARTRQVEAAAPAGRPVGLGKLTSAIVEREVADWGRFHNRRQVSSYTGLCPSEDTSSDRRFQGPINKHGNRRLRPVLIECAWRLAVFQPGYRAVQKWRPVLADPQAGKPRRKKAIVALARTFAVDWWRVRTGRCQAEDLGLRLKPVTAATPAAGPEEDQDNPFPQ

SEQ ID NO: 126701 - protein, 402 aa, unidentified
MSRPQVARQAPLAGSTDSRFFVDRCGAAGLGKLVAWLREHGVSVVGMESTGVYWMPVYAALESAGGFEPIVANAQHIKAVPGRKTDMNDAEWVACLVRHGLMRPSFVPPKAIRDLRDLTRYRRTLVEAQASERRRLIKLLEAADIKLAGVLSDVFGVCGRLILRAVIAGDQSAAAMAKLARGKLRQKRPQLFDALSAQVDPHRRGLLAMQLTRVEAAEADIAALDAQIAIHLAPYARQLGLLMAIPGIDRVVGATMIAEIGVDMTVFATAGHLAAWAGVCPGNNESAGKRKPTGARKGNPHLKTALCNAAIGASRKRDSFFKAKYHKLKSRRGGGRAALAIAHKLLVVAYHVLSTGAEYRDLGETYLDKRNAQRSAQRYVRRLENLGYTVTLNPVAQTANAF

SEQ ID NO: 126702 - protein, 338 aa, unidentified
MTIETLGVDIAKNVFQLHGVNCNGHVVFKRRVMRDQLLEVLAQIDRCAVVVEACTGAFYWARKFESLGHQVKVISPQYVKPLVRRQKNDGNDAEAICTAARQPHIPFVPKKTVEQQDIQALHRARQRMVNHRTAVVSQIRGLLLDRGFAIAKSITRARRLVPDILANFDNELTPMARDAIGEPYDLFRDLDRRIASFDKKIEQVFRNSETCQRLAKIKGVGPKTATAIVAAIGDGAEFKNGRHLAAWVGLVPRQFSSGDRKVLMGISKRGNRHLRSLLVHGARAVVRTAPNKIDLNNQWVNQLRERRGFNRATIAVANKNTRIIWAVLRTGEPYRAAF

SEQ ID NO: 126703 - protein, 427 aa, unidentified
MKMADLLSTLFVGIDVSSRENVVCFLDFQSQKPLASFSVPNNQPGASSMADRIVEFMHQHKDLSFVTVALESTSYYGIHIANYLSSCTLLLSFNISVYCVNPMLIHSYKKTFVGMSKNDYVDAFAIADFARVGKITSSPWRGSQFLALQRLTRHRLHLAKSLTSEKTYMLSNIFLKFSQFPILDKDSQPFSNKYGATAASVLTDFLSTDEIADMPLDKLVDFVSGKGKNRFSDPEKTAELLQKAARDSYRLDKCLYEPLTIALSSSFNVVKAYTKELKTINSAIEQNIKGLNPSAYTVLLSIPGVGPVYAAGIIAELGSIDCFKSQDALAKYAGLTWRESQSGKFKADETSMTRAGNIYLRYYLLEATTHLIWHDKAYAEYYHKKFDEVKLHQHKRALVLTARKFVRLIFGLLAKNQLYSQSRESLT

SEQ ID NO: 126704 - protein, 354 aa, unidentified
MKDKRYYVGMDVHKATTVIVVLDANGKQVMKMVVETASNRILEAIAGIKGEIHITFEEGIHSSWLYDLLKEKVNKLIVCNPRDEKLKSKGNKSDDIDAYKLAELLRLGGIKGVYHGQEEMRKLKELTRCYQYLVSDCTRVKNRIKAIFRARAISYKGDSVYQSSKREYWLGELKEEGVRNRAQYLYQELDVLINLSQQAQKAMVEEARKHKAFKILDSIPTLGEIRVALILSAMLTPYRFSSKRQLWAYSGLSVVSSSSSDYSIINGEIKKSKKQVLTRGLNQNFNRTLKTVFKSAASSVKKGALKNYYEGLLAKGTCQEMARLTLARKIAAIVLSLWKRGECFNSDKFITQTV

SEQ ID NO: 126705 - protein, 357 aa, unidentified
MTSSDAAGKARIIVGVDTHRDEHVAVAIDQLGARLGEHRLPTTSIGYEGLDCWAMGLGEVIAFGIEGTGSYGAGLARYLASCGRAVIEVSRPDRSTRRRLGKSDPLDAEMAARAVLAGVAKDSPKSGLDEVEMIRMLKIVKDSAIKARTQAINQMKALIVTAPVELRPRLAGLNARRLVSRCAGFRPGELVAPLAAAKYALRILAQRHSQLTSQIEGIDTEMVRLTAKAAPALVDVFGVGPDTAAALLITAGSNPERLRSEAAFAALCGVSPIPASSGKTNRHRLNRGGDRRANAALYRIVLVRLRYHEPTKEYMSRRTTEGMTKAEIIRCLKRYVARQVYAILRDIGRHNLGLSTS

SEQ ID NO: 126706 - protein, 325 aa, unidentified
MRQPKSQVKPLTQVGLDVSSQTLDAHIRVDGKAFSVHNTDAGFDQLCDMLSAYDVSMILMEATGGYEDNVACYLQLQGFDVVVINPRFARRFAQSMGRFAKTDRIDAAILAQMAFMIDSGPDRERYIKPVTDEQRKQLSRMSSRRRQVVDLITIEKQRLTHADEYARESINEIISLLNAQLKRIESDILRYVKKNFSELASRLLSIPGVGSQAVTVLIADLAELGHVNRRRISALLGVAPFNHDSGKFKGQRRIRDGRQSVRNVLYMGVIAATRFNPVIKAFYDSLLLRGKPRKVAIIACMHKLIRIINAMMRTGKTFDISMHGV

SEQ ID NO: 126707 - protein, 414 aa, unidentified
MESVYRSVAGIDVHKKMLAVVIRRQYGEQAEYQKRKFGTTRAEIQHLEAWLGAEGASEVVMESTAQYWRPVWYGLEPHFQLHLTHPLKTRAPRGRKSDFRDAQRLADRWCSGDLEESFIPGSEQRAWRWLTRTRVQLKKKLGVIHNHVEGLLEQGGIKLSAVVSDLFGVSGWAMLEHIAQGVTDVEVLAREARGALRKKDAELKEALVGRLEPVYRLLLRQHMDQVRMLRRQVEEINQALAEAMQEHVATLHRLSKIPGVDLYAAQELVAEIGPKAAAFASAEQFASWVGVCPGSQQSAGVNYSHRSAKGNRYLRRLLCQIAWAAIHTKDTFFAGLFARLKPRVEGKGAAWAVAHRIAKIVWLLLHQQVEYRERGSAPPNERTLVRKFKRLVKEFGSLGLDVRALLDQQLSAPS

SEQ ID NO: 126708 - protein, 347 aa, unidentified
MVTVGSDSHKRTHTFVAVNENGKQLDFQTFAATTPGHLEALRWAGQWPDRRWALENCRHLSRRLESDLLHTGEAVVLVQARLMATVRVTGRQLGKSDPIDALAVARAALREPNLPVARFEGKSREVKLLLDHREDLVAERTRICCRLHWNLHEIEPGVVLSDSALIRWCVMDRVEKIVRHHTGLLAEIALEQLETIRRLTRRIKALGLQLRALMRQLTPSLLELQGCGPLCAAKIFAESADIRRFETRGAFALNNGTAPIPVWSGNNVRHRLNRGGNRQLNAALYRIAIIQARDEGLGRTYIAKRLALGNTRREALRSLKRRISDEVFRRLWNDLPLVLNERFSEAA

SEQ ID NO: 126709 - protein, 355 aa, unidentified
MERYIGMDVHAASCTLAVISEKGRKLKDFPVETNGQALVEAVRMIPGHKHLVFEEGLQSAWLYETLSPHVDEVVVAGITQSRGPKSDKRDAYGLAEKLRVGNLDKHVFKAPRQFTQLREFSRAHMTLVGDVVRTQARIKSVYRSRGVLVAGVDVYSPRRRDSWIEQLPSSTRTRATRLYDHLDFLMEQKKQAEADLLREGKKHRIVKILETAPGFGPIRAARLVPIVITPHRFRTKRQFWSYCGLGIVTRSSSDWVQTTDGAWIKARTPQTRGLSRQHNHFLKSIFKGAATTVVTQRKKDPIHARYERLLDGGTKPTLAKLSLARMIAATVLRMWKNEEEYDPGRAGLLATTRKR

SEQ ID NO: 126710 - protein, 405 aa, unidentified
MLKFLIKRAFNLNILYKLANNFNFRPMRRVCGLDVHKDSVFMCILSENGEKIQEKYGVLTKELDTLRDVLVANNVGEVAMESTSIYWMPIWRVLESDFDLKLVNPYFIKQLPGKKSDVKDAEWIATCLQKELIKGSFVPDAAIQRLRQYNRRIFDLNKDISYKLTKLDMALQRCNIRISNYVSKTDSKSYKKVVDKLAGGITDPQELEKCIHGRTVNRFGKDIITASLTGVINETDIDIMSQLKSEIDLAERHKSECLMKMREICMENYPKQLENIKSMPGVKEQSATAIIAEIGVDMKMFLTAAAIVSWCGLRPRNEESAGKIKSRKIVHGNKYLRRTLIECAWAASKTQGCFYNKFSYTQVSIRKKNVLKVRVAVARKMLVTIWNILSKGEAYREILDCTQPQ

SEQ ID NO: 126711 - protein, 422 aa, unidentified
MSWMAPGCLMSEEDARRRDEGTPAARRPATIGGKVFYVGIDLAKRRHSASVVRDDGRRLVLGFAFPNSSEGFAALLARLAKAGATGDSSKVCLEATGHYGRNLIAFLEGHGYEVFEVNPLLTANWRRATSVRKVKNDAVDAEALALWLLAGNPTARRRAKDESDDLRTLARSRTSLSHMIGDCKRRAVAILDVTFPELHGFFSDDFCVAATAVLMRWQSAEALSHARLDSIRKEVREAGGRLSGARAAELRELARASVGTASAPLAFQLRQLLAQIEFTRGQMAELDAELARMVEGSPVLTIPGVGTVLGAGILGEVGDVSRFASAKKLLAFAGCDPSVFESGEFVGSRAHMSKRGSPYLRWYLWLAAERARVYDPALGTYYAKKRAEGKCHKVAVSAVVRKLVSIIYAVLRDGTAYVCPAA

SEQ ID NO: 126712 - protein, 326 aa, unidentified
MEKHYIGVDLHQAFFQACAVSADGARLWEDRFPRTDEGLAAFRGRCHHEVAVAVEASTPTWHFVDAIHEAVGTLVIVDALRTRLKAGYAAKTDRLDARRLADALRRDSVSSIYYPPSAIREMRELTRYRHALVQTRTKLIQRLRAVLLRQGIVDAHRLSRQDGSLDRLVLPPQAAASVAGLRRLLALVRAEGLTAQRAVEAAAHADPIVVALQEVRGLGPVLGLMIRAEVGDIGRFPTGGHLASYAGLVPRVEASAGRVRYGRITKRGSPWLRWALIEAAMHGPQRTDAEGRWVRRLALRKGALKARVAYARQLCHEIHAVWRAIA

SEQ ID NO: 126713 - protein, 333 aa, unidentified
MQNFYFIGIDVSKKKLDFCVMSNSKVLKEEQVSNHPQAIATVIAGIKEELSMSNDSLIICAEHTGQYTYPLICACKSVGSKLWLENASQIKYCSGVTRGKNDKVDARRIAVYAMRFFDKAKPYQRPTEELMRLKQLEAERSLYLTDLAKYKAQLSDQEGFMEDKIFKRKAKRLKEMIKSLEKTLKEIAQEMADVIYSSEELSRQMRLLKSVEGVGPVVAMNMIIATEAFTRFDNPRQFNCYVGVAPFAYTSGSSQHSRNRVSQRAVKYIKCLLHMAAVAIAHKKTGDLKTYFERKVAEGKNKMTVLNAVRAKLVARMFAVIRNNRVYQPILSV

SEQ ID NO: 126714 - protein, 421 aa, unidentified
MTQTSHDTFAAFIGIDWADAKHDGCLQAAGTAKRECFQLEHTPEAIDAWVTTLRTRFNGQPVAVCLELDKGPLVSALRKYDFLVLFPINPLMLARYREAFTPSRAKDDPTDAALQLELLLTHRDKLHPLTPQSATMRALAQLVEHRRRIVGDKVRMTNRLTSTLKNYFPHVLHWFQDKDTPIFCDFLSRWPTLKAVQLARRSTLESFFRDHHVRSPEVIARRLQAIRAALPLTTDEGVIAPHVLLVQALVAQLRVTLQAITDFDTAIAQRAQSHPDFPLFQALPGAGPVFASRLLVAFGEQRERYPSATALQKYAGIAPVTERSGKKSWVHWRLQCPKFLRQSFVEWAAESIRHSFWAQVYYQQQRDKGQAHQAAVRALAFKWIRILYRCWQERTPYDEATYLQALARRGSSLIQNLAKAS

SEQ ID NO: 126715 - protein, 404 aa, unidentified
MQVYIGIDWSEAKHDVIFMNAAGAALAQFEISHSTEGFLRLDETRWRMKLTPDDCVVGLETAHNLLIDFLWSRGYSKVYVVPPTTVKSNRKRFSSSGARSDPSDALVIADSLRTDHGRLQPWRPDSLLTRQIRAKVSLVNHLTSSTVRLSNRLRAVLLRYYPAALNMFRSWPTKVAMEFIRASPTPRDAESLTFDQFQRFARQHRYPNPKRLPACFARLQAPQPEATQATVEVYKDEAVLLATLFLTMMRAKKEALRELKTLFREHPDHAIFDSLPGAGDYLAPALMAKFGDDRKRFPTPASVQALAGTCPVTDQSGKRRIIKFRRACDREFRAIAQQWAIASLKQSVWANAYWQQARPRCRYSSHAFRRLANRWLAILWKLWQSGQMYDEAYHLQQRALRSKR

SEQ ID NO: 126716 - protein, 353 aa, unidentified
MIVIGVDPHKTTHTAAAVDPVTNTGLGSLRIDATLAGYRRMLVWAKQWAQRQWAVENAEGLGHHLAQWLLARGEVVLDVPATATARVRELSRGARRKNDRIDAASAACVAAAQGDARPVVAEDHVDALGLLDERRNNLCQNRTRTINQLHRLLRELLAGGVPTDLTAAKATAALHTFRPRSTPERVRVQLCRDLIADVRRLDQQLADNQAEATRLLDEHGTRLREIDGVGPVLAARILGRTGHVSRFATAGAYATYNGTAPVEVASAEYQCHRLNRYGDRQLNCAIHTIAIVQLRRHGSAGRRYYDRKITDGKTPRAALRCLKRHLSNQLWRTMLSDEQRDQDRCHDQSTKAS

SEQ ID NO: 126717 - protein, 354 aa, unidentified
MSEKLNSTVAVMGIDIGKNSFHVVGLDARGAIVLRQKWSRGQVEARLANMPPCLIGMEACVGAHHLSRRLKALGHDARLMPAKYVRPYSKGQKNDFRDGEAIAEAVQRPTMKFVATKTAEQLDLQALHRVRARLVSQRTGIINQIRAFLLERGVAVRQGLRFLRAELAQILATRTDVVSPRMVQLIEDLAGDWRRLDERIEGLSTDIQALAQHDPACQRLVSVPGIGPIISSAMVAAIGRGEVFAKGRDFGAWLDLVPKQTSTGDRTILGKISKRGNRYLRVLFVQAAWVVLIWPKSWERYGFKPWIEAAKKRLHRNVLAVALANKLARIAWAVLNKERNFECIAKNAMAPRSA

SEQ ID NO: 126718 - protein, 314 aa, unidentified
MILPLRCVGIDVSKHTLDIFDDAAGKPERIANAPRPITAQVARWRCGNVFVVFEATGVYDRELAEALHRAGVRFARINPARARDFARAQGRLAKTDEIDAHMLASFARTMAPACEPAPDPARNALSLLAKRRDQLVHIRAQEKNRRSEARDPAMIESIARLIDFLDGEVKAIETRIKALIKTEPTISDDARLIRSAPGVGPVACMQLIALMPELGHVGPKQVAALAGLAPLNVDSGRYRGKRAIGGGRKRVRDAVYMAALNAVRRDPSLKAFYQKLRTAGKPAKLALIAAARKLLITLNAMMRDRKTYLAPRPS

SEQ ID NO: 126719 - protein, 340 aa, unidentified
MTTVTHIGIDLAKTYFHVFCADERGQAVIQKRIHRSDLMEFMATVSVSTIAMEACGSAHHWARQFEKLGHDVKLIHPGFVKPFVKGNKNDSNDAEGIYEASVRPRMRFVPVKTVEQQDILAIHRTREILIRQRTQLVNQIRGLLAERGHVAPQGRRSLMKLITELLSDEGVLTPIFEELLTEMKERLVSLDERRLIYDRKLRKLSQENETCKRLTEIPGIGPICSTALYATVGKGRDFKNGREMAAWLGLVPRQETTGGKPKLLGISKRGDRYLRKQLIHGARSMQWNPKGLPEARRLWLANLESRRHKNVAAVALANKQARIAWALLSTGQTYRTQQVA

SEQ ID NO: 126720 - protein, 345 aa, unidentified
METMYYIGLDVHKKTISYCVKDGSGRIHAEGAIPATRLDLDIWMKRLPQPWTAAMEATIFTAWIYDHLLPHAVAVKVAHPLMLRAIAAAKKKNDRIDANKIADCLRCDFLPECYMASTEIRERRRTLRYRNLLVRQAVQMKNKIAVLLMEAGVSYNKQKLHKVGYFRELLATNQDIDDGLRSLLRLCRETVVRLGKTESALVRSLQRDSLLVERVERLMTIPAVGPITALTWALEVGDVQRFSSIKKAISYCGLCGAERSSADIIKRTPLSKQRNKHLQTILIEAAKMAPRNSPELAMIYDREKQKGNANRATLAVARKLVAYLVAVDRRQKEFLTVERENRTAA

SEQ ID NO: 126721 - protein, 411 aa, unidentified
MDRFVERCAGLDVHKDTVAATVRVPGGAGQRLQETRTFSTTTGGLVTLADWLESYGVTLVGMESTGCYWKPLYYALEERFECWLLNAQHLRNVPGRKTDVADSAWICQLVEHGLVRASFVPPKPIRELRDLTRYRKAQIEERSREVQRLDKVLQDAGIKVSSVASETLGVSVRRMLDALVAGTHDPDVLAELARGRLRRKLPELREALTGRFRSDHHGLLVSQILAHIDYLDETIAFLSARIEQVIAPFSKQRELLETIPGVARFAAEVLIAELGVDMTVFPTSAHLASWAGQCPGNHESAGKRRSGKSRKGSKWLHTTLTESAKAASRSKATYLSAQYQRLRGRRGPGRATGALRNSILVAAYHILDQHVPYHELGADYFDRRSTQQRQKRLVRQLEQLGHKVTLEPIPA

SEQ ID NO: 126722 - protein, 345 aa, unidentified
MEIHTIGIDLAKTVFHLVGLSARGEVVVRKKCSRNQLLRFTSNLHVSLIGMEACGGAHFLGRALREQGHNVRLMPAQYVKPYVKTNKNDYIDAEAIAEAVGRPTMRFVPIKTDDQLDLQSLHRIRERWVTRRTAVVNQIRGLLLERGITIRKGRRHVEVSLPAILEDPDNKLSGALRMLLAQLQLEMQYLSRQIDESDKLILRIANEIESCRRLIAIPGIGPLTATATIAAIGNGAAFKKGRGFAAWLGVVPGEHSTGGKQKLTGTSRRGNKYLRRLFVQGAQTVLLRKEKQSTGLRTWLIDLTSRKRKQVATVAMANKMARMVWAVLSKGAAYCPPLSAQTVAA

SEQ ID NO: 126723 - protein, 341 aa, unidentified
MDHLAIDIGGRESQICIRSAKGEIAVERRLRTTDLPKLFEQRAPSRVILETCAESFWLADAAKKARHDVKVVPTTLVKALGVGSRSTKNDRKDARVLSEASCRMELPSVHIPSMESRDRKSRLSARDSLIASRTMMINVVRGWMRTRAIRLRRSGDVVSFSERVREVCTELPDYIDRMLNTLTVLTAEIANADRELRTIAKNDPRCVTSMTVPGVGPVTAVAYKATLDSVERFPDAHRAEAYLGMTPGEYASSEKHHRTGITKAGSSRMRWLLIQAAWTARRFAKNHSMVLWATEIEKRRGVKVAIVALARKIAGILFALWRDGTTYRDPAAAQSRVAAAE

SEQ ID NO: 126724 - protein, 338 aa, unidentified
MTYVGGDVHKNTSTLAYLIPSTGEVGTKRVKTTREEFEQLLGQLPEPWIVAIEATREAPSVSRWLEDMGADVRLVDPQTLSVLGKLHAAKTDRKDAELIRDAMYHDYLPECYNAPDHVVERRALTRGHKVLREMATRLRNLIRIIFCQWNFECKVSDLQSKAAREMMPTWLQELPETVRVVAQQYWKLLCETEDSINAVDHRIEEEVKADPVAAELTDHPGLGDVIVMGLMAEMGEVRRFPGPKKLNSYAGAVPRVAQSDTHSATGHLPQRCNRRLRYWAVMAAQCATRARADSKAKRTYERVKQRCGPNSAKIAAARDILTHVFHVWTRVQAQLHEA

SEQ ID NO: 126725 - protein, 340 aa, unidentified
MHKSSAEAFLSCGIDVSAAQLVVALEGEGGSWRQRSFTNRAGGHQALIRWLQKSGERVRICLEATGRYSLDLALALHAASGIEVAVLNPKLVHAFAVTLCRSKTDPADAQVLAEYARRMAFQPWHPPRAAALELRAITRHIAALTQQHTQQSNRLHALSASSTGSGWVRQDLKRSLRDLERRMEKMRGAALALIAKDAELHPRWAQLLSMPGIGEISALSLLGELALLAPGLSVRQWVAHSGLDPAHHDSGSSVHKRARISRAGNRYLRRALYMPALVAVRRDPHLRAFYQALLARHKAKLQALMAVARKMLHAIFGMFRGNADYDGSRLFPGLELAAAA

SEQ ID NO: 126726 - protein, 339 aa, unidentified
MQIHSVGIDLGKTTFHLVALGAAGKVLVRKKFTRKQLLAYTANVQTSLIGLEACSGAHFLGRALRKQGHDVRLIAAQFVKPFVKSNKNDFVDAEAIAEAVERKNMRFVPIKTDDQLDLQAIHRVRDRLISRRTAMINQLRAFLLERGMVFAQKPAKLKAAMADILENAEADLTPQMRNLIDMLWGEWKLVEQQIEGLNDELERISASDAGCTRIRQIPGIGPVVATAIVAAIGNGAAFRKGREFAAWLGIVPRQYSTGGKAKLLGISKRGNVYLRKILIHGARAAVLRIKRDRAPIGAWLDALDARAPKNVVVVAMANKLARIAWAVLSSGNEYRPVTA

SEQ ID NO: 126727 - protein, 427 aa, unidentified
MNYTQNHKISQITPSTLVIGIDVAKEKHVARAQDDRGLEFGKRLIFQNRFHGFELLLEWAHRHAKENSKDHIIFGVEPTGHFWLNLAYYLTAKGYDIVLVNPMHVKKSKELDDNSPTKNDTKDAKVIAQLIKDGRYSVPNLLDGIYAELREGVKIRDQLIQQLMITEGRIQNMIDRYFPEFFDVFGDWEGKAALCTLKLFPFPSQIVEMTPEEILQEWKPFVQRGVGIKRATKLVEAARKSIGLTIGTQFAQREMDNLLEQLELFRKQLEDLDQELEGIVRTIPGANEMIDITGLGVATVTTFLSEIGDLKNYKHPQQLVNLAGLSLRENSSGKHKGKTTITKRGRSKLRRALYMAIRPLVAHNPTFKALHHYYTKRPDRPLKKQQSLIALCCKLLRVIFVIGHKQCQFDGSKLLQGIPQENLLQVA

SEQ ID NO: 126728 - protein, 408 aa, unidentified
MGRAAEVVAPSSSIRTDGGCPVAQVNDLSRSLTAFDPISTLVVVVEMSKASWLVSGVVPGVERQPLKKLEPDATALLRLIERWRNEAVRAGRPISRVALAYEAGRDGFWLARWLIARGIEAHVIHSASVAVSRERKRAKTDRLDAAMLMRVFLGWLRGERGHCGMVAIPTIEEEDARRPSRERESLVDERSRITNRMKSALARLGIRGFKPHLRKAPERLAGLRTAEGTGLPANIIEEFRRDMARLALVREQISSIEKTRAERLERAPDTGPHAMVRLLARVIGIGIETADMLVREILSRKLRDRRAVARYAGLTGSPDESGLKRREKGLAKAGNARVRRGLIQLAWRFLMFQKDSALAQWYRTRTEGPSGARKTTMIVALARKLLIALWRLVTTGEVPDGVELRPAA

SEQ ID NO: 126729 - protein, 347 aa, unidentified
MLFSGIDLHKRSLVIHTLDADGTTTREAELKSDRGAVLAYFGTLAGPHRAVVECVQSWYWLRDLLAPSGVDLRLAHAKYVKAISYAKVKTDRVDARMLAQLLRAGLVPEAHMIGAEHRETRDLLRSRLQLVTRAVRCRHAVGSLLEKYNVPTPEELPELARMQAALQEEQRVLIRTHVRRVEAVLKTRLLPTPDVQRVVWVPGIGKLGAYALVLEIDDIQRFPTVRHFHSYCRLVPGADNSAGKVRHKRSRDGNRYLKQVFHTAAIRAAQYHPEIRQEYRRLARRKGRIVARALIAKELASIVYWVLRKREAFNGKFRGHVLTPKPPRWPRLASPGGLTDAGRASHG

SEQ ID NO: 126730 - protein, 355 aa, unidentified
MSSEKYIGLDVHQATICVAVMDAKGKVVMESILETKATTILEFFAGLRGTLSVTFEEGTWAAWLYDLLKPHVANLVVCNPRKNALLKHGNKSDKIDARKLANLLRLNDLEPVYHGETGVRMLRELARSYLTMVKDVSRVMSRLKAIYRSWAIPCAGRDVYYTRHRGEWLGKIPEAGCRRRAEQLYQQLDMLQPLRQQARRELLAESRKHTITAKLRQIPSLGPIRSALAVALIQTPHRFRTKRQLWTYSGLGLETRDSGEYHYVEGQVRRRKKQVFIRGLNKDHNHDLKGLFKAAATRASVRPGPFQDFYQRSLAKGIQPTMARLTLARKIAAITLTLWKKGENFDAEKLKAQAA

SEQ ID NO: 126731 - protein, 344 aa, unidentified
MKITTIGIDLAKNVFQVHGVDGRGKGVLRKQLKRKDVLSFFANLESCLIGMEACGGAHHWARKLQVMGHTVKLMAPQFIKPYVKSNKNDAADAEAICEAVCRPTMRFVPIKNIEQQSVLALHRVRQGFVKARTAQANQIRGLLGEYGLIVPQGIGYIASRVPELIEDARIELPDTFRLLIARLLEHLKELQRQVEEIEAQIKAWHRTSEASQRLEKVPGIGPLTATALAATVGDAKNFDNGRQLAAWLGLVPRQHSSGGKPTLLGMSKRGDAYLRTLLIHGARSVIYRAGQRADAESWLLKLIARRNANIAAVALANKTARIVWALLAREREFRSDYSAVRAVA

SEQ ID NO: 126732 - protein, 366 aa, unidentified
MAKFLFVGCDLHEKEMLLVYAGDDGDVKRCRFRSERRWRKGLVRWLQHEAERVGAREVVFAYEASSAGFILYDDLIAAGVKCHVVAPTKLDRSPHHRRRKSDANDARVILDVLRAAYLAGAQLPGVWVPDRMTREAREVVRGRLRTAQKVAATKNEITSLLKRFGVERPRGVGCPWTKSFRQWVEGLVDCEGSLGPWVGATLGSLLSQLKMLEAEIEHFDSLIEALSHTERYEATSEALDDVKGVGLVAAMTFLVELGDLSRFSNRRQVASYLGLVPSCYESGEADDRKGHITRQGPGRVRGVLSQAAWAWVRWDERAKRKYDRLVARNPKKRKIALVAMMRQLAVVLWRRGLKAQRRAAARSKNT

SEQ ID NO: 126733 - protein, 342 aa, unidentified
MLHAGMDMHKLFSVVTVVDDSGNEVVKGRKLENRDLEIVEFFKSLQDKLRVVIEAGSNWMWMTDLLDDYGIENVLCHPLKTKAIASARIKTDKLDSLTLSQLLRANFIPEAYKPDQKARSLRELLRYRASLVGKRTGIRNAIHALLARGNISIPSSDIFGKAGMEYLLKLELPPQRRFALDGYLEVLKALTHEIKKAEEKIKEEYKSSPEAQLLSTVPGVGLILSLTILSEIGEISRFKRARQLSSYCGLCPSTAQSGNTVKHGRITRQGSKWLRWAFVEAAIQASGKPGPLRDFFLKLKKRKGGKIARVAVARKISTYVFHMLKEGKNFEELISLNLDAPG

SEQ ID NO: 126734 - protein, 335 aa, unidentified
MKNYLFYVGIDISKLKLDVYLIENVLTNKAEHFIVENTAKGIKAMISLLKKKKIDLTKTLFCFENTGVYTYPLSINLSEFGLDYWIVPAIEIKRSKGISRGKNDKTDAKDIAWYSIRNIDKLKLSSIAEKEIQQLKLLFTEREKVMKTLLIFGTTKENKDFISKDVFKVVSNINAKTIKSLKKCLKELDTKMKEIIKNNSELKQQYDLIKSVPGVGNQSALYFIIATKGFTAFDNSRKFACYSGTAPFEYSSGSSVRGGTKVNHMADKKMKSLLQMGALAAIKHDQQLKEYYNRKKNEGKNSMLVLNNIRCKIIDRVFSVINRKTPYINTYKFAS

SEQ ID NO: 126735 - protein, 423 aa, unidentified
MGKIIPVCCGVDVHKKFLVATILTGDHLIPECKQKHFGTSYRCLLDFRQWLLDNHCLEVCMESTGKYWVPVWNVLEDSFHVVIANPKWVSAVKGSKDDKKDSRWIGNLFRMGLVPGSYIPGKEIRILRELTRYRSKLVSMRASEKNRYQNAFTVCNLTLDGVVSDMFGKSATEIANYLLNTDTVDPEHCVSFLKGTLKKKADAVIEAVEGFSMTPEQRERVRIIQGHFADIDKRIAQIDDLINRQVAEYEPAISLLCTIPGIDRRHAITILSEIGTDMSEFGTSRRLCSWAGLVPGNNQSAGKKKSVKITRAGVYLKPALVEAAHAAVKSAEIQPYFRIKYERIMKRRGKKRAIIAIARMILTSIFAMLQTGEVFHPSDLQQYDMPENLQKKRTLSAAKDAVKLLVSLGLVVEGSISLVSLAG

SEQ ID NO: 126736 - protein, 408 aa, unidentified
MKTLHQRCAGLDVHKQDVVACLRLATKGRVHREVRRFPTTTRGLLELAAWLEAARCTIVAMEATGVYWKPVWHILDGSFELVLANAAHIKGVPGRKSDVNDATWIADLLAHGLIRASFVPPQPIQDLRDLTRTRKQLSREIVRHTQRLQAVLEEANVKLASVITDILGASGRRILKAMITGETDPSHLAELGSRRLGCSRDTLVEALDGRVRDHHRFLLDQHLKTIEQLEETMAAFDARIEAALAPFRDTVERLTQVPGLSTRAAEVVIAEIGLDMSRFPTAGHLLSWAGLVPALDESAGKRRSTRVTKGAPWLKPVLVQCAWAAANKKNSYFEAQFLRLKGRRGPKKAAVAVAASILTTVYHMLRDGTCYQDLGPNYFARRNPARTARKLADRIRNLGYIVEIRSAA

SEQ ID NO: 126737 - protein, 392 aa, unidentified
MYIVGIDIGKNHHEASIVSPEGKQIGRSLRFATTHKGADSLMSFIFKNIGNSPCVFDMEATGHYWYPIYSFLKAKGYTIYVINPIQSDSLRKMYIRQTKNDSIDSFLIAEVIRFGQFGTTSMADENILAMRQLCRYRDSVISSRTEIKLRIGTIMEQIFPEYEKQFSSLWVSTSMGILEKYLTPENIENAPIDELFEIIKDKSHNRLTRAKAISIKEAAADTFGIKIAQDAFSFQLKQLIDRMNFLDKQIEALDCQILEYYEKFDCYLHTIPGIGIIGAATILAEIGDISRFKNSSALVAFAGIDPTVRQSGEFNSTHNHMSKRGSPYLRHAIFLAATTCSFHNSPLNAYYKKKRDQGKHHLTATGAVARKLTTIIYAVLRDSKPYEPKKFC

SEQ ID NO: 126738 - protein, 400 aa, unidentified
MSGSHERIWVGIDAGKGHHWAVAVDAEGRTLFSTKVINDEGQILQLIGAAREKADEVRWAVDISGRASALLLAQLIADGQQVVYVPGRTVNRMTGAYRGEGKTDAKDALVIADQARMRRDFAPIETPPELVSTLQLLTGYRRDLIADRVRLINRLRDLLVGICPALERAFDYSAAKGPVVMLTEYQTPAALRRIGVKRLTTWLDRRKVRNAADVAVKAVEAAQSQLTALPGEVRAAKLVCDLAHQLLALDERIKDNDREIRKTFRTDERAEIIESLPGMGPILGAEFVAIAGDLSGYRDAGRLASHAGLAPVPRDSGRRTGNYHRPKRYNRRLRWLFYMSAQSSMMRPGPSRDYYLKKRAEGLIHTQALLALARRRVNVLWAMLRDKREFTSVPPVTQTA

SEQ ID NO: 126739 - protein, 420 aa, unidentified
MTTSNSTPADVVLVAIDIAKLRNEVLIEAPGHKRRRRLLVLNTRAEHDHLIEVLQAYGRPVVCAFEATGNYHRPIAWRLAEAGFEVRLVSSLALARTREALHNSWDKNDPKDAQVMLHMLRIQATQVYHDPLRAGINDVQELSKTHEAIARAKTEIQHRILTHYLPLYFPEIDRFRGNSRSDWFFAFLHAFPTPASITALTKEEFVAAAWDVVGRKVSKTQILMDIYETARSSIGLPLPLDAPAIRMFRMVIDEARSLIRQRNEIEAQADELLRHSQDYQLLRQIPGIGPINALTIIAEAGDLRRFGHHRQFLKFCGLDLSTQQSGQYRGQTRLSKFGNARLRRTLWIAGQVAIRQRENGFRHKFERYIAKDRDNPDLRRKAMTAITAKMARVVHAVVKGGSDYRPFVEGRVPGGRTSVS

SEQ ID NO: 126740 - protein, 379 aa, unidentified
MTTTDAAAETRETVYAAIELSKKTWVLGIAHPDRDRPSIHRVSGGNIAELVSRLRVAARNNRRILVCYEAGYDGFWLARALAKMGIECRVLDPASIQVNRRARRVKTDRIDVLALLRALIATDRGERHVCAIVRVPSVEEEDARRSHRERQRLVRERTGHINRIKGLLFAQGIRDIKPKLRRTRIDFAALETAEGHPLPDRLRRELEREYARLSLIATQLREVEKERDTADAQDPVVEQKRQLLVALHGVGATSAAILAREVFARSFASRRQLGSYLGLTPSAYDSGSTTRCQGISKAGNSWARRILIEVAWLWQKYQPASPLSHWYIQRTAGQSSRIRRIMLIALARKLAISLWRYVETGLVPEGVAIARAEPRCAPA

SEQ ID NO: 126741 - protein, 361 aa, unidentified
MNRNANSQSAGQMIGLINGQQVVGLDIAKSVFQLHSVDMGTGEIVNMQLKRAKVLEYFANHQPCLIGIEACGGAHHWARELQALGHSVRLIHAKAVRPFVSGNKTDATDARAIWLAVQQPGTKFVGIKSEEQQATLVLHRQRELLMKMRVMQTNALRGLLYEFGATFGRGKNALFSEIEAALETLLAKNSLPQYVADSLREQVGRIKALDQDIKSIEQRLQERLKSNAQMKRIAHIPGVGLLTATAAIATMGEASAFKSGREFCAWLGLVPRQSGTGGKVKLLGISKRGDTYLRTLLIHGARSVLSHSKEPVPWLEQLQQRRPTNVVIVAQAAKMARTIWAVTAKEQSYQRGYQSTRPQTA

SEQ ID NO: 126742 - protein, 322 aa, unidentified
MDKPVTPDCYVGIDVGKDRIEVHIRPDAVAFGCATDAKGLEQLLTRLKPLTPKVIALEATGGYEAIIVATLSNAGLPVAIVNPRQTRQFAGALGRLAKTDKIDAGVIAHFAEMAKLEGKPPADAERSELRALLARRCQLVEMAKSERQRGARADSALTRRSCRTVVRQLEAEIARVERAIGKLVDGGPLFQAREALLKTIPGVGKVVARTFIAELPELGTVDRHEIAALVGVAPINQDSGKWRGRRMIKGGRPQVRSPLFVACLSVIQHNKPLRAFYQRLVDGGKVKKLAIVAVMRKLVVIANAMVKSGKPWSATATPAAAA

SEQ ID NO: 126743 - protein, 341 aa, unidentified
MDKTLYCGVDLHSNNAMYVITDQEDQALFKRRLPNALPEVLEALEPYRRQLKVVAVESTYNWYWLVDGLLDHGYPVVLANPSKIDQYDGIKEADDLTDAAFLARLARLNILPTGYIYPAADRPVRDLLRRRRLLVRHRVALMLSLQTMAMRQSGQSISWRALRTLSEDQRCVFLGDNDCLTFVTDQQIELLELLNERIKRFEDKVLEHTCLRPAYECLLTMPGVGVILALTIMLETGPMERFKTVGDYTSYCRCVRATHRSNGKIKGQHNERNGNPYLAWAFVEAVHHAIRSCPAAKRFYDRKLAQRNGALATKALAAKWTKAAYYMMKRQEAFDLSRVFG

SEQ ID NO: 126744 - protein, 406 aa, unidentified
MAAVMIGVDPHKGSHTAVVIGPAEEPLGELRVRASAGQAGKLVGWAAAWPERTWAVEGAGGLGHLLAQQLVAAGERVLDVQPKLASRVRLLQAGDTNKNDPNDALPVAVAALRSRTCRQVVADDYPAVLKVWSKRHRDLARTRNQVACRLHAVLCDLVPGGHSKEISAAQAARILAQVTPSGAVALARVELAAEFLADLRHLDAQLRGTRKKLAAAVRASGTSLTQVFGVGPVIAGTIAGDVGDVARFPGRDHFASCNGTAPVEVSSGNRTIHRLSLRGNRRINHAIHMAAITQLRHKHSEGRAYYDKKVAEGKTHKEALRSLKRKVSDAIFARLQADARQAAAARTKGPGGQPGNGSDSSAASSHPERRLFGPATPGPDTTIRPGTTADTPSPSKPTSKKTRPAT

SEQ ID NO: 126745 - protein, 420 aa, unidentified
MEEITEDAEIVARVAGLDIGKATLTACVRVPHEDRPGRRLQEVRTFATTTPALLGLRDWLICQGVTLVVMEATSTYWKPPFYLLEDAVECWVVNARDVKNVPGRAKTDKLDAVWLAKRAERGMLRPSFVPPPWQRELRDLCRYRRTLVQERTREKQRAEKLLEDTQIKLSAVISDIFGASGRAMLEALIAGQTNPAVLADLARGSMRGKKSVLQEALTGQFRDHHGWLLRMMCDRIDALTAQIDALTARIDEAIAPFAHQVAQLDQIPGVGKTGAQEIIAEVGMDMTRFPTAAHLVSWAKFAPRARQSAGRAKPGTTGKGNPWIGGTLGEAVIGAARTKTFLGSRYHRLARRRGKRRALVAVGNSLLVIAYHLLSDPGARFTDLGPDWHDRLAPVRRKRQLIAELERLSGKKVTLQEAAA

SEQ ID NO: 126746 - protein, 392 aa, unidentified
MIYVGIDVAKDKHDCFITNSDGEVLFQSFTILNNREGFETLFKRIESVSKDLSKVKVGLEATGHYSYNLLGFLFSKGLPTYVINPLHTNLYRKSLSLRKTKTDKVDAHTIASMIMSDVNLKSYSDTSYHNEELKSLTRYRFDKVKERAKLKSSVSRLICILFPELEKLVPTLHMASVYALLSEFPSASAVASAHLTRLSNLLSESSKGRYGKDTAIIFREAARMSIGSHMPAKSLELKHTIKLIQELTIEIDEIETEIKQIMDEQIHSPILTIPGISYRMGAMIIAEIGDFSRFDSADKILAYAGMSPSTYQSGKLDNCYSHMEKRGSRYLRYALYNATKYVCHWDESFGTYLEKKRAEGKHYNVALSHATKKLVRLIYAMERSGQPYTKAA

SEQ ID NO: 126747 - protein, 457 aa, unidentified
MREKSKRTKGIEEAHPFSGMSRIHPHAAGVDIGAIEIVACVAGDENTQIVKAFGNYTVDLQALAQWLKSYSIKTVAMESTGVYWIPLFEELERQGFECLLISSRSLRRVAGRKSDISDAQWIQTLHSYGLLEGSFRPQAELVALRTLLRHRSQLVEHRSPHIQHMQKSLLQMNVQLSQAVTDVTGMTGQKIIRAILAGERDPQTLAAMREPGCKKSAEEIGKALTGTWREEHLFVLKQSVMLYDFYTEQIQACDLEIERLYGLTRPDWESGEVAPVTKRKRNSHSKNIPQHPEEIRKHLKRISGVDLSAVDGFGVSLAQTVIMEVGTDMSKFPDEKHFCSWLGLAPKHEISGGKVLKKNTLKTKNRAGQAFRLAANSVKQAECMFGVFYRRLRARLGPAQATVATAHALARVVYRMLKYKVEYEPLSLNEYQKHYEEQQIKYMRKKAAKFGFQLVPT

SEQ ID NO: 126748 - protein, 383 aa, unidentified
MITVEARVHPLVQARALSKLPNLLGNGDAPMSYDYHIGVDYHKAYTHLVVQDGGGKVLRSGKVKNDPRSLAGFLSPYLENSHAVMEASRNWTVMYDWLDELCDDVILAHPLKVKAIADAKIKTDKIDATILAHLLRADLIPESYVPCEAARALRQALRERIFFVRLRTMVKNRVVTIFDRYPEQTRALREMSDQFGKIGRGQLELLSVSVIDREHIDRALAFIDDINQRIRESEKTIRCFSKDNADVKRLKTIPGVGEFFARLIAAEIDDISRFRSAKKLAAYAGLVPSTYASGGKCWNGRIIKAGNKWLRWAFVEASIPAMRAEPALKFDYERLKATKGANRAKVIVGRKLLTIAYQVLRDQRDYERRDALVERPSNSSRLS

SEQ ID NO: 126749 - protein, 322 aa, unidentified
MSEMLIERFVGIDVSKGVLDLFADPPSASLPRQTAQEDGALKLLCDALAALAPTLVVVEASGGLEQRLAGELAARGVPLAVVNPRQVRNFARASGELAKTDAIDAQVLCAFARAIRPQARPPKDADTQDLADILARRRQLVDMRVQELQRQHTAKSRALRKSLAEHIAWLDKRIERLDEDMGQRLMQSDVWRARDDLLQSIPGVGPVMSRTMLGLCPELGELNRREIAKLIGVAPLANDSGKHRGRRRIWGGRADVRRVLYMAAQAAMRHNPTLREFALQLKARGKLPKVVIAACMRKLLTIMNTIVKTGTPWRQPATLAPG

SEQ ID NO: 126750 - protein, 342 aa, unidentified
MTTIKYFVGVDIAASTFTASVGATPWKVILKADTFENTENGYQTFLDWLANQQIEAKTSVVCMEATGVYSEGLAYFLFAKGYPVAVQSPLEVKRTFKPYGPKTDAVDSLQIAEYACRHIDQLSFWQPRNEILEQVKALLATREQFVSQNVAHKNALQAIQRKPVRTLFAEQAHAQMIEQFKKHIQAIDHEIRRLIESDPTFKEMLLLLLSVPGVGLLLASHMILLTQTSLDHKELASYLGIAPNEHSSGTSVFKHATSRHFGPSAVRKLLYLASCSVRTHQTQFTSYFARKTREGKPPKLVLNNIANKLIKIICAVLLTKTAFIKNYHSVQPLVFQNTLTQS

SEQ ID NO: 126751 - protein, 339 aa, unidentified
MPLYVGLDLHSNNNFMAVMNKQGKRVDHKKLPNDPELILQALRSHRAKIGGVVVESTYNWYWLVDALMEAGYAVHLANPSAIQQYSGLKHADDQHDAFWLAEMLRLGILPEGFIYPKEERPIRDLLRKRRHLVKLRTSLIISLQNIISRNCGVQFKGSDVKRLKEDRVSPLLEGNEDLALAGKASKETIDYLTRQIQRIEATIVKRIELRESYRYLLTLWGVGKILALTIMLETGPISRFAQVGNYVSYCRKVPSQWTSNEKVKGKGNKKNGNKYLAWAFSEAAEFARRHHAEARAYYNRKMQKTNFMVAHSALAHKLARAAYYIMKDQVPFMPEKLFG

SEQ ID NO: 126752 - protein, 350 aa, unidentified
MLIIGCDYHPSFQQIACVDTDTGELGERRLAHPEEAAQFYGELKQRNVAVRVGMEASGHARWFERLLRQLEFEVWIGDAAEIGTKRVRKQKTDRQDAQLLLRLMMEDRFPRIWVADAENRDLRQLLWHRHRLVQMRTRVMNQLHVVALNEGLQRKKALWRPAGRKQLESLVLAPWASRRRQDLLELLDQITPQIQKLTQALEAEVDKRAVTRRLMTHPGVGPLTALAFELVIGTPDRFHCGKQIASYVGLVPEENSSGNRRRLGHISKQGNALLRFLLVEAVQVTIRTQSQWRSKFFHLAMRRGRKIAKVAMARKLAVHLYWMWRQGWDYAEFKKLGPHAGKPGNLYGAQ

SEQ ID NO: 126753 - protein, 269 aa, unidentified
MTFRPHALHLKAELFVKSSRVHVRDDGFTRCNFHLKFFIMVSRGIDISKSSFVAAYPSTNGNPTKTFPNTTARMRELIGTLAVAEHHCVMEATSNYGCCCTCYIRTVLPSVLPPPKKQIKHFSRMMMPVTKTDEKDAYMIAMYGEKMNPPIYKMPSQATIRILTTEGFTYFDNAKQLSRFIGICPTYQQSRTSVNIREHINRNDDERLRSLLYIAFWTALRYNSRECYIRLKANEKPFKVALIAVTNKLVRPVLTITTINSIYRWICPG

SEQ ID NO: 126754 - protein, 408 aa, unidentified
MFLVSHLATSIDKRKNTNAKGWETMQLLYQRCCGIDVHKKMIVACLLSITDQGVQKEIQTFSTMIPDLFRLRDWLHAQECQAVAMESTGVYWKCIWNVLEEGMNLLLCNAQHMRAVPGRKTDVKDAEWIADLLQHGLLRASFVPPRPQRELRDLTRYRSSLAADRTRLVNRIQKTLEDTNIKLASVASEITGKSARAILEAMLAGEQNPEKLADLAQKRMKGKREQLVEALQGTLGAHHRFLLNSQLHQLDFLTGQMREIDQEIAHRLGVQSDPDELEPADVPGSSSVKEQEATLTETSDSSSSACVASNSPPPFSSAQAIRILDEVPGINVRVGAIVVAELGLEMARFPDEDHLACWVGLCPAAKISANKRLSTKIGKGNRWLRQTLIEVANAAARSKGTFLRAYYK

SEQ ID NO: 126755 - protein, 345 aa, unidentified
MPIVGGLDIHRKQITFDYLDTATGEVGRGQIAPADRAHLRAWLARFAGRDDAAFALEGCTGWRYVAEELAAAGVAAHVAEPADTAFARGRKRHAKTDRTDSRHLRVLLEQGRLPECWIPPAQILECRALLEAYHDLRREHTAWIERIHAVFFHQGAPRLGEGALRTDRGLAALREAAAVHLSPAGQLQVATALDMLAAVEARMDTLRQQLLHAARHLAGARALQARLYGVGPLAGLAMTCWLGGAGRFSSARKAVRFAGLDVTVYSSDGKRSPGHLSRQGPEILRWVAYEAGKTHGRASAPGHDYYAAVKDRTDGKIAALSQARKLIRQACHILAELGDDALTAA

SEQ ID NO: 126756 - protein, 357 aa, unidentified
MLAETQDSEEIIARVAALDIGKAELVCCVRVPDEDHPGRRLQEVATYSTMTRSLLGMADRLRCLGITRVVMEATSDYWKCAFYLLEAHGFDTWLVNAKDVRHLPGRPKTDKLDAIWLCKVAERQMIRPSFVPPPQFRRLRDVTRYRADLVAVRTAEKQRAEKLLEDAQIKLSVVASDIFGVSGRQMLAAMIAGERDPRVLAQMARAAMRGKIAALQEAFTGFFTDHHAFLLARMLARVDAIDADIAALDARIEQMTAPLAAAVQRLDEIPGINTTIASVIVAEIGLDMGRFPTAGHLVSWAKFAPGVKESAGKHMTGHATPTWHGCSATPPWPPAAATPSSATGTGASPAAAAARKP

SEQ ID NO: 126757 - protein, 335 aa, unidentified
MNSVPVFVGLDYHQDAVQVCVLNQQGASLCNRSVTNDAETIDRVVTLHGTPRRIAIEACCGAADLAEQLASERHLPMQLAHPGYVNRMKRSPDKTDLGDAQLLADLVRVNYLPRVWLAPKALRELRRLMRHRANLVRQRKDTKLRIRGLLRENRLRCSEAKPWTKAWYGWLQHEAALSESDRWLVDQLLEQLSFLEGQIRVVLERIEQATANDPLVARLKAIFGVGLITATTLRAEVGRFDRFDNGKQLARFCGVTPRNASSGTRQADAGLIKAGNPEVRTVLIELAQRLIRWNHAQWGQLAHGMLARGKPKNVVVAAVANRWVRWLYHELQRNP

SEQ ID NO: 126758 - protein, 519 aa, unidentified
MNLAGLGARGSSRSVTVVRCGAIGCPVGRLVPEADNCAVWRAPAGWSVYPVGEVCPFKDAFGREPAASWITMNTTLPVLDSQAAFVDVGSEHMHVSIAGGRPEVFGAVTGELHRLRDWLQAQGVRSVAMEATGVYWLPLYGVLEAAGLRVLMVNGKHTRNLPGRKTDMQDCQWGATLHAHGLLRGGFVPPAHIRRLQDYLRLRQDHLTLAASHVQHMQKALERMNVKLHDVISNLVGVSGRAVIEAILAGERQPLRLLALCDAQIQKRKAARVHEALRGTWAEEHLFALRQAWESWQHYQGQIAACDAQIQQVLQALEATLRGAEEPAADRPGPASRKRPSLNAPVIPGLDELIQRLCGGRDLTVLPSCTSYSVLQLIGEIGLDLNAWPTAKDFTSWLGLAPGSHQSGKRYRGTGRKRNRAGRLLCVMARSLARSKDMALGGFYRRMAARRGGLVAIIATARKLAVLIWQTMVKGLGFVEEGLKRYEARVLETKQRTLHRLAKQLGFAVLPAPTAPKAQ

SEQ ID NO: 126759 - protein, 362 aa, unidentified
MFRPHTLYIRIRIVRKVHEPVFAMRDQDVSDVIKTKNRTAMQYIGIDVSKATFVVAYSSDKGGEIRTFNNTTAGIKQFIGTLPKDGSIHCVMEATGNYSALLLYMLNVAGITVSMENPLKVKNFAKAMLSTIKTDKSDARLITLYGEKMNPRPFKVQGEAILRLRQKRTVIRQLTKQITAMSNLRGSLACLPVPDKGATHTVDETIKFLEKKRDRLQSELTDLVEVEFSRQLALLTTIKGIGITLATALILTTGGFTYFQNAKQVSRYLGICPTYEQSGTSVNIRGHINRNGDAYTRGLLYIAAWPASRFNAQCKETYTRLRQNGKPGKLAMIAVANKLVRQAFAVVAHDKEYIDGFVSNRP

SEQ ID NO: 126760 - protein, 406 aa, unidentified
MTSVFCGIDWATDHHDIALLDEAGTLLDKLRIDDTPTGLSQLLDLLAQHGDSPEHPIPVAIETSHGLLVACLRATGRPIYVINPLTAARYRDRYALSRKKSDHLDAKVLANILRTDPAEHRPLPADSHLAQAITVLARAHQDAVWDRVQTGNRLRSHLREYFPGFLTVFRHFREGLASPVTRTLLAAAPTPTQAAQLTRPQLRAILKKAGRQREITGEVERLHTLLREPQMHQPPTIEQAMGTKTLALLRQFNAACASADDLEAATTTAFATHQDAEIITSFPGLGALTGARVLAELGDDHTRFTSPRALKAYAGSAPITRSSGRKTTVLARHIKNQRLASAGYIWAFAALTASPGARAHYDRRRQAEDRHVAAQRNLFNRLLGCLHHCLTHRIRYDEQTAFPSTA

SEQ ID NO: 126761 - protein, 343 aa, unidentified
MRKYAALDVSMEQTAICVVDESGKKIIEGKVQTDPDTVTTWLAEKAGSLEKVGMETGPLAVWLWNELRARGLSIACLAARHASAALAMMPNKTDRHDAAGLAQIVRTGWYKEVRIKSHAAYVVRALLSARDALVGIRGKIENEIRGLLKTFGVMFGRKVGGFTRRAEEIVAGELAASPEIKRIIEALLEARRAILDRIKVLDSRVRSVAKANATARLFMTAPGVGAVTALSVASAYDDPARFSRSSSAGAYLGLTPRRYESGEISRNGRISKRGSKLTRKHLFEAANALLTRVGKFSSLKAWGLRLAKIAGFKKAKVAVARKLAVILHAMWKARTPFRWSVAV

SEQ ID NO: 126762 - protein, 337 aa, unidentified
MEQQRQYVGIDLHRRRSVIVRMNEDGQVLGVDQVMNDPVEFAVAVAKAGADPEVALEATYGWYWAADLLEANGARVHLVHPLGLHWDTRRVKNDVRDSTELANRLRRGDLPEAFIAPAEQRELRELVRYRAKLTSLRTSAKAQIHAVMAKEGILPTLDDMFGPGGRALIDQMPFESAYRLRVDSLLKLLDHYAGELVVVEAELAARLAGHKGYEAIQAIKGIGPIMAAIFVAEIGDTSRFPTARHLCSWAGLTPSHRESDTKVQRGHITKQGNHLVRWAAIEAVARYHGGDPIAPTYQRVARRRGRNIGRVAAARKLLSLVYYGLRDGNIRCLAETT

SEQ ID NO: 126763 - protein, 387 aa, unidentified
MTVRTVNNLPASAHAETVRCLFAIELSKQSWVIGFTTPLSAKISRRILSGGDWKGLLELIEEVRARVSREIGRPVEVMSCYEAGYDGFWLHRQLEAHGVRNYVIDPASLQVDRRMRRAKTDRIDTERLLRSLMAYLRGEPKVWSVVQVPSVAAEDARRLHRERDRLISERVQHVNRIKGLCALQGIYDYHPLHPQAMARLEQLRTAQGIALPPRLKSEIKRELHRLTLVVEMIATLEAERDAIVENEASTHVNAEKIHALHKLKAIGPEFATVLVGEIFHRDFNNRRQLASYVGYAPSPFQSGNVAHDQGIGKAGNRKGRTTGIELAWLWLRYQPDSDLSAWFRARVGAVKGRIRRIAIVALARKLLVALWRYLETGLVPRGAVFKA

SEQ ID NO: 126764 - protein, 385 aa, unidentified
MQMILGQSRFAPFGLPFLGFRELMKGEQSVTAPYDYHIGVDYHKSYSHLVVQDSAGKTLRSGRVKNDRQSLGSFLERYRENSHAVVEATRNWMVMYDWLDDICDDVVLAHPLKVKAIADAKIKTDKIDATVLAHLLRADLVPEAWAPGEKARELRIALRERMFYVRLRTMTKNRIVTVFDRYPEQTAQLKKLGDLFGKTGRQQLALINVSEVDRIQIDRGLDFIGDIDGRIKQSEATIRAMTKTNGNVKLLKTIPGIGEFFARLIDAEIDDISRFRNPKKLAAYAGLVPSTYSSGGKTYHGKIIKQGNKWLRWAFVEAVAPAVATDPQLRAQYEHLKFRGTNKARVAIARKLLTIAFQILRDQRPYERRGANGEEGASSTISRLS

SEQ ID NO: 126765 - protein, 415 aa, unidentified
MELLHERCAALDIGKRDLKACVRTPTQGRGRSRRQEIRTFATTTNALLELRDWLLAQEVTLVVMEATGDYWRGAFYLLEDELTVILVNAAHARGLPGRKTDVSDAAWLCQMGECGLLKASFVPPEPIRRLRDLTRYRSTLAAERTREAQRLEKELEDAGIKLSSVAADILGRSGRAMLAALIDGERDVHVLAEMAKTRMRPKIPQLVQALTGNFGEHHAFLCRIHLERIDQLSAAILELSRRIEEQMHPFARQVQRLQTIPGVGPATAEVIIAETGADMSRFRTAGHLASWAGMCPGHHESAGKHKSGKTRHGNRWLGAALGTAAMAAVRTKDTTYLGARYRRLTPRLGKKKALVAIEHSILTAAWHMLTNDTDYHDLGGDYLARRDPEAAMRRIVRQANSLGLTVRFDPIEPAA

SEQ ID NO: 126766 - protein, 327 aa, unidentified
MSNRKWIGIDVSKAELAICVMNADKTVVHAIFANTKEGFRSLINYLKKRKAVGCAVCLEATGPYGEDLAAYLHARGYLVSVVNPVRIKRYAESQLRRNKTDKLDAEVIADFCRTQEPALWTPPDPAWVELRALVRHLDDLIAMQVQEKQRLESTTSATVRADLKDHIAYLQEQIEQVTQQVNDHIDHNPEWKHKRELLNSIKGISDRTSSRLLAEIRDITAFDTVEQLVAYVGLNPKQRQSGKYKGQVKISKIGNAALRSALYMPARSAKRHNPLVQNLVKRMTDEGYCANAITVAVMRKLLHYVYGVLKSGQPFDPHYLEKQAISA

SEQ ID NO: 126767 - protein, 404 aa, unidentified
MSVHVAPVTSSTIVVAVDVGKTSAVFSVTDAARHRLVGPSEFAMTGSGLAAAAARATAVMPPAGRVKVGVEAAGHYHRPVLDHQWPQGWEVLELNPAQVAEQRRVQGRRRVKTDVIDLEAIAELVLAGYGRPVTARDVVIGELSAWAVHRSRRVATRNATKNQLLGQLDRAFPGLSLALPDVLGTRIGRLVAAEFADPARLAGLGVNRLIRFAATRDLQLRRPVAERVVAAARDALPTRDAVIARQILAADLVLLADLDDQIQSAESALALLLPRSPYATLTSVPGWAVVRVSNYAAALGDPARWPGPRQIYRASGLSPMQYESAHKRRDGGISREGSVALRRALIDLGIGLWLNEPTAKNYAHALKDRGKHGGIVACALAHRANRIAHALVRDRTTYEPTRWV

SEQ ID NO: 126768 - protein, 424 aa, unidentified
MNLTQNDRLKQVTADTLIVGVDIGSKTHFCRAFDWRGFELSRRVFRFSNTGMGFLTFLRWTEEVMNKTGMKKVIVGCEPTGCYWLTFQKFLQDHGIQLVTVNPFTVNRSKELDDNSPEKSDLKDPKTIALLVKDGRYSTSYLPSGVYAEIREASVCRDQIMKQHIRLSNQIQGWIQKFFPEYLECYADWDSTSGLLLLKEAPLPQDILKIGAGGINQIWRNAKVRAAGIKRAQILVEAAQNSVGLEAGEAARLEIWVLVNDYMLKAEQLRRLDEYLEEKVKEVPNVEKLLAIKGVGMSTVIGFVAEVGDIGRFTDPKQIQKLAGLEIVKKSSGKKKGQPRISKRGRRKLRRTMYESARALMNWNPAFQDVFLYYRNRKKNPLGGMQAKIAVACKAIRIFYVVLQTGCDFDEEKFRKDIIRPEAA

SEQ ID NO: 126769 - protein, 338 aa, unidentified
MALYAAIDLHSNNSVLCVLDETDRIVFSKRLPNDLAKIEQALRGCPGEIQGVAIESTYNWYWLVDGLQDAGFTVHLVNTCAVKQYDGLKHTGDFDDARHLAHLLRLGILPTGHIYPRQARALRDLLRKRGQLVRQRSSQILSMHNLIARNLGAHAKGNEIKRWEDADIVAMPLLPEQRLALMANRAVMDCLDAQVSRLETAILQQARGSETFQALNTVPGIGKTLALTIALEAGDMSRFASAGNFASYARTVSSRRESNGKKKSDGNAKCGNKHLAWAFIEAAHFAVRYDDTIRRWFQKKCASSLQVVAIKAVAHKLARACFHVMKTGTPFDAARAFG

SEQ ID NO: 126770 - protein, 369 aa, unidentified
MTKTLYVGLDVHKDTIAVAVADEGRGGEIRFFGTIEHKADSVLRLTKQLAEAGKTPTFCYEAGPCGYGLHRHLTKLGFECAVVAPAMIPRKAGDRVKTDRRDAEMLARLWRAGELTPIWTPDEEQEAMRDLIRTRKQAMDAVKVAKQQLLSFLLRHGLRYENGSYWTKRHRRWLAELRRFRFDHQQLAFEELKRAVDQAEARVASLDQAVDAAVQTWRFAPVVDALRALRGVNTTIAATVVAEIGDITRFENPRQLMAWLGLVPSEHSSGSTTRRGRLTKTGNALARTMLVEAGWSYRHPPKEGQPYLKRSEHLPQEIKDIGWKAQTRLCKRFRHLSNTGKPQPRVLAAIARELAGFIWDIARKTPLPA

SEQ ID NO: 126771 - protein, 421 aa, unidentified
MEEVYYERCAGIDVHKKLLVVCLRIGRKSEVREFGTLTHEIREMVAWLKSKGCQMAGMESTGSYWKPIYNIFEQEGLPVMVCNAYHIKNVPGRKTDVNDAQWIARCLSQGLLNPSFVPDREQRELRDMTRFRKSQIEERARNINRLQKFLEGANVKLGSWLSDVEGKSATELLELVIGKPDFTVEDVAERMHGRLKSSSKELFLSLNGSITLSQREFLTHVMAVIREQTAQIEKTDAMIQRSLSANYKAAVQALDAIPGIGKISAEQILAETSTDMSHFRNQHSFSKWAGVCPGNNESAGKRKSGRTPPGNKTLKSTLTQCAKSARKNKSSFFCAQYSRLVTHRGKNRATMAVAHSMLIAVFFVLKGAKFKDLGADYYNKFNRERKILSHVRQLSKLGVAIPGEILQGALLPPLDPRCRSA

SEQ ID NO: 126772 - protein, 365 aa, unidentified
MENHSIVWVGMDTDTKKNQIAVYRGWETAAEEFEAGMDRQGIKRLVQRLKREVGEVRCVYEAGPCGYELYRKLREAGIHCDVIAPSLTPRRPGDRIKTNRRDARNLGRLYRAGELTVIAVPNQQPEAVRGLTRAREDVREDLTRRQHRLNRFLHRYGYHYSEGERWTKKYWLWIRQIRFEDTNLQVILEESIRAVEQSLEQLKTYDAKIEENAHKPEFATKVARYQSLRGVQTVTAMTLATEVWDMRGYPTAPQFMKSTGLVPSENSTGEHERRGRITKAGNAHLRRVLVEAAWHYRHRPIAGPAIKKRRRQQPAAVVSIAERADQRLNRKFRRLVDRYNKKPSIAAVAVARELAGFIWAIGQED

SEQ ID NO: 126773 - protein, 342 aa, unidentified
MNISTIGIDLAKNVFQVHGVDAHGDVVVVRKLRRAQVVAFFAKVPVCLIGMEACATAHHWARELTKLGHTVRLLPPAYVKAYVKRSKNDAADAAAICEAVTRPSMRFVPIKTEEQQASLAVHRTRALFIGQRTQLINALRAHLAELGLVAETGRDGFTNLVEMVWDEDNVSLPPAMRQALLAVVDQLEALSQQISKLDRVIMAQHKASDVSRRLESIPGIGVIGATAIVATVADPSAFKSGRDLAAWIGLVPRQHSTGGKEKLGGISKQGDRYLRRLLVVGATAVVRQARLHPEKYLWVMKLLAKKPAKVVAIAVANKTARIAWAIMAKGGHYRAPELAAAA

SEQ ID NO: 126774 - protein, 362 aa, unidentified
MFGFARTITPKGAFMRFYTKAHKHYCGIDLHARKKYVCILDSEGTVLVHREVSCNPESFLRIVAPYRDGLVVGVECMFAWYWLADLCREEKIEFVLGHALYMKAVHGGKAKSDKIDAYKIAVLLRGGMFPLAYVYPPEMRATRDLLRRRNFFVRKRAELMAHIQNTVIQYNLPPLGFDLTCEESRHEVAQLFPNPEVKKSIEIDVAMIDAFDDVLKVLEPNIEKTARQHNKHALTLLRSIHGVGKVLGLVMLYEIHDINRFPTVQDFASYCRLVKCAHESAGKKKGTGGSKIGNVHLKWAFSEAALLFMRHNPAAKILVDNLAKTHGKGKAISILSHKLARAIFYMLKNNVPFDREKFLATA

SEQ ID NO: 126775 - protein, 338 aa, unidentified
MTIETLGIDIAKTVFQLHGVNRNGRLVLRRRVMRDQLLHVIAQIEPCTVAIEACTGAFYWQRKFEELGHRVKIVSPQYVKPFVRRQKTDGNDAEAICTAARQPHMRFVPTKTIEQQDIQALHRARQRMVNHRTAVVSQIRGLLLDRGIAFPKSITRARRMVPEILADEESELTALAREAIGELHDLFRDLDRRIASFDKKIDRVFRASEDCQRIARIKGVGPKTATAVIAAIGDGTEFKNGRHLAAWVGLVPRQHSSGQRTVLLGISKRGSQHLRSLLVHGARSVVRTAAGKTDPFNAWVNQLHQRRGFNRATVAVANKNARVIWAVLRSGEVYHAAG

SEQ ID NO: 126776 - protein, 398 aa, unidentified
MWQKISTIALLSALMVKSWRMCSQFPIPWMGSTACCSESRNNSESFDILYERIRSVAPDLSKVKVGLEATGHYNYNILSYLLDKHLTAYVINPLHTNFYRKGLSLRKTKTDRIDSRTIALMLLTDLSLKPYSVSSYHRENLKSLTRYRFSRVQERSRQKSSISRLVTILFPELSQLVPCIHISSIYTMLEELPGASYVASVHLTRLTNILSKASKGRFGREMAITFREAARTSIGAKIPAKSLELRHTIADVRAIESEIREVETEIQKLMDEETTTITSVPGIGTQMGAIILAEIGDFSRFDSPDKILAFAGMSPSTYQSGKMISSYAHMEKRGSRYLRFALFNVTKHVCNYDPGFAAYLAKKRAEGKHYNVAISHAAKRLVRMLYAMETNGTLYEAA

SEQ ID NO: 126777 - protein, 345 aa, unidentified
MNEVTVIGIDLAKSVFEVCLKAADGRVVERRRLRRAAFERFMETAPRVLVGLEAGPGAHYWARWLKARDFAVKVMSPRAVRAYRDGPHKSDALDADAVGEAATRARVRAVAIKSEEAQCLQALIRVRACRIAQRTRVTNQLGSLMVEFGIAAGRNLATWYNRIAATPAFAAAPEEMRLLFDELIEDARALDRRIRQLDAEIARQVKDNPLGWLLTTVPGIGPVTTAQIIARIASPDDFANARAMPAFLGLVPRLIASGETSRLGPITKHGPADIRQGLVLGAQAVITAALRNPAKDDPLYVLARKLLAKGKERNKVAVALANRMARIACVILQTEQPYNPPRRAA

SEQ ID NO: 126778 - protein, 355 aa, unidentified
MESTKYIGMDVHKDAISIAVLNSSGKLVMESIIETKAITILEFVHGLRGSLYLTFEEGTWAAWLYDLLKPHVTKLVVCDPRRNDYLKQGSKSDRIDARKLAELLRSNLLRPVYHGEHGVRPLKELARSYLTITKDQARVMTRVKAVYRSWAIPCAGKQVYGQRHRLEWLGKIQEAGVRRRAEFYYVQLDALRSRRTTRRSELLLESRKHGASKLLSQIPSIGPIRAALLIALLQTPDRFRTKRQLWAYSGLAIETHDSAENQYVNGQLQRSRKQASIRGLNQNHNHDLKNLFKSASAVAAAKAGPFQKFYDAQIGKGLKPEMARLTLARKIAAITLIVWKKGVSFDARYLNPQTA

SEQ ID NO: 126779 - protein, 415 aa, unidentified
MEGAEKARGLERYIGLDIHKEYALVGGQNGRQEWVLPARRVGMEKFREWAGANLREGDAVVIETTTNVWDIYDVVAPLATRTVVAHARGVRQIAEARVKTDRKDIERLIRLLIADIVPEVWVPPVEVRELRGMISYRNRLVKTSTMVRNRLQSLAHRHNLLLPKGALTDTGWWAGQKLSALEQIQIRQELALLEELGKHKAEVDAELGRQSLGAVWGKQAVRLLQLSGFGVVITMTVLSAIGDIARFESAKKLVGYAGLGAGVHDSGKEHIEKRITKSGRKELRWALVEAAWRAIRISPYWKEQYEKYLKRMRKPQQAIVVIARKLLVTVWHVLTKEEKDEHVSEEDLAYKMLVLSWDMDESARLGLTCKQFAKYALLKLGVETDITRFVRKDVPRRVASNAETLARMAELGLSL

SEQ ID NO: 126780 - protein, 341 aa, unidentified
MKQFVGLDVSMKETAVCIVDDTGQRIWEGSVTSSADAIAAIIREKAPDLVRAGIKTGPQAVWLWHSLRERGIAVDCSHARRAAAALKLQANKTDRNDAFGLARLVHSGWYEPVAIKSFDRYRMRAVLTARERIVRMCTTMINQIRGLAKTFGLALSAGKGQVFEQSVRRVLPDDIVLRDLFESLLSVLSGLRDQRRVFDRQLARFAREDEACRIVSSAPGVGSITAIAFVTAVDDPSRFRSACDVGAYLGLTPKRYQSGEVDIGGRISKAGDRLTRKLLFEAATVILYRASPTIALKQWGLRLSARSGSWKARVALARKLAVTLLTMWKTNTMFENSSFAG

SEQ ID NO: 126781 - protein, 335 aa, unidentified
MQIKHFIGIDVSKDTLDLSVVVDGENIQHYCIKNITKEIKSTVNKIMKAFGATVDDTIFCMEHTGMYNLPLVKWLESQQGKMWLESGVHIRKTLGMVRGKNDKVDSARIAMYAFTNRHQIRLWKAPRKVIERIAALLSQRSRLIKAKKQLNTANQEQRKFLDKDIMSSLNKYTSKTVVVIVKQLEAIENEILGLLEEDEKLNRMYKIITSVNGIGFVTASYILVTTNEFININNPKKYACYSGVAPFEHSSGSSVRGRTRVSQMANKNIKTLLHMAALSTIQMQGDLQEYYNRKVAEGKNKMSVLNAIRNKLVLRIFACINQDREYEKNYCYKFG

SEQ ID NO: 126782 - protein, 459 aa, unidentified
MQRNRSKPKTQRTMPMVHANAAAIDIGATMHMAAVRADRTSEPVRSFGTFTTDLHRLVDWFTECGVETVVMESTSVYWIPIFELLDARGFTVFLVNARDAKHVPGRKTDVSDAQWLQRLHSYGLLRASFRPKGQIAELRAYMRQRERLLEYGASHIQHMQKALTEMNLQLHHVVADITGATGLRIIRAILAGERDPKVLARLRHYQCHASADTIEKALTGSYRSEHLFALEQALALYGVYQEKASACDIRIEAVLKELSIGRGPRSDPLPSPRRHRATQANGLAFDVRAALFALLGKDLTQINGLGPYLSLKLIAECGDDLSAWPSAKHFTSSWLGLAPSNKISGGKVLSSRTRRCGNRASALLRLAAVTVGRTDTALGAFYRRLSARIGKTKAITATARKIAALFYNALRHGMEYVDPGASFYETRYRARVVDNLHRRAKAFGFVLQPIEPTPSSVVS

SEQ ID NO: 126783 - protein, 309 aa, unidentified
MEVEFYGVDVSKAKLDVACDGEVVLVENSKSAIKAFARRMPAGSFVALEATNTYHLQMANICHSYGMHVFVINPRLTRRYREANGLRGHNDRIDALTLARYIEREHDGLREYVPLSEDQRRLPSLVRRRWKLVGMRTQLMESFGSMSELKREVKALAVRIDALIAKLELLIDKQLEGNAGRARIATIKGVGPVVSAVLVADLDAHAFASADAFVAYYGLDPMPNDSGRRRGERKLSKQGQRLGRAMLYNAAMSAVTSKVWKPLYQQCLARGLKKVQALIVIARKIARAAWSIHKHATTFDPARVYRALT

SEQ ID NO: 126784 - protein, 348 aa, unidentified
MITIGIDPHSRTHSAAALDDGGRVLAEITVGSGGGELDRLVRWIEGVGPERIVAIEGARGFGLALCRRVLAAGETVLDVAPALTASERRSSRRAGKDDRGDAVAVARVALREEGLPHASAEVRGSNLKLLVDARDQLVAEATRTRNRLHALLLTIAPGYHEQVRDLTSSAALLVARRLASRARGTDRVRSSLACSAITRLRSLSGEIGVLEREITSVLDQAAPANLLSICGVGPLVGAKILGEVRDVGRFSSAAAFASYSGTAPIPASSGTIIRHRLHRGGNRQLNRALHTVALTQARRDDRAKQFLARKRAEGKTPREARRALKRHLASAVHRALLLDAEEVSSGTA

SEQ ID NO: 126785 - protein, 420 aa, unidentified
MTRIQTKKTQVVNHKSLIVAVDIGKRTNMGYYRFSHNRRAKPFPFGNHAHGFGLFWDRISQVQRQNQLEEIVVGFESTGSYGVPLVHFLKEKGVKLVQVNPMHTKRLKELTGNSPNKTDRKDPKVIADIMELGHALTVIVPEGSAAELRRLTQARERSVRRRTGLLNQLQDLVFLVFPEFLTVMKGVKSKTARYLLNRYSTPGDLVACGDLDLLCSRVKKISRGMIGRERIEPLYLSACSSVGIQEGRNSLVLEIREILSWIELVDGFIAQLEERMGFHLQQIPYSSSILSIKGVGPITAAGLIGEVGDFGYFRTIPEMEKLAGLDLFEISSGLHKGRRRISKRGRPLLRKLLYFGAVNVVRTGGILHGWYHRALERGMPKTKALVAVARKLLRIVFAVVRDHREFISDYRNQPGLRMTA

SEQ ID NO: 126786 - protein, 365 aa, unidentified
MTSMTDQHLEVIAGVDTHGQTHHAAVVDRLGRHLADKEFAATGAGYRQLMTWLGSHGTVAAVGVEGTGAYGAELARVLTRSGLSVVEVDRPDRKMRRLRGKSDPIDAYAAATAVASGRATGTPKTRDGIVEAIRALRVPRRSAIKARTQAINQARQLLVTAPEALRAQLRGLSATELARTCARLRPDDLAGPTGATKAALRRLGRRILALAEEIAELDAELKTLTTQAAPALLVRTGVGPDVAGQLLATAGDNPDRLHSEAAFAHLCGVAPIPASSGRRDRHRLNRGGDRAANHALHTIALSRMRWDPRTKAYVQRRTKEGLSKKDIMRCLKRHIARDIYRALIHDLQARYAHPSPPAADLPQAA

SEQ ID NO: 126787 - protein, 413 aa, unidentified
MAEEIEWFVGVDWGSQSHQVCLFDARGECLEERAVAHGGPGIEGLCDWLIARTGATPELIGVAIEITHGPVVEALLERGFCVYAINPKQLDRFRDRFTVAGAKDDRRDAQVLGDSLRTDRHAFRRLSNDEPVIVHLREWSRMADDLQQERSRLASRLREQLWRYYPQMLELADDLAADWFLDLWSQASTPARAARLRATTIERFIKKYHLRRWQASEALRILKQKPLSVAPGVVEAASDHIRTLAARIKLVNQQLKAAHHKLDELCAQLIPSEDDEPGQQRDVVILRSMPGLGRIILAVLLAEGWQPLRRRDYHALRILSGVAPVTRRSGKTCVVVRRYARNKRLENALYHWARVATQHDALSRRRYAALRRRGHSHGRALRTVADRLLSVACTLLEQQTLFDPTHEVGDAAA

SEQ ID NO: 126788 - protein, 420 aa, unidentified
MKSASNTPNTALPEFPPNDVTAGLDWARDDHAVSIVNGRGRQIAHTMVEHTAAGLRDLVAFLGRHGVGEVAIERPDGPVVDTLLAAGLLVVVISPNQVKNLRGRYGSAGNKDDRFDAFVLADTLRTDRPRLRPLVPDTDATVALRRACRARKDLVAHRVAVTNQLRAHLRNVLPGAVGLFKDLDSPISLTFLARFTTQDQADWLSPKRLGDWLAKQGYSGKVDPAVLHTRLTAAPRGITGPDAESQAHITRALLAVVTTLVAQIKALSTQIDHQLDAHADAHIFTSLPRSGRVRAARLLGEIGDCRARFPTPESLTCLAGAAPSTRQSGKMRVVGFRWACDKQLRDAVTDFAADTRLVNPWAADLYDRARTRGHDHAHAVRILARAWLHIIWHCWQDRVPYDPDQHRALQRFLANQNEAA

SEQ ID NO: 126789 - protein, 338 aa, unidentified
MGVYIGIDLHSNNSVVVVVDDAGKVLYEKRLRNDLPVILNELSAYRKRCRGVVVESTYNWYWLVDGLMEAGYGVHLANTAAMQQYSGLKYSDDKSDARWLAEMLRLGVLPEGYIYPKEGRAVRDLLRKRSQLVRQKVSQMLSIQALLSRDAGTTLSGNALKAIAEEDLDRLLPDPLVARAAKSNLRVYRCIEKEVAELERAVLSRAKGCAGFEDLLGIDGIGKVLGLTILLEAGDMGRFAGAGNFASYCRCVGSVKLSNGKKKGKGNTKSGNKHLAWAFVEAANFAIRYSAIVRRFYERKKAKTSGVVAIKAVAHKLARAVYHVLKEGVPFQAERAFA

SEQ ID NO: 126790 - protein, 370 aa, unidentified
MTERTTYFVGLDVHKDSIAVAHAEAFRAEPPHYVGVIGTRQADLDKLIRRLHSRASDLVFAYEAGPCGYVLHRYLTGKGLDCRVVAPSLIPKKPGDKVKTDRRDAVEIARLLRSGDLTNVYVPRIEDEAIRDLCRARDAATVTLKAAKLRLKSFLLRQGLHYSGRADWNQAHRRYLSKVVCPTPAQQVVFQESVRAVDEQIDRLHRVEQELLAMAPSWRLYPVVEALQALRGVQWIVAITVVAELGDLTRFDNPRQLAAFVGLIPSEHSSGDKRRQGGITKAGNGRARRALIEAAWAYRYNAKISPIIQKRIESLPKPIQDIGWKAQLRLCKRFRRLCARGKNPNVVVAAIARELIAFMWAIAKEISTNV

SEQ ID NO: 126791 - protein, 310 aa, unidentified
MGVCAGVDVAKAHLDWVVGSRGETERCPNTPAGVRRLVKRLSRLDFDRVVLESTGQYERALLEALEDEGVSVVRVNPVRVRRFAEGMGVLAKNDALDARILALFGEKADLAERPPKSPRERLLGDLASRRRQLISMITSEKNRLEHAKGWAGKDIRSHVRQLEKRVERLDAEIDRVVAEDAKQQGDFERLQSVPGVGPKVARALLIDLPELGQLDRRRIASLVGLAPYARDSGQKRGSRSIHGGRAAPRTALYLAAMVGSRWNPELAAMKARLQEAGKPPKVILIACARKLLTILNAIVRDQSDWRTVSP

SEQ ID NO: 126792 - protein, 342 aa, unidentified
MQQSIFVGLDLGSSQCHQTIINADGMIIRSRAVPTSEQQLRNSFADLQGDVHVHAEASELSDWVRSIINPLVSRFVISHPRSLAWIAKDAVKDDAVDARKLAELLRLNLIHEVYYEERADRRSFKLLVVHHEQLSREQARLKSKIKARLRTLGIIRKDARLFSEAGQIELFDSITDPLIEQMFRQSFAVLNQMLISLTDAKTAMIEFSRSLPEVRLLQSAPGVGVITACRFVGYVQTPQRFSNKRKLWRYARLGITRRESNGKRLSHPHLDPAGVGSLKDCSRKIFEAARRTKKDNSFKRFYEQSLDTTKNAVHARLSTQRKILACLRAMWLSMQPYRDDGG

SEQ ID NO: 126793 - protein, 432 aa, unidentified
MNDLLKYIVKENNIFTHYKDSIAMKRYYKNKEIDSKTEIVTADIGKINHYGYIRSAAKDLKTFRFSNDKEGFDLLWSKVEKFKKSNNLEDIVFGFESTGSYGEPLKLYMQQKGVILIQVNPMHTKRLKELSDNSPNKTDKKDPRVIADILMLGHGLTTIIPEKKIADLRELAQSRESRLEDINRVKNRIEALLAKHFPEFLLIMGLNTKTSMYLLKHYPTARAIGKQRINKLAWKVYKVSRSQIKYSKVVKLDQAAINSVGVKEGQHAYRAEIRRQLEQVELLEHQLGEIEKQITAVVEQMPEGRILRSVKGIGVITAAYLLSEVVDFKAYSVQKEIEKLAGLNLYEISSGKHKGQRRISKRGRALIRKVLYMVVLNMVKKSGIYYEDYQSYLKRGLKKIEALVIIMKRLLRTVYALVRKNEMFKEGYKIAA

SEQ ID NO: 126794 - protein, 420 aa, unidentified
MKAYNINDFAVLIGIDWADTKHDICEHPNHTKKYHYCIIKSKPEALHDWAMSLKQRYPNQQIAVACELKKGPLIYALAKYSHLTLFTINPSSVANYRKAFTPSNAKDDPSDALIQVEILTLHMDKLTVIEPESAAMRSLTQLVEYRRNLVQDSVDLSNKITATLKNYYPQVLELFKEKDTTIFCDFISKWPSLTKAKRAKKQTLLDFFNSHNSHYVHVNEARIASIKSAMPLTDDRGVIEPNQLLVGVLIAQFKVLLKGIESLDKVIKQAYKVQQDKPIFDSLPGAGPQLAPRLLVAFGSNRNRYDDASELQKYAGIAPVIERSGKKMWTHWRYSCPTFLRQTFVEWAGFSIRYSFWAKAYYEQQKSKGKPHNSIIRSLAFKWIRILFRCWKTNTPYDESKYLKALKRRGSPLLKFAVNS

SEQ ID NO: 126795 - protein, 417 aa, unidentified
MTEYAACLGIDWADKKHDLCLFDAATGKKTKQVLPHTPQAIAEYFSNLRARYRGQQIAVGLEQSRGPLLFALLQYDFLVLYPINPSTLAKYREAFSPSRAKDDPTDAEYAAELLMQHSDRLKAWHPDDDETRTLRYLVEHRRRLVGDRTRLSNRMTSLLKCYFPQLLSWFPDLSTVLVCDFLLRWPALERLRGVKRTSLLHFFRVHHSVRSDTLEKRLAAIKESVPLTTDRAIINSSVLMITALAAPMKTTIEAIRQFDREIQKLCAAHPDFPLFQSLPGAGEVYASRLLAVMGTKRDRWSSAAELACLSGIAPVMERSGQSTWIRWRYFCPKFMRQSFHEYAGESVKHSFWARAYYQQQIAKGKSRQAAVRALAYKWIRVIWKCWQTRTPYNEVRYLENLRMKGSPLLSYAAKNAA

SEQ ID NO: 126796 - protein, 451 aa, unidentified
MAKRREKRERRSVVWEPDAAGIDIGAEEIYVAVPPDRDEESTRRFSSFTCDLHALADWLGRCRIRTVAMESTGVYWIPLFQILEERRFQVYLVNAHYLKSVPGRKSDVSDCQWIQYLHSVGLLRASFRPPDAICALRTLWRHRGSLLEMAAEHILHMQKALSQMNLQLHHVLSDITGTSGQAILDAILAGKRDPVELAQLCHSRVKSPRDKVAQALVGDYRPEHLFTLKQSLEGYRYYQKLILELDQETARLMQALPSATDQPLPPRTKATAYHRQGNDPHFDLRSELYRISGVDLTDIPGVSAATAQVILTEIGSDVSRFRHASAFASWLGLCPEKRVSGGKVLSCKTRKVKHRAATALRMGANSLCRAKGYFGEFFRRMRAKLGTAQAITATAHKIARILYHVLSTKEPYTETIFHLYDEQAHQRAEIRLRKQAARLGFQLVTIPATGE

SEQ ID NO: 126797 - protein, 355 aa, unidentified
MPSKTDTAVAHTIGIDTGKNTLHMIGLDEKGAIVLREKVSRTRIAARFVNVPPCLIGIEAGMASHHIARELAALGHKVKQVPPAYSKPFRQVHKNDFRDAQAVAEAVERPSTRCVPIKTDGQLDLQALHRVRSRLVGNRTAVINQIRGFLLEHGIPVRQGHRFLRQQLPQILATRADVLSPRMIRIIGDLVEDWRYLDERIETVTDEIEALARADEGCQQLITVPGVGPIISSAMVAAIGNGAAFCKGRDFAAWLGLVPKQMSTGDRTILGRITKRGNRYLRTLFIQGARAVLLHPTSWARHSFGPWLTTAARRMHRNVLTVALANKLARIAWTVLAQGRRYEARVEPRIEPAAA

SEQ ID NO: 126798 - protein, 489 aa, unidentified
MSTARKQQGKKKDPMLNARAPQRKVRGSHCQQGKGNQRGSELTITNPDAAGIDIGSQVHYVAVPEGRAQESVRSFGAYTAQLDELVQWLKDCRIKTVAMESTGVYWIPLYQKLEEAGFEVLLVDARQAKHVPGRKSDVQDCQWLEQLHRYGLLRAAFRPEDSVCRLRTLQRHRKDLVESAAMWIQHMQKALNEMNLHLHHVLSDISGLSGLAILDAILAGERDPRKLATLAHYRVQKSQAQIEAALRGDYRPELLFVLSQTLQNYRQMQQQIAQCDLTIEKQLAKMADCTNPNQASEPTQQSPDSAGCKPPKRKPKDALELSLAGHLKRILGVDLTTIPGLNILAVLNLLSEIGTNMGKWRNEKAFVSWLGLSPNNKISGQRVLSSRTRKVVNRAATTLRLAAMLLGKSNTPLGSFYRRKRAQLGAPKAITATARKLGCLIYRLIKNGQGYKEPDLHTYELKYKDQILNSLRKRANSFGFDLVEVPNAA

SEQ ID NO: 126799 - protein, 445 aa, unidentified
MINRTIGIDLAIRGDHVAQIYDNGQPVGRPIRFRHNPCSLDAFVARAISDIGPDDCVQAIMEPTGMSWFPVAHRLADVGVAVARVKGKRVKALRRYLSEHAKTDLADAHVLAAIPSFGGPRLDPVHIPAPKSHALQRLTKQRSRFQDAVASAKRRLLDLVRWASPLLERVLPDFGTRLAMALLQHWVDPEVVLKARRSTIARFIALHASGNHPHSGAFVDALIEGLRQAAREALALHRDHLDFTELQAEICIEIDVMKVNMLARDQLTLKIEAIYCELQPEDVLRTIPGIGRHLAPVLLGVLHCADRFQSERHIRGFCGLFPRRSDSGGTERPGQKITQGGNDRIKRALMLAADAARKIDPDLAEVYCKMMTHRSHHHKQALCAVANRLVSRIFHVMRTGKPYILRDRDGREISLAEAKALITERYTVPESIRATRRVNRVSIAA

SEQ ID NO: 126800 - protein, 357 aa, unidentified
MPVTTKFTDFSGQSFYIGLDVHKKSWTVTVRALNMELAHFSQAPDAIQLSRYLQRNYPGGRFLSAYEAGFCGTSYHDALVRAGVENIIIHPADLPESDKEKKNKTDLHDSRAIARYLEAGILRGIHIMPLDQQERRSLFRCRQATVGNVTRCTNRLRSLLYYYGIELPDNFREKEYISSRFLEWLSNLELTTDQGTETLQNYIEDLQYNRKRLLFITRKLKKAIAEHYLQSYTSLSTVPGFGPITTIALLVETGDLTRFDDPDEYCSYLGLVPSEQSSGESVYSSHLQPRCNTHLRPLLIEAAWTAIRRSPALLAYYRKHAVKNNKKAIVKVARKLALIAKAVALKQQVYQEDYACA

SEQ ID NO: 126801 - protein, 350 aa, unidentified
MVVVGADVHKRTHTFVAVDEAGRKLAEKVVKATTAGHAEAVMWARESFGPEVVWAIEDCRHLSARLERDLMGFGQSVVRVPPKLMAQTRASARTRGKSDPIDALAVARGFLREPDLPVASHDEVSRELKLLVDRREVLVAQRTATINRLLWRVHELDPDHAPKARSLDLAKHRRILGDWLATVPGLVAELARDELADIIRLTETINALTKRIGQRVRHVAPVLLALPGCGELTAAKLVGETAGVTRFKSAAAFARHAGVAPVPVWSGNTAGRVRMTRSGNRQLNAALHRIAVTQIRLNGLGQVYYRKRLADSDSTTEALRCLKRRLARVVFGHLQTDEQNRQQPCQPAAA

SEQ ID NO: 126802 - protein, 360 aa, unidentified
MRKTKQQRSSRMHWVGLDVSKNTFDAALAGPDQRYPSTPLRELSWKAFPRTRSGVKEFLAWLDGHAPKGKARVIMEATGRYSVELTSWLLAKRPTLRPAIENPKNTKAFIDSLNQRNKTDGLDARGLAFYGVERHPTPYEPLCKSRQELRDLSRYRDTLVAQRTALKNRSHEKCSSKIVTRMQARQRRQLDKDIAAVEREMRHVINDDDAFSHDFKLRTSIDGVGPITTMTVLAEIGDLRRFERARQLTAYAGVSPRVVQSGTSVRGKTHMCKRGNERVRQALYLSAMATLNTKNTNSLSAMHYRLCEEGKHGKSALGAVMRKQLTVMRAILISGKPYDPSFQGRGKLGGQPPRERAIST

SEQ ID NO: 126803 - protein, 415 aa, unidentified
MGGRQQWYAGVDWGSQSHHVVLTDGDGRKIGERSFKHGGEGLAEMAAWLMAASCAAEPGQILAAIEVPHGPVVETLIERGFKVHAINPKQMDRFRDRFTMAGAKDDSRDAEVMASALRTDPRCFRSLAAADPIIVELREWSRIAEDLGVERNRLINRLREQLWRYFPALLELEDDLGAEWLLELWEAAPTPNTASRLREATIAKLLKRHRIRRFDAASVVNTLRRPPVRVAAGTVEAASAHVALLVPRIRLLNRQIKDAHSRIDGLTARLMPVEEAEPGQKKQHDAEILASLPGVGRTVLATLLAEASDALQRRDYAALRSLAGVAPVTKRSGKSCVVVRRQARHDRLANAVYHWARVAVQHDPRSRAKYAELRRRGHSHGRALRSVADRLLNVACAMLKSGAAFNPSSAAQKPA

SEQ ID NO: 126804 - protein, 370 aa, unidentified
MSDRSTMFVGLDVHKESIAVAYVCGERGAEATFVGNIGSGRGEIERLVRRLQSKGHDLMFAYEAGPSGYGLYRYLTGKGLGCVVVAPSLIPKKAGDRVKTDRRDAVQLARLLRSGDLTSVHVPRVEDESIRDLCRAREDAMKDLKAAKQRLKSFLLRHGIEYPGRAAMVSEQEPWVARVTCATPVQQLVFQEYVRAVSHQRGRLTGLEAELEDQAKSWSLYPMVEALQALRGVKATVAVTMAAEVGDLTRFDNPRQLTAYLGLIPSEYSSGEKRHVGSITKTGNSHARRVLIEGAWAYRYQARVSRVIQKRQEALPPAVRDIAWKAQVRLCKRYRKLTGRGKHSNVAVTEVARELACFMWAIAREVGTTV

SEQ ID NO: 126805 - protein, 347 aa, unidentified
MNKITTVGLDLAKNTFHLVACDHRGKVVYRKRLTRSKVPAFFGQLPPCLIGMEACSTSHYWAREFSRLGHQVGLIPAQHVKAYRRGNKNDFNDANAIAEAVVRPELRTVPVKTVQQQDQQTLNVHRQQLIRTRTAEANRMRAMLLEQGVVIARGLPALKRRLPELMENPEDRFSELFITLLQQAYLHLVQLDEHIERCDRELKALTAQSPACQRLQGIPGFGPVSASLFHSQVGDARAYRRGRDVSAALGLVPRQYGTGGKVILLGISKRGNRTLRCLLVHGARAVVSRVGDKQDALSCWIRRLVARVGIHKATVAYANKMARIGWAVLRHERDFEPNHRPRPIRTS

SEQ ID NO: 126806 - protein, 397 aa, unidentified
MKPIQHRAYCGIDTHKYTHTAKVVDCWLNPLGEITFENRPSQFAAFLKRIQQISGKLQPVFGLEDTRGYGRNLAVYLTGRNFTVKQVNPAYTSLARRSAPTVFKDDSYDAFCIAQTLRDRHAQLPDAHQEDIFWTIRQLVKRRETLATSAKMLQNQLHVQLAASYPSYRKFFTLVTCSTALYFWERYPSPMHLDTITAEQLGKELRQRGKNTCSNRKAQHIVGLIAADGEQPKAYQAERDFIVQSMVKEIRYKQEAIKEVESQLARILPQTGYRLETMPGIHLLTASRIISEIGDIQRFANANKLARFAGVAPVHFSSAGKGKEQRSKQGNRVLNATLYFLAVQLISPRGKRNPAFREYFQRKVGEGKKKAQAIICIQRRLVNIIYGMMKNKTAYKR

SEQ ID NO: 126807 - protein, 342 aa, unidentified
MDHFAGLDVSVKDTSVCIVDGTGKIVREVKVASEPDALLGVLRNPDYCFKRIGLEAGPLSQWLFSALGEANLPVICVETRHMRAVLKAQINKTDRNDARGMAQMMRVGLYRPVHVKTLRSQKLRMLLTHRKLLQSKAIAIENDLRGTLRNFGLKVGIVGRTRFEERIEELVGHVPDLAVLVEPLLVVRRVLGEQIAVLHRRLLTIVRDDEVCRRLMTIPGVGPVVALTYRATVDVPARFRKSKSVGAVFGLTCSRDQSGERDRPGAISRCGDEMMRAMLYEAAQSMLVRSTRWSWLKAWAMQVAKRRGLKRAIVALARRLAVIMHRVWVDGTEFRWTREVTA

SEQ ID NO: 126808 - protein, 737 aa, unidentified
MASASLQRSLTAHQNPYFFRVSRLDGIVRPLCRFLVEGLKVKKVALVHVATPGSTEFAGEVKACLEQAGVAIPILEKVRPGTPDFSVFLLKVRQARVEVLVSGGFYAENLILVRQLAESSMGLKAFVAPWGVAYPSFLEEMGRAAEGLLGTCAWNPGITWPGTEEASQAFVAGFQARFGELPNTTTMHGYTSARAVLAAMAAAVQEGAEPGGEALARALRTGEGFAGTLEFFPEEGKYHLDGHRKCGVRLAPEASREAGGLCPECGKPLTLGVMHRVLDLADREDGVVPPDSRPYTSLIGLPAVLAEALGCGPGSKKVTRLYFQLLEKLGPELEILRHTPLAAVAREGGALVAYALDADLNRLFGPQRVPLDELEAWREKRLTPQDAVVLEMTTNALQLHDDLLPHVHSVTVVHPPHVTAITRGRVMTDKIASRILATYLAKELLVSIWVPPQPVRELRALLAQRSKMVRLSTQAKNRLHAVLHRHRLLPPKGSPFLDAARQWWLGLPVDPLERTRIQADLDTLAFAQRQIAALEECLATAAAQDERVPFLVQTTGISMLTALTLLAAIGDIKRFPSARHLVGYAGLGASVHDSGQSHREGRITKAGRRDMRAALVEAAQTAANTHPHWRAELRRLAPRLGRNKAIVAIARKLLVVVWHTLTEETADRHAEAEMVARKLLAHAERIGRRNRATGQSAAAYVREQLDRLGLGRELTVIQRGRKRIVLPPSRLQAPSHS

SEQ ID NO: 126809 - protein, 314 aa, unidentified
MNQLNTTYIGVDVSKNTLEVFHPAWDKPRPFPNDPHGHRLLVRELATNGLLLHFVLEPTAGYEAALVAHLSGAGLPLSLVNPVQARAFAKASKTLAKTDSIDARSLAEFGATLKPPPTAHRSALQCKLRALSRRRSSLVAQRTAERSNLDRETDTFVRADIKALVRVIENRIAKFDREISSLIASDQETKKRHARLRQLKGVGPVLANTLVAEMPELGTLADKQIAALAGLAPYNRDSGKWSGQRFIQGGRSRVRRALHMPALTAVKHNRVLSEFYKRLTDAGKPHKVALTATMRKMLCVLNRMLADESFQPST

SEQ ID NO: 126810 - protein, 408 aa, unidentified
MARKSKNSTKGTGRMLPLLHPDAAGVDIGAEEIFVAVPADRDVESVRSFDTFTRDLHELVDWLQKCRVRTVAMESTGVFWIPLYQILETRGFQVFLVNAQHIKNVPGRKSDVSDCQWIQYLHSVGLLKASFRPPDEICVIRSLWRHRESLVQMAAEHIMHMQKALSQMNLQLHHVLSEITGVSGLAILDAILAGERDPAKLASLCNWRVRSSHETVAKSLEGDYRPEHLFTLRQSLVGYRFYQKLISEVDQELELGMRELPRAEGAPEQMPPRTKACIYQRAGTITAHTILMEVGPDVSRFRNASAFASWLGLCPERQVSGGKILSTRSRKVKNRAAIALRLGAQLPVSRQELPRGVPPKDEMETGRTRGRHSDGPQTCPHRVSPAVYQGTILGKGLDQMRPASQQSR

SEQ ID NO: 126811 - protein, 342 aa, unidentified
MNEYDGRQFVGIDLHRRRSVIVRQSESGEQLSAVRIINDPVALGLEIERAGPNPEVVLEATYGWYWAVDTLQAAGARVHLAHPLGVKGFRYRRVKNDVRDAADLADLLRMNRLPEAWIAPPATRELRELVRYRAKIVAVRSGLKAQVHAVLAKAGVLIPVSDLFGVGGRQRLAKVPLGAAYVQRVISLLELIDALDAHETRFSIMVADKLGGHAGYQAIQQLPGVGPILGAVFVAEIGDVHRFADPAHLCSWAGLTPRHHESDTVVRRGHITKQGSKLVRWAAVEAIQRHPATSKIALDRTRIQSRRGKNIAKIAAARKLLTLVYYGLRDGHIRALAPRRAA

SEQ ID NO: 126812 - protein, 341 aa, unidentified
MMPATIQLTELGIDMAKAKFDAAFERERKDGTDGTATFEHSTFDNTPQGFKQLAKWLKRHKITHVHACLEATGTYGDALAEFLHQAGHIVSVVNPAQIKAYADSRLSRNKTDKADAMLLARYCRSETPPAWTPPAPELRDLRALLHQLDALKDMRQQEHNRLGALSATLPSEQVRTVIQTHIDFLDAQIKHLTDTIKSHVKRHPHLQHQRDLLQSIPGIAWLTAARLIAVDLTRFDSADQLAAFAGLSPRQHQSGMSVNKPAHLSKRGHATLRHALYMPAIVATKYNPFVHDLYHRLLNNRKAKMQAIGAAMHKLLRLAFGVVHSDTPFDPHWDAKRLQVA

SEQ ID NO: 126813 - protein, 313 aa, unidentified
MTFKGNGCYAGLDVGKQWLDLAIHDVDGTRQFSNSPAGVKKLIIHLSRLDPALVVVEATGGYEQLIVQAMFSAGIPVHVANPTRIRSYARAKGVLAKTDTIDAVIITEYGYMLNPEPQNAKSEEEIRLRSMIMRREQLVEIRAAESNRLHTVHLCMKSSVEDHLRWLSGQIEELEVQIQALIHALPAVQASVNLLKGIPGVGPITAATVQAAMPELGQVNRQQIAALAGLAPYNRDSGKKRGRRRIFGGRKSVRRVLYMACISGIRHSPVIRKMYEQKIAEGKPFKVAITACMRKLLVIMNAMVRDGTAWSYT

SEQ ID NO: 126814 - protein, 375 aa, unidentified
MKEKVRFLGLDVHAETIAVAITEPDGEVRSLGTIANRGESIGKMVKKLGPVEYLRACYEAGPTGYVLYWQLAELGVACEVIAPTLAPMKAGDRVKTDRRDAERLARSYRSGDLTPVWVPDEGSEALRDLVRAREAAKQDQLRARHRLSKFLLRSGQRPAAGMKAWTLGYMAWVRQLRFKQVAQESTRLDYLHEVEHMAERVKRLEQAIAEAVKLASPALQEVICGLQALRGVAQISAVTIAAELGNISRLNTPRQLMGYSGSVPSEDSSGQRTRRGSITKTGNAHLRRIAIEAAWSYRLRPGVGPALRKRQEGVAEEIKEIAWKAQHRLHKRYMRLAAAGKDQRKIIIAVGRELLGFIWAIGIKAETASKVRMAA

SEQ ID NO: 126815 - protein, 351 aa, unidentified
MTCKKDVAVVRTIGIDTGKNTLHMIGLNEKGAIVLREKVSRNRIAARLVNIPPCLIGIEAGMATHYMSRDLLALGHEVKQVPPAYAKPFRQGHKNDFRDAHAVAEAVQRPSTRCVPIKTDDQLDLQALHRVRSRLIGDRTAVINQVRGFLLEHGIAVRQGPRSLRQQLPQILATRTDVLSSRMLRIIGDIVDDWRYLDDRIERVTDEIEGLARTDVNCGQLISVPGIGPIIASATVAAVGNGTAFAKGRDFAAWLGLVPKQMSTGDRTILGRITKRGNRYLRMLFVQGARAILLRPKSWAKHSFGPWLTAAARRLHRNILTIALANKLARIALTVLIQGRSYETRIASAAA

SEQ ID NO: 126816 - protein, 403 aa, unidentified
MNAAGIDVSKGKSMVSVMRPLGEVVAKPFTVCHTGSELKELADYLKSLDGETRVIMEHTGRYYEPVAQFLHDAGLYVSAVNPKLIKDYGNNSLRKVKTDKADSKKIAKYGLDNWGELRQYASMDMIRYQLKTLNRQHALYSKMKTAMKNNLIALLDQTYPGVNALFDSPAREDGTQKWVDFAASFWHADCVRGMSQATFTERYRKWCKRNRYNFSSDKAAEIYTGAKDQIAMIPKDDLTKRLIRQAIDSLNTVSKTVEQLKAEMLKLASQLPEFPVVMEMHGVGDSLGPQLMAEIGDVTRFAHRGSITAFAGVDPGANQSSEREAKSVRTSKSGPPELRRTLFLVMDGLLKSMPQDDPVYQFMDKKRAEGKPYLVYMTAGANKFLRIYYGRVKEYLASLETAD

SEQ ID NO: 126817 - protein, 407 aa, unidentified
MEVLHPRCAGLDVHATNVVACVRLTSGRSVTYEHRTVSTTTRGLLELADWLTAQSVTHVAMEATGVYWKPVWHVLEDAFTLVLANAMHIRNIPGRKNDKNDATWIADLLALGLIRSSFVPPAPIQELRDLTRTRKQLVREITRHTQRIQKTLEDANVKLTEVISDILGTSGRAILKALVAGETDPERLADLTSGRLKATRAQLVEALHGRVTTHHRFMLNLHLTQIAALDTAVAAVEAQIREALTPFRAAVSLLTTMPGVSETAAAVILGEIGDDMAKFPSAGHLLSWAGLCPRLDESNGKRRSTRTRQGAPWLKTTLVQIAWPAARKKNSYFRAQFLRLKSRRGPKKAIVAVAASMLTDVYYMLRDGVEFHDLGDQYFVQHDKTRLANRLLQRLRDLGVEVEVKAA

SEQ ID NO: 126818 - protein, 413 aa, unidentified
MQRAKFYIGIDWATEKHALCVTDAEGHIIKERSIPNDNGLFKIIATLIAGVSSNEVFVAVETRRLVFVEALLDQGFKVFSINPKQSERFRDRFSVAGAKDDRFDARVLASALRTDLDLFRAVEPENAQQIRLRTATRMTQTIKEQSREVANRLRDIVMSSMPLLLGLCNGADEAWFWELVLLASSPDTAKHISDEKLKELIQRHRIRRIKIHAVQDVLKGAHLAAAAGVCEGAAWQAKLLVAQLQLLSTQERAAAAEVTAALRDLPKTEGAMNDAEIIMSAPGFAEHTTGVLLAEAGAVLARRDYLELRAVCGVAPVTKSSGKRRTKSKWTKNQNVDGVVVMRRAVNMRLRNAVHHAGNTASRDPRFAPMYARLRASGANHARAVRGVADRLLGVLIGMLRTQTLYQPPATTT

SEQ ID NO: 126819 - protein, 391 aa, unidentified
MTMYFVGIDISKYKHDCCIISAANQKVVSKFTFKNDKSGFEQLNLILNSLSTPEDIKIGFESTAHYALNLELFLENSLLTFMEVNPVLISEYKKSKTLRRTKTDSVDCESIARWLMTVEYKPHSKGFYHAYSLKSLTRLRDRLIRQRSFYLVKITNVLDHTFPEFKPFFNERLSKTALYLLENYGSAEKMARMNSVSYEKLRSISRGKFSPQQFIALKELAANTVGVNNSIFDVELNSLLTLYKTLVTEINTLEKEINLLIEEVHPHYLSVPGIGPISAAIIYSEYGDISNFDNPGQMLAFAGIEPGINESGTESHGGRMVKRGSSQLRYALINCCLPLIRFDMTFATYYAKKRAEGKPHRVAITHVAKKLIRVIYALERQDTDFCVQKLR

SEQ ID NO: 126820 - protein, 366 aa, unidentified
MKYVGIDLHKKSISLCVVDASRQVLARRQFHTGDVGKIAAFFVELGVFQFAVEATAAYEWLVQLLEPLATRWVLVHPGQMRVIAESTNKSDRLDAEVLAEFLALGKLPRAYRPTPREREHRTLARYRAKCRQQVTRVRCRIRHILASDNADRPALFGPEGREHLATVAVTKADRFVLDQMLVAHDQAMDQLAAATKELKAFAASGDAEEKRARQIVTSAPGVGATIAEVVLAELADVERFETVSAAGAYAGLVPGRRGSAGKVIELGITKQGSRLLRWAMVQAAWQAVRYSARWRAVYEQVKRRRGGKRAIVAVARRLLVVLVSLLKSGQMYAANEAERKEQVRKERARRAKKERRPAKAKAKAAK

SEQ ID NO: 126821 - protein, 341 aa, unidentified
MKQAITIGLDIAKHVFQAHGADAAGHVLFRKRLTRAKLLGFLAAQAPCVVAMEACAGSHYWGREISKLGHTVRLIPPAYVKPFVKRQKNDAADAEAICEAAQRPSMRFVPVKDEEQQANGVVFRARDLLVRQRTQCINALRGHLSEYGYVFRQGITHAATLIAHVEDPNSFLPESPRVILRLLVDTFSALQAQIKELDAEINRRSRADPVAQRLMTIPGVGPIAATAITALVPAAGSFRAGRDFAAWLGLTPLQKSTGGKQKLGAISKRGERTIRRLLILGASAVIQQACRRGAPAGSWLAQMLPRKPKMLVTVALANKMARVVWALLVKGGVYRAPAAAA

SEQ ID NO: 126822 - protein, 401 aa, unidentified
MKKFTGTVTVETAASPTWVHQAVVSPAAAHGLYVGLDVHKETIAVAVAHPGRAEPVYRGEIANRPKAIRKLVAQLSQETGGEVVLWCYEAGPCGYVIYRQLLSLGQDCEVVAPPKRERIKTDRRDALKLARKLRAGELTQVWVPDVEQEAMRDISRCRADFKTQEKKAKQQLNGFVLRHGHHWPRGQSRWTRRHWEWLGQLSFSHPWQDEVARDYCEAVRSATERLQALEQRMITQALPQWSLAPVVDSLMALRGINHVAAITLLAELGDITRFERPSELMGYLGLVPCVHDSGLSKGRRGAITRTGNGHARRILVESAWCYRFLARRTPHLLRKAKNASPQAQAIAWRAQTRLCGRYRALIGAGKNQKVVCVAIARELIGFVWDIVRHELPKVVAPARMA

SEQ ID NO: 126823 - protein, 412 aa, unidentified
MDVVVERCAGLDVHQATVTACVRLPGRKGERAQVIQTFGTTTPDLLTLRDWLAAHQVTHVAMESTGVYWKPVYYVLEDASTLLLVNAAHMANVPGRKTDVQDCAWIAQLLECGLLRGSFVPPPAIRELRDLTRYRKALIQDRTREANRLHKVLEDAGVKLATVASDILGVSGRAMLTALVAGTTDPTVLADLARGRLRAKLPALRQALTGRFQGHHAFLVTQLLAHLDYLDEAIATLSAEIEGHLAPFAPAVARVQTIPGVKQRTVENLVAEIGVDMTRFPTAGHLTSWAGVCPGNNESAGKRRRGRTRKGDRWLKITLIEAALAAIRVKGSALGARYRRICRHRGHKIAIVAVARAILEIVWHLLTHGTTYAELGADYIDRRDKEQVTRRYVRLLENLGHRVTLEPAPIAA

SEQ ID NO: 126824 - protein, 346 aa, unidentified
MMIIGCDYHPSWQQICWLDTATGETEEKKLEHASGEAEKFYRQLPGPALIGMESTGNCQWFVEMATTLGHEVWIGDAAKIRASEVRQQKHDRRDAALILKLMLEKRFPRIWTPSGLEKDLRQLLIHRYKLVRIRAQVKNELQHLAMNQGVTKKKKLWSKAGEQVLRELPLKPWASRRREDLFKVRGMLDEQIAPLDQAVAEVAEKNEKARLLMTQPGVGPITSMAFVLTMGDVSRFQRGKQVASYLGLIPREYSSGGHQRLGPISKQGNRFLRMLLVEAAQAAVRYDPGFRNEYFHRCHTKAKGVAKVAAARKLAIRLYWMLRTNRGYPEVVRVESSSRVAVVRAS

SEQ ID NO: 126825 - protein, 345 aa, unidentified
MNTIKVVGIDLAKNVFQICVWMEDGSVAANRKVSRQKLLDAIRTFPPGTFIAMEACATSHYWGRKLQAMGYHVQLIPTQHVKAFSHHQKNDANDALAICETACRPGLHFVPIKTVEQQDIKALRSARQLMVEQRTALANQIRAFLAEQGFVVPAGIQKLQQYLPDILEDSDNTLSGVLRRLLHTLWGSLQDLNIGMHEMDNEIAALARQQTGYEHLLTIPGVGPLIAAAFVSEVSSLQFANGRQLSAWCGLVPRQHSSGGKSRLSSLSKHGNRHLRTLIIHGARAVMRCVQKRHDRLGEWLKTLIARCGFLKATVALANKLTRIIWRVLKEGVDFNMQKAFLSIN

SEQ ID NO: 126826 - protein, 456 aa, unidentified
MARRKKKQPAVMYHEGLRPMRSDCAGLDVGSREMWIDVGIENSPEPVRKFDAFTEDLNAMAGWLKSCGIRSVAMESTGVYWIPVFQILEAHGIEAVLVNAAHVKNVSGRKSDWLDCQWIRILHCYGLLRSSFYPAPEIAVLRSYIRHRQSLVESAASHIQHMQKALSLMNLQLHHVISDITGVTGMKIIRSIVAGQRDARQLAAMRDRRIRASEQTIVKALEGNYRPEHIFQLQQSLELFDFYQNKIEASHQQIEAHLQRMDSKADVSKLPEARSGKKTIRNRPQFDVREQAFRISGVDLTRIDGIQESAALSLIAEIGIDMSRWNTEKHFVSWLALCPNNKITGGKVIGRHTKKSAQRAREILCLCAQSLLDSRSALGAYCRRLCGRLGKPQGITATAHKLALLVYRMIKLGKDYLDIGQERYEEQFKQRALKHLARKAKDMGFQLVPVTENQVP

SEQ ID NO: 126827 - protein, 346 aa, unidentified
MEHYVGIDVSLELSSVCVVDGRGKIVKEAKVASEPEALVCFFKELGFPVNRIGFEAGPLSQWLHAGLTQAGFETVLLETRHVKAALSAMTVKTDRKDACGLAQLLRMGWFQQVHAKSIGSQEIRALLVARKQLLGRLLDVELSIRGILRGFGLKVGQVTRKTFEARIRQLVTGHTTLERIAEAMLSARATLKAQYEKLHKAVLAIVREDAVCRRLMTVPGVGPVVAVTFKSAVDDPSRIAKSKAVGALFGLTPKKYQSGEKDVTGGITRTGDEMVRTALYEAANVLLSRITRFSKLKRWGMDVAKRRGSKRAKVALARKIGVILHRMWIDGTTYRWAEAKPMAAQG

SEQ ID NO: 126828 - protein, 330 aa, unidentified
MKKISVGIDISKKTLDASIYSGSGGQPWIKTTNSEDGFVKIINWVEKQGFNPQEVMFVMEHTGHYGYALAAFLDAHDMPYTFVAGLEVKHHFPLSRVKNDKNDAKKIAQYFYEVQEREDFRIQTIKASEIYTLSLLLSERNLYVKHRAHLKAQLSETQEYSSANRNERLKTIEKAYSKQIREIEKEITNVIDSTPELKKNYELIRGIAGIGLVTAVTIIVATANFTRSKNARSFANHICVAPCDKSSGTSVKGGVHTSNIGRKDIKALLSRGVLLAIKYDKGIKSYYERKREEGKHYYCIANAIMFKMVCRIFAVVKRGTPYVETHAYIQ

SEQ ID NO: 126829 - protein, 368 aa, unidentified
MSKTENGRLCIGVDLHKTQFTVCAMNEEGEYLLERKYPTTEEGYEEFSQEMHDREEEGYSIELAVETTGNARYFKNRMEKEYFAVKVVNTNRFKVITLSTKKTDANDAATLAYYLMKEMLPEANLCSQTSEEIRRMLKTRTILVQSTVKIKNQIHGMMLGYGIETKAAQFQSKKKRQELMNDLADHEYSAFTASSLKVMLQIIDDLSEEIKRVEAQLVEMVKENEDVELLMSIPGVGINTATTIAAYTENLERFDGNYKRFASYIGIVPSVHNSNETKHLGRITKHGPQELRTAFVQAALGMVRLTKVTSEWRLIKDYHRKKDDKGSGRAIIALARKISRIVFVMLSKREAFNPDLMRINEQNFQQTA

SEQ ID NO: 126830 - protein, 365 aa, unidentified
MQTIIRSQTLFVGIDVHKDTHTAVGLNAFGEKVFEMKIGNEAEDFISLIEKTKVQAERAGLLPSFGLEDVHSWGERLSSFLVEEGQQVRAIAPILVDHRRSKMTHPEKSDSLDARGVAEVMIQRIDSLPLYKLTEEAQKAKQIRELSLERECLVKERARLKNQLHILLHRIHNTGYRAKFKDPFSKKALRYWMRGVPKDTDVILTQRTKRALRRLSDLREEIQEIEEELETMMKESGQTVATASGCGVVIAAEIIGEIGDVSRFHSPGSLAKYAGCAPREHSSGKTIRWRKTRSGNRRLNRAFHRMALSQISRMGNSAARAYFKRRVSEGKSKSQALVCLRRQMVTIIWMMMKHKTEYRYPQKSD

SEQ ID NO: 126831 - protein, 350 aa, unidentified
MIIIGADYHPGFQQIAYVDTETGELQERRLQHREEAEKFYRELAAQQMKVRVGMEASGHARWFERLLSELKFELWIGDAAEIRTKRVRKQKTDRQEAQLILKLMLEARFPQIWVPSWENRDARQLLWHRHRMVQARTRIMNQLQAVALNEGLRSKKRLWREAGREQLLAIRLAPWASRRRHDLLELLDRLNPTIAELTEAVEQEAEKCPEAQRLMTHPGVGPLTALAFVLVIGTAERFRCGKQIASYLGLVPSEDSSGERRRLGHISKQGNSLLRFLLVEAAQVTVRSNQEWRSKYYHLTMRRGRKIAKVAMARRLAVRLYWMWRKEWNYEQLTKFGSRAGQPGNPHGVQ

SEQ ID NO: 126832 - protein, 345 aa, unidentified
MMIIGCDFHPSWQQVSWLDTETGETGERKLVQASGDAERFYRQVAAPALIGMEATGNCHWLVDLLSELGHELWVGDAAQIRASYVRQQKTDQRDAAHILKLLIEGRFPRIWMPSSEVRDLRQLLLHRYKLVIIRARVKNELQHLCLNKGVQRKRKLWSAAGQQILRELPLKPWAGRRRDDLLKLMAMLDQQIEPLDQAVQEEAQRDKMALLLQTQPGVAITALAYVLTMGDVSRFPRGKQVASYLGLIPREHSSGGRQKLGAITKQGNRMMRMLLVEAAQIAVRYDPEFRKQYLHRCHSKPKAVAKVAAARKLAVRLYWMLRTQQPYPAVVRIESSPRVALVGAS

SEQ ID NO: 126833 - protein, 410 aa, unidentified
MGLFCGIDWATEHHDVAVVDDDGRVVARGRVSNDAAGFAQLLTLLAEAGDSAAHPIPVGIETDRGLWVAALRETGRVIYPINPLAASRYRARYAVSGAKSDATDAVLLANIVRTDPGAHRPLPADTELAQAIRVLARAQQDAVWARQQIGNQIRDLLKDFYPAALTAFAGLSEGGLARRDARTILAAAPTPAQAAKLTPARLRRLLVKAGRQRHLDRDVERLREVFTDTYLHQPPTVENAMGIQLTALLGQFDAACTAAADLAEAAIAHFDQHPDAEIITSFPGLGKLAGARVLGEIGDDRTRFADARGLKAFAGSAPITRASGKKTVVLHRHIKNRRLAAVGPIWALSSLRASPGARRHFDARRAAGDWNHQAQRHLFNKFLGQLHHCLQTGQLYDEHLAFPPPLLLAA

SEQ ID NO: 126834 - protein, 378 aa, unidentified
MTCGGASSAQVCYATPVVKTVELEEVPMQIVGALDVHRRQITFKTLELASGESARGRISPAAREPLRQWLERFAGQQGEFVLEGTTGWRFVVEEIERAGHVVRLADPAETAARRGRKRRAKTDDADCELQLRLLLAGELPEAWIPPVQILELRTRVRLRKTLIDQRTAWLQRLQAQLFHQGVPPGLKPRTAAGRDALARVELSPAGREAVELCLRMLDQLDRELEPIDRALLAFARRQPGCRALTGQLYGVGAVTATAILAELGDARRFRSSDDAVRHSGLDVTVWQSDRKRAAGHLSHQGPALLRWALFEAAQSAARRSSPDHAYYRNVAKRIDHNRACLSVARKLCRRAHHILRELGDDALAPTDPPRTNLVDAAA

SEQ ID NO: 126835 - protein, 422 aa, unidentified
MTDTFSYFVGVDLGAEQHAVVVLNNVGDILGRRSFSHNGAEVLELFSWLAKLTGGAAPQQVALTAETPRGSIVESALERRHPVFSINPKQLDRFRDRFSVAGAKNDDRDALVLAASLRTDPHCFRRLQLGDPRLVLLRELSRSQEQLQENLRRDCNRLWSLLQRYFPALLQLSPAADDPWLWSLLQVAPLPTAAARLQLPRLEKLLAQHRIRRFSASELADLLRQPPLPLAPGAAEALAQSVLLLLPHLSLLHKQLAHLDARLDKIVDELQQDTDFTEHRDIEILRAFPGIGRVFTVTVLAEAHTPLVERDYHALRVLGGAAPVTRQSGKTKLVLLRRACNHRVQHALFHSANVFVQKDPRAKQQYDRLRACGNTHARALRGVGDRMLQLLFVLLRSQSDYDPQRRLVSLSQEGTPPPQKPS

SEQ ID NO: 126836 - protein, 388 aa, unidentified
MNRIIKIGMDVHSTNYTLCAMEPTIGAEDRIFGEVQVAPDYKEIIGFIAFLKMKLGLNNDYSIECGYEAGCLGYTLYHQLTAAGIKCVILAPTTMLTQQGKRVKTDKRDAYLIAQCLCYGGYHPVYIPTGKDDSVKEYLRMRDDHKIALKKLKQQINAFVLRHGYQYVGTKWTIRHITWLKKLQLDPIYRETLNEYMASYDEQEAKVERFDKRIEEIASEACYKDNVKKLGCLLGMRTHTALSLIVETGDFARFAKGNIYGAFLGMAPGEHSSSTNLNRLSISKAGNSHLRRLLVEASKGLCKGVVGYKSKELRSRQKGQPAEVIAYADKANIRLRSKYYKMIRHGKKKNVAVAAVARELACFVWGMMTGNIGTNPIIDTSAPAVSQG

SEQ ID NO: 126837 - protein, 402 aa, unidentified
MDMDERQQFRWFLGIDVSKETFDACCIPSRGERLFNLSASMDRKGFEELIKQLSALSIPRESVLVGMESTACYHVTLYSFLISLGYTVMVMNPLLISNFVKLQLRKTKTDKKDASVIAQFLLLNRDSFCQTLVSSDFSELRELSRQRESLVDQMSSIKSEIKRLLTVTFPELEQMAGVFTKSMLRLLSHYPSAHSIRQLKRSQIAKILIPGSYGKQTAVSVERIIRGAQESIGTTSPAKEIVLKQKVSLLMQLEQHLQELTDILKELCQAKIQENTRILTSMKGIGEKSAMNFLIEMGGDIKDFERHQKLIAMAGLDPALYQSGKIDRKGKISKRGNRHLRRVIWLMTTKVIQFNERFKQYYLKRIKDGLPYKKAVLATAHKLIRVMFAMLTNRTLFDPRMN

SEQ ID NO: 126838 - protein, 324 aa, unidentified
MTSSASSPLFVGIDVSKARLDIATRPQNARWQTENREPGIASLVDKLQQLKPTLIVLEATGGYETAITAALAAAGLPVAVINPRQVRDFAKSVGRLAKTDKIDAVVLAHFADAVRPELRQLPDEQTQELQGLLVRRRQLIEMLVAEKNRLPMTHKALKAGVKEHIQYLEHQLEDLDAEIQDRLRQSPLWREQEDLLRSVPGVGKVLSVTLLAELPELGKLNRKQIAALVGVAPYNCDSGQLRGKRAIWGGRATVRSALYMAALSAKRFNPVIRSFFEKLVAGGKPKKVALTACMRKLLTILNAMVHSGSRWQPLKAAPKALSTA

SEQ ID NO: 126839 - protein, 394 aa, unidentified
MTYLSCPDTPAAKEYATVHVAWELSKANWKLGILLPGAQQMSRFTIKGGDLAAVAARLAAARAKAARSGLPVRVLSSYEAGFDGHWLHRWLEGQGVVSHEIDPSSIEVNRRARRAKTDRIDLARIMRAFLAHLRGEPQACSIVHVPSPEEEDEKRSSRERDRLIKERTAHTNRIKALLHAQGIRDAKLLSRDFLRRLKEARTGDGRALPPRLMAEIAREHERLVILNRQIAAIEAEREAECRKAARQAERREAAPRSNQAKIVQLTQLKSVGVNDAQVLVNEVFYRNFANRRQVGACVGLTGTPYSSGADQRDQGISKAGNPRARTTAVELAWRWVYWQPDSALTRWFKARVGDAKGRVRRIAIVALARKLMVALWRYLETGVVPEGAVLRPSF

SEQ ID NO: 126840 - protein, 371 aa, unidentified
MTSIIYVGMDVHTTNYTLCCYSIENDKIFATVTLEPHYTNILKYLDRVKKNHDGNCHFLCGYEAGSLGYSLYHQLSGGGLDCVILAPSTMATTRKKKGIKTDKRDATNIAKCLAYNTYSPVYIPTGEDNAVKEYIRMRNDAKDTLKSVKQQLLAFCTRHGKRFTEGRSNWTKKHLAWLKKLELDNAILQETLQEYLTLYHQAFDKVEIFDKRITELARMENYEEKVSRLSCLIGIKEHTALAAIVETGDFKRFPTAKQYAAYLGLVPGEDSSGESVRRTGITKAGNSHVRRLLVESAQCYNRGAVGVKSKALKERQSGNDPKIIAYADRANERLKRKYYRIMFHSKRNIAVTAVARELACFIWGMMTDNTA

SEQ ID NO: 126841 - protein, 423 aa, unidentified
MNTQSTPSFTAFVGIDWADRKHDFCIQASGSDQRVFGTLEHSPEAIAKWAYSLRDQFGGSIAICLELAKGPLVYALQRFEFLVLFPVHPSTLAKYREAFTPSRAKDDPTDAEIALDILLRHPEKLHPIKLQSVAMRELATLVEERRGLVNEVTGITNRMISTLKQYYPQVLDWFESRDTRIFCDFLERWPTLKQVKRARRSTIEAFFHQHNGRRAHLIEERIQGIRTATALTEDESVIRPGQMVVQALVAQLRVILQSIDNFDTEIKAVTRKLPDYDLFAALPGAGHIQAPRLLVAFGEDRDRYASAAELQRYSGVAPVVERSGNKCWVHWRFACPTFLRQTFVEWAGSTIPRSFWAAAYYQQQRSKGCSHRVAVRALAFKWIRIIYRCWKTRTPYDESVYLKALKKRGSPLLATASESAKMT

SEQ ID NO: 126842 - protein, 453 aa, unidentified
MAQRNRSLRLKPGQSRVALTITHPNAAGIDIGSAAHFVAVPPDRDDEPVREFPSFTVDLNAIADWLQACRVDTVAMESTGVYWIPLFELLESRGFTVLLVNARHVKNVSGRKSDVLDCQWIQQLMTYGLLSGAFRPADQVCVLRSLWRQRGMLLRSQAREVQHMQKALTQMNVQLANVISDVVGETGQKILRAIVAGERDGQVLGAMKNVRIHASVDEIAKSLQGHWRVEHLFTLKQALAAFDFIGTQLAECDQEIEAQLKRLEVHEGDPAKGKKRSRPRNAPKFDLRTQLFKMCGVDLTRIDGIDVTTALAVISETGADMSRFPTEGHFASWLGLCPGTKITGGKVMSGKTKRCANRAAQALRLAAAALRTSQSALGAYFRRLCSRMDKPKAVTAAAHKLARLIYTLLTKGQEYTDQGQDYYEQRYHQRVLRQLAQRAQKLGMKLVPTEQPA

SEQ ID NO: 126843 - protein, 393 aa, unidentified
MKPAMSVRGIDIAKRVFHAVGMDNTGKIVLRKRLARNALMPFIATLPPVLIGMEACGGAHDWARRFREHHHDVKLMAPQFVKPSVKSNKNDMRDAEGIGEAVTRPTMRFVPIKELDQQDVQALHRVRERLIGARTALVNEVHGLLNEYGLVVPKGVSKFRQTVVAKLESEKAKLTPLSQEMFWKLIEEFAALEAQLAYYQEKLDTLAAIHPECQRLMTIPGIGPLTATALVAAVSDASAFKNGRQFAAWLGLVPRQHSTGGKERLLGISTRGDSSLRTLLVHGARTTIRWVGRQTDRRSQWMRQLVERRGTNRTAVAVANKNARIVWALLTSHQDSQLATGSGQLIRASVASVRLEYGTVTKGVMPKLLMAMVLDKDMEESCRTMQGGIELMT

SEQ ID NO: 126844 - protein, 354 aa, unidentified
MKKFFIGVDVSKDTVDVSFFDDDRMKSPEYLAQYSNSPKGFREMVKDLRMCCHGVSSGQWLFCCETTGRYDHPLCHWLVDHGMVVWRESALQIKWSSGIQRGKNDRVDSLRIAEYAWRHQDKMQKFVKPSESLSNLKAAFTHRRRLVEKRTATRCQLKSMSSEKGLSASVARMIVRDLSREIERLSASIATMDESIQKIIRSDSELDRNYRHIISVKGVGPITAVALIVCSGNFKAITSAKKMACYCGVASFRSQSGTSINRKASVSNLSNRQIKSLLSMAARSASRSNPVFAEYFNRTLSRGKPVALVYNNLRNKIITVIYKLIERDCDFDVDYMRMHSTGQRANESAIREAV

SEQ ID NO: 126845 - protein, 372 aa, unidentified
MPDVSSTAPADVRVWVALDVHKLSIVAAILPPAGGQPEVQQIETTRAAIGRFVDRLGGPEGLAVCYEAGPGGFELLRVLTELGVACDVVAPSLIPVRAGDRVKTDRRDAKKLVRLYRGGQLAFVAPPSPETEGLRDLMRCRDDLRCARTAARHRVSKQLLRHGRVYREGKSQWTKMHRAWIARQRLDDELAHKALCEMLVHLDGLDRQLDALDRDLAQIARAQRWAATVEILTRFKGISTRTALGLIAEIGDFARFAHPRELCAWLGIVPSEYSSGQQRHRGHITKTGNHHARRLLIEAAWSYQHRPRRPDRGPQPDARAWQAQIRLHRRYRHLTTERGKRSTVATVAVARELACFLWAAVTDQPLATEAAA

SEQ ID NO: 126846 - protein, 315 aa, unidentified
MAHTIARTLGIDISKDRLDVHLLPDGIDKQFPNDAKGLRALIRWLLPYAPERIVFEATGAYHRRLERMLATADLPGVKVNPQRLRAFAKACGRLAKTDRIDARVMARFGTLMAPDIRPMRSQVLDLLAELLAARRALVKDRNALLHRQKNVTIPLLQRQAEQRLRQVDAQIEAVDAESRRLIAAEPQLQRRLDILTSIPGIGATCALALIADMPELGTLANKQAASLAGLAPVVRQSGQWKGKSFIQGGRTQLRRALYMPALVAIRFNPPLKSKYQQLTAGGKAAKAAITAIMRKLVILANALIREDRFWTPEHA

SEQ ID NO: 126847 - protein, 339 aa, unidentified
MNITMIGLDIAKNVFQVHGVDAQGSIQVSKALRRAKVETFFAALPPCLVGIEACGTSYHWARVLRALGHDARLIAPAHVKAYVRRNKTDAADAAAICEAVGRPTTRFVPLREVEDQAALGVHRAREMLVKQRTMLINALRGHLAEFGVVAARGHEGAEALCAIVADPEERRIPDLLRAALMTFAGQIETLEAQIATIETQLKSWRRQDAMSRRLETIPGVGLITATAIAAKVRNPERFANGRCFAAWLGLTPRQHSSGGKVRLGPISKAGDRYIRRLLVSGAQSLLTASKSRRKPDPWLAKMLASKPRLVAAVALANKLARIVWAVMVRQTNFRAAAPT

SEQ ID NO: 126848 - protein, 419 aa, unidentified
MLRIVHYNCAGMDVHKKFIAVCIASTDFKGVTSYKKKRFATFNSDLIACRDWLLKNHCSEVCMESTGKYWIPIFNILESHLHVVVANPKYVRAIKGQKTDDKDAMWIADLFKFDIVPSSYIPDRNIRKLRELFRYRYKLVNERSSEKMRLQNALTISNIALGSVLSDTFGKSASSIIEYLLSGQDFDPEYCKKLLLKRAKDKADDVVASIIGYEISNDQAIKMKLCREHTDYLSSVIGRLDDAITELSNPYDELIQLASDVPGITETSARYIIAEIGPDMSVFKSAKHLCSWAGLTPQNNESAGKKKSCRVSRAGAYLKPLLVQCALAAIKDKQNPYFRAKYDRIKKRRGHKRAIIAVARMLLTCLYHMFLKKEAFQPSDIHYEELPEQLLKKRKELYIQQAIKLLENEGMTVVPPSVA

SEQ ID NO: 126849 - protein, 358 aa, unidentified
MSNHKIQNFIVKGKEVFVGLEDSKKSWKIAVRSGRMLIHETAMEAKYNILIGYLRNKFPQCNIHLVYEAGFKGFNLHDQLTEDGISCVVIPPHIVTEPKVNKVKTDKRDAKRLALILENHDFKFGCYVPDKERREDRQVSRTLGAIKKDITRNRGRIRMFLYCHGIETAFANKDKWGRAEFLALKDLSLSGPLKISLNTLVVMLEQLWNYQKELRAYLRELCRKERYRKAYEIAKSMPGIGWYTAIRLVLELGENLSRFTNGKQIAGFVGLGCGEHSTGETERKGHITGMGSGFIRSTLIENSWAAIRKDPVLLDKFNRVRGNNKSKKKAIVAVARMLIVRFRACVMSGKPYVIGVVR

SEQ ID NO: 126850 - protein, 323 aa, unidentified
MNKDIKYFGIDISALVFDVTDSDGNYYQFKNNLSGFKKFVKLMQSDSHCVMEATGYYHYKLAYYLLESGLKVSVENPLAVKRFIQMKLSKIKTDKSDSRLICEYAKQVEMKLWQGNSKHQTECLQMTRLLSVYTKQSTMLKNKLHGEAVLGNPSKAVVSSLKRSLKQVQKEIKTLEDKLMILVKQVHQDVFTRLQSIPGIGSKTALMLVVLTDGFERFTSGSELCSYAGLTPVIRKSGSSVNGRSRISKIGNQKLRNLMFMCSFNACKYNKACRAIYERLVAKGKSKKLALIAVCNKLLKQAFAIAKSGLVYDQTYRSILVTK

SEQ ID NO: 126851 - protein, 405 aa, unidentified
MERCCGLDVHKDTIAACVRIGGPSGRAAQHVQTFRTTTADLLVLRDWLAAHGVTHVAMESTGVYWKPVYYALESDFTCLLVNAAHIKQVPGRKTDVHDCVWIAQLLEHGLLRGSFVPPVPIRELRDLTRYRKALIQDRTRVANRLHKALEDAGVKLASVASDILGVSGRAMLAALAQGTTDPEILAELARGRLRGKLPALRTALAGRFRSHHAFLVGQLLAHLDYIDEAIATLSTEIESRLAPFADQLTRLDSIPGINRRTAEVIIAEVGVDMSVFPSAAHLASWAALCPGNNESAGKHKSGKTRKGNRWLRNALIEAAAGASRAKDSALQARFRRVLRHRGPKKAVVALAHALLRIAYHVLAHGTTYRELGADYSDRRHTQRLTRRAIRLLEGQGYRVTLEPAA

SEQ ID NO: 126852 - protein, 360 aa, unidentified
MKKVSTGSMKVLSNKKVYIGIDVHKDSWHVTARTDGEEVFNGRIPASYHSLMKLLERFKDGQLKVAYEAGPCGFCLYDKFMEDNIDTIVVPPSLIPMESGNRVKTDKRDSRKLARLLESDMLKKVFVLTEEERMHRELIRTRRQLVDHRGSVARQIKSKLLFYGISSPFPTKYGWGRPYLQWLRSIVCQSWYLKESFEILIDLYEYLTKEIKQITKSVIELSRIDKYRERINLIRSIPGVGLLTGMEILVELQDFTRFKTSEEIASYIGLTPSEYSTGPYVRQGRITRCGNKRVRVALLESSWILVGRDPLMKAKYLKLKSSKGAKRAIVAIARKLIIRIRAMLLQNVPYRTGGTMLKAA

SEQ ID NO: 126853 - protein, 362 aa, unidentified
MFKLDRRRYRVGEPEPAYCREADLDKPDVCGIDVSAKELVVMVERCGRREGARNFSNTASGHQQLRDYLAAPGRPVRVCLEATGLYGLDVALWLERDARFQVMVANPRAVKNFAQALFQRSKNDRLDAGVLLEYAARMPFQAWQPPSRAALQLTAVTRRLQTLTEQATAENRGHALAATAASSTVVVADVKRSLRAIEKAQARLARAAEKIIADDEPLQRRYQLLRTVPGVGETSALQLLGELVLVPANADVRQWVAYAGLDPREYSSGSSLKKRTRISKVGNRHVRRVLYMPALTAAHHSPVFRAYYQHLLAAGKCKMVALIAVMRKLLHAVFGMFKHNAAFDETKVYPGFAPELAASFAS

SEQ ID NO: 126854 - protein, 347 aa, unidentified
MSITMIGLDTAKSVFQIHAVNETGKTEIKRKLSRHDLLPFFKKQELCTVVLEACGAAHHWARILTGLGHDVKLIAPEAVKPFVKKGKKNDAADAAALCAAASRPDMKFVPAKSLEQQGILALHSARSLLVKQQTMLANAMRGLATEFGLTVPKGIGKLEELTVLVDADEAFPVKARQAFTGLFDQCKALTESIVTFEAEIVAHARHDETARRLATIPGIGPITASLIAATVGDIGMFKSARHFAAWLGLVPRQHSTGGKTRLGRITKTGNREIRKLLVLGATSMVYRAPQWNSAAGLWIRGVLERRPVRLATVALANKMARIAWALMTRKEVYQAKGRVAAAAVAAA

SEQ ID NO: 126855 - protein, 364 aa, unidentified
MSQSTPIVVVGIDVGKSGLRAHILPGGLQRHFQNDKGGRRALRNWLLKHGVSRAVFEPTARYHRRLHQGLYEAGLATVLVNPLRSRRFAESLRQLAKNDRVDAVMLARFGQFDNLASTPPKDAHLQLLSDLLTLRRKLVSQLDTLRKLCSELAPEASCGPAATLTAFAADIAACDQRMLECIAADGSLARRAKIIQTVPGCGPVTASCLCAELGTISRRQAAALLGLAPFDRDSGPVQGHRSIRGSRAHPRRVLYMAALSGIRWEHSCQACYQRLSAAGKEHKRAMLAVMRKLACLLTALVQSYIIPAVDSQVPPPTRRGFFSHCSAPAGRNLEPQWPERACRGGLAPAGSPRSFSDCSDFLPF

SEQ ID NO: 126856 - protein, 343 aa, unidentified
MKLSYVGVDLAKNVYQLHGVDRHGKSVWKRRLRRGQWLQALLEKTEPGCEIGMEACTGAHHWARELQARGYTVRLIAPQFVKPYVKSNKNDANDAEAICEAMSRPHMRFVTVKSVEQQDIQATHRVRTELKDHRNAKANQIRGLVAEYGLVAPQTLLALRRAIPEWLEDAENGLTDYFRSLLHGLWDDLLTLEDRLKELDKEIEKLARSNEVAKRLQQLRGVGPIVATALVATVGDGGQYNKGRQMAAALGLTPRQNSSGDKHRLFGISKRGDVYLRTQMIHGARAVVSQAKHRDDPLSRWVTAIAKRRHPNVAAVALANKTARMAWAMLRNDTDYDPNLAVG

SEQ ID NO: 126857 - protein, 375 aa, unidentified
MKGKVRFLGLDVHAEMIAVAVAEPDGEVRSLGTIPNRAESIRKMIRKLGAAEKLRACYEAGPTGYVVYWQLAELGVQCEVVAPTLVPVKAGDRVKTDRRDAEKLARCYRSGDLTAVWVPDEGSEALRDLVRAREAAKQDQMRARHRLSKFLLRSGQRPPTGVRPWTRPYLIWVAQLRFTQSAQESTRQDYLHEVEHMRARVTRLEQAIMEAVKLASPALQQVINDLQALRGIAEISAVTIAAELGQVSRFSSARELMGYCGAVPSEDSSGKRIRRGGITKTGNAHLRRIVGEAAWSYRRPPCIWYGLRRRQESISEEAKEIAWKAQHRLHKRYMKLGAAGKPQGKIITAVARELLGFIWAIGTRAEAIVNQRNAA

SEQ ID NO: 126858 - protein, 420 aa, unidentified
MEAIIERCAGLDVHQASVVACVLCGPANQRPRKEVRTFGTMTCDLLELRDWLLSHGVTAVGMESTGVYWKPIYAVLEDHAQLIVGNAHHIKNVPGRKTDVKDSEWIADLIRHGLISASFVPPKPIQELRDLLRYRDKLTKMRTQQRNGLLKILETAGIKLSSVATDVFGVSGMAMLKALVAGERSPAKMAEMAKGRLRKKIPELEQALEGRIEPHHCFLLDMQIQLLEQIGANVARLETEIELKLEPFREQHKRLTTIPGVDFVVAAIIIAELGVQMSVFPTEQDLAAWVGVCPGSYESAGRRKSVRIRKGNVHLKTALVQAAKAAAKQKGSYLKDKYWRLKARRGAGRATIAVAHKILVSAYHMLSKGTDYHDLGESFLDQLDRTRTVNNLVKRLKTLGCEVHVTERPPNSPEPERKAA

SEQ ID NO: 126859 - protein, 397 aa, unidentified
MIAVGIDVSKSKSTVAILNGDGSIRAKPFDVHHVADELQALVDYIKRTSEPPTILMETTSHYHYPLLKAFTEAELPVCLINPYQMKKYGDTELRKAKTDKRDSLRIAQYALEKSYSLIPYTPQDQKYEDLRFLSRQYSQRISTLTVAKVQLLSLLDETMPGITTILPLKSRDPDNCVLLRFIKRFKSFDVIRKMGKTRFLDSYQVLVKKTKDRFAGSKGLAIYELVLNSVTTRGENPLSAMTQDQCVDLVSTSQKAADEINLQMRIIAETMPEYKVLRSMAGVGDRLGPIILGEIGDIRRFHSGKALNAYAGNDAPPYQSGQFESRNRHISKRGNPALRKACFEVMQALKLTKPQDDPVYLFLLKKEQEGKPYNVAKMAAVNKFLRIYYARAMELYK

SEQ ID NO: 126860 - protein, 343 aa, unidentified
MEAYAGKQFVGIDLHRRRTVIVRTTEAGEVLEAVRIVNDVQRLASVMARAGHCPEVVLEATYGWYWAVDALQAGGANVHLAHPLGVKAFEYRRVKNDFRDAQDLADLLRMGRLPEAWIAPPPTRELRELVRHRAKLVGLRSRCKAEVHAVLAKCGVQVLMSDLFGVDGTQLLDGLDLPAPYAARIASLRRLMDDVDFEITVFAGIIRGRMAQEPGYTAVQKIPGIGPTLGAVLVAEIGDITRFSSAQKLTCWAGLTPKHHESDTHVRRGRITKQGSRLVRWAAIESVKTISKTSEVGMLRERVADRRGRNIASVAAGRRQLELVFYALRDGHVRALEHLPRVA

SEQ ID NO: 126861 - protein, 354 aa, unidentified
MNSEKYIGLDVHQATISVAVMDSTGKLVMESILETKAATILEFFAGLGGTLSVTFEEGTWAAWLYDLLKPRVAKLVVCNPRKNALLKDGNKNDRIDARKLADLLRGNHLKAVYHGETGVRMLRELARSYLTIVKDLTRVMNRLKAVYRSWAIPCAGRDVYYTRHRAEWLGKIREAGVRRRAEQLYQQLDMLQHLRQQARRDLLAESRKHSITAKLRQIPFLGPVRSALSVALIQTPYRFRTKRQLWAYSGLALETRTSGEYRYVEGQVRRSKKLLIRGLNKDHNHDLKGLFKGAATMASVRPGPFQDFYQALLSKGMKPTMARLTLARKIAAITLTLWKKEENFDAKKLKSQAA

SEQ ID NO: 126862 - protein, 345 aa, unidentified
MLYVGVDAHKATSQVTVMDSGGNILRRKRIVSSPIAVRQALAGYDEPLKAVLEASYCWAPMYDWLDEVADEVVLAHPLKVRAIAEARIKTDKIDSETLAHLLRSDLIPRAHASSQDVRARRRVLRQRMFLIRLQTMVKNRIRALLVQHICEQPKVSDLFGKCGRDWLRRVQLPDPDGRLLKEDLGLLEFLQQEISKTDRLIAELAQGDEAVQFLASVPGIGVFLSVLIRWEVDIIERFRQAKKFASYTGLVPSTYASGNRIVHGRLTKQGNKWLRWAFVEAVSPAVRSSAYLHSYYQRIKLRRGVKDARIATARKIAELAWAVWTERRGYQERLPKSLRTATEER

SEQ ID NO: 126863 - protein, 399 aa, unidentified
MKGSMPMQSVLAIDVAKGKSMVSLISSCGEVLIEPYEINHSINDFTNLLNKINKQKLDNVSVIMESTGIYHRPVERFFLENNFKVFVINALYSKMYKRNLRKTKTDKLDCISLSELFFTTDFREYIKPDDTYLNMNALSRQYHALDELCVNLKNRYKNLVYLCFPEYELIFKKKTIYSDLALSFIEKYPHADIISNTRIDALQNFFKKNGFRHWKKKPATIKEYAINSYPSVSKDDEITSSLSQLARLINTYQKEIEKIKYKIIFLGKKTKYFESINSIFGIGEFTTSLIIAEIGDINRFKNIKELTAYCGLDPSIKQSGKSINIKGPISKSGNKYLRKILFVSILNILSVTRVCHIENDIETYYRKKRNEGKHHYVATIACTTKLLRQIFVLCKQLDK

SEQ ID NO: 126864 - protein, 459 aa, unidentified
MSIAHCKAKAKYSAFHALHQSCIGVDVHANLIVGVYQRAQFGKTTIEEQYWNSDAIKSSLKKFALWCKSLAPEIIIMESTGVYWQSLYEQLELVGFTSEQLVVVNARDVKNRRGSKTDRADAVHLAEVARQGNYRSSFVPRKDIRELRCISRAYSQLKNQRKSLVNVLHKQLCQVGCRASSVFSDIRGKMATKILDALIDGYEGDELLKKVKEICKNSRGRLKASPKEIVEALDADMESKVWFSIRKIIEHIRYLDKELEEHLDKLREETKPYKSTLDLLMTIPSVKEITAIGIVCELGDDLSAFESVRKFSRWIGLAPGNNESAGKRYSGKITPGNKYLKTLLVEAASGIGLSKTGYLKEVHQRLKERRGTKRANVAIAHKLCRIIYSVLKNKTAYVEQYKPVLKDHRLEKAVHAVAGLRTVGYACDDITVEDIETGMTSVIFGANKSKLTSNSQLVT

SEQ ID NO: 126865 - protein, 418 aa, unidentified
MQTELSQFTAIIGIDWADKKHDVCVQDMKTGRRHASQVRHRAEELDEWARSLHRRYGGPIAVALEWSKGPIVSVLQKYDFFVIFPIDPSTLANHRKAFTPSGAKDDPTDAEFALKLLLTHTEHFKPLNPQSVEMRTLMVLVEQRRKLMSDRVRITNRLRNALKQYYPQTLEWFDHIDTHLFCDFIKRWPSLEQARRARKSTLEKFFREHNMNRKALLESRIQAMKSAMPLTADEAVIVPYRLQVLTLVAQLEVALESIRIYDEEIAGLAPQHPDYDLFNSLPGAGPTLAPRLLVAFGEQRERFASAAEVQKYGGIAPVTERSGQKSWIHWRWQCPTFLRQTFVEWAAQTINKSYWAGLYYYQQRAKGSSHQAAVRALAFKWIRILYRCWVTRTPYDEAKYLKALQERGSPLLKIAEAA

SEQ ID NO: 126866 - protein, 343 aa, unidentified
MQVVRIGLDLAKYVFAVHGVDARGKIVLRKTLRRDSVSRFFANLPPCMVGMEASNGAHYWARLLTDLGHQVRLISPQFVTPYVKSNKNDRNDAEAICEAISRPTMRFVPPKSAEQLPVQAVHRIRRRLVSDRVKLVNQVRGLLAEHGIVIPRDITKLRRGLAELVARCDDDLSELVRSLMVELREELVELDRRITSYDRRIREIFRNSEPCQRLGKIEGIGPITATALMAAVGDRTCFKNGRQFAAWLGLVPKQQSSGGRARLFGISKRGDRYLRTLMIHGARAALAQAGGKQDPRSLWLTKLRQRRHANVAAVALANKNARIVWAMLAGNTSYEPELSIKAA

SEQ ID NO: 126867 - protein, 339 aa, unidentified
MNRIVVGVDVAKRVFQLHWVEPETGEIVALQLKREKFLEHFANRSSCLIGMEACGGSQHWARTLQKLGHEVKLLSARMVKPFVGGNKNDAADARAIWTAVQQPGIKAVAVKSEEQQAVLALHRMREQLVKFRTAQINGLRGLLTEYGEVMPQGRAGIRRDIPGALGRLSDRLPAMVIETLREQYARLGELDRQIRQIELRLRQWQSQDSATQRIAAIPGVGLLSATAVMATMGDAKAFKSGREFAAWLGLVPRQTGTGGRVRLLGISKRGDTYLRTLLIHGARAVLMHSKSPPEWLTELMKRRPKNVAVVAMANKMARTIWALTAHERAYQSGYVSRPA

SEQ ID NO: 126868 - protein, 341 aa, unidentified
MPDVHNPTRWLGVDVAKATFHAALARADLDARPPTREFARSPDGARECLAWAASLAPGTPLAAVMEATGGYSEPLAAWLRGLRPELPVAIVNPRWVKHYGLSLGVRDKTDRVDAIVLATFGQERHPSAHVPMSETYSVLHAMVREREALLKAALATENRDELPSRSAVAQEVRGAIIREMKAGIQRLDAAILAHIKADENLHADYRILVSIAGIGPVVASGIMGELGDLRRFEDARKLSSFVGLAPKHRRSGTSVNAPPRMSKQGNPRIRRLLYMSALTVIRGDNDLAVIYRSDITRGKPPKVALVGIMRRLMVLMRALLVENRPFERHHTKAWPEEVQAD

SEQ ID NO: 126869 - protein, 337 aa, unidentified
MTLYCGIDLHANNSVVAVLDESDRTIYEKRLPNDLATIIHVLCIYQAELAACVVESTYNWYWLVDGLMAAGFPVQLAHTSALPQYAGLKYTNDFSDARQLAHLLRLGILPTGYIYPKEERALRDLLRRRLLLVRQRTLHHVSLQSLIARHSGQRLSAYQIKTLTLPQIADYLQGPALLGGEITHQARCWLDGAIKRIERELQHQIKPRQDYQLLQSIPGVGPVLGTTIVLETGTIERFASPGNYASYARCVKSEKISNGKYKGQGNKKNGNKYLAWAFMEAAHYGAIWNPRIKQYYRRKQAKAHILVAKKAVANKLARACYHMLKRGEKFDVKRAFG

SEQ ID NO: 126870 - protein, 442 aa, unidentified
MSELVLLDPRAAFVDVGSEKMHVSIGGGPPEVFGTVTSQLHALRDFLLEHRVCSVAMEATGVYWLPLYGVLEAAGLDVRMVDGRQTRHLPGRKSDMQDCQWGATLHAHGLLRAGFVPPAHIRRLQDYLRLRGDHIAAAAGHVQHMQKALERMNIKLHDVISSLTGASGLAVVRAILAGERDPVALLELCDVRIRKVKAERVVEALRGDWADEHLFALEQAVQSWDHYQAQIVDCDRRIADILARMPGGDGPAAAVEKPAKPRTRPGVNTPQIDNLRELLQRMCDGKDATTLPAHSEYTVLQLVGEVGTDLTRWPTEKHFASWTGLAPGSAQSGKRRAAVKRRRNRAGQIFCVMARALARSKYIALGAYYRRMAARRGGLVANKALAHKLAILFWRVMVKGMDYVEQGLAHYEAQVLETRQRLLRRLAKQFGQQLVPIQGSSP

SEQ ID NO: 126871 - protein, 312 aa, unidentified
MGIDVPKRRLDASLRPTGEHFGLPNDPAGIDTLVGRLERARPKLVILEATGGFERAVAAALAAAAIPVATVNPRQARDFARATGKLAKTDRIDAEVLARFAEAVRPAAKALPDEEAREFAAILARRRQTVEMLTAEKNRLGAAASSPVGKRIEAHIKWLEKELARTDGDLDGAIRESPTWRENEALSRGVPGVGPVLARTLMAELPELGGGELTPKQLAALVGVAPLNRDSGTLRGRRTVWGGRERVRQAPYMGALVATRFNPTIEESYERLVGAGKPKKVALVACMRKLLTILNAILKHRTPWRSPHALAP

SEQ ID NO: 126872 - protein, 435 aa, unidentified
MGRVEVCGFPAYFLRRAVAAVYFAGVDIAKKQHEVCIVNADGEQVLSMPVTNSVAGAERLLRAIHGQIGPDPGLVTFCMEATGHYWLAFYSFLTERGYTVHVVNPIQSDAARDLYIRKNKTDRKDAYILADLLRMNKTQPTSMASEPVLRLQTLSRTRFAFVDQVANLKQRVLGILDRIFPEYPQCFSDVFIKASRELLKTFSTPEELAEVDLSELAEFLTAHSRGRLGAERARQVQSYARSTFGISIAVDAFALELKLLLDQIEFIENQISAIEQAIEEAMAELAAMNQSTDLPEGVYHVIETIPGIGRILAAAIIGETGDIGRFVSARKYVAFAGLDATVRESGQFAGTRNRMSKRGSPYLRRAIWLAAVNARRLNPELRSYYEAKRAQGKHANVATGAVARRLAHLIHAIWRDQRAFDPDFRWTPPGAEPNT

SEQ ID NO: 126873 - protein, 336 aa, unidentified
MTSIIYVGMDVHTTNYTLCCYSMEDDRFFAEVQVEPDAKNILKYLARIEKQQSRDCRIVCGYEAGCLGYSLYHQLHAHGIDCVILAPTTMMTKPGKRIKTDRRDARLISKCLAFHTYSSVYIPTEVDDAVKEYIRMRDDANSALARVKQQIIAFCIRHGKIHDGKSYWTNKHLEWLSSLDLGNKILSEVLQEYLIRYYQLREQVDMYDMRINELAQAEPYRQKVEKLGCFRGIAAHTALSFCVEVGDFRRFATAQQFASYLGLVPGECSSGDKQQYTGITKAGNSHLRKLLVETAQVFGRSATKSGKSVALKERQAKCDSLSVEYAVKAIARLKTK

SEQ ID NO: 126874 - protein, 391 aa, unidentified
MIYVGIDVAKNKHNCCILGSSGTVLREAFTLSNDRKGFQELFSAIQGALHQEGTDHIKAGLEATGHYSENLVAFLRNSGIKPVVFNPLQVNLFRKSQSLRRTKTDKVDAKCIAQLLMSAESTPVFASYQIQELKTLTRHRSRLVSQRTKLKQCISRLVDILFPELPSVCCSATQASMRTLLLELPSARQIAACRIDRLTNLLYAASKGRYFREKALEIKQLAQQSIGANSPASELELRLTLQQLDFLLDQLKQLEKAIQTIVAAIHSPILSIPGIGPTLAAIILAEISDIHRFSSPDKLLAFAGMDPSTYQSGKFKADHTPMVKHGSTYLRWALMQAARLASIYCDTFRHYMDTKLAQGKHYFVALGHVSKKLVRVIFRILTTNEAFVPQA

SEQ ID NO: 126875 - protein, 523 aa, unidentified
MITKTRKRKSIGTKKRFIGKPAGQIQERVQAVGPEHFGVVAVDCAKRRSKWMLCNFFGKVVVEPTSVEHSTGGLREMTQLVARTCQAEGLTDVIVAVEMTGIYHKPVQRAFRKGGFDTRIVHPFASSHYRQPLHPDAKTDDHDLEAIFQAAIRGYGLATLPVGEVYQSLQAVSRHRHNLVKQRSRLMVQIRRLLHQTMPGFADLFDEGKLFHHSIALPVALQFPSAEAIREAGVDGISRRLNQIHVSFQTRTIERIVAWAGNATEPSELTPMYTRQWQQLNQVRQMWDEQILATEREMAGFLVKTPYVLLLTVTGINVVSAARFAGEAGPIEHYASARAINGRAGLFPSRYQSDEVDHADGSLIRQCNRKLRGAAMLVAENLIKCHPYYRGVAELWKQQKVDPRDRRCRIANRAMRMVYQLIAGRQVWRGKGVDREYLLAKLQEFHRLHQTPIDQSIRDMNEAFFWLPKSAYAMEAKPLAELAAKKHRGPKRIGELLIPLLIRLGVSIEDGVELDTSEARSSD

SEQ ID NO: 126876 - protein, 371 aa, unidentified
MPHVTSVGLDVHARSVSAAAFNLYTGEVVERRFGPGAGPIAEWVLSFESPRAVYESGPTGFALCRELRALGVDCVVGAVSKMQRPAADKRVKNDRRDAAFLARLLATNNVVVVPVPDAEVEAARDLSRALDDARENVQRARQRLSKFLLRRGHVFDEADSLGRRKGAWTAAWWSWVAKIRIEEPAAKAAMAHYIEDVRHEESSKLKLERLVAEEAARPRWGAVVGALRRIKGVDTVTAFCLAAEAGCFSRFRSAPAYAAWVGLVPSEHSSGEKVARGGITKTGNAASRRALVEAAWHFASCSPSPKPPRAGSEGVPADIERRAAKCTARLAARHRALREAGKRPCVANVAVARELACWVWEVGCRAEGTLR

SEQ ID NO: 126877 - protein, 405 aa, unidentified
MNAVGIDVSKEKSTVAIMQPLGVVISSPYDVSHNAKELKALSDFIKELSGETKVVMEATGVYYEPIAKYLHDQGIFVAVVNPVLIKDFGGNTIRKVKTDKKDAIKIAQYALHYWSELNEFIPEKDERKSLRILNRQYRQAVKITTMINSNLIMLLDSVFPGANKLFTSPARELDGHVKWVDFVWEFPHCDKVAGLTPSAFKKKYKSWCDKHKYHYSEVRAKEIHEFSRNCTCSISCSPDNCAIVKQTAKFMSDALENSHKIRTEMERIASQLPEYNTVISMYGVGKTIGPQLIAEIGDIRRFRSRKAITAYFGYDTEPDDSGQKVSKSRPMTKKGSPLLRRTLFNIMTVFITNQPPNEPVYRFLDKKRSEGKHYFCYMAAASAKFLRIYYAKVSEAMNKTKAPSG

SEQ ID NO: 126878 - protein, 355 aa, unidentified
MKKNSIARVSDGRFIGLDLSDKQGFLIALADDGSITEEGKVSMTEAGLHKEFAARSACRIAIETGGHSPWVSRVLAALGHEVIVANSRQIPLIFRSKRKNDRLDAESLARLARLDPQLLHPVVHRSERAQQDLAVLRSRDALVRTRTSLINHVRGVVKAVGARLPSCGARYFARRAEGELPEGLKPALAPVLEMIEELTTKIAWYDQEVERLARERYPETAVLRQVGGVGPVTSLAFILTLEDPRRFHRSRDVGAFLGLVPGQRQSGGSDPQLHMTKAGDAFLRRLLIQCGHYIIGPFGKDCDLRRWGQKLAGSSGKTKKRAVAAVARKLAVLLHRLWQTGAVYEPVRDTIAAAA

SEQ ID NO: 126879 - protein, 392 aa, unidentified
MIYVGIDVAKDKHDCFITNSDGDVLFKSFTIPNNREGFETLFQRIESVSDDLAKVKVGLEATGHYSYNLLGFLLDKDLTTFVINPLHTNLYRKSLSLRKTKTDKVDSRTIATMMMSDINLKSYADTSYHNEELKSLTRYRFDKVKERAKLKTSVSRLVCILFPELEKLVPTLHMASVYALLSEFPSAGAIASAHLTRLTNLLSESSKGRYGKDSAVMFRDAARSSIGSLMPAKSLELKHTIKLIQELTTEIEEIEAAIKRIMDEEIQSPITTIPGISYRMGAMIIAEIGDFSRFDSADKILAYAGMSPSTYQSGQLDNCYSHMEKRGSRYLRYALYNATKYVCHWDKSFATYLEKKRAEGKHYNVALSHATKKLVRLIFAMEKSGQAYIPAA

SEQ ID NO: 126880 - protein, 392 aa, unidentified
MLFVGIDVASKKHDIAITSSEGDIIVRPFTISNDLEGFKKLPMVITSHTESVEDVRIGIEETGIYSKNISEFLALHGFIVHMINPVLTNHSRKSQSLRPAKTDKIDVLAICRYIQSNFKRLNSYTPSLYIHMELKSLTRARFDILKNQIKAKTEWTRLLDLVFPEFRQHFKQHSKWVYNLFSKYPAIEQISRMHLCTLEHIIKVQGDRVLAAQKIKLLAMNTIGHPSDTNGVLLTNTLCDIMHYASQLRRIEKQIKSIVAENFAFLLTVPGIGDITGATIIGEIGDINRFHSSSALVAFAGMDPAIHESGDFRANTMHISKRGSRYLRSAIFISTRAAIINPSIQDNKFREKYLKKRAQGKHHNSAICSASKNMINVIYSLMKSHESFNYFV

SEQ ID NO: 126881 - protein, 428 aa, unidentified
MDVLVERCAGLDVHRDTVVATVRVPAEDGARNRRVQHTRTFATTTAGITALGDWLAEHRVARAGMESTGVYWKPVYYLLEDQLEVWLINAEHLHNVPGRKTDVADSAWIAQMVEHGLVRPSFVPPPPIRELRDLTRHRRTLVEERTRVVQRLEKVMQDAGIKLTSVASALLTKSGRAILDALLAGQDDPDQLAELARGRLRAKIPALREALAGRFRAEHHGLLVAQMLAHIDFLDAAIAELDTTLERAAAPFQAMLKRVCTIPGVSVRTAIMLLAECGADMTVFRTPAHLASWAGICPGNNTSGGRSRSGRTRHGSVPLRTALTEAAHAASRTKNTYLAAHHAHIRSRRGLPKAIGATRHDLLIAYWHVVHDQVDYADLGPDWAQRRRSTEHRTRRLVHQLEQLGHTVTLEPSQDQRACGPSFAVVVT

SEQ ID NO: 126882 - protein, 420 aa, unidentified
MSFKIFRFNCCGLDVHKTWIYACIGITDSNGRTDYKQARFSSFSKGLKELCDWLAKYNCSEVCMESTGKYWIPVFNVLEKANNSVILAHPKYTKPQKGNKTDRKDAKWICDLFMCEMIKPSFIPPADIRHLRDLVRYRFKLTCMITGEKNRVQNCLTVSNLKLDDVFSDVFGKSSRSITEYMLAHPGEIFDVAPFVDSRCKTPMEEIQAAVDGAISPEQAIKLRQCLNHIDELEKHLEEIEREILRLSDKYQAALDLIRTVPGFDKNPMTAIQILSEIGGDMSVFPSAKHLVSWAGCCPRNDQSNKRIKSTRISRAGNYIKPILVQVANGLLRSKKHPEITGRYKRIKSHRGHKKAIIAICRMLLTAIWHILSDLKPYTAEGFLESRPVNKAKVLTTSQALNLLKQRGYTIKDDIVPAMN

SEQ ID NO: 126883 - protein, 347 aa, unidentified
MKRTTKCVALDVHQATTVASVREESGRILARSILPTEKDALLEFFGGMRGSVHVTFEEGTQAQWLHDLLIPRVHRVLVCDRRGEKRQGNKGDIADADQLSEDLRRGSLRAVYHGSGHRAALKELARTYENAVEDTTRTMLRLKALFRARAIRTPGQEVYQPESRGEWLAKLPDRAVRFRAESLSAQLDVLKEIRQKAKAALLAEARKDPAWERLLGIPFLGPVRVALLLAVMQTPWRFRTKRNLWAYCGLAVVTHSSADYALQEGRVVRRRRTPMTRGLNQNHNRSLKNIFIGLLPDLAQNVELLGEGLRPEAHRVARAAWPATRPGSLADTPPDPGCGSHGRGRAP

SEQ ID NO: 126884 - protein, 351 aa, unidentified
MLYAGLDLSRKRINFDARLAGGELVERGACPPDADGLRGLAGRLLAHDPEVLAVVESMNGARFVHDQLERHGLDVLIADAERAKGLAPLACKTDKIDARVLAELARRDLVPEIWLPDPGTRADRERARFRLHLVHKRTALKNRVHSTLIAWGKPCPVSDLFGRSGRELLHRLEIPEPWSSTLEASLRLIDLLDEQISAQERELRSLGADDPYVRLRQSVPGIAWVLGFTIASEIGDIHRFPSPRKLTGYTGLCPKVDQSGERDWRGRLKKNGPRYLRWALIEAAQHAGRGPHYRDLYERTRRRHGRQRGPKVAAIVVARKLANAIWHMLTYETAFAPASATQSSGGMTAPN

SEQ ID NO: 126885 - protein, 327 aa, unidentified
MEVSLIFVGIDVSKAQLDVEIRPTGEKESVANNKVGIKAVVNRLAKIKPTLIVLEATGGYERQVTRALASAELPVYVVNPRQVRDFAKATGQLAKTDSIDAGVLAHFAEAVRPQLRPLPDVVTLELRALTARRRQILEMIAAENNRLAMTSKAVRKRIDAHVRWLEQELDRANQELDRAIEQSPIWKENDDLLRSAKGIGPVTSRTLLAELPELGTLDRKQISALVGVAPFNRDSGSLKGRRSIWGGRAPVRCALYMATLVATRRNSVIRDFYKRLLAKGKLFKVALVACMRKLLTILNSMIKHKTSWSETFSRQTTCLLIQLLRAP

SEQ ID NO: 126886 - protein, 323 aa, unidentified
MQAADAIVGIDVAKAKLDVALKQPTGKWRTKVVANTTSGFEELRTWLAKYGVTRARVCMEATGIYWEQVAQDLADHGFAVSVINPAQIKAFGGASGVRTKTDVVDAKLIAEFCARHTPALWQPASKSVRRLRSLVGRREALVDLRTQETNRLEVAASELVRNSIEQVLETLNAQIAQIEKQIAKDVDDDPTLREQRQLLASIPGVGDKTIAMFLSHYGGELRFARSRQAAAFAGLDTAKHESGTSVRGKPRLSKMGHASIRRALYMPAVVAMTKTSWGRAFAARLLSAGKPKKLILGALMRKLVTIAYGILKSGTPFNQALHA

SEQ ID NO: 126887 - protein, 484 aa, unidentified
MPDGVVTQGEPKMARAARRQNRRPSTPRRASRRRSAQLEQLNLNAAGIDVGAEAHWVAVPCDRDEQPVQCFGAFTADLYVLAEWLQQCQIETVGRESTGVYWIALFAVLEERGFDVKLVDPHAVRQVPGRKTDVKDCQWLQELHTYGLRRGAFRPDDEMCVLRSSLRQRSMLVAMTSRTVQHRQKALEQMNLKLTEVVSDITGKTGMTIIRAILAGERAPQLLATSRDQRCKHDQATIAKALEGPWRAEHLFALQQAVEQHDFIQQQVRVCDAQSEGCLQACVPQVEDALPPSAPVRKRRSRQKTSPDFAVHASLHAMTGVDLTQIDGIDSLTALKIISEIGLDMPRWPTGKHFASWLGLCPGNNVSGGKRHSIRSKPSANRAATAFRLAAQTLAHSYSALGAYYRRRRSRLGAPKAITATAHKLARLVYSRLRYGTAYVDAGQQAYERKYRDRVLTNLQRQAKAFGYQLVHIEDTDGGVVSTL

SEQ ID NO: 126888 - protein, 343 aa, unidentified
MDQITRIGMDTSKHIFQLHGVNTAEAPVLRKKLRRKEMMAFFEKLAPTAVAIEACGASHHWARRLQSLGHTVKLIPPQLVKPYVKRGKNDAADAEALCEAMSRPTMRFVPVKTVEQQAALMLVGVRDRLIRNRTQLANAIRGYAAEFGLTAAKGMCKIEPLLARIAADETLPELARELFALHGREYRQLQARLEEVDARLMTWHRTDECSRRLARIPGVGPIGASMLVMKTPAPQEFRSARHFAAWLGLTPKDHSTAGKVRPGVITRAGDEALRSVLVTGATAVIKQAQRGRVASPWLVDLLNRKPAKLAAVALANKIARVAWKLMVSGETYTTPQTVMVRAA

SEQ ID NO: 126889 - protein, 414 aa, unidentified
MDIVHTHCAGLDVHKKTVVVTIIVPGPNGGWQKETRTFGTMTTDLLALSDWLMELVVSHVAMESTGEYWKPVFNILENNFEVLLVNAQHIKAVPGRKTDVKDSEWIAELLRHGLLKASFVPPLGQRELRELTRYRSTFIKERATLVNRVHKVLESANLKLASVATNVTGVSGRAILQALLEGTATPEEMAELAKGRMREKRTELTRALEGHVKAHHRFVLTELLCQIDSLDEAIVRFDDQIVEYCRPFEETVTLLDTIPGIARETAEIMVAEIGTDMSRFPSADHLAAWAGVAPGNNESAGKRRSGKTTQGNHALGVALNHAANAAAHTKHTYLSAQYHRLAARRGKKKAIVAVEHSILIIAYHIIQRRKPYHELGSDYFDQRRPEATAQRLVKRLEHLGFQVSLQQTQAPLAV

SEQ ID NO: 126890 - protein, 324 aa, unidentified
MGDGTEGETMSEVFVGIDVSKSQLDISIRPSGESFSVGNNDEAIAGLAVRLAPLAPRLIIVEASGGYQAAVVAGLALAQLPIAVVNPRQVRDFAKATGRRAKTDALDAAVLAHFGEALKPEPKPLEDEQAAALGALVARRRQVVEMITAETNRIAQSQTAVRAKIKLHINFLRHELSDLNRELDDALRRSPVWREQDELLRSVPGVGRVLAVTLLSELPELGRLNRKQVAALVGVAPVNRDSGTLHGHRHIVGGRASVRPALYMAALVATRWNPAIRAFYQRLCAAGKLKKVALTACMRKLLTILNAMVRSNRRWEPSTLPAAK

SEQ ID NO: 126891 - protein, 339 aa, unidentified
MRLYVAIDLHSNNSVLVILDEADQLVHKHRYPNDLPVILSALAPHKENIQAIAVESTYNWYWLADGLMAAGYTVKLVNTVAVKVYDGLKHTDDEDDARHLAHLLRLGLLPTGHIHPKEERSVRDLLRKRSQLVRHRTMHILSAKNLILRNSGKSISVDALRKLDENALHLLCAGATPLLLAIKSSLAVLHCLDEQIKLVERAVLTQARLKPEFRKLLSVDGIGEIIGMTIMYEAGSMERFKKVGNFASYARCVASSRWSNGKKKGENNRKNGNKYLAWAFIEAAYSAARYNERIMKYFQRKKAKTNSIVARKAVAHKLARACYHVIRDQVVFDAEKAFA

SEQ ID NO: 126892 - protein, 358 aa, unidentified
MRIIGCDLHARQQTVAMLDADSGELVEKTLQHDGEELRKFYSQLPHPVLVGIEATGSMQWFLELMEELGIECRVGDPAKIRAAEPRKQKNDRRDAQLLLKLLVEDRFPTIWMPSTEQRDLRTLLRHRHQWVRLRSRVQHTLQSMALNHGLRQGRSLWSQAGQHALRALPLTRYASERRAALLSLYPRLQGSIEELDKEVSEEVQQHPQARRLLTHPGVGPITALATEVFLGDPLRFSDGKALASYIGMIPSEHSSGGRQRLGAMSKQGNTLLRYLWCEAAMHAVERDPELKHFYRRKLVQKGLGKARVAAARKLGIRLWIMMRDQIDYQEFCRRGKARQESGSVRAGMPDLNSGPAEA

SEQ ID NO: 126893 - protein, 360 aa, unidentified
MTGTMTWAAMDVHARSTYAASLDVVTGELSRQRFDTGAVEPVVGWLAGLPGPVRACYEAGPTGFGLYRAAAAAGIECQVIAPSKTPRPSGDRNKSDRRDTDLLLRQLMAGALTAVAVPSATFEAARDLARAREQVRLDLMRCRHRLSKLLLRHGRVWDRTAWTKVHRQWLAAQRFEHQNTELAFIDNLAACDGLSARRETLDERLSWVATDPEFWPVVRRLRAFRGLDTLSALIIVLEVADFTRFPRAVQLGSWLGLVPSRQQSGESDVHGSITKTGSKYARRILVEAAWHYARPPGLGRALYERQEGLPDHVLQIASRAQHRLYRIHKRMRERKKPGNVITVACARELACFLWAAATAP

SEQ ID NO: 126894 - protein, 332 aa, unidentified
MTYFAGLDVSLEETSICVVDESGRILKEARAASEPGALSEALREVDLPLERIGLEACSLTAWLHDGLRAEGLAAICIETRQANAAMKTMPNKTDRNDARALAQIMRTGWYRQVHVKSRQCRLWRSLLVARRTVLNEMRSIENVVRAMLREAGVKLGLPSRTAFAGRVRELAGGDAEVMAMVEPLLSVLSTMLREFARLTRRVFDIVRKEEACRRLIRATIDRPERFGSSRAVGAHLGLTPARYQSGETDIQGRISRCGDELARTALYEAAHSLLVRSKKWSNLRAWGMNIARRRGMARARVAVARKLAVILHRMWADATEFRFGKEPAALAA

SEQ ID NO: 126895 - protein, 339 aa, unidentified
MKLYSGMDLHSNNTYCGITNESGKRLVGHRLPNEPKVILGFLEPYRPDLEGIVIESTYNWYWLVDVLQENGYRVHLSHPSGNEQYRGLKHTDDRHDAFWLADLLRLGCLREGYIYPKQRRPLRDLLRKRAHLVRLRTSLLLSAQNSLQRNRSLHVRNEDLKKLTADLLSVHLEGDEALWLAAKASKELIDAFTHRILRIESWILKHLEPQVGFGYLLTLPGVGEILGMTILFETGPIQRFPDVANYVSYSRLVASQRISNDKLKGKGNQNNGNKYLAWAFSEAAEHARRHYPRCRAFYNRKLQQKNATVAHCALAHKLARAAYYILRDQVVFDETKLFS

SEQ ID NO: 126896 - protein, 324 aa, unidentified
MFFLGIDVSKAKLDCALLGSDANKRKTKVVPNSIAGVQTLLQWCAKQGAEPAQLHAVLEPTGQYHEQAATALHDASVSVSLVNPAQVRDFAGALAVRSKTDGIDSYVLARYGQALNPGLWRPAPLHARQLRALLARRDALAKDLQRELNRQEKTQFSDPPVLVEGSIAKTIAFLREEIKRLDHAINDHIDRHPDLKEDRELLTSIPGIGDRAGNSILSIMHNRPIESAESLASYLGVVPVQRQSGTSLNSRPRLSKTGPSTVRATLYMAAIVGKRFNPHVAALYARLLAAGKSKMAALGAAMRKLVHLCFGVLKTRMPYRPDYA

SEQ ID NO: 126897 - protein, 333 aa, unidentified
MYYSGIDLHSDNSYISTVDENGTLVKQQRLENIDEHLLGYFHCLPGPHQAVVESTTGWYWLNDLLQDNGIELFLAHAKYLKAISYAKVKTDKIDSQTLATLLRQGLIPRAHKISRELRGLRDTMRIRLRLVQQRSDTLRRIKSIQAKFNGAVPDAYRFQLTALEHLRDALSEQILALEKSLHPALIPNDDIQRLLYIPGIGKLSAFTIYLEIDGIERFTSDKHFVSYGRLVPAADNSNRSIHHRSSKDGNKYLKIAFSDAAVHAIQFYPEYKRFFLKRTKRSGQAVARACVAKELAKIVYYILKNKTHYKGFKGQEISRQKSAQWPRLSSPLA

SEQ ID NO: 126898 - protein, 319 aa, unidentified
MRKVVLGIDVSKKTLDATLIFDNRTLSKQFKNSAEGFKLLAAWLESLEIEQVHVCLEATGTYSEAAALFLHERGHLVSVVNPLRIKGYANANMQRNKTDRLDAQLIASFCQTQEPDQWLPPSAEVKQLQALMRRIEVLEEMRQAEENRLANSVSEVQPSIGRMIALLTEEIRELERQIKEHIDRHPNLKEQSRLLQTIPGIGSRTAQLLLSEIEFERYRSARSVAAQAGVTPRKRQSGTSLKQTNLSKLGNARLRKALYFPAIVARQHNEIVKEFAERLKKRGKAPMQIVCAAMRKLLHIAFGVLKHNRAFDSSLAFSA

SEQ ID NO: 126899 - protein, 345 aa, unidentified
MKIVGCDLHTRYQQIAMLDRETGELVERRLEHENGEARAFYAALSGSVRVGIEATGHTRWFERMLAELGDELWIGDAAQIRASMVRKQKTDARDAAHLLDLLLSERFPRIWRPTLEERDLRQLVWHRQKLVWMRNAVGNQLHALAMGEGVCRKKTLFTKKGRVELESLKLGPWASHRRQELLTMTDQLDTSLQKLDQAVAEQAERNPTAVLLMTHPGVGPVTSLAFVLTIGPVGRFERSKQVVSYLGLNPREHSSGGRQRLGAISKQGNPMMRSLLVEAGHTAARLDRELRQDYQRLKLRRGSGGAKVAMARKLAVRMYWMLRSPANYAQLVRMQGSPRGTLVGQ

SEQ ID NO: 126900 - protein, 421 aa, unidentified
MQILYPRCAAIDVAKKEIAVCMRTPGDEPGGRRSQVRKYKTFYGVLKEMCAWLAECGVTHVAMESTGIYSNPVFHALAEFGHFEVIKCNAAHVKNLSGRKTDAADCAWLAELLECGLLRGSCIPVQRIAELRDLTRYRAKLVGSRTSEIQRLQKTLEDAGIKIDSVASDVLGVSSREMIRALIDGERRGTVLAELARGVLRAKIPDLSMALAGRFNDHHALMCKLHLRHIDELTELIDTVDKQIEMMLIPFRTERDLLMTIPGIGPAASAVIIAETGTDMSFFPGADHLASWAGLCPANNESGGRRRPAGTRHGDQHLANVLVECAWAASRTKTRPSAQFHRLVRRFGGHRNPRAKKKAAVAVAHTLILIIYCVLDRRLPYEELGADFYTRRQDPARYKDKLIARLAKLGYTVTVQPAPAA

SEQ ID NO: 126901 - protein, 329 aa, unidentified
MKKDWYVGIDVSKKWLDVAIFVENSELKGYSHTQVGNSKSGYKDLLGWLREHDVDASTCTYGMEHTGFYSDGLQHFLDKKGYKYTMLEPAVIKHYPIQPREKNDRLDAAKIADYLFRFKETLKFSRVPDKTMEELRNLHRERKFYVEDRVVYLNRKQVVGKEEAKRLDKIISLLDKQVESIEEKIRDIIRNDESLMESYLYLTSITGIAFVNAVNAIVITQNFTVFKTARDYASYIGVAPHTKKSGTTVRWKPKPYKHCDLTAKADISQAAKIAIVHDVELKRFFERKCNGKEDADTIRKAMNAVKFKLVLRMFAVVKQKHEYRQFTTI

SEQ ID NO: 126902 - protein, 403 aa, unidentified
MEVLHPRCCGLDVHKKTVTACVITPDGREIRTFGTMTNDLLQLKEWLHESKVTHVAMESTGVFWKPIYNLLEDGFNLLLVNAQHIKAVPGRKTDVKDAEWIAQLLRHGLVRGSFVPDRNQRELRDLVRYRRSLIDERSREVNRIQKVLEGANIKLSSVATDVVGASGRAMLAAMVNGIDDPKALANMAKGTLRRKKASLEEALQGLISEQQKAILKIQLDHLDFLDKQIARLDEEISERMRPQQEVIERLDSIPGMDHRSSEEVLAEIGTEMSQFPTAAHLSSWAGLCPGSNESGGKRKNGRTRRGNRWLCSTLVRAARATTRRSNNYLSALYHRIVRRRGDKRAIFAVAHSIAVIIHTMLSKGTVYQDLGALYFDERDQERTVRRAVQRIERLGYKVSLQVA

SEQ ID NO: 126903 - protein, 320 aa, unidentified
MSDHLAVGIDADSKTLVVACHGTKGSARITNSASVITKWLSTLPVRSRIGVEATNRYHELVVQAAQKAGHVVFVLNPRDIKHYAKGVACRGKTDSGDAQVIARYIAKEADNLHEHVARSPAQEQLHVLLQQRDSLVRSKAKLNLSLGAGASESAIFGRIFDGLKEAIAMLDQQIQQLCRSGEQRDLYRRIMTIPGVGPTVAAFVTHHITRWPLTSSDAWIACTGLDPRPNESGARIGRRRLSKRGNASLRQILYMAAMGLTRSKNGKPLYNAIRERGHSSTASFNILARKLARIAWGVFKSGRDFDPAMLKVGQTGFQQA

SEQ ID NO: 126904 - protein, 408 aa, unidentified
MQVLYTRCAGLDVHKDTIVACVRCVSPPLHQEVRSFGTTTAELLRLADWLAEHGCTHVAMEATGVYWKPVWHVLEDEFELVLANAAHIRNVPGRKTDVNDAMWIADLLAHGLIRSSFVPPQAIQQLRDLTRTRKQLVREVSQHSLRIQKVLEDANLKLGSVLSDVLGRSGRAMLDAIVAGEADPARLAALAQGTARNKTAELREALRGRITEHHRTMLRLHLQVVDALQRTLAELDAAVGKALAPIRQRARLLTTMPGVSDLTASVVVAEIGVDMSRFPTAGHLVSWAGLCPRSDESAGKRRSTRVRKSGTWIKTTLVTAAWAAVRVKTSYLRAQFLRIKARRGAKKAILAVAASMLTAAFHMLRDGTEYNDLGSEHFDRQDRSKTIRRLIKRLQDLGCDVPVGAHAA

SEQ ID NO: 126905 - protein, 403 aa, unidentified
MNNVAGVDVSKGKSVVSVLRPFGEVVAKPFAVGHTGSELKELADYLKSLDGETRVVMEHTGRYYEPVARFLHEEGIFVSAVNPKLIKDYGNNTLRKVKTDRADARKIARYGLDNWVELRQHTPMDTIRMQLKTLNRQQGLYSKTKTMMKNNLIALLDQTYPGVNALFGSPVREDGSQKWVDFATTFWHVDCMRNMSLTTFTERYRKWCKRHGYNFSQSRAVEIHTDAHDLIAMLPKDALTKTMIRQAIDALNAVSKSLEQLKAEMRTLSTQLPEYPVVMAMRGVGDSLGPQLMAEIGDVTRFTHRGAITAFAGVDPGADQSGAHEAKSNRTSKSGPPELRRALFLVMDCLLKTQPEDDPVYRFMDKKRSEGKPYLVYMTAGANKFLRIYYGRVKEYLASLEEN

SEQ ID NO: 126906 - protein, 352 aa, unidentified
MRHFIGCDAHKKYSVFVAIDETGNVKPAVRVNHDRELYRGFLRGLPAGSEIAVETIGNWYWIVDEMEEAGHRPRLAHARKSKLMMGEIDKTDKLDGRGLATLLRNGTLPEVWIASREVRDQRELLRLRMTLVGMEIRLKNRVHAILAKYAIQLEEVRDVFSQQGRRLLLGTTLENLPPHTAEVIRQHMELLESTEQQRELAEERLKSIVKERADVKLLMTLPGVGWILGTVIAFEIGDIDRFSRAPEIASYAGTVPRVHSSGGKTRYGRVHPDVNRYLKWAFVEAANVIVMHQKRLGDVHVVRLYKRLRQRKGHGRAVTAVARHLAEAAFWVLKKQQPYQQPQGCRVSSTHR

SEQ ID NO: 126907 - protein, 346 aa, unidentified
MLADELDYVIGVDPHRDTHTLAVVDVRSGGVVFEATAVADGEGYESVLRLANQHAPGRRAFAVEGTGSFGAGLARFLVSHEERVLEVGRLRRERLSGKSDALDAIRAARSVLGQTRPAGPRAGGEREALRALSAAREGAVTARRAGLCQLRGLLVSAPEPLRAELRSLTRAQLLRRLAAVRPEGRQDPELRGTLLALRALARRVKALTVEERELAREIETLTRKLAPQLLAQPGVGPLAAAQVLISWSHRGRITSEAAFARLAGCAPIPASSGQTVRYRLDRGGDRRLNRALHMILVTRRRTHAPTIAYINRRIQEGKSRREATRCLKRYLARNLYRLLEHAPTST

SEQ ID NO: 126908 - protein, 317 aa, unidentified
MKTVPFEQVILRGCGIDVHKDMVVATISGEGLKTETRSYKTFSSSLTELKEWLLSSGITHVAMESTGVYWKPVYKILECPDMKVWIVNARHIKYVPGHKTDKKDSAWICKLLLAGLLKPSYIPEREQRELRDLTRYRNKLIQHVSSEKNRIVRILEDCNIKLSSVVCSLDGVVANKLIDMLIDKGHVTMDEITCIYHKKLEASPELLYQACEGFIEPHHIYMLQTIRKDMEQTKAIIADLTCRIKEVLSPYENVMELLQKIPGLSRKTVEDLIAEIGVDMEAFPTEKHLASWAGVCPGNNESAGKKKVVEPPMATNS

SEQ ID NO: 126909 - protein, 473 aa, unidentified
MGAQKVFSNSTLFNGLPPQKVLFCIIDIGKNVHTFSFLTASGQTICPPTKTLTNLQGFNSFSSSLQKAIRQTGPDLVIFAYEASGIYHLPWQDALFARFLDHFNSQAHPTFQIRLLQPSQVKASRQARSPRKRKTDPIDIHAMSDLLAKNLGNPITPPSTTSLLLQQSVANLRYYTQQLASLSISILRTIDRLWPGALINIPRFQRAHPELSPPEPLVRSKPLQRQTLRLLIQHCPNPYHIRQLGPQGIRELFHSHNLRCGPKRANHIYQLALNSLLPPEPLAESLASFLQTQFRLYLEVEQAIALTEQTLAQIIPSSPAKHLLTMPGISTVLAARYLALVGFPLRFETPQQAWALAGMDQEVYITGDKVYLGPITRRGNPYHRDTLFKMGFQVALHCPAIGLTYVNALKRGKGEVGATIHTANRVHRIAFALLRKQEDFRPPPISPAKARYVKEQMRRRKAHRSQKVKARQG

SEQ ID NO: 126910 - protein, 346 aa, unidentified
MNPLYVGIDVSSKTNVVYLIKPDGSKISNFSVDNSLDGSKKLVKIILSALENHSLDKVIIGLEATSIYGDNLVYFLREDCSLSKHLTKIHILNPKQVKKFKDAYNDLPKNDFVDSFVIADCLRFGRINKEVYLSDYRYAALKTLTRARFYAVQNLVKEKQRLINIIFKKYSSLTQDKVFSDIFGTNTLAVYTEFDSVDTLVNMDLHELTKFIQKKGKNRFSDPDSVAKAIQKATRSSYRLPKTVNDSVNQVLSISINSIKSIEAQIKALEKAIAEQMDLIPNTLTSVNSIGPVYSVEIITEIGDINRFDNQAASAKYAGLVWKQHQSGGFESENTHLIHSGNRILK

SEQ ID NO: 126911 - protein, 407 aa, unidentified
MEVLYPRCAGLDVHARNVTACVRIASGPDVTYQHRTVPTTTRGLLELADWLAAAQCTHIAMEATGVYWKPVWHILDGQFTLVLANALHIRHVPGRKSDMTDAAWIADLLAHGLIRSSFVPPAEIQELRDLTRTRKQLVGEIARHTLRMQKTLEDANLKLTHVVSDILGTSGRAILKALMAGETDPDRLADLTRGRLKATHAQLVEALHGRITAHHRFLLDLHMTQIEALEAAVDKLERHVGTALAPFRAAVSLLTTMPGLSDTAARVLIAEIGDDMTRFPTPGHLVSWAGLCPRLDVSAGKRHSTRIRHATPWLKTTLIQAAWAATRKKDSYLRAQFLRLKSRRGPKKAIVAVAASMLTAAYVMLRDGLEYRDLGGGHFTERDKQETTKRLLRRLRDLGVEVEVKAA

SEQ ID NO: 126912 - protein, 432 aa, unidentified
MVRFLYLYHSRDEEQEVTKESNRNSKKGVLYMKYVLAIDIAKNKSMVSLINSCGEVLIEPYDVNHSWNDFQNLKERIEKFNIYHGDLKIFMESTARYHMPVKRFFKEETLFEVQVINPLYSAMHKRNLRKTKTDKQDCFNLADLFFSGKVKNYLDHEQYYLNLNTMARDYASLLEKTTNIKNEFRNLVNLCFPEYESLFKGHLIFSDTSLAFIEKYSHPDIIISTRVDALANFMAKFNKRHENYYLKKAKLIKDKAVTSYPAVSKDDEVVSSLIRTTKLLKFHSLEVEDIKEKLIEKAKRCYLFENINSIVGFGELTTALVIAELKDINRFNNIKQLTAYCGLDPSVKQSGSSVNGKGHISKTGNKFIRKILFNAVCNIIMQASRNNPENDILVYYRKKRNEGKHHYVAVISCTTKLLRRILAECKKVQTNM

SEQ ID NO: 126913 - protein, 356 aa, unidentified
MKTTTLPKSYDGEHVYVGIDVHKKTYVVVARVQQTIVKRWTTAAKPEAFATQLLRYFKGGIIHSAYEAGFSGFVLHRVLEQAGIKSRVVHAAAIEVAVHQRVKTDKRDAAKIAEQLEANRLDAIHVPSEAQEQNRLLSRTRQQLVQERAAVKQKIRMKAHQFGLIAPDERREMSPRLVKELLAIAPSNAFTIVVEAHWQIWQALNTQISSLESQLQQQAKDDVNEWLYQSVPGVGRISARVLSNELGDMSRFSNERQLFSYTGLTPSEASSGETVHRGHITKQGNRHLRGLLIEIAWRAIRKDPALYRFFERLHPRIGRKRAIIAVARKLIGKMRAALKYGQPYRLDYPAEATANA

SEQ ID NO: 126914 - protein, 495 aa, unidentified
METISIRRVYLSAHPGRRDTAEGEPVSQIKIKQKRKKKEAKVLQLPVIREDAAGIDIGATLIHVAVGPGRDEEPVRTFETFTRDLKAIAVWLRTAGVKTVAMESTGVYWIPLYELLESEGFKVLLVNAHHVKHVPGRKTDVSDAQWLQYLHSVGLLQGSFRPTEDICAIRSLGRHRESLVQTSSQCIQMMQKALTQMNLQLHNVISDITGASGMRILQAILDGERDTEHLESLCDKGIKAKPEVIMGSLEGNYRSELLFILGQNLKRYKDLQSLIGDCEKEVGRLIDAAPAKVNLADKPLPPATKRGSKRSASAPPCLPDLREKQYRMLGVDLTQVPGINTQTVQDFIGEVGPDLSRFRSASAFSSWITVCPHNKISGGKKLHSKTRKSKSRAAKAFRLAAQSLAHSDEALGEFYRRMRGKFGPPKAITATAHKLARIVFHMVTTAEPYDASVFTRAQEKHRLHQENRLRANARKLGFQLIPIQLPSDNQGVVVP

SEQ ID NO: 126915 - protein, 406 aa, unidentified
MEGPIITVDVSKGSCHYQPFIENGHPMRKPKQLSATIDGFQKLGQTIKDLEAKTEREDIPVIFEATGVYHRPLQKYLEDHKIRYYIISPLLSATYRKTDLHSNKTDALDCAHIAKAYYCEKELRQYQAQPQEYKRLYQLSRIYESELVHLRKRKVSLRSMLDIIYPRIDKTFKGNQNLYDPIPMEILKRYPHPSLLLSHREDTIVKTVGHRTGHLKGYTERIVHKIYEKAKECYSGCEINDIEVLKLPSLIENVQEQKKKCDSLLKEMIEIARTCPYFASVVSIVGIGENLAARIISELGDVSRFDNRAAIVAYAGLNPKIQQSGDIDGLHLKISKKGNKHLRCLLYLGAQCNYRLRKEDPLYEFTKKKRQQTQCPLSSKAAYTASAHKLLVIIYSLCKNGTRYHS

SEQ ID NO: 126916 - protein, 362 aa, unidentified
MKKSTAKNEKVYIGFDISQKKIAVYAVCGDATSKTEVTIANDRNEISRFLSQFDDPRKVCVVMETGTHSLWMSRFIESLGFEVVVAHARALRLIYAADKKNDALDARHLAELAQLNRNLLHPVKPIDEERQRDLVAVKARDLLIRQRTGIINTIRGHLRALGLSDKALTVDNIASGATDLPDAVKPLLSPLFQQLHYLALGIREYDRQIRQLCKKYPETKLLRQVTGVGEITALTFALLVGNPQHYSSGKRVSSLFGLVPRQDQSGEVDKQLGITKSGNPLMRKLLIQAANYILGNFGSDCDLKTFGQRIAARGGKIAQRKSKVAVARKLVTVLYALWKNPEIPYDPHFKATRKNYNRIQSA

SEQ ID NO: 126917 - protein, 342 aa, unidentified
MQNDTRIAVDLAKAVFEIAVSDRPGRVGRRERLPRAQFLNFFAQRPAATVVMEACGSAHYWGRRIEGLGHRVVLLPPYHVRPYVRRNKTDRTDAKGILEASRNEDIHPVPVKTVSQQVLTSLHRLRSGWMSERTARINCLRGLLRELGVFIPTGARQVVPAVWALVEDADADVPDTLRPFLAELCQEIREIEARVDRVERQLQAMSQQLPVVAQLLTIPGVGLLTATALLAFIGDIRRFPSARHLASYLGLTPREYSSGLRRRLGGISKRGDGYLRTLLIHGARSVLLRARTHQPDRLREWAHQIAKTHVHNKAAVAVANKMARVVWAVWTHAKPYQSQLTA

SEQ ID NO: 126918 - protein, 338 aa, unidentified
MGMVGGLDLHRRQITYDWVDGETGDCQRGMIRPVTRESFREWLGRFRDADAAFAVEATTGWRFVVEELERAGCSAHLAEPAETRALRGRKRRAKTDRADARHLRDLLVHQILPESWIPTPFIADLRTKVRLRKTMIDQRSGWAKRIKAQFFHHGWPTPPSALTIAGREYMAQADLPPTARQVVDAGLAMIAALDTQIELVDADIRALARVQKGCVVLQTQWGVGPIVSAAMLGELGDVTRMRSSSQAVRFAGLDVTIHDSDGKGPPGHLSRQGPSVLRWAVGEAATGAWRPGSPDHDYYQATKARLGTSRARVSVARKILRRSYHLLANLGEVAIEPV

SEQ ID NO: 126919 - protein, 348 aa, unidentified
MNQFIGLDGHKNSCTFVVINEKGKVKRKAVLPTDEKQLVEFVKSVPGRRHLCIEEGTQSQWFYEIFSDHVHDLAIVQGRKSPGNKDDERDARNLAERFRTRDLGHRVQKVPDSLATLKDLVRSYEMLNTDLVRVKNRIKHLYRSRGIAYSKTGCPFCTGRGGCQKPGFHQRLQLLRTQQESLKPLKAEAQKAMVTEANRHPMTRILQTAPGFGPVRTAELLSIVIDPYRFRTSRQFWCYCGLAIVGRSSANWVQKPNGELSRVKINHTRGLNQNFNHMAKAIFKGAAVTVLTSMPTEPLRADYDRLLANGTKPNLARLTLARKIAALVLAMWKNKEAYDPGKYRVTSI

SEQ ID NO: 126920 - protein, 396 aa, unidentified
MSARSTSDFIVSYDEPVLVVEWPTDSMQLPAGLHSESVDRKALGPFRRPLTSTGHRTPLLQRSSNGCLGPRARIQESEFVVIGDSTMGVYVGIDVSKQHLDWVLGAEGNVERNSNSSAGIRWLVTKLKKVEVTSIVVESTGGYERALTEALSAADLPVILVNPWRVRRFGEGLGVLAKTDPLDARDLALFGERARPPQRPLPGPRQREMTDLVRRRRQLIAMIVAEKNRLDTAPRIIRRDILSLVQLLERRVAKLDLRIDQAIAGDAERAENWKRLQTVPSVGPGVARALIVDLPELGALGRRQITSLVGLAPFAKDSGKKSGYRRIRAGRAAPRTALYLAAMNGARFNPVLKAMYERMIAAGKPPKVALIALARKLLTILNAMVRDRTDWQETAT

SEQ ID NO: 126921 - protein, 428 aa, unidentified
MIPAVIERCAGIDVHKKFVMVCVLIGPADSNPTPQIRRFSTFNAELERLRKWLLELQCNRVAMESTGPYWKPVFNVLEEAGIEMVLANPQQVKNLRGHKTDPKDAHWLAHLFRHGMIRPSYIPPKPIRELRDLTRRRKQLVRNGAMERNRVQKLLEEANVKLGSVLSDVFGASGQDMVEALVKGEATAEQIAQLAQRKARKKIPEIQKSIEGHRLNQTHRDLMQQCMTHLAFLEEQIEEIDQQIQNKIRSYGLSEAYELLQTVPGMQAEAAATVLAEVGADVQAFPSAAKLSSWAGVCPGNNESAGKRKSSHTTKGNPYLREVLLECAWASSRKKNSQMQHRYRRLLGRRGKKRAAVAVAHALVQAVYYVLSTRKPFVDTAEPRRSPGQVRRLVRHHTRRLRKLDCWTRRTKSENKGNSMAQNQQTSG

SEQ ID NO: 126922 - protein, 420 aa, unidentified
MKKIKTKNFGGVNGRMLIVTVDMGKERHFGYWRCPDGTDVKPFAFWNNGRGFEEFWERVSWAKQFHKLEDIVFGYESTGSYAEPLVHFMRARGIHMVQVNPMHTKRLKDLQGNSPNKTDQKDPKVIADIMALGHALTVVIPEGPAAELRRLTQARERSNERYVALVNQLQSLVAIIFPEFMQVMTNVKIFTARYLLARCPSPGDIVEYGLDNLIRTMRKVSNGKLKEERAKALYEAAKVSVGVIEGQTSIIREIRELLVAMDAAESFTESLEKDMAHYLKQIPYSGSILSIKGIKEVTAAGLIGEVGDFRKFSTLSEILKLAGLDLYEISSGQHKGKRRISKRGRPLLRKLLYFVAINAVRRGGIMHHLYQRYLNRGMPKTKALIAIARKLLCIIFAVVRDQSVYKKDFSRVTSPIKEAA

SEQ ID NO: 126923 - protein, 318 aa, unidentified
MKIQQATNFVGVDVASAHLDVAIQGQTRVQRFDNTAKGIAQLLRALPCGCAIGLESTGRYHQALAQAAHAAGLSVYVLNPLDARRYAQSVGQRGKTDRIDALMLARYVCREHEQLRQWQPPTQTQEEVRELIGHRATLVRQRSALTQAGSHSKMLKSLDAPVLQALKQAIERVDAKLAAAIKMDTPSQQAFEHITSVPGLGLVCGSLLVMLFGRMQERSSDAVVAFTGLDPRPNDSGKKMGQRRLSKRGWPEIRRLLFAAAMSAARTKTWSGLYEAQRKKGLSTTAALIVLARKLLRVAFALFKQKSCFDGSRMAVNA

SEQ ID NO: 126924 - protein, 343 aa, unidentified
MEKNTMIGVDLAKNIFQLHIASMTGHLLSKKKLSRDRFRTFMQQHEPAVVVIEACGSAHYWAQTLGEMGHEVKLIAPQYVKPFVKRQKNDAADAEAIVVAAQRPEMRFVEPKTKEQRAKAILFRGRERLVHQRTDQINALRAILYEFGHVVPQGIVHVPKIVDIIDRTDSDLPDIVRDECRDLLSQISGNTERISLKTKMIQKLSAETDTARRLRTIPGVGPMTAMAIDAFAPSMEVFKNGRALAAWLGLVPRQFSSCGKERLGRVSKAGQADIRKLLIIGAMARMTRNGRKSIREGSWLSRMMASKPRMLVAIALANKMARMIWAILKSGTDYRDPVLGAAA

SEQ ID NO: 126925 - protein, 392 aa, unidentified
MFFVGIDIGKNNHVASMMDDTGKVVFKAFSFPNTSDGGNALFSKLASYSLKPSDFEIGMEATGHYWLSVYSFLFEKSFLLHVINPIQTDGWRRGTEIRRRKNDIIDSVLIADLIRYGQFVETKLADEDLFSLRTLTRFRTYLVESISDLKRKVVCVLDQVFPEYQSIFSDIFGKTSKEILLQFSSPIDFESVSSETLAQLLAQLSRQKVGAAKAEQLKAAASSSFGVTFAKDSFTFQLRALIEQISFIEKQVKETETEIAGIMEKLESPITTITGIGNVTGAAIISEIGDISKFDSPRKLVAFAGLDATVAQSGEFEAAHNVMSKRGSPYLRKAIFQTALIASFKDPVLSVYYQKKKAEGKYHLTCVGAVARKMCNIIYAVLKNNQPYVPKA

SEQ ID NO: 126926 - protein, 320 aa, unidentified
MMTQNNPVVVGIDVAKDKVDACIRTVTERKTCRTTAAGQRGLIVWLRKHQVGKAVMEASGGYERVWVRALRQADIEVRIVDPKRVRSFAESAGRLAKNDKIDAEMIAWFAETFSEAPSQVDDPAHEEMKALVKGRKSLIDVRARLEMQKEHELPALVRKAHARLLKKLAGEIATIETAVVAKIKTTPAFAKRAEIIQSVPGFAEATAITLLAGLPELGQVSNEVAAALVGVAPYDDDSGKRHGQRCIKGGRRWVRNALYMPCVGAATLNNPVFKVFYQRLIAKGKAPKVALVACMRKLLVILNTMIARAEKWDTKRYQML

SEQ ID NO: 126927 - protein, 353 aa, unidentified
MKFVGIDWGYRTAQWCALGPGGEIAGEGRIASDRDGLGRLVLELGDEVKACLEMMSGALWVRDELVACGWQVEVADARKVKTVAPLAAKTDKVDARLLAELCRRELVPALWLPSLDERALRERLRRRMHLVRLRTSAKGRIFGLQTQWGVRVSLRRLRRADGLTLLEQAGMPDVWRRSVSECLQLVDFLDARIEPLEAELKPFAHADQRAVLLDTIPGVAELLALTIAVEIGEISRFARPEKLVSYGRLAPRVHQSGQGLPRSGPLSKSGSRLLGWAAVEAAQQAWRESNPWHELYVDVARRSRHTNSAKAAVARKILIAAWHMLSRNEPFKPVPRRTTSTSVPASSRLALAA

SEQ ID NO: 126928 - protein, 323 aa, unidentified
MKTLKRASVSPTYVGIDIGKAQLDVAAPRLSLRVPNTAEGCIEMFAACRGVGKRLHFICEATGSQGRTLVSFLHAHRCKVSVLCPLHVRLFAKATGYLAKTDKIDAGMLAALGRTLHPKPTRKVGAPERRLREIMRRRQQLIFQQTIQKGQKHELFTKELRESAENVIRAIHAEVVLLDAAADAVINSSSRLLAKRDAMCEVKAVGVLTANRVLAECPEIGRLNRRQIAALAGVAPFNRDSGTVSGTRHIWGGRTHLRAALFMPAFVAARVNPVMSSYYQNLRARGKPSRVALVAVMRKLLIHLNHRARLGEIAFSGVKDKRG

SEQ ID NO: 126929 - protein, 365 aa, unidentified
MAEVTRDAVARVGVDLSKRVFQVHAVDRAGRVVMARPMSPERFFDWCVTLPAGVLVAMEACGGAHHVARRLRLVGLDARLIAGHFVTPYRMAGKGGKNDANDAAAICEAAGRPQMRFVPIKSAEQQGQLAVHRLREGYKEERTALINRIRGVLAEFGLVFPQSPEALRRVLGDVLEDASNELPGVARLVLQRAHLHWIDLDLQMKWCDERIEAHARSDERAIKAAALQGIGPIGASALVASVGDFKQFASAKQFGAWLGLVPSQNSTGGKARLGRITKRGDDYLRTLLIQGAKSAVMTAGKRSDRISQWLVKLKERVGWQKAVVALANKNARILWAVLTREGSFDPNHVPEAPAPQCALSQRPAF

SEQ ID NO: 126930 - protein, 309 aa, unidentified
MEQVYVGIDISKDNLDVAIHSSNEQWRFPNDSVGITSLCKKLRQFEPALVVFEATGGYEMPLYLGLDSAGLPATPINPRQIRQFAKSTGKLAKTDSLDARVIAHFGYAIRPTPHPVPQTQELKIAQSRRVQLLGMITAETNRLKSAPETIKARIGAHIAWLRQDLSETDKELRTMIENDPIWREKDSLLQSVPGVGPALSVTLISQLPELGTLNRRQIAALVGVAPLNCDSGTLHGKRVVWGGRANVRAVLYMATLVATRCNPVIRSFYLRLCTAGKKKKIALTACMRKLLTTLNSMLKYHVPWTYSAG

SEQ ID NO: 126931 - protein, 360 aa, unidentified
MLAAGRFGTDKAGYAQMLAAGRKFTGRIWAVEGCNGIGKHIAHRLVHDGETVVDVPPKLSAQMRVFATGNGRKADPVDAHSVAMVALRSPGLVQVEVDDDLVVMGMLADRRDELGRARTQTINRLHLELFPGGAKQFLSAQQARAMLATIRPRDLPGKTRRRLAAELISELEATEKKIKALKKELAALVAARGSTLMELHGIGPASAARLLADVGDIHRFAGRDKFASWNGTAPLDASSGNQERHRLSRAGNRRINRTLHIMVVVQLRNQTPGRAYYDTRKAGGMPSMMATRALKRRLSNVIYARMLADQERREEGPGGQPGTTTDFSVTDLTPDIGSSEKPRPGPAAQSTTRPRTAPLT

SEQ ID NO: 126932 - protein, 370 aa, unidentified
MAKRSMFVGMDVHKESIDISLADEGRHGDVRRYGVIAGDLDALAKVMRALRAPNRVLHFVYEAGPCGFGIHRYLTTQGEDCVVVNPSSMPKRSGDRIKTDRRDGEALARLHRAGELTPIYIPTADDEALRDLVRAREDAVGLSTQAKHRVKAFLLRQGRRYPGRAGWTRPYRRWLADLSFPRAPQHIALQEYRDTIDETERRVERLTDQLRQLAPAWRWAAVVEALQALRGVSFVTAVGLVAEVGDMRRFTHPREFMAYLGLVPSESSSGPRVRRGRITKAGNPHARRLLAEAAWAYQGMPRIGRQMLSRQEALPQSICDIAWKAQLRLTARFRRLVARGKAKPKVATAVARELTGFIWAIAREVPAPPA

SEQ ID NO: 126933 - protein, 355 aa, unidentified
MSQEKYIGMDVHQASISVAVMDVKGKLIMECVLETKAATILEFIRGLRGTLAVSFEEGTSAAWLHDLLSPHVGRLMVCDPRKNALLKDGNKNDRVDARKLAELLRTNQVKAVYHEKHGTRALKELGRSYLTLTKDMTRVMNRIKGVYRSWAIPCAGTKVYSPRHRGEWLAQLVEPGVRLRAEHLYQQLDSLEPLRLEARRQLLLESRKHAAVKLLRQIPSIGPIRAALLVALLQTPNRFRTKRQLWAYSGFAVEVHDSGEYRVVRGKLQRNRERITVRGLNDNHNKDVKYLFKSAAISASTRPGPLHDFYLARVESGMRPTMARLTLARKIAAITLTMWKKGVSFDPKQLKPQAA

SEQ ID NO: 126934 - protein, 344 aa, unidentified
MYHYAGIDVSLEYSSVCVVDGTGKILRERKVASEPEALIAWFRSQGLVLERIGLEAGPLSQWLYAALREAGFAVELLETRHVRDAFKAMPVKSDRNDARGIAQLMRLGWFRPVHCKSIEAQETRAVLTARKLLQSKLRDIENSLRGVLRGFGLKVGKTTECTFAERIRELVAGHPGLELVARALLEAHAVLRREFNGLDKHTQKFARAHPQARLLMTTPSIGPIVALTYASAIDDPKRFRSSKATGAHFGLTPKKHQSGQTDYTGRISKIGDASVREALYQAAHVMLTKPVKNCSALKGWAMRIARRAGMRKAKVALARKLAVILHRMLADAKPFNPMAKAAAT

SEQ ID NO: 126935 - protein, 330 aa, unidentified
MNCHRRLKCDFDHGCQIAFEAIPLPKSIGWYKLIEIVKKSCGLDIHKRFFIATILSTSSEKQQQRFNRDDDGILALKNWVISEKCDVVACESTSDFWVPIYDSLIKHLPVIIGNARDMKAFTHKKTDKIDSEVIAQLALNNMIQPSRVFPKYHREFRSYVRLRHKLVQKRTDIKNEAHAILALEMFNLNDVLTDIFGKNGRAILSGISSGKNVDEIIESLSPNVRKKSAQIKEILDREISQGAALRLQICLKLIKHLDDEIEALENEIFNYAYGKHKREMEILMSVPGIGELGAATLIAEIDNFKDFSSGDKLASWLGVVPNVYQSADKF

SEQ ID NO: 126936 - protein, 338 aa, unidentified
MGAYAGIDLHSSNNYIGIMDQDYKRLFGRRQPNDLNNVLKVLEPFKADLEGVIVESTYNWYWLVDGLQEHGYTVHLANPSAIKQYEGIKHTDDRWDSFWLAHMKHLNILPEGYIYPKEQRAVRDLLRRRLFFVKQRTANILSLQSTITRNLGIKISANNIKKLNMDDANELFDSSNLVFMAQNNISAIKHLGKIIKGIEKEIKPQVQLRKEFLMLLTIPGIGIILGLTIMLEVGDIGRFSKVGNYSSYCRCVSSKRLSNGKKKGENNKKNGNKYLAWAYVEAAHFATRYIPKAQKFYQQKMAKANGAVATKALANKLARASYFIMRDQVPFDEDMLFK

SEQ ID NO: 126937 - protein, 418 aa, unidentified
MDEEDRRWFLGVDWGSAEHWARLTDGGGRQLGQKRFVHSGEGLAQLADWVLSLSGAEPHEIWAAIEVPHGPVVESLMERGLRVFAINPKQVDRFRDRFSPAGAKDDRRDTVVLSDSLRTDTKAFRELKPTPAQLIELREWSRMRDDLTTERSRLANQLREQLWRYYPQALDLAQGDLERDWFIELLTLVPTPAAAKRLRKEPLARLIKRHRLRRIDADGALKILRQTQISSAPGAVEAASAHVGLILPRLALINKQLRACERRLDQLTKAFAQEQAAGQPSEQRDVAILRSSPGIGRVVLGTLLAEAWEPLQRRDYHALRCFAGTAPVTKASGKSRIVRRRRAANTRLSNAVYHWARVASQHDPASRAKYAALRARGQSHPRALRSVADRLIGVLCVMLQNQTLFDPLRSRQRALSAS

SEQ ID NO: 126938 - protein, 412 aa, unidentified
MSRKVTDKIAAAERQGFWKGGLFMTFYVGVDIAKYEHVASILDSGSGELRLDSFRFDNDLKGFESLLSNLSKLKKEETVIGFESTAHYHQALFSYLNGKGYECILINPLIISRFRKLSLRDAKNDNIDSRVIAQFLLFEHDHLKNEEFVMNDLKELCLQRDSLIRSSTTLKIKMISYLDRVFPELESTIPEGTLHTMGLRAILKEYPTAEMIAKTRIDRLVNLAKKASRNRYKEAVVRKIREAAKTSAGFHSDALALKIRQSVVLLEQIEKQIDEVEGVLCSLPSVQNSPLHKIKGINSIEIAYILSAIISIERFSSAKKLIAYAGLDPRVRQSGTWEAKSTRMSKRGNVLLRYALIWTANNVRKHSPSMKEYYEKKRSQGKGHYNALGHCAAKLCRYVFYILNHPEEEFIS

SEQ ID NO: 126939 - protein, 360 aa, unidentified
MEHLAIDLGGRESQICVRSSDGTMVEEGRVATGSLLKLLAGRPPSRVVVETCAEAFAVADAALAVGHEVRVVPALLVKSLGVGARGVKNDRRDARVLSEVSCRIDLPSVHVPSQEARARKTMCGMREGLVGCRTKLVNAVRGWLRGRTTRLRTGGVETFAARVRAAVKEPPAYVERLLHSIEELAQQIAQADRELEELAKKDAVCQRLMTVPGVGPVTSVRFVATLDEVGRFASAHELESYLGLVPGERSSGERQRLTSITKAGSTKMRWALVQACWSARRWRPNDPMVQWSLEVERRRGKRIAVVALARKLVGILYAIWRDGSSYNPLRGAAPVTRAVPAFDLAQAFATRAQEVQPSRV

SEQ ID NO: 126940 - protein, 353 aa, unidentified
MAKPRTLPPCAFTVGIDPASESFVAALMTALNQDVRAIEEFDNTKAGFAAFEGWLEVQHVPTDDLLICIENTGVYSEALCYCLYERGFLLALAVPYNVYKASEDGPKNDRRDSQKIAQYALRYLDRLTAWAPRETLVECVKAILTTREQLVKQKTATQNTLRAMRRKPVETPSVLQALETIKASLAQQIEMLVEALKRLIGEQPRVAQMVDIVETAPGVGLLMSAHLLVLTNAFTEPLPYRALAAHLGICPNEYASGKSVWRPSKSRGYGPSMMRKLLYLASGSIVAHDERFGEYYGRKCAEGKSKLLVRNNVSNKLLRLVCAMIKNKQPYIDTYRSINPRLLKQPRKHLTKS

SEQ ID NO: 126941 - protein, 430 aa, unidentified
MKSNTQNTKIEAITETTLVLGIDVGSETHYARAFDYRGIEYSKKPFKFSNDEAGFVTFKAWILDIKEKHGKDKVVPGMEPTGHYWFNLGKFLQDNEMKPVLVNPHHVKKSKELDDNNPTKNDRKDPKVIAGLVREGRYMIPYLPEGVYADLRTASNMRFQLQAELTRIQNRISRWFNIYFPEYKTVYGQPDAKSGMLILKVAPLPEDILTLGIDGVNQIWRDAKVRAVGKARAKTLIEAAEHSVGSKEGEISARMEIRMLLEDYESRNTRLQEVVALIEELVKKIPMAEKLLEIKGVGIKTVSGFLAEVGDISRFNNPKELQKLAGLALVENSSGKHKGETTISRRGRKRLRYLLFEVAMSLVSKNPEFRELHSYYTTRKLNPLKKMQSLMAVAAKLLRVFFAMLTKGVDYDPQKLVSDIKRPAVYLQVA

SEQ ID NO: 126942 - protein, 414 aa, unidentified
MSDPLVVGVDPHRKTNTVCIMDRHGDEVCDRFTVQNNRPGTESFVHEVALRVLEGDFDAIHIASEATSWYWWHFFQTLDQDPLLNQWPVTLYPFNPRLTANYKKTFVDLDHDDPIDAFVVAERLRMGRDLPAPFHYEDRYFPVRMLTRYRYHLVHQLAREKSYCLAILYFKYSEYSRKDKKPFSNLFGATSRAVIQEFASIEEIAALPFEELVEFIDRKGKRRFSDPTDNARKLQRVVHDSYLLPQAMHQPINLILSLSLRHITMLEGLEKRLQTAIAEGMQPIHHSLDTIPGFGPVFSGGIVTEIGGVERFDFNQAKVAKYAGLKWRKTKSADFQAEETRLTRTGNRYLRYYLCEAANRVRQCAPEYAAYYDRKFNEVRKHQHKRAVVLTARKLVRLVVRLLTTNEPYRPRRC

SEQ ID NO: 126943 - protein, 341 aa, unidentified
MPIVTVGIDLAKNVFAVHGVDEAGKAVLIKPRVSRDQLGALIAQLPPCVIGMEACSGAHYWARVFQRCGHTAKLMAPKLVAQYRMSGKRGKNDAADAAAICEAVTRPSMRFVPLKDEHQQATLCLHRTRQGFVEERAATYNRLRGLLSEFGVVLPQCPERLRLDIATHLDLLPGWARRCISDLLEHVGNIEDRLGEYDRAIAEIAREDERSKRLMQLRGIGPTTASALLASIGAGHDFRNGRQVAAWLGLTPGQHSSGGKARLGSITKAGDAYLRSLLVLGARAVMANLGDKQDRFSRWVRNLMERRGYWRAAIAIAAKNARMAWAVLKYGDDFRNEPVAA

SEQ ID NO: 126944 - protein, 424 aa, unidentified
MKVTFQTCCGVDVHKAFLVATIIKTTGGIEPSYQKRRFSTFNNSILEFKRWLLENECLDVCMESTGKYWIPVFNLLEDEINVTIANPKWVKAVKGNKDDTKDSKWIGDLFRLGLVRGSYIPCKKIRILREFTRYRYKLVSCRSSEKNRYQNALTVCNVALDSVVSDVFGKSSTSIIDYLLEQSGTSIDHEMIASKLLKRLKAKEDAVIESIEGYQMTDSQKYRMHLVRAHMDYITAAINDVDSEIESLISSDPDYQNAAELLYTIPGVKHDSAITIISEIGIDMSQFCTSKRLCCWAGLTPGSNESAGKKKSVRITRAGVYLKPALVQCAHAAVKSNKSPYYKKKYESLVKRRGKKRAIIAIARMILTAIYQMLSTGEQWNPCDLYKIDMPVALVEKQKAKAIKQAKKLLQREGLLPPDESLAS

SEQ ID NO: 126945 - protein, 344 aa, unidentified
MIYIGLDVHKRFSRMGCFDPATGDAHDLGSVSNEASALEEALERLPSPRTVVLEAGRSSYHMAGLLESIAEEVWVVDPGEVRRLQHTISKTDRRDAAALAWWAAKGVLKPQWRPDAELLDLRELTRGKTALTRMSTRVRTMIRMLLARHGHSCPHRDLMSERGQLWLEEVELEGHAGQMLAGLREILTVVQRKVDDFERTVEQTSREHPVARRLRTIPGIGPFLSLALAVEIGDINRFPGPTQLRGYSGLVPAVYQSGDKDARGPLTKAGNRWLRYAAVLAAQRIGQMREPDPRLKRIFLSVAFRHGRNPAKIAVARRLLDLIYYMLKKGQDYRVSKPRVATTA

SEQ ID NO: 126946 - protein, 462 aa, unidentified
MKRKAKSQATHSGLAVVNPNAAAIDIGATIHVAAVGADRASDPVRSFGTFTADLHRLADWFAECGVKTIVMESTSVYWIPIFELLDERGFEVILVNARDAKHVPGRKTDVSDAQWLQRLHSYGLLRASFRPKGEIVELRAYLRQRERLLDTAASHIQHMQKAMTEMNLQLHHVVSDITGATGMRIIRAIIAGERDPAVLASMRDTRCHSSAEVIEKALTGHYRGEHLFVLEQALALYDVYQQKVAACDIRIESVLKELSSIRGRKEDARADGSGSPRRRSRQSNGPDFDVGKALHSLLGKDLTRIHGMGPYLALKLVSECGDDLSAWPSAKHFTSWLCLAPSNKISGGKVLSSRTRRSGSRAASLLRLAAVTIGRTDTALGAFYRRLSARAGKSKAVTATARKIATLFYNALRHGMDYVDPGASYYETRYRERVVKNLHRRAKAFGFILQAAEMPAAEQAVS

SEQ ID NO: 126947 - protein, 374 aa, unidentified
MCRHRCRQKICLVCILIGGPGEKVQTDVRKCGTTTTELESLKGWLIKSGCTQVVMESTGSYWKPVLNVLEAEIAIVLANARHVKNVPGRKSDVIDCQWLAQLLRYGLIRGSFIPPRDIRNLRDLTRRRRQLIGATTSEKNRIQKVLEDANLKLGSVLSDVFGASGRAMLWALIHGNADAEKVAGLARCSLRKKMPAIRQALVGALLTDHHCFVIRQALDHIDYLHAQMAQLDERIAELLKPYQVQFELLQTMPGIRKDAATAILAEIGPDMGQFATAAHLASWAGLCPANNESAGKRGKHRAGKSRKGNQWLGATLNQCAWAASVKKGCNFGDRFRRIAARRGKKRAIVAIAHAQLGSSITCFRLGSHTKKDPC

SEQ ID NO: 126948 - protein, 315 aa, unidentified
MKSGTESKMSLPVVVIGVDIGKEVFHLVGFAADGKITLRRRIRRLGLKDAFEKLPPCIVAMEACLSAHFVSRTLRALGHEPRIVPAIYVKPFVKGQKNDCNDAEAIAEAGLRPNLRFVQEKSQDQLDLQACHRVRSRLVSRRTATINQIRAFLIEQGIAVRAGPRALRKSLFPILENRKDEISPRMAKLIRGLYDDWCCLDERIETITGEIEILSRSEAKCRQLMSVPGVGPLISTAMVAAIGSGEAFEPGRDFAAWLGLVPRQYSTGGRSILGRISKRGSKYLPSADLDDELPPHCAHPRRRRGLGSLRGSLRL

SEQ ID NO: 126949 - protein, 387 aa, unidentified
MTKIIRIGMDTSKSVFVLHGVDEAERPVLRKTLRRRQVLEFFAKLEPTKVGMEACGGAHYWARELRALGHEVVLLPPQYVKPYVKRNKNDAADAEAICEAMSRPTMRFVPIKTAEQQAALMLAGMRDQLVRRRTQLSNAIRGYAAEFGLTASKGLSKIEPLLVRIAADPTLPELAKELFASYRREYGEVEEQLAKIEKQLMAWHKGNELSRRLAEIPSIGPIGASLSVMKVPDPGAFRSGRDYAAWLGLTPKDHSTAGKTRLGVITRAGDEALRSTLVAGATAVINQVRHGRGDHSPWLVQLVKRKPPKLAAVALANKTARIAWKLMVSGEHYNRDRDFGASEVAAVDREGRCAALRKGSAPRPSLRSRTTPPQAAAIDQGHEFGAR

SEQ ID NO: 126950 - protein, 349 aa, unidentified
MSQNLNSAVAVIGIDIGKNSFHVVGLDDRGAIVLRQKWSRGQIEARLANMPPCLIGMEACVGAHHLSRKLKTFGHDARLMPAKYVRPYSKGQKNDFRDAEAIAEAVQRPTMKFVATKTAEQLDLQALHRVRERLVSQRTGIINQIRAFLLERGVAVRQGLRFLRAELPRILATPPEVLSPRMVWVISDLAEDWRRLDERIDQLSNEIAVLARQDAGCERLMSVPGIGPIISSAMVAAIGTGDAFAKGRDFAAWLGLVPKQMSTGDRTILGKISKRGNRYLRVLFVQAAWVVLIKPMSWERHGLKHWIEVARKRLHRNVLAIALANKLARIAWGVLAGSRAFEASKLQAA

SEQ ID NO: 126951 - protein, 449 aa, unidentified
MKSKMELEVINPRCAGIDVGSRSHFVAIGQNLSDVKEFGVYADDLTAICLWLKESGITSVAMESTGPYWQNLYVELSKYGFELVLTNGKFTKQVQGKKTDVKDCQWIQKLHTLGLLTSSFLPDEITEQLRTYCRQRTNWLNLAAEASSKMQKYLKLLNLRLDVVVKDICGLTGLAIIADICNGNLDPEKLAEHRHYSCKKSKEEIAKALIGNNRQDYLFGLKQEYESYLFFQSKIADCDKEIEAFMKTEIMIDPVKKKLKTTDKKYKKANKNAPDFDLNQLAFQYFGGIDLMAIEGVSYATILTLISEIGPDGFKKFPTAKHFASWLRLAPNNKISGGRVLSHRTPKGSNRLKIGLRQAANAIGNLRGTDLSDFFRRIAFRKGRPAAISATARKLAIIIWNMQIKNVPYLPTKEYLFLDQKRQMKLVTRIRKQIAKFDLKPEQLGFATG

SEQ ID NO: 126952 - protein, 359 aa, unidentified
MTEITRGLIARVGVDLAKRVIQVHAVDAAGRVVAAKALPRDGFMPWCAQLPPGTLIAMEGCSGAHHWTRKLRALGLDARMMAPHFVTPYRMQGKGGKNDANDAAAVCEAASRPSMRFVPLKTPAQQAILAIHRLREGYKEERNACINRIRGLLTEFGLVFAQRPEVLRRDLSDVLEDATNELPALLRMALRQAHLHWLELECHMAWCDERIEAHVRTDEQAKTAAQLCGVGPVTASALVAMVGDFKQFRSGNQFGAWLGLVPRQNSSGGKPSLGQITKRGDGYLRTLLIQGAKAAMVHAKKRSDRISLWMVSLIDRIGWQKAVVAMANKNARILWAVLTKGTAYDPNHVSINPGLPATP

SEQ ID NO: 126953 - protein, 362 aa, unidentified
MPKMIWLGMDVHAASITVARYEDQAATAMVQTIANDPAQVRRLVRRLPAGSDVRACYEAGSCGYGLHRQLTALGVHCDVIAPALIPRRPGERIKTDRRDAEKLGRFYRSGELTTITVPTPSQEAVRDLVRAREDVRRDRTAARQRLAKFLLRHGHRYPGSHWTKRHWEWVCGHTFDGPARTVFVHYCDHVLALNERLAHLEREIRTLAESAAYQPVVTRLSCLRGLATLSALVLIAELYDLRRFRTPRELMAYLGLVPSEHSSGARERRGRITKTGNALARRLLIEAAWAYRHPARQTRRVQQALTTQPPAVHAISDRALHRLTARYRRLLSRGKTPHHAVTAIARELCGFVWAIALVPDLA

SEQ ID NO: 126954 - protein, 355 aa, unidentified
MNSVRYVGLDVHRDTISAAVLSESGRMIQQSILATRAAAILDFIGGMRGTLHVTFEEGTHSAWLYDLLERRVARLVVCNPRMNALLKSGNKSDAIDARKLAELLRADLLSPVYHGEKSAMEVQHLARSYALLTEDTTRVMARIKAIFRGQAIACAGQKLYGHKHRDEYLAQLGACALRRRAELLYQELEAVQQLRRQAKREMIVECRKYPETKLLCSVPFLGPVRAAVLIGRVQTPHRFRTKRQFWAYCGLALEMRDSGEYRMVDGQVERRKKPAQIRGLNWNHSHELKNLFKAAATTASFSNGVFREFYLGLLKKNMQPEMARLTLARKIAAIALKIWKKGEAFDAEQVKLQAA

SEQ ID NO: 126955 - protein, 463 aa, unidentified
MNEVRLGIDVACRAPHQASLADETGRFLWQGWKFQTTTAELDVLWAKIPEDTTVVVVMEPTRNAWVPLAAWLTAKGAAVSVVPPEQSADLRDYYNKHTKTDRLDSKMLARMPMLHPEGMRVVDHLGPAEPLKRAVRHRSSIQKHRVASAMRLDSLLELMGPGWLDVFGTTPYGKAAVAVLERYANPHALRKLGRSRLAKLLIRSSRGSFREDKADELLTLATETLDLWADGGLDFDELADDIAIEIQQINLFDTQIAALEDRIEALYETADPAGIVISAPGLAVTLAAGILGRTGDFNRFHSLAGVRAFTGLVPKIDQSGIEDHNKGPTKHGDPGLRHALFLAAEHARKVDPTLAARYHRLYVEQGKHHNSAICTIAAVLATRIAACWRNGQLYEIRDTNGSVITAEEGRKICAERYTIDPATRAKRRNATTAKKLKRVGRDKKESQSAPVTDPPQQQHTKAA

SEQ ID NO: 126956 - protein, 325 aa, unidentified
MSQSESIEIYLGVDVSDQWIDVCALQTVDRRILFQKRLARTVEAVGELAREIERPALAVLEGTGGLEVAPARALESFGVGVRVVNPAQARHYALSNGKLEKSDRLDARILAEFGLERQFFPREKPDPKVEELALLTTRRRQLVQMRAVEKIRLPREESAFNRKSIAQLMTHLSRQIEKIEREILRRICADQKMKRRFELLKSAPGVGDRTAAELTALLPELGRMSRGEAAKMVGVAPLVKQSGKWKGRVMTMGGRAPVRTALYLAAMSTLRTSSYFRDRHDLLRKRGKSGKCALIALARQLLTVLNQMVREDKEYDPGLLIAVRG

SEQ ID NO: 126957 - protein, 356 aa, unidentified
MVQAHTTKGILSKRTMQTTKYFIGFDISADDFSASCIINPDNLVFPTQKFSNNIDGSNEFLSLLSKNKINQSEAIICMEATGVYSENLSYFLASKGFTICIEAPHKIKNKTKDSPRKNDFLDAEAIAEYACRYADKLSAWKPKNEILEQIQVLLSTREHLTSQMTANLNALKTLKYNYYQTPLANQIYQQTINKLKEHIKQIDQEIKNLIDKDDSFKNKISLAKSVPGVGLLLAANLLVLTRGFSEHIGYKHTAAYSGICPYEQTSGTSLHKPPRSKKCGPAKLRKLLYLAALSVRTHNHNFKKYFLRKVAEGKNKRLVLNNIENKLLKIIFAVIKSGVAYTENYKSINPGILKTA

SEQ ID NO: 126958 - protein, 338 aa, unidentified
METYAGIDLHSSNNFIGVINDKDKILYGKRHSNRLDDVLRALDPFQDSLQGVVVESTFNWYWLVDGLQEHGYAVHLANPSAIQQYEGLKHTDDQWDSFWLAHMYRLGILPEGYIYPKEHRAVRDLLRRRLLFVKHSTSHILSLQSMISRNLGLRMSAREIKKLKPEDVDDLFDCPNLGFMANNSLAAINFLKKIILDIEKKVESQVKMRKEFLMILTIPGIGNILGLTINLEVGDIGRFPAVGDYSSYCRCVESKRLSNGKKKGENNKKNGNRYLAWAYVEAAQFCRRYCVKAQSFYQSKAAKTKPVVAVKALSNKLSRASYYIMRDQVVFDEDKLFS

SEQ ID NO: 126959 - protein, 316 aa, unidentified
MQTFLNIGVDVAKDAVVVACAAQSFPAHSITNQRAPLLAWLKSLPAGSRIGLESTGGYHELLADLAHTQGHTVFLLNPLDTRHYARAMGNRAKTDRVDAELIARLIAQEHTRLRHYTPPTADQRKLDRMIRRRAKIVRIKSSLKLTMSNLSGFTTELKAVLCKLDALIAKIDSAMSAIAAHSSQHGEAQQRLQTIVGVGPVVGMALSNTLERVPFRNADAFVAFTGYDPRANDSGNKIGRRRLSKRGPAELRRLLFNAAMAAVKSKVWKPIYEHYRTQGWSTTAALVIIARKIARAAWSIHHYHSTFDPERITKNA

SEQ ID NO: 126960 - protein, 355 aa, unidentified
MNDAKYIGMDVHTATISAAIRDSGGNLVMEATLETKAETILEFVHGLRGSLHVSFEEGTCAGWLHDLLKPHVTEVLVCDSRKNALLRVGNKNDREDARKLSELLFLNKLHAVYHGETGIRTLKELARSYLTITRDLTRVMNRLKAIYRGWGIACAGQQVYAPRYRAEWLAKITEAGVRRRAEIYYQQFDALAALRQEVRRELLAESRKHPAMRWLRQIPSIGPIRATLLIALMQTPHRFRTKRQLWAYCGLALRTYESGEYRFVGGELKRSKKAVTIRGLNKNHNHDLKNIFKGAATRAAATAGPFQEFYEARLASGMKPPMARLTLARKIAAITLLVWKKGVCFDAEQLKQQAA

SEQ ID NO: 126961 - protein, 467 aa, unidentified
MVKQNVETNACAELASLPIQQRHAAGIDVGDATHWVCVDANGGDVAVREFPAHTPGLRDLVAWLQQCGVTTVALEATGAYGHVLFLTLLEAGFHVVTTAPTFTRQIKGRPKTDRRDCQWIQRLHRHGLLPSIFQPDEATQTLRDLVRQRANHVRLSGQHIQRMQKALELMNLKLTKVIGDVTGVTGLKIIRAIVAGERDPQVLAKLRDRRCKRAAAQIAEALDGRYRPEHVLELECCLAAWEHYLELIKKVDAAIAAQLRTIRRQTELPPLPPKPRVRGKKPHDPTFNVREALYYMLGVDLTAIEGIDELHALTLVSELGTDFSKWPTVKQFTSWLGLCPNWKKTGGKVKSSQTRKGKNRAARALRLGAWSLMRSKSYLGAYLRRQRSRLGAPKAITAAAHKLARIVYHLVRYGMAYVKETEAAYAEQTRQRLEKQLHRRAKELGYELKPIEKPVSPEVAEQPTRMA

SEQ ID NO: 126962 - protein, 364 aa, unidentified
MDVHTTNYTLCCYSMEDDRFFAEVQVEPDAKNILKYLARIEKQQSRDCRIVCGYEAGCLGYSLYHQLHAHGIDCVILAPTTMMTKPGKRIKTDRRDARLISKCLAFHTYSSVYIPTEVDNAVKEYIRMRDDANSALARVKQQIIAFCIRHGKIHDGKSYWTNKHLEWLSSLDLGNKILSEVLQEYLIRYYQLREQVDMYDMRINELAQAEPYRQKVEKLGCFRGIAAHTALSFCVEVGDFRRFATAQQFASYLGLVPGECSSGDKQQYTGITKAGNSHLRKLLVETAQVFGRSATKSGKSVALKERQAKCDSLTVAYADKANARLKKKYFKIAMRSKVNIAKTAVAREMACFIWGMMTDNISCA

SEQ ID NO: 126963 - protein, 421 aa, unidentified
MTQPYGNTGRDVLVAIDVAKKQNAVLIRLPDGARKKLTVINNLAGYRELSSYLKKLKRPCKIGFEATGNYHRTLAFYLHQQGFELELISSVAASRTREAMYNSWDKNDPKDAQVILHMLQTGLTQIYYDPLEHRINDIQELSQTYCQVSLRKTRVQHSIMTHYLPLYFPEAAKYYHTSRAAWFTSLLMTFPNPAAVLRYSREDFIKAAQAVSGRKVNKAAWLRDFYETARESISLPVPEDSEAIRMFRLVLQEHQDLCRMRRAIEERAELYLKDNADYLRLRTIPGIGAVIALIILAEAGDLRRFSHYKKFLKYRGLNLSTQQSGAFRGLSKLSKYGNSRLRYAFWIAGTSAIRMRENTFRKKYENYVKSDPQNPDLKRKAYTAVAAKIARVAYGLVKSGREYRCYHESSVPSGIILSTGR

SEQ ID NO: 126964 - protein, 387 aa, unidentified
MTVRTVNNLPAATHGETVRCLFAIELSKQSWVIGFNTPLSEKISRRTLSGCDWKGLLELIEDVRARVSREMGRAVAVMSCYEAGCDGFWLHRQLEAHGVRNYVIDPASLQVDRRARRVKTDRIDAERLLRSLMAYLRGEPKVWSVVRVPSVAEEDARRLHRERDRLVLERVQHVNRIKGLCALHGIYDYHPLRPQATARLEQLRTAQGGELPPRLKSEIKRELHRLELVVEMIATLEAERDAIVEDEASTHLNAEKIQNLHKLKAIGPEFAAVLVGEIFHRSFDNRRQLASYVGVTPSPFQSGSMAHEGGISKAGNRKGRTTGIELAWLWLRYQPDSDLSIWFRARVGIMKGRIRRIAIVALTRKLLVALWRYLETGLVPRGAVLKG

SEQ ID NO: 126965 - protein, 359 aa, unidentified
MLNNSTLFVGLDLGDKHAYVTILDQDGELIEESRLPTNKASFQRKFSTIQPCKIAMEVGTHSRWASHLLKDLGHDVLVANARKLRAIYHNPRKGDRADAETLARLARLDPELLSPIHHRSPQAQADLAILRSRDALVRSRTLLINHTRSIVKSTGARLPSCSADSFARKVASEIPEPLRPALTPILDIIASLTQQIQSYDQKNEELCSERYPETKLLREISGVGPLTSLAFILTLENPDRFRRSREVGPAIGLVPRRDQSGDQDPQLRITKTGDAYLRRLLVGSAQYILGPFGPDCDLRRWGLKLAERGGKNAKKRAVVGVARKLAVLLHHLWKTGEVYDPFYQSKNEATESVLFPAAA

SEQ ID NO: 126966 - protein, 363 aa, unidentified
MANPRPNVIGEVDTHKHTHYAAVIDDNGRLIDHAEFGANSAGYAALLNWMRALGTIGSIGVESSGSFGAALTRFLSRAGELVIEVNKPNRQARHKEGKSDRLDAEQIARAVLAGEGVATPKTKSGPIEVIRTLRVARASAIRARTQAFNNLFGTMIGAPSEVRDDLVGLTKRTFVNHCLALEPETETLLELIEEPERLVIASVRLTLRDLAQRWKALDGEAKDLGRQIEALVSHVAPELVEVFGVSTELAGQFLVTAGDNPERIRNEAAFARLCGVCPKPASSGLKNNRHRLNRGGDRGANSALWIVAVVRLRHHEATRQYVARRTAEGLSKREIIRCLKRYIVREVFAALPRSGSLATLEVA

SEQ ID NO: 126967 - protein, 452 aa, unidentified
MRLLNGKQGLRRSQFAQELRGANLEKVLIVPIDAAKVLQKSMILNYFGEVIESPFSFVVNQSGMNLLIEKIEEAKHSCQAERVFIGIEATGHYYEDIVRILTNKGYSVHIINPASTHEERKQHLTYTKTDDIDLYLIAEVLIGNKATNAKLTTGVYKQLQFLTRARRSEVNKRSRIKVEIRTLHDNIWREFQGYSVLENGKVKTKKIFSDFWGKASLHLLTYFPHASQVIELGELGLRRLSKEHNLKLRNTVIEKLLCAASESVSKPLSELSSELFLLNQKLKDYEWHTQNIEKYEKEIERIFINTDGLLLLTVPGIGLITAAEIYCEMGDLTNYTSASQLIKKAGTNPTIKQSGKSEGYYGRISKQGNANLRRVVYNAGRTLSVHNDALKPFYTRLKEKGKKAGKIYIAMGNKFLKIAFSMLKNHKPFECNEPNFNYKQEVFKKLTLPLSA

SEQ ID NO: 126968 - protein, 411 aa, unidentified
METLIRRCAGLDVHKASVVACVRVIDDNGELLSLTQTFGTTTGDLLKLNDWLMSYAVTLVGMESTGVYWKPVYTLLETEFECWLLNAQHLRNVPGRKTDVADAAWIAQLVAHGLVRPSFVPPKEIRELRELTRYRKAVIQERSREAQRLHKSLEGSGIKIANVASDILGVSGRAMLQALVAGTHDPDLLAELARGTLRKKLPALRKALVGWFSPTHRILVSELLAHLEYLDESIERLSDDIAQMIAPFAAAIDLLDTIPGVDRRTAEVLVAEIGLDMSRFPSPAHLASWAGLCPGNNESAGKRFSGKTRKGSKWLRTALVESAHAASRTKGTYLAAHYARIKGRRGYKRAIIAVAHSILVIAYNILQRQQPYQELGADYLLQRERKDAYQRRLVKQLERMGYDVSLTERAA

SEQ ID NO: 126969 - protein, 347 aa, unidentified
MNFYTTQHKHYCGVDLHARTMYVCIVSQQGVVLLHRNLPCDPQTFLLTIQPFREDLVVAVECIYSWYWLADLCAKEGITFVLGHALYMRIIHGAKAKNDRIDSHKTAVLLRGGLMPRAYVYPADMRATRDVMRRRLHFVRQRGSLLAHIQMTHHQYNLDSPGKRISYRSNRDGLGEGFEDASVRDSIAADLALIDHYEVVIGELELAVLRQARVHDPNAFRLLTTLPGIGRVLGLTILYEIHDISRFPSVQDFASYSRLVKCEKNSAGKSLGTSGAKIGNAHLKWAFSEAAVLFVAKCAQGKTLLTRLERKHGKAKALSILAHKLGRAVYFMLARNQAFDLERFTKS

SEQ ID NO: 126970 - protein, 343 aa, unidentified
MEVSTIGLDIAKSVFQVHGVDESGATVIRRQVRRRHLLGFFEKQAPCLVGMEACATSHYWARQIAALGHEVRLMPPHYVKPYVKRNKNDMADAEAICEAVTRPTMRFVAPKSEEQQSVLVLHRTRELLVKQRTMLANAIRAHVAEFGIVAPRGIPRVKELLAVIADPDDERLPPGARTCLEGLARQFGSLHVEIRAAEKRIHALHRSNETSQRLATIPGIGPIIATALAASITDPSVFKNGRELAAWVGLVPRQSSTGGKERLGRISKQGDQYLRWLLVAGAMSVIKSAKRRETTKRPWLDELIAKKPIKVAAVALANKMARTAWALLSHGGTYREPVVAAAS

SEQ ID NO: 126971 - protein, 391 aa, unidentified
MPEDAPRPAQAAIRTDLGAIFVSMELSRRAWLITSLSPGGGEKMSKHSVPASDVSGLLRRFAELRRKAAARTGRDFPIIVIQEAGLDGFWIHRVLQSEGIESHVVDAASILTSRRRRRAKTDRIDGETLVRTLMAFKRGEPRVCSMARAPTPQEEDRRRVCRERRTLVGERVTHVNRIKGLLFAQGVFGYEPLRKGRRERLEDLRTGDGRPLPVHLKAQIMRELDRLEVLLEQLKSVEAERDALLKPATEEAISPAAMLARLKGIGPETAAVLWSEGLFRQFDNRRQVAAYAGLAPTPWQSGSIDHEQGVSKAGNPRLRTTMVELAWLWLQNQPTSALSLWFHERVRRLGGRMRKTTIVALARKLLIALWRYTTAGVVIEGAVMKAASATI

SEQ ID NO: 126972 - protein, 440 aa, unidentified
MDEKDLIRVEKFRQLKREIRGSEAYLIVGIDVAKDKHHAFFGTATGKTVFRRLVFENNRNGFDKLLDQVKALRVQHGLSKVVFGLEATANYHKPLGEHLIRSGESVVLVSGGAVKKNRELMDGRWDKHDDKDAANVADLVSQGKCLFYEHPEGALRELRDLLSLKRRLKRLEQGHRVRIRNHLVAKYFPELDRYYEQSEKVSLAVVRWCLDPSVIAGLEYGKFMQLVAPGRERLYQGNRLPLIWKMAGDSIGCEAGPEVEFEAQVMVEGLKQIRESLRAVEERIEEACSQFAEYEFLLSLPGFGPDVSSKVLGAIGNPFRFQTGKQVLKLAGYDLSAERSGKTSEGATPVISKKGKGDLRYALYQAALIASVRSRPFMAYYALQLKGREREPGIKTKMRVKLAAKLLIIAWTLMKKKEPFDPRQVRGEFPSLAAGDGRES

SEQ ID NO: 126973 - protein, 344 aa, unidentified
MEQQFIGLDVSQAETAVCVVDASGVAVWQGKCASTPEAIGATLARRAPRVARIALETGPMSAWHWRTLSAMGLPVVCIDARHAKSALAMQVNKTDANDAFGLAQIVRTGWYREVQVKSESSHRTRGLLAARAKLVGMRKELANQLRGLLKVFGHVIGAAGRQTFDARVRALAAGDTALSTTAEALLAARANLAEQIARLDKLLLTQTRKEPACRRLMTVPGIGAITAAAFVATIDDPGRFRHSASVGAYLGLTPRRYQSGTMDVSGHISKTGDGLLRSYLFEAATTLLTRVQRWSALKAWGVRLTKRVGQKKARVALARKLSVVLHRMWADGTEFRWTAKDAAA

SEQ ID NO: 126974 - protein, 348 aa, unidentified
MKFLAIDAHSQHCELAILNENGKLIQCRSIPTSERGLIEAVRCVIGPKKLTIEEGSMTGWLSLLLRPYVDELIVADPKQNHWISKNEQKDDVGDAVRLAQLLRLGVLKPVYHSQDQRWVEFRSLMQHHQDLTQHMVRTKNQLKAHLRSVGIACAGKAIYQAADDEEQLADWLGKISSYPQLQFEVRQIVRLLAQQMDLLDETKDHIKEQSKQWPIIEAWQRQQPGVGLIVASTVAAMLITPARFSKKSKLCAYAGLSVFQQRSAGKILRSGATRGGNRDLKRALMLAANAIGRMKTGNHELASCYQSLKSRGLSSLTVQRAIARRLLFQMVGQWKRALVNQPKPQLTA

SEQ ID NO: 126975 - protein, 391 aa, unidentified
MSMYFIGIDISKYKHDCCIISAANQKVVSKVIIKNNKAGFNELLTIIHSLANPADIRIGFESTAHYALNLELFLENSLLTFMEVNPVLISEYKKSKTLRRTKTDSVDCESIARWLMTVEYKPHSKGFYHSYSLKSLTRLRDRLIRQRSFYLVKITNVLDHTFPEFKPFFNERLSKTAIYLLENYGSAEKMAHMNSASYDKLRCASRGKFSIQQFLRLKELAANTVGVNNSIFDIELNSLLTLYNSLCKEIKTLEAEITKLIEEVHPHYMSIPGIGPISAAVIYAEYGDISNFSNPGQMLAFAGIEPGINDSGTESHGGRMVKHGSSQLRYVLLNACLPLIRFDITFATYYAKKRAEGKKHRVAITHVAKKLIRVIYALERQDVDFNVKKLR

SEQ ID NO: 126976 - protein, 413 aa, unidentified
MEVVYRRCCGIDVHKRVIVACMNKNGKRELREFGATTGDIKELGNWLTEEKCEMISMESTGVYWKPLYKIFEMMGLEAIIVNAAHMKALPGRKTDVKDAEWIADLLRHGLLKASFIPDREQRELREIARYRKSLIEERARELNRLQKILEGANIKLDSVVRDINGKSSRKLLDKIVADETPSADEVSQMIHGRMRHKLDQIMLAIEGITTPLQRKLIAQIIDHIDDMTKRIADMDDMIKGYMEQYETAIAAIDELPGIARRSAEVIISEIGMDMTRFPSAAHLCSWAGVCPGNHQSAGKRQHGKTTKGNRALKTTLTQCAQAAKNCKDSYFSAQYQRIAARRGKNRATIAVAHSMLIAIYHVLKNGVAFKDLGSDYYDNFNRDHKIRGYLKRLAVLGWSPEIGCSTKVAVASA

SEQ ID NO: 126977 - protein, 370 aa, unidentified
MKDHSIFVGMDVHKNSIDIAIAEKGRQGQLRHFGTIESSLAALDKVVRKLVSNRKRPCFVYEAGPCGYQIYRHLTAKGFDCAVVAPSLVPRASGNRIKNDRRDSLMLARLHRAGELTAVCVPHDADEALRDLTRAREDAKIDEKKAKQRLLAFLLRSGHRYSGRASWSQAHRRWLADLKMPHRCQQIVLQEYIEALSHCSQRLQRLTDQIRQMVPQWRLFPVVQALQSLRGVSLIVSATTVAEIGDFKRFQNPQQLMSYLGLVPSEHSSGEKTRRGSITKAGNTHVRRMLVEAAWAYRFRARVSRALLQRHEDLPQAIRDMAWKAQVRLCARYRRLWARGKIKAVVTTAIARELCGFIWAIATAVEGPTA

SEQ ID NO: 126978 - protein, 333 aa, unidentified
MPLPPTLPAIPAPTSRYVGIDVSKATLDVAAVDAAGRPADPARRLPNTAAGIAEAVRQVRAGRPALVVLEATGAYHVALLQALAGAQVPVALANPAQVKAFRQVTLGRNKTDRLDARLLARFAASQDMALRRYAAPPAVQQDLRDLLGYREQLVKQRTALRNTREAHARAGVSASVADWTAADLARLDARVREVDVALARLLATRPQAQILRQAVTGAGPLVVAAVVAYLPGAVWGRAKAAAACAGLHPACANSGQTTRAQLSRAGSARLRRYLYLAALAARRWDTDLGAFVDRLTARGKAPKAALVALMHKLLRRRMGALRTATLPLPPAAA

SEQ ID NO: 126979 - protein, 417 aa, unidentified
MNLPPETIPIQRYIGIDIHQHYLMIGGQNRHQEWTLRPRKVQVSRFRDWAEKNFKPGDAVVIETTGSVWDIYDIVAPLVTRTQVAHARKVRQIAEARVKTDKEDIKRLITLLIADIVPKVWVPPMHVRELRSLISFRWRLTKQITMSKNRLHSVVQRFNLNAPEGGLLTDKNRTWWDRQEFSDLTGFEVERDLEIVKILESQKAAIDQKLAELSNTEPWASDMVYLMQIPGLGPIFSMVILSAIGDIKRFSHPKKLVGYAGLGAGVHDSGQKHQGKSITKEGRKELRWALVEAAWRAVGSDPYWEAQLKRLEKRMHRNKAIVAIARRLLVSIWHILTKRESYRHFDEETIAYKMLIWSWAMDEKSRGGMTPQQFAKYGLLRLGIGQDLERINRGGALRRIAPTEEILALKPELEPPR

SEQ ID NO: 126980 - protein, 336 aa, unidentified
MTLYCGIDLHSNNCFLSVINDKDKRLLEKRLDNDPVLIVQTLKRYRARLQAVAIESTYNWYWLADALQDAGFKVRLVNTAQIIQYQGLKQTDDRYDAFHLAHLMRLGILPTGYICPRDERGLRDLLRRRMFLVQDRSRHIISLKGQYQRQTGQTLSTNAIKGKRFVLPIVGDMNVQLAMTSNLNMVKVLTQQIRTLETVILRQVKRVPTFELLKSTSGIGDILAETILLETGDIRRFKRAGNYASYCRCVESKRISNDKKKGVGNRKNGNKYLAWAFIEAANFAKRHNPKARAFYERKKAETNNIIALKALAHKLSRACYHIMKNEVAFDSSKLFA

SEQ ID NO: 126981 - protein, 453 aa, unidentified
MGKQSGKARSLSLDCIEPNAAGIDVGATEIYVAVPPDRDGEPVRHFKTFTSDLREMASWLLQCGITTVAMESTGVYWIPPYEVLEEAGMRVCLVNSQHVRHVPGRKSDVSDCQWLQYLHSVGLLKPSFRPDAAICALRSLSRHRSSLVESAAVHIQHMQKALTQMNLQIHHVLSDITGISGMAIIDAIVAGQRDPGQLATLCHAKVHSDRQTVIKSLTGNYRTEHLFTLKQSLAAYRNYQLLLAECDQEIQRLTGTMAGKMESGGPAPQQNRRKRRKNQFHFDMSSELHRLFGVDLTAVPGINALTAHALLSEVGTDLNCFPSAATFANWLTLCPGTKKSGGRILSSKTRPTNSRLSHALRVAAQTLARSRSHLGNFYRSMRARLGAPKAITATAHKLARILYHLITTGSAYDETVFDREQQTQNLRLHKRLAKQAKLLGLQLVPINAGVSCS

SEQ ID NO: 126982 - protein, 407 aa, unidentified
MELMALYKRVIGLDIHQAQITACALIEEADGSSRIEQRQFGGFKRDRRELADWVASLRPDEVVMESTGIYWKSPYAALEAVGIRAKVVNARHVKNVPGRKTDVGDAHWLATLARAGLLRGSFVPPAKLRELRLIARQRQKLVGQLASEKNRLHKVLTDSGVRLGVVVSDLHGQSARAMVKAIIAGLAPHEVLKLASARLKAGREEIFDALQGDLSASHRFVLDELMRHIEEIEARIARFDARLLAELESERNTLALLQTIPGVDLIGAAMLLIEIGTDMDAFGSADRLASWIGICPGNNESAGKRKFGQLRKGNLYVRRLLCEFAHAASRTTSAFKSKFQSLVVRRGYKRAIMAIGHKILRTIFFMLKRREHYRDSTTDYEALSVQRNAPRWIKALTKFGFIKPACA

SEQ ID NO: 126983 - protein, 368 aa, unidentified
MQELITGFVGLDAHAESTAIAVAEAGRAAPRFVGSVGARVAELTKALSKLGAPQSLCVVYEAGPCGYGLARELTSLGYRCEVVAPSRIPRRPGERIKTDRRDALNLASLARAGELVPVTIPDERDEAIRDLSRARVDAVRARLKARQQLKALMLRHGQRYSGKTSWSAAHERYLARVSFAHPAQDIAFTEYRQAVGEGEARVQRLRESLTREVEHWRMHSLVSAVMTLRGLDLVAATTVVAELGDLRRFAHPRELMGYLGLVPSEHTTGSKRRLGAITKTGNGHVRRVLIEAAWNYRFPARISPALQMRQERQPPDIRAIAWRAQLRLNHRYRRLKARGLHHNKICVALARELAAFVWDIGRHVAPSP

SEQ ID NO: 126984 - protein, 456 aa, unidentified
MQQYYLGIDVSKGYADFVILDEKKQPVEENFQLDDTFDGHSYLYERICKFSNEHPESIINASVESTGGYENNWFNSLIKFQGSLNLRTARLNPLGVSANSKADLKRNITDKISAQNVAEYMIAHPEKVSYQEENPQAGLRKQWGFIQMLTKQKTQLLNQSESLLYTANPDLLTYCKDGVPGWVLKLLVLYPTAYKLSKAKVSSVAKIPYISSKRAQELVAHAKKSIASATDKITAQLIIATVKQILHLSEVIKSQTKIMAEECSLPGVDLLKTFTGIGDFSAIGLILEIQTVERFSSVKKLASFFGLHPIFKTSGDGSSGFRMSKKGRKKPRHILFMVALCAIQSNPLIRDIYLEHVKKGMNKMAAIGACMHKILRIIYGMLKHNKAFDPEIDRWNRDKTSQKKKSSFRDKNRRYQNFDSKAPISRRQKGKRKELGQSHSDNDTKNGIITPVPIQS

SEQ ID NO: 126985 - protein, 323 aa, unidentified
MSSPAIYAGVDVSKAHLDLAFTNSEERPRFPNTARGIEQLVSQIEEASPELVVLEATGGFEVPAAVALAAAGVPVVVANPRQVRDFARSTGQLAKTDALDSGILALFAERVRPAVRPLPDEATRALDALVGRRRQIIDMLTAEKNRLGFALPTVQKGIKKHIRWLERQLSDVDQDLDDQIRQSPVWQAKSDLLREVPGVGPNLARTLIAELPELGRLSHKEIAALVGVAPFPRDSGGMRGKRMVWGGRAPVRSALYLSIWSASKWNPVIRPFYERLRGKGKPPKVAQVACMRKLITILNAMVRDGRRWDPELPLQQLQAQHSC

SEQ ID NO: 126986 - protein, 317 aa, unidentified
MNTTPTFVGIDVAKDKLDVFIDSSGESFTVANSPDGIVSIRQRLAGLNVKLIVIEHSGRYERRCALDLMDSGLPVALINPRQSRDFARAIHWLAKNDRIDGRLLAEFGRRIEPRPSERIPENRAELDELVGRRRQLVQMRAGESARLQQAQFKSIRRSIEKVLRQLEQQIQDLERRISKLIENDQDWHSKGQLLQTVPGVGPVVASTLVAELPELGRINRQEIAALVGLAPFDRESGQWKGKRSCFGGRAEVRSTLYMAAITARRCNPIIQRLAQRLEAAGKAFKVVMVACMRKLLTILNTIAGTGQAWNPKLVTQS

SEQ ID NO: 126987 - protein, 387 aa, unidentified
MTPTCQSAPATAALDYDNTMFGALELSSKKWVFAVQLPGSAKHTRHVVEPNGPALDSLIDRLKARSAQAGKAIRRIIVTHEAGRDGFWLARFLQRRGVEVLVMQASSLPVDRRARRAKTDRIDAEMLLRTLLAWLRGEPRVCSMVPIPSEADEEARRAHRERADLTKERRSILSKIDGILATLGITGFRGARRDRRDQLANFRQPDGAPVPAAAQGRIERLLDRLDLVLAQIAKIEKARDAVLKKPKAESEPERMIRDLVELCGVGVESATLLAREVFCREFRNRQALGAYVGLTPTPFASGGLQREQGISKDGNRRARALLVELAWTWRRHQPDSALTRWFEARIAGAKGRLVKIAIVALARKLLIALWRFVKDGVVPEGVMMKAA

SEQ ID NO: 126988 - protein, 345 aa, unidentified
MHPSTIGVDVSKDFLDVHRLADGASRRFANDKTGRKALLKWLTAAPVKSVVFEPTGPYHRALERALDAAGVPIAKVNPRQARRFAEAAGKLVKTDRVDAAMLARMGEVLGLEPRPCVSQTIAELKELHLARAALIKDRTAAKNRAKAITLLLLEKQNKKRLVEIDVKIEEIDAAIEKLIFDDAHLARRFEILLSIPGVSKITAFALLIEMPELGSLEGKQAASLAGLAPVQRQSGSWKGHAYIRGGRAFLRQALYMPALVVCRFNKDSRALYQKLVEAENPPSSPSPPSCASSSSLPTPSCAITDHGPKTPLAHNGYSRRAVQVRQGCSGRSQTPSVSTPACATA

SEQ ID NO: 126989 - protein, 431 aa, unidentified
MVFISGPDLWLAKSDGSEPRPITKLKIGQALHPAFSPDSKKIRFSILDSQAHTSSIWEVKPDGADFHALFPGWHTPPHECCGIWTPDGKYYAGLEYDGPERIYEAETGRHRFATVLTTPKALHDLIVDRAPDRVVIEICSIAGWVSDLVRSLDIELQVANTADERWRWRNVKQKNDRRDALKAAQLSAVNQLCPVHVPEQTMRQWRALIAYRSKLVQRRTKIKNHIRDLLLREGQLLPRGRTAWTQVGMAALVEMAQPLAEVAGDELWRGELGVELAQLTELQQQILMVHAKLDQLAAADPRVALLRTIPGVGPRLAEAIVTMFDDVTRFATAGQVGSYIGMVPKSFDSGETERSGRITRHGNRLVRSLLVEIAWAALRHNAWARQTFQRISGGKKSRRKIAVVAVGRKLLVKCWGMLRHQTPWHWQTSVG

SEQ ID NO: 126990 - protein, 374 aa, unidentified
MSKLRFLGLDVHADTIVVAAAEPDGEVRPLGIIPNRLESIRKLVKKLGPVSNLRACYEAGPTGYVLYWQLTELGVNCKVVAPSLIPTKAGDRVKTDRRDAAKLARSHRSGDLTAVWVPDAAHEALRDLVRAREDAKQDQLRARHRLGKFLLRHGKRPDGSMKAWTGKYMEWLQRKVHFEIAALEATFLDYVHEVSHQAERISELEKAIDTAIAEAPSQMRAVIEALQALRGVAKITAVTIVAEVGSFSRFENPRSLMGYSGMVSSEFTTGNRVRRGRITKTGNAHLRRVIGEAAWAYQRRPWVGGLLRKRQQGLDQEVKDIAWKAQGRLHSRYTKLTARGKNKNQTVVAVGRELLGFIWAIATRTEAKYQRQAA

SEQ ID NO: 126991 - protein, 387 aa, unidentified
MQKPHDNSKASPAAFMQDNTLIAVIELSLSNWLVAGLIPGVSREPLKKLEPNPEDLLKLLHGWRDEAIKAGRPITRIAVAYETGRDSFWLARWLRERGIDAHVIHATSVAVSREHRRAKTDRLDTAMLKRGFLGWLRGERGHCTVAIVPTMEEEDAKRPHREREGLVHEQTRAVNRMKSALIQFGVRNFNPKLRKATVKLETVRTPEGKSLPPNTIAALRRDMERLKIIKEQIKAIEQARLQQFEQKPEALANRMVYLLVRIYGLGWETADLLAHELLSRTLRDRKAVARYAGLTGSPDESGSKRREKGLSRSGNARVRKIMIQLAWRMVKFQPDSALVQWFKQRTENAKGSRKPMIVALARKLIIALWRYANDGVIPEGFRLHSAA

SEQ ID NO: 126992 - protein, 368 aa, unidentified
MSNVFHVGLDVHKESIEVAFVDENGEARQYGKIKNNLSALEKVIRRLHSKGPRELKFVYEAGPCGYGIFRHLTGLGFECVVVAPSLIPKRSGCRIKNDRRDALNLCRLFRAGELTPVHVPTPEDEAMRDLVRARDDAKSAEKKAKQRLKAFLLRHDLRYSGRSHWSPAHMNWLADLKMEHPAQQIALQEYIDALKESMQRVARLTDQIRSLLPNWNKAPVVQALQALRGVRLVSAVVIVSEIGDFRRFNNAKEFMTYLGLVPSEFSTGDQIKRGGITKTGNRFARKALVESAWSYRMPAKVSKVLLKRQEGLPQAVLDISWKAQVRLCDRFRRFRAQGKPQQVTVTAIARELAGFMWSIAHEVTPETA

SEQ ID NO: 126993 - protein, 370 aa, unidentified
MSVRRILAKTINTDLEYEAIGIDLAKNCVSVALLTTDGEVVCIDRLDYSELEKSAQVLCPTTFAMEPCTEMNYLVQKLEAWGHRCLVIGGKNVQNYVENHYSGQKTDLNDAQALAFLAQDTQLRTIKAKDMEQQKYASLTTLREQYIKQYRQTIVSLKGICQAWGLNISKGISGKARLKDLIENHAAFPEELKESLVDMVTHAQTAQKALNKITKTLELLAKNDKVCQLIQTIPGLGPICSCRLRATIGDIQRFKNPKDFPAYYGLVPRSIATGHNEKKGKITHRGDKTMRSLMVQGAGSVVNMATKGKLKSKQLTKWILKKQKEKMPWGKLVCAVAAKLLRIVRAVLISRKPYNPKIAGVAKCSLPKGT

SEQ ID NO: 126994 - protein, 385 aa, unidentified
MFYVGIDIAKTKHDLACMDETGETVITNFRFANSYQGFHQLKIKLEQLSPITQDVQIALESTGHYNYNIVAFLREIGYNVFAYNPFIIKQFAKSQSLRKTKTDTKYTLLIARKLRSDVTPDYYQTDKVMDELKELTRYQNRLIQSRSKCKNLYIRLLDIIFPEINSYVSNLHSHFVYELLTKYPSAQKIARARVSSLLKIKRLTADKAHQIQEIAKQTIGNTSTVLSLELVQLIESIKHYDKQINQVQEEINLLMIELNSPITSIPGIGSRLGAIILAEMKTIHNFRNPNQLQAFSGLDPAIYQSGQMDNTGHMVKRGSSYLRYALIQAAKLISIYSPHFKAYLKLKISQGKHYNVAVTLVAKKLIRVIYHLLKTNQTFDEAKLR

SEQ ID NO: 126995 - protein, 347 aa, unidentified
MSYIGVDLHQNSITVCRRTGDGSEAFETLTLSPADMERFCLSLDADDEVAIEATGNSAWFRDQILPCVGRVVVVNPSQFKVIRKSVKKTDRNDAAALALFLEKDMLPETRVKTSAENELASLAHTRDLLVKQRTRLLNKIHALHVGKGLKLKKESLGSKRGLAAIDMALFSPCEQVEITVLREAALSLTASLKQLDTEIEKHASAFDGYEGIVSIKGVGPRSAAVLLAAIGNVHDFESADKLAAYFGMVPRVAQSNETDHRGRITKRGNKLARTTLVQCSLVATRYSPYLKSFHERIRQRRGTGKAIIATARKLLSIIYDTLRNGWVFDDFTQFQRRENLRPAGQSS

SEQ ID NO: 126996 - protein, 388 aa, unidentified
MSFDQHHEAPTAIQNHLAAIFVSLELSRSIWLITSLSPGLGEKMSKHSVRAGDVAALLARFSELKRKASERTGKSFPIVVIQEAGLDGFWLHRVLQNEGVESHVVDPASIATSRRRRRAKTDKIDGEALLRALLAHKRGEPRVCAMVKAPTPEEEDRRRLCRERKALIAERIKHVNRIKGLLFSQGVSGYEPLHRDRRERLESLQTGDGRPLPGHLKAQILRELDRLELLLKQIKAVEGERDALLVEQDVATPAPAAMLLDLKGVGPEFAAVLWSEGLFRHFDNRRQVAAYAGLAPTPWQSGSVDREQGVSKAGNPRLRTTLIQLAWLWLRNQPQSALALWFKERLDSNGGRLKKTLIVALARKLLVALWKYVTAGVVIEGAIVKSAS

SEQ ID NO: 126997 - protein, 428 aa, unidentified
MPQGSGLQGATLAHVTTSTIDPTLTEAAATEVFAGIDWGGSFHQICLIDEDGKVLRQQRVPHDAAGFDELDRLLTCHRARLRVAIERAEGLLVEHLHLLGVEIFCVSPKISARARERYRMAAAKSDAFDAFVLADTLRHEHRHWRALTPPSPVLAELRAISRDRDRIVIAQQATENRLRAVLEAYHPASLHLFSTLDRDITLDFITDYPTPEQAGRVGTARMDGFCRRHGYSGRTQPEVLVERLRPHLLSAGEGTVAGKAFSASLFTEQLRMLNTHLRAYDKRLDELLERHPDTPIFTSFPGVGPVVAATLISEMGEDRHRFPAPGALLAEAGLSPVTRASGRTRQVRFRYASNRRMRHMIDWWMFTAIREDDWTRQAYDHARARGQGKYRALRGLGSRWTRILWRCWTDHTRYDPAIHHRNPEPTTA

SEQ ID NO: 126998 - protein, 375 aa, unidentified
MPSTNLQNSIDFNGQKFYVGLDVHKKSWAVTVRSVGIQVAHFTQPPSAEALANTLRKKFPGGVFDSAYEAGFCGTTAHELLCKLGINNIMVHPGDIPSTDKQKKNKTDLHDSRSIAEHLEKKNLHAIHVLTREQQELRSLYRIRETRVKEVTRANNRLKGFLHYFGIEIPESLSKKERLSKRAIDWLGSLEMATEAGTFAKQELVDELKYQRTKEYQVTKLLRQQIQKDHADAYKRLITVPGIGSVIAMALIAEIGDFTRFDNPDEYTSYLGLTPWNESSGDTIRTKGIQPRCNKHLRPLIIEASWTAIRHAPQLFAYYSKHATKDNKHAIIKVARRLVMIARGVVIHNQDYQADYLQKQRNENKEKSRVAAQKK

SEQ ID NO: 126999 - protein, 361 aa, unidentified
MEQQVMVGRVVVGVDAHKRTHTFVAVDQIGRRLAERTLAATSEGHLQVVAWAAQWPDVTFAVEDCRHLTRRLEGDLLRAGHVVVRVPARLTAALRRGERQPGKSDPLDALAVAHAALREPDLPVAKLDGPAREVKLLTDHRRDLVAERTRLQCRLRWHLHELDPSLQVPSRGLRRFCVLDQLTARLAGLDGVVARIARELVVRCRELTARINELERELRDLVRQLAPTLLAVPGCGVLGAAMILGETADARRFRSKDAYARFNGTAPIPVWSGSERQRLNRGGNRTVNTALHMIAVTQARGVGPGQAYLDKRIADGKTRTEALRLLRRRISDAVFAALLIDERARAARRPEHAHDQLQQAA

SEQ ID NO: 127000 - protein, 371 aa, unidentified
MSKAIICGTDMHDNSLVCRVAVEKEEPVTKRYKNTGRGRWQLFNHLKGEAKRRGCDRIVLAYEASTHGFCMYDDCRSASIECFVLAPTKMRKSRKDRKNKDDNKDAQLILEVLRGHVMAGNALPCIWIPDDEIRANRETVRARLDLGHKLTGAKTQVQTLLKARRMHSPRETGKSWSKPHRRWLGTLCMEDKNWPALASLLRQIETLEHEIAILDKEVEKLSEKSRYKDAARVLAEQIKGVGLLTAMVFLTEMGDLSRFSNRQQVGAYLGLVPSSHESGEDNDRKGHITREGSGRLRRVLCQASWSRVIHDHTESEVYKRIVRRNPKHKKIAVVASMRRLGIRMWHMALSSQQKTGVLPGHETDNIEKAVA

SEQ ID NO: 127001 - protein, 345 aa, unidentified
MELFTLGIDLAKTTFHLVGMNQRGEVVVRKRLSRTQLLCFTANLKVELIGMEACGGSHFLGRALREQGHEVRLIPAQYVKPYVKTNKSDYIDAEAIAEAVGRPTMRFVPIQSEEQLDLQSVHRVRERWVMRRTAVVNQIRGLLLERGITLRKGRRYVDEALPGILADATSKLSGSLLVLLRELKLELAQLADKIDRSDTAIAQIARQNEACQRLVAMPGVGPVTATAIIATIGNGAAFRKGRDFAAWLGVVPEEHSTGGKQTLWELPRRGNKYLRRLFVQGARAVMQHKTKQSSGLTAWLAQLTARTHHNIAIVALANKLARMAWAVLAKNEVYRPPLLAGTAII

SEQ ID NO: 127002 - protein, 331 aa, unidentified
MMDVYYAGIDVSARTLDSALALPDMPVRQGHFAHTPSGHRQLIKWLTKGGRSVRVCLEATGLYSLGVALALHEHRHCEVMVVNPKAIKHYAQARQQRAKTDVLDAQLMLDYGQRLPFVPWQPPAPEILHLQAITRRISQLKVESTRERNRLHADAYRTGMTDLIKRDIQVNIRHLERRRARLEAEGQALVLAAPSLCAPFQRLLSIPGIGETSALRLLAELAVLPAEMKPPQWVAHAGLDPRPHESGSSVLSPRRITKAGNKYLRAALYMPALTAIRHQVNIKAFYDKLVAAGKKPRQAITAVMRKLLHAIWGVWKYDQNFDGQKFYKIAA

SEQ ID NO: 127003 - protein, 357 aa, unidentified
MKITTIGIDLAKNVFQVQGVDERGKAVLRKQVKRKDVVKFFANLERCLIGMEACGSSHYWARKLTELGHTVRLMAPQFVKPYVKTNKSDRNDAEAICEAVARPNMRFVPVKTGEQQAVLSVHRARQGFVKARTAQANQIRGLLAEFGIVIPQGIGHIAKRLPEILEDAENALPGMMRQLLQRLGENLKAMDRQVGELERQITLWHRDNEPSRTLEAIAGIGPITASAFVASVGDAKSFKNARQVPAWLGMVPRHEGTGGKVKLGRISKRGDVYLRTLLIHGARSVIRQFERKPDRADGWLKKLLARRNKNVAAVALAAKNARIAWALLAHERTYQSDYVTKRTAVQSRSVELNEATV

SEQ ID NO: 127004 - protein, 354 aa, unidentified
MMIIGCDYHPGFQQIAFVDTETGELQERRLEHREEAEKFYRDLAAQGMKVRVGMEASGHARWFERLLSELQFELWTGDAAAINAKRVRKQKTDRQDAQLILRLMLKDDFPQIWVPSWENRDLRQLLWHRHRMVQARTRIMNQLQAVALNEGLRCKKRLWREAGREQLETFKLAPWASRRRHDLLALLDRLTPTIAELTAAIEQEVERCPAAQRLQTHPGVGALTALAFVLIIGRAERFQCGKQIASYLGLVPLEDSSGQRRRLGHITKQGNSLLRFLLVEAAQVSVRSLPEWRSKYYHIALRRGRKIAKVAMARKLAVRLYWMMRKEWDYAQLNKFGSHAGEPGNRDGVKSSTE

SEQ ID NO: 127005 - protein, 342 aa, unidentified
MKEASIIGLDLAKRSFQAHGALADGSVAFRKKLTREKVLGFLAEQPRCVVAMEACGSAHHWGRAIRDAGHEVRLIPPAYVKPFVKRQKNDAADAEAIAEAASRPTMRFVAVKTEEQQARAMLFRTRDLLVRQRTQLINALRGQLSEHGVVAPQGPANVAILAQAIDDMTPSLPLLVVELARVYLDQIDGLSEKVAGLEKAIACEAKRGAMTRRLQTMPGVGPITAMAIETFAPPMEVFRRGRDFAAWLGLVPVQHSTGGKQVLGKTSKMGQRDIRRLLITGAMVIVRWACRKGAQEGTWLHRMLGRKPRMLVAIALANKMARSIWAMLTKGEDYRGPVAATL

SEQ ID NO: 127006 - protein, 426 aa, unidentified
MNYTQNSKIAQVTERTLVIGVDIGSEMNYARAFNWRGQELSKKVFRFSNSQEGLQSFSDYLRNNQAIASAEQIIVGCEPTVHYWFTLAKYLKAQHINLALVNPYHVKQIKELDDNSPKKTDQKDPKTIAKLVVDGRYSYPDLPEGIYADLRKAVSSRERIVEELNAVTNRLKRWLKIYFPEYLTVYKKFSSESGLTVLETAPLPQDVVKLGADGINHLWREKKLRAVGIKRAQTLVEAAQNSIGLDGGACARMEMQMLLEDYRAKEVQLEKVTAVLEAETLKIPYTEKLLSIKGVGLITVAGFLPEVGDIRRFDSPKQIQKLAGLELKENSSGKHLGRTSISKRGRKRLRKILFQVMLPMIQNNAEFREVYEYFTTRQKNPLKGKQAIIAAGCKLIRVFYTILKHGVDYDPQKLRMDIIRPESAAA

SEQ ID NO: 127007 - protein, 354 aa, unidentified
MAKILRSGVSVVGIDIGKNSFHVVGLDERGAIVLRQKWSRGQVETRIANMPACLIGMEACVGAHHLSRKLRALGHDARLMPAKYVRPYSKGQKNDFRDAEAIAEAVQRPTMRFVATKTVDQLDLQALHRVRERLVSQRTGIINQIRAFMLERGVAVRQGLRFLRIELRGILATRCDVLSPRILRLIEDLAGDWRRLDERIEGLSGEIDALARQDAGCKRLMSVPGIGPIISSAMVAAIGAGDTFSKGRDFAAWLGLVPRQISTGDRTVLGKISKRGNRYLRVLFVQAAWVVLVRPKNWERHGLKPWLEAARKRLHPNVLAIALANKLARIAWSVLARCRTFEARRIDEAIVQTA

SEQ ID NO: 127008 - protein, 344 aa, unidentified
MKPATHILGIDIAKLKFDVHLRALAGGDQRWASSFSNDSKGFKQLVRWLSEHLLGANPQLHACLECTSRYGDALAEFLQARGYRVSMVNARRTRHYANSQLTRTVNDQIDARLIADFCASERDSLTLWEPLSPDHRQLRDLTRARQSLVQEHDRFGNMLETAAGVARQVFQKQLRQLKRQIQQLDKAIAQFVASCPTLHQQVALADSVPGVGLVTAATVVAELPPLAKIAQARQAVALFGLDPLKKTSGTSVDTRARLSRMGSRRGRRALYMPALVALRCNPIIRELGQRLEQKGRGGKYVVVAAMRKLLRLIYGVIKQGQPFDSNWATSSLKESSTPTATILG

SEQ ID NO: 127009 - protein, 492 aa, unidentified
MASSSPASRRNAKNALKLKKQTRERAATATSPVEMEKLEPVHRRAAGIDIGSAENYVAVPPETVAPGESSVRVFGVFSEQQDALVEWLRSCQISTVAMEATGVYWLTLYDKLEAVGIEVYLVDPHGVKAVPGRKSDWLDCQWLQKLHTYGLLQRAFRPDAPIRRLRTLTRQRTGLVCAAASQQQQMEKALVCLNLQLGLVISDLVGETGISIIRAILLGERDPKVLVERYRSVRCTKASIGEMKQALQGTYNDEDLFVLQQCVDTWDFVQEQVRECDGKIELALAAIPTARAVERKAPPLPVPAAAEQPKKKANGTQGKNAPVKDFTPILRRICGVDLTQVMGLNLLSVLMLLGEIGTDMSRWRSAQAFCSWLGLCPGAKISGGKVLSRRTRKVTNRAATILRLAAVAVGRTDTWIGLFYRRMKARKGGPKAVTATARKLACIVYHMLKFQEEFVALDMEKYVAHAQAHRLRYLKREAEKLGYELVEAEQVA

SEQ ID NO: 127010 - protein, 370 aa, unidentified
MRHGSTLYVGLDVPKDSIAVAYATTDGPSDPVHVGAIGTRLCDIDALVRTMQSKSAPLVFIYEAGPCGYWLYRDLTRKALTCVVVAPSLIPRKPGDRVKTDKRDAVTLARLARSGDLTPVYVPDVPDEAIRDLARAREDALRDLNTGRFRLKALLLRNDIRYVGRANWGPEHVRWLARLVLPTPAQQIVFQEYVRTVTERTELLHRLEAELLEQAKPWRLYPVVDALQALRGVQFTVAITTIAELGDLTRFDNPRQLMSYLGLTPSEYSSGDRRRLGGITKAGNGHARRVLIEAAKAYRHRAKVSEPIQARQQHLPAPIRDIAWRAQVRLCGRYRKLLARGKHPNTIAAAVARELAAFMWAIARTQAVSA

SEQ ID NO: 127011 - protein, 391 aa, unidentified
MSFKILKNNCCGLDVHKTWIYACIGITDSFKRTEYKQARFSSFTKGLQELCLWLAKYNCIDVCMESTGKYWIPVFNVLEKNNIFVTLSHPKYTKPQKGNKTDRKDAKWICDLYMCGMVKPSFIPPADIRQLRDLVRYRFKLTCMITGEKNRAHNCLTVSNLKLDDVFSDIFGKSSRSITEQILQHPGEVFDVAPFVDSRCKTPIEEIQAAVDGAISHEQAVKLRQCLKHIDELEMHKAEIEREIFRLSQKYESVLDLIRTIPGFDKNPLTAIQVLSEIGADMSVFPTAKNLVSWAGCCPRNDQSSRKIKSTRISRAGSYFKPVLVQIANALIKSKKHPEFTTRYRRIKARRGHKKAIIAICRMILTAIWHILTDLKPYTPEGFLESRPVPD

SEQ ID NO: 127012 - protein, 416 aa, unidentified
MLDQQQFAAYVGLDWGDRRHCVHLQVAGGRNMESFELEQKPEALHEWIARLLERFQGQPIAIAIEQRKGAVIHALMMYAFLVLFPINPKALARYREAFHVSGAKDDPTDSELLLDLLSKHSDRLRAWVPDSQLTRKLQTLCEQRRKLVNRRVALNNRITSLLKQYFPQALDWIGDVDSVQACDFLESWSTLDAIQSVNPDQLQTFYRRHNCRKASVISERLNQIARACPLTTDSAIVEPYSLIVETSAVQLRSLIRAIQRLDKRIAELFAQHPEHNLFDSFPGAGAVCGPRLLTVFATDRSRWMSAVELQSHSGIAPVTEQSGNTCWIHHRLACAKFVKQTFHEFADQSIRYSPWARAFYDLQRSRGKDHHAALRALAYKWIRIIFRCWKDGKPYDEAAYIASLRRHGSPVIEKLD

SEQ ID NO: 127013 - protein, 468 aa, unidentified
MGDKRARTRRTRGKKGKHPSLLKRINRHAAGIDCGSETHFVAVPPERDEEPVRSFKTFTSDLRRLADWLEACKIKTVAMESTGVYWIPIFEILEDRGFEVVLVNSRHVKNVPGRKTDVLDCQWIQELHSVGLLRGSFRPDAEIATLRAYLRHREKLIQGAASHIRRMQKALVEMNLQLHNVISDITGATGMRILRDIVAGVTDPVALAAHRDYRCRASEEEIAASLTGNYRAEHLFALRQNLELFDTIQRQIQDCDGEVEILLQRLARKQKKPKRALPQPRCKFKLCDNEPRFEIRDPLFRLSGVDLTQIDGIAPYTALRLVAEIGTDMSRWPTYSHFTSWLTLAPKNKISGARLISSRTQPSANRAAYLLRMSAMVLGRTSTALGAYYRRIAYRVGKPKAITATARKLAILVYKTLKGELDYADPGEAAYEQRHRERALRNVRKRAKTLGFGLVSLETGELLHGSVS

SEQ ID NO: 127014 - protein, 313 aa, unidentified
MSEQYVGIDVSKDHLDVALSDGTSLRVGNEEAGHQELVARFSAAVPRLVLMEATGGLERALAAQLSAAGVLLRIVNARHVRHFAKATGLLAKTDRLDAQALVRFAQTLKPEPRSIASEQTLALQALIARRRQLVEMLGMERNRLRTAHSGVRKSLQASIRWLEKRLAEVDEDIDGALRECGVWREKVELLESVPGIARVISVNLVACLPELGELNRRQISALAGVAPFNRDSGRWQGRRSIYGGRPQVRRALYMAALVGARHNPVLRAFYQRLRSAGKPAKVALTACMRKLLVIVNTMLKTGKPWTTDLVAQT

SEQ ID NO: 127015 - protein, 343 aa, unidentified
MKLSRIGVDLAKNVYQLHGVDRHGKTVWKRRLRRAQWLQALLDKTDPGCEIGMEACTGAHHWARELQCRGYTVRLIAPQFVKPYVKSNKNDANDAEAICEAMSRPNMRFVTVKCVEQQDIQATHRVRTELKNHRNAKGNQIRGLVAEYGLVAPPSLLALRRAIPEWLEDAENGLTDNFRCLLHGLWNDLLTLEERFKALDKAIEKLARSNEVTKRLQQLRGVGPIVATALVATVGNGEQFKNGRQMAASLGLTPRQSSSGDKRRLLGISKRGDVYMRTQLIHGARAVVSQAKNRDDPLSRWATDIAKRRHPNVAAVALANKTARMAWAMLQNETDYDPSLAVG

SEQ ID NO: 127016 - protein, 373 aa, unidentified
MPKYSTAFGMDVHLRSTTVCALDADTGEAVTRRFPGNPWGEIAGWMDGFPGPSLAAYESGYLGFAPQRGLAGLGVECVVAAVSKIPRSAADSASKNDRNDAARMAKAILAHDISPAWVPSPEVEGIRDLAGAYDGATARLATAKQRLLAFLARRGFVYGGTTPAGNPRKYWTYDFLRWLDKARPEDDGGVRALAALRNEVEAAAEARADPLSEYRAAVDASPIAAEVAALQSIKGCAFALAAAFSAEVGDFTRFRSGRQVTAYFGLAPSQRSSGDSVRLGGISGAGNALVRKLAVEGSWCYAAARHQPKLMPRDTGVPLEIRMHGRKGSERLLRRREEMLARGTPAAKANAATAAELVRWLWALGMMCREGAE

SEQ ID NO: 127017 - protein, 426 aa, unidentified
MEIVYPRSCGVDVHNSFIVAVICISESVKPKYIKKRFSTFNNQPVQFRDWLIENNCQNVCMKSTGKYYIPVYNALEGYISNVVVANPKWVKAIKGKKGDKWIADLFKFGIVRSSYIPEKDIRILREFTRYQYKLVNMRSSEKNRFQNALTTGNCKLDLVFTDVFGKSASSIVDTILSNDPYASEDILSKVHARCKASHEDILSDVDGTQLNQFQKARIQIVQKHMKYLDSLLNEIQQHIDLMVANYDDYIQLLCTIPGINRKSAITIISEVVTDMSQWPSHRKLAVWAGLAPRCNQSASKKKSVKISKAGVYLKPCLVQIAHAAIKDKKCDYYATKYNKISKRRGKKRAIIAIARKILIAVYHLLKTGEVFNPTDMADVETTKKQRIEYIKNNLRNAFNQLSRTGLSEAEILQFIRKEPTNSPQIE

SEQ ID NO: 127018 - protein, 334 aa, unidentified
MKQVNQVGVDVDSEALVCMMKRAGQPLPLATFANSAAGHQKFIRWVTKGGRPARVCLEATGIYSLELALALHEAKNVAVMVVNPRAIKDFGRACMQRAKTDAVDAGGILDYLERMPFTEWQPPAPEILELQAINRRIVQLNTELTREKNRRHAVEFAGASANAIGNDIEVNMHHLERRIERMHNSGLNLVRGVPALATKLAHLVSTKGIGEASAMRLLAELLVLPDDLAAPQWVAHAGLDPRPYQSGASVHRPRRISKVGNRHLRAALYMPALVAIQHQPNVKAFYDKLIAAGKKPMQAVVAVMRKLLHAIWGMLKHDQDFDGEKFFKIATKNT

SEQ ID NO: 127019 - protein, 346 aa, unidentified
MSYSTTVGVDLAKNVIQISVVSGRGKELSNRSLTRKKFAEFLCKQKPAVVAFEACATSHYWARTAQRHGHIARIIPAKAVAPFRQGHKTDSNDALAVAEAARRPNIKEAPMKTVDQQGLQAIQRSRDLLVQESTALSNHLRGLLMEFGVVMPRGFAALQRKLPEILEDGDNEVPDMYRPTLHRLYFRFLELRSDIHAMDVEIKELVKQHPGCSRLTALEGVGPISAVLLYASLGTGEAFSGSREFAAYLGLTPRQLSSGGKTNIVGLSKKIGNCRLRSVLIQGARSYVHRLKEPKTSKDRWLMDLIERAGHGKAAVALANKNVRTAWAMLTQGTEYQRRPQLNVAA

SEQ ID NO: 127020 - protein, 331 aa, unidentified
MEKKDFLGIDVSKLTIDCHLHMMQVAKQFKNAKSGFKSMERWLKQQTNLSLSELVICFEATGSYSFELTRYLADDNLEFTVDSGYRISRTLGLVRGKNDPVDALRIAEYAYRYADKLRVYQMPSDDLIQLHKLYNLRRKLKKDLAGYRTRLKEEKRIDFFNIPVLNDPQIAVIEALKQSVADVEKSMEAIIRDNSELQKNYDLLVSIKGVGFVTATLVIALTANFTLFDDPKKFASYSGTAPFSYQSGTSINKGKRVSKLANAEMRSILTQGAKSARQHDPELKAYADARAKAGKSPMSTINILRNKLISRMFAVIRKQKPYEIRVPNTAA

SEQ ID NO: 127021 - protein, 349 aa, unidentified
MLADEVDYVVGVDTHRDQHVLAVVVASSGGVIAQRSVRSNARGYAEALRFTGDHAPGTRIWAVEGAGHYGAGFARYLSSRGETVHEVSRTARGERRLQGKDDLLDAIRVARSALASTARALPRSGERQEALRLLLLARRSAVDVRRVAIVQLRSVIVTAPESLRDELRRLPLGELLRRCSRFRRSSSRTPDELAIILVLRSLARRIEAATEEARELEREILGHVSALVPELLNEAGVGPIVAAQLIVTWSHRDRVRNEAAFARLAGVAPLPASSGQTIRHRLSRGGDRQLNRALHTVILHRRQHDPATRDYIARRIAEGKSTRDATRILKRYLARHLYRVMQNASPTMT

SEQ ID NO: 127022 - protein, 341 aa, unidentified
MGQVSTVGLDLAKNIFQAHGADVSGEVVFRKKLGRGRLLAFFAGLPACVVAMEACAGAHHWGRELARQGHTVRLIPPIYVKPFVKRQKNDMADAEAICEAAQRPSMRFVPLKQEEQQASSVVFRARDLLVRQRTQTINALRGHLAEYGWIVPKGVPHVDRLIARVEDPTEALPPAARTILLVLVSTLRTLDEQIAVLDAEIASRARHDPVARRLMTIPGIGPITATALIALAPSHEAFKSGRHFAAWLGLTPRQRSTGGQQKLGSISKMGERTLRRLLTIGASAVIKQAAIRGAPAGSWLDQMLARKPKMLVIVALANKNARIVWALLAKGDVYRAPGVPA

SEQ ID NO: 127023 - protein, 348 aa, unidentified
MKYIGLDCHKEYDHATMIDTETGEVKARKLAHIKEEFREFIGDKAGTRVVIESCRDWSRTYELSEDLVEEVILAHPLKVKAIASAKVKTDAIDSRTLAQLLMADLIPEAHLRKAENRVKQRVIRHRAFMVVMRTRVKSRIHDLVDSQLLPPDVLKTKPINLFSKKGMKWLTSLEWAKEEDKRLVESHLRVMEAINQEISITDGMVKGIYEKERDAQLLTTIPGIGITLGMLISTEIDGIERFHSPSKLCSYAGLVPSTHSSGGKTYHGKITSEGNRWLRWALVEAAVPASYADAEIKERLDTLRKKKGANVAKTAMARWLLRVVYHVLKEKRPYITAYNIMAKPGAAF

SEQ ID NO: 127024 - protein, 359 aa, unidentified
MTGTMTWAAMDVHARSTYAASMDVITGELSRQRFDTGAVEPVVAWLAGLPGPVRACYEAGPTGFGLYRAAVAAGIECQVIAPSKTPRSGDRHKSDRRDTDLLLRQLMAGALTPVVVPSPTCEAARDLARAREQVRVDLMRCRHRLSKLLLRHGRVWDRSTWTKAHREWLGSQTFAHHNTELAFIDNLAACDGLTARRTALDERLSGVALDPEFWPIVRRLRAFRGIDTLSALILALEIADFTRFQRAVQLGSWLGLVPSREQSGETDRHGSITKTGSRYARRILVEAAWHYACPPRIGKTLYERQEGLPDHVLQIARRAQTRLYRVHRRMREHNKPGNVITVACARELACFLWAAATAP

SEQ ID NO: 127025 - protein, 442 aa, unidentified
MSDTGSKQQAEPNWAAFAAIDWADQKHFWKLLPAGSQQPEQGELENTPEAVEVWAAGLYQRFGGQPIAICLEQARGGLVYMLSKYSHLVLFPVHPTTAARYRETFSPSGAKADPSDTAYLLDLLLRHRDKLRQLQPDTVETRLLQILTEQRRRMVNEKTRQGLRLTDCLKTYFPQVLTWFGKVSSPLVGALLEQWPTLGELQRQHPGTLRQFFHAQNCRSEERIRERLEAIYQATPATRDPAVLEGFGLIAQGLVALLHTLRSHIKVLDRRIAELALAHPDRALFASLPGAGPVLVPRLIVAFGTRRDRYTDAYQMQCYSGIAPVTEASGKRQWVHFRFACPKFLRQTFHEFANCSIRYSEWARAYYESQRAQGKEHHAAVRSLAYKWIRIIYRCWKDGKPYDEQLYLQALQRRNSPLRADPATGFGWKAVAGFAKFSNETS

SEQ ID NO: 127026 - protein, 427 aa, unidentified
MKVVHPICAGLDVHKKVIVATVAITDSQHITTHKQRKFSTFTSDLNLLADWLISHNCRHVCMESTGKYFIPVFRVLELRGLLPCVAHPKFVRAIPGKKTDIKDSKWIADLFKHGLVPMSFIPPLEIFELRDLTRYHTKLTNVRTGEKNRIQDSLTVSNIMLSSVVTDTFGKASSAILKYVLDNPEQKDIDFNPFMTKNMKAKVEDISKAMDGTFSPEQANKTKIAFKHLDDVNACLEQLNSAISLLAKRYEPQIELLTTIPGVTTRSATRIIAEVGNDMSVFQSSKHLCSWAGLTPQNNESAGKKKSTRISRAGVWLKPLLIQCSLAAVKDKKCPYFAYKYQALSKRRGKKKAIIAIARMILTSVYHMLSNNVAFDSELYQTYYQNQTKRINNVSIPKMISFLASQGLIVTTGDGEVLAHPLLASTG

SEQ ID NO: 127027 - protein, 403 aa, unidentified
MGNQTFIPRDYDVFAGLDVDKRSISVTFTDHQGLLKSLRMPYNVEHLVNHVRKHFPNQKVAFAYEAGPTGYGLYDGLVAQDFRCLIASPSMIPKAPGQRVKTNRLDSVGLSENLRGGQLKGIHVPSPLYRELRHLTQLRDTFVSEMVGMKQRIKSLLLMEGMEFPPAPAGSQWSFMVKNKLRKLPCSSTVRFKLDQLLDSLEFNEKQVFKTTREIRRFCQNDPELSQCIKYMMSVSGIGWIVASQLLARIGDWRELKNIRQLAGFLGLVPTEHSTGERTDRGSITHTGDERLRSKMIQASWSAIRKDAELREFFRLICHRHPRRQGPRVAIVAVARKLSVRISVVLMQQRPYVVREKVHSAPLTQEETSSQAVCRATHSSKSLFGRGWFNLIGERKNIRAFVR

SEQ ID NO: 127028 - protein, 317 aa, unidentified
MAQKGTIVGIDIAKGKIDAAIRFGAEASFANSAEGRRELLAWLKEHGVCKAVMEASGGYERSWAVLLRGAGLEVVIVDPNRVRHFAKSAGQLAKNDPIDARMIAWFGEVFGHASGRPHDEERQELDQMVTARMGIARLKEQIEGWGEHEQPKAVQKAQQALLKAVATQLAKLETIIAAKIDKTERFAQRAEIIQSVPGLAGTAAAGLIAFLPELGLVDRQAAAALLGVAPFDADSGKRRGERHIQGGRHKLRKLLFMPVLSAATQHNPVLKACYQRLIAKGKKAKVALIACMRKLIGILNTMLARGEKWDPARHAIA

SEQ ID NO: 127029 - protein, 387 aa, unidentified
MTVRTVNNLPAATHGETVRCLFAIELSKQSWVIGFNTPLSEKISRRTLSGCDWKGLLELIEDVRARVSREMDRAVAVMSCYEAGYDGFWLHRQLEAHGVRNYVIDPASLQVDRRARRVKTDRIDAERLLRSLMAYLRGEPKVWSVVRVPSVAEEDARRLHRERDRLVLERVQHVNRIKGLCALHGIYDYHPLRPQATARLEQLRTAQGGELPPRLKSEIKRELHRLELVVEMIATLEAERDAIVEDEASTHLNAEKIQNLHKLKAIGPEFAAVLVGEIFHRSFDNRRQLASYVGVTPSPFQSGSMAHEGGISKAGNRKGRTTGIELAWLWLRYQPDSDLSIWFRARVGIMKGRIRRIAIVALARKLLVALGRYLETGLVPRGAVLKG

SEQ ID NO: 127030 - protein, 434 aa, unidentified
MSNGSGVSRGDRDRNARLGRLRGAVPVVNAVVGIDLADLKQMVVVTDHDSKVLARRTFRCKAWDLGAALDWAADRAGRAGFAGVTVACEPTGHRWRGLGQLAVERGMSFVCVQPLLSSLARKGEDLTSDKTDDKDAVLIARLTAQLRCYLPEPVDPVWGRLRHLGARREQLLETHIRCVQQIRDLLECVWPAVLDAAAQPFKSMTWVAAVSVVVARDDGNLARTRRLGLERFTRLVRAEVTRRGKTKPCLRIVRKVFAALTETAGVVEHRQAALARIGWTLPDWDRACADQDLVEGRMVAVLGQLGLTDLVCSIDGLSPVGAAAILAETGDLSRFTSARALRTTGQAGRPGSAGAEVRHVRRQVAPVRRGTPAAAGRGVAGSMGMPPEQPGVRRPLPTPDQPRDQPAQAHPGPHHRRRRDPAAAVRRHHHRAAL

SEQ ID NO: 127031 - protein, 320 aa, unidentified
MPASCGVGIDVAKDTLDVAWATESDARWRTTNDEAGWAALIDQLHARPPTVIVLEATGGYETGVASALSVAGLPVAVVNPRQVRHFAKALGRLEKTDTLDAGILCEFAVRIAPVPRPLANDELADLQALVTRRRQLVDMLTAERNRVPLARGAVRKNLRAHIAWLEKQVGHTDRDLRTRIEASPIWRVRDQLLQSVPGIGPTTAACLLAGLPELGTLSHRAISKLVGVAPLPDDSGTRVGYRRIQGGRADVRRALYMATVTAIVHNPTIAAAYRRWRAAGKRPKVALIAAMHKLLIHLNAILTDQTTWQPTPVPPSTTPS

SEQ ID NO: 127032 - protein, 412 aa, unidentified
MDVLIERCAGLDVHKDTVMACVRLPGQGGVRQQEIHEFGTTTAELLALRDWLSAHGVTVVGMESTGVYWKPPFYVLEDAFTCHLLNARHLKNVPGRKTDVKDAEWIAQLVEHGLVRPSFVPPKPIRELRNLTRYRKAQIEERIREAQRLDKILQDAGVKLSSVATDILGVSGRAMLTALVEGTRDPGVLSELARGKLRAKIPALKEALSGRFGAHHALIVGTILSKLDFLEQVISHLSAEIEEAIAPFEPQVELLDTIPGVDRRSAEAIIAEIGVDMAQFGSSARLASWAGMCPGNDESAGKHRSGKTRKGSKWLRTTLTESAKAAARSKGSYFSAQHARLKGRRGSRKATIAVGHSILVVAYHVLDRAVPYEDLGADYFLRRRDPKRHAAKLVRQLQAIGYRVTLEEVEAA

SEQ ID NO: 127033 - protein, 333 aa, unidentified
MYSIGLDISKSSVNVHIPLTQLDLEIENSLKSFKTLYSKLKKLYKKELDKLVFTFEPTGSYSALLYRFCADKSIKVFLINPKQSSNFSKAIAQRNKSDKVDAKVLSQAIVIAREDEICIPSINLLVEEIKELMVYYKLKMKQRVQLSNHLESLESKQGNTALIRRLKREIKALKEVEALVMDEMYELITQDEKLKEQYNSIESIDGLGKVSTVALLHLFIRYPNANQRQITSLAGLDPVVRESGTSVRGRSRISKAGARIYRGSLFMATMSATRYNPQMKVFYERLKDNGKHTTLAQIAVMRKLVIIAHSLFKSGEMYDKDMFLKTTGIKEND

SEQ ID NO: 127034 - protein, 343 aa, unidentified
MESMHYIGLDIHKKIIAFCIKTAGGQMIKRGTLSATRQALNKWLENLTQPWTAAMEATLFTGWVYDFLKPHAYKIKVAHPAMLKAITAAKKKNDRDDAEKITDLLRVNMLPECYMAPVELRELRRILRYRNYIVRTATKEKNKISGLLMEVGGAYNKKRLHGKKYFDELLAKIEDVPESVINMLKLSRSNLEVFTDIQKRFVRTLKENQLIRERVRRLMTIPGVGEITALTWALEICEPERFNSIDQAVSYCGLCSAQKESAGKEYRGPISKKRNKHIQTILIEAAKLAPSWNPQLAEIHKKESAKGNANKATLAVARKLVAYMLAVDKNKKDFRIIESKKAA

SEQ ID NO: 127035 - protein, 453 aa, unidentified
MQGCLLTREGMDALSPIILKEVLVMKLKPIAGIDVGKFFSEMAILSPSNEIVARMKITHDSSDDVKRAVKLLRKTEKDFDSKPLVIMESTGHYHKILFHSLNSFGFEVCIINPIQANCIKNIGIRKVKNDKVDAQNIALLYRFQNLSTTSVPNQDIDHLKGLCRQYYKLSDELTMYKNRLTSVIDQLMLNFKDVFSDVCSKSALAVLEEYPTPAAIVKANRNKLIDVIKVSSRRSIDWSTKKYEVLLLKAKEFKSLSVDNITNVTMLKVYISMVRNLKENLKNILVAIQQLIDDDIKKDIPFFSKALQLLQSIPGIGLITAATILAEIGDFSAFAKPKKLVAFFGIDPSVRQSGEFNATRNKMSKRGSRLLRRVLYTTALANIRTNRNKEAINPVLMDYYKKKSQSKAKKVALGAVMHKLVYIIFAVMRDGKPFELRDPKVHAQMLSLKNTAA

SEQ ID NO: 127036 - protein, 356 aa, unidentified
MNKISRLDFEGQQIYVGMDVHKKSWSISILTDKFEHKTFTQPPEVGTLVNYLKRNFPGGSYKSVYEAGYCGFWIHDRLQEHGVQCLVVNPADVPTKDKERRSKTDRVDCRKLARSLRSGEIEGIYVPSRPKVEDRSLIRTRQGMVKKQTRCKNQIKSILQFYGIQMPEELANSHWSKRFIGWIEAIRMERASGNFALKVHLEELNNMRKIIADLTRSIRTLANADEYRENVRLLKTVPGISTLTAMILLTELYELSRFRNLDKLCSYIGLIPDTNSSGETDQQTGITKRRNAQLRGILIESSWVAVRKDPALMMTFNTLYKKMPKNKAIVRIARKLLNRIRYVLKNQQEYVSAVVQ

SEQ ID NO: 127037 - protein, 402 aa, unidentified
MTIMTNPGDHVAGIDSHKDTIHIAVITATGLEVTDHEFATTTVGYRKAVAWLAKHGPVAAVGIEGTSSYGVGITAALRRNGIQVVEVNRTRPAERRKQGKTDRLDAYRAARSVVSGEATTHPKHDTIESLRALVVTRRSANKSLQACWRQIGSILVNANPRLRDKYRHVSRDKLIDLLAASRPDQVRDLADATILRALRSLARRHQYLRGEIDDLDEQLDTHTTARNPGLRAIHGVGPALAAILLVTAGDNPERLRSPASFAALCGTSPIPVSSGKTQRHRLSRGGDRQANWALHQIVKVRMSHDQRTRDYRDKHLAAGWSLAAVYRSLKRAVAREVFRALTGHCEIPNYTDLRPARQAKNLTLTTVAQHFNVWPAHISEIELGKRRDDTLAQSYREWLQAA

SEQ ID NO: 127038 - protein, 364 aa, unidentified
MEIPFRKEKESRKREYIAFDSHKRYSLEEREDVASGKIVQQVRLTHGPGAVRRYLARCTPGTAVALEATGNWYWIVEEIEQAGLQPRLVHPRKAKLMMGLINKTDKLDVHGLNRLQRNGTLPTVWIPPRPLRDLRELTRTRLVLVEQRTRLKNRLTATLAKYGVPPSEYSDAYGKSARAELEARIEPLPEQTRWVCKQLLAQIDFLVRQIRQLEQRLEDLVEVTPEMERLMTLPGIAEILAATIALEIGDIGRFPDAPHLASYAGTTPRVHASGGRVRYGRLRADVNRYLKWAFVEAANSVAVNHRRCPERHVSQLYDRLRQRKGHHKAIGAVARHLAEAAFHVLRRQETYRDPVLERGCTSEV

SEQ ID NO: 127039 - protein, 404 aa, unidentified
MPTYYVGIDVSKFKHTCCVINENGEIIRKSFDFSNSKEGFDSLIEIFKSIDQSKLSFQIVMEATGHYHECLFRYLVANNYLAQIKNPVVIARFKQSEYLDKAKTDNLDALLIAQYASKHPFSPSMLKSYNIERIRRISRAKFFLYQDKERTINHLHRYLDESFPELVPFLGKRGDIKRYQGRSFFDSKTTLWFLENFPSAKKFSSVRSETAEKLRRMSKGAFSLIKFNELRNIAKNSIGVAFSETETIIVQLVHELRNIQERNEELDKLLEPLIDETAPNLLTVPGIGYRLAGLLISEIGDASQFPSADKMIKFAGLDVRIYQSGTIEKHGAIRKRGSPLLRYALFQAAEKVRIHCPEIAEFYSKKKGEGKHPICALTHTARKILRIVWALLKTGQNYNQLVSD

SEQ ID NO: 127040 - protein, 376 aa, unidentified
MDKYTKYVGLDQHQDSITVAIADPGRSPARVWGQIESTPSALAKLAQRLDDGETQLRFCYEAGPCGYGAYRQLTALGYECTVVAPSLIPRRPGERIKTDRRDALRLAQQHRSGELTPVWVPGVEQEAMRDLVRAREDLKGMARQLRQRLQGFLLRHGRVYPGVTKGTQAYWRWLETQKFDAPQQQVVLQEYIDMVRALQERVAALEAEMVQARDTWSLGPLVEGLTALRGVASITATTVAAELGDLTRFDSPRQLMAFVGLVPGEHSSGSSRRQGGITKAGNAHVRHVLAESAWCYRFPARKTPALQRQAERTTATVQALAWKAQKRLCSRYRHLTNRGLPKGKVCTAIARELLGFIWAIAWELKPTTAAPTRRAG

SEQ ID NO: 127041 - protein, 341 aa, unidentified
MDKELYFGVDVSKKTLDLAYYDGETIDWKNAHIKVSNDDAGFKKIGSWVAKVGKDFDTFLFCMEYTGLYNQNFRLWLESKEYIYGMVEPRKMHHFEPDLDDDQRSLDRIKTDELDAFRIAIYCEQNHKKILRNPSKLPSPVYFKLKRLLAERKQNTKQSTLYKQQLHDICAYDTDLSVERKKLLLKDMKENQKAIDKEIDSYMNEDASISKNYDLLTSIPGIGRIIALETIVLTENFTAISNPRKYACYIGIAPFKKESGTSVRKRTSVSKKGFSEAKADLSIAVLSAIRNNPSIRDYWIRKRKEKCGGIVLNAVKFKLVLRMFAVIKRGTPYVETDAYKN

SEQ ID NO: 127042 - protein, 435 aa, unidentified
MDEVTDEPLYRDRVCGIDIGKAGMVATIRVPSERDPARRAAETRSFGTTKREVLALADWLRCWQVPAVVMEATGDYWKGPFYRLEAEGLECVLADAKQVKNLPGRPKRDPSDSRWLAACFERGAVTPCFVATEEFRVIRLHTRYRRELTEERTREKQRAEKLLESAAVKLSSVVSDLHGVTGRAVMDQLIAGERDPKALAQLARARARRKIAELEEALDGAEFFTPAHAALLATMLARIDHLNTEIDQLTGVIERLLAPYEEQLQQAESMPGWGRRSAQDAVAETGADMTRFPTGGHLASWAGRTPLDNQSGKRQGRAKSKKGNRYLGGLLGETAVAAGRTQTREGARYRRIARRRGKPKAQVAVGNTQLKVYHTLLSNPGMRYQDLGVDYYERQRGIRRRIAHHVGKLGALGFDVTLCRRPDPESGGTGETTAA

SEQ ID NO: 127043 - protein, 429 aa, unidentified
MQAVAVVEAAQVVWEAVLERCCGLDVHKQTVTACLLIGALDKQPRESLRTFPTTTKGLLELRDWLEQDSCTHVAIESTGIYWRPVFHILEDAVTVLLVNAYHMKQIPGRKTDLKDAQWIARLLRWGLLKPSLIPPKPIRELRDLCRYRKKLTEQASAEKNRIQKVLEDANIKLGSVASDIFGLSGRAMLDALLAGDMSAEEMAELARGKMRPKIPQLVDALEGHVSEHHRFLIEMHLEHLGYLQQAIAQLHQRIDEKIKPYQHQIDLICSTPGFNITSAQHVFVEIGGDIRLFPSEGHLASWAGLCPGNNESAGKRKSGRTTKGNRWLRGSLVQTAHAASRAKGTYLKSFYHRVAARRGKSRAAVAVAHKQLASIYGELQCDRTYQELGENFFDRLNQRALEQRLVQRLQGLGYRVQLQPQNAADWAIS

SEQ ID NO: 127044 - protein, 402 aa, unidentified
MNAVGIDVSKGKSMVAIMRPFGEIVSAPFEIKHTASGINSLVELINSVEGESRIVMEHTGRYYEVLAHQLSEANLFVSAINPKLIKDFDNDSLRKVKSDKADAVKIARYTLDKWQNLKQYNVMDELRNQLKTMNRQFGFYMKHKTAMKNNLIGILDQTYPGVNTYFDSPARSDGSQKWVDFASTYWHVDCVRKMSLNSFIDHYQNWCKRKKYNFSQSKAEEIYGKAKELVPVLSKDAITKLIIKQAVDQLNSASTTVESLRTLMNETASKLPEYPVVMAMKGVGTSLGPQLIAEIGDVSRFTHKSAITAFAGVDPGVNESGSYEQKSVPTSKRGSSDLRKTLFQVMDVLIKTHPQDDPVYQFLDKKRAQGKPYYVYMTAGANKFLRIYYGRVKEYLSSLPES

SEQ ID NO: 127045 - protein, 414 aa, unidentified
MLKIVYRVCCGMDVHKSFVVACIAATNEQGVTTYKSKRFSTFTGDLRRCAAWLAENNCKDVCMESTGKYWIPIYNILEHTCNIVLAHPKYVKAIRGKKTDKRDAKWIADIFKHDLVAGSFIPPPDIRQLRDLVRYRWKLTNFTTGEKNRAQNCLTVSNFKLDDVFSDVFGKAASAITARILEDPTEKITDISGFRTKGMKATDEQVLAAVDGEMCAEQAEKLRIIRSHMDSLELCKLNLESLILSTAEKYLPQFNLVMSAPGIQSFAAIGIISEIGVDMSVFPTSKHLCSWAGLTPQNNESAGKKKTTRISRAGAYIKPLLVQCALCAIRAKQFPEVRNRYLALKKRRGHKKAIIAIARMLLTAIYNMLKKNEPYNPELYRQADRPPTHREVSVEEAIFILQRQGYLVTAPSVT

SEQ ID NO: 127046 - protein, 340 aa, unidentified
MKKLSVVGIDIAKQVFHLVGMDEHGTILVRKRLYRAQVMAFIAQLPPTRIGMEACGGAHSWARCFREHGHEVKLMAPQFVKPYVKANKNDMRDAEAIAEAVTRPTMRFVPTKDVGQQDLQALHRVRERLMGERTALVNEVHGLMHEYGIVIPKGVAKFRQAVVEKLESEQDKLTPLSQEMFWKLVEEFVALEKQLAYYQEKLEALATTHPECQRLMTIPGIGPLSATALVAAVSDASAFKNGRQFAAWLGLVPRQHSTGGKERLLGISKRGDSYVRKLLSHGARVTLRWVGLKTDRRSQWMRQLLERRGKNRTAVAVANKNARIVWALLTSHQDYQPVQG

SEQ ID NO: 127047 - protein, 337 aa, unidentified
MDHFAGLDISMDETCVCVLDREGVVVHESKTASTAEAIAKELAKAPSCRRIVFETGRMAPVLYHGLSQLGLPVICVESRQAYQALRSLATHKTDRNDARGLAHLARTGFFKPVHVKSLPAHAIRSLIIARKKLVGQRVTLENQIRGLAIVFGIRLPRALTTAFINQALRASAGIAGLSAAMRGLIAARTAVMAAVAAIDADMSRMTSASVVCRRLMTIPGVGQLTALAFVAAIDDPSRIRRSRDVGAYLGLVPRRYQSGEVDYVGSISKCGDRRVRTLLYEAANVMLTRYKGQLKLKDWAFAIARRSTMRKARIALARRLGIIMHAMMRDETEFAPV

SEQ ID NO: 127048 - protein, 370 aa, unidentified
MSQSSTLFIGMDFHKDTIAVAYVAQEHGAEVTYLGTIGTRQCDIDQLVRKMQSKAKHLIFVYEAGPCGYWLYRYLTKKGYDCWVVAPSLIPKKAGDRVKTDRRDAVQLARLARSGDLTVVYVPTVDDEAIRDLTRAREDALSDGKDAKFRLKAFLLRHDIRYTGRANWGPAHLRWLSEVVCPTPAQHIVFQAYVRAVTEHAERLQRLDQELQEHVHAWRLHAVVEALQALRGVQFTVAVTMVAEIGDLTRFDTPRELRKFLGLIPSEYASGERRQQGSITKAGNTHARRARVEGAWAYRSPAKVSRHLQLRLAKQPKMIQDISWKAQVRLCKRYRHLGARGKHANIVTVAMARELAGCMWAIAKQLPVAA

SEQ ID NO: 127049 - protein, 392 aa, unidentified
MEEKRTTARAEFLGFDVGKASHWACGLDGAGRVVLSERVANRAADIDAVMARAAPGALVAVDQKRNIGALVVARARAAGNPVAYLPGSAEKALRDAERGVAKTDRIDAEVIARAALGMPHVLRPLAEEAPRAASVRLLASQLDFCVRSRTQAKNRLRAVLLEADPALEAAVDPSCAWHMAVLAGIGGPARCAEAGVRRFRAVAERAGGATRAASSRLWDALSASAAGGPAAAQGELARMLARGILSLDAEIAEVEALMAAELEGDETYRCLLTVPGIGPKTAAALVAGVDISLFPSHDRLASYCGVAPADSQSGTSVRSSRPQRGGNKALKNLLIFSCNSLVGTGNRFGRYYDECRARNMRHNAALKAVARKRLKVIWAIMRDPRPYEEPAA

SEQ ID NO: 127050 - protein, 402 aa, unidentified
MNAVGIDVSKGKSMIAVMRPFGEVVRSPYEVSHTDSELSELAKALKSLPGETRVVMEYTGYYHAPVAYVLCEAGIYVSVVNPMLVHDYGNNSLRRAKTDKKDAVKLANYAIDHWLSLPQYFPEDDVRLMLKTCYRQYEQLSKIRTMQKNNLISLLDSVFPGANTLFSSPRRADGSEKWVDFIAKFWHCQCVSNSSVKVFTERYEKWCRKHGYNFSADKAANIYALTCGHIYTMPKSDTTKMLVQQAVSQIQVSSAALVALRSQMQELSSKLPEYPVVMQMYGVGPTLGPQLMAEIGDIRRFHSKASLVAFAGVDAPPFQSGQIDVRSRSISKRGSSSLRRTLFLVMSVILQKAPEDEPIYQFMNKKRSEGKPYKVYMMASANKFLRIYYAKVKKRLDLLDEA

SEQ ID NO: 127051 - protein, 389 aa, unidentified
MKIFVGIDIAKLNHFAAAISSDGEILIEPFKFTNDADGFQLLVSKLESFDKNSIIIGLESTAHYGDNLVRYLVAEFYQVCVLNPIKTCQMRKNNVRKTKTDKVDTFVIAKTLMMQDVLRFITFFDLDMMDLKALGRFRQKTIKQRTRLKIQLTTYVDQVFPEIQYFFKSGLHQNAVYALLKEAPSPKEIASMHMTHLANLLKVNSHGHFTKELAKELRVLAQKSVGANDSAISIQITQTIQQIELLDSQLEKIEAEMTDIMKFNDSVIMTIPGIGYINGGMILGEIGDIHRFSNPNKLLAFAGLDPSVYQSGNFQAKTTRMSKRGSRVLRYALVNAAWNVVRNNATFKAYYDAKRAEGRSHYNALGHCAGKLVRVIWKMLTDEVEFNLE

SEQ ID NO: 127052 - protein, 411 aa, unidentified
MEKVYDKCCGIDVHKKLIVACFKKGSKQEIRDFGATTRELLEMADWLKEGGCEMVAMESTASYWKPLCNILEPCELKAMVVNARHMKAVPGRKTDVKDAEWIADLLQHGLLTASYIPDKDQRELRELVRYRKSLVGERNRELNRLQKMLEGANIKISGTITDINGKSARNILEHILTGRQIDSAEYDILYEKKIIAHNLKATKEQIIDDLNGVMSELQRKMMRILLDHLDELNAHIKELDDDIDSFMKPEEKKAASVIQDIPGIGNTSAQAIISVIGTDMERFPTDAHISSWAGLCPGNNESAHKRKSGKTTKGNALLRDTLVVCAHSAVKNKNSYFSAQFARISAHRGKKRAYVAVAHSMLVAIYHILKDGVVFKDLGADYYNQFNKERKINAYLKKLKALGWEAPVVAA

SEQ ID NO: 127053 - protein, 343 aa, unidentified
MEVITIGVDLAENVFQVHGVDAEGDVVIGRQLRRSRVLPFFKKLPPCLIGMEACATAHHWARQLIGFGHEVRLMPPHYVKPYVKRGKNDAADAAAICEAVTRPTMRFVSVKGMEQQSVLMLHRTRELLVRQRTMVINAIRAHMAEFGIVAPVGVPQVKKLLGIIADTDDARLPSLARTCLESLARQFLSLHDEINTAEKRIHAWHRSNEVSRRLETIPGIGPITASALAASITDPEVFKNGRELAAWIGLVPRQTSTGGKQRLGKISKQGDQYLRWLLVAGAMSVIRHAKRRGTTNLPWLAGMIARKPTKVAAVALANKTARIAWGVLMRGGTYQKPVAVQAA

SEQ ID NO: 127054 - protein, 379 aa, unidentified
MGKGIRFVGLDVHGETIAAAVAEEDGSELDFGVIGNRPEAVRRLIKRLGPVEKLRVCYEAGPCGYVLYWQLTGLGVDCEVIAPSLIPQKPGDRVKTDRRDAKKLARMYRTGLLTAVWVPKADDEALRDLVRAREAAKKDELRARHRLGKFLLRRGCRAPQGVEAWTKRHTEWLRSLRLERPAQEVVFIDYRHEVDHAQERLVRLERAIDEAVERVPASKRAVIEGLQALRGVSKVTAVTVYSEVGELSRFARPKLMMGYTGMVSSEHSSASRIKRGAITKTGNAHLRRVLVQAAWAYCRRPNLSPALKKRQAGLSEEIKEISWKAQHRLCGRYRRLVSKGKTPQQAITAVARELVGFIWAIGVHVEGQIRQESQAHAAA

SEQ ID NO: 127055 - protein, 376 aa, unidentified
MSNVRFIGLDVHAETIAVAVAEADGEVRSLGVIPNRPESIQKLVKKLGPAAQLRVCYEAGPTGYVVYWQLTALGVSCEVVAPTLVPTKAGDRVKTDRRDAMKLARSYRAGDLTPVWVPDAAHEAMRDLVRAREAAKKDQLRARHRLGKFLLRHGRRPPTAMQAWTQRHLTWVKTVHFEHAAQEATVLDYLHEVEHMTDRIERLERAIDDTVKTAPARMRVVIAALQALRGIARVSAVTIVAEVGELSRFTKPRQLMGYSGAVASEDSTGERIRRGGITKTGNAHLRRVIIEAAWAYRYRPAVGRALRKRQAEVSPEVNAIAWKAQHRLHARYRHLTARGKCKQETVTAIGRELLGFIWAIGVHVEAKRTRTESVAA

SEQ ID NO: 127056 - protein, 361 aa, unidentified
MSTIPKKSEKKKREQVNFEGKACWVGVDVHKLTYAVAILDEDGQRLEFSTPAEPKKFLLQLLKMGMAIKALTYESGPCGYGLAWACQEMNIPVLVVAPSRVPRPISKSGKTDRLDSMKLVELLARDMLKSIAIPTREEFALREMERVRQRLVKKRRLVRQNIRAFLLRNGLEEPAGLDRWGTAPLHALREMSLQIFLRLSLDSYLEEHATILASLAKITKQFEKATIELGYGEQIKNLRTIPGVGVTIAHTFTSEIFRPERFKRAEDICAYVGLAPITSHSGSGKEKAWLRPVGQNYLRSILVESAWRLIAVEESYRDYYNRIRNKTGFAQKAITAVARKLLVLIWRIAIEGRPYRPVAAN

SEQ ID NO: 127057 - protein, 415 aa, unidentified
MKFAKDTRGIERYIAMDIHKEYVLVGGQNARQEWMLRPQRVRIEKFEAWAQANLRRSDAVILETTTNVWDVYDIVAPQVKYVVVAHAGKVRQIAEARVKTDKKDVERLLVLLIADTAPEVWVPPVEVRELRGMISYRTRLVKTATMIRNRLQGLVHRHNLILPKGALTDQAWWAGQQMSALEKMQIRQELSMLAEMDKHKAEVDAELARQSLGEVWGRRAMRLLQLSGFGVVISMTVLSAIGDVHRFENAKKLVGYSGLGAGVHDSGKEHRQKPITKEGRKELRWALVEAAWRAIRISPYWKEQYEKYLKRMRNPQQAIVVIARKLLVAVWHVLTEEETDVHAQEEDLAYKMLVLAWDLDEEVRMGLTYKQFAKYALMKLGVETDITRFVRKNVPRRVASNEETLARMKELGIPM

SEQ ID NO: 127058 - protein, 421 aa, unidentified
MHEDRKWFVGIDWASQEHVVTLCDREGNRIGEREFAHGGTGLSDMIAWLLKRSGGEPGEIHVAIETPHGPIVEALLERGFNVYSINPKQLDRFRDRFTVAGAKDDSLDSYVLADSLRTDMPLFRKLSVVEPLIVELREWSRIDEELKVERVRLANRLRDQLWRYYPQMLELGDLDEDWMLDLWEAAPTPQKAARASKAAIGRVLKKHRIRRFDAAQVLSELRKPALSVSQGTIEAATAHIRMAAERLRLVNRQLADAEVQLERLCKKLAEPVARDDGENVPGQRQEHRDVTILDSLPGVGRTVLATMLAEAPDAVQRRDYHALRTLCGSAPVTRRSGKSCVVTRRRACNRRLTNAAFNWGRVAVQHDPVSKAKYEALRARGHGHARALRSVVDRLLYVACTMLEKGTLFDPSFAEAKKAAA

SEQ ID NO: 127059 - protein, 391 aa, unidentified
MSMYFIGIDISKYKHDCCIISAADQKVVSKVTIKNNKAGFDELLTIINSLSNPENIRIGFESTAHYALNLELFLESSLLTFMEVNPVLISEYKKSKTLRRTKTDSVDCESIARWLMTVEYKPHSKGFYHAYSLKSLTRLRDKLIRQRSFYLVKITNVLDHTFPEFKPFFHERFSKTALYLLENYGSAEKMARMNSASYEKLRSLSRGKFSPQQFLQLKELAANTVGVNNSIFDVELNSLLSLYKSLVKEIDAIEKEINKLIEEVHPHYMSIPGIGPLSAAVIYSEYGDISNFANPGQMLAFAGIEPGINESGTESHGGRMVKRGSSQLRYTLINCCLPLIRFDMTFATYYAKKRGEGKPHRVAITHVTKKLIRVIYALEMKDIDFNTQKLH

SEQ ID NO: 127060 - protein, 343 aa, unidentified
MQSITTIGLDIAKSVFQVHGVDANGLVVIRRQLKRRYILAFFEKLPPCLVGVEACASSHHWSRELQALGHTVRLMPPAYVKPYVKRQKNDMADAEAICEAVTRANMRFVPTKTPEQQSGLVLHRTRHLFIRQQTSVINAIRAHLAEFGVTAPVGRKGIEDLLGVIADPSDKRVPDVVRACLAALGSQLLGLKKQILDFDRMILAWHRSNQTSKRLNCIPGVGPLLATALVASVADPKAFRSGRNFSAWIGPVPKQHSSGGRPRLGSISKKGDRYLRGLFVAGALAVIRYAKLHGTKYRPWVAALLARRPTKVAAIALANKLARMAWAMMARGERYNYPAALRV

SEQ ID NO: 127061 - protein, 454 aa, unidentified
MKIAKSTSQPKAQAALQIVYPNAAGLDIGASEIMVAIPPYREGVTVRGFGTYTPDLAALADWLSEAGVTHVAMESTGVYWIPIFELLEESGFEVIVVNARHIKHPPGRKSDVMDCQWIQQLHAHGMLRGSFRPEAEMCILRAYLRHRDNLLEDRAKHIQYMEKALLQMNLQLGQVLSDLTGETGLAILHAIVKGEHNPLILARMRHGNCKHSPEDLIKALTGHYRKEHLFVLKQALEMFESFSQRLRECDQEIERLLEEMKPELPDDFPPLPPDPKPNSHSKNAPSYDARALLYPLVGVDLMAIPGMNEILLQKILSEVGLDMSRFPTDKHFCSWLGLAPHNAISGGRILYSHTLKNHNRAGQCFRLAARAVSRGNTVYSEFYRHIRARSGAKEANVATAHKIARTFYFMLKRGQPFLAPDLQTYLQVQREKDIRRLQARAIKFGFRLQPAEVS

SEQ ID NO: 127062 - protein, 430 aa, unidentified
MEIVHPRVAGLDVHKKVVWVAARLPGERAGERTVTVRRVKTFWRSLRQMAAWLAGLGVTDAAMESTGVYWWPVYHALAQAGIQVCVCNAAHMRNVPGRKTDLADCQWIAELHEHGLLRASFIPTGAVAELRARTRYRKKLIQQRVSEGQRLSKVLEDAGIKIDSVASELLGKSGRAMIEALIAGEREPGRLASLALGRLRRKTEELAMACDGRFTAAHAQMCRLHLDAYDHLTGQIAELDALVAEAAAPFAVLIPRLVTIPGIGRRTAEVIVAETGGDMARFATAARLAAWAGLAPGDNESAGKRKHAAARKGNRYLRVAMVEAAWATARTRTRPGARFRRLARRFGRGHEKKAALAVAHTLTRITWAVLSRGEDYADAGEDYYEQRDRRNREHLIRHHQQALARLGCQVTLIPPGDGSPPGTGPSQPAA

SEQ ID NO: 127063 - protein, 419 aa, unidentified
MSFKILKFNCCGLDVHKIWIYACIGITDSNNRTEYKQARFSSFTKGLNELCDWLAKYNCKDVCMESTGKYWIPVFNILEQHNLWVTLSHPKYTKPMKGNKTDRKDAKWICDLYMCGMVKPSFIPPADIRELRDLVRYRYKLTCMITGEKNRAQNCLTVSNLKLDDVFSDVFGKSSRSITEQILQHPGEKFDVALFVHGRCKTPIEEIQAAVDGAISIEQAVKLRQCLDHIDELNRHISEVEQEILRLSDKYEATLNLIRTVPGFDKNPMTAVQVLSEIGGDMSVFPTAKHLVSWAGCCPRNDQSNQEIKSTRISRAGSYFKPVLVQVANALIKSKKHLEFTNRYKRIKARRGHKKAIIAVCRMILTAIWHILSDLKPYTAESFLESRPVKEKKVLSTSQALNLLKQRGYIIKDEPLVVS

SEQ ID NO: 127064 - protein, 387 aa, unidentified
MPQPNDLSRSLVALDQDGTIIVVVEMSQSSWLVAGMLPGIERQPCKKLEPSAERLLGLLHRWRDEAVRTGRKIARIVLAFEAGRDGFWLARWLSAHEVEAHVIHPSSVAVSREHRRAKTDRLDTELLKRGFLGWLRGERGHCTMARVPTIAEEDAKRPNRERECLVGERTRIVNRMKATLARLGIRNFKPTLRKAAERLATVHTPEGAPLPPNVSAELQRDIARLGFVVSQIKEIEEARQERLEQEPETRPHAMVRHLARVVGVGIETADMLVHEVLSRPMRDRKAVARYAGLTGSPDESGAKRREQGLARAGNARVRRGMIQLAWRFLRFQKESALAQWYQARTADSRVGTRKTMIVALARKLLIALWRLVTTGETLEGVVLRPAG

SEQ ID NO: 127065 - protein, 427 aa, unidentified
MAGVVIGIDPHKGSHTAVALDVHEKQLGRLRVRASSRQVDGLLEWASGWPRRRWAIEGARGLGQLLAQQLIASGERVLDVPPKLAARVRLLDSGQINKNDPNDARSVAVAALRAHELPELAAEDHAMVMRVWARRYHDLARLRTQVVCRLHAVVCELVPGGVRKYLRASQATDVLDRIVADSPVAQAKLELARELVADLERIDAQRREAKGRTARAVAATRTSINDVYGVGPIVAGTVLGYVRDIRRFPTRDRFASYNGTAPIEVSSGDRKIYRLSRRGNRQLNHAIHMAAISQIRHHDSEGRAYYEKKIAEGMTGKTALRALKRKISDALYARMIDDARRLAAKDPGGHTGNDSASSAAGSHPETPALRKSHSRATANSKTGTGQRPLRLRPAPDRRRTSRRATGVQVEPAWVCTAGAGRTDLMGR

SEQ ID NO: 127066 - protein, 400 aa, unidentified
MSEDVAFAGIDWASALHVACVVSERGEVRERFDFAHDAAAIDGMVRRMKRAKVHGVAIERGDGPVVDALMDAGLAVFVVPPRQVKALRARYGSAGNKDDRFDAYLLADTLRSDGHRWRALREDSDATKALRALCRSRKDLVEIRVGVANQLRANLELAFPGAIGLFSKPDSPITLSFLRRFPTAAKAAWLSHKRMAGWLHSVGYNGGIATEVLYGRLVAAAPGLTGIEGEARGQITLGLVAAIETLNAQISAVEVHIAELFANHPDQHIFSSLPRSGMVRAASLLAEIGDCRERFLTDAALAGLAGACPSTRQSGKYERAAFRWSCNKKLRVAVMDFANGSRMADPWAADIYKRAIDRGCRHPHAVRILARAWLRIIWRCWQDGVAFDPALHRSRFAVAA

SEQ ID NO: 127067 - protein, 353 aa, unidentified
MNSLTDLREVVDVVIGVDTHVHTHSAAVVDAATGGVLGEITVDATAQGYAELVEFANNHATLRAWAIEGTSSHGAGLSRHLVERSEIVIELDRPKRAARRNGAKSDPLDAIRAAREAMARPRLGTPRAGGERQALSVLLAARRSAIDASTEAQQQVFSLVIAAPEPIRVRFRGQKLAAMLNTAAKLRVQSAWDVETISTVVALRTLARRAHAMLKEARELQKAMVAIIRSWRPELLEEFGVGPIVAATVLCAWSHPGRVHSEAAFAMLAGVAPIPANSGQVTTRHRLNRYGDRHLNNALHTVVASRIQYQPATRDYVARRTAQGKTNREIKRCLARYVARDLYRLLENTATAA

SEQ ID NO: 127068 - protein, 417 aa, unidentified
MEVLYPRCAGLDVHQASVVACVRIATDARASHEVRTFETTTKGLLALADWLREAACTHVAMESTGVYWKPVWHVLEGDFELVLANATHIRNVPGRKTDVNDATWIADLLAHGLIRGSFVPPAEVQELRDLTRTRKQLVRELARHTQRIQKTLEDANIKIVGVISDILGTSGRAFLEAIIAGQDDPQRLADLARGRLKADREKIVEALRGRVQAHHRFMLKLHLEQIHCLEKAIAEIEGRLGERLEPFRQEVKLLLTIPGISQTAAHVIASEMGLDMTRFASADSLVSWAGLCPRSDQSAGKRRSTRILKGAPWLKTTLIQAAWAAARTKNSYLRAMFHRLKARRGAMKAIVAVAAAMLRSAYYMLTRHMPYQDLGPSYFEKKTRTRTANRLLKRLKDLGIEVLQTRITEPSTVPVSL

SEQ ID NO: 127069 - protein, 414 aa, unidentified
MLKIVYRVCCGMDVHKSFVVACIASTNEYGVTTYKSKRFSTFTKDLRRCADWLSENNCKDVCMESTGKYWIPIYNILEPTCNVVLAHPKYVKAIRGKKTDKRDAKWIADIFKHDLVAGSFIPPADIRQLRDLVRYRWKLTNFTTGEKNRAQNCLTVSNFKLDDVFSDVFGKAASAITTRILQDPTEKITDVSGFRTKGMKATNEQVLAAVDGEMCEEQAEKLRIIRSHMDSLELCKLNLESLILSTAEQYLPQLNLVMTVPGIQSFAAIGIISEIGVDMSVFPTSKHLCSWAGLTPQNNESAGKKKTTRISRAGAYIKPLLVQCALCAIRAKQFPELRNRYLALKKRRGHKKAIIAIARMLLTAIYNMLKKNETYNPEIYRKGDRPPAHREVSVEEAIFILQRQGYLVTAPPTS

SEQ ID NO: 127070 - protein, 351 aa, unidentified
MLIIGCDYHPSFQQIAWVDMETGECGEQQLQHSNREAEKFYRDLKLKGAQVRLGMEATGHARWFERLLAELKDELWVGDPAQIRAARVRKQKTDRRDAGHILKLMVEGRFPRVWVPSPENRDLRQLLWHRHRLVQMRTRVMNQLQAIALNEGVRRKKGLWSKSGREQLESFQLAPWAEWRRRDLLELLDRLNPRIGELTTAIEQEAERRPEARRLMTHPGVGPITALAFELIVGPVERFGCSKQVSSYLGLVPCEDSSADRQRLGHISKQGNTLLRFLLVEAGQAVVRSDPEWRGRFLHLAMRRGRPIALVATARKLAVRLYWMLRQGTEYQPNSVSVRTWGSSKLGHGVK

SEQ ID NO: 127071 - protein, 386 aa, unidentified
MVMILYGWFLGEFVRLKPNGMDSSHLYRISIKVGSNQTKGIHTMNDDITITIDLAKNVFQVAVFNRSGNVLFNNVLNEKRMCKLIEKYPNARIYMEACGSSHYWGRYFQKREHFVGLLPAQIVAGFRMGNKSDKNDALAIYEASKSKNEQIHLVPILTLEQQDISMMHTYREGCKKQRNQIASRIRGIGLEYGVKFPLGINKLCEQINDVLEDGENELTVKGRELIDQLYSELKQVMKLFVQATKDIEVLAKENDACKRLTTVPGIAWLGASMMFAKFGNASHFKRGRDGSACLGLVPAHTGTGGTVRILGITKRGDTYLRSILVNGARAVVIHSKEKTDKLSCWIRDLLARKSFNTVVVAVANKMVRMATALLKSGEEYRQAVAQ

SEQ ID NO: 127072 - protein, 322 aa, unidentified
MSLTVLGIDIAKQKFDVALLADGKIKNKTCRNSTEGFETLKVWLEKQGIQKVHACLEATGNYGEDLAVYLHEVGHTVSIVNPARIKGFAQSELVRTKTDKLDAGVIARFCLAMKPETWLPPAPEIRSLRALVRRVDSLIDMRSQEKNRISTAHESVIVLIKEHIVYLDQEIERIRKQIDDLIKRNPHLKQRKDLLDSIPGLGKATVPHLLAELDNLDKFTHVREMVAFIGLAPKETLSGSSIKGKPRLCKIGNARLRKALYMPALVSIQCNPVMITFYNRLKEKGKNGKVIVCAIMRKLVHVIFGVLKSGKMYDPNYKLTLA

SEQ ID NO: 127073 - protein, 379 aa, unidentified
MKRQLDLHGNVVASFCPTTENALTVLRRGAHREASCHMDTIGLDLHKRESQLCVLTEAGEIVERRIVTSRERFTVVLGGRPPAHILLEASTESEWVARHLESLGHAVIVADPNFAPMYATRRRGVKTDRRDARTLAEACRLGAYRRAHRASDGQRHVRAELAVRDALIRTRTRYVALTKALVRRDGLRLPSGEPAHTEAKLAALPLPPALAAELAPLRALWEPMNTQIAAADAQLAHVAAADPVVTQLMTAPAIGPVTAVAFVATLDDVTRFARAHQVAAYLGLTPREYSSGEQQRRGRISKTGNTRLRSLLVEAAWRVLRTKDAAAAPLRAWAERIAQRRGRSIAAVALARRLAGILYAMWRDGTDYRAPQPSAVEAA

SEQ ID NO: 127074 - protein, 424 aa, unidentified
MTRNSNPNTPEATEPLIVGIDWADAKHDLTVIDGKKTLHFRISSDTEDVAEMIDKLTAIAAGRPIAVCLEKGRVRIIYHLMLHDTLTLYPVDPKQAARYRESFASSRAKDDRRDSYYLARLLAERQADMKPLKPDDPLTRKISLLCQTRRQMVDDKTSVVQQLQAVLKMFFPLLLALPGVRLDCGLKQEVLRRWPDPRNFIKLNKQTLEKLLRRHRSGSDEQIAGVIDTIRNTRLPSTDASLIEPLVIRVRTLAAQLQAIEKGVEQIEKEVAVAMNEHPDAKLFTSLPGAGAALAPRLLAALGSDRDRWNDANELGSYTGILPVTRQSGKTKIVSRRRACPAYLKQTFHEFADCARKHCDWSRAYYKLQRAKGMAHHAAIRKLASRWQRILLSVWKHRQPYDDARYTEIMKRKLPELTTYLPAT

SEQ ID NO: 127075 - protein, 342 aa, unidentified
MDTIGLDLHKRESQLCILTDDGEVIERRIATTRERFTAVLGNRPPVRMLLEASTESEWVARHLESLGHTVIVADPNFAPMYATRRRGVKTDRRDARTLAEALRLGAYRAIHRASAAQRHVRAQLAVRDALIRTRTRYVNVVRALTRREGLRLPTGSPEHLERKLATLPLAPELVAELAPLRVVLEPVNVQIDLADEQLAATAAADPLFARLRTAPAVGPVTAVAFVATLDEVRRFRTAHQVEGYLGLTPREYSSGERQQRGRISKTGSPRMRALLVEAGWRLLRSTDPAAAALRAWAERIAARRGTNVAAVALARRLAGILYALWRDGTTYRAPTVRETTAA

SEQ ID NO: 127076 - protein, 335 aa, unidentified
MKKIHVGIDISKEKCNLCFRSGLEIVREEECSNEVRALKKAFKAALKALGASVEEVLVCAEYTGRYIYPLTVACQELDIFLWMDDPTRIKNSMGLTRGKNDAIDAARIAEYAFRYSDKAVRYSIPNAALASMKNLLADREFLLIDRKRYQSQLTDQKKYMAPGDFKHKNSRWKKVIKSMDEQIAAIDAEIESLIAADPVLTRQKELLVSIDGIGDRIAINMIAITGGFTRFQNARQFCSFAGLTPYKYDSGTSVRSKAKISKRANQTMKALLHMSAVNVATRMKDGEYKDYYERKLKEGKHVMCIMNVLRAKLVHRMFSVIRRDTEYTKQYEPAS

SEQ ID NO: 127077 - protein, 449 aa, unidentified
MEQPQEVEDEEHERTWERVAAIDVAKTFVVVCTRVPDDDLPGRRRMLVWSVPALIGAVTELGDHLRCQGIEVVTLESTGEYWRIWHVVLEAAGLKVQLVNARSVRNVPGRAKTDKKDAVWLAKLTERGLLQPSFVPPYDIRRLREYTRLRADLVRDRTRYWARLEKLLERALVKVSSVASTLDTQSVRAMIEALIAGERNPKVLAGLAIGRMRAKLRELAEALDGRFEDHHGELARILLDQVDALTRQIAVLEDKAGQLIAQIPAAWGVDADGTTGPDAGRGPGAAVLPAVARLDEVTGCGVTAACALIAELGLDMTVFGTPGRLVSWAKRCPQTRQSGKKNTAGKVPKGSPWLNGVLGEIAASAARTDTFLGERYRRIARKRGKRKALAAIARSILVIIYHLLADPAARYRDLGPDHYDNHLSRDRKIRNHVRQLQALGLTVTIEEAA

SEQ ID NO: 127078 - protein, 394 aa, unidentified
MRFVGIDVGAERHVVAGVDEAEAVVIPPTGFTEDAAGYHQLRTLLGPATDTLVALEATGHYWKNVFAVLVSAGFAVALLNPLRTRRFAEEDLQRTKTDTIDALGIARFAGQKRPAATPLPDPATEELRELLRYRDRLSQDFGDRERQLHRLLDLGFPEFPRHVHDVGSELATAILRDYPTAAAFQGVAVRRLAGLRYDGRHKVGTDLATTLLTAAAGSVGQHHGAAYRGQVRDACADLDVLRGRLRTLDRDIERLLEDHEVGTLLTTIEGIGPQTAARLVATFGDFSGVRSAAALASYVGVIPGLRQSGKRTSVRASLTPIGAARLRAKLYMPVLSAVRHNPWLRAYYVRLIGRGKLPKVAIIAAMRKLLHAVYSVATHRRPFTPHVVTQEARA

SEQ ID NO: 127079 - protein, 441 aa, unidentified
MSRVIVGVDPHKKSVTIEAVNEHGQVLATGRFGTDSTGYRLMVRYVHEQWPHRRWAVEGAHGVGRPLAQRLLAQGEAVVDVPAKLAARVRVFDTGNARKTDATDAHAVAMVALRTPRLDQLAFDEELIALRLLTDRRDELSHLRVQTVNRLQRLLTELLPGGAKRDLSALQAKRLLATVKPRTLVGKTMRRMATEEIEDLVAVDAKLKAIKKELRIAVVARGSHLMDLHGIGPAGAARILSDVGDVARFPDRNHFASWTGTAPLDASSGDQIRHRLSRAGNRRMNHVPHIAAIVQIRHDTQGHAYYRRKLAESKTPMEALRRLKRRLSDAVYRQLVADARTPGADSADQQQAGPGGHSGATSQSSAADLHTPVIGSSDKPQPGPTEPTLPRTRPRSNPSAAPVASPSRRRAGAVKVERPTGRTTLTATSAGAHSTASRPRP

SEQ ID NO: 127080 - protein, 464 aa, unidentified
MRAIGIDLAFTAAHKAVVLDEQQHYVTPVISFHTRAAELDSLLAGARQGADSSEVQVVMEPTGMAWFPIAVYLEQQQVPVYLVNCQEVSDLRKYYQRHAKSDRIDARVLAQLPSVNPEHLHRLTPASAKLLACQRGCKELDRLSRAMVALQNRLHAIDRFAWPELTPLVFKDPFSATARWFREHWYDPAQVLQAGASRIRQNSPDPADSPENQGDWATDLVRLAHQVVELYGTENRFLHFEELQAEIIRLQATLAFLEGQFDTVRFRIVRPLYRQLHPSRNLETIKGIGQDSAAVYLSFIGDPQRFQTARRLRGWSGMVPNSKQSAHTEAKGLHITQAGPALIKKYLYLDAEIARQWDPQLAALYYDQMVNKGKHHLQAICTCATHLLDRIRIVLRDDRPYELRDVQGQPVTVAEARAIIMERYTVPEEVRQRTNKRTRHERAANLIEKQHARQTKKETSPKIG

SEQ ID NO: 127081 - protein, 371 aa, unidentified
MEHIRFVGLDIHKERISIAVAESGRSGAVEYLGEISNDPVAIGKLCDRLERRGNALAFCYEAGPCGYGVHRQLTSLGHRCDVVAPSLIPHKSGDRVKTNRRDATMLARLHRAGELTPVWVPDADHEAMRDLIRLRSVVRQIVTRTRQHLQGFLLRHGRKHGRGTAWRMAYRRWLSSLAFGHPAQQIAFQDYTDAVMDAERRLKRVEEQISGLLPEWNLRPVVDALQAMRGIALINAVVLVAEVGDFTRFSNPRQLMAYFGLVPGERSSGETIRRGGITKTGNTHARRALVEGAWAYRMKARIGRHKVDRIEALPKIIRDIGWKAQVRLCTRYRRLRARGKTANVVNVAIAREMVGFIWSIACTVQSTPKTA

SEQ ID NO: 127082 - protein, 382 aa, unidentified
MESLVYVGMDVHKDTYSLCCYAPSEGSFFAEARIDADARLVRKYLEEVGKARPGSRFATCYEAGCLGFSLYKELTKLGIDCKIVAPTTLAKEPGSSAKKTDRKDARMLARNLAFGLCRFVHIPDEIDLETREFVRMRMAHKKALKKVKQQILAFCLRLGKKYGEGGRGKQYWTAAHLDWLKKLGLSPAMREILDEYLDTYDKYAAKLERLDGRLLERSDSERYKEATDRLNCLKGVTKQGALTIVSEIGDFSRFATPNELCSYLGLTPGQNSSGQSVNYLGITKQGNSIVRWQLVESAQSIVRGTPGKKSKRTLAKQSGMPARVVSYCDRAAERMMRKFNRLVLSGKERNKAVTAIARELACFIWGLMTDNLDGRRQSAPSK

SEQ ID NO: 127083 - protein, 347 aa, unidentified
MQEMKLFAGLDMHTESITGTIKDEAGNPVRVLKVETSQEGVKQLFDRLQKKHITAVFEASRNWPRYAELINPYCAKIVMAHPLKVRAIASARIKTDAIDSNVLADLLRANLIPESYMPSLEIVELRELLRYRAGLSRMRGELKTKAKNILSREGKKCEFDEVTGKRARLWLRNLMLNELNRKELDYTVALIDNLTAEINKFDAEIEREQYKYPESDILKSVVGISTFSALMILAEMADIGRFPSPDKLASYAGLVPSTYQSSQTQYSGRITKRGNAHLRWILTQCTHASIKSRYSHKLKTFYLRIERKKGKQKAVIATARKMLTTIWHLLNKNEYYAYRDIPSKNGL

SEQ ID NO: 127084 - protein, 358 aa, unidentified
MYIGVDTHKKTHLLVAIDAQGQMHATQTVANTPQGWVTALEWAGDYRDACRWGIENSGSLGKGFAQFLLADGETDVREVSPQRTAQYRRRGRTQDKTDAADALAIARLISAEGEQLPLVQADDLSTELRLLSDHRDNLVAERTRLINQLHAQMLQIDPCYRERSGVLTTATGVRYCHALVLPHADGVLRTRLLIVHQLAGQILGLREEIETIETALRQRVQETGTLLLQLCGVGTLVAARLIGELGCTPRIHSAAALAALAGIAPVEVSSGGRHGHRLNRGGNRQLNKAFHVIALSQLRREPLAQAYYAKKRAEGKTARAAMRCLKRRLVDVLYRLLPKSEDGNRLREGQELPIEAAA

SEQ ID NO: 127085 - protein, 311 aa, unidentified
MMNDSIGVDISKDHLDVHRLSDGVSRRFANDSRGHRTLIGWLERPELRIVYEPTGPYHRALEHRLAEAGFALVKVNPRQARRFAEATGRLAKTDRLDAAMLARMGVLLELEARPARGPTLNDLKDLRMAREALVKNRTAARNRAKNLTLPILKRHNAEQLRQIERQIAALENEIMALIKVDPDLARRFDILVSIPGVSAITAFALLIDMPELGTLDQAQVASLAGLAPVARQSGQWIGRAFIRGGRANVRRALYMPALVAIRFNPDLKAKYDRLKAAGKASKLAITAVMRKLIIIANALLRDGRIWEPTRT

SEQ ID NO: 127086 - protein, 389 aa, unidentified
MSGEADFTVKAEPEDFKNTLFLAMELSRATWLVATFAPRLGDKINVHAIPGGNTKRLLELIGRLQAKLRDKGVSRVRTVCCYEAGYDGFWLHRVLVNHGVENHVLDAASLPIDRRAKHIKTDNIDAKRLLRAIVGFVQGDPQSCRVVRAPTPEEEDARRLHRERQRLVRERTGHLNRIKALLITHGIRALRITDAKWCERLDKMQTGDGRPIPARLKIEIEREWKRLKVVAEQVREVEAERDRLVKGSEPSGDGCTEKMRRLVKLHGIGAEFATVLTREVFYRPFQNRRQVASYVGLTPAPYDSGDTKHDQGINKAGNTRARVIAVQMAWLWLRYQSKSELSLWYYSRVGDLKGRVRRIMIIALARKLVIALWRYVETGKVPTGAIVTA

SEQ ID NO: 127087 - protein, 414 aa, unidentified
MPEWKNLTHYAGFDWARDHHAVIIVNGHGEIVADFEFQHSLEGWTSFRQQTAAWPALAVAIETSQGAAVDQLLQHGCAVYPVHPVAAHSYRQRKAPSGTKTDHLDAWTLADALRVDGHGWKQLQPMDPLTQQLRLLCLDEVSLIEQRTLLVNKLQQALVEYYPAALEAFDDWTCEHTWDFIIEFPTPHALVKAGKRRWHKFLHTHKLWRPQTVEKRLAVFARADQFQASEPITQAKSRLALSLCKLLRTLAQQLEHYRKEIEKLFQEHPDHDLFGSLPGAKKILAPRLLASIGTDPERYGNHNVLQCFAGTAPVQYQSGQIRKARARWACDKFLRHTIHLWANCFRKATVWGQTYYQTKRQRGMSHACALRCLGQRLLKIVFKMLTDKKPYNPELHAHNQHKHGSWVLQMPACE

SEQ ID NO: 127088 - protein, 410 aa, unidentified
MERVIERGAGLDVHKKSVTACVRVPGPEGGRRQEVQTFGTTAAALLALRDWLSAHGVTHVAMESTGVYWKPVYYVLEEWFTCLLVNAAHVSKVPGRKTDVRDCEWLAQLLEHGLLRGSFVPPVPIRELRDLTRYRAVLVQDRTREANRLHKVLTDAGIQLASVASNVLGKSGRAMLTALVAGTTDPEVLADLALGKLRRKLPALQEALVGRFRKHHALLVSQVLAHLDYLDEALEELTAQIEQALAPFASEAARLDAIPGVGPRTAEILIAELGVDMQQFPTARHVASWAGLCPGTHESAGKRRAVRTRKGNRWVRAALIEAALAAVNVRDSALAARYRRLVRRCGHKKAVVAVAHKMLTTAYLLLADGRTYQEPGAGYYDARRKDRDVRRALQALERHGYRVTLEPAAA

SEQ ID NO: 127089 - protein, 352 aa, unidentified
MNQLKYIGMDVHKAMTVISVLNSEGKELAQAIIETKSTTIIDFIHGQRGTLHVTFEEGAQAAWLYDLIRPHVASVLVCDPRKIVTQGNKADKIDARRLAELLRTKGLTAVYHGEQSTRAVKELTRSYQEMIEDSTRVKNRLKALFRARGIDCSGSTVYGADERKNWTAKLEHAAVRARAGRLWEELDALEKLCEQAEDDLKTEARKHAAIKILQGIPGIGPIRAAVILGIAGTPHRFRSKRQFWTYCGLAVISKITSEYQLIDGRISRSKKQPLVRGLNRNYSRALKEAFKGAAKTAAAGAWKSYFDAMVANGQDPPLALLTIARKIASITLALWKRGERYDQKKVEILHAA

SEQ ID NO: 127090 - protein, 491 aa, unidentified
MKSIFQRANPAILELFEKAGSPEKVLCVPIDYAKREHTALACNGAGLQLRGPFTLHNTPAGVDFLEKVVAGLCRKHAIRREHVFFGGEDGASFTFNFAHALVQKGWLGIGIHARDAARERQNLVASTDNLDLLGIAAVLINKKWGRTLASECSPARVLRNLVHHRASLVRARSASAQRLHHLADQLLPGFLDEKQSGLTPFTKPSLWVMSRGLAPRRILARKLESLTAGLERFMVRQPAEKARKLKELARAVLPPPAGLCDTLQANLDHEVTVYAHLDTCIHAAEQDIARRLAATPGAMLTTVPGIALTLAAALFVEIGDPARDRGLGRLVSYAGIVARLKQSGGPDQEARTHGRSRRACVPLKRCVMDIALKMGQYGHPELKADFERRVNAHQDPRLTLGRRMLRICRHLIRHQDFFLPPSVREATDPDVRREYILRAWDKMLIKWRDTGAIREAFADGAPLEGWRITLNEIYGLNLSKTSPYTGRTEIP

SEQ ID NO: 127091 - protein, 311 aa, unidentified
MNDTIGVDISKDALDTYWLSKRKHKQFANNKMGLRALIRWVRQAKVSLVVFEATGVYHRLLETSLAAHDLPFARVNPRQARRFAEGTGTLAKTDRVDAAMLARMGSLLELKADKPKSETLHNLKGMETARQALIKDRTAARARLNTATYPLLRKQATLRLRQIERDITQIDAAIEAIIAADKALSQKADILISIPGIAKITAYAMLTEMPELGTLSGKQAASLAGLAPISRQSGKWQGKERIQGGRACLRRAIYLPAVVATRFNPDMKAKYHELIANGKCKKLAITAVMRKLVVMANALLRDGRKWTETRT

SEQ ID NO: 127092 - protein, 414 aa, unidentified
MFAVGVDVSNGRSTVAVLGAQRKIVMKPFEVPHTADGFASLSEKLRGLNGEARIVMEHTGRYYEPFAMSMYRAVFFVSAVNPLVIKDYREGVDVRKVKTDRADALKIAQFALDKWEILPQYTPMDTIRYDLKTLHRQFQLSGKTRTALNNNLIALLEQSYPGANRYFDSPVRPDGSQKWIDFVDTFWHVDCVAGVSRSAFVERYRKWCKRHGYNFSERKAVELHVDARQKFPLVPKSDTCKLLVKEAVSQLRTVSRTIETYRAEMNRLAAQLPEYETVMAMTGVGKSMGPQLIAEIGDLRRFAHQKSLVGFAGTDPIKDDSGDKVSDSKPSSKRGSPYLRKTLFVVMTILLQLQLQDDPVYQFLDKKRSEGKKYYVYMTAGMTKFLRIYYGRVRDCLKARGLWEQPMLESGSSD

SEQ ID NO: 127093 - protein, 428 aa, unidentified
MEVIYPKAYGVDVHKSFIVAVICDSTSITPKYSRKRFSTYSNSLIEFKNWLIENDCQNVCMESTGKYYVPVYNALEGFISNVVVANPKWVKAIKGEKDDNKDAKWIADLFKMGLVRSSYIPSKDFRVLREFTRYRYKLTNTKSSEKNRFTNALTVGNCKLDMVFSDIFGKSSQSIIDTILNNDNFSDEDIISCLRKNCKSSTEDILSSVNGIQLTNEQKLRINIVKDHIDYLNNQIIKLNDIIDILVEPYKSYIDLLYTIPGIDRNSAIGILSEISNDMSQFKSHYRLTSWAGLAPGCNESAGKKKSVKISRAGVYLKPYLVEVAHCAVKDKSNSYYAKKFEKISKRRGKKRAYIAIARKILVAIYHMFETGEAWNPTDLASVETPIEDRIKYTKNNFNQSFKQLLSLGLTSEELIELINQNANKLLV

SEQ ID NO: 127094 - protein, 408 aa, unidentified
MQVEHPVCCGIDVHKDTLTACLRRVEDNGQVHKEGREFATTYTSLLALSDWLVEQHCPVVAMESTGVYWKPVYHVLAGTVEVFIGNAHELRSRPGKKTDKRDAAWIAELLAHGLIRPSFVPPPESCALRDVTRTRVALVQTRSQSKNRVHKLLEDTHLKLGSVVSDLFGVTGRRMLAALVAGERDPQVLASLALGSLKHKRPQLELALTGQFTAHHGTLLGLLLELIEMLDRQIATLDQQIGALVAPLQAPIAQLDSIPGVDIIAARDILAEIGTDMSRFGDAARLASWAGVCPGNHESAGKRYRGKTRKGNRYLRRILVQCAWGARKTPTFLGRTFRRLEVRIGKKKAALALAHKILVIVYHLLAAGTCYEEARYDQYNPRQEARERQRAIKALERLGYTVTVARAA

SEQ ID NO: 127095 - protein, 410 aa, unidentified
MRIIALDVHRRFAQVAVLEDGKIRNAGRIDLEHSRLLQFAKTLKPDDEIIIEATGNTNVIVRLLSPFVGRVVIANPILVRAIAWAKVKTDKIDAAVLAKLHASGFLPEVWMPDEETETRRRVVAERAQLVSQITRLKNRIQSVLHANLIPPYKGILFSQCGRTWLTAQPLPEDQRRVILRHAGELDRLGAELAEVDKSLAQRALEEPRVKRLMTITGVNVTVAMSVLAAIGDIRRFSSQEKLVSYFGLNPRVRQSGDKPAYHGRITKQGRAHARSMLVEAAWVVSGAPGPLRAFFIRIRDKRGKHVAAVATARKLAVVVWHMLTKDEDFTWSRPALLQWKLRKLELKAGHPSRRGGHQKGSAAAYSNKSVRDSEREATGNAEEEYRRFVANWKQQSPKGRSGATNEVRRS

SEQ ID NO: 127096 - protein, 328 aa, unidentified
MKSIGIDVAKNSFVVAYPFKNGFDIFEFNNNSKGIKKFIDTLDAKDSHCILEATGTYSSLIVYMLCSVSIPVSVVNPKQIKHFAKMMLSVTKTDKLDAKLICMYGQKMNPPLYKVPSVAIQTLRQQRTLLRQLKKQLHMLKNVQESFNALPLKDSKSSRIMLKTMVFLEKQINELETEMGEITKKEFKAQFESLSSIKGIGPVIATSLIMSTGGFTLFSSAKKYAKYIGVCPSYQQSGTSLRTRGVINRNGDSELRSMLYVASWSAIRFNSACKQLYERLKASGKPSKVALVAVINKLLRQAFAVVLKEEQYFDNYSSIYPKNILNLT

SEQ ID NO: 127097 - protein, 408 aa, unidentified
MRLFVGDDWAEDHHDVELMDVSGRRLAKARLPEGVAGMARLHAMVGGQLGETPDEDAEVVVGIETDRGPWVAALVAAGYTVMAVNPLQAAEFRRRLGVSGAKSDAGDAHVLADMVRTHSHELRPVAGDSARAEAVKVVARTHKTMIWERTRHAQRLRHALRDYFPAALEAFEDLDAADALELLAKAPTPAQAARLTTAQISAALKRARRRDVAGKAAAIQTALRAEHLGQPDVVATAYAASVQALIAVLTVLNTQITALQGQVKTHFGQHPAAEIICSQPGLGAVLGARVLAEFGDDPHRYATAKARKNYAGTSPVTRASGKKKVALARFIHNDRLIDALMAQAFAALKTSPGARAYYDRQRARGSGHNPALRQLANRLVGILHGCLKTSTPYDETIAWSHHAENVAA

SEQ ID NO: 127098 - protein, 348 aa, unidentified
MDYYVGIDVSVKDSSVCVVDGKGKTVKEAKVASEPEALAEFFAGLGLPLTLVGLEAGPLSQWLHAGLEEAGIEVVLMETRKVQAALSAMPVKTDRNDARGIAQLLRTGFFTEVYRKSDESQEARALLTARKLLVNSLIDVEQSIRGILRGFGLKVGPTTKPTFEARIHDLAEGRDALAGAIDPLLIARRAIREQLAVLDKRARVLARQDEICQRLMTAPGVGALTALTFKTGVDDPARFGHSRAVGAHFGLTPRRYQSGETDIVGSITKCGDAAVRSALYEAALSILTKVQKHSVLQAWGLHVAKRRGMKRAIVAVARKLGTILHRMWTDGTDFFWSRAEMSELAATA

SEQ ID NO: 127099 - protein, 429 aa, unidentified
MTRISVGVDVSKNRSTVCIMDQDGKFIMRPFLVWHSTEELDFLADTLKRLNGEVRVIMESTSIYQYPIALHLKEKGIFISIVNAYKVKKFANTDFRGGKTDKKDSRTIASYGISYWDKLVEWQIPKDTYFNLDLLNRTYMNAKKHRQIILQELQHYIDCAMPGMDKELHSLNLNTKKDFMLDFVEKFWHRDEIVNMTEAEFTEVFTAWAKKKGYRPVEGKAAKIYAIAKSCIPYYPANPTVKTILQCIVDKLSGVNRTLVTIVTQMIEEAKKLPEYQIVREMPGVGDPLAARFFGSAGDIRRFKNSKALVAYAGIDSPPDESGDFSSTHRHITKKGSKVFRDTGYEIMMALRAQKRTWEKVRKNPEVYDYMLRKEAEGKPRKVAKIAALNKFLRIVYARIKELYDNMALAERAKTKTKSKTKAKTKATA

SEQ ID NO: 127100 - protein, 389 aa, unidentified
MPNVADQAEAPTTIRTDLAAIFISLELSRSIWLITSVSPGSGEKMSKHSVRAGDVAALLARFSELKHKARSRTGKSFAIVAIQEAGLDGFWLHRALEQEGIESHVVDPASIATSRRRRRAKTDRIDGEALLRALLAYKRGEPRVCTMVRAPTPEDEDRRRLSRERKTLVAERVEHVNRIKGLLFSQGISSYEPLRRDRRQRLEDLRTGDGRSLPTHLKTQISRELDRLELLLDQIKLAEAERDALLAEDQAAAPEPPGRMLLEFKGIGAEFATTLWLEGLFRRFDNRRQLASYAGLAPTPWQSGSVDREQGVSKAGNPRLRATLIELAWLWLRHQPQSALALWFKERVKRNGGRMKKTIIVALARKLLVALWKYVTAGVLVEGAVMKVA

SEQ ID NO: 127101 - protein, 357 aa, unidentified
MESLKQIRRFKYFMGIDQHKRYSHITVIDEVGDVVEERKVYHQDREAMLNYFKSFNPHQTKVVLEATGNWYWLADLLESANLPHILAHPYKTRIIAESKIKTDSISSFILAQLLRAGLIPQSYLASKKTRSLRELLRYRISLVKVRSSLKCRIHSILDREGIDTPKLSDLFGRKGLIWLKSLTLAYPLSRSLEGYLNLIERLNSLIDETEKSIKLTIKETPLAQLLLTIPGIGFFTAYLILCEVVDINRFLTPKKLSSYIGIVPSIHQSGNFSHTGKITKQGNKYLRWALIEASQKAIIKDPYLKAIYDKITYKKGKQKAKVAVANKLAHIIWGVLKYREPYRPKKRLIYSCPGQAR

SEQ ID NO: 127102 - protein, 358 aa, unidentified
MTTTTTSMTESARARRVIVGVDTHKDIHVAVAIDEHGAQLGSGSFTADRAGYTALISWATSWGVEVVFGVEGTGSYGAGLASAIRRSGIGVLEVLRTDRRDRRLRGKSDALDAENAARSVLAGSVHAIPKSADGVVEMIRVTKVAKDNAVKARTSAMISLKQVLVNADDELRQSFKGLPKMTLIRRAAALRPGPIDNVTAATKQAIRAIAARWLALDEEIKGHDLLLTRLTTSIAPDMVAGFGIGPDVAAELLIVLGDNPARIHSEAAFARLCGTNPIPASSGKTTRYRLNRGGHRQANSALYRTVVVRMQYHEPTKAYVQRRTEEGKTKPEIIRCLKRLLAREIWARTRDFRAQSGT

SEQ ID NO: 127103 - protein, 343 aa, unidentified
MEIIRIGLDLAKSVFEVCGVDMRDHVVLRKTLRREAVPQFFAELPPCLIGMEACSSSHYWAKVLTDLGHQVRLIAPQFVTPYVKSNKNDRNDAEAICEAISRPSMRFVPPKSSEQLEIQAVHRIRQRLVSSRTRLVNQIRGLLAEHGVVIGRDISRLRRALSQIVEGADGNLGDLIQELASDIHQELAALDERISSYDRRIRNLFRTNEMCQRIGKIEGIGPITATALVAAVGDQSCFENGRQFAAWLGLVPKQRSSGGKSRLFGISKRGDRYLRTLLIHGARAVLGKAGGKQDARSVWINRMRERRHPNVVAVALANKNARIVWSILSKNEDYRGPETPQAA

SEQ ID NO: 127104 - protein, 447 aa, unidentified
MAQRKRPTTQSAITLTHPNAAGIDIGSAAHFVAVPPDRDDEPVREFQSFTADLHRLADWLDACGVDSVAMESTGVYWIPLYELLESRGFTVLLVNARHVKNVSGRKSDVLDCQWLQQLMSFGLLHGAFRPAEQVCVLRSLTRQRTMLLRNQGRLVQHMQKALTQMNIQLANVISDVAGETGQRILRAIVAGERDGQALAQLRNARIRASEDEIAKSLQGSWRAEHLFALKQALDAFDFCGTQLAECDAQIQAQLQALHVREDAPAAGKKRGRARNAPKFDLRTQLFQMCGVDLTRIDGIDVTTALVVVSEVGADMGKFPSDKHFASWLGLCPGTKITGGKLMSGKTKRCANRAAQALRLAAAALRSSQSALGAYYRRLCARMDKPKAVTAAAHKLARLIYAMLTHGQEYTDQGQDYFEERYRQRVLHTLAQKAKAMGMQLVSADNPA

SEQ ID NO: 127105 - protein, 347 aa, unidentified
MTIVGGFDVHRAQITFDYLDTDTGEVTRGQIQPATRSVLRGWFGRFAGRDDVAFAVEGCTGWRFVVEEMVAAGVRPHLAEPADTATQRGRKKRAKTDRADARLQRELLCQGRLPESWIAPPHVLEVRTLVRLYVALMGERRTWQQRIQAQLFHQGVPALRGLLTQEGRATLSSAALSPAGRQMVDTALAVIDELGERVLPLRAQLQAIGRRQAGARSLTAHYGIGALCAAIIWAELGDPRRFSSSDQAVRFAGLDVTVWSSDGKRAAGHLARQGSAVLRWALFEAAQSAARASSPDHDYYIRLADRLGGKRPALSVARKLIRRCYHTLRELGEEAWSTTGSTLQEAA

SEQ ID NO: 127106 - protein, 337 aa, unidentified
MSLYCAIDLHSTNNVPAIIDDDDRILFQKRLPNDLSTVISALKPFKHDLYGVAVESTFNWYWLVDGLADNGFDTLLVNPSAVKQYEGIKHTNDESDAFHLAHLMRLGILPTGYIYPKTERAVRDLLRKRLQLVRHRVTHMLSAQNQIWRSTGLNVSSKPFKQADFSLLNLVNDNHIRMAVKSNLTIIQALNQLIDELECTVLQQIKLKPEFLALLTIDGIGKILGMTIMLETGDIRRFASVGNFSSYARCVDSSRTSNGKKKGSNNRKNGNKYLSWAFVEAAHCIIRHNKTAHKFYQRKRSQKNGALATKALAHKLARAAYHVMRNQAPFQLERLFR

SEQ ID NO: 127107 - protein, 308 aa, unidentified
MIAQNYVGCDISKQWLDFFDETSGRLRRIDNQADAIAAYVAGLDPSRDFVVMEATGVHDRLLRHALAKAGVPFSRHNPAHTHHYAKSTRRRAKTDPLDARMLSDYGRRYNPEAEPAPREEVERLQSLARYRDQLVEMRATAKKHLAEAFNEIVIADLEETIAYLDTRIKAIEGQIAEAIRQAEDTARDYSLMVSVPGVSKVGAFSLLALLPELGQRSPKAIAALVGLAPFDNKSGKLNRRSQIQGGRSRVRRALYMAALTAIRTCERFKTFYSALAARSGSKKLAIIAVARKLLVVLNAIIRDKTAFA

SEQ ID NO: 127108 - protein, 321 aa, unidentified
MRTDRTFTTGSEEAVLAVSLELAAASWKVALHDGRREQPAVHTVAQPQAAARLQAVLELIEAHRDKWSLPAGVRIVVCYEAGQDAFWICRALQAQHIECYVVDPASIPVQRHRRRAKTDRLDAISLVINLRAWLRGERDRMRVVHVPSPQDEASRQLMRDRGQLQKEVLQHRDRMRKLLTTLGCWDEVGHQAFAGRLARDEVRCHDGAPLPPELRERLLRECERLALAEQQLAALEKTRQASVPAPARRRSDALARLKGIGEVGASRLALELFWREFSNRRQVGACVGLVPQPYDSGESHTDQGISRQGNRISKDFPDLVA

SEQ ID NO: 127109 - protein, 338 aa, unidentified
MFFGGIDLHSNNNRLGIIDELGKKLYERKIPNDLIMVRKALDPFRAELQGIVVESTYNWYWLVDGLQASGYRVHLANTTASQQYSGLKHTDDGSDAFWLADLLRLGLLKEGYISPPGERAVRDLLRKRGQLVQQRSRNILSIENLTSRNCGVALNSQGVKQLTAEEVRKTYRDENVALAVTSTLCVLECLNRQVDIVERRVKEQVKLSESYQLLNTVPGIGEILAMTVMLETGDIRRFPAVGDFSSYCRCVDSIRLSNGKKKGRGNRKNGNKYLGWAFIEAANYAIRYYPEVQRFYHRKKARSKSVVARKAVAHKLARGSYYVLRDQMPFDIAKCFGP

SEQ ID NO: 127110 - protein, 415 aa, unidentified
MGKIIERCAGIDVGKRFLLCCALTGAAHEEPHSKTLRFDTTVLALESLHKWLREEGVTHVVMESTGSYWIPIFNILEGEFVVVLANPEEVKNRKGHKTDRKDAEHLADLLRHSHVRASYIPTKQIRDLRNLTRRRVQLMEDATRERNRVQKLLEQTNVKIASVLSDIFGVSGQRMLLALLEGQSTPEEMAGLARGTAHRKIPQLIEAMQGHRMTDHERFLIRSSLRHLGCLEEELEILDTEILNRMRTIPFQHAFTLLQTMPGVGELAAAAILAETGIDIAPFPTAEQMSSWAGLCPGKRESAGIQKGSHTTHGNAYLRTALVQCAWAATRKRGSVFQARFQRIAPRRGPKRAIVAVAHQMLIILHSMLTARVPFRAAEGEHRQRRRLRRAHHHLRCLRHLGLEVQIANPDGLMP

SEQ ID NO: 127111 - protein, 312 aa, unidentified
MMASLDVFVGIDVSKDRLDVHVRPLGVGFSVSNETTGHAALIARLRPLRAKRIVLEATGGYERALWLALSEAGLVAAVVNPRQVREFARAAGRLAKTDRLDAAVIAHFAETFVPRPGKPDAVADRLGEHVRYRRSLQEEIVALEHQRRRLETPALRERAERRHAALRAEVKEIEREMRAIVDGDPGKKALFACLTALKGVGLVLACTLIANMRELGTLTRHQAAALIGVAPLNHDSGVRRGYRAIAGGRRRVRNVLYVATLSAVRSNPVIREFYRRLSADGKPAKVALVACMRKMLVMLNGRVRDHLATTTA

SEQ ID NO: 127112 - protein, 340 aa, unidentified
MNIVFLGIDLAKNVFQICGLNQAGKPVYTKRTGRKELLQTLANIPACLIGIEASTGAFYWQREFEKLGHKVKVISPQYVKPFVRGQKNDGNDAQAIAVALMQPTMQFVPPKSPEQQDIQALHRARQRIVNHRTATVCQIRGLLLDRGIPIGSAVSRARRAIPLILEDAENGLSSRMRRTIAELYDLFNDLGRRIHFFDKEIETVFRQSEACPRIAKVKGIGPETATAVVAAIGKGTEFKNGRHFAAWLGLVPRQHSSGDRQVLMNMTKKGDKHLRTLFIHGARAVVRVATNNNDGHMNQWVNQLKERRGFNKTTVAVANKNARIIWSMLRNDTGYQVVCN

SEQ ID NO: 127113 - protein, 409 aa, unidentified
MKLFVGIDVSSKDLVTSIISEEKHEVVFRGNFVNDLKGATELKKQIINTANSNQIDQVIIGMEATSIYSFHPAMFFQEDIDLKAFNTQSVVVDPKKTKRFHDVFAEDKNDQIDAYYIADYLRVGHYSIGIVRQENYIALQRLTRSRYEIVQSLVRVKQHFIENLYYKLNKLVISDELNTSIFGSTMMQLLTEDLTTDDLLNISINDLTDYLAEYGRGRFADPEALAKTIQKAVRSSYRLDKVVANSVDAVLSVYAAEIKTFQKMIKDLDKSIEKVVKVTDDEQILRSIPGIGPVYAAGILAEIGQIDRFDNEAKLAKYAGLSWREKQSESYTSDNTPLKRTGNTYLRYYLVEAANLVRTHDPVFGEYYQRKYKEVKHTPSKRALVLTARKLIRVIYFLLKNHQIYQEKR

SEQ ID NO: 127114 - protein, 441 aa, unidentified
MAKLPILDPRAAFVDVGSEQMHVSIAGGTPKVFGTVTSQLHALRQWLIEQEVTSVAMEATGVYWLPLYSELERAGLKVIMVNGRQTRNLPGRKSDMMDCQWGATLHAHGLLRPGFVPPAHIRQLQDYMRLREDHIRSAASHVQHMQQALERMNIKLHDTISSLTGVSGLAVVRAILEGQRDPHELLALCDVQIRRKKAERVIESLRGTWTDEHLFALSQALQSWEHYQRQIAQCDQRIELLLEQAAPGGGADDAQARPRGPRKGCSENAPKIPGLRDKVAAMCGGKDLSVLPGFTEYSVLRIISEVGTDLSKWGLDKRFASWTGLASGSDQSGKRRRSTGRKRNRVGRMFCVMARSLARSKDSALGGFYRRLAARRGALVANIALARKLAVLFWRMMVKGTAFVEMGLAAYEAKVLKGKQRAVNRLAKELGLQVTAIPTAA

SEQ ID NO: 127115 - protein, 324 aa, unidentified
MAEMFAPVLGIDVSKKTLDVTLLTKKGGKKRKRVGNNATGIATLIEWLSQQSPGDVHICMESTSVYWEAVAEALHEVGYRVSVVNPMRIKGYALSQLRRNKTDPLDGDVIADFCRTQTPEVWTPPTAEEQKLRALVRHWEALKKSRTQQLNRLGTCRDEDVKRSLETVLATIHVEIEATIKRIEELIDQHPDLKGKKQLLTSIPGIGDTTAIHILAEMYDLSEYKDAKAAAADAGVTTSHYQSGTSVRRRPKISRMGKAAVRSALYFPAITAINHNPVVQQMATRLANRGKHKAVIRVAAMRKLLHLAYGVLKNQQPFDPAYCG

SEQ ID NO: 127116 - protein, 368 aa, unidentified
MKGCYCGLDLHSNNTFIGISDEDGKRVFQKRSPNDISGILEYLRPFKESISGVVVESTFNWYWLVDGLVEAGYKVHLAHPPAIVQYMGLKNQDDKHSAFHLAKLLSLGILPEGYIFPKEERHLRDFLRKRLMMVQNSTKYILNFKSLMNRNFSVSISSNEIKKLKPDQLKEEFFKDYHLLLSARSSISAINYFHDEIKSIEKEILKEATLKDEFQILLTAPGIGKILALTIALETGNIKRFSKVGNYASYCRSVSSIRSSNSKKKGTGNKKNGNKYLSWAYLEGAHKLRRYCLEAKAFYEKKKVKTNNVVAIKALAHKLSRACYYMMKDNIAFDVEKIFGKPIKVGGGSKSTGGLAKKPNAPIDNTAA

SEQ ID NO: 127117 - protein, 478 aa, unidentified
MKAKSSSPSRRVVKAIRPAKQLPVLHPHAAGIDVGATEHSVCVPEDAVPVGESSVRQYRAFTGQLDQLVEWLQACGVQTVAMESTGVYWIPLYQKLERAGLEVVLVNARHLKRVPGRKTDVLDCQWLQQMHSYGLLSGSFRPADDICVLRTYLRHRSNLVAGCSQQVQHMQRALDQMNLHLHHVVSDLDGDTGLAILDAILGGERDPKELVQLRDVRCRKSTVAEMEAALKGDWREEHLFVLKQAREGYRALQGQIVECDGAIEKVLERVAVNPAAVPEAQRPKNPVAAPPEAGAKEKRRKRSRGNAPQQDLTTPLQRICGVDLTRVVGLNVLSVLMIISEIGVDMSRWPNAKAFCAWLGLCPGNKISGGKVLSSRTARVVNRVAILLRTLAPTLGRTDTWLGVFHRRMKARLGPAAANTATAHKLATILYHLLKYKEEYIDVDRVVYEEKFRRYRLSRLRKQAAELGYEMVELKEAA

SEQ ID NO: 127118 - protein, 419 aa, unidentified
MNEQGEIGLWIGMDWADQKHQYALRESDSSRVEEGEIAQKPEALREWLNRLRERAGGRWVAIAVEQSRGALIYALMDYDFVLIYPINPKSLANYRKVFYPSGGKDDPRDADLALDYLFKHRDRLRLWKPESPEIRCLRLLTEERRKWVDLSTELTNQLTSNLKTYYPQALEWAGLLKDDTACDFLERWPTLAELQKAGTGTIRRFFRAHGARRQNLEEQLGQVPGAQPLTRDSAVLTAGAMLTVSLVQQIRPLNRSIERFDRKIAELFKNHPDHFIFTGIPGCGPALGPRLLTLFGDDRDRFDSAEQVQIVTGIAPLIESSGKKTKQSPGVVHFRWACPKFVRQSVHEFAVHSLSRCPWARAYYKMQLSRGKTHHMAARALGFKWLRILFVCWRDGVAYDDGRYMESLKANNSPLLAFL

SEQ ID NO: 127119 - protein, 363 aa, unidentified
MRRTDHRAAYPRSAVHAHDTALFVALELSRSTWLIGSSTPGSDRISKHQVPAADTTALLALLKRLKARAERSCGTTVRVISIHEAGLDGFWVHRFLEANGIESHVVDAASIAVNRRSRRAKTDRIDVEKLLDTLMEWARGGRRACSMVRPPSSAEEDERRLTREREALVIERTRHVNRIKGLLATQGVFGFEPMRKSHRRQLEHLHAWDGQTLPPRLKAELARELNRLELVISQVAAVEGERDRALKAQQHPAPSISAPEATASASAQPTATEHAGRLLLRLRSIGPEFASVLSSEAFYRNFSNRREVAGYAGLVPSPWKSGGIDVEQGISKAGNARLRKTMIQMAWLWLRHQPGQHSQSMVP

SEQ ID NO: 127120 - protein, 346 aa, unidentified
MAYYVGLDVSVKETSICIMDDKGVVAARTDISTDPDLIAGFIFRHAPKVERVVHESGILAIWLTRELEKRGVPIICIDARLAHKALSGRINKSDQGDAEGLAQLARTGWFTQVHIRSEASERVRVLIGARERLIRMRKDLEGHVRGVLKVFGICMKSVGTGKLRRDFRDQLAAAADADPAIEMMSETFIPLHKTLCIARDALDDEVRMMARESDLARRLMTVPGVGPIVALAYIATLDDEKRFRKSVDVGAFLGLTPKRHQSGEVDWSGKISKCGDCDMRRLLYSAASTLISCTRKPSRLKDWATKLAERKGHKKAAVAASRKIAVILHCLWRNETVFEPGMEGAS

SEQ ID NO: 127121 - protein, 401 aa, unidentified
MFYIGIDIGKRNHEVGLIDAKGNPIGKTLRFTNSKAGSVNLLDFFNQNGLTSDNAVIGLEATGHYWLPIFSFLNKLGFKITVFNPLQSDALRNFYIRKTKTDTKDAYLIAQVIRIDSPDETPFIEEDLLRLKHLERLRCSMVNQSSDLKRKVISLLDQVFPEYETIFSDIFGKSSTELLLYSPLPEDLIEIESEKLASFLNQASSGRFGESKALSKANKLRDCALNTFGIDIATDVYKLQIKLLLEQINLLEQHLEKIEFQMIEISNRQEHYLTTITGISDVTACVILGEIGSIKRFERPEQLVAYAGLDPSVHQSGDFNGSKTRISKRGSPYLRRAIWQAAFVASFHDPALSLHYQKLRKRGKSHGTAICAVARKLLHIIFAILRDNKPYHPKFNTNIPN

SEQ ID NO: 127122 - protein, 412 aa, unidentified
MNPVVGLDVSKGESQVQAFLDKGKPYRKSFSIKHTLDGLDRLLEFLREIEKLADGKQPSVILESTGQYHMPVIQFLEEQQYVYIIVNPLISHRARSTNLRKVKTDAIDAYQLCELYYKEELEPYKKRGIHLLNLRNLTRQQETVSSTAVQTKLQLQSILDQIFPEYRGVFGDLYSKISLQILSIFPTSKEVLSVSESDLTNKIAELCTTRSEKWAKEKAIKLREAALRNPFQNNLYLSHIFNLRMFINIVLQYQEHLSKLAAEIDALAKEIEEYEIIQSIPGVGEKIAATIISEIGEIERFNHPKKLVAFAGIDPSVYSSGRFTASINRITKRGSSRLRQALFMAVQCGIRDARKQKTSEEIIPRNKKLRKFYDKKREEGKPFRVAIIACANKLLHWIYALLKRKEAFQNAV

SEQ ID NO: 127123 - protein, 391 aa, unidentified
MRYFGIDIGSDEHVVAAVDSDSAVAAKPFKINESADGYARLLAVLGAAPVALVAFEATGHYWRNLFAALTARGYAVALLNPLQTHHFAKEELSRTKTDAIDALGIARFAAQKHPVVTRLAEGATDELRELVRHRDRLVADFGDRVRQLHRLVDLGFPEFTRHVKGLDSMLASALLAEYPNAQAFAGAAPRRVAKLVYDGVHKVGNELAQALIASAKVSVGAHHGPAYRIQVRHTCQDLDTLRRRIKELDGDISTLLDDHEVGSLLTTIDGIGPTTAARVIAELGDINRFANAAALAAYVGVVPGLKQSGKRQSPRAGLSPIGHARLRTALWMPLLTAVRRNAWLKAFYDRLVGRGKPPKVALIAAMRKLLAAIYAVARDRKPFVPRPVTVP

SEQ ID NO: 127124 - protein, 476 aa, unidentified
MNCAAQPFRWRQQEELEMNPKRSKSRHGRKMPMVHPNAAAIDVGATMHMAAVRADRTPEPVRSFGTFTADLHRLVDWFTQCGVETVVMESTSVYWIPVFELLDARGFTVFLVNARDAKHVPGRKTDVSDAQWLQRLHSYGLLRASFRPKGQIAELRSYVRQRERLLEYAASHIQHMQKALTEMNLQLHHVVADITGTTGLRIIRAILAGERDPQALAALRHYSCHSSAETIAKALTGSYRAEHLFALEQALALYTAYREKASACDVRIEAVLKELSIHRGRDHGAVPPPRRRHRTDQVNALAFDVRAALFALLGKDITAIDGLGAYLSLKLIAECGDDLSSWPSAKHFTSWLGLAPSNKVSGGKMLSSRTRRSGGRAAALLRLAAVAVGRTDTALGAFYRRLSSRIGKAKAVTATARKVAVLFYNAVRHGMEYVDPGASSYETRYRTRVVNNLHRRAKAFGFVLQPLEPKAGAAVS

SEQ ID NO: 127125 - protein, 386 aa, unidentified
MIYIGIDISKYKHDCFIATETEEHQFSFENSQSGFNELLGHFKPLVKQEMIIGLEATGHYGENLKSFLTLHGYSFMEINPFLVKKFSEAHSLRKTKTDKKDAHTISTYMRSVDYKAYHHQSYHISALKSLTRLRFKLISDRTKHYNMMTKVLDVIFPEYKPFMREQGYSETTLYILKHFSSSERIAKMNDVHFDKLRKLSMGRFNYPKFVKLKELAKSTIGVTQDHQLFKLKTSISYVEKLNRDIDETEKQITSLMDRYPTKIQTIKGIGIISAAVILCEYGDITLFSNPAEMLSYAGLDSTIKQSGTMSSTGKLVKRGSKYLRATLINIGMMTMIYNPVFYAYYHKKKQEGKHHRVAMVHLAKKLIRVIHHLETHHEDFDSSKLQ

SEQ ID NO: 127126 - protein, 397 aa, unidentified
MYIVGIDIAKRKHEAAVIDGEGAVIIKPFSFTNNCSGYNRLLAMLAKAKLPLDEVSFAMEATGHYWLALFTRLQKEGLRVQVINPVQTNSIRSFYIRQAKTDPRDALLIAEVIRFGHFSESTLHPENIYELRELCRGRHAIVSMQADVKRKVVALLDQVFPEYETAFTNMFSDTSMAILQTCPTPKELSEMPLEELCHLIEVSSHKRFRMAKARELQELARNSFGFAMAGDVFSTMIRLYAKHLDFLKQQVREMDRKIAEIMDTLDTPITTITGIGPTLGAYILSEIGDISRFSSAAKLAAYAGIDPTMRQSGEYNGVRNRMSKRGSPYLRHAIWLATSSAVLHDPALKLYFQKKRDEGKPYMASVGHACRKMVSIIYAVMRDNKAYTPYIPNEISA

SEQ ID NO: 127127 - protein, 369 aa, unidentified
MGEYSGAFVAFDVAKAKHAIAVAEAGRTGEVRFLGEVENTPARIERTIKKLAARYGRLQVCFEAGPTGYGLYRQTRELGHDCLVVAPALIPKRAGERVKTNRRDAVTLARLHRAGELTGVWVPDPVHEAIRDLVRAREAAMEDVRRKRQQLLSFLLRQGRIYTGGGHWTLAHRRWLARQAFGHPAQQIVFQEAVDVIEDTAQRLRRLDEQLAVIVPTWSLAPLVQAYQAMRGASFLVAVTVAAEIGDISRFDTPRQLMSFLGLVPSERSTGDTVRRHGLTLAGNRRARRALIEAAWTYRYPARVSATLRARLEGLPKAVRDIAWKGQVRLCARYRRLSAAGKKLPVVVAAIAREMAAFLWAIGREVVPV

SEQ ID NO: 127128 - protein, 367 aa, unidentified
MSSVASQAGLIHLGMDTSKNAIVVATLLPGQDSPATDRIANEETAIRRLIGRFADRSVLRAWYEAGPGGYELYRLLASMGVACQVVAPSLIPKGSSDKVKTDKRDSRRLARLGRAGELTPVRIPSPAEEAVRDLARARDAVLADRKRAQQRLTAVLMRHGRIWRGATYWTAAHRAWIAAQRYGEPALASAIGHYRAALAVREAELAALEAELMPWAGREPLAGPVARLGCYRGIAELGGLTLAAEVVDWRRFPAARAFMSYTGLVPAEYSSGERTRRGHITKAGSEPVRTALTEAAWSYRHAPAIGAGLRRRQHGAGPDTLARSWTAQRRLHDRYVHLVHHGGKAAPEAIVAVARELAGFVWAEMTA

SEQ ID NO: 127129 - protein, 410 aa, unidentified
MELLHRRCCGLDVHKETVVACLRLVSDGKVTTEVRTFQTTTADLLRLSVWLAENDCTHVAMEATGVYWKPVWHILDDGEFVLVLANAAHVKNVPGRKTDVNDAMWLAELLAHGLLRASFVPDTQTQEMRSLMRTRKQLVREQTSHVLRVQKTLEDANIKLDSVLSDLMGKSGRAMLEALIAGETDPAKLASLASRRVKASPEELREALRGRVTKHHRFLLRLHLNQIDALDAAMATLDAQVEADLGPFRTAVELITSIPGVKNLGAHVIVSEVGIDMHRFPSAAHLISWTGICPRNDESAGKRRSNRLRKGAPWLKTMLVQCAWAAVRTKDSYLQAQFYRIKARRGPKKAIVAVAASILTAIYHMLKDGTMYKDLGRDHLDRRSTDRQKRRLVKRLADLGYSVVIKPLAA

SEQ ID NO: 127130 - protein, 399 aa, unidentified
MTSTDGIDLYLGLDVGKGEHHATALTPAGKKAFDKALPNNEPRLRELFTKLQAKHGTVLVVDQPATVGALPLAVARDTGCRTAYLPGLTMRRIADLYPGEAKTDARDAHVIADAARTMPHTLRDLVPADETVAELEMIAGFDDDLAGESTRIKNRLRGLLTQIHPSLERVLGPRLDHPAVLSLLEHHGSPTQLRKAGRRRLITLLRPRAPRVAERLVEDIFTALDEQSVVVPGTEAAALIVPSLATSLAAVLDQRKLLATRIEDLLEAHPLSPVLISMPGIGVRTAARILVDVGDAKAFPSAGHLAAYAGLAPVTRASGSSIRGEHPSRRGNKQLKRAFYLAAFASLSQPESRAYYDRKRREGKHHVAALVCLARRRIDVLFAMLRDGTLYEPPAVTAA

SEQ ID NO: 127131 - protein, 430 aa, unidentified
MEIVYPRSCGVDVHKSFIVAVICISESVKPKYIKKRFSTFNNQLIQFRDWLIENNCQNVCMESTGKYYIPVYNALEGHISNVVVANPKWVKAIKGEKDDNKDAKWIADLFKFGIVRSSYIPEKDIRILREFTRYQYKLVNMRSSEKNRFQNALTTGNCKLDIVFSDIFGKSASAIVDTILSNNPYTSEDILSKVHARCKASHEDILSAVDGIQLTQFQKARIRIVQKHMEYLDSLLDEIQHHIDLMVANYEEYIQILCTIPGINRKSAITIISEIGTDMSQWSSHRKLAAWAGLAPGCNESAGKKKSVKISKAGVYLKPCLVQVAHAAVKDKECEYYADKFKKISKRRGKKRAIIAIARKILIAVYHLLKTGEVFNPTDMADVETTKKQRIEYVKNNLRNAFNQLSRTGLSEAEILQLIRKESTNSPQIE

SEQ ID NO: 127132 - protein, 356 aa, unidentified
MTCTTKYIGMDVHKESISIAVRNAAGKIAMECVIETKASMILQFVDGLRGDVHVTFEEGTWAAWLYDLLKPHVTRLVVCDPRRNALLQEGNQNDRVDARKLAELLQNSQLRSVYHGDHGLRTLKELVRSYLTITKDLSRVMTRVKAIYRSWAIPCSGKQVYSSHHRAEWLGKINESGVRRRAEFYYQQLDALRSLRQEVRRDLLAESKKHKAWKRLCEIPSIGPIRAAVLLGILQTAHRFRTKRQLWTYSGLGIEVHSSADHHVVKGQLERKKKHIEIRGLNENCNHDLKNLFKGAAVVASTKPGPFEEFYAALLAKGMRPEMARLTLARKIATIVLIVWKRGVCFDAQHLKPQTA

SEQ ID NO: 127133 - protein, 347 aa, unidentified
MRFYTQQHPHYCGIDLHARTMYLCILNQAGAIVLHRNMKADPDSFLTAIAPYRDQIAVAVECIFTWYWLADLCAREKITFVLGHALYMKAIHGGKAKNDKIDAQKIAALLRGGMIPEAYVYPETMRSTRDLLRRRMHMMHQRAQLLAHVQNTNHQYNLPDIGKKISYRGNREGVAERFADASARSSVAFDLKRIGFYDGLLNEIELEIVRHAKQHDPNSVYLLDTVPGVGKILSLVLLYEIHDIGRFPSVQDFASYCRLVKPRKESAGKVYGSSGGKIGNAHLKWAFSEAAVGFLRHNPEGQAYLARLEKKHGKGKALSILAHKLARAVYYILRRKEAFDMKRFLNR

SEQ ID NO: 127134 - protein, 338 aa, unidentified
MTIEILGVDIAKNVFQLHGVNRGGHVVLKRRVMRDQLIEVLAQIDRCTVVLEACTGAFYWARKFEALGHKVKLISPQYVKPFVRRQKNDGNDAEAICTAARQPHIPFVPKKTVEQQDIQALHRARQRMVNHRTAVVSQIRGLLLDRGFAIAKSITRARRAIPGILADQDNELTAMARNVIAELYDLFRDLDRRIASFDKKIEQVFRNSEACQRIAKIKGVGPKTATAVIAAVGDGSEFKNGRHLAAWVGLVPRQFSSGDRMVLMGVSKRGNQHLRSLLVHGARVVVRTAPNKTDPNNLWVNQLRERRGFNRATVAVANKNARIIWAVLRTGEPYRAPS

SEQ ID NO: 127135 - protein, 316 aa, unidentified
MGESVFVGIDVAQDWLDVWLHPLGQHARCANTLTGIGELEQLLTSLKVEKIVVEATGGLEYLAAQQLQQVGLPVAVVNPHFTSAFRTMRGKYTKTDSLDAETMALFAQKMEPEVRPVPTAQNKEMKDLAARRRQLLSMIGAEQNRLTRVQSAVARRSIEAILSALRQEKKEIDQHLQASIQNDESSRQKYQLLTSIPSIGPAIAMTLITELPELGQLGKKQMTSLAGLAPHHRESGRMKGKSTIKGGRQPVKAALYMAALVSLRYNLTFRGFYDRLVKKGKAKKVALTACMRKILVVAHEIVKSQRPWQYDYQSQG

SEQ ID NO: 127136 - protein, 315 aa, unidentified
MSDVPCFIGIDVAKAQLDIALRPSGERWAVPNDVSGVTMLVDQLQALHPVLIVLEATGGLERLVTSALATAGLPVVVGNPRQARDFARATGQLAKTDALDARALAHFADVIRPTPRPLPDAQTQELRCLLGRRQQLMVMRTAEQNRLAGTSGRLQTDIAAHITWLNERLATLDDDLETVLRGSPLWRENDDLWQSAPGIGPVCARTLLLELPEWGTLTRQQIAALVGVAPLNCDSGTLRGRRIIWGGRAHVRTVLSMGTLVATRSNPRIKAFYERLLAAGKVKKVALTACMHKFLTILNAMLKHRTPWQPQEVQS

SEQ ID NO: 127137 - protein, 460 aa, unidentified
MKRKKRSKKKAVVQDIPQLEALKQINFNAAGLDIGDAEIYVAVPEGRDEVSVRVFETFTVDLYALADWLERCGVDTVAMESTGVYWIPIYDILETRDFEVYLVNARHIKNVSGRKTDILDCQWIQQLHTYGLLQASFRPEEEIRAVRALVRHRENLIQSMTREIQHMQKALQQMNVKLTNVITDITGLTGMLIMRDIVSGERDPHKLALHRNVHCAKSEEEIAKALHGHYKPEHVFELKQALAAYDFYQRQIKECDAEIEKLYADLEPRGDGPDKPLPPPIRKRRKASKNTPDFNLRFYLYRWAGVDLTQIDGPDALTIQKVLTETGVDMSPWPTVKHFTSWLGLCPHNDKTGGKVIKRSTKKTQNRAAAALRMAAQSLSHSKSALGAYHRRMRARLGGPEAITATAHKLARIIYAMLKNQTEYVAPSEDAYEEQARQRALGRLKRKAKTLGFQIIPVSS

SEQ ID NO: 127138 - protein, 431 aa, unidentified
MSKFLNEFIVGIDVASEFSYVAMLAPNGDLIRKPFKIDHTPAGFQYLLQTLKKEEERLNRSPIYFVESTGIYHLPLFFFLRSNDLKGFVLNPLCIHSNKNNNIRKVKNDKKDAIAIAEVAKYKDIKVSLVPEPQILSLRMLVREYFALADNLTDCKLRFLNDLKLVFPGFTAAFKNPFSAGAMTLLKDYPSLQSLQDADLELLSERVAKTARRSSDWAKTKLLKLFDYAVIAKAIGLSSVFLEEKIRIQIQTIKAIETSMAKIEIAIKKQIESTTFPKAFRKNIELLDAIPGVGFLSAVTLVAEIGDFSSFSSAKALTAFFGVDPNVNESGKFKGDRVRMSKRGSKLGRRILFTIAMASVRKTRKGDAINPVLKAYYENKTVSKKKKVALVAVMHKLLHYIFAVLREQKPFEFRKPEEHRRTLLLQLKSAA

SEQ ID NO: 127139 - protein, 346 aa, unidentified
MTIVEETRGITGGVDTHLDVHVAAALDPTGGLLGSKPFETTPTGYKELLSWFEGFGSLTKIGIEGTGSYGSGLARFLRRQGVEVVEVDRQNRAARRRSGKTDPLDAIEAARAALSGRAQGCSKSRDGAVEAIRVLVVAKRSARQARVKALTQMRHLTVTAPDQLRCRLKGLNVSALVTEGARLRPGRSSDPINAATKASISSLAHRVQALEYEIAELDQLLAPLLEATAPGLLSLHGVGPDTAASLLVAAGDNPERLHSEAAWAHLCGVAPISASSGKVTRHRLDRGGDRQANSALWRIVLVRISRDPETQAYYQRRLNEGRSKPEVIRILKRYVAREVYHHLPRG

SEQ ID NO: 127140 - protein, 311 aa, unidentified
MESITVVGIDVSKDRLDVAVRPSGEAFAVERNGAGLEQLTIRLRELAPQVIALEATGGFETIAAAALAAARLPVVVVNPAQIRAFAKAIGQRAKTDPIDAAAIAHFAEATKPVPRPLPDDATRLLSDLVARRRQIIEMIGAERQREQRVTVPRLRRSITRLIKALEKELASLNTDIDDAVRGSPAWREKENLLSSVPGVGPVISSTLIAELPELGQLGRREIAALAGLAPFTRQSGKWRGKSFIGGGRVAVRTVLFMGAIVAKRHNPVLKAFFDRLIAAGKPKMVALIAVARKLLTIRNAIIRDNRPWQTA

SEQ ID NO: 127141 - protein, 331 aa, unidentified
MFPVGIDVSKNTQDLCMLYDGIKGRIKTRNIQNNRHSVENILRWLRLQHCSPEDVHVVMEATGVYHEQLATELHDAGFRVSLANPHRSREFARGMGIMTKTDKVDAYMLACYAFLKKPHRWEPPAPEIRYLGALLRRRDVLLGDALREENRLEKYLSTDTPADIISSCRRMAQLLREEISNIERQIKAHIKASPALRRDYTLLTSIKSVGPQLGMHMLIVLRSHNFVSAEQAAAFLGVVPIEKRSGTSVRRRPRMSKIGPPQLRAKLYMSALCGKIYNKRMRNIYDEMCLRGKPKMVAIGALMRKLVHWCYGVLKTGTVFNDEDLKPVLST

SEQ ID NO: 127142 - protein, 352 aa, unidentified
MKKRNTIGMDMGDRNHTICTLDPSGKVLSRNTVSNTAAALRKCFKKLEPALFAIEAGTHSAWVSRVLEGMGHEVLVGNPRKLRVIWDSDIKDDVRDAEMLARIARFDRELLYPIHHRSRDAQLDLISINARDLLVKTRSMQTTHVRNVVKGFGERITKCSTKSFHKRAREELSSELLEMFAPLLSCIEALSAKITEYDKQIEKTCIENYPETKVLRNVQGVGAITALAYVLTLEDPTRFKKSRDVGPFLGLVPKRDQSGKVDKQLSITKAGNSTLRRLLVGSSQYILGAFGPDCELREFGLNLAARGGKNAKKRATVAVARKLAVMLHRLWVDEAVYQPFHQQVRKEMEQAA

SEQ ID NO: 127143 - protein, 342 aa, unidentified
MTQYKRIGIDTSKAVFTLHGIDQQDRPVLRINLRRPQLLVFFKKLPPTEIAMEACGSSHYWARELIALGHDVHLIPPQYVKPYVKRGKNDRNDAEAICEAAGRPGMHFVPVKSVTQQAQGMVLKVRETLVGQRTLLINTLRGHAAEFGVIAAKGLHQVGPLLDAIEQETAIPPEAKDMASLLGRQIEELDTRIKELDAKLTAAHKANEVSQRLATIPGVGPITALTLAIEIDPQAFESGRHLAAWAGLTPKEHSTGGKQRMGGISRAGNERLRALLVAGAMSVIRAAARPGSKQMTEWLRGLLARKPRKVAAVALANKMVRVAWALMTRGEVYRRPAGAAAA

SEQ ID NO: 127144 - protein, 429 aa, unidentified
MGRLRIVYPICCGMDVHRDFVIACIASTNAQGVTEYQSRRFSTYTGGLRDCAAWLAENKCKDVCMESTGKYWFPVHNILEKSCRVVVTHPKFVKAIKGKKTDKKDAMWIADLFKHDVVSGSFIPPERIRQLRDLCRYLQKLTWMNAGEKNRAQNCLTVSNLKLDSVFSNVFGKSASAIIDFMLEHPGEPFDVAPFLRTGCKSPIEEIQAAVDGSFSPWQADKLKIIREHMADLGKCKKMIENLICRLAEPYQRQIELIMTVPGISDPMTAIRIIAEIGTDMTQFESSKHLCSWAGLTPQNNESAGKKKTTRIGKAGQFIKPLLIECSIGAANPRSKKYPEIAHKYQQLRKRRGAKKARVAIARRLLTAIYQMLLKDEPYQPCVTPVQENIPKQRVMTAEDALAMLRRKGYILVDAAGAVIEGNSLPAPA

SEQ ID NO: 127145 - protein, 384 aa, unidentified
MKKNSKNNKEKARRHMKKNSKNNKEKARQKALQAKSRKMKLTVGIDLGDEWSHCCFLGEEGEIVEECRVKTTREAVKSRFGELKLAVIALEVGTHSRWVSQMLSEFGHEVIVANARELRAITGSDRKSDRVDAEKLARYARVDRRILRPIKHRGEEAQVDLVVLRARAVLVKTRTQIVNSVRGMVKSFGYRMPKCSTERFVKLNNEVPEKLREHLAGLMEVLEHVQKQIEEYDQRVEKLAKEKYPETTVLRQIWGVGEITSVSYVLTIEDKGRFEKSRDVGPYLGLRPRRSQSSESDPELRITKAGDCFLRSLLVECAQRILSKKGPDTALKQFGLRIEARGKKKAKKRAIVAVARKLAVLLHKLWVTGEVYEPFPETTVRKAA

SEQ ID NO: 127146 - protein, 435 aa, unidentified
MQLFIPTRNKEESAMKGLRAIRVKTVKEGTLIATVDIGLTTNTGYCTTLDGRGTKPFRFDNTKEGFEKFWCMTLANQNRFGCDEVLVGYESTGPYAEPLIHYLRHKQVKIVQVNPMHKKKMKEVNDNSPLKTDDKDPRVIADIIRLGHALTIVVPEGDAAYLRRLNNARERHVGEQTALLNQLQQLVFLIFPEFKTVLKGLKGKTAQYLLKRYTTPEKIGTLSKEVLGEEMRKRSMGKFGIQEAESLIGLARETVGIKEGLGGIFMDIRHILMQLEAEVRFISEIEAEMGATLERIPFSGRLLSIKGLGIVSVAGLIGEVGDFSKFSTQSEIMKLAGLDLYEISSGKRKGQRRISKRGRGLLRKILFYAAIQMIRKNGIMYDYYARLTGRGMERMRALIAVSRKLLRIIHAIVRDNRDYVGEYQTSERRLIKIAA

SEQ ID NO: 127147 - protein, 354 aa, unidentified
MDITTVGVDLAKDVITVCTMDRSGHVLHTRNLRSGDFAAWLVQLPAGTLLGMEACSSAHHWARKMRTMGLIPKLMAAEFVQPFRKSRSAKNDQNDAEAIAIAVRQPQMRFVAIKTEAQQARLAWHRVREGWKEERTGLINRTRGLLLEFGYPIAISSKAFTVGLQAALHHSAFPGAFRTLLERIQEQLKQLNEQLAQCERAIAESAKQDAQSQRLQAQPGIGPISADAIAASVGDAREFRNGRQFAAWLGLTPRQFSSGGKTKLGRISRRGDAYLRTLLVQGARSTLQSAIKRPANVLSHMQQWILKLYGRVGYHKTLVAIANKHARQVWAMLAKGEEYDQQAWKRFTKKAAAQ

SEQ ID NO: 127148 - protein, 361 aa, unidentified
MNEETAITNDRTVVGGVDTHKDLHVAAVVDAPDRVLGSECFATTRHGYKQMLAWMRSFGELARVGVECTGTYGAGLLRYLQHAGVTVLEVTTPDKSERRKRGKDDTLDAYNAAHAAFAGVRTVTPKTRDGMIESLRTLKVCRKTAIKARRVALQLIQSTIVCAPDELRESLRKMTRMQLIRTLAALRPDLTGYRDLVTAYRIAFKSLARRYLELHDEIADLDVMIAAMVDELAPDLVARKAIGYESASQLLLTAGDNSDRFRSEASFAALCGASPVPASSGKTTRHRLNRGGDRAAHSALHIIAIGRLRTDPRTQAYVEQKVSEGHSKLEAIRCLKRYIAREVYAIIRNRNRKIAQSQIAA

SEQ ID NO: 127149 - protein, 482 aa, unidentified
MKKKNIFQNRSQQLLRLFEKAGNRLKMMCVPIDYAKKDHIVMFCNGHGDILRKPFSVKNTLEGVKYLIDQVMRSCRQRHIKKEYVFFGGEDVNSYAENFANALRTKGFLVANVNAHDAKKQRENLQASTDRIDLMGIAMMLLNLRAKCSPAQDGIFRNLRTLVRHRKKLVVMKTEVKNRVHTLVDRLFPGFLNEKNTGINSFSKSSLVLMEDRFSAQQIRRRQQRTLIKILKRCATPDAENVAAKLHSYAAQVITTPDEYAATLQLSLQHHIRHYRCLQENIDQLLSEIALLLAQTQAAFLTSIKGVGIVLAAGVSSEIGNPFEQKPLNNLTSYCGIIPRVKQSGGIEGHTHTGRVSKRSNHLLKDCVVQSAFQIGLRGPEPLLQDYKRREAAGQHADFGIARRFLRMAMCLMRSSQVYLPPKLRSPKTQMQERAGYYLTMWPLLRDKWKKAHAHQAAFAKDQPLGQWRQMVQELYDIKLKL

SEQ ID NO: 127150 - protein, 346 aa, unidentified
MMIIGCDFHPSWQQVSWLDTETGETGEQKLVQASGDAERFYRQVAAPALIGMEATGNCHWLVDLLSELGHELWVGDAAQIRASYVRQQKTDKRDAAHILKLLVEGRFPRIWMPSSEVRDLRQLLLHRYKLVIIRARVKNELQHLCLNKGVQRKRKLWSQAGQQILRELPLQLWAGRRRDDLLKLMAMLDQQIEPLDQAVKAEAQRDKMALLLQTQPGVGPITALAYVLTMGDVGRFPRGKQVASYLGLIPREHSSGGRQKLGAITKQGNRMLRMLLVEAAQIAVRYDPEFRREYLHRCHQKPKAVAKVAAARKLAVRLYWMLRTQRPYPAVVRIESSPRVPLVGAS

SEQ ID NO: 127151 - protein, 469 aa, unidentified
MNNFYLGGDVSKGYCDFIILDEEKKTALKNFQLDDTAKGHHLLNNVLLDFTSAHPGCKIIAGVESTGGYENNWFESLCDMQDKIELSVARINPIGTHHSSRASLTRIVTDKLAAGNIAEYLINYKDKITFKKTDKFCSLRRHWKFVRLLTRQRTQLYNQLESNLYNANPEILRYTKYGYPKWLLRTIMQYPTAKHLSKARISALSSIPYISEQRAVILINRAKNSVASATDNITGELITSVVKQIISLTKLINKRSQIIADNCQLPEIEILKSFSGIGDYSAIGLMLKIVSINNFSSVKKLASYFGLHPVWKQSGDGTFGMHISKQGSREARVLLYNVAFTAIRSNPLIKEIYVRHCSKGMKKIKALVTCMHKILRIIYGMLKNNEKFNPEKDKANSRKMLENQLKSKKIISKLRRFQELDSEAPVSNRQYRKRKQQETSQNEITSLNTGSVPHCFAESDVKTSEKNNK

SEQ ID NO: 127152 - protein, 476 aa, unidentified
MGKGSGTTRGDRRRNARRERLRELLPRDGAVIGIDLGEDKQAIAVIDHDVRVLARKTVRVKAFRLGGALDWAVGQARAKGFAAVTVACEPTGARWLQVQRLCAERGLPLVCIQPLVSHIARQQQDYTTHKTDEADCVMIARLAIELHCYIPEELDGAWAQLRHLGRRRAQLITAATASVQRLQDFLSVAWPVAAEVCAHPFESVTWLTAMQVVTSRCGGQPEKLAAIGLAEFTALVRQAVAGWGGQRPAGPVCRAVFAALASTEGMVVSHRRGLLRRCADELGDLQRTRAQLRAVEADMAAVPGELGLSRLADIPGLTAVGAAAMLAETGDPRRYDSSSSLVKHAGLSPSGNASGAFEGQAHISRRGRPGLRLTVWRAIWPLLIHNSVMAAKYAAMIAAADAAAAQAVQAQSGTGSRQASAAAAARARRAKARVACAASLPRWIYSMVVHDTGWDPDVASGSASCQHAPRYQAEAA

SEQ ID NO: 127153 - protein, 383 aa, unidentified
MKAVCGLDVHKDSIFLCILHSDGELFEQVFGVLTFQLEEMRKLLQKHHVFEVCMESTSIYWIPIWRVLSPHFTLRLVNPYFIKQLPGHKSDVKDAQWIAECTMKELVRGSFVPPEIIQQLRQYDRRIFDLNAESVRKVSKVDGVLQRCNIRLSNYVSNIECKSYRDVVRRLSEGVTNPNELMKLVHGRIVNRHGVETILASLTGVVSQAEIDVLRQLHEEIDIAESHRNECQQRMLEICEKHFPEELERLQKIPGIKERAATSLIAEIGTDMSKFETANHLASWSGLRPRNDESNKKIKSRKITHGNVYLRNTIIQCAWAASRQKDSFFSRFSYHQTIVRRKNKMNVIVAVARKLLIAVWHVLHDKTDYVDFKPNREESANNG

SEQ ID NO: 127154 - protein, 427 aa, unidentified
MDVHRDFCEVAIAEGGSVRTAGRVASEPEALELFARSLVDSDEVAIEATANAVAIARIIEPHVRRVVLANPRAVREKARRAKTDRIDAGLLAQLLAVGYLDEVWTPDDATQTRRRLITRRCALVRARTRAKNQVHAVLGRNLLGRPPVTDLFGRRGRVWLAEQAAGLPLDERLSVDAGGRQVDFLAGEIEQLDKILGADALSSPDALRLMTLPGVNVVTAIALLAAIGDISRFPTPRHLVAYLGLDPRVRQSGNEPAKHGRISKQGMTEVRCLLVEAGWQTTRTPGPLRAFHERIADRRGRNKATVATARKLVVIAWHLLSRGEDYAFMRPALYREKLRRIELLLGGQRHQGRSATGRQLLKTDQRRAERELATQHERAYQRMVADWKASRPSSATLPQPTQLVGAGVTPGRASQRPSRGKAARQTP

SEQ ID NO: 127155 - protein, 315 aa, unidentified
MDDQPTIFVGIDVSKDRLDVHLRPLNEAFHVPRDAKGLEALTRRFGNLPIALVVLEATGGFEATVAAALAAAGLPLCIVNPRQIRDFARAMGRLAKTDTLDAEVIALFAERIRPPARPLPEPERRHFAELVSRRRQIIGMINMETNRRDQAVDKQLTRRLSRHIAFLEKELAELDGDIGQTIKASPVWCETEALLKSVPGVGDVTARTLLAQLPELGTIGRHQLAALVGIAPINRDSGLMRGRRSIAGGRTSVRGVLYMAALTAIRRGSPFRPFYERLTERGRPRKVALVAVMRKLLVTLNAIVRDRTPWQPLTA

SEQ ID NO: 127156 - protein, 350 aa, unidentified
MEFFVGLDVSLDETHICVVDEGGRIIKETRALSEPKALAKAIRHKGRRIEHVGLEAGPLSQWLYEGLVREGFSVSVMEARHVRAAFAAMRIKTDRHDARGIAQLVRLGWFKRVHVKSLDAQETRALLTARAFLVEKVTATENSLRAALRNFGLKMGSVTRRTWEARARELADGNPVLEGIVEAMLRVRTLLLDELADVDNQLIALAKSDPVTRLLMTTPGVGVIVALTFRSAVDDPHRFPRNRDVGAWLGLTPRRWQSGKTDIAGRITKAGDPRVRVMLFEASASILGRARVMSPLKEWGLRIAKRTSMKKAIVAVSRKLATILLAMWKSGTAYWATGRPPASAKDFAAA

SEQ ID NO: 127157 - protein, 350 aa, unidentified
MKKIVKQVLGIDVAQKELVVCLGRLYDDWSPELYAHKTFANTGKGFVALLLWLKKMTDETIPVRFVMEATGVYHESLAYFLDEKGYAVSIILPNKISNYFRTLDVKTITDRTASEAIALFGLERKLDTWKRPNPLFKKLRQLTRERDQLVQARTAAKNQLHAEQAEAEPNKSSVVRIKKQIVFLDNQEQEIKTEIKELAQQDQKVKKIINTIESLPGVGLLTASIVLAETNGFELIRNKRQLTSYAGLDVKEKQSGTSIKGKPRISKKGNKYLRKAMHLPALAAIRSDERFKAIFARLVSKHGIKMKAAVAVQRKLLELIYIIYKTEIVYDKEYLKKSGSNKMLLPEQAG

SEQ ID NO: 127158 - protein, 359 aa, unidentified
MYFAGLDAHLKYVSIAVLDRRGQVALETSVSTREPEQLLAALAPYRPLEVVVETCPFWPWLYDLLVPAGIGFHLAHAKQLRAIAAAPQKSDAVDARLLARMLLAGLIPEAYPRPADQRELLRLLRHRTTLVRYRTRLAGRIHSQLHQQRLSLPREKLLRQATRAWLEETAWPRLTVEQQAIVTTHLELIDGLTPLVQALERRIATAAAGHATAPLLATIPGIGPYRSLLLAAELSPITRFARAEHLVSYAGLAPVTRSSGGHTHHGSIPQGANRWVRGALVSAIPTHVRWAPTSPVTMAYAQLKARLGWRVARVAAARKLARVVYVMLTRRTPWGGAPAASDGRDEVQNSHVAPTTSSC

SEQ ID NO: 127159 - protein, 392 aa, unidentified
MVISVGIDVSKDKHDCFIVSAEGEVLADVFTVPNNMDGFHCLLQRIRDCTAPQDKIKVGLEATGHYSCNLLGFLLDNGLTTCVLNPLRTNLYRKSLSLRKTKTDRVDARTIASMLLSDAGLKPYTSTAYHNEELKSLTRYRFDKVKERAKLKSSVSRLVCILFPELEKLVPSLHLASVYALLEEFPGAKQVASAHLTRLKALLETASKGRYKRDMALEIRDAARNSIGSRMPAKSLELQHTTRLIRELDNEIAEIEGQIQAIMDELHSPITTIPGLGFRMAAMILAEVGDFTRFDSPDKLLAYAGMSPSTYQSGQLKNCCPHMEKRGSRYLRYALYNATKYVCHWDPAFADYLAKKRAEGKHYNVALSHAAKKLVRLIFAMERSQKPYFPTS

SEQ ID NO: 127160 - protein, 487 aa, unidentified
MHPRTTNKFLETFDVYRFSFESAGALALDNEYSGFAVLPAHYIAFAERKRARPWTSIYHCGRYDVKPLATQQFTAYVGIDWADTKHDVCLQVPGNELREFDCIRHQLADIDQWAQSLHQRFGGPIAVALELAKGPIVYALQKYDFFVLFPINPLTLAKYREAFMPSRAKDDPTDAELALDLLMRHPERFTPLRPQSVQMRTLLSLTEHRRELVGDKTRFTNRLTNTLKQYYPHALDWFEQHDTLLFCDFLTRWPTFPQVKRARRASLEAFFYAHNGRRPNVISARLGAIKAAIPLTEDMGVIAPCRLQVLVLIEQLRTTLQAIDRFDREIAQLAPRLPDYSLFQDLPGAGPHLTPRLLVAFGEDRQRYQHADELQKYAGIAPVTERSGKKSWVHWRLRCPTFLRQTFVEWAGQTINKSFWAGAYYRQQRAKGSSYQATVRSLAFKWIRILHRCWQTRTPYDESAYLNALRKRGSPLLKHLELDAQSA

SEQ ID NO: 127161 - protein, 343 aa, unidentified
MYYIGLDVHKRTISYCVKDAAGHVHSEGKIGSTRRELDAWIKTLPQPRMIAMEATIFTGWIYDHLLPHAEKVKVAHPLMLRAIAASKKKNDRIDAGKLADCLRCDFLPECHMATREIRDRRRTLRYRNLVIKQMVQMKNRVSGLLLETGVSYNKQRLHKVGYFAELMTTNKEVQESIRPLLQLSREMISRSQKLEYALVSSLERDPLLQERLRRLRTVPGVGPITALTWALEIGDYTRFSSIKQAISYCGLCGDEKSSADKVMRMPISKQRNKHIQRVLIEAAKLAPRQSHELALIHARELERGNRNRATLAVARKVVCYMLAVERRQQDFVPAEEFSRTVAA

SEQ ID NO: 127162 - protein, 315 aa, unidentified
MHHSIPQTAGIDIAKDRLDVCLCPDGATRHFTNDAKGHRALIGWLSGHAIQRVVFEPTGAYHRALERSLASAGLPLAKINPRHARRFAEALGQLAKTDRLDAALLARFGALLEPPTRPVLSPTLDAMKELLVARQALMKDRTAALNRQKIVRSPLLRRHLDQRLRQIARQLAAVDAQLQSLCLADAALAPRLAILMSIPGIAQATALSLLVEMPELGSLDQRQAASLAGVAPMARDSGTSRGRRTIRGGRAHVRQALYMPALVAARFNPDLKAKYQALVAAGKPAKVALTAIMRKLIILANALLRDQRHWTPKPA

SEQ ID NO: 127163 - protein, 340 aa, unidentified
MPLYVGLDLHSNNNFMAVMNKQGKRVDHKKLPNDPELILEALRSHRAKIGGVVVESTYNWYWLVDALMAAGYPVHLANPSAIQQYSGLKHADDQHDAFWLAEMLRLGILPEGFIYPKEERPIRDLLRKRRHLVKLRTSLIISLQNIISRNCGVQFKVNDVKRLKEDRVSPLLEGNEDLALAGQASKETIDYLTRQIRRIEATIVKRIELRESYRYLLTLWGVGKILALTIMLETGPISRFAQVGNYVSYCRKVPSQWTTNEKAKGKGNKKNGNKYLAWAFSEAAELARRHHAEARAYYNRKMQKTNFMVAHSALAHKLARAAYYIMKDQVPFMPEKLFGR

SEQ ID NO: 127164 - protein, 463 aa, unidentified
MKRKAKSKATPSGMALVHPNAAAIDIGATMHVAAVGPDRASDPVRSFGTFTADLRRLADWFAECGVTTVVMESTSVYWIPIYELLEERGLEVFLVNARDAKHVPGRKTDVSDAQWLQRLHSYGLLRASFRPKGEIIELRAYLRQRERLLDTAASHIQHMQKAMTEMNLQLHHVVSDITGATGMRIIRAIIAGERDPAVLASMRDTRCHSSAEVIEQALTGHYRAEHLFVLEQALALYDVYQQKVAACDIRIESVLKQLSSVRRGKGDAKAEGSGSPPRRQSRQPNAPAFDVGEALHSLLGKDLTRIHGIGPYLALKLVSECGDDLSAWPSAKHFTSWLCLAPGNKISGGKVLSSRTRRSGSRAASLLRLAAVTIGRTETALGAFYRRLSARVGKAKAVTATARKIAVLFYNALRHGMEYVDPGASYYETRYRERVVKNLHRRAKAFGFVLQAADMSAAEQAVS

SEQ ID NO: 127165 - protein, 346 aa, unidentified
MKVSLSFCLIGKFKIMKKTVIGIDISAKTLDICVKSECGEAFFVIENEISAIRKFLKPFTKTKQEVVLGMENTGRYNWNLYEVLEGFQGSVFVINPLHLSKSLGLQRGKNDKVDAKRIAEFTLKNEGEMKAWEPSPASLKKLKVLLSERKSKIKLRTALLQQNKNYSNLKTIGLDKQLIKMNKEEIVLLSRHIECLEKEMDLVIKSDEELSRKSALMHSIPGVGKVLTWMFLAKTENFRNITTARKMACYSGVVPFDHQSGSSIRFRPRVSMFSDKSLKSVLHLASMSVIQSENDLRAYYLRKVSEGKNKMLVLNNIRNKIIHRIFAVVNSGRNYEKNYQNNLVWP

SEQ ID NO: 127166 - protein, 356 aa, unidentified
MTKVKTNFSHHTVDVGLDVHKRSWSAAIFLDGLYVRSIHQPPSAHALEHFLKTQFPSAAYRCAYESGKFGYWIYRALSAKGIECLVINPADIPSTQKDEVYKNDCRDARGIGQALTAGQLKGIYVPSLEQEADRNLLRHRKKLWRDLVRCKNRVKGFLDYNGIELPAQFDNPNWSRNFIKWLGKLSFEHPANRMTLDYQIREVEMLRKELLSISNDIRKLMRSKKYKQLYYLLRSVTGIGPLTAAALITEIGDMKRFPSFYDLNSFIGLMPMEHSSGERELRGRITIRKHRQLRSELVECAWAAKRNDPALALYYSEQIKRGKNGKAAIVKVARKLLSRVRHVWLSGEAYQTAVVK

SEQ ID NO: 127167 - protein, 418 aa, unidentified
MLVVGIDVAAEVHQVAVIDETESVVVKPTPFAEDAAGYQKLFELLARAGARGGGDLPLAPASAQPERTLVVMEATGHYWQNLFAALMAEGYAVALVNPLRTHRFAGEELARTKTDSIDCLQIARFGAQKRPAPTGLPEAAAAELRELVRLRTRLMQEVIDRINQLHRLIDLGFPEFTRYLSDVNTELAGAILRQYPTAQAFRALAPKRLARLNYDGRHHVGEELARKLIDAAKISVGSQHSPAHQTGVRYACEDLETLRKRLKQLAAEISSKLEQHQVGKLLTTIAGIGDNTAAMLIAELGDPARFASAGALAAYVGLCPGHKHSGKHQPRSSSLTPIGNRRVRKARWMPTLGAATQSNPWLMAFYRRLIARGKPPKVALIAAMRKLLAAVYSVAKNRRPFVPFLNPYPIGDLETLSC

SEQ ID NO: 127168 - protein, 404 aa, unidentified
MNGLPERTYAVYLGLDVGKEHHHACALDPAGKRLHDKTLPQDEQRIRDLLTDLSVHGDVLVVVDQPASIGALPVAVARSMNIQVAYLPGLAMRRIADLHPGSAKTDARDAYVIADAARTLPHALRRVDVGDDALADLEVIVGFDDDLATETTRVTNRVHGLLTQIHPALERAIGGSLHHPAVLELLSRFGGPSGLRTAGRRRLLAVAKPRAPRKYQAFVDAIMTALDEQTVTVPGTRAADLVLPKLADQLAGLLAQRAEAATQVEEMLDAHPLAQVLTSMPGVGVRTGARILLEVGDASSFATPGHLAAYAGLAPVTRRSGTSIRGEHPSRSGNKNLKRAFFLAAFAALKDPASRAYYDRKRAEGKRHNAARICLARRRCDVLYAMLRDGTTYQPGRPVTPIAA

SEQ ID NO: 127169 - protein, 361 aa, unidentified
MLQRNELDFKGQNIYVGIDVHLKSWTVTILTETQPHKTFTQPPKPEVLASYLEKYFPNGNFHSAYEAGFSGFWAHYRLMSLGINNIVINPADVPTTQKEQYHKNDPVDSRKIAKALRSGLLTPIHILESETMEDRSLVRTRSTLVKDMTRFKVRIKSFLFFFGINYPEYFENTRTHWSRNFMQWLKEIKLETWSGRAALDMLIWEAENQRQLLLEIDKKIRILCRSDRYKQNVELLQTVPGIGITNAVVFITQIENVERFRTIDDLASYVGLVPTSHSSGEKENKGEMTFRGQKMLKSMLVESAWVAVRIDTALSLSYNTYIKRMQPNKAIIRIARKLLNRMYYTLKNKRPYQMGIVGQNL

SEQ ID NO: 127170 - protein, 417 aa, unidentified
MQKVFPNCAGLDVHKRFVVACRLTVDDQGHIHRKLHRFSTMTKDLEALSNWLAQAGCSHVAMESTGIYWQPVYNILEGSFEVYLVNAKHVKHVPGRKSDIQDAQWLAELLQHGLLKPSFIPPRQQRQLRDFVRYRQGLVEERNRITNRIQKVLEDANIKLSSVVSDIRGVSAQAILRELLAGQQDPQKLAQLARGRLKAKRTELEQALCGRLGAHHRFLLVRLLAHLDFLDEEISALQGQIEVCLARMPSFCDAVDRLDTIPGVDRHTATLIVAEIGVDMSRFPSDRHLTSWAGLAPGSNETGGKHKPARTRKGNRYLRRGLVQAARAAARTRGTYLNALYHRIASRRGKNRAAVAVARTILQICYHLISQGQTYRDLGVDYFDRLDRERTTKRLVRRLEALGFQVTLQEQPLVDAA

SEQ ID NO: 127171 - protein, 315 aa, unidentified
MGTPIFVGIDISKKHLDIFLTPPDTSFTVPNTEAGMIKLVARLHQVAPQIILLEATGGYEFRVVAALREAGFPACCINPRQVRDFARSLGILAKTDRIDARVLACFAEKLRPEPRPLPEAQQQEFKHLMARRRQLLEMIQMEQNRLQISPFPRVQQSIRAALQALKEQLRQLDRDIDDFFRRYPVWLDQDQLLRSVPGVGPQTSLSLMAWLPELGHLSRREIASLVGVAPFNRDSGTWRGKRSIRGGRPQVRRSLYMATLAALRFNAAIRTFYQRLLLNGKAKKLALTACMRKLLTILNAMMKNHQPWFPQEKTA

SEQ ID NO: 127172 - protein, 342 aa, unidentified
MKEVSIIGVDLAKNVFQLHGASADGSVVYRKKLSRPQFARFMADHPACKVAMEACPSAHHWARELTRYGHRVRLIAPHYVKPFLKRQKNDAADAEAIVEAALRPTMRFVEPKTVEQQARAVAFRTREQLVKQRTEAVNALRSHLYEFGYIAPVGIGYIPRLEGVVADPDAGIPDLARDICRMLLEQIAQLTDRINTLKARIAAMSNEAEMQRRLQTMPGVGPITALAVETFAPPMEQFRRGRDFAAWLGLVPRQHSSGGKQKLGKTSKMGQRDIRRLLVIGATAVIRWASRRGAPAGSWLARMLARKPIPVVAVALANKMARGIWAMLSRDENYRGPVLIGA

SEQ ID NO: 127173 - protein, 365 aa, unidentified
MNQDTLHVGLDTDKRHIDVAVAEPLPGGEVRYWGKLANEASALDRVLKRLRGSGRRLSVCYEAGPCGYGIYRRLSALPGVSCQVVAPSMTPRRAGVRVKTNRRDCLTLAKLLRAEELTAVWVPDRAHEAMRDLVRARAAAVEDLLRCRQRIGGFLLRQEIGYAGKPWTGKHRAWLGGLEFVEGAHRLMMAELVEALDQAQARRDRLRDHILELVPSWSLAWLVEALQALRGFALINAATVAAEIGDPRRFESPRQLMAYLGMVPSEHSTGAAVRRGGITKTGNARARKALVEAAWTYARPAKLPKPAGQSAALRAIADKARHRLSGRYRRLVTRGKRPPVAVIAIARELAGFLWAIAHAAAKHPH

SEQ ID NO: 127174 - protein, 364 aa, unidentified
MTAAQAGRQAASSTVEVVGGVDTHKDTHTAAAVDTAGRVLGSAQFPTDAAGYRALLRWLRGFGTLLLVGVEGTGVYGAGLARMLAAQGVAMVEVDRPDRKARRWQGKSDPVDAEAAARAALARVRTGVPKQRDGRVEALRALRVARRSAVGQRADVQRQIKALIVTAPESLRAQLRKLPDRELIEVCADLRPDRANADDPGTATKIALRSLARRHRRLSVEVADLDELLGPLVAQINPGLLALKGVGAEVAGQLLVTAGENADRLTNEAAFAMLCGVAPLPASSGKTTRHRLNRGGDRAANCALWRIVITRMGTDQRTKKYVARRTTEGLAKPEIIRCLKRYVAREVFLALQSASTEKRPANAA

SEQ ID NO: 127175 - protein, 340 aa, unidentified
MTITTIGIDLAKNVFAVHGVDQNGKTVLVKSRVTRAALPGLIAGLPPCVIGMEACSGAHYWARLFRQYGHEPRLMAAKFVSPYRMAGKSGKNDAADAQAICEAVRRPHMRFVPVKDESQQAMQCLHRTRQGFIEEKTATYNRLRGLISEFGVIAPQSIDALRRMVSVQKSSLPLQVQQCVDDLLEHVDRIEANITEYDQILSRIAKTDHRSQRLMKLKGVGPTTACALVACIGNAHDFKNGRQLAAWLGLTPSQYSSGGKSKLGRITKAGDSYLRTLLVQGTRSVLIGAEKKTDSFSRWVCSLVERRGYWRAVVAIAAKNARLCWASLHYGDDFRLYSAS

SEQ ID NO: 127176 - protein, 368 aa, unidentified
MTVYIGVDFHPYEQSVAFASDEDGEIVYRRFLHTDKQSIKAFYRKYGEDAVVGVEATGCLWWFEKLLVECGQKLIIGDPRMIRRAALSRHKNDFRDAETILDLLMRGQFPAIVPRSEESREVLDVLNYRQSLVRKRTSTANQLQAFARSKGLARFRMPAVKSRPKLVAAAGTDVETLLISSRLELFDHLTKEIKILEARLAEMAEQDERVKLLMTHPGIGVINALALAHTLGDVRRFRRKEEVVAFVGLDPLEKSSGQKKRIGQISKHGSRLVRHLLGQAAQACRDKRIRKFYSEVSRRRGRPKAKVAAARKLLINCYVMLRDGISYEEFHRRGEVGLCEGSGEVSSNASVSGGLMARPAIFAEESQG

SEQ ID NO: 127177 - protein, 370 aa, unidentified
MEQYTEAFVGIDTAKNKHALAIADPGRDGEIRYLGEIDSAPAAVQRMIRKLAGRYEKLYFCYEAGPTGYGLYRQVRALGHDCIVVAPSLVPKRPGERVKTNRRDAVTLARLLRAGDLTPVWVPDAVHEAVRDLVRARTAASEDLRRKRQQLLSFLLRHGRIYSGRKHWTKMHLHWLAQQKFDHPAQQIVFQDAVDAIEDAATRLRRLDQQVAEIVPSWSMAPVVEAYQAMRGVSFGVAVTFVAEIGDLRRFDNPRQLMAFLGLVPSERSTGERVRRAGLTLAGNKRARRVLIEGAWSYRYPARVSQTLQTRLEGLPKTVRAIAWKAQIRLCARYRRLTAAGKKRPLVIAAIAREMAAFLWAIAQHVAPAA

SEQ ID NO: 127178 - protein, 398 aa, unidentified
MLSIGIDVSKGKSTVCGMKPGGEIVYTPFEIQHTREGMSELVSLLRGSGEEVRVVLESTGSYHCPVVAALLENGIFVSVVNSLRMKRFCSQSIRRVKTDQIDAMQIALYGLAYWQELQPTRLPENTYRELQLLARQYYQMTSMLIKAKVDFNALCDQVLPGMQELMSDHAGRHKLSDFVLRYRHTTHILEMGETRFRKDYCKWAEKKGYRNRERMAALIFATAQNGIPVLPNAPSTQIVITEAIRVLHTVEASRDAILTQMQALAKTLPEYSLVREMPCIGDTLAPRLIAEIGDVRRFHSKRALIAYAGIDAPPYQSGKFSANNRHISKRGNRYLRKTGYEVMQSYVMHKPANDPIFTFIEKKRSEGKSGKLAMVAGLNKFLRVYYGKVTELYRSLPQ

SEQ ID NO: 127179 - protein, 369 aa, unidentified
MPHVTSIGLDVHARSVAAAAFNPFTGEVVHRDFGTDAAEIAEWALGFEEPRACYESGPTGFHMARELRALGLDCAVAAVSKMQRPAADARRKNDRRDAEFIARMLATHNIVEVPLPDAAVEAARDLDRALDDATAEYRRARQRLNMFLIRLGHVWDERNADGARKGSWTRAHWRWISGIRLEGPQRDVLEYYVTAARCAESDRRQLEKKVLALARTDRWRPAVEALSCIKGIDTLTAFRLAAEAGSFTRFRTAPAFASWCGLVPSERSSGETERRGGITKTGNRLARTALVESAWHYLTCTPRPKAPAPGADVPAAIRARADACTARLCRRREALAAAGKSSCKANAAVARELACWVWEIGRRAEGTLS

SEQ ID NO: 127180 - protein, 342 aa, unidentified
METRHIGIDLHRNNFTCCVRLENGRNYLSAWKLEALPQFVKKLRPSDEVAVEITGNTRLFYDAVAPCVARVVAVNPIQFRVISQSVKKTDPNDARNLALYLSKGLLPEVRMKEKTQAQIASLTQTRDTLVKLRTALKNKVNNILSAHGINLEKEALSAEKKLDEVLTMPFDPMVRTELKVIVDQIRSLNKSIVELEKTIAEEGQKLPGHKNLTSIKGIGPLTGSILLSVIGNIHDFSEEGKLAAYFGIVPRVSNSNETERSGRITKRGSKLGRTALVQCALIAQRYSPYLKRFYEKTKRRRGTGKAIIALARKLLGIIYRTLKNNWVFEDFPNFVLAEEAAA

SEQ ID NO: 127181 - protein, 324 aa, unidentified
MDKDKKTFGIDISKDTFDVMDSLGNYYQFSNNFKSFSKFLKLLDTNSHCVMEATGYYHYQLAYFLVDNNIAVSVENPLSIKRFIQMKLSRVKTDKSDAKMICLYGQERDLKLWAGYSKNQIQSLQMIRLLDIYTKQSTALKNKIQAEEVLGNPAKIVVNSLKRSLKNLQKESLIIETSLFELVKSDHQEILTKLESIPGIGRKTATMLVVLTDGFNRFESGAQLCSFCGLTPVIRQSGTSIKGRSRISKIGNAKLRNLLFMCSFTACKCNKACQAIYERITNKGKSKKLALIAVCNKLLKQAFAIAKSGVEYNESYRSAIPKMI

SEQ ID NO: 127182 - protein, 388 aa, unidentified
MPELWAGTDAGKAAHHCTVIDTDGTKVLSRRVPNNEAELLELIADVLALAEDDPVTCAIDLNAGGAALLIALLTSHGQRLLYIPGRAVHHASRSYRGDGKTDAKDAYVIADQAWMRRDLQPLQNWDEIAVDLKILTARRYDLAADRTRAINRLRAQLLEYFPALERAFDYAASKGALVLLTGYQTPAALRRIGASRLATWLKNRKVRGTQTLAEVAVAAAQAQHTAVAGEATAAAVVCTLAKAVLALDEEITGVYLKIAARFREHRDAEVITSMPGMGPLLGAEFIACTGGDMDAFGSTGRLAGVAGLAPVPRDLGRISGNMRRPHRYHRRLLRVFYLSAQIAARFCPTSKTFYDRKRAEGKSHKQAILALARRRLDVLWALIRDQRH

SEQ ID NO: 127183 - protein, 347 aa, unidentified
MKNKFYCGIDVSKLKLDVSILIDEKTVHKVFKNTIDDVQDLMNWLLSKTNSNSLIHVCIEATNIYHELVADFLSENKDNFIVSVVNPRKAKHFSNMLANTKTDKVDAKLLALYCQKFEPEIYNPLSKERRELRELSRLMDNLIELKNIQKVRLHTFHSEVAARGVLSTIKSIEDTIAEIQKEIKSYYNNYSDLNKEFQLLKSIPSFGDRISNVLQVEMPKDENGKYNPKKLTSYFGLAVREWQSGTSVSGKPRITKFGSPRVRNMLYMAALVAISHNLFIAEFYNKLVKKGKPKKVALVAVMRKLLVLACAILNSGKPFDVNHVSYRVIHNVKNNVIYCSDKFTKVS

SEQ ID NO: 127184 - protein, 345 aa, unidentified
MDQISRIGMDTSKHIFQLHGVNAAEAPVLRKKLRRKEMVAFFEKLAPTVIAIEACGASHHLARLLQSFGHTVKLIAPQLVKPYVKRGKNDAADAEALCEAMSRPTMRFVPVKTAEQQAALMLVGVRDRLIRVRTQLSNAIRGYAAEFGLTAAKGVAHLVPLLERIQADESLPALARDLFAIQAKEYAQLQEQIAEVDAKLTVWHRADECSRRLAKIPSVGPIGAVMLTMKTPDPTLFRSGRQFAAWIGLTPKDHSTAGKTRLGVITRAGDEGLRSVLIVGATSVIQQAQRSGKMSPWLAALLKRKSAKLAAVALANKTARIAWKMMVTGEAYDAKLVAAAKDVTG

SEQ ID NO: 127185 - protein, 368 aa, unidentified
MSIVQTILYAQFSLCCYTNEKEQAEYPQKIDGHYSKVINYIEAMRFHYGDDALFICGYEAGCLGFTLYHQLTDHNVKCVILAPTTMLQQKGRKKVKTDKRDAALIARCLAHHDYSPVHIPTEQDEQTKEYIRMRNDHKLALKKVKQQILSFCLRQNYRFNGTINHWTQAHLKWLRSLKPEGLYAEILQEYLLTYDNLTNKLERFDKRIEELASNETYQENVHKLSCFIGVKTMTALAVLTEVGDFKRFASAQHFASYIGLTPGEDSSGDDQNRLGITKAGNRHVRSLLVEATQSYSRGQIGFKSKALKARQAGNSPEVIAYADKANERLRRKYYRMVLKNNKKTNVAKTAVARELACFMWGMITGNVG

SEQ ID NO: 127186 - protein, 344 aa, unidentified
MTTELSIVGIDLGKNWFHLIGLNERGATVLRRKLNRTQLAEYAATALPCVVATESCPGSQYWGRLFANAGHEIRILPAQFVKPYLKANRNDFNDAEAIAEAGSRASMRCVPLKTTEQLELQALHRVRRRVIVERTAIVNQMRALLLEQGIVIPLGRALFARRLPTIFEDAENGLSPRLVSLLYRLRQRWLAVDVEIDELTRELTTWADQSDLCRRAQTVPGVGPIIATAVVAAVGDGRMFGRGRDMAAWLGLVPGQYSTGGKPTLGRISKRGNTYLRQLFIQGASALYLHMKRDRSSLGEWLRHVEARSHRNVAVVALANKMVRICWKVLTSEEVYQPYPSRVA

SEQ ID NO: 127187 - protein, 358 aa, unidentified
MKSKNNKLDFTGQIIYIGLDVHKKSWTVTIYYMGIILRTMSMPPIPEKLAGYLRKNYPNARYQSVYEAGFCGYWIDRKLRALGIENIIVNPADIPTKQKERRRKTDKVDSKKLARELSNNNLDGIYIPSRENESIRALSRLRRQTVKDQTRLKCRIKSLLHYLGIELPENSEMKYWSGKFIKYLSELEFDHKAMKLTLENLIESLRKERQILLKVIRDLREVVKENQRAGKIVKLLRTVPGVGFITAVTLYSEIMEINRFNKFDSLSCLIGFSPATNSSGEKEKVVGLSNQQNKYLRSMLIESAWTAIRMDPALTQVYGKLVMRMGKQKAIIRIAKKLLNRIMYVWKNEKEYVLAVVS

SEQ ID NO: 127188 - protein, 410 aa, unidentified
MLFIGDDWAEAHHDIEVEDDSGRVLARRRLPEGLAGITTLHELVAEHLDPTAEPDQVQLGIETERGPWVQALLAAGYGVFAINPLQVARYRERHSPSGAKSDAADAHLLAEIVRLDRAHHRRIAGDSEIAEHVKIAARAHQTMIWSRVRQVNTLRSLLREYYPAALAAFGTDLASRDALAVLSVAPNPELGRRLSQARIETLLRRAGRQRNVSTTAATIRAALTSEQLAARPGVIGAYTASASALLAVLTAMAAQTEVLAGQVEQGFGQHPDAEIYRSQPGLGEVLGARVLAEFGDDPGRYADAKARKNYSGMSPITKASGTKRVVLARFARNRRLGDALFLQAFAALNNSPGARAFYDRQRARGATHYQALRTLANRLVGILHGCLRTHTLYDEHLAWHNEPDKLSPAA

SEQ ID NO: 127189 - protein, 381 aa, unidentified
MTTAATHHEQSNTTEAMLFVAFELSEKTWKLGFTTGHGQKPRERTVTARHHEHVLDEIAQAKRRLGLPATAPVVSCYEAGREGFWLHRFLQAHGITNHVVDSSAIEVNRRRRRAKSDGLDVRKLLSMLMRYAQGERHVWQVVKVPAVEAEDQRPLHRDLETLKQERASTMTRIEGLLSSQGLRVTSLTKLPEQLEALRLWDGSPIPPGLRRRVLRVYAHYTFLSEQIAAVEAERRALLQTSQEASIEKVRQLMHLRGIGINGAWLLVMEFFGWRAFKNRREVGGLAGFTPTPYQSGESAREQGITKAGNRHVRWMTTELAWSWLRFQPDSALSVWFRTRFGGGGKRLRRIGIVAVARKLLIALWRFLETGVLPEGAGLKEG

SEQ ID NO: 127190 - protein, 374 aa, unidentified
MKIVGCDFHPSWQQVAIFDPETGEIVELKLVNGDGEAERFYRELESPALVGIEACGNSQWFIEFLEGLGHLVWVGDAAQIRASYVRRQKTDRRDAGHILKLLIESRFPRLWVPTAEQRDLRQLLIHRYKLVEIRTRVKNGLQHLALNRGVQKKRALWSVRGRACLEKLALEGWTARRREDLLKLLAELERLVEELDAAVTRTAQEHPQARLLMTQPGVGPITSLAFVLTIGDVSRFRHSNQVASYVGLIPREHSSGGKQRLGAISKQGNRFMRQLLVEAVQTVNRLDEGFRKQYVARCHHMPKGVAKVAAARKLAVRLYWMLRQNVGYPEIALIESSPRVPLVGTCGASGSPLRGSPGAASQAEGLIGRSRIQR

SEQ ID NO: 127191 - protein, 310 aa, unidentified
MEPIFVGIDVAKDRLDVHVQPSGQAFSVSRDDAGLAELVRRLPPLGATRIALEATGGYEVVVAATLAAAPLPVAVINPRQIRDFARATGRLAKTDALDAQAIAGFAAAVRPAARPVANADARLLGELVTRRRQLVDMLGAEHNRRRLIEPPALKRRLDAHIRWLERALRELEGDLDTTVRASAIWRATEDLLRSVPGIGPITAYTLIADLPELGRLDRRKIAALVGVAPINRDSGTLRGRRMIAGGRASVRPVLYMATLTAIRHNPVIAAFYRRLVSAGRPGKLALTAAMRKLLVILNAILRDPRPWRPA

SEQ ID NO: 127192 - protein, 365 aa, unidentified
MNYMKVGMDASKEKLVCAYRANGVGEIKMVTLANRKEAVKPWIEKLQTQGMVHVCYEASSVGYEIYRWVTGIGAECAVVAPSLIPKKAGNHVKTDSLDARELLSLFEAELLTSVHVPTESEEALRDLVRSRGDMRKTLTQHKHRLNQLMQRHGRIYPGKAHWTQKHMNWIRRETLTEQAAEATKAFYLRWVEQSQGELDRVDAMILEQAPKHQATYALAQRFMGFYGIDVKSGIALASELLDVRRFQKSGELMAFVGLTGREYSSGAVFRRGSITKTGNARVRHLLIQAAWKYTRKPSWSERLRDHWKTQPAALEVIAQKAKDRLYKRYHHLVNRGKVKQKAVVAIARELAGFLWAAGQIEATAV

SEQ ID NO: 127193 - protein, 328 aa, unidentified
MSRRPPHGVQRARIYKEESMHHSSKVYIGVDVSKLTLDCSIADRCLQLPNNSKGFAKLCSMLPDNAHVVFEATASYHRALELHLHSHAVVLSKVHPRSVRDFARARKCMAKTDRIDARILGLFAQAVPPEPSPAPDPARSALAECNALREHYVAIRTQMTNHKGHLSSSTCLRSMNALLRSLERQIEAIEMAAAAQIKTDPLLAAQYSALRSHHGVGPVCASTLLACLPELGHASRGQIASLAGLAPFNRDSGACRGQRHILGGRSRVRRALYMAALSAARSNPPLNAFYLRLRTAGKPPKVALIATARKLLIALNSSLKSLSPSIPS

SEQ ID NO: 127194 - protein, 407 aa, unidentified
MIASLPTKPRKYACFCGIDIAKNKHVACVVDRDGKLIVRSQSFTNDAEGYQRILDRLKEVGGPSKVSIAMEATGHYWYSLHDFLIRHHYDVAVLNPIQTAKQVTKGIRKTQTDRIDAHHIAVLLKNGEQRPALIPGELGMTCRQLTRLHQAMVNQQSRIKRVLWSRLHPVWPEYEDLFATPFCKTGRTLLNTAPTPQDVLALPREDLFDLIRKTSRGKYGTVQAEKVRRAAENSVGTHRGIAATRVSIRLLLAQLDALKPTREQLEGEIETLAARLPDYLMTLPGASPLSVVSLFGETDPIEAFASPSKLIAFAGLDLVVSQSGDYQAPRRHISKRGSPFLRHTLWAMAHRACYQEGDLRDYWLRRKGQGLSHLESVTAVAIKLCPVVWRIMTDRRPYLIQRPATKP

SEQ ID NO: 127195 - protein, 393 aa, unidentified
MKDKPWIGVDAGKEFHWAHALDASGTELLSRRVENDEASLSALIDEALSLAGDLVWAIDQVGGGAALLLALLWERGQRVIYVPGLTVNRARDSYRGESKTDERDARVIADQARMRADLTELAPEEEALAELQLLLARRRDLVVDRTRAVTRLREALLALFPALERALDLNAKGALVLLTRYQTPAKIRRAGHKRLAAHLKGRGVKGADELAKKALTAAKTQSVELPAQEVASTIVAEIAGEVLALKERLPALDKEVASRFFARPEARILASLPGIGPVLGAEFLVAVGDLSVFESADQLAAYAGLVPAARDSGKRVGNNRRTRSGNKVLKRVFFLSAFSSLRSSPHSRAFYERKRREGKKHTQALIALARRRVNVLWAMLRDGTTFEPPPLRA

SEQ ID NO: 127196 - protein, 353 aa, unidentified
MIVIGIDPHKSTHTATAVDPATNTDLGSIRIDATRAGYKALTGWAKTWPQRSWAVENAYGLGHHLAQWLLTLGEIVLDVPTTATARVRELSRGGRRKNDRIDAAAAACVAALQGDARPVDPEGPTEILGLLDERRSNLLGTRTRTANQLHALLRQLFAGGAPTSLTAPAATALLRGFRAKSPVDRTRVGLCRNLIADIRRLDTQLAANEKQMADALDEHGSRLREVDGIGTVTAARLIGRTGRPDRFPTAAAFANYNGSAPVQIASADTDRHRLSRYGDRQLNSALYIVAMVQIRMLASAGHAYYDKKITQGKTPAAARRSLKRHLSDRVWRIMIADERRHHRSEDNQSVRAA

SEQ ID NO: 127197 - protein, 402 aa, unidentified
MNAVGIDVSKGKSMVAIMRPFGEIVSAPFEIKHTASGINSLVELINSVEGESRIVMEHTGRYYEVLAHQLSEANLFVSAINPKLIKDFDNDSLRKVKSDKADAVKIARYALDKWQNLKQYNVMNELRNQLKTMNRQFGFYMKHKTAMKNNLIGILDQTYPGVNTYFDSPARSDGSQKWVDFASTYWHVDCVRKMSLNSFIDHYQNWCKRKKYNFSQSKAEEIYGKAKELVPVLSKDAITKLIIKQAVDQLNSASTTVESLRTLMNETASKLPEYPVVMAMKGVGTSLGPQLIAEIGDVSRFTHKSAITAFAGVDPGVNESGSYEQKSVPTSKRGSSDLRKTLFQVMDVLIKTHPQDDPVYQFLDKKRAQGKPYYVYMTAGANKFLRIYYGRVKEYLSSLPES

SEQ ID NO: 127198 - protein, 388 aa, unidentified
MNRIIKIGMDVHSKNYTLCAMEPTIGAEDRIFGEVQVAPDYKEVICFIESLKMKLGFCDDYSIECGYEAGCLGYTLYHQLTGAGVKCVILAPTTMLTQQGKRIKTDKRDARLIAQCLCYGGYHPVYIPTGEDDAVKEYLRMRDDHKLALKKLKQQINAFVLRHGQQYSGTKWTIKHVTWLKKLELDPMYRETLDEYLASCEEQEAKIERYDKRIEEIASEARYQENAKKLGCFLGIRTHTALSLIVETGDFKRFAKGNTYAAFLGLAPGEHSSSDNVNRLGISKAGNTHLRCLLIEAAKGICKGAIGHKSKELRARQSGQPAEVIAYADKANTRLRSRYYKMIRHGKKKNVAVAAVARELACFIWGMMTGNISIRPKGDTSGPAVSQG

SEQ ID NO: 127199 - protein, 391 aa, unidentified
MSDIIRIGVDTSKSVFQLHGVDAAELPVLRKKLRRRDMLAFFRRLPATKVGMEACGGTHYWARELTALGHEVKLLPPQHVKPYVRRGKNDRNDADAICEAMSRPRMSFVAIKSADQQAAQMLMTTRERLIASRTQLINTIRGHAAEFGLTAAKGPAHVAPLLLRIAEDKTVPELAKELFALHGQELNRLKIELREIEAKLKVWHRQNELSRRLAEVDAIGPIGGCLLAIKAPDPQVFRGGRDFAAWMGLTPKDHSTAGKMRFGAITRAGDEALRRTLVVGATSVIKQVSKGKGDPSPWLRDLVARKPPKLAAVALANKVARIAWKLMVGGERYDAARAGVKAAARRQRRWPAASLDASARGAQSAPPSVKRRNPGSALTHKVIKMALQSTH

SEQ ID NO: 127200 - protein, 386 aa, unidentified
MQKLNDLSRSPNPLDPDGTLIAVIELSLSSWLVAGIVPGVERQPLKKLAVDENALLKLLNRWREEAAKAGHRIKRIAVAFEAGRDGFWLARWLRARDIEAHVIHASSVAVSREHRRAKTDRLDTELLKRSFLGWLRGERDHCKMVAIPTTQDEDAKRPNREHESLVGEQSRIVNRMKATLIRLGIRGFNPKLKKAAERLDGLRTPEGEPIPPNTLAELRRDMVRRRLVSDQIRQIEDARLERLKQAPSDGPHAMVRLLARVIGVGVETADMLVQEVLSRSMRDRRAIARYAGLTGSPDESGRKRREKGLTRSGNARVRRGMIQLAWRFLMFQKDSTLAQWFRTRTENARGTRKTMIVALARKLLIALWRLVREGVVPDGVVLRPAP

SEQ ID NO: 127201 - protein, 267 aa, unidentified
MRLYCGIDLHSSNSVIAVLDEQDRPVYEKRLNNNLDDILEALKPYKDEIVGCVVESTYNWYWLVDGLMEAGYGVHLAHAGALPQYAGLKFTNDSADARHLAQLFRLGILPTGYIYPKQERALRDLLRRRLLLVRQKTLHHLSLQSLIARHSGQRLNANAIKKLEEHDLDDYLDSPILLGGEITHQARCWLDGAVARIEREIQKHIQPREDYQLLQTVPGVGPALGTTIALETGTIERFPSPGNYASYARCVKSEKISNGKYNGQGNK

SEQ ID NO: 127202 - protein, 312 aa, unidentified
MDKTICGVDVSKEWLDAHVEPNGAAGRFRNDAAGITDLAAWCQGHGVELAVMEASGGYERLALLLLWDLSLPCALVNARSVRRFAEAMGFLEKTDGIDAAMIAGYAQAKRVQPTLPPSPAQQRLKALVARLGQVTGDLTIQKQRKSAAADTETIASLDEVIALLVRQSRRLEGEIASLIDDDPLWACLDRAFRSLKGIASRSVARLMAELPEIGILSNKAIAKLAGLAPIANDSGKRSGRRPVRGGRAGPRGVLFLVASIVAKYDPHLAAFQHRLQAAGKEKMVIRIALARKLLVILNAKARDARTEFANAT

SEQ ID NO: 127203 - protein, 360 aa, unidentified
MRIIGCDLHARQQTLAMLDTETGEVVNRTLMHEGNQVREFYSELPGPVLVGIEAIGPMQWFLDLLAQLGIECRVGDAAKIRAAEPRKQKHDRRDAELILKLLVEKRFPAIWMPSKELLDVRALLLHRHQWVRLRTQVQNALQAIALANGLRRGPSLWSYDGLAKIAFLPLPPHTSLRRSALQALYRHMDEEVEKLTVQVAEQVEHHSGAQLLMTHPGVGPVTALATDVFLGDAQRFDDGKSLASYVGLIPEERSSGRRRRLGRISKQGNPLLRFLWNEGGAHAARRDPELRRFYRRKLVQKGLGKARVAVARKLGIRLWIMLRDQIDYQEFCRRGQKQSSAACAGMPEVGNGANRHRPVE

SEQ ID NO: 127204 - protein, 353 aa, unidentified
MAIVGGLDIHRKQITFDYLDTGSGEVRAGRIAPADRAGLREWLARFAGRGDVAFAIEGCTGWRYVAEELAVAGAEVHLAEPADTAAARGRKRRAKTDRGDSRHLRDLLESGRVPECWIPPAHVLGCRALLEAYHDLQSEHTAWVQRVHAVLFHQGAPVLPGMRAGQDRAALAAAAAAHLTWSGQLQVAVAADVLACMEEHMNDLRARIRAEARAMPAARELAARLYGVGPLSALALACWLGGSGRFSSSRQAVRFAGLDITVWSSDGKGPPGRLSRQGPPVLRWALYEAGKSHARAGAPDHACYAQVKDRCNGKRAALSEARKLIRQATHILAALGDDALTPGPRPRTSRLAA

SEQ ID NO: 127205 - protein, 411 aa, unidentified
MQVIYERCCGLDVHKRTITACRLKWLGTDWEKEIRQFGTMTKDLLALSDWLVHEGCTHVAMESTGVYWKPVYNILEGQFELLVVNAQHLKAVPGRKTDVRDAEWIAELLAHGLLRASFVPPASVRELRELTRYRTSLVRDRARTINRLQKVLETANIKLANVVSDIDGVSARLMLEALVAGERDTQQLASLAKGRLKEKREQLVEALSGCLKPHQSFLIAEHLAQIDYLEGAIERLSHQIEERLRPFEQEIAWLDTIPGVNRRTAEVLWAETGGDMSRFPSARHLASWAGMCPGNNESAGKRRSGRTRKGSPWLRHCLVEAAHGAAHTKNKYLSSQYHRLGARRGKKKAQVAVGHSILVIAYHLLTRKQPYSDLGANYFDERDRQAVTKRCVNRLQKLGFKVTLEKLQMAA

SEQ ID NO: 127206 - protein, 326 aa, unidentified
MKITIMGLDLAKNVFQAHGIDETGNTVLVKRLHRKQMLPFFSKLPSCLIGMEACGTAHHWARTLAAMGHEVRLIPPSYVKAYVKRGKSDALDAEAICEAVQRPTMRFVPVKTVEQQGILMTHRARALLVRQRTMVANALRAHLAEFGLVANPGIANLAKLAQQALSDEDGLPSYARTSLDILIRQIMVFTDEIAVLDQQLHAWHVDSEASRRLAAIPGLGVVTATAVAATVTDPDQFRSGRQFAAWLGLTPQQHSTGGKTQLGGISKQGDRYLRRLLVVGATAVIRHTKDKATPMANWIRKLWRKSRSGSSPSRSPTSSRGSHGSY

SEQ ID NO: 127207 - protein, 345 aa, unidentified
MLYVGLDLSRKRLDWQALMPNGERAAIGAVPPDRDGLDKLVRRLGDGEGVLAVIESMSGARFVHDELELQGWDVRIADALKARGIAPLACKTDTIDTWVLAELARLELVPEIWVPDPEVRAERERARFRLHLVKHRSSLKNRIHAILFQHGVPNTSSDLFGSAGRALLERLQLPEPWASTVAASLELIDALDERIAACEQELRRLGAEHRYIPLLMTCPGIGWVLAFTIASEIGEIGRFASPRKLVGYTGLCPRVEQSGERDRRGRLRKNGPAYLRWALVEAAHTANRHPCYRPVHERFLARHGRKRGTKLAAVEIGRRLAESIWHMLTTNEPFAPAGAPVSLAA

SEQ ID NO: 127208 - protein, 415 aa, unidentified
MSRYCGIDWAEGHHDVAVVDQDGTLIAKKRIGDDPAGFTALTELLTAAGDTATDPIPVAIETPRGLMVAAIRATGRKVYAINPMAVARYRERHTMARSKSDHADAMTLANILRVDAHMHRPIPADTELAQAIAVLARAQQDAVWRRTKASNELRSLLREFHPGFLAAFADKSATNLAKPEVRAILAIAPTPAAAARLTRTRIAAALRRAGRKRGIEALADDIVDKLRRPGLRQPELVEKAMGRQALALLAALDAACLGAEDLEQAATEEFRKHPDHAIVTSFPGLADLTGARVLAEIGDDRTRFANARALKAYAGTAPVTRASGRSISITFRRIKNDRLAAAGWVWGFSAAAHPGPTREHYLHRRAHGDRHSAALRHLVNKMLGQLYYCLQHRQEFDPVKAFGQPATPTPEPLAA

SEQ ID NO: 127209 - protein, 370 aa, unidentified
MSVRRILAKTIDTDLEYEAIGIDLAKNCVSAALLTTDGEVVCIDRLDYSELEKSAQALSPTTFAMEPCTEMNYLVQKLEAWGHRCLVIGGKNVQNYVENHYSGQKTDLNDAQALAFLAQDKQLRTIKAKDIEQQKYASLTTLREQYIKQYRQTIVSLKGICQAWGLNISKGISGKAQLKDLIENHAAFPEELRESLVDMVTHAQTTQKVLNKITKTLEVLAKNDKVCQLIQTIPGLGTICSCRLRATIGDIKRFKNPKDFPAYYGLVPRSIATGHNEKKGKITHRGDRTMRSLMVQGAGCVIRFATCGKLKSKQLTKWILKKQKEKMPWGKLVCAVAAKLLRIVRAILISSKPYNPKIAGVAKCSLSKGS

SEQ ID NO: 127210 - protein, 366 aa, unidentified
MEKIGVVGGRGQEGLPAPKRPPDGTPVWMAMDISRSKAVYCLRWDGSEQRRLSTPLGIAHVRALLEHYRGCQVHVAYEACGFGYELAWWLQEQGIARMVIAPSRVERVPGLQVKTDRVDVGKLARKLEKGDLKAIYIPSRTVHEQRQIGRTYAQCLKERKRAQVRIRSLMQEQGRLGPLPAAGWKVYSAWLGAQNLPQSVRLCVQAHEQLRALADQQAQRMKVELYKLARGAEYRPLVKALSAQSGVGWQSAIRLVLELGDIDRFRTTDALPHYLGLTPSQYSSGELDHRGHILKCGPGFLRALLLQCAWSAIRQGHDTELQERFANLAPRIGRKRAIIAVARKLAIKLRGRWRTHLMASKPASAV

SEQ ID NO: 127211 - protein, 415 aa, unidentified
MALKIVYKICCGIDVHKTFVVACIASTNSKGVTTYESHRFSTYTKGLRDLLQWLLARNCKDVCMESTGKYWIPIYNILENDCTIVLAHPKYVKAIRGKKTDKKDAKWIADLFKHDLVAGSFMPPADIRQLRDLMRYRFKLTCFRSSEKNRLQNCLTVSNIQLGNVVSDTFGKSAQAILDKLLENPADTSFDLEPLVFKSLKKKLPELRDAIDGFITPEQAGKLKVIKGHFEDLESRKAELEELILALAAPYQQELAILQTAPGISSVFTAIGIISEIGTNMEAFPSAKHLCSWAGLTPTNNESAGKKKSVRVSKAGCYIKPLLVQCANAVVTSKKHPEIRNRYLRLKKRRGHKKAIIAIARMLLTALYHMLKNGENYNAELYRKSNLPPVDREITVEQAIIIARNQGYKIKSATA

SEQ ID NO: 127212 - protein, 341 aa, unidentified
MPHFAALDVSLETTCICIVDAEGAILVEKKAASDPDAIARVLTAAAADLVRCGLEAGPLSPWLHGELARRGIPMVCLETRHAKAALGAMRNKTDRNDARGLAQLVRTGWFRAVHVKSSESQELRALLAGRKLLHGKCLDVENQIRGLLKAFGLRLGLVARARYDRRVMELLVEQPRLRVVVQPLLRARAALWAEFNTLHLLLLRTARKDPVCRRLMTVPGVGPVSSMTFKTGVDDPARFSRSRLVGAHFGLTPRRYSSGEIDRSGAISKVGDAMVRESLYEAAHIMLTRVQADLPLKRWAQGIVRRGGPQRAKVALARRLAVVLQRIWRDGTVFDPRFEAA

SEQ ID NO: 127213 - protein, 354 aa, unidentified
MTKKLLKQVVGIDVSQKKLDVSLGRMDEETMTQIYAYKTFDNNVRGFMALILWVKKNTESVAPLRFVMEATGVYHECLAYYLSGKSYLLSIVMPNKITNFFRTLEVKTVTDKSMSAAIAMFGLEKNPSNWTPPKKAYRELRQITRERDQLMTERTMIKNQLHSEEVEAHPNAKTIERMKMRILMLNGQIKEIMAEVKATVKNDAEITKAMKLILTIPGIGELTGATILAETDGFALITNKRQLTSYAGLDVKLKDSGTSVHGKPRISKKGNKYLRKAMHLPALAAIWHTEEYKAIFERVFENSGIKMKGVVAVQRKLLEMVYTIFKTQQPYESGYMEKQAKKKQELKLKMADVC

SEQ ID NO: 127214 - protein, 467 aa, unidentified
MNIDKEDTELSLPPNYFFMEPKTTKKSKRMEHFSLINAHAAGIDVGDTEMVVAVSPSACEQNVRTFGTFTCDYEQIVCWLQECKITHVALESTGVYWLQLYLLLERVGFQVTLANAKHIKNVSGRKDDENDAMWIQRLHSYGLINGSFQPDLQIRGLRDLMRHRRSLVSDQSRCINRLIKALELMNIKVQTVLSDIDGKTGKAIVEAILNGERDATVLASLADKRVKASKETLLKSLHATWSAQYLFLLKQQYSTYNFISSQIKEIDLQIEKQLQTLSASLHEGELCPVNVDYPRKRSTRKNAIPFNATAYLFSLLKVDLTKIPGISEVSALEIISEIGTDMSRWPTENHFTSWLGIVPNTKKSGGKIISNKIMKKKHRAGQALRIAASTMYQSKSPLGDFFRRKQAKGGPSKAILATATKIAISIYMMIRHKTPYQPEKMKDAQDRFKQAQIRKLESRLAQLKSAA

SEQ ID NO: 127215 - protein, 352 aa, unidentified
MGQVTMADQQSHVTVGVDSHKDVHVAAVIDQVGQILATTSMATTDRGSGQLVRWAQRHGQVDRFGVEGTGSFAAGLTRYLRARGYQVLEVNRPNRQTRRRRGKSDTVDAESAARAALAGQASTPKAADGTVEMIRALRVARRSAIKARTQAANQLDSLVITAPEELRVQLRGLATARRVEVAAAFRPGSLTTPVAATKLALRELARRHLALTAELERLDTELAKLVRKAAPKLVARRGVGTEVAGRLLVAAGDNPDRLRSEAAFAHLCGAAPIEASSGKTVRHRLNRGGDRQANNGLWVTAMCRMHSDQRTKDYVARRTKEGKSKKEIIRCLKRYIARELYRDLATAVLDKP

SEQ ID NO: 127216 - protein, 422 aa, unidentified
MMDKERRWFVGIDWGSEEHVVSLCDDAGKKVGQRKFSHGGIGLTDMIAWLLKTSEGKPGEIHVAIETPHGPIVEALLERGFNVYSINPKQLDRFRDRFTVAGAKDDSRDAEVLADSLRTDTRAFRKLSIAEPVIVELREWSRIDEELKVEHGRLTNRLRHQLWRYYPQMLALADDVGANWFLDLFEAVPTPEKAASVREKTIARILKSHRIRRFDAAHVLSELRKPALTVAPGTIEATTARIRGLIERIRIINCQLADAQRQLDRLCKKLSEPVADQEGEIAPGQKNEQRDAAILDSLPGVARTVLATLLAEASDTVQRRDYHAWRALCGSAPVTRRSGKSCMVVRRHACNQRLRNATYHWAQNAIQHDATSRAKYDALRAKGHGHARALRSVIDRLLNVACAMLNSGTLFDPEFASKRATG

SEQ ID NO: 127217 - protein, 400 aa, unidentified
MMTPDDIDVWVGLDVGKSAHHAHALDHDGNTLYDKPLKQDEKAIRTMLGKLSKHGRVLLVVDQPNTIGSLPLTVARNMGIAVAYLPGTAMRRTAQLLPGDAKTDRRDAHVIAWAALKLPETLRDAGPDDETLAALKLLAGHDEDLAHESTRHVNRLRSLLLQTHPAFERALKGERITRDATLALLERYGGPMGVKRAGIEDVKDWAKSNGLRAGRIIDDMFKAIGEQTVTVPGTLMAETIIPSIAHDIKTIRDRRREVDRQVEKLLEDHPLLTVLTSMPGIGVRTASNILLGIGGDIANFKSSAHLAAYAGISPVTGQSGTSIKGERPSRRGNKRLKNALWQTAFVASTKHPPSVAYYKRKREQGKHHNAAIICLARRRCDVIYSMLKNGTLYQEPALVA

SEQ ID NO: 127218 - protein, 344 aa, unidentified
MTYYVGLDVALRSLSACVIDDQGEIVKEAKLDSDVEVIVAWLESIRGEIEIVGLEAGTLTQYLTYGLQAAEYPIVCMETRGVHAALAAMRNKTDKNDARGIAQILRTGWYRSVHVKSIESHHIRALLSSRKAVLNKCIDLENEVRGLFKIFGIKLPAPLKHGAFDDAVRETIEADVALSLALLPLLDARLVLYRTFLEMDRRARKLAQQDKVCRRLMTTPGIGAISSLTFKAAVDDPKRFKRSRTVGAHFGLTPRRFQSGEMDNMGHISKAGDRDVRIVLYAAANALLTRTTGWSPIKAWGMRLMKTKGRKRALVAVSRKLAVILHRMWIDGNDFQWGAEGGQA

SEQ ID NO: 127219 - protein, 337 aa, unidentified
MIIVGCDFHPSYQQIAFLDTERGEAEEKSLTHASGEAEQFYGRLPRPALVGMGAVGNSQWFAGLLERLGHQVWMGDAEQIRASYVRQQKTDRRDAGHILKLLIEGRFPRTWTPTTEMRHHRQLLVHRHKLVQLRTRVKNELQHLALNQGMQRKWRLWTVEGRGKLEALSLERWASQRRLDLLQLLAMLEGQIELLNQAVAEVADAYPSVRLLMTQPGVGPVTALAFALTIGDVGRFSRSKQITSYLGLIPREHSSGGKQRMGSISKQGNRLLRTFLVEAAQSVVRFDPGFRREYQHRCHQKHRAVAKVAAARKLAVRLFWMLRTQRPYPDVFASRVA

SEQ ID NO: 127220 - protein, 338 aa, unidentified
MTIVMGLDQHRAQITAEWMDTETGEVMRSRISPAHRAGVRRFCERFRGQELEVGLEATTGWRFVADEFRRVGASVHLAEPAETAAMRGNKRRAKTDRADARHIRELLTGGRLPESWIPPGHILDLRARVRLRHTLSHQRGEWQQRIQAVLYHHGCPQRGNLLTSEGRSWLAAQPLSAGAREQITIALGVIDALEAQITPLEKELRSFARRQTGCKAVMGQFGVGELTAVTILAELGDARRFSSSRDAVRFAGLDITVHQSDQRRAPGHLSRQGPPALRWALFEASMCAARPCSPDYEYYSQAAERLGSNRARLSVARKILKRSYHLLRELGEEALAPA

SEQ ID NO: 127221 - protein, 319 aa, unidentified
MINYIGIDISKRDFHVCFEEGGDIIKFNNDASGIKVFLKYLKAHKYNTENTLIGLESTGSYHLPVAYLCTKAGHTVHVINPLITKKQNQTTLRRVKTDEKDARLIRYCLINGAGYPFCETKDTLAIKTLVRQRAGYSMLRHCTRLKHEEVLRREDYLKTSITAINKELYDFLDRKIKSLDAILRKYDSKTQKLLQTIPGVGPQTAVTILSEIGDINRFPNSQKLTAWIGLDPRTHQSGTSINGKGYITKRGNKILRTRLFNATSVAVIHPPNIFYDFFQKKRSEGKPYRVALVATMHKMVHVVYAVWTKEKPFVNNYKN

SEQ ID NO: 127222 - protein, 453 aa, unidentified
MPRKRVNKSKRVALPILNPDAAGIDIGATEIYVAVPADRNPEPIRMFATFTQDLSELADWLQQCRIRTVAMESTGVYWIPLMQILETRGLEVYLVNAKHVKNVPGRRTDVSDCQWLQYLHSVGLLRASFRPAQDICALRSLLRHRASLVDMVSCHVQHMQKALDQMNLQLHHVISDITGTTGLAILDAILDGNRDVHALATLRDPRIRASHETIAKSLVGDYRREHLFTLRQSVALYREYQRQITICEQEMHQLMKDLETKADTTATLPTAKDSVKKCKVMAPARAMALREEAYRIFGVDLTAIPGISVLHVQCVLAELRHGISKFNSSGAFSSWMGLCPGNDISGGKVLWTGTRKVKNRIAVTLRMAAQSLQQSESALRVFYRRMRTRLGAPKAVTAAAHKLARIIFHMLTTREPYDESVFAQAEQKNLQRMEHRLKIQARALGYTLLPVQP

SEQ ID NO: 127223 - protein, 467 aa, unidentified
MPRVRPHPHRRGPAVTLPPELHQVNLNAAGIDIGAAHHYVAVPPGRDPDGRDVRTFGAFTADLIALADWLTRCGIETVAMESTGVYWIPLFEQLTERGFEVKLVDPRQLKHVPGRKTDVLDCQWIQQLHTFGLLAAAFRPADQICALRSYLRQRGMLVRYAAHHIQHMQKALEQMNCKLTHVVSDIAGLTGLAIIRAILAGERDPHVLAQLRDRRCKADEATIARALEGTWRREHLFELRQAVELFDFYRAQIAACEAEIEAQLGQFADQSGGQPLGDAPRGRPAGRGALSFDARQHLQRLTGVDLTRIDGIDAPTALKLVAEIGLDMTRWPTEKHFASWLGLAPGSKVTGGKQFSGRTKPSANRAATALRLAAHSLHHSRSALGAFYRRLKGRLGAPKAITATAHKLARLIYRMLRFGTEYVDSGQDYYEQRYQRRVVAHLMRRAQQLGYQLIKNEPVSVATTSPA

SEQ ID NO: 127224 - protein, 396 aa, unidentified
MRFAGIDIAAEEHVVAVVGEGAEVLVRPTAFGEDGAGYARLLELLRSPEALLVAMEATGHYWKNLFAVLAAHGHKVALLNPLRTHRFAGEDLPRAKTDAIDALSIARFAAQKRPVATALPDSATEELRELVRLRDRTVQEQGDKTRQLHRLVDLGFPEFRREVRTLDSMLATAILRECPTAEAFRRVALKRLAALKYDGRRKIGKDLAQALVRAAKDSVGQHHGPAYQIQVRYLCDDLDTLRARLKDLEGDIESTLRTHEVGSLLTTIDGIGAQTAARLVAELGDPARFRDANALASFVGVVPATSHSGKHRPARAGLSHLGHARLRRSLWMPTLTAVRRNPWLRAHYERLRANGKLPKVALVASMRKLLHAVYSVAKNRRPFTPLLPPAPLPPHA

SEQ ID NO: 127225 - protein, 331 aa, unidentified
MRIKQTIGIDISKLKFDVRIHSNQMFSVFENTNNGFKKLIKWVNCNNPFSKEETLFIFEHTGIYSHQIAVFLTEQHLPFALVSGLEIKRSLGIARGKNDKVDATKIALYGYRLRDEIKPYKMPCEEIINLKRLLSLRDRLVKQRAGYKASLKEFSRVLLKKDNEILLVTQEKMIKYLTKQIDKIDKGLDAIINNDNILKDIFTLVTSVKCVGRQTALFIIAYSEAFTKFKSWRQFASYCGVAPFPNTSGTSIRGKTKVSHLANKKIKNLLDLCAKASINYNPEMRTYYDKRVAEGKNKMSTINILRNKLLSRIFAVVNRQTPYVNIMKYAA

SEQ ID NO: 127226 - protein, 315 aa, unidentified
METMEARYVGVDVSKDRLDVHVLPEGAAFAVARDGKGLAELVERLSALQPQRIAVEATGGFETIVAAALAGASLPLVIVNPAQVRHFAQALGRRAKTDPIDASMIARFVEATKPDLRPLADEAAQLLADLVARRRQIIEMIVAERNREKRVAVRRIRKSIARLIAALEKELSEIDAEIDASVRGSPAWREKEDLLASVPGVGPITARTLIAELPELGTLDGKRIASLAGLAPFTRQSGQWKGKAMIAGGRKSVRSALFLASLAACRHNPVLKAFRQRLIDAGKPKMLVAIAAAGKLLTILNAILRDKQPWRPENA

SEQ ID NO: 127227 - protein, 354 aa, unidentified
MNNTIIALDLGRHKSVACVFDRGTRAHAFRELDTTPGALDRLLASYPGAALVIEACANAGWVHDRAVAAGHPVKVANTAAEAWKFKHLKRKTDRDDALRLAQLEALGQLPTVAMPDPATRQRRMLIACRQELVGRRVACQNRIRALFAAAGLATPSGHRAWTEAGLLALAAHARPLAACAPEELWRGVLQLALAEYAALVAQIAEVERALDALAKCDPATVLLETIPGLGRRTAEAVAAHVGDATRFASAKQVGAYAGLVPRQYQSGVTDRKGRITRRGPALLRKLLVECAWCMLRYNGWARAVYARLTGGGQARKKPAIVALARKVLVRCWAMLRDGVPWRDEPDPASGRRAE

SEQ ID NO: 127228 - protein, 430 aa, unidentified
MNTNTISKNPPPQPSEESSPVQPEAWIGLDWGDKNHAFALQDRSGKSESGTIDHSAENLHQWLGELAQRYGSRPVALAIEASRGAVVHALLQYPWLKIYPINPVTSARYRSAFTPSGAKDDLPDAQVLLDLVRNHTDKLRVLEPQEAVTVKLAGLVEARRAMVDQRTSVLNRLTSLLKSYYPQALQLLGDLDTELAVDFLSRWPDLISLKAAKPGTLKRFYYQRQIRSDELVQERLALIAKAVALTTDEARVSVAVLQLRQLLDQLRVFHKHIPLLNAEIKVVFASHPGADLFRELPGAGPQLAPRLCVAFGTIHSLYPDPSSLQKYVGVAPVREKSGNQIWTHWRWQAPTFLRQTFVEWAGQTVRYSAWAKIYYERMLKKGKKHPAILRALAFKWIRILWKCWQDQTPYDEARYLKQLAHRKSPNAVTI

SEQ ID NO: 127229 - protein, 353 aa, unidentified
MQIKSQIKSQIKSIGIDLGKTTFHLVALGTHSRVVVHKKFSRQQLLTYTANLPACLIGMEAGVGSHFLGRALRAQGHQVRLIPAQFVRPFVKSNKNDYRDAEAIAEAVERENMRFVPIKTEDQLDVQALHRVRERLVSRRTSVINQIRSFLLERGISFRKGPASLRRQMPEILENAEEKLSTRMRRLLDFLWQEWKHLQLQIESLNEDVEQIASQDEVCARLQQIPGVGPLVATAVVSAIGNGAAFHKGREFAAWLGLVPRQWSTGGKAKLLGISKRGNPYLRKMFIHGARAAVLRVKRQGSCLGQWMSGLETRAARNVVIVATANKLARISWAVLSSGEDYHPMHRAVSSAS

SEQ ID NO: 127230 - protein, 408 aa, unidentified
MNPLYVGIDVSSKSNVVYFMLPDGSKHSNFSVANSHTGSSQLVKRILSAMTSCSLDTVLIGLEATSVYGDNLVYFLREDAALARFNSKIHVLNPKQVSKFKEAYNDLPKNDLIDSFVIADCLRFGRINKEVYIGDYRYKALQNLTRARYFAVSNLIKEKQRFMNILFKKYSTMTQEKVFSDTFSTTALAVYDEFESAEALADMDLHELTAFIMEKGKKRFPNPDAVAKAIQKAARSSYRLPKTVNDSVNQVLSISITSIKALEAQIKEFDKAIAAQMELLPNVLISIPGIGPVFSAGIMAEIGDINRFHNQAQLAKYAGLAWKQHQSGDFEAQTTMLINSGNRFLKYYLCEAAFSLVRCDKEYSDFYHLKYKEVNRYQHKRALALTARKFVRLVFRLLKDNRLYTSAE

SEQ ID NO: 127231 - protein, 455 aa, unidentified
MSKSNRTDTPLRAARAQISNPEITVHATYRSAIGIDVHLNLLVCCHQKQVEGHCEQSESRDFNTDRASIDAFAAWCRECNPDIILMESTGSLWQSPYDALERAGFTSERLALINARDAKAAAGRKTDRKDASRLASLARTGNFRKSFVPEKDFRLQRVISRDLQKNRNDISRTSNRFGKSLNLTGCRPTTVFSDIRGGKAASCILMAKLRDDPHLFEVIKQNSRRLRASPEQIMQALNFEIEPMMKEQILALREKINQLEEYDRSTFERLRQLQAPYEKDIQLLITITGIQERSARMIYAELCANLKEHFPTSEQFASWLGICPGDNTSAGKQKSGKCPKGNKHLRRTLIEAVRGLVVGGTAALKEKFQVLKMRRGYRRAMVAFAHLLARIIYSVLTHQKGFEPYQSTAFRDTLIERAKNGVKQLLKLKGTKYVIADGLVVETKTGAILGAVVSS

SEQ ID NO: 127232 - protein, 426 aa, unidentified
MSKFLYSPVVGIDVASDHSIVTILDTQGAIFRKAFRVEHDSKGFKYLLAEIKKAEGIFLMDIHVFMESTGIYHLNLFYFLKINNINAYIINPLITNCNKNKNIRKVKNDKLDSLAIAKMGKYDDIKTSDFFEVNLYDLKVLCREYYHLTDMHAKQKKKLTNELHVIFPGYDKVFDEIDSKTSIAILQKYKTPHAILKASKDEMLQIISIGKQTLAWREKIYEKLILASNNAIDIGIPSNIFSVKIEIILSILDSIRVQIEKIVFEIKGFLYSENMPEQFKKNFELIKTIPGSGFISALTVLVEMSNFNFFSSPKKLVAFFGIDPSVEESGKYKSDNNKISKRGSSFARRALYFIALSSIRKKTNGVLMNPVLKEFYANKIAHGKKKKVAIIAVMHKLVNYIFSILRDQKCFELRDPNAHKELYCVK

SEQ ID NO: 127233 - protein, 348 aa, unidentified
MKGSYVIGMDAHSVETEVAVLTPAGQVRQRQRVATSALKLRQIVSAVPKPRRVVLEESTIADWLWRSLLPVADEVVVCDPRRNRSISGGDEKCDRRDAEELARLLQGGYVKRVHHPESIERIIFKEHVGFYHDRVRQRVREANRIGSMLRRFGVMAREKDLADPDRRAELLERLPDDGLMRTNLELAWFGYDAVATQVSECRKKLVARCRHEEVLRRWVRVPGIHWVRAATLFVHLDTPWRFRSKSALWKYLGIGLRRRQSGASPGWLGVPRQVNRRLKATILGAALSAVAGDNPFAAQHRSWLKNGLAPLVARRNVARRLACTLWGMWKNQTAYRSDWVGQAAARSG

SEQ ID NO: 127234 - protein, 270 aa, unidentified
MEYIAFDCHKRYTWAVVEDEQGQILVEERIEHAPGALREFLAVWEPGSPVAVETVGNWYWIVDEIEQAGYKPRLVHAGKAKLMLGMVNKTDKLDARGLNKLQRAGTLPEVWIPPGELRDVRELPRTRMVLVRERTRLKQRIHATLAKYGIQVEASDLFGVKGRHLLRGQLPLLPPHTRYVTKGLLRQIEALEEEIRALEERMREVLSPTREVELLQTLPGLGFILATVIALEVGDVGRFPGPGQLASYAGMTPRVHASGGKVRYGRTRRT

SEQ ID NO: 127235 - protein, 397 aa, unidentified
MRFVGLDIHKEYFVAVGVNSERRMIFGPQRVSNYQLDEWILRHLTHEDSVVLEMTTNAYLFYDSLLPHVHSVIVVHPAHVALVTQVDVKTDKKAALALAELHAVGLLTGVWIPPHEVRDMRSLIAQREKMVRLSTIAKNRLHAVLHRKPLIIAENSFSPEQRSWWESLPLSETEKLLVGSDLDTLEFAQRQVNYIEVNLKQKSLQDERIPYLIQLPGIAWLTAMTILAAIGDISRFETAKKLVGYAGLGTRVHDSGMTHSSGRITKSGRKDLRQAMVNAANHAVQNHPHWKQAMARLEPHLGRSKAIVAIARKLLVAVWHVLSEKVADRFADPQKVASSFLHLAYQIGARNLPNRISALAFTREQLDHLGVGEDLQQIDWGSRPLRLPPSQLLIEKE

SEQ ID NO: 127236 - protein, 347 aa, unidentified
MDQQCHYVGLDVSLETTSICVIDDAGAVIWRGKCRSDPDTITAIVRQHAPGAVRVGLETGQLSNWLTLSLRRRGVPVVCMDARHAKAALSLQINKTDANDAFGLAQVVRTGWYREVAVKSMDAHTLRMLLVARSRLVSQRQATANTIRGLLKTFGLVVAQGSKGLFPVRVREQIAGNPTLIAIIEPLLAVWHAIRDQVAMLDRQMLARARNDQVARRLMTIPGVGVVIALAYTAVIDDPARFRRSVSVGAYLGLTPRRYQSGEVDTTGHISKCGDSLLRGYLYEAAAVLLCRDARASILKSWGLGLAKRIGMRRAKVAVARKLAVIMHRIWSDHSEYRWTAIPPTAA

SEQ ID NO: 127237 - protein, 311 aa, unidentified
MAGGLYIGIDVSKDSLEVAFGCDGEVRQLANRDHAITALAAELKKLGPELVVMEASGGYERMVTALLWEAALPVVVANPGQVRDFAKGMGQYAKTDRQDARIIARWAEVKQPPLRQLPDAQGRELSELLTRRRQLLEMLVAERQRLTQTVSKPIRKELSASIGSLQRRLEKTEAEIEQRIRKSDLWNRTRELLESVPGVGKLTSFMLLAELPELGTSDRRQLASLVGVAPYPRDSGKWHRPRLIHGGRAAVRSALYMAALSAARCNPVLAPFYQRLLSRGAAKKQALIAVIRRLLGILNAIVRDRTPWRLS

SEQ ID NO: 127238 - protein, 354 aa, unidentified
MDNIKYIGLDVHRDTISAAVLNGSGRLIQQSVLMTRAAAILDFIGGVRGTLHVTFEEGTHSAWLYDLLSRRVEKLVVCNPRRNALLKSGNKGDAIDARKLAELLRAGLLSAVYHGETSALEVQQLARSYTMLTEDTTRVMTRIKAVFRGQAIACTGRKLYGHHRNEYLAALGVCALRRRAERLYLQLDALQLLRRQARHDLVVECRKHTAAKWLQTVPFLGPLRAAVLIARVQTPHRFRTKRQFWNYCGLALETRDSAEYRVIDGQLERKKRPTLIRGLNWNYNHELKNVFKGAANAASVGQGEFRKFYLGLLKKGMRPEMARLTLARKIAAIALKIWKKGESFDAEHLKSKAA

SEQ ID NO: 127239 - protein, 359 aa, unidentified
MSVYVGIDVHRKRSQVAVVDAAGEVLVNRNVVNGVETVLGVIGELPIGTPVAFESAYGWGWLVELLDTYGFAAHLVHPARCKAIASARLKNDKVDAAILAQLLRTDLLPEAWIAPPPVRALRSLLRHRVQLVRLRTLLRNRIHAVLADHGRDRAAGCWSGPGRAWLGELDLPAPSREVIDDCLAMIDALQIPIDRLDAEVLTHARADARVKVLTALPGVGPLTALIILAEVGDITRFDSARKLAAWAGLTPTVRGSDLTVRHGHISKQGSTWLRWILCEAAQTAKRSPEFATTYQAIARRRGKKIATTAIARKLLTRAYHLLDEHQRAAQPPPDQRPRRPRQATNTAPKTSPGRARESA

SEQ ID NO: 127240 - protein, 317 aa, unidentified
MSGYGDAFIGLDTSKAKNAVAIAEDGRGGEVRYLGEFENTAPATRKLVSRLTEKYDHLHFCYEAGPTGYGLYRQLQDLGQDCAVVAPSLIPKRPGERVKTNRRDAVSLARLHRAGELTAVWVPDTLHEAVRDLSRARETAMEDLRRKRQQVTSFLLRHGRSYAGRTTWSGRHRRWLAEQTFDHPAQQLVLQEAVDTAKEAEARLDRLGAALAEIVPTWSMAPVVAAYQAMRGVNFLAATTLVAEVGDLRRFDNPAQLMSFLGLVPSEHSTGDTTRRGAITKTGNRRARRVLVEGAWSYRFGARVSVLHGYSQSKSTG

SEQ ID NO: 127241 - protein, 422 aa, unidentified
MLEETNDSEEIIERVAALDIGKAELVCCVRVPGEGKGGKRLQEVKTYPTMTRSLLVLADRLAGLGVTRVVMEATSDYWKAPFYLLEAHGFEVWLVNARDVKHLPGRPKTDRLDAVWLCKVAERQMLRPSFVPPPAIRRLRDVARYRVDLVGVRTAEKQRVEKLLEDAQIKLSVVASDIFGVSGRAMLAALIAGERDPKVLAQLARGRLRAKLSVLVEAFTGFFTDHHAFLLAKMLARVDALDSDIAELDRKLEELIVPFAAAVDRLDEITGVGRVAAQLILAEIGTDMGRFPTAGHLASWAKFTPGVKESAGKKKGKSSTGHGNRYLARVLGEAAVAAGRTDTFLGERYRRIARRRGTKRAIVAVGRSILIIVWHLLADPTARFHDLGPGFYDTRINAERTKRNHVRQLEALGYKVTLQPAA

SEQ ID NO: 127242 - protein, 336 aa, unidentified
MQIYGIDLSMEKFDVNYIDKNGKEKNKRVKNRLIDISGFLDTVSKKAILCAENTGPYGDLLVFLSNQAGIKIALVSGYTIRHSFGMIKGKSDTMDAGRIREYGERFKDKLIFKQYDTEEVFELKSLYSFRSQLVRAIKILQTGKHSRSNTPMQSISVKKHTDKALESLNFEIKKVEAEIEAIIKNSKEMKENYELITGIKGVGPVIATDLIIKTGNFKVIDTARKAASYAGICPFPDESGKMKGKRKTSPFADKKLKSLLYMGARSAVKHNKEYRLYYQKKQLEGKPHYLIMNNVSNKMLRTIYSVVINKRPYSQEYICLDPRELKNINSSTEKVA

SEQ ID NO: 127243 - protein, 424 aa, unidentified
MIPVPSYVLLVTILLIWRKISKYINMNRNRTVAGLDVHKDSIYLCIMGHDEAIIFEKTYGVLTPELRQMCNDMVDRGVSEAAMESTAVYWVPVWNELCESMELKLVNPYFIRQLPGRKSDVRDAQWIAECLLKNLIKGSFVPEPIVQDMRKLNRRIFDLQEDLTYYSNKLDAALQRCGFRLSNYVAKITGKSYRKAVESIASGVTDPDELIKCVHGRIINKHGRETMLAAMTGSFSTTDITVIRQYWELLAIYTRQSEECQSKLTALCEAHFPTEYKRLQTIPGVKERAATAIIAETGVDMKTFATAASLVGWCGLKPRNDVSNGRYKSRKITHGNKYLRKILIEISWTASRTRNCFFSNFSYIQVTQKHKSKMKIQVAIARKILVAVWHMLSKQEDFIDLYLKRLEEQRLMEEKIRQLESKMA

SEQ ID NO: 127244 - protein, 426 aa, unidentified
MKVMHDRVAAIDVHKDMVKVAVRVPGERRGTRKTDVLEFRTFYGVLEEMGRELRRRGVTHVVMEASGVYTEPVYYALAGLDFTEVMVINPAHAKALKGHKTDARDAIRLLDLYECGLLSGSCIPAPDLKEVRDLARYRMKTVQARASEIQRLQKTLETAGIKLSSVVSDVTGVSATAMIEALTGGERRGAVLADLAQGRLRNAGKMADLSMALTGRFTDHHALMCRLHLDRIQSLGEAVAGLDATIAPLAARHAREAALLKTLPGFGDVIVAGWLGAIGPAPHRHFATAQRLASWATVCPGNYMSAKKSKGGRTGDGGNYIKPLLVQAAWAAVRVPGRLQARFHRLVRRFGGARNKGAVKRAIMAIARTLLKIAYQVLKTGTPYTDPGADFYASRETTQARQDYLIRQLQKLNPGCVITVTPAEAA

SEQ ID NO: 127245 - protein, 463 aa, unidentified
MKRNRWRKSHQPRRGPSLLERINPDVAGIDLGSAQHYVAVPTDRDADPVQSFGTFTSDLHRLADWLKTCRIRSVAMEATGIYWIPLFEILEAEGFEVLLVNARHVKNVPGRKTDVSDSEWLRDLHSVGLLRGSFRPADAIVALRGYMRHRETLVESMSAVIQRMQKALLQMNVQLPQVITDITGKTGMAIICDIVAGRTQPEQLAQHRDWRCHASEAEFVEALTGNYRPEHVFVLKQNLELFQIHQSKLADCDVAIESQLQQLASRCQPPATKLPPARHRRKVSPNEPGFDIRKYLHQLTGVDLTQLDGIGPHNALRLIAEVGTDMTRWAHEHDFTSWLTLAPNNKITGGRLLSSRTPASANRAAKILRTAAMTVGKTQTALGAFYRRLAIRIGKPKAITATARKMAILIYRMLKGDIVEYMDPGPDTYNVRQRQRAVRNLRRRAENLGLTLIDTDTGELVPA

SEQ ID NO: 127246 - protein, 411 aa, unidentified
MIKENYMYVGIDLHKETHTAVIIDCYNQKLGEITFPNRPADFPKLVTKVKKCNTDGKEVVYGLENAYGYGRALAVWLIDKGYLVKDVNTAISHRQAKHRGAMYRKSDSDDAEAIALATLNMLDKLPDAYPDDAYWSLGQLVHRRDNIMKQRTRLVNQLHEQLCIAYPSYKQFFNDISRPTALYFWEHYPSRKYLKGKSVEDLRAELVPVSHNKCSTKTCEKILDAVASDKVKNNAYQDARDMVTLSIVSDLQHYDSQLAEVDKMLEQMYKMLGCTLTTIPGVNVITAVKILAEIGDIKRFSNANKLARFAGIAPLHLSSSGKGKDVAAKQGNRRLHATIYFLAIQMVQVSSKGTPRNSVVRAYYEKRKAEGKTSQQALICISRRLISIIYGMLKHGTEYRMPVVESAGENR

SEQ ID NO: 127247 - protein, 269 aa, unidentified
MKDMLIGVDLAKNVFQLHGASMTGDVKYRKKLSRGQFFRFMSEQPSALVVMEACGSAHYWARELVKLGHAVKLIAPQYVRPFVKRQKNDATDAEAIVIAARQPEMRFVEPKTADQQARAVLFRARERIVHQRTELVNALRAVLYEYGQVIPQGIGHIKRIEAIVENAEIGLPELVQEECRDLLAQIGEKTARIEKKAKKLAELSRQSETARRLQTMPGVGPLIALAVEAFAPAMQSFRCGRDFAAWLGLVPRQFSSGGKERLGRVSKAG

SEQ ID NO: 127248 - protein, 425 aa, unidentified
MDIKYPICCGVDVHKSFLVAVIIKDAQPKPQYIKKRFSTFNNDLIEFKKWLISNDCLFLCMESTGKYWIPVYNILEDKINVTIANPKWVRAIKGEKDDNKDAKWIAELFRLGMVRGSYIPSKEIRILREFTRYKYKLTCLRSGEKNRYQNCLTVGNLAVDHVFSDVFGVGSQAIIEYILATNETDFDDAYCLSLLPKKGRRKATDQEILNAVKNSNFTSAQKIRISIVKEHLDYITKSISKIDLTINSLVEPYEMYINLLSTIPGMDRNSAIITISEISTEMNHFDSSRRLCSWAGLTPTNNESAGKKKSVKISRAGIYLKPCLVQVAHAAIKDLKNPYYAKKFDRISKRRGNKRAIIAIARMILTAAYHIISTGEEWNPTDLQSIEMPKEIKIKLAKSDLQKSIKTLIANGITLEEITKAYLPT

SEQ ID NO: 127249 - protein, 357 aa, unidentified
MDYGVYCGVDFHARQQTICCLTTEDGVIATYELKHDNKKAVRDFYAQLPGPVLVGLEAGGYSLWFEQLLEELNHEIWLGDASEIRRCARRRQKNDRRDAALILDLLVRGEFPRIHRQTALSREILRMLRYRHRLVKIRTISKNCLQALAIQSGLALKSQLFTEAGRQQLASLAMSPAMQCQRKQWLELLATLDERISTCEKWLSDQALADQRVRRLRTHPGLGLLTALAVLHTLDPVSRFPNQRKVAAYGGFDPCEDSSAERKRYLGISKAGSKLLRFLLIEAGQTAVKEDAELKRFYWRLQQRRNKPKAKVAVARKLLIRSYILLRDEIDYAEFQRRAVAARLARENTRLPCLSSD

SEQ ID NO: 127250 - protein, 406 aa, unidentified
MLLSIPFFYFTKELIYVLKIVYPKCCGLDVHKTILIVTIAKTDNKNITTYETRELTSINSSILSLKQWLLDNNCKDPCMESTGKYWIPVFILLEDSINIFLIHPKYVKAIKSKKVDKKDSKWITNLFKHDLIQASFIPPTDIRVLRDICRYRYKLVNIITSEKNRVQNCMTVSNIGIDKILTDCFGKSSTNIMKCLIENKNSEIDNEKVKSLLNKGLKKKSPQIIESIISSSINDDQLFKLDVIYKYLDNLNVFIAAIEDELSNRAKKNKAFVDLTCELPGIDTFSAIWRIGEIRTNMDVFQDAKHLTSWAGLTPTNNESAGKKHSTKISNAGCYIKPILIQCALCAIKVASNTYYYNKYISIKNRRCHKKAIIAIARMMLTAIYYMFKTVEDWNPYDNEDSKKTS

SEQ ID NO: 127251 - protein, 413 aa, unidentified
MEVLHSRCAGLDLSKRDAKVCVRLVPPGKSRASQEITTWSSMTADILALREHLIAAQVTCVAMEATGDYWKPFYYVLEDGPFEVMLVNAHDAKNLPGRKTDVSDAAWLAQLAAHGLVRASFVPPPPIRQLRDLTRTRTAITRERTREAQRLEKVLEDAGIKLSVVATDITGTSGRAILGAMVAGERDPAVLADLSVRQLRAKIPALTKALAGRFSDHHAFLVELHLQLIDQHSAAIATLTRRIEEAMAPFRAARELICTIPGIGVPTADVIIAEIGADMSRFPTAGNLASWAGVCPGHHESAGRIKSSRTRPGNRWLKGALGAAALSIARHPGTFLHVKYQRLARSRGKSKAIVAIEHNLLTLVWTMLTSGALYNDPGPGYYARRNPERSKNQAIRQLEALGYHVNIEPRPAA

SEQ ID NO: 127252 - protein, 362 aa, unidentified
MRIIGCDLHARQQVLAMLDTTTGEVVNMILKHEGDNVREFYSKLPRPVRVGIEATGSMQWFINLMEELGTECLVGHPAEIRAAEPRKQKHDRRDAELILKLLAENRFPAIWLPSRELQDLRSLLRHRHQWVRMRTRIQNALQSIALANGLRRGTALWSHDGQTQIASLPLAPHTAYRRSELQAMYEKFEAEIEKLNQRVEEQACKRPGARLLMTHPGVGPITALATEVFLGDPARFADSKALASYVGMIPREYSSGGRQRLGGLSKQGNPLLRFLWGEAGAHAARKDPELQRFYRRKLVQKGLGKASVAVARKLGIRLWIMLRDEIDYNEFCRRGQKQQKSSDACAGMPETRNGAKSHRPVD

SEQ ID NO: 127253 - protein, 473 aa, unidentified
MSKGSGISRTDRRRNARKERLRGMVPRGGAVLGIDLGEDKQALALIDHDERVLWRKTERVKAHRLGDAIGAAAEAARAAGIEAVTVACEPTGSRWMQVQRLCRERGLPLVCIQPLMSHIAREQQDYTTHKRDEPDAVLIARLACELHCYIPEELDETWAYLRGLGRRRAQLITAVAASVLRIRDFLSVAWPSAITAAAGPFDSLTWLAAVEAVTARCGPDPARLARMTEEELLAAVAETGRGWGLKRPVRRIVRNVLAVLDDPDAVGWSRRGLFRRTRDELADLRHNRALLCEAEAAMTAVLEGELGLARLGDIPGLTLAGAAAILAETGDPRRYETSKSMVKHAGLSPADTSSGASEGDSHISRRGRPALRSAAWRAITPLLQHNPVMAAKYQAMVAAAEESAAAAAAGARPGSARAAQAGRAVRAARAKARVACAAALLRWIYFMTVHDAGWDPAAASGGRPDQQDALQAA

SEQ ID NO: 127254 - protein, 334 aa, unidentified
MWHIGIDLHRKMLVMAAVKDDGEVIDPVRIDCQDTAAILAAVEGLKPFRAVIEATGTYRWLYDLLSPHGTVLLAHPLRLRAMIQRRAKTDKLDAQLLANLLRINQIPLAYVPPEDYQQLRDLTRTRARLVRGQAEAKIKLRALLARQNRSAPYKVPFGPRGLAWFAKQDFGWLENLVRDELLARMKHYAKHTATIDERLEELRERFPEAGALLDIYGMGVFSALVIIAELGEVDRFRTARQVGAYAGLSPQVHQSGSHCYHGSISRQGSPWLRWVLVQVAMHVVRDDVALQNFYTRIRKRSSAKIARVAVARKLAEICWKRLRRWHEQHGRKAA

SEQ ID NO: 127255 - protein, 307 aa, unidentified
MMKDGINISKAHLDVCRPATAQTARFENATAGLTAFKRWIGSTQLDLVVYEATGAYHGLLEKRGSGHLPLVKVNPLQARRFAQARGTRAKTDAVDARVLALMGEALGLQPDIPASEDYHDLKQLRVARTSMIKAHQRLKNRINTQTLCLLRRQAKAQLALLDRQLEAIDAEITDRLSQDQARALDILQSIPGLGAVVAATILSECPQIGTMDCKQTASLAGLAPMTRQSGQWRGKAFIQGGRKFLCDALYMPALVAIRFNPDMKQKYDAMRQAGKPAKVAIIARMRKLIERANTPRKQDRKRAPKHA

SEQ ID NO: 127256 - protein, 344 aa, unidentified
MVIIGIDPHKSSFTAVVIDHSGVTVASHRFVVNAGTATQMTKWGEQWPERRYAIEGAKGLGRGIAQILAARGEDVVDVPSTLAMKVRVLSTGGGRKTDPDDARAVALTALYHSGLHNVHREDQTTILRLLSERRDDLARERTRVLNRLHQLLRELIPGGVPTGLSADKAAAAMRRIKPGTATDACRRDLAKEVLTDLRRIDANIKANEAQMRDALAATPTTLHEIHGIGRVLAAKLLGHIGDITRFPSADHFAAYTGTAPLAASSGENTRHRLNTGGNRQLNSVLHTIAVCQSRDPGPGRIYYQRKLGEGKTPAEARRALKRRLANVVFRRMIRDRQHAFAVTA

SEQ ID NO: 127257 - protein, 326 aa, unidentified
MQGKESSEQKAKVKSSAGIDVCKSWLDAHVLPEGCSLRVVNDARGHRRLIAWLSQYAVSLIAIEATGKWHRQVHRMLHARGFQVAVVNPRRARLFAEAIGLLAKTDRLDARMLALLAVDLSPPARAPAPEAIEALQELVAGRDSAVAEQTALENQLAAATTTFFTRQLKARIVRIAKDIASLQTEIERRIGCDEALARRYAILISIPGVGPVTAATLIANMAELGTCSTKQIAMLAGLAPVADQSGSREGRRAIRAGRAAVRRVLYLCALAAKRCNPAMTALYTRLMAAGRPHKVALVAVARKLIVLANTLIVQNRLWQSQPPIQA

SEQ ID NO: 127258 - protein, 341 aa, unidentified
MKPTVVGVDIAKRVFQLHWVEQDSGEIVTVQLKRAKLLEHFANRAACVVGMEACGGAQHWARELHKLGHEVRLLSARMVKPFVGGNKNDAADARAIWTAVQQPGIKLAAVKSEAQQAVLALHRMRQQLVKFRTAQINGLRGLLTEYGEVMPQGRGAVRAQIAGVLQRLADRLPGLLIDTLREQVARVGELDVQIQEIERRLQQWHRHDAASQRIAAIPGVGLLSATAAVATMGDAKVFKSGREFAAWLGLVPRQSGTGGRVRLLGISKRGDTYLRTLLIHGARATITHGKEHPAWITNLAQRRPKNVAVVALANKMARTIWALLAHERVYQSGYVRQPLQS

SEQ ID NO: 127259 - protein, 354 aa, unidentified
MEEVVNARSVSFAEKRIYIGLDVHRSFFVATCLCEGAVVKRCRMPARSEAVISLISKYFPESKVKTCYEAGYSGFWLHRDLESAGISNIVVHAASIEVAANDRVKTDKRDSLKMATQLEAGRLKGIRVPSVEEEYRRLLTRTREQLMRARKRIQVQIRMRLHQFGLFPEEIKGVMRLKDVEKILTTLEGELKLAIELLYGQWVYIAGDIQQIDKKLSEQAQADSLEEIYRSVPGIGPLTARVLSNELGDMSQFLNVRALYSFTGLTPSEYSSGDKVHRGHISRAGSSRLRHMMVEAAWKAVRADEPLHDFYWQLAKRAGKKRAIVAVARKLIGRVRAAIRDKGRYEIRTHKKAA

SEQ ID NO: 127260 - protein, 331 aa, unidentified
MSYFVGLDLSLKETAVSVVDRQGKKIWYGKTLSDPESIIHSLRLWRQEIELIGLEACPLSEWIFAGLRDQGLNVCCIETRHAQRFLSSRPNKTDRNDADGIAQMMRLGHFKPVHVKSRTAQGIQTIIAARAQIVNTMVKLELTARGLIKKFGHKISRGGRVSFAERVRMAISADADLYMAINPLLDSRETLRRQKLSYDKVLYAMSRKSTVCRALMTVPGVGPVTSLAFVAIIDDPERFANSRAVGAHLGLTPKTYQSGEIDHNGHISKCGDKMMRLLLFEAAGVLLARAKQSNPLRAWGIRLQRNVETRKPERLLRESCQSSCIAFGRST

SEQ ID NO: 127261 - protein, 406 aa, unidentified
MRVLYERCCGLDVHKQSITACALTPEGKEIRTFGTLTDDLEELVDWLKEKKVTHVAMESTGVYWKPVYNLLEAEPIEVLVVNAQHIKAVPGRKTDVKDAEWIADLLRHGLLKGSYIPHRAQRELRELVRYRRSLIEERARELNRIQKVLEGANIKLSSVVSDINGMSARLIIRALIEGKDDPAALAQLAKGRLKQKTEELRRALKGVMGPHQRMMLAEQWRHVEYLDEAIARLDREIEERTSPFHEALELIDTIPGVGRQSAEQIVAEIGTDMSRFPTAAHLASWAGMAPGNHESAGKRLSGRTRKGNKKLRSCLVECARAAARTKNTYLSAKYHRIAKRRGANRASVAVGRTILEMIYYILTRKEPYRELGADYWDRQREASIVRQTVKRLEGLGYEVKLEKTSA

SEQ ID NO: 127262 - protein, 377 aa, unidentified
MKLYLGLDVHKDSTTIAIAESSRKGEVRTYGTISSDLHAVEKALSRIKKAHPNCELETCYEAGPTGFVLARRLEQLKIPCLVAAPSLIPQPSGERIKTDKRDANKLARLLRAGELISVYIPEPTDEAIRDLCRARTDAVDDLKRNKQRLKAFLLRSGYRYQGKANWSAAHMRYLREIVLAHPAQKTTLEDYLQTIDSASDRIARCEANMTSLLSEWRLKDAVLALMAFKGFQMVAAMITVSELGDIHRFYHPRQVMSYLGLISTEHSSGSKRHQGAISRCGNGHLRWLLIECSHHYATPPKVSKELSKRQEGLPKELLALSWKTQNRLHTRFKQLLGRKLHRNKAQVAIARELCGFIWAALKMQQCYNAHEAESQQA

SEQ ID NO: 127263 - protein, 320 aa, unidentified
MAQQGRIVGIDVAKLKADACIRSLQLRLSQPSTAQGQQDMITWLRRNEVGLAVMEASGGYERVWAEALRAAAIAVRIVDPKRVRYFAKSAGRLAKNDPIDAEMIAWFAETFAAAAEPAHDADRDALNRLVTARSLLVRLATPIRQLGEHGQPRVVENAQRAILKTIKAQLAKLEAAIEAKIAANAQFLARRAIIASVPGFGDHFVAGALAWLPELGRISNKAAAGLVGVAPYDDDSGQHRGERHIRGGRRDIRTLLYMAALGAATRHNPVVMAYYKRLRAKGKKTKVALVACMRKLVVILNTMLARGEMWNPTPRTTAVA

SEQ ID NO: 127264 - protein, 367 aa, unidentified
MANGTLGAGREPAMRVAGVVGRWAEVGGQGVIVMGLDQHRAQITAEWLDTETGEVIRSRITPAHRQGVRRFCEKFRGQELEVALEATTGWRFVADELARVGAVVHLAEPAETAARRGNKKRAKSDRADARHIRELLMIGRLPESWIPPEHLLDLRAQVRLRHTLSHQRGEWQQRIQAVLYHHGCPQHGELLTLAGRSWLSAQPLPVAAREQITISLAVIDALDIQLAPLDARLRAFARHQPGCKVLLSQFGVGELTAVTILAELGDARRFSSSSDAVRFAGLDITVHQSDQRRAPGHLSRQGPPALRWALFEASMCAARRCSPDYDYYSQAAERLGSNRARLSVARKILKRSYHLLRELGDEAIAPI

SEQ ID NO: 127265 - protein, 734 aa, unidentified
MIALLCLVLAVLTAPFKSRSRLEAENAVLRHQLIVLQRKVRGRVRLTNNDRRFLIQLYRWFPSILQVLTIVQPETLVRWHRAGFRCYWRWKSSSRGGRPQIDADLCALIRWMSIENPLWGAPRIHGELLKLGFEVAQSSVAKYMVKRRGSPSQGWRTFLRNHAPDIAAMDLFVVPTIGFDLLYAFIIVRLDRRDLVWINVTSHPTAEWIARQITEAFPWDDAPQYLIRDRDQLYGAIVTHRLRAISIRDKPRAPASPWQNGFAERLIGSIRRECLDHIVVMGEEHLRRVLRSYARYYNEIRTHRSLDKDAPVSRPAQQAGNTCGFRSHGEVDSNRYSGRVRLLPPTLEATMQTVAERPEAPTAIRTDLGAIFVSLELSRSTWLITSLSPGGGEKMSKHVVRGGDVTGLLERFAQLREKTRARTGKVFSFVVIQEAGLDGFWIDRVLQNEGIESHVVDPASIATSRRRRRAKTDRIDGEALVRALLAYKRGEPRVCVMVKAPTPEEEDRRRLCRERKVLIAERIRHVNRVKGLLFSQGISGYEPLRRDRRERLVTLQTGDGRLLPDHLKAQVCRELDRLELLLEQIKAVEAERDVLLAAQQAPAAMLLDIKGIGPEFAAILWSEGLFRHFDNRRQVASYAGLAPTPWQSGSIDREQGVSKAGNPRLRTTLIQLAWLWLRHQPQSALALWFEERVRRNGDRLKKTTIVALARKLLVALWKYVTAGVVIEGAVMKAA

SEQ ID NO: 127266 - protein, 340 aa, unidentified
MRTTYVGMDIHKNFIQAAAMDEQGNILREQKFKTTRDNIKQFINSLDTKHIHAAIEATCTWYHIYETLNSLNVKTTLVNVRRTKVIAESKIKTDPLDAKNIAHCLRTGFIATAYIPPKQIMEQRNILRHRMSLRKELTRYKNKIHAILLRNGIHHNFSDLFGIGGKQFLKTVKLPDSEQYNLNSYLKIVETLTYEKAHITKKIESLCRNNQQATLLISIIGINYYSAMAILSEIGEITRFPNPKKLCSYAGLVPRTIQSGSHVYHGRILKECNQHLKWILNQCVHSHIRFCPNSNITKLYYRVKKKKGANKATVAACRKLLTCIWYMLMKHEMFKYNEDN

SEQ ID NO: 127267 - protein, 430 aa, unidentified
MKNGTNQRLEGITSTTLIVGVDIAKEIHWARFVDYRGLEIGKAISFTNDRTGFESIVARIEETRKLKTLREPFTEVIVGMEPTGHYWKTLANYLMKAGHRVVGVNPYHTKRAKELYDNSPTKNDKKDALTIARLVKDGSYFDPYLPQGVYAELRMLTNTRISVVERSSAIKNIITAILDEYFPEIWQVFKYPLQGKASRQVLRSCPFPSLVLAMGEAGVSFEVKKAVKKTVGARKIQQLFAVARVSIGADYGLETAKLRLRLLLDELEQAENHLAEIESAMGRMLDITGYAKQMLSIKGVGVVTAASFLGEVGDPLRFESARQIAGYAGYNLVEDSSGKSKSGTCISKRGRSQLRALLYKMAFTVVSKNPEMKALHHYLTSREKNPLKKKQSLVVISKKIITVIYSLLKKRTAYDPALALGAVRREMMAA

SEQ ID NO: 127268 - protein, 586 aa, unidentified
MLFRCLCDYLCASVVRDLRKEFTTELGYPSLRRAFRVMKLCSSMVDPESKLSYAPVVGREGRLIIGALCPSQSLVSGVSVFNIGDAFIRQSECDPVKEKAAVSAPLRPQLLDQSPVAKARKREQIISHPEKHSQRTTQNSVSNLPQHLQHINLNAAGIDVGSDRHLVAVPEGRDTVSVREFGAFTADLQALADWLEQCGVTTVAMESTGVYWIPLYEILEQRGFEVYLVDARRVKNVSGRKSDVLDCQWVQELHTYGLLAKAFRPAEEVCVLRGYLRQKEMLVQTAAMHIQHMQKALQQMNLLLHNVVSDITGATGMKILKAIIAGERNPKVLAKERDPRCRNSTETIAKSLVGNYRPEHLFALRQAVELYEIYQAKIADCEAAIAAYLEQQDHRTEDEPPSPPKPISARDRMRGGTDVRAKLYRMTAVDLFAIPGLAADTLLTLASEVGLDVSPWQSEKHFTSWLALCPGTKRSGRRVLSSKTRPSANRAAQAFRMAAATQARAKTALGAFYRRIRSRSGGREAITATAHKIARIFYSMLKNGTAYVEIGQAAYEHKFNERRLRSLKQQATALGYHLTPIAAGSF

SEQ ID NO: 127269 - protein, 350 aa, unidentified
MDIAVLGIDLGKNSCSVAGLDASGKVILRRRMQRKTIVGLASKLSPCVIAMEACCGAHHLGRVFSAQAHTVRLMSPEYVRPYVKAQKNDDRDAEAIAEAATRPTMRFVTLKSEEQLDMQTLHRARDQAVRERTSLMNQLRAVLLERGVIVPQGRAKLRLRVTELLRHGTGELSSRIQLLIEDMLTRWQGLDERIAVFDAEFTAEAKRDEAARRLTSIPGIGALNATALVAAVGDAETFARGRNLAAWLGLVPRQATTGGKYLRKMLIQGARATSPTLSRSNTGLGQWLRGLLARAHSNTVVVALAPRWRALSGHSCATAQRLSQAPRRNALRQGPEAWRAPLRATAKRAP

SEQ ID NO: 127270 - protein, 302 aa, unidentified
MEKATIIGVDLAKHVFQIHGAGADGSVAFRKKISRVKLLPFLSSQPRCVVAMEACAGAHGWARDIQAQGHEVRLIAPAYVKPFVKRQKNDMADAEAITEAAGRPTMRFVAVKSAEKQASGMVFKTRDLLVRQRTQTINALRGHLTEHGIIAPRGVFHIGRLATEVENVNSHLPVIVTELCTLLLRHIATLDEQIASLDRRIRDRAREDETARRLMSIPGVGPVCATALEALAPPPETFARGRDFAAWLGLTPRQNSSGGKVRLRASRGWGSETCGGCLSSVRRLWCDGQPGGALPQDRGSPV

SEQ ID NO: 127271 - protein, 346 aa, unidentified
MEYYVGIDVSLELSSVCVVDGRGKIVKEAKVASEPEALVCFLKELGVPVNRIGLEAGPLSQWLHAGLSQAGFQTVLLETRHVKAALSAMTVKTDRKDACGLAQLLRMGWFEQVHAKSIGSQEIRALLVARKQLLGRLLDVELSIRGILRGFGLKVGQVTRKTFEARIRELVTGQATLGRIAEAMLSARATLQAEYEKLHKAVLAFVREDAVCRRLMTMPGVGPVVAVTFKSAVDDPRRITKSKAVGALFGLTPKKYQSGEKDVTGGITRTGDEMVRTALYEAANVLLSRITRFSKLKRWGMDVAKRRGSKRAKVALARKIGIILHRMWLDGTTYRWAEAKPIAAQA

SEQ ID NO: 127272 - protein, 429 aa, unidentified
MSDKNSVQIRVSVDVGYRRHSVAIGVPSGEVLEEFEIAHRPEGFAEFFSRIEKHQKVRGCEVAVAMEGYNGCARPLDAMVRQRGYRLYNINNLKLARFKEIFPGAAKSDRIDARKGLELFQLSDHLPLAKEVLQEVKGTPQANEVLKRLTRRRRRLVDERVRVISNLQTDLQAVCPGLLEITKNAGNQWFLNFLVSAATLPQLARLRPATLLKIPAVGRKYARLVEDWQKRAHFSEEVDWVSEMIQEDAQRCLELDEKIKALRAKIKEVAKDSKMAKILLSIPGFGTICTAELAGEIGTVERFSKEGSLALYLGMSTLDNSSGKYQGSKQPKHVNTRAKAAMMVALDRHRKYVPQSQRYYEKKRSEGKKHNQAIRALGRQLSRIIYKLLTEEREYEMRPEKGNTKSKVSLRSLIKTQIRKPKISVKGNK

SEQ ID NO: 127273 - protein, 337 aa, unidentified
MLDANGKLVMESILETHASTLRDFLAGIRGQLNLTFEEGVAAEWLYGVLQSDVDKIVVCDPRKNALLKAGNKNDRIDARKLAELLRGGQLRQVYHGNRGVRTLKELAHNYLVLTRDVTRVLNRIKAVYRSMAIRCPGQRVYHPRYRQQWLEQLAEPGLRRRAERLYQQLDLLQPLRQQARRELLAESRKHAARQLLEQIPSIGPVRAALLMAILQTPHRFRTKRLLWAYSGLGLEIRTSSDHDFKNGQLQRRRPKQISVRGLNRNHNPELKNLFKSTALSASLRPGAWQECYQRMLAKGIKPAMAQLTLARKIAAVVLTLWKKGENFDPDKLTMQAA

SEQ ID NO: 127274 - protein, 423 aa, unidentified
MDVVGIDWAWDFHICYSIEKDKIWRIKDNKEGYRELLNEVSKEAVFVIEESFNRISDFLLSEGREVYLLPPKRSKEARGYHSNGIKTDSLDARSIALTYSEHPEYCIRARNNEEGRSFREQLRAYRYYKDEASRLKNKLHNELHDHFPEFVEEMGNWTKNKGKILLLSITDELKNLSIEEIHSHFKENQIAFTNSLREKAKALKKREWHITKYTLMMVANAARHLLEVEKGKQEMKKEMERNLKESKYRVILSLPGVGAVTGVALVAAFLNHEFKNYRNFQKYCGTVPVIIQSGNYRKCVMRKHCDRNLKGVLHMMALSAVNEGSWMRGYYARKIKEGKSFGHALRALANTLVKIAFAMLKGLKAYDEELFLSSRGNKSPQSNYTTKTSTQGTERRTNERFSLPDSVAQTNCHLGTVSGRLSP

SEQ ID NO: 127275 - protein, 348 aa, unidentified
MTTVHYVGFDVHKKSVSYCIKTAAGAIVKQGKLPSQRDALLSWASERDTPWHGAMEATLFSGWIYDTLQPYATQLEMANPRELEAITKAKKKSDPIDARKMADLLRCDLLPACYVAPPHMRELRRLLRYRSLMVREAVRMKNRIAGLLMETGSEYDRERLHGRQYFDQLLDSLQDIPVSVKQLLQLTRSSLETFEFVQRRVLKMLASDQPLQQRVALLETIPGVGEITALTWALEIGEPGRFSSVRQACSYCGLTAAFRSSADKQQRGPISKQRNKHLQATLIEAAKLAPRWNPALAQVHARELDRGHRNRATLAVARKLVAYLLAVDRSGKPFQLPAQPAAVAGEPT

SEQ ID NO: 127276 - protein, 328 aa, unidentified
MGKIIRIGMDTSKQIFQLHGVDEAEQVVLRQKLRRREVLEFFGKLAPTVIGIEACGSSHYWARELTRLGHEVKLMAPQLVKPYVSRGKNDAADAEALCEAMSRPKMRFVPVKSAESQAALMLAGLRDRLVRNRTQLANAIRGYAAEFGLVAAKGKAKLEPLLLRLQADETVPPLARELFAELMAWHRANALSRNLARIPGVGPVIASLLVMKTPDPHAFRSGRYFAAWLGLTPKDHSTAGKVRLGVITRAGDEILRSLLVVGATAVVWQVRRGTGRNPSPWLVELLKRKPPKLAAVALANKIARVAWKLMTTGEIYDANRALPATAAA

SEQ ID NO: 127277 - protein, 399 aa, unidentified
MLISQSLQLRVGVDVGTQNHSVAVGLTDGSLLEEFEIPHTAAGFDDFFTRIEGHAKRYPDPIAVAMEGYNGHIRPLDSLVKLRGWQLFNVNNLKLARFKEIFPAAAKSDRIDSAKTLELFQLRDHLPMARDVLQEVLATPAENDVLKRLSRRRRRLVNERTRVINSLHADLQAVTPGLLQITRYVGNRWFLSFLTCRKDIRKLARLRRASLLKLRAIGDTYADRIQSWQQSAWFGPDARLVGDMIHQDGKRIQELNHQIKALKDEMARVAATSVIACHLASIPGFGAVCGAALAGEIGTIARFQSEASLALYLGMATLDNSSGKYRGSKKPRHVNVRAKAAMMAAVDHHRKLVPQSQRYYERKRAEGKKHNQAIRALGRHLCRVIFKMLSQQRPYRIDP

SEQ ID NO: 127278 - protein, 341 aa, unidentified
MGQASTIGLDIATRVFQAHGADASGHVVFRKRLVRAKLLEFFAAQPPCIVAMEACAGAHHWGREIGRLGHTVRLVPPAYVKPYVKRQKNDTADAEAICEAAQRPSMRFVPVKSEEQQANGVVFRARDLLVRQRTQCINALRGHLSEYGYVFSQGITHADAVIALIEDPASFVPESARAILAVLGDTFQALEVQIQTLDAEITRRAKADPVARRLMTIPGIGPIAATAITALVPAPEGFRAGRDFAAWLGLVPLQRSTGGKQKLGAVSKMGERTIRRLLILGASAVVRWAGQRGAPEGTWLAGMLVRKPKMLVTVALANKTARIVWAVLVKGGVYRAPVPAA

SEQ ID NO: 127279 - protein, 527 aa, unidentified
MAIRFASAKRRKARPHVLHKPRGVIHPRVQAVGPERFGILCVDCAKARSKIMLADFYGRVLIEPTTVEHNRFNLDAAVRSVRGAMAQHDLRDIIVVVERTGRYHRLVQRTFTKAGFEVRILHPFATKQFRQPANPGNKTDDTDLSAIHRAAAAGFSLSEHKPDPLLVCLQLLARHRRTFVRKKVDIQLKMLEHLEAYMPGYSRCVYDLFDSDVAMWVARNVGSADAIVSAGVIDLVRRLSQAGIRKNIPVVEKIVAWARSAPPADEPAALHRRFFTELDEERVSKLRSIRAIEAELAQQLVLTPYVLLLSIPGISVVSASEFAGEAGPMERYRSARAISGRAGLYPSRYQSDQVDRCDGKLIRCANRDLRYALMVIADNLLRCNEHFRILGATWRLNGKDPRDVRVKVAGRFCRIAYQVVAGRQVFRHPCARERDYILEKLIAFAADHEIPPEQLQRILDAATDQLPPAACQEEAIPLVEKLARVRKHRGAGPQSLGEILPEVLARLGVALVRSNESGEADLTERPS

SEQ ID NO: 127280 - protein, 337 aa, unidentified
MNTQTTKQLHVGVDVSQETLDVSARHDSGEPRSGQFANTSAGHRQLITWLTKGGRSARVVLEATGVYSLDLALALDAAKRIAVMVVNPRAARKFADACLQRSSTDATMAVALQEYAARMKFVPWTPPSAAVRELRALARRIATLTEEKTRELNRRHAAGASANTPAVVLNDVAVNVRHLQRRIADLERHAVALITTAAPLQAAYQRLLSVCGIAQTTAIQLLGELLVLPADMTARQWVAHSGLDVRHVDSGRSVHKVPRISKQGNAHLRRILYMPALTAAQREPHVRTFYEQLVAAGKKPMQALVAVMRKLLHAIWGMLKTNTDFDGSKFRKLREAA

SEQ ID NO: 127281 - protein, 343 aa, unidentified
MSYYVGLDVSVKLTAICIIDDAGKVVMERVVASDPGDIGRCIEEIDGEVARIGLEAGPLAPWLFGGLAERGLPVVCIEVRQMKAFAKASPIKTDRRDARLIAQAMRTGLFKIAHVKTDYSQRIRLLLRHRQAMVRRNKDLINTVRGTLKAFGIRTGGGKNTLFAKRVREAIDDKIILAMTEPLLAAYKDGLQTLAKLDAMVLAIAKEDAICRRLMTVPGVGPVVALTFRTGVDVAHRFDKSRLVAAVFGLTPRVHASGEVEQVGRITKCGDAMVRALLYEAANVMMTRCRADNWLKSWALKVARRHGVRKAKVALARRLAVIMHRMWVDGTDFSMERPTPMTV

SEQ ID NO: 127282 - protein, 344 aa, unidentified
MLYVGLDLSRKRLDWLALDQEGQPAEIGAVPPDRDALAKLGQRLGDTPVLAVIESMSGARFVHDQLELAGWDVRIADAAKARGLAPLACKTDRIDCRVLAELARLNLVPEIWLPDPQVRAERERSRFRLHLVKHRSALKNRVHAILFQHGIANPHRDLFGAGGRALLTRLELAEPWASTVAASLALVDQLDEQIAACERELRRLGANHPSIPLLTTIPGVAWVLGYTIAAEIGDIARFPSPRKLVGFTGLTPRVDQSGERDRRGPLRKNGPNYLRWALIEAAHTAGRNPRYRPIVERMRARHGRSRGSKIAAIEIGRRLTEAIWHMLTHDQPFAPAGAPTPVAA

SEQ ID NO: 127283 - protein, 412 aa, unidentified
MPHDIEARYNVVPLKAITLIKEVSMLGTDIIKAKFLPRDYDVFAGLDVDKKHIDVTFSDHDQRMKSIKIPYSADHLLAYARRHYPGQPIAFAYEAGGTGYGLYDQITAAGYRCLVVAPSMVPTAPGQRVKTNRLDSKKISTALRGGELTSIHIPSEPYRHLRHLVHLRDTFVRQATASQVRIKALLLFEGIPFPDPQGRWSTNAWAQLRTLPCASPVRFKLDRLISMATFADEQARQTARELHRFCRHNTELSSTLELLMSAPGIGRITGTHLLARIGDWRLIRHIHQLPSFLGLVPCEDSTGDAANRGPITRTGDRRLRAKLLQAAWVAIRQDPELDDFYIRIYQRNPKPMAAQKAITAVANKLCRRIACILKEQRPYVLRDASSRTTKEETASPQGETRFPAETSAPPVP

SEQ ID NO: 127284 - protein, 338 aa, unidentified
MTITISMLVIDLAKGSFQVCAIGADGAVLYNRVLSRTRLMTLLAEQSACVVAMEACATSHHWGRVAQSHGHEVRLVPAAYVKSFVKRQKNDKADAEAIAEAASRPTMRFVAVKSAETQGRAVAFRTHQCLVRQRTQLINALRGHLAEFGLVAPKGPASLKVLENALADEASDLPDPVREMGTIYVEQIARLTEVIERLVDELEAASKTDEELRRLCTIPGIGPVTAGAVAAFAPDLDTFDSGRNFAAWLGLVPRQRSTGGKTRLGSVSKMGQTDIRRLLIVGAMSVIRWVVRKGGSTNRWLAALVARKPKMVAAVALANKMARMIWALTTKQENYRMA

SEQ ID NO: 127285 - protein, 408 aa, unidentified
MKRYYLGVDWAEEFHQVWVSDPDGKKVAEMKVFQQSEAMSEFGAWLHQRKAEEIELWAAIEKPHGRIVDFLLDHRVVVYPVNPKALDRARDRFRMSQSKSDSFDAYVLAEFLRTDHAHLRALEPNSVQAQELKILSRDHERLMRQKTRLLHQIGITLKEYYSRPLEVFGDLESKIARDFLKAYPTPQTLSKLNRRGWNRFAKHDHHVSEVRSNELWEKLSKAQLPIPEHIVRVKAKLLLALMVQLGALIPEVEGYSEEVERFFAAMPAAELVKTLPGGKSGTTVAKLWAELGDANNRWQSFRHLQAEAGGVPVTQSSGKSHVVVFRFACNKHLRHAIYWFSFNSLRRCEWANKSYRQQRAKGHSHAQALRALGAKWLKIIFVMWRDHKPYDENYHLANIARQRMRQAA

SEQ ID NO: 127286 - protein, 387 aa, unidentified
MSEMFNPHAPATAYDHNTTIVAVLELSGKNWLLGAVAPGLSRRTKRSFEARNVEAVVRALEQAKGESAKARFEVARIVVGFESGRDGFWIARALQQRGFEVYVMHAASIAVERRGKRAKTDRLDVDLLLTTLMGWLRGEPGRCTMAPVPSEEEEDLREAGRRRETPVHARLKVENQIASLLIRHGIEGFKPRLKNAETKLCELRTFDGRSLPANTMNSLRLLLAQHRLLSAQLKEIEEARQRVVNVAKPDRLQRMIQALAHVVGVGVETATVLVHEVFSRSFKDRRALGAFVGLTGTPYNSGSSKTEQGISKNGNARVRRMLSQLAWRWLGHQPESALAQWFNARLGGAKGRMKKVLIVALMRKLVIALWRLAETGEVPIGARLAAR

SEQ ID NO: 127287 - protein, 337 aa, unidentified
MQITTVGLDLAKNTFHLVGLDANGHEVMKKQMSRAQVLRYFINRPPCLVGMEACAGAHYFARTLSRHGHTVKLIPPQYVKAYLRGQKNDYNDARAIGEAVRAPQMRFVAAKTVSQQDLQALARMRAGVLRSRTALVNRLRGLLGEYGIVAPKGVGTLRRALPELLEDAENGLSDRFRRLLRQGQQELSELDAHVATLTDELQDSAKQDERARRLQTIPGFGPIVAAVFAATLGDGGQYRRGREASAAVGLVPRQHSSGGKERLLGISKRGDRYLRSLLVHGARAVVVAAKAKDDPLSRWINRLRETRGMNKATVALANKLTRVGWAVLKHGNAYQPA

SEQ ID NO: 127288 - protein, 432 aa, unidentified
MEKIRNNVSGIDIGAKKVFTAVEGQPVVSHFTFTEDFLKLRDYLIEHKVESVAMEATGVYWVILYEILEEAGIDVWLVDGRQTKQVPGRKTDVKDCQWIQELHSYGLLNRCLVVEADIKELRSYLRLREDHIRSSSMHINHIQKALTQMNIRLKEVLSQLHGKSGIAIIEAILKGERDRDVLVNLCHLSILKGKKDLVYKSLEGRYTESGLFALKQAYEAYQFYQGQIQQCDARINTVINRMGNSGQGQNTEQKRKPIRHHKPQVNQLGPNLLNIFEGKDATVISGITDYSWIQLLSETGNNMAKWPTEKHFTSWLGLSPGQNDSGGKKKRVKKKGRPVAGQIFRTIAQSLINSKNIAIGAFGRRLRGRKGAAIAIKAMARKLAILYWRIMQKGLDFAEKGIKKYEEQLAAQKLKTVMRLANELKLDISHYH

SEQ ID NO: 127289 - protein, 356 aa, unidentified
MLYLGIDQHARQITISLRDDHGDVRLARQVSTQPEKITAFFQQLTRERLRDGERFVAVLEVCGFNDWLIRLLLDYRCHKVILIQPEDRKKCKTDRRDAAALSELLWVNRERLLQGQPVRGLRQVEIASPADREDRRLTTLRKEAGGARTRLINKVKQILRRHNLQWQMPTKTFPTVAAVAWLKGLALPEIDRLEMDHLLADLEQAEKRLKDLERVIARRCAASAGGKVLSSMPGVGGGFTALSLACRVGQVERFPRARSLANYWGLTPGCRNSGESDQRLGRITKAGSPTARWLLAQLVHKVLRRDARLRDWFRRVKRRRGPTVARVAVMRKLATIIWHMLSKRKTYAECRAPAAA

SEQ ID NO: 127290 - protein, 344 aa, unidentified
MTVKLMAGIDLHSNNLFCGIVDLEGKRVFEKKLPCDVDSVVRALKPFKKRLEKIAVESTYNWYWLVDGLQDHGYPVVLANPAAMQQYDGLKHADDKSDAFFLAEMLRLNILPTGHICDREIRPVRDLLRRRMGLVHQRTSLILSLKSLHTRMTGRDLSTGRIKALEASEAETLFEHPADQLITRLDVQLVEQLSRSIAKIEAAILAVVKFLPNYQVLQTMPGVGRILGLTITLETVDPRRFASPGDYASYCRGVDSRRMSNGKKKGENNGKCGNKYLAWAFVEAAQFARRHDESCRKFHDRKTAQVNGIVGTKALACKLAKAAWHMMSQNTPSDSGRIFPGIKS

SEQ ID NO: 127291 - protein, 430 aa, unidentified
MSFLPNYISVGIDVAADFSWFCILTPDGREFKKPFKVDHDNADSLKNAVLTIKKAEEQFSMKSKIFLESTGIYHFPLFCHLKELGFEVFVINPLITNSNKNIGIRKVKNDRLDAKRIAVTGYSPDTKVSVMPAELILNLRCICREYYSLVDNRTSYVNKLKAQLHIVFPGFCKVFSDITGITAISLLKNFPTPEDVINAQPDEIIKLISTSSRKGLNYAKAKYDKLFKAAKNALNFRYNLPSVYDVLKVYIYFIEEFDKKINLVLSEIKAFVDENKSEKFVQQIYYLDSIPGVGFLSAITLMCEIGDFSAFRKPKQLFAYFGVDPSVNESGHFKGNDNKMSKRGSKIARRVLYAIALASVRVKRNGIAINPVLYDYYQKKKESKPKKVALGAVMHKISDIVFAVLRDNKPFVLKTPDEHKLQYQNIHKAA

SEQ ID NO: 127292 - protein, 421 aa, unidentified
MGKRRYSTVNCKQVDWSALAGAMAGQRAVFAVDVAKVKFVAALQVNGGKTLVRVGWAHPFETAELLAGIEVLAAAGALEVVMESSGVYGDALRWQLQQRGIAVYRVEAKRVHDSAEVYDGVPSLHDAKATELITKLHWAGCSARWDILPEARRDQLAQLRRLRQAKARAEAERSRLEALLARHWPELPHLLALGSASLLRLVGAYGGPAPLALLTRQARQLLRDVGGRLLTQEKIDAVLASARTTLGMPCTTGESAQLRWQAEQVIAAQREQRQAERQLARSVPPTDVLAPMQALLGKVTTAVLLATQGDPKHYPSAASYCKSIGLNLREHSSGQHQRRLCITKRGPSMARFYLYFAALRLHQRDPVIKRWYEFKTARPGAVKQKQVIALMRKLAKAFWHQANGHDFDVNRLVNLKAVAGA

SEQ ID NO: 127293 - protein, 355 aa, unidentified
MIVIGADTHKSSHTLVAVDSVTGRRVGVCTVASTTAGTLDALSWARRVCGGADRVWAVEDCRHVSGRLERLLISAGEAVVRVAPRLMAGARSSGRERGKSDPIDATAVARAAIREGVEQLPVARLEGAELDVRLLLDHHDDLVKARSQSQQRLRWHLHDLYDDLSIPAGALDRTVWLDRVLGRLRRSPQTTRVRIARDLVCEIRGLTRRIRELEQEIRLLVCELCPQLVAMPGCGPLTAAKLLGEVAGADRFKSDAKLARAAGVVPVPASSGRQDRHRLDRGGNRQLNLALHRLAVNAARHDPTTAAYLARKQAQGMSRMALRCLKRHLVRRLHKLLTQPAHDQARAPETALALT

SEQ ID NO: 127294 - protein, 410 aa, unidentified
MQTLVERGCGLDVHQATVVACLLIVLKSGKVHKQVRTFGTTTRDLLGLREWLLSEGCTHVAMESTGVYWKPIYAILEGAFEIVVANAQHVKKVPGCKTDVKDAEWIADLFCHGLLRASFVPPKPIRELRDLTRYRRKLVESRSAERNRLLKVLETANIKLASVVSDVFGASGRLMLLALAEGKDTAQEMAQLAKKQLRKKIPELQLALEGKVEEHHRFLLSVQLHRLGAVEKDLAIVEQRIEEKLKPYEAEIKLLDEIPGVDVALAGAIIAELGADMRVFENVSQLASWAGVCSGNNESAGKRRSGRIPKGNVYLKTALVEAANAAAKAKGTYLRDKFYRLKARRGYKRAAVAVAHKILVAIYHMLSHRVCYNELGDLYLDKLNKHHLTRNLVHRLERLGYTVTLEQKAA

SEQ ID NO: 127295 - protein, 313 aa, unidentified
MLYVGIDVAKNKHDVTALNVRGKTVLKPLTFSNNKAGFELLDLSLRQLNQDCLIALENTGHYAFNLLNFLHEQGYKVYTYTPLLIKEFAKSLSLRKTKTDKKDAHGIALKLLSDPNREQFQHDNRQVELKILARHIHRLKKKQSDWKVQYTRCLDIIFPELDKIVEKHSEYTYQLLTCYPNPQKRLEAGFDKLIEIKRLTASKIQDILSVAPRSIGTTSPAREFEIIKHYKRLIDKAETCVNDLMAEFNSVITTVTGIGNRLEAVILAEIRNIHAFDNPAQLQAFAGLDSSIYQSGQIDLAGRMIKRGSPHLR

SEQ ID NO: 127296 - protein, 372 aa, unidentified
MLLSRKVPNDQQAILGVLVEVQALATRLTWTVDLTTAEAALLLAVLWGHRQQVRYLAGQAVHQAAVGYRGEAKTDAKDARIIADQSRMRRDLPELQPGQDLIVELRILTSRRADLVADRTRAINRLRQQLTAICPALEHAAVLAGQRGWVVLVAHYQRPGDLRSLGVAPLAALLAGHGIRNADRIAQAAVAAASTQTVDLPGQDVAAGVAGELAREVLELEARITQTDHALQARFHRHPLAEVIWSMPGFGFRLGAELLAAIGQVELIGSADRLAAYAGLSPVTNDSGKRTGRLRTPVRYHRALRRVMYLAALTAIRCSPQDRAYYQRKRAEGKRHVQAVICLARRRTNVLWALLGDHRTWEPQPPLNHQAA

SEQ ID NO: 127297 - protein, 414 aa, unidentified
MKTLFVGIDVSMKDFKAQFMDNLGETVSKRQRFSNDNPGLEAFINLVLEICHSDSFERVVIGLESTSVYSWHLQMSLASNHQLASYHCQVYSFNPKVVANFKKAYVDLSKNDWTDAWVIADRLRFGRLPENSQVDFRYLPLQRLTRFRFHLTQTLTREKNYFLTNLFLKFNTLQQNEVFSNLFGATSEAVLTEFLSPDEIAARPLDDLIDFLVEKGNKHFADPKATAEKLKIAAHNAHRLRGNLLEPVNLILTTSLETIRTLEKQIKTIDKAIAKEIAHFKHTLDSVPGLGPVICAGIIAEIGDIHRFPNDSALAKFAGLTWREHQSGEFEADTTPLTKTGNAYLRYYLIQAANSVRQYEPEYREFYSRKFRESKTHHHRRALVLTARKLVRMVDALLRSNQLYLPKEQRRNLV

SEQ ID NO: 127298 - protein, 440 aa, unidentified
MSCTDFAHPVATATRPEDITVFAALELSRKSWLVATSSPGEDRVSKRVVVAGDGPGLLALLAKLRETAERRLGRVVRVAVIQEAGLDGFWLHRLLVENGIESHVVDAASLAVDRRKRRRKTDAIDVEGLLRALMAWARGERRVCSMVRPPSPEEEDRRRLCREREALVTERIRHTNRIKGLLAGQGVLDFDPLRPKHRERLDELRTGDGRPLPPCLLAEIRRQLGRLDAVVRDLATVEAERNGLVGLCSMDRPAQSPGEGAESGGVPEAVTIPVAQETGSAVAPEGAAASAASEAAPAKAASEMAPAEPAALLMKLKGIGPEFAAVLWLEALFRSFGNRRQIAAYAGLAPVPWQSGGIDRDQGIAKAGNPRLRKTMIQVAWLWIRHQPGSAISQWFAKRVGTARGRVRRIAIVAVARKLLVALWRYVTQGVVPEGAVLKP

SEQ ID NO: 127299 - protein, 365 aa, unidentified
MFMLGWTAPDGISCARLRVVATTAKGSRPMTIIRIGLDTSKHVFQLHGVDEQEEPVLRRQLRRGEIERFFKKLPATRIGLEACGASHHWARMLRGLGHEAVLIPPQYITPYVKRGKNDAIDAAAICEAMSRPEMRFVPVKSAEEQAALMLLRVRDLLVKQRTMLINAIRGHAAEFGVIGAKGPHKIADLLQRIGEDDNLPALAREMLASLAGQLAALELRLEGLEAKLMARHKAEPRSRLLATIPGIGPIAGLSFALKVPDARVFRSGRHFAAWLGITPREHSTAGRQRLGRISRQGDEGLRRLLVLGATAVIQQAKPGRTSPWLLDLLARKPKKLAALALANKMARIIWAMLISGELYRRRVAA

SEQ ID NO: 127300 - protein, 372 aa, unidentified
MESILYVGMDVHKTNYTLCTYSIEDDKDFGLAKVEPDYMNILRYVRRLKEHRGENVRVVCGYEAGGLGYSLYRSLTANNVECVILAPSTMPKAPNERKTDYRDAAKIARCLAYNSYRGVYIPDAEDEAVKEYIRMRDNAKDHVKQLKQRILALCMRWRKEFSGTKKLWTIAHMKWLQHLEFENPIAQEAFDEYVIQLNEAIARVKRYDEKIEKWAKLPRYAENVSKLTCFCGVKTHVALATIAEVSDFNRFPNANRFASYLGLVPGEYSSGEKINRLGITKQGNSHIRKLLTEAAQCYSRALPGKPSAELLKRQEGNDPKVIAYANKGNERLKRKYRSIAARKPRPLAVTATARELACFIWGMMTDHLEQVY

SEQ ID NO: 127301 - protein, 438 aa, unidentified
MSNKVIFNLDELFISVGIDVGADFSWMSIALPNQQFVGKPYKILHNSIDSLTTAVSKIKEAEELFSLESRIFLESTGIYHYPLFCYLRDKGFNCSVINPIITKNSTNINIRKVHNDRFDSKKAALVGLKPDLKVSLMPSDLALNCRNLCREYYDLMDNRSAYVNKLQGELRMAFPQYLGIFSKVTINTSLTLLETYTSPSAFLKADKQEIIDIIKSTARFGLTYAQNKYNAIIQAATDANQFGYIIDSNIKRIRLYISFIRKFDEEINSILESLHELVDANKDTDFVKQIHLIETFKGAGFLSAVSIMGEIGDFSAFSKPKQLFAYFGLDPAVKQSGKFEGTKVQMSKRGSAIARRVIHTLTLQSISISRNREAKNPVLREYYLKKCDSKPKLVAMGAVSHKVCNMIFAILRDNKPFKIIAPQEHIKQYNAAKCDIAA

SEQ ID NO: 127302 - protein, 316 aa, unidentified
MTSYVGTDVGKAGVVVAVHGQDGVTVVANARAALRGWARRLPAGSLIGVEATGVYHREVVAAVQAAGHTVYLLNPRDVRHYAHAVGRRAKTDRVDAQLIARYVAQEHAGLRPYVAPTATQAAIAALLARRHAVVKAQVSLRQALRELPAGLAAWRQLQRDFKTLLAQLDAQLEQLVRQDAPLAALRQRLRTTPGLGPLSSLALATLLTRYAFRRSDALIAFVGYDPRAADSGQHRGRRRLSKRGPAEVRRLLYAAAMAAARTNTWRPLYQQDRQRGLSATEAIVILARRLARTAFAIARYGTTFDPARVTKACAKP

SEQ ID NO: 127303 - protein, 377 aa, unidentified
MKAPSTRPAAVLGLDVGKSSHWACLIDRDGEVLASAPVRNREAELDALFASAPAGTLVVVDQFRNIGSLAVRRARAAGLVVAHLPGLAASRAAGLFAGEAKTDERDAAVIARTALGVPDSLSGVPGRGEALEAARALSSQRDHVVACATRDKNRLRAALLESCPALEAAVDLSDRRWLELLAGFGGAWGIARSGAEGPRAEAAGEAAAASTAPPPALVEAENRQVRFLAARISEALDEAGALEAETAALLEGDETYACLLTVPGIGPRTAAQLAVSVDIGRFPDHDHLASYCGIAPRVRSSGTSVRSVRASRRGDARLKSLLIFSCNSLVRSSGRYGEYYRACRARGMGHGRALKAVARKRLRAIYAVMRDRVPYRE

SEQ ID NO: 127304 - protein, 345 aa, unidentified
MNKISVLGLDLAKNLFQVHGVNEAGEVLVRKQLTRSQMQRYFARLSPCLIGMEACSGAHYWARILTELGHTVRMMAPAFVKPYLKSNKNDRNDAEAICEAVQRPSMRFVRPKAPEQQAVLQLHHGRQLLVRQRVALSNHLRGILSEYGIVLPQGVKVISRRLPALLDDADNELPMLARYLLAELKSAHDQLMERIEQLERQLKAWHTGNAVSQRLASIPGIGVLTATALAATVGEGQDFRNGRQLAAYLGLVPRQASSGGKERLLGISKRGDGYLRSLLIHGARAVIHHIRRRLKAHQPGGNPWVEQLLQRCHVNEVAVALANKMARTAWVLLARNETWCAARPL

SEQ ID NO: 127305 - protein, 379 aa, unidentified
MTRSATVTTGEHTLYAALELSKNSWLLAIRIPGRDNPSLYPIKGGDADGLVAKLDAARERVAKVAGQAPTVTLCYEAGYDGFWLARLLEQRGIDCLVMEPASLQVNRRARRVKTDRIDVEALLHTLIAWRRGERHVCSMVVIPSVEEEDLRRSHRERDRLVRERTAHINRIKGLLFGQGIRGINVKRHYKSLTPADLVTGDGRPLPERLGREIAREIERLALVQDQLVDIERERDHAATPNETTERKRHDLLRLKGIGPAFSAIFARELYYRRFANRRQVASYIGLAPSPYDSGEGRRSQGISKAGNGLVRYAMIQAAWLWLKHQPQSALSQWFHRRTEGQTGRMRRVMIVALARKLAIALWRYLELGLIPEGAILSDR

SEQ ID NO: 127306 - protein, 359 aa, unidentified
MDAQEGTVRRIIGGVDTHKDLHVAAVVDEQDRVLGTQSFASTRQGYRQMLAWMRCFGEVERVGVESTGSYGAGLLRFLQQAGVTVLEVTTPDRQDRRRRGKNDDFDAQNAAHAAFAGIRTVTPKSRDGMIEALRVLSACRKTAVTARRIALQMIQNTVVCAPESLREVLRRMTRMQLVRTLAAWRPDLTAYRDVEVAYRISLKSLARRYLELHDEIADLDAMIAAIVNELAPNLVARNSIGHVGAAQLLLTAGGNPQRLRSEAGFAALCGVSPVPASSGKTARHRLNRGGDRGANSALHIIAIGRLRTDARTQAYVAKRIGEGHSKLEAIRCLKRYIAREVFMLIKQRQREINQTRIAA

SEQ ID NO: 127307 - protein, 315 aa, unidentified
MHHPIPQTAGIDIAKDQLDVCLCPDGATRRFSNDAKGHRALIAWLSNHAIQRVVFEPTGAYHRVLERSLASAGLPLAKINPRHARHFAEALGQLAKTDRLDAALLARFGALLEPPTRPVLSPTLDAMKELLVARQALIKDRTAALNRQKMVRSPLLRRQLAQRLRQIAHQLAALEAHLLSLCQEDAGLAPRLAILMSIPGIAQATAVSLLVDMPELGSLDQSQVASLAGLAPVARDSGTSRGRRTIRGGRAHVRQALYMPALVAARFNPDLKAKYQALITAGKSAKVALTAIMRKLIILANALLRDQRHWTPKPA

SEQ ID NO: 127308 - protein, 360 aa, unidentified
MTHRTWKLGNVKWLRVSEGDAMTVGLDVHKASVHAALRRNGQEIGTWVMPMENKTIVASLNRFGPALKKVVYEAGPTGYGLARALKKAGLPVEVIAPGKVPQAPNPDSKTDRLDSRKLAEEAEKGSLQKAVIAIPTEQEEADRQLARLRDQLIGKQRRVKQQIKSLLLQQGLAEPAGLAHWSAEGLAALKMMRLRHQWQLSLEVMIEELEHLVALRKRVERHEAWLMKQRRHRKSARVLQTHPGVGVVTATAFRLEVYQPERFATPEQLAKYVGLAPRVRQSGPKRRGGPLIKAGRGSLRSLLIEASWRWIRDDAAAAKTYRRLVRNTGSGQKAIVAMARRMAVHLWCMLCRGEVYHRAA

SEQ ID NO: 127309 - protein, 339 aa, unidentified
MKYTPVGVDIAKHVIQVHFINEHTGEVVDKLIRRQDFLTFFSNREPCLIGMEACGGSQHWARELKKLGHEVRLLQARFVKAFVMGNKNDVMDARAIWMAVQQPGKEITVKTEEQQSVLVLHRTRRQLVKFRTMQINSLHGTFLEFGETLHKGRAAMDREFPEALERLKERLPPYVISALENQFNRLNELDLQIDDIEKQLTSVAKQNETCKRLLDIPGVGPLIATAAVATMGETSAFKSGREFAAYVGLVPKQTGSGGKIRLLGISKRGDTYLRTLFIHGARAAALLTKEPGPWITELKKRRPASVAIVAMANKLARTVWAIAAHGRKYDRNHVSIRPY

SEQ ID NO: 127310 - protein, 329 aa, unidentified
MTKLLKKVIGVDVGAKFLTVSFNDSNNQDQVYNIENNQRSILSFLKKISSDDYCFVIEATGNYSSRILHLSLGQEFETSLINCMSVKHFARMKNIIAKTDAEDAKLIRLYGEMFRPEKYIPKSIEIEHLDQEIKLLNDLEEEKRRYAVKLKALRFTPYLNHNTEKHYERRLKQLEKEIKAVELRLPKLQNKEFKEVKDLIQSVSGIGEKTSLQLMTATSGFKNFDSAKSLVKYFGLAPRIYQSGKKSYSPGKCRTSKTHIRSLLYVCSWTAMKHNVHCKELYLRLLTKGKPKKLALIAVCNKLLRICFGVVKNKIAYQKNYQKNCKILT

SEQ ID NO: 127311 - protein, 386 aa, unidentified
MTQHSHVTTSNGLDYDRTLILAVEVSGRSWVVAAQVPGLRQKSAKQQLAPRADALMAAVEGYKRRAAAAGMTVERVIVAYESGGSGFWLARWLQQRGVEVYVMQPSSVPVDRRMRRAKSDRIDADMLLRTLLAWLRGEPRVCSMVPVPDEAVEDARRPIREREELIRARVALVNRIEAVLTVLGAGDYNPLRRDCRERLGQLRTALDQPLPPHARAQIERLLDRLDLIRQQVADLEAQRDQAVEGEAAGRTEQMIQRLARLRGIGVQTATVLVHEAFVRRFRNARALGSYAGLTGTPYSSGGTQREQGISKDGNRRLRATLVELAWMWLRYQPGCALSRWFHDRLGGSRGRLRKVMIVALARKLLIALWRYIQDGAVPQGMELKPA

SEQ ID NO: 127312 - protein, 467 aa, unidentified
MSAPKRRARKRPRHKAGALPPGFEQVNLHAAGIDIGAESHWVAVPAHCDPQPVREFSSFSAGLQALTEWLVSCGIATVAMEATGVYWVPLYELLETRGLRVVLVNAKHFRNVPGRKSDVLDCQWLQQLHTFGLLRGSFRPAAAIVRLRTYLRHREMLVQAGAQHIQHMQKALTLMNVQLHHVLSDITGETGMRILRAIVAGHHDPAELAKFRDPRCHASQDTIAAALTGTYQADYLFVLQQAVELYDVYHAKIQACDRQIERALRALTPKVDVQQTPPPPARPLQKPRGHQMRINVRAPLYAAAGVDLTQINGIASHVALAVVSEIGVDMSPWPTEKNFTGWMCVAPGTKITGGKVLSSRTRTAANRVATLLRTAASSLMRSQTALGAFGRRLAARIGEAKALTALTRKLAVQIYHTLKHGRIYKDPGAAAYDLQHRNRILRSLTKRARTLGYELVRIQAAPQTAVS

SEQ ID NO: 127313 - protein, 343 aa, unidentified
MHVNTIGVDLAKNVFQVHGVDSAGKVVITRQLRRKQVLDFFSKLPGCLVGMEACGTGHHWAREISKLGHTVRLMPPSYVKGYVKRSKSDAADAAAICEAVTRPSMRFVPIKSTDQQALLMLHRTRDLLIRQRTQLINALRAHLAEFGLVAEKGREGLAELSAIIADEMNREALPPAMKQALQAIVDQLAALELQIGTLDRVIHAHHRANDMSCRLETVPGIGVIGATALASTVTDPSGFKTGRDFAAWIGLVPRQHSTGGKERLGGISKQGDRYLRRLLVIGATAVVRHARQHPQKHPWIMKLLAKKPAKLVAVAVANKMARIAWAIMAKGGYYRAPALAAAT

SEQ ID NO: 127314 - protein, 423 aa, unidentified
MEIMYERVAGLDIHKATIVACVRLGAGRNVTRECRTFDTTTDGLRALLAWLEECRCSHVAMEATGVYWMPVWKILGEGDFALIVANAAHIKNVPGRKTDLNDAMWIADLLACGLIKPSFVPEEDVQELRSLLRTRKQLGREQTRHVQRIQKTLAEANVKLDSVLSDIMGASGRRIIEAMIAGVRDPRRLAALANTRIKATPKQLYDALHGRLTDHHRFLLTLHLRQWDSLDATIREIDQEVEARIARMDKEVKAGEAPFRDLIGLLCTIPGVSTLSGTTILSEIGRDMSRFPTAGHLVAWAGLCPGQNESAGKRKPVRLRKGAPWLKTMLVQCAWAAKRKKDSYYKAQFFRLQARRGPQKAICAVAASILTAIYHILKNGTEHHDLGADHFNRRSIEGQTKRLVAQLTKLGFEVQLQRTTEAA

SEQ ID NO: 127315 - protein, 412 aa, unidentified
MDTYCGIDWAEDHHDIAVVDRDGALLARRRISDDPAGLAELLGVLAGHGDAAGQMIPVAIETPRGLLTACLRATGRQVYHINPMSVARYRDRHSVAGRKSDHGDAVVLANVLRTDMHAHRPLPADSELAQAVAVLARAQQDAVWDRTQAHHKLRSHLREYFPGFLAAFPAASGSITRPEARVILAAAPTPAAASALTQARLRALLRTAGRSRGIDAEAARLGEAFAVPQMRQLPLIEQAMGRQSLALLGQLDAACTAAAGLEQAVAESFNQHPDAGIITSFPGLGILTGARVLAEIGDDRTRFCDAKGLKAYAGAAPITRASGKVTSVSFRRIKNNRLCAAGYIWAFSALTASPGARAHYDRRKDAGDRHAAAQRNLFGRLLGCLHHCLATGQHYNEHTAFPELANNTRTAA

SEQ ID NO: 127316 - protein, 362 aa, unidentified
MRIIGCDLHARQQTLAMLDTATGEVLNKTLTHEGESVREFYSKLPAPVRVGIEATGSMKWFLHLMEELGIDCQVGHPATIRAAEPRRQKHDQLDAELLLKLLVENRFPSICQPSQERLDLRGLLLHRHQWVRLRTRIQNALQAIALANGLRRGSSLWSQSGQRAIASLPQTTHTAHRRSELQAMYTRFEAEIEQLNQQVLEQAGQRPTAGLLMTHPGVGPITALATDVFLGDPKRFCDGKALASHIGIIPREHSSGGRQKLGGLTKQGNPLLRFLWCEAAAHAVRRDPELRRFYRRKLVQKGLGKARVAAARKLGIRLWIMLRDQIDYQEFCRRGQMQQRNGGACAGMPRGRYGAKSHRLID

SEQ ID NO: 127317 - protein, 422 aa, unidentified
MCLPFTLTRGLLWFWPEQSRTNGQDTRVPEALQCKQFELANTPMKTELYLGLDVDKEWIVIAVAEWGRNGAVQDLGAISNDLHALEKLLARLRKRYGPDVIIGACYEAGPCGFGIARRLKQLGVECAVVAPSLTPTRTGDRLKTDKRDARKLARLLRAGELTAIYIPEATDEAIRDLCRARSDAVDDRRRSRHRLKAFLLRHGYRYQGRTSWSAAHERYLRELMLPHPAMKVILEEYLISVQLASERIAGCEAAMSELLGKWRVEPAVRALMAMKGFQTVAAMIVVSELGALDRFTHPRQVMAYLGLVPSEKSSSNRRRQGAITKCGNAHARWLLVECAQHYAAAPKVSKELSQRQQNQSRAVRTLSWKAQNRLHQHYRRLMARRLLRNKVIVAVARELCGFIWELLRTQECYHAPAPSGMK

SEQ ID NO: 127318 - protein, 353 aa, unidentified
MKKLFIGIDFAKEKFDAAIIEACGLKEFGNREYGMFTNDKKGYRQFFKWVKTNADKSVENEWLFCGEDTGSCSLGLSKWLYGKGLDIWIENAYSIKHSSGIQRVKSDKADSSMIAEYAWRHQDKAVLFEPLSESLSQLREVFLYRHKLVQQHIAMDVRKQDKEAAEPSKAISFIKRKSKHLMSEIDNAIKECDLMIDRIIESDAELKENYAIITSIKGVARQNGACLLIFTNNFRRFDLDARKIACYYGVAPFGKDSGTSIHSPAKTSHFANKLIKSLLGQAAHCAKKFNPEIREYYNRLIGRGKKPQVALNNVKNKLIRIIVALVRKKVYYDPKTYMFYNAKFTDVKKMLNS

SEQ ID NO: 127319 - protein, 340 aa, unidentified
MRQLYAGCDLHGNNNFIGIVDGEGKRVFKEKLSNDLSVVRDTLKPFQGDLVGIAVESTYNWYWIVDGLMEKGYKVHLANPSAIQQYSGLKHSDDKHDAFWLAEMLRLGILPEGYIYPREERPLRDLLRKRGHLVRLRTSLVNSLQNILSRNLGKRVNANDVKALREDRVSLLLEMNEDLALAGRVSKEAIDHLTRQIRKIEGVVEKRIKLKEEYRYLLTLHGVGKILSLTIMLETGPISRFPTVGNYVSYCRKVPSQWTSNGKRKGSGNTKNGNKYLAWAYSEASGFARQLYPEPRAYYNRKMQKSNAAVAHSALANKLSRAGYYVMRDQVAFRPEKLFG

SEQ ID NO: 127320 - protein, 443 aa, unidentified
MGKYYLGGDVSKGYADFAMIDQAKRIVESNFQLDDTHDGHQQLELFIKQFFVKNPDATLFAAVESTGGYENNWLHILQLAGINLPVHAARLNPIGIHHDKQAALKRNSTDRISALAIAEYQINHAYAIRYNESDEYKSMKKLFSSYRMMLKMRTQLLNHLESWVYSGNTELVQYRKDNTPKWLLRLLAEYPTAPILAQARPEQLAKIPYLDDDRAQKLIAEAQRSVSSVTDLPAQLAIKMLSQEILHLDETIKAIKKQAEAFVNVREISLITSIDSIGVMSAIGLFVEMGGCVGFFKNAKKLSAFWGLHPVMKESGDGSYKPKMSKKGRKLPRAILYMIVLNGIRSNGFIDSIYKKELQKGKAKKAAIGVCMNKLARIIYGVLKNDTAFNADIDKQHQLRSCPKMTNKNNIFDIRRFQQEDNKAPISRKQSQKRKGREQSQSD

SEQ ID NO: 127321 - protein, 320 aa, unidentified
MASRESLFIGIDVSKQTLDVAFGADPHAPRETIPSTDEGVQRLVTRLQRLQPTLIVLEATGGLERMVFAQLLQAGVPTARVQPRRVRALAHAEGRQATTDRLDARLLARFAERVRPPHHQATDEQRASLRDLLVRREQVIQMRTAEINRLTAAAPNLRPGIQQHIDWLDQEIRALAQERDNEAERTDEVRRKRELRDSVPGIGAITARNLLLRLPDLGTIKRTEAAAVVGVAPYAHQSGAQHKPRHISGGRRDVRRVLSMATLAATRRRLVRRAFDQRLCQAGKPRKVAIVAAMRKLLTILGAILRQQKPWDPAVHTSAP

SEQ ID NO: 127322 - protein, 372 aa, unidentified
MNYNTVYVGMDVHKESFTLCSCKYEDEKASHYQRTPASYKNVLRYLAFLRTIYGEDTRFVCGYEAGCLGYSLYHQLENFNVECVILAPTTMLEQRSKRRIKTDKRDAEIIARSLAQHNYSPVHIPTETDNQTKEFIRMRDDHKAELKKIKQQILSFCLRQGYQYDGSGNWTAKHVKWLRSLKPAGLYKEILDEYLLTYTILTDKLNRLDQRIEELASKEEYTESVSKLTCFLGIKTHTALSVIVEVGDFQRFVSARKFAGNLGLVPGQHSSGDDRNGLGITKAGNTHVRRLLVESAQSYTRGKIGYKSRVLRSRQAGNSPQVINYADRANERLRRRYYKMVLKDGKKYNIAKTAIARELACFIWGMMTDNIY

SEQ ID NO: 127323 - protein, 356 aa, unidentified
MNSTKYIGMDVHKEATTIAVMNAAGKLVMESIVETKAATIVQFIEGLRGELYVTFEEGTWAAWLYDLLKPHVTKVVVCNPRKNALLKTGNKSDRIDARKLAELLRAGLLSAVYHGETGLRTLKELSRSYLAISKDLARTMNRIKALYRSWSIPCGGASVYAPRHRAEWLSKITEPGVGRRAELSYQQLDGLQKLRQEARRDLLTESRKHGATDLLQRIPYIGPIRAALLIALMQTPHRFRTKRQLWAYSGLALETHSSGEYHYVQGQLQRSQRPGALRGLNRNHNHDLKSIFKGAATKAGSAKGPFHDFYTALVAQGMKPTMARLTLARKIAAIALLVWKKGVCFDAQQLKRQVPV

SEQ ID NO: 127324 - protein, 347 aa, unidentified
MTITIGIDPHKATHTAVAVDTKEAVVGEHKVRASAAQATVLIDWARGFGPRTWAVESAAGLGYLLAQQLVAAGETVVDVPPVLAARVRIMGSGRSQKNDPNDARSVAIAALRSNRLARVRPDDHARVLGLLAKRHRDMARLRNQACTRLHALLGELHPGGIASEMTVTKANDLLSQVEAVDEVTRCRLLIAAELVEDITRLDASLKASKKRVKAAAVASGTTVTDVYGIGPICAAMIIGHVRDVGRFPTKGHFATYNATAPIEASSGGHSRHRLNPRGNRKVNHALHVAAVTQLRNDTEGRTYYDRKLAEGKVVQGGHPRPQAQDLRPRLRPPRRRRSPEDHLITTD

SEQ ID NO: 127325 - protein, 338 aa, unidentified
MAQNKIIGIDLAKSIFFLFEINHKGKNISRKKLPRSKLLNYIAQQNECTISMEACSSAHYWAREFSKLGHQVMLFPPQHVKSQRHKQKNDYNDAEAIAEITLYQRHHPVPHKSIEQQDIQSVIKMRKLLITERTRLINQVRGLLSEYGIIIPKGKTAFGKAIPSILEDAENQLSSMLRELIYHQHERYNYINEQVSWFDNKLNHTIQHFANAKLLTSIPGFGPLTSQAVAVWMGSGQQFKTGRDASAAMGLVPKQNSTGGKNTLLGITKQGNTYIRSLLVHGARAALRRAKFKSDKLSLWAVDIEKRRGANRAAVALANKLMRIAWAVISKNEEYKPA

SEQ ID NO: 127326 - protein, 362 aa, unidentified
MRIIGCDLHARQQVVAMLDTNTGELMEITLTHEGNNVREFYSKLPRPVRVGIEATGSMQWFVNLMEELGIECLVGHPAQIRAAEPRKQKYDRRDADLILKVLVENRFPAIWLPSKELQDLRALLRHRHQWVRMRTRIQNALQSIALANGLRRGPSLWSHDGQNTIASLPLAPHTAYRRNELQALYAKFEAEIEKLNQRVEEQACKRAGARLLMTHPGVGPVTALATDVFLGDPARFADSKALASYVGMIPREYSSGGRQRLGGLTKQGNPLLRFLWGEAGAHAVRRDPELQRFYRRKLAQKGFGKASVAAARKLGIRLWIMLRDQIEYNEFCRRGQKQQKSSDACAGMPEKRYGAKSHRHAD

SEQ ID NO: 127327 - protein, 355 aa, unidentified
MSGAYEGRQIVGMDLHRRRSVLVRMTDTGERLETVRISNDPQHLAQVMARAGEAPEVVLEAAYGWYWAADTLAELGAHVHLAHPLGVKMFSYRRVKNDQRDATDLADLLRMGRLPEAWIAPPATRELRGWVRHRAKLVGLRSSVKCQVHGVLAHAGIWVPMSDLFGVAGQQLLAELSAGTRLSVESRSRLDSALRVIAALEFEIELFTKLVNGRLRTDPGYRAIQAIPGVGPVLAAVFVAEIGDIGRFHRPQQLASWAGLTPKHHESDTTVHRGRITKQGSRLVRWAAVEAVQRVSGHTRLGQHRDRVAARRGRNIGVVAAARELLTLVFYGLRDHHIRALDTPAPPPAADRSAA

SEQ ID NO: 127328 - protein, 392 aa, unidentified
MRKPKQRKPLNDLSRSLTTLDANHTLIAVIEMGQKSWLVAGIVPGVERQPLKKLDTDEDALLKLLNRWRMEAEKAGHKIKRITVAFEAGRDGFWLARWLRARGVEAHVIHASSVAVSREHRRAKTDRLDTELLKRAFLGWLRGERDHCKTVAIPTIKDEDAKRPNRERDSLVGEQSRIVNRMKAALARLGIRDFNPKLKKAAERLSGLRTPEDQPIPPNTLAELYRDMERRRLVTDQIRQIEDARLERLKQAPKDGPNVMIRLLARVIGVGIETADMLVQEVLSRNLRDRRAVARYAGLTGSPDESGSKRREKGLARSGNARVRRGMIQLAWRFLNFQKHSALAKWFQARTANARGSRKKMIVALARKLLIALWHFVRDGVMPEGVILRPAQ

SEQ ID NO: 127329 - protein, 423 aa, unidentified
MAYRIAGIDVHKKKLAVVVVDVEVDDEYQFERRWFGSNPEQLQRLAEWLIEQRVEEGVMESTAQYWKPLWSALERYWKPSCQNREGAGKMSGTLHLAQALSNRGRRGRKKDFRDAERLVKRLVSQELTLSFVPDTEQRLWRTLTRTRYQRTRDKVRLQNQLEALLEEAHIKLSSLVSDLLGVSARRMLHALADGETDPGAVAALAHQRLRATSAELRDALGACTELNPVYRRLVRLALDDLQLIEQQIGQLDQEIASLLREHQDAVQRLAEIPGLGVDSAQQIIAEVGAKAATFASAKNLVSWVGACPGEEESAGVNRSKRSPKGNRQMRRILNQAANAAVKHKGSIFEIVYRRLVLRLGHNKTIGAIGHRLCELIWIILHNGVRYEERGPSVCEKAKRVRTSRMIRTLRTLGYRVEPAVIPA

SEQ ID NO: 127330 - protein, 367 aa, unidentified
MSSVASQAGLIHLGMDTSKNTIVVATLLPGEQSPVTDRIANEEAAVRRLVGRFADRSVLRAWYEAGPGGYELCRLLASMGVACQVVAPSLIPKGSSDKVKTDKRDSRRLARLGRAGELTPVRVPSEGEEAVRDLVRARDAMLADRKRAQQRLTAVLMRHGRVWRGATYWTAAHRSWIAAQRFSEPALASAIGYYRATLAVREAELASLEAELLPWAAREPLAGPVARLGCYRGIAELGALTLAAEVVDWRRFPAARAFMGWTGLVPSEYSSGERTRRGHITKAGSEPVRTALTEAAWAYRFQPAIGAGLRRRQHGAGPDTLARSWKAQRRLHDRYVHLTRDGGKAAPEAAVAVARELAGFIWAEMTA

SEQ ID NO: 127331 - protein, 339 aa, unidentified
MTVKTVGLDLAKDVFQVHGISENGRVIFNRAIKRAKLLAFFETLPPCVVGMEACGSSHHWGRQLRKLGHDVKLMPASYVKPYVKRGKSDAVDAEAICEAVRRPTMRFVEIKTEEQQAILSIHRTRDLAVRQRTQLANMIRSLLREFGHILPIGIEAVTAFAKRHQDGDHPDMPEIANGMLGIQCYQFIGLNERISGYSKMIEQHAMLNADARRLMRMPGIGPVTASAIVATIGDAHQFRTGRDLAAWLGLTPLNKSSGGKERLGKITKQGDRYIRKLLVVGMTSRAVTAKRSPEKVDLWTAKIIADKPFRLATVAMANKAARAVWAMLTKKQEYRQPAF

SEQ ID NO: 127332 - protein, 388 aa, unidentified
MIQQESEESNGGRTVVGIDPCREFLQLAILAPNQETRFLKLPLSPSITAEIVKSTDPRTTQIAIESYGSYGKLFIYDLLRKGYDIREVNPHISKKLSQIYSEEHSDLKDAESLAKALLLIPDLPKVAITDKQQWMAKLTRTRRKLVKDLNGYLNRLHIALTESYGVIYKRLFKILSMKKSLKFFEDYPTINDCLSDDQVKKRLGEEKWELLNLAGRWEDNAYLETLRTEIRGYIEIIRSITSTKVAIEAKIRDSAALIEEMRLLGTFPGIGGVAGATLLSEIGDIERFGTESHLSAYCGVSPVIWQSGTGRIRTKRRRRYSRRLKGILYFISLSQIRINPESRAYYDRKRNEGKTHWQAMNALSRQLIKIIYYILKHKVPYQRHSLVN

SEQ ID NO: 127333 - protein, 352 aa, unidentified
MERYVGLDSHARSCTLGVMSAGGRRLKSLVVETNGKALVEAVRGVGGRVHVCLEEGTQSAWLYELLKPHVAEVVVAVAPERKGSKDDQRDAWARANELRTGAIETRVFKAPEHLAGLRNAVRAYGFAVTDVVRAKNRLKSVFLSRGIGTDASVYDAAKRKAWLKQLSSPHRELAEWLGRQLDQLEPLREEAEGLLLRESKKHPIIRKLSTAPGMGPIRTAQVVAIVATPERFRTRRQLWSYSGLGIVTRSSADWVQDRTGKWVRGHHAQTRGLNRKRHPRLKAVFKGAATTVIAQLAEDPLHADYERMLKSGIKPTLAKLTLARKIAATVLSMWKHQEVYDPKRHRPTPEQK

SEQ ID NO: 127334 - protein, 445 aa, unidentified
MTTRTIGIDLAIRGDQVAQIFDDGRPVGKALRFRIDPAGLDAFVAKASRDLPPGSSMQALMEPTGMSWFPVAHRLADAGVEVVRVKGQRVRALRRYLSEHAKTDLRDAYLLAAMPMFGGPCFDRVHIPTPKSHALQRLTKQRSRFQDVVASGKRRLLDLVRWASPSLEHVLPDLRTRLSLAVLRFWFDPAAVLKARRSTLVRFVGHHATGNHPHSGPVVEALVDGLKTAARDAVALHRGHVDFTELQAEVAIEVGMIVHHLDAIAELERRIAALYAEVHPSDVLRTIPGIGIHLAPVLIGVLHTPDRFRSERHIRGFCGLFPNRASSGGAERPGQKITQSGNDRIKRALVLAADTARRFDPELAEVYCRLMTVRGHHHKQALCAVANRLVNRIFRVLRTGQPYVLRDADGRTIDLAEGRRVVADRYAVPDAVRASRRVNRLKGAA

SEQ ID NO: 127335 - protein, 354 aa, unidentified
MAKAVKTIGLDTAKHVFQVHGADASGGRVLTKRLRRNQVSDFFANLPKCLVGLEATRGANYRARVIGSFGHEVRMMAPQFVRPFIKGQKNDAQDAAGICEAVQRPEMRFVPQKSIEQQDLQALHRIRSRLIGNRTQLGNQIRGLLAEYGIILPLHLSHLRAQLPALFSEEHPLLTSFSRELFASLYEELCALDERIQAMEERIQRVFSANEQYQRIAAIEGVGPLIATAMVAAVSNGKVFRNGRQFAAWLGLVPRQHSSGDKQRLLGITKKGDPYLRMLLVHGARSVVYRSAGKTDHSEPMDRRQATKAWHYEGVCGRGQQECTDYLGGAVQRGAVPRSGVNFHLRLQDEYLMA

SEQ ID NO: 127336 - protein, 392 aa, unidentified
MSQHCHFDASRSLTALEQDSTIIAVIEMSQTKWLVAALIPGVERQPLKKFDAHEETLLNLLHRWRSEAGQAGRNIKRIVVAYEAGRDGFWLARWLRARDVEVYVIHPTSIAVSREHRRAKTDRLDTELLMRVLLGWLRGETRHCSMVAIPTIEEEDARRPNRERRNLITEQTRIINQMKAIFTRFGIRSLRPTMRKVAEKLEDLRTAEGTPLPQNTLAELRRHLARLRVVRDQIRAVEQERLRNLAVAPAAEKKSPHAMVRLIARVLGVGVETADMLVNEIFSRHWRDRRAVARYAGLTGSPDESGSRRRERGLARAGNVRVRSGMIQLAWRFVRFQKNSALAQWFAARTADGRASTRKTMIVALARKLLIALWRLVTRGELPQGVVLRPAS

SEQ ID NO: 127337 - protein, 321 aa, unidentified
MQFIGIDAAKATFDIALPLSHGKYRTKAKLPNTPKGFDELLAWRAKHAPNAAVGMEATGIYHEALAQALVEAGVVVHVANPARVKAFGQAEGMRTKTDRSDAKLIARFFEAQRSEKLHPYVPPTPSEVKLRALVRRRDDLQEMLQMEHNRLDVADISVQQGIKDVIRTLEEQIKQVQKAIEDHIDNDPDLRRRHQLLTSIPGVGNTSSAQLLAMLGDLSKYSDVRQVVAHAGLNPAQRQSGNYEGKCRISRVGDANFRKKLYMPALTGKTHNPTLKSFADRLSAKGKPFKVVMCAVMRKLIHLIWGVLRSGRPFEPDVALA

SEQ ID NO: 127338 - protein, 352 aa, unidentified
MRTSQKAAGIITTIGIDIGKNTFHLVGLDKRGAIVLQQKVSRGQLERRLANIPRCLIGMEACSGAHHIGRQLAAVGHDVRLIPAQYVKPFLKGHKNDYRDAEAIAEAVQRPTMHFVAIKTPEQLDLLALHRVRSRLVGQRTGVINQIRGFLIERGITVRQGPMPLRKALAEILSSDTGVLSPRMVGLVTDLVQDWRRLDERIAAVSAEVEALAEQDDGCQRLMTVPGVGPIISSAVVAAIGNGTGFKQGRDFGAWLGLVPKQESTGDRTILGKISKRGNKYLRTLFVQAAHVVLARRPSAAMRGLWPWIEQASKRLHRNMLAIALANKLARIAWAVLARGRAYQPRITADAA

SEQ ID NO: 127339 - protein, 467 aa, unidentified
MQLRLGIDIACRAPHQASLADERGEFVFTGRRFRTSVEDLEQLWAMLPEGTESGDVTVVMEPTRNAWVPLAAWFRRHGARVVLVPPERSADLRAYYAKHTKTDRLDSRLLARLPMLHPEGLHEEHGLGPGDRLRRSTRLHQTLTRRRSQSLARLDAMLEILGPSWVVVFGADLSNKTPLRFLAAGYACPHTIKRLGKARVARFLYRHSRGRWGEEQAEALLAAAAETLVLWAGDLEFEELADDIAIEARLALRLDDELKDLDERIAIFLAEADPTGILTSVPGIGRVLGAQILGRLGDPNRFRTLAGVRSFSGLVPSLDASGMSGRHGPPTKRGDACLREAMFMAADQARRCDPSLAARYHRLMVEAGKHHTSALCHVAAVLLTRIVACWRTGEHYVIHDVDGTVVDIAQGRRIVQERYTVPADLRAVRRTSGGAGGRKGTDRRSKGSRGAPSTGPSLVNATALVGA

SEQ ID NO: 127340 - protein, 364 aa, unidentified
MGVGSRHRPRLDWKPAAASADRPRMSLALQSFLPFPNSCQGTSPHQQGRGTKMKEHYYGGIDVAKDRLDVQVLPHRQRFSVDNNATGWAELVAQLHALPIAAVGIEPSGGYERGIIRTLLAAGLSVRRINPNKLRQFARARGILAKNDRIDAQLIAEYVSIMPTRVVQRNTATERLTEVVTMRRQLCDEHVTIENQAAHVEDVILRRLNKRRLTRLKADIRLLDRRMAEMVAADADLAQRYALLISMRGVGPTLAFTLIALLPELGHMSRKQIAALVGVAPYDFDSGKLKGHRCIYGGRIPVRNVLYMAALSACRYNPVLKIFHNRLAAANKKPKVVIVAVMRKMITTLNAMVRDNAAWQPGAA

SEQ ID NO: 127341 - protein, 379 aa, unidentified
MRDAEPRFVGLDLHRHDVMVGAVNAHQDIVLTPERVTLRRFAQWAPRHLRPTDQVAIEATTNTWALYDLIIPHVAKVVVAHPQQVRLIASAKVKHDKRDALILAQLLAANLLPEVWVPPPPVRQLRSLIVHRHHLATHQRMAKNRLRGVLFRFNLPAPPGDVASPAHRAWWQSISLNPVERLRVQHDLDTLDHLTAQITEVNASLAHLSVCSPWAAAVPFLLQMPGIGLVSAMTILSAIGDISRFPTPKHLVGYAGLGAGVRSSGQTTRSGPITKSGRGELRTALIQVAWAAARYSPYWREGFSRLAPHKAITILARKILVVIWHVLTHRTMDRHADPAQVERAFLKWATDHRLATSQGVSRTQFVQNALVLVGFRPPD

SEQ ID NO: 127342 - protein, 341 aa, unidentified
MDEYIGLDVSLEETAISIRRDGQRIWRGKCKSDPNVISTLVRKRAPGAKRMVFETGPLSVWFYHALSAEGLPAICIDARHAKAVLNMAANKTDANDADGLAQLAEVGFYREVRVKGYDSMLTRTLVAARTKLVRICIELSNQIRGLMKTFGLVIPPGRGRTFEQNVRELLDGNDALSPIIMTLLEAWCGMRRQAAKLSRQLMATARQSAPCRLLMSIPGVGVVTATSFVTAIEDPGNFRKSRSVGAWLGLTTRRYQSGEVDYDGHISRRGDAHLRGLLYEAATVILTRAGADSSLRSWGLKLREKVGFKRAAVAVARKLSVIMHAMLKSGEFFERFPGSNA

SEQ ID NO: 127343 - protein, 455 aa, unidentified
MYKVKLKKTKAKSLIEMPIVNPYSSGIDISDKEHMVAVPEGVATDRVRRFGAMTCDLEEIVKWLQECEIQTVAIESTGVYWKPLFSALTRHGFEVYLVNANYVKNVTGRKTDETDAMWIQKLHSCGLLRSSYLPDDEQEALRTLVRYRRTLVQDSSRFVNRMQKSLELMNIKFHTVIADIIGKSGRRVIEAILQGEREGKNFLPFIDKRVKADSQTIVKSLEGNWRTEHLFTLRESYEMYQIYKDRIAVCDQEIEKQLQQYEAKRNDGVIETDQKPKKKPIQKKKDKNHPRFNVRGYLERIHGVDVLNIYGLSETCGLELLAETGTDLSKWENDNHFVSWLNLCPNNKISGGKLISSTLLKKKSNPASQAFRQAANAVQKSNHWLADYFRRMKAKGGHKYAIVATANKIARIYYKMVRYKEEFNPVDLEHYQQKYKQAKIAYLERKLSQLKKEVA

SEQ ID NO: 127344 - protein, 343 aa, unidentified
MQTVTTIGLDIAKSVFQIHGIDAAGHVIVRRKLKRRYVLPFFQKLPPCLVGIEACASSHHWSRELQAFGHTVRLMPPAYVKPYIKRQKNDAADAEAICEAVTRANMRFVATKTLEQQSCLMLHRTRHLFIRQQTSVINAIRAHLAEFGIVAPVGRNGVEQLLDVVADVSDKRLPDLARTCLLALGAQLRTLKVQILNFDRQIMAWHRSNEASKRLDEIPGVGPALATALVASVADPKAFRSGRDFSAWIGLVPKQHSSGGKDKLGSISKQGDRYLRSLFTAGALAVIRYAKIHGTQHRPWLTALLARRPTKVAAIALANKIARMAWAMMARGERYKEPIALAA

SEQ ID NO: 127345 - protein, 403 aa, unidentified
MNAVGIDVSKGKSMVAILRPYGELVEAPFEVKHTSSEIQSLIQTVQSIDGESRIVMEHTGRYYEPLFCQLAEAGLFVTAVNPKLIKDFGTNSLRKVKSDKADAIKIAKYALDSWSDLKQYSVMDEIRKQLKTMNRQLDFYMKHKTSMKNNFIGLLDQTFPGVNNYFSSPAREDGSQKWVDFATTYWHVDCVRNMSRSAFISHYQNWCKRKEYNFSQSKAEEIYEAAKELVSVLPKDDVTKFIVKQAAGQLADASERVAQLKVKMDETASKLPEYPIVMAMYGVGSSLGPQLMAEIGDVSRFTHKGALTAFAGVDPGVNESGTYEQKSVPVSKRGSAPLRKALFQVMDCLIKHMPQDDPVYLFMDKKRTEGKPYYVYMTAGANKFLRIYYGRVKEYLLSLKQPE

SEQ ID NO: 127346 - protein, 410 aa, unidentified
MEVLHPHCAGLDVHKDSVVACIRHMVEGKVTTHVKTFKTTTQELMALSEWLSTEAATHIAMEATGVYWKPVWHILSDGEFELILANAAHVKNVPGRKTDVNDAVWLADLMAHGLIKASFVPDEPTQQMRDLLRTRKQMVRERSSHIQRIQKTLEDANFKLDSVVTNILGLSGRRIIEALIAGQTMPQALATLAHRNLKATVDELEASLRGRVTRHHRFLLKLHLDQIDAIDAAVARIDEEVNVNVEPFRVAIEMLSAIPGVGDLSATVIVSEIGIDMSRFETAAHLISWAGLCPKNDQSAGKRRSNRMKKGAPWLKSTLIQCAWCASRTKGSYLQAQYLRLRSRRGAKKAVCAVAASILTAIYHMLKNGTLYQDLGTSYFDNRAKDKQALRLIDRLKNLGFEVQIKPLAA

SEQ ID NO: 127347 - protein, 352 aa, unidentified
MRKKCSTVSFKSQVIYCGIDVHKKSWKVCTRHCGMQLDNFSMDPDPQKLAEYLKRNYPEAEYRSVYEAGFSGFEAHRTLCKLGVLNIVINPADVPTSGKERNYKNDSIDSRKLARELENGSLEGIYIPEPENLVLRNLTRRKEQLTGNITRTKNRIRSHLLFLGLKFRSWSGSSLKIMEADAEKRFDHALSSDLRELRFLREERLRVIRCEHACLKHLKREEIQKNLESIPGIGFDTAVVLQAELWDMKRFKGKDQLNSYVGLAPHLVGSGEHEEVKSSGNRKKKQLHYRLIESAWRAVRFNREYGAKYGAMIGKGICPQKAISIIAKKLLLSIRAVWLQNREYQVLLPKTR

SEQ ID NO: 127348 - protein, 344 aa, unidentified
MIVLGADTHKRSHTIAAVEMATGQVLGDKTVGVGERGFAALLIWARALDTQRVWALEDCRHVSGALERFLIGRGERVVRVSTRLMAGTRRSSRERGKSDRIDAVAVARAALATGIDTLPTAALAGSELDLRLLVDHRERLVRTRVALNSTLQWNLHDLWPELTLPGGALFSNKWSAKIARRLARAEQTMRVRIARDELRRLRELTAAIKALKAEITELVGELAPQLVAEPGCGPLTAAKLVGEIAGADRFATDAQLARAAGIAPIPASSGRTDRHRLDRGGNRQINAAIHRIAVTRARCDPQTQDYITRKNAEGKTNRDAIRCLKRHLARRVWNLLRTPTPIRP

SEQ ID NO: 127349 - protein, 476 aa, unidentified
MKAKQAAQSRRAVKAIRPAHNLPKVHPHAAGIDVGATEHSVCVPEDAVPAGESPVRQYKAFTGDLDQLVEWLQACGVKTVAMESTGVYWIPLFQKLERAGLEVVLVNARHLKRVPGRKTDILDCQWLQQMHSYGLLSGSFRPADDICVLRTYLRHRSNLIAACGQQVQHMQRALDQMNIHLHHVVSDLDGETGLAILDAILAGERDPKELVKLRHARCSKSTVAEMEAALKGDWREEHLFVLKQALESYRALWRQIAECDAATQKTLVQVTPNPSTLTETERPKNPVASPDTGKKRRRKQPRGNALQVDLSTQLQQVCGVDLTRIVGFNVLSVLIIISEIGVDMSRWPNAKAFCAWLGLCPGNKISGGKVLSSRTARVVNRVAILLRTLAPTLGRTDTWLGVFHRRMKARMGPAAANTATARKLATILYHLLKYREEYIDVDRVAYEEKFRRYRVGRLRKQAAELGYEMVELKEAA

SEQ ID NO: 127350 - protein, 343 aa, unidentified
MDYFAGLDVSVKDTSVCIVDDTGKIAREVKVASEPAALLAVLTGSSYRFKRIGLEAGPLSQWLFSALAEADLPVICVETRHMRAVLKAQINKTDRNDARGIAQMMRVGLYRPVHVKTLRSQKLRMLLTHRKLLQAKAIAVENDLRATLRNFGLKVGMVGTIKFEARVKDLVDNFPDLATLVQPLLVVRRVLREQISILHRRVLAIVRDDEVCRRLMTVPGVGPVVALTYRATVDVPARFRKSKSVGAVFGLTPARDQSGERDRPGAISRCGDEMMRTTLYEAAQVMLLRSAKWSWLKAWAMKIARHRGMKKAIVALARRLAVIMHRIWTDGTEFRWTREAAAA

SEQ ID NO: 127351 - protein, 361 aa, unidentified
MADAIRWVGLDVHASQTTIAVLDHDTGELSRAKLRGSPDQVVLGFLAGFDGRVIAVYEAGPTGMKLARVARAAGIDMRVCAPGLIPRRPADRIKTDARDAERLVRQLAAGGLSFVRVPSEHEEALRDLVRAREDVRQDLMRARHRLSKMRLRRGLRYDAGSSWSDRHIDWIVRLKFDDLASRIVVGEYVNAVQQLNQRRRDLEQIIEQLLPSAPFAATAYRLRCFRGLATLSAVALCCEIGDFARFTKPAQLSAFLGLVPAEHTTDSKRRLGSITKAGSSHARRLLVEAAWHYRRLPATGTTLARRQEGIDPRVIAIAWRAQVRLHTRYTRMKARDKPAGVITIANARELACFCWEAATLD

SEQ ID NO: 127352 - protein, 324 aa, unidentified
MNDFPKLGLDIAKQTFQAVLLRQGKQRHKKFNNTPAGFAELSQWLAQQGVEQVHACLEATGIYSEAVARFLYQAGHLVSLVNPARIKAFAQSRLVRTKNDKVDAGLIARYCLEAVPDAWTPPPPEIIQLQALMRHLDSLEETRGQLRNRLTDGPQVAPVLTSLRKLIAEVEAESERIWQQVREHIKGHPELKEQAALIDSIPGIGELTAAKLLGELTQLRSYQSASQVVAYAGLNPQERQSGTSIKGQSRISKTGNARLRKALYLPAIVALKHNPLIRALGIRLEERGLAPLAIIAAAMRKLLHLVFGVVKSGKEFDPDHALAS

SEQ ID NO: 127353 - protein, 439 aa, unidentified
MVWTGRRFRTTPQDLDRLWAMLPEGTDPADLLVVMEPTRNAWVPLAPWFRRSGASVVLVPPERSADLRRYYAKHTKSDRLDSQLLARLPMLHPDGLYAEQSLGPGDALKRAAKLHSTLTHRRSQSLARLDALLEILGPAWHAAIGADLANRTPLKFLAAGYADPHVVKRLGRTRLARFCYRHSRGAWGEPHAAALLAAASETLELWSGGELDYPDLAEDIAIEARLALQLTEEIKDLDERTTLLLREADPSGILTSAPGVATITAAAILGRLGDPNRFTSLAGARAFTGLVPILDASGLNGRHGGPTKRGDAVLRQALFMAAGQARRIDPTLAAKYHRLMTEAGKHHNSALCHIATTLLTRIIACWRARQPYQLRDIDGTPVTIDQARTIIADRYTISKDLRARHRTTADTGTDRRNKRSPSAPSTGPSTTHARRAGAA

SEQ ID NO: 127354 - protein, 310 aa, unidentified
MNVATVGADLAKDIITVYAADTVGRVVEVRDLRRKDFSAWLIQLPKGCVVGMEACSGAHHWARVMHGFGLTPKIMAAEFVKPFRKSRSSKNDRNDAEAICTAVRQPNMRFVTVKSVEQQTRLAWHRVREGWKEERTALINRGRGLLAEFGMVIHRGSGAFTRALSGLVRDEALAGSLRGVLEQLQRQLAVLDEQMQLCDRTIAEHARSNPEGKRLQALGGVGVLTADAITATVGNARDFKNGRQFAAWQGLTPRQYSSGGKAKLGPITRRGDTYLRTLLVQGARASVRVALKREPAHLMNRPGIPGDSIS

SEQ ID NO: 127355 - protein, 463 aa, unidentified
MRTDKKLWRNRKARKELARRLQSENPGLEVVHPHAAGIDVGNSAHYVAVRPDRDAQPVRRFECFTADLHRLADWLQSCGVQTVALQSTGVYWIPLYDILEERGFEVYLVNAQHTKNLPGRKSDVQESQWLLKLHTYGLLNNSFQPPSKIRTLRTYWRQRLQHVTGAATCVQRMQKALTQMNIQLANVISDLSGVTGQLIVRAIIDGERDPWKLAELSHPRIQASRAEIAKSLEGTWRPELIFVLQQELEMYDIYQRRMAECDQQLQKHLAAFANTVTPPPKEELPPKKKKKQNKNNPHFHLADELQRIAGVDLTRIDGVDVFVAQTVISEVGLDMGHWKTEAHFASWLGLCPDNRISGDKVLARGTRHVLNRAATALRLGASTLLKSQTYLGAQYRRLRTKLGAPKAITAMAHRLARLVYRMLKYGQHYVDKGAEYYERRNRQQQVEFLRKKAARLGLQIIPA

SEQ ID NO: 127356 - protein, 413 aa, unidentified
MIKRERIKESRQEVYAGIDIAEEKHVIRFIDNLGREIGKPVSFTNNLEGFSQIEQCAKERGKFSVTFCVEPSGDYWKPLAYYLKERQYPVVLVNPYHTRQSKELIDNSQTKNDRKDAYLIADLGKQGKCFPAHLPEGSMADLKELVLAWTRTNRLLVQAKTYLHNFLTKYFPEYKGCFSMMYGKASMYCLVHFPLPSDIQQIGLSRLTFLLKRASGGKLSEKKVQLLYQKACTSIGMKEGTHAAKEALGDILQDIEMLLQRKRKMKEQMAFHLLQSGYRDSLLSVPGVGVITACFFLSEIGNPQWYTKATQIEKLAGLHLVENSSGKRHGRFIISKRGKHLLRYTGYLAALSAVAKNNELATLYEYRLNHTMNPKEDKMKLMTYLAAKMLRIMFVVCKKRTVYQPEAITQYWK

SEQ ID NO: 127357 - protein, 355 aa, unidentified
MQKYNFSFKGQNIYVGIDVHLKTWHVTTLTESGCKYSFAQHADAKELFDRLNKKFPEAHFKSAYEAGFCGFSAHYALTDLGIENIVVHAADIPTTGKEKAMKTDAVDSEKIAWALKRGELRGIYVKDKRYMDDTNLMRLRQRFIMDLSRQKNRTKHLLYTQGVTYPERFRNCRTHWSRNFMKWLREEVELLSDQKMSLLLLCEQVENTRKAILKVTREIRRLSTTDRYKENYDLLTSVPGFGLTTSMMILTEFDNDIMRFPNERRFVSMLGLIPTCHDSGEKKVSGEKINRGNKRLGPLIVEASWVAIQRDLELGAYYSNCCQIMKPHKAIIKVARKLACKAYAVLKTKTRYVLP

SEQ ID NO: 127358 - protein, 412 aa, unidentified
MQVLYPCCCGIDVHAKTAVACLIKQGKRQTRTFSTMTDDLLRLSDWLTAEDCTHVAIESTGVYWKPVFNILEATLTLILVNARDAKAVPGRKTDVRDCEWLADLLRHGLLRASFIPPPEIRELRELTRYRQTLIKEHTAVANRIQKLIESANIKLGQVATDVLGVSGRLMLRALADGEQDIERLVELARGSLREKKPELRRAMTSRLTPAQRFVLNELLTRLCELEAATARVGEQIIKEVAESADPFVPEAVKLLQTIPGIGLRVAEVIISEIGVDMTRFPTDAHLASWAGVCPGNNESAGKRRSGQTTKGSPYLRAAITQAAWAAAHTKNTYLAAQYHRLIKRMGKNKALVAVAHSLLVITYHVLAQRADYRELGGDYFDRQHRQTQQQRLIRKLEAMGLKVTVEALAEAA

SEQ ID NO: 127359 - protein, 356 aa, unidentified
MQVFKQSVGVDISKSDFVAYFEVMLSNQRIKKIGRRKFDNTPSGAKRFVQWLVKKSVKDVLLEVVMEATGRYHEVLAYHLYEGHYRVCIVLPNRIKYFARSLNQFSKTDPIDAAVIARYGLSQPLEAWEPPREGMRRLRELSRERQDLVKMKTQAINRLHAMRSSAKLANSTIERLELQLAFFEQQIAVVEAEMNQLSNQDQHLAYQVKQLTSIPNIGTTSAYTILAETAGFQLFSNRNQLIKYAGLDVVENQSGTSIEGRSRISKRGNANLRAALYMPAVSALTKPSVFRDTYQRHLDSHKNKSKALMAVQRKLLLVAFGTHQSGQMYDEQQHRCRTSKQVGEHKGSPTVAHLVN

SEQ ID NO: 127360 - protein, 330 aa, unidentified
MEKVQHIIGADLSKRTIDLFCHLFKSHIRIDNNLSGYKELLKWIRQQQINSSELMIVMEHTGLYSFCFENFLQQHQISFTKVNALVIKRSIGLVRGKSDKIDAKRIAEYGYEKRSKLIAEALTSVELQRLQLLHSTRDRLVKQKAALLNALKEYSNIGLPKQDSIMQSQMRLVRNLEKEISKMEAEMKDIIQQNPSLQQNHQLLQSIKGVGKVLATATIIKTKNFTRFTNARKFACFCGTAPFENTSGTSIRGKTKVSHLADKQMKTLLDLSAKSAIQYDKELRAYYLKRVESGKSKMSTINIVRNKILYRMFAVIKRQTPFSENYLQAA

SEQ ID NO: 127361 - protein, 321 aa, unidentified
MTIIGFDVSKNELVGARTNKSGLLKESIILENTRSAIAQFLDEATQLYPSMLVASEATAEYHRVLAEECIGRSVSFRLLNPILTKQFTRATIRKQKTDRTDALIIAKLALAGEGTVLRKESLHPAKSIARVAYKLARLEKILAAMRSRVLRVFPEEVEMSAVIEQPRKVIGDSVRILRNCLATRIDSKLALLLASIPGVGPTLAATFIAEIGSINQFPSGKALVAYAGLDPRVRQSGISLRRNTKLTKRGSPYLRKAAYIAAYIAKRHDAELGAYHAKKILEGKRYKEATVATARKILYRVYAVWKRGTPYQKHTLSTIIA

SEQ ID NO: 127362 - protein, 341 aa, unidentified
MDISVLGIDLGKNSCSVVGLDAIGKVVVRRRMRRETVITYAATLPACVVAMEACCGAHHMGRALARQGHAVRLMSPEYVRPYVKAQKNDDRDAEAIAEAATRPTMRFVELKTEEQLDMQTLHRIRDQLVGDRTSLMNQIRSLLLERGYIVPQGRAKLALRLGEMLDGDEPVLGSRIHRLVSDMRLRWSALDERIADLDAEFTDAARADERTRRLLTIPGIGALNATALVAAIGDARTFGRGRDLAAWLGLVPRQATTGGKPRLLGITKRGSRYLRKNLIQGARAPLPVMSKSDTRLGAWLRGLLSRSHHNTVVVALAAKMARIVWALLRHERTYDPVAQAA

SEQ ID NO: 127363 - protein, 322 aa, unidentified
MAMLSFGGIDVSKDRLDITVLPDEQCSSVSNDAAGWAELIEQLRGSSITAIGVEASGGYERGVVRALLAAGMSVRQINPFKLRQFAKASGILAKNDRLDARMIASFVAIMPTRPAQRQTPMIEQLAAMLTVRRQLSDHKVATENASRLLEGAMLQRLSRRRVAGLTADIDLLDQRLVEIVTADPALAHRFWLLTSMPGVGAVLACTLIALLPELGQMSRKQVAALVGLAPYDFDSGKLKGRRCIWGGRARVRHVLYMAALSASNWNPALKAFHDRLAVTGKKPKVVIVAVMRKMITTLNAMLRDGTAWVDRYSGRRSAATAR

SEQ ID NO: 127364 - protein, 338 aa, unidentified
MFIIGIDPHKGSHTAAVLDRTETVIGELRVSADRQQRDQLLRFAATFTPRTWAIESASGLGALLAQQLVAAGKTVLDVPPTLSARVRLLDAGCTDKTDPHDARAAAIVALRHGRLRRVTPVDHTAVLRLLADRHHDLTGLRTQAICRLHALLCGLTPGGAGRLLSAPQAGRMLRGVRPLGPVEIERKRMALELLGDVRRFDNQLLAIHHRIVEAVVASATTVTDIHGVGPLGAAIILGHTGDIDRFPSGGHFARYTGTAPIAASSGPKQRHRLNPRGNRQLNRALHVAAVTQVRNDTPGRAYHRRKLDEGKSTKEALRALKRQIAKTVYRHLVADAHH

SEQ ID NO: 127365 - protein, 397 aa, unidentified
MRQSTTQGLHVSVDTGCYQHHAAVGLSNGKYLGSFEFPHTKLGFAEFFSKIDRYKKHSNGKVCVAMEGYNGHARPLDRMVQIRGYRLFNINNVKLARFKEIFPGAAKTDPIDARKGLELFQLQQTLPLAKTVVEEVSPVGEVEQQLKRLSRRRRRLVDERTRYINTLQADLRAVSPGLIEITADVGNVWFLNFLASAKDFRQMKQRKESRLLKIKQVGKRYVAAILAWQENALFSDDIAFVWPLVHQDVLRIIELRKMVKTIDKQLICLMEQSTLARHLLSIKGFGDTSCAELAGEIGCIERFAKEASLALYLGMAALDNSSGTYQGSKRSKQVNQRAKMAMMNALDKHRRWVEQSSSYYRKKRNEGKKHNQALRSLGRHVVRVIFKMLKEDRDYYL

SEQ ID NO: 127366 - protein, 395 aa, unidentified
MKVAGIDVHKKVLMVVVVDASTREEKPTRRRFVTMPSELHRLLTWLREQGVEEVVMESTAQYWRSVWLELESHMRLHLAQAFSNRAPGGRKHDFKDAERLVRRLIADELILSFVPSGEQRIWRSMTRMKLQLTRDRVRLQNQIECLLEEMRIKLSIVVRNLLGASGLRILHALANGETDPGKLAQLGGERLQCTEEQLVDALTGRAQPVHGEMLALQLQRLQLIDQQMAQLNSMIAAAMKAHQDAVIRLAEVPGLGVDSAQQIIAEVGAQASTFPSAAELTSWVGTCPGKEESAEQNHSSRSAKGNKYMRRVLHQAAHAAVAKKGSHFQAVFRRLLPRLGYQSAIWAVAHRLCRLVWKILHEGVRFIEQGHEVGPREKRKRAQSWREPSASSAIR

SEQ ID NO: 127367 - protein, 340 aa, unidentified
MGNVTTVGLDIAKNVFQVHGVNAEGAAVVRQRLSRGRMLKFFAKLPPCLVGIEACATSHYCARELVALGHDVKLMPAQYVKPYVKRGKNDAADAEAICEAVTRPTMRFVGIKSPEQQSAMMLHRVRLILNRQRTQLSNAMRAHLAEFGIAAPIGRNGIEQLLDVIADPTDNRVPADARFCLEMLAAQLRIVKEQILENDRRILASARETELGRRLMEIPGVGPLLASAIVATVPDPAIFRSGRNLAAWIGLVPRQNSSGGKERLGGITKAGHQYLRQMLIVGAMAVVRFAERNGAKRPWLVQLLARRKTKVAAVALANKNARMIWAMMASGERYREPQVA

SEQ ID NO: 127368 - protein, 370 aa, unidentified
MTFLGIDLHTNCFTCCYLDSKTGDKRIETFKLNSSGLPLFYKTLNRRTHVLVEATINTFAFVELFQHLVAEVVIANTYKLKIISVTDKKTDKVDAEKLARVLKMQVLSGEQQISPVMVPPKVVQDLRALFSTYTLIRKQITATKNRIHSLLKQNLFPFTKEYIFGKKTRPSIRAISEDPVLALQLGLLFDLLESLENKADEFADQILVTAAPFSREIDILTSMKGVSVFTAAAIMADIVSVDRFPNSKHFTSYLRSAPRVESSNEKTIIKSTNKAGRKTSIVLLSQSLNHFRDSNPKLSAWHDRLATYKKKGLVRMGLCRRVFAEMYQMLKKQEYHYYCDEKNHQKKMEEYYLFLNRHGLEITENLKLAS

SEQ ID NO: 127369 - protein, 415 aa, unidentified
MRRVLFVGDDWAEDHHDVEVMDEAGRRLSAGRLPEGIAGMARFHAMIAAGLGPDADLDAEAGVLIGIETDRGPWVQALIAAGYRVYAVNPLQAARYRERFSVSGAKSDPADAHLLADMVRTDHHQLRGVAGDSELAEAVKVVTRAHKTLIWERTRHTLRLRSALREFFPAALVAFGDLTASDTLELLGQAPDPASAARLTTTQITAALKRARRHHRDRRAAEIQAALRTEQLGQPPAVTTAYGVAVRAQVAILGVLNEQIGLAQEQVEDHFGRHPDAEIYTSQPGLGQILGARVLAEFGDDPTRYGDTRARKNYAGTSPITRQSGKKKVVLARHVHNDRLLDALGGQAFAALTRSPGARAYYDTQRDRGLGHRAALRQLANRLVGILHGCLKTGTRYNETTAWSHHTKQDRQAAA

SEQ ID NO: 127370 - protein, 311 aa, unidentified
MTLPQDIIGVDIAKCWIDTYTLSTRKHERILVTKQALARFARAAKGTLVVVEASGGYERPLTEALRHAQVDCARVNPRQAREYARATGRLAKTDRVDAEVLARMGRALELAPTPPADPDRTRLADLVARRDDLVALIRAEKNRAGTTRDTWIAREIAQLLKVLQGHLTAVEGQIATHVETRAALAAESRRLTSVPGIGPALSAVLIARLPELGHLDHRKITSLIGLAPHACDSGLHRGKRRIWGGRADVRRALYLAAFIASRYDPTFKAFRKRLQDAGKPVKLAITACARKLLTILNAMLQNGQDYRKQTA

SEQ ID NO: 127371 - protein, 315 aa, unidentified
MATVPTYAGIDVAKDRLDVVLRPSGEYLRAGNDEQGVRRVVGRLLEEGTALAVVEATGGLERTLAASLDGAGVPVAVVNPRQVRDFAKSVGRLAKTDRIDAAVLARFAEAVRPEPRPLTDERARELTALVGRRRQLLAMITAEGNRLVRAPKPLRRGLKAHLKWLRKEVERTEAEVDRMVREDAVLEEKDELLRSVPGVGPTLSATLLAELPELEHLDRKRIAALVGVAPLNRDSGTLRGLRTVWGGRSSVRATLYMAALVASRYNPAIKTFYERLCAKGKPKKVALTACMRKLLTILAAVLRNRTPWQPRVVPA

SEQ ID NO: 127372 - protein, 391 aa, unidentified
MPEDAPRPMQAAIRTDLGAIFVSLELSRRTWLITSLSPGSGEKMSKHSVPAGDTAGLLRRFAQLKEKARARTGRDFPIIVIQEAGLDGFWIHRVLQSEGIESHVVDAASILISRRRRRAKTDRIDGETLVRTLMAYKRGEPRVCSMARAPTPQEEDRRRVCRERRTLVGERVKHVNRIKGLLFAQGVFGYEPLRKGRRERLEDLRTGDGRPLPVHLKAQIMRELDRLEVLLEQLKSVEAERDALLKPATEEAASPAAMLARLKGIGPETAVVLWSEGLFRQFDNRRQVAAYAGLAPTPWQSGSIDHEQGVSKAGNPRLRTTMVELAWLWLQNQPASALSLWFHERVRRLGGRMRKTTIVALARKLLVALWRYTTAGVVIEGAVMKAAPATI

SEQ ID NO: 127373 - protein, 353 aa, unidentified
MKIVGMDLGQGKSAWAMLDTRTGEVARGQVYLNADALRKLLTRIGPDQLVIESGPLAARVHDLAVGIGVATLVADATQDAWQWKNVKRKTDADDADKLVRLAALGQINPVHIPAPAVRERRHLLEYRAALVAEQTRCKNRIRATLLLQGLKLPGGKSGWSVAARKTLAQHARPLAECDPTELWRGLLWTELEHLQQVESRVATVTDKLDELARSDAQVARLQTIPGVGPRTAEVIVTTLDQPHRFATRRQVAAYAGLVPRRWQSGQMDRSGRITKRGSPLLRAVLNQAAWITMRCNPELRAFFLRLGGGQKKRKKQAIVAVMRKLLVIAWALLRDRTTYQATRLRTRVAKPAA

SEQ ID NO: 127374 - protein, 449 aa, unidentified
MSTHDSKRRGLPVIHDRAAGIDIGSRFHVVAVPVDLAKEAVQTFKAFTADLERMANWLVSLGITTVAMESTGVYWIAVYEILEGHGLQVVLANARDARAVPGRKTDVNDAQWIQRLHACGLLRASFHPDREISALRSYLRLRERHLDFAAAHIQHMQKALTHMNLQLHHVVTDITGVTGMRIIRAIVAGERSPSVLAAMSDTRCKAGIDVIQASLVGNYQPEHVFALMQALSMYDAYQEQLVVCDQQIAQTLIKLSQEKTLPAEPLPKPRHRTRQPNALNFDVRTLLYQLVGVDLTQIHGIGPYLALRLVAECGTDLSRWRTCHHFTSWLTLAPGCRISGGKVLSAHTRKTKNRVTAHLRLAAVTVGRTNTALGAFYRRLAARIGKAKAVTATARKIAILFYNAMRFGMNYQDPGADHYEQKYRERVVKGLYRRAAEFGFTLQPAEGVS

SEQ ID NO: 127375 - protein, 421 aa, unidentified
MTFPQEREAVVGLLHEALPASTLVVAIDPGKVSNRVWMSTGEAGEVVPPMSLPVLRPGLDRLQRLVADHIGPSAPVFAIEATGGLHQAWVRELNQRFPGTVRLFAPSETTAARAQLGSRRFKTDDRDCAALTYLARQGQGRLVPDQLQDALAAAVRHRRGLIAEHKVTQQRLHDQLHALCPGLAAPDGHGRALHADSVIGQAVLDCAAAFAGRPPSARSLRARARGRILDREAEFWIDRWRTCLPPPADAAARAARLGRSLARWRALNADIAAIDGEIAALLAGSDGQVLTTLPGVGTSRAAAFAAFSLPIDRFPSAEHLYSATGLAPASYRSATINRRTPISRQGLPEHRDALMNLAWGLSQHCGPFIDRHRELRARGLRPIPARIALARHACRLAYTLLRTQQPFDEQRYRRARHQSER

SEQ ID NO: 127376 - protein, 367 aa, unidentified
MEKSSTAFIGMDVHKESIEIAIADQREARHYGRVSGDAAAVDKAVRRLRSVHKHPVFVYEAGPCGFWIYRRLKAQGLECMVVSPSNTPRNAADRVKTDRRDALKLARLARAGELEPIYVPDVADEAMRDLVRTREDAVSMQRQARQRLQALLLRNEIRYVGRSSWTAAHRRWISGLKLPQPAQQIAFEEYVQAVEEAQRRLERLGEAILAQLAHWRWRPVVRALQALRGVSEIHAVRIVAELGDFQRFDSPRKLMAYLGLIPSEDSSGARRRQGSITKAGNSSARRAMVEAAQAYAHPARVSWVIARRQTGLARSVTDIAWKAQLRLCARFRKLSARRLPRNKVIVAVARELSGFVWAIARQLKPLS

SEQ ID NO: 127377 - protein, 343 aa, unidentified
MQTITTIGLDIAKSVFQVHGVDAAGQVVIRRQLKRRQVLTFFERLPPCLVGIEACASSHHWSRELQRLGHTVRLMPPAYVKPYVKRQKNDMADAEAICEAVTRANMRFVPTKAPEQQSCLMLHRTRHLFIRQQTAVINSIRAHLAEFGIVAPVGRKGVTELLHVVADPNDKRVPEVARACLTALGAQLLSLKEQILEFDRLIMDWYRSNQTSKRLHCIPGVGPMLATALVASVVDPRTFRSGRNFSAWIGLVPKQHSSGGKDRLGSISKQGDRYLRSLFVAGALAVIRYAKIHGTGHRPWLTALLARRPTKVAAIALANKIARMAWAMMAKGECYKQPVALAA

SEQ ID NO: 127378 - protein, 369 aa, unidentified
MTMIRYVGLDVHKDSVVVAIADDGRGETRRYGQVANTPDALMRLAKKLAEDGATLHFAYEAGCCGFGAYRLLSGLGHRCDVIAPGLIPRRPSDRIKTDRRDASMLARLLRAGELTPVWVPDEAHEAMRDLVRTRFDATCVLRRSRQQLNMFLLRHGRVYTKTERKWGTLHKRWIRDVTFEHEAQSLVLEDYYQTVDRAEARIEEITARIRELLPTWSLAPLVDRLQAMRGISMVSAVVIAAELGDFERFAHPAQLMSYVGLVPSEASSGDRTRRGGITKTGNEAVRRTLVESAWNYRMPARISKNMMEHQKRLPRDVRDIAWKAQVRLHQRYKAMIAHGKRPNVTVTAIAREMLGFIWAIGRTPVTAHA

SEQ ID NO: 127379 - protein, 371 aa, unidentified
MGQDTLFVGLDVHKEKIAVALAEGGRQGEVRSAGTIMNKLDAVQRVVAKHAKRHERLKFCYEAGPCGYAIYRQITKLGYECTVVAPSLIPTRPGDRVKTDRRDAVTLARLHRADELTAVWVPDEAHEAMRALVRARTAAMENLRRARQQLQGFLLRHNRIFTGGHNWTKRHRRWLAALQFDHPAHQIILQESVDAIDDAHARLIRLEGQIAELLPQWSMAPVVEAIQAMRGVSFISSVTIVAETGDLRRFDRPRQLMSYLGLVPSEYSSGSRTLRGGITKAGSRHARRVLIEGAWTYRTNARVGPFHQARLEGLPKTVRQIAWKAQVRLCARYRRLAARGKPHTVVTAAIAREMGAFIWAIARHVQPVEQS

SEQ ID NO: 127380 - protein, 368 aa, unidentified
MKTVRSFVGMDVHKATISISIAEDGRSGPVRFLGVIPNTADEVAKLAKRLAKHGELDFCYEASGCGYGIHRQLTALGHRCMVVAPSMIPRKPGDRIKTDRRDSEKLAILHRSGDLTPVWVPDTTHEALRDLVRARVDASMHLMRARQQLLAFLLRHGRSYPTGKHWTQRHRSWLAGQTFLEHAHGIVFQDYLEAVWTAQQRRDALIERISAMVGSWSLGPLVEALRGLRGIDMISAATFIASTGDLSRFESPRLLMGYLGLVPSEHSSGGTIRRGGITKTGNREARRMLIEAAWSYQYPARIAKEKAEILVRLPKKIRDIAWKAQTRLCTRYRSMIARGKKPTVVVAAIARELAGFIWAIGQEMRAAV

SEQ ID NO: 127381 - protein, 346 aa, unidentified
MIMIGCDFHPGLEELALLDTETGQRRQHCLSHAFGLEPVRQFYAGLPRPVRVGLEASGYSLWLEEMLEELGCELWVGDPARIRKAAPRRQKTDRNDARLLLQLLEENRFPRIWVPDRATRDLRQLLMHRHKLVILRGAIGNQLQAIAMNRGMQKKGRLWSREGREQLKSLILPPWTTRRRDELLSLREQWDREIAELDQVVLREAERNPEARYLMHRQPGVGPITALAVVLTLGPVERFASARKVASYAGLVPAEYSSGARQRLGHLSKEGNPFLRWVLVESATVAVRHDPEMKRMYWRLVERRGKSIAKVAMARKLLTRLYWMLRRRNEGRGLRQRNRVAGELGA

SEQ ID NO: 127382 - protein, 288 aa, unidentified
MRFYTKQHHQYCGIDLHARTMYVCIMDRDGEIMVHRNLKASPEALLKVIAPYRDDLAIAVECMFTWYWLADLCAREGITFVLGHALYMKAIHGGKAKNDKIDAHKIAALLRGGMLPQAYVYPAEMRATHDLLRRRMHLMRQRAELLAHIQNTNSQYNLPEIGKKLAYKANRAGVAERFPDPAVQKSVAVDLALIGHYDQLLRDVELSVLKTAKLHDANTLYLLRTVPGIGEILSLVLLYEIHHIQRFPRVQEFASYCRLVKCAKESAGKRYGTSGTKIGNAYLKWAFS

SEQ ID NO: 127383 - protein, 446 aa, unidentified
MNCHRRLKCDFDHGCQIAFEAIPLPKSIGWYKLIEIVKKSCGLDIHKRFFIATILSTCSEKQQQRFNRDDDGILALKNWVISEKCDVVACESTSDFWVPIYDSLIKHLPVIIGNARDMKAFTHKKTDKIDSEVIAQLALNNMIEPSRVFPKHHREFRSYVRLRHKLVQKRTDIKNEAHAILALEMFNLNDVLTDIFGKNGRAILSGISSGKNVDEIIESLSPNVRKKSAQIKEILDREISQGAALRLQICLKLIKHLDDEIEALESEIFNYAYGKHKREMEILMSVPGIGELGAATLIAEIDNFKDFSSGDKLASWLGVVPNVYQSADKFYNGRITKRGSKVARWILTQIAQAAARKKNSKLKEFFNRKKKSIGHAKAIIALARKIATIIWHLITNDEMYEDETGYQKGQIQKRKIVETEIFSVDERIKIISGIIAVMGKDEGEST

SEQ ID NO: 127384 - protein, 363 aa, unidentified
MQDYIRDARESGGQEHDLFVGLDVDKGSIALTAFDRSGVRKSVKMPYDAEGLLSFIRNHYANRRVIFAYEAGPTGFRLYDAIVNRGHDCLVVSPNSIPNAPSNRVKTNRLDSVRLGTLLMGDQLKGIRVPSEAIRKLRSLVALRYTYMEDIKAYKCRIKGEMLLWGLTFPAAPKGSQWSNKVVGRLRSLDCDVIIGLKISSMLDHLEALGKHMRLVEVALRSFIDGDSDLRMCVEYLMSIPGIGWRIACYVLSRIGDHRCLGSSKEMGSFLGLVPRENSTGEKIDRGSITRCGDPRLRSMVIQGAWAAIRRDPELRAFYERICSNHPQRIAARVAIVAVARKLAERMHCVLKEQRRYELRRAA

SEQ ID NO: 127385 - protein, 300 aa, unidentified
MKPRMKSNTSSAVVIGVDIGKDIFHLVGFAADGKTAFRRRIRRLGLKDAFEKLSPCIVAMEACLSAHFVSRTLRALGHEPRIVPAIYVKPFVKGQKNDYNDAEAIAEAALRPNLRFVQEKSQDQLDLQACHRVRSRLVSRRTATINQIRAFLIEQGIAVRIGPRALRKSLFAILENRKDEISPRTAKLIRGLYEDWCCLDERIETVISEIEALSRAEAKCRQLMSVPGVGPLISTAMVAAIGSGEAFERGRNFAAWLGLVPRQYSTGGRSILGRISLGCISKRSSKYLRTLLICISSNLI

SEQ ID NO: 127386 - protein, 374 aa, unidentified
MKNDQNTFFEKVLLFIGIDVHKSKWVVTVRTYDLELKTFSMKPSAEELENFLIKNYPGAVYRIVYECCFSGFWIYDYFTEKGYSIIVTPTNRIYKDGSTIKTDKIDSRKLALQLSRELLREVIVAAKRIREYKYIFRIYDKQKMRQGQILRQIKAFLEQKNHLLKWNRWNKGLLEKLKTLKFEDKLFDLKFGNLITEYEYIVSQIKDTEKIIEQIKEDEQLGRRIQIIEKINGIGIISAVRMCLYLFDRKDRFESSERLNHYLGLTPSERSSGDKIIRDRSGVCGNRQLRSIIIQLAWMTVRKDGALLEKFDKVYKSSGSKQKAIVAVARKLMTKIFAAIKKEEDYRINVRIASAAEQRIKEKPKKMIRTGDCV

SEQ ID NO: 127387 - protein, 409 aa, unidentified
MDLVIARCAGLDVHQATVVATVRTPDDRGGRRRTTETFGTMTPDLLALREWLQAHGVTHVALESTGVYWKPVYYVLEDAFTLLLINMQDLKRVPGRKTDVRDSEWLAQLLECGLLKSSFVPPPPIRELRDLTRYRLQQVRDRAQEVNRLCKVLEDAGLKLTTVITDVMGVSGRAMLRALVAGTTDPGVLADLARGKLRQKLPALQRALQGRFRAHHAFLLQQILTKIDFLDETVERVTAEIDRRLAPFEATLAALDTIPGIDRVGAISIVAETGGDMSRFPSAEHLCSWAAICPGQNESAGKRRSGKTRQGNRYLRGTLVQAGLAASRSNGTALQARYHRVKRHRGHKKAVIAVGHSILAIAYYIMRDGRTYHELGADYFDKRHAERAVRRHVRQLEALGLQVTIEKAA

SEQ ID NO: 127388 - protein, 391 aa, unidentified
MDQVFVGIDIAKESFVACALNEKQEKLFELTLSMDREGFQKLEKYLRDFPKESLLIGEESSGCYHINLFSFLVSQGYRVVVLNPLLVSHFLKLSLRKTKTDRKDALTIAQFLAQFHTSLPESSFLSSDFRDLARERESISFEITRLKNDIQRLLEITFPELPRYLNVFSSSLLNLLQFYPSARAIKAADPVRLAEVLTNQGKRRKPTISPEELLSLARVSIASPSPSRELILSQKISHLLFLQEKLPEIEEMLSMMCRQIAWEDLEILKSIKGIGEVTALHFLAEVGDVRRFGNHRKLIAYAGLDPSIYQSGKFKGESKISKRGNRHARRVIFLMAQSVAKVNHLFRTYFLRKREEGASYKKAILAVAHKLIRVIFALLTQRSHFRVSLNS

SEQ ID NO: 127389 - protein, 405 aa, unidentified
MEVVYPHCCGLDVHKKNVVACIITPEGKEIRTFSTMTDDLLALVDWIKEKGCTHVAMESTASFWKPVYNLLELEGMQTLVVNARHMKNVPGRKTDVKDAEWIAGLLRHGLLQGSYIPSRDQRELRELIRYRRSLIDERAREANRIQKVLEGANIKLSSVATDVLGKSGRAMLEAIIAGEEDPEILSELAQRKLKQKKAELKRALNGLIGPHQKLMLKTQLRHIDFLDAEIARLDEEVKARMLPFEEDLERLDTIPGVGRRTAEQILAEVGHTMDPFPSAAHLCSWAGLAPGNNESAGKRKSGRTRKGNQKLRSALVEAARAAARTKNTYLSSQYHRIAARRGANRAAVAVAHSILTIVFHILKRKQPYIELGPTYYEERKRDAVIKQSVKKLESLGYKVTVESIA

SEQ ID NO: 127390 - protein, 399 aa, unidentified
MGGAISIEYRFFVGVDVSKESFAVCIKDIKGKVIFENSFSQSLDGFKNFFQIVKGIGDETSVVVGMESTSIYFLNLFSFLVVNNINTVIINPTLIKNFSKLSLRNSKSDRKDASTIADYLLYAKPDPSKKEDLEELKLLVREREKLTKEVSHLKDEILRCLFNIFPELERNFNIFTKGMLHFLLRFPSALSIQKSKKRTVEYEFSRAFKGRGKKPSFTSKDIIALANNSIGIESRASEKILVSKINMLLVIEEEIEKFDKLIFREVKDTEINKVNIIASIPGIGKSLAVSFICEVPETGSFGNGKKLVASRGVDPVIKSSGKYMGEFGISKRGNRHLRRTVYLMAMNVIKFKGKFRDFYLRLRERGKSYMEAVIALANKLIRTIYSMLIHGTLYSPNYS

SEQ ID NO: 127391 - protein, 356 aa, unidentified
MAKTTKTATVVGLDLGDQWIHFCGLDAQGEEVESGKILTGRSGLEPRFCGTARVRIALEAGPQTNWIARLLSSWGHEVIVANPREVHAISHGHKKSDRIDAAMLARLAWADPRLLCPVTLRGEEAQLRRDLLQARGLLVQIRTQLVNHVRGTMKKRGQPLPRSTSARWARDSQEVLPDPLKPILQPLLHLVETLGAEVDRYDRQVQQVSSQEPATALLQQVNGVGPITALAFAATIENPQRFARSRLVGGYVGLAPKSDRSGETAKQKGITHRGDEMLRCLLVQSAQYILGPFGKDCDLRRYGLSLVQRGGRAAKKRAVVAVARKLAVLLHRLWSGQAVYDPLYQAKRSELVTQAA

SEQ ID NO: 127392 - protein, 360 aa, unidentified
MRIIGCDLHARQQTLAMLDTNTGEVVNKVLQHEGDNVREFYSNLAKPVRVGIEATGSMQWFVNLMEELGIECLVGHPAEIRAAEPRKQKHDRRDADLLLSLLVQRRFPAIWLPTKELMDLRALLRHRHQWVRLRVKIQNALQAIALANGLRRGSSLWTQAGQQAIASLPLSPHAAYRRNELQAMYAKFAAEIEKLNQRVEQQARERSRTRLLMTHPGVGPITALATEVFLGDPARFASSKALASYVGMIPGEYSSGKRQRLGGLTKQGNPLLRFLWSEAAIHAVRQDPELKHFYRRKLIQKGLGKARAAVARKLGIRMWIMLRDGLEYNEFCRRGQMQQKVVMPMRGCQHGVMVRKSPAD

SEQ ID NO: 127393 - protein, 346 aa, unidentified
MKHSVGLDVSVKETAICIVDEAGKVVREGKVATEPQAIIAFLSSAGVEYARIGLEAGPLAQWLVNGLSEAGLPVICVETRHMKAVLKAQQVNKSDRNDARGIAQMMRVGLYKPVHVKTLASQQKRMLLTSRQLLCDKLQDMENELRGTLRNFGLKVGVVSAGHFEARIKELVAGQPPLEMIVVPLLTVRRVVREQLAKLDKMVLDQVRDDKLCRRLMTVPGVGPIVALTFRATVDQAQRFARSKTVGAHFGLAPRRFQSGERDYDGGVSKCGDAMKRTALYEAAQVLLTRTRTWSWLKAWGMQVARRRGANKAIVTLARRLAWIIREGARDFGLGTAPWRVFSWRR

SEQ ID NO: 127394 - protein, 342 aa, unidentified
MDYFAGLDVSVKDTSVCVVDDTGKITREVRVASEPDALLAVLRDPTYRFKRIGLEAGPLSQWLFSALATDLPVICVETRHMRAVLKAQINKTDRNDARGIAQMMRVGLYRPVHVKTLRSQKLRMLLIHRKLLQSKAIAVDNDLRATLRNFGLKVGMVGATKFEARIKELVENFPDLFLLVEPLLVVRRVLREQIGVLHRRLLAVVRDDEVCRRLMTVPGVGPVVALTYRATVDVPARFRRSKSVGAVFGLTPSRDQSGETDRPGAISRCGDAMMRTALYEAAQSMLVHSTRWSWLKAWAMKIARHRGMKRAIVALARRLAVIMHRIWVDGTEFRWTREAAAA

SEQ ID NO: 127395 - protein, 349 aa, unidentified
MDYFVGLDVGVRTTSICVMNEAGAVVREGKVESSPEEIIGFLAEPGRRYGRVGIEAGPLCQWLYAGLAKAGLPIICIETRHAQAVLSAQVNKTDRNDARGIAQLMRVGLYRPVLVKTLASQQIRILLSGRRFLQSKLIDIENSIRGLLRNFGLKVGVVTRAQFERRILDLIEDHPALLAVIEPLIVVRRAVREQFVILHKKMLSVARTDTDCRLLMTAPGVGPFVALTYRAAVDEPARFARSRAVGAHFGLAPRTYQSGELDHRGSISKHGDETIRTALFEAAGVILRPNTRPSALKAWGLRVAKRRGMGRAMVAVARRLAVILHRMWIDRTEFCWKAELPDPRLLSRQ

SEQ ID NO: 127396 - protein, 292 aa, unidentified
MFVVGIDAHTRYVVLVVLNSSGQRVLGPTRVRVSEPARVREVLAPFQPLEAVVETSSTWPWLEDVLQPLGVRFVLAHARRLRAIAEANYKRDEIDAELLGRMRLAGLIPAVYATPPTQREWETLIRHRTALVAQRTAPVNRIHAQLHRRGLWLERGRLLTRQGRAWVRHEAGPQLSLEERALVRSYAGLAPRSSQSGERGIRHGSIPAGANRWLRGALVRAVVSHVQTAPASALSQYYTMQKARVGWPVARVATARKLARVIHALLRTQRTWIETPTRGELRSTHAAQTAII

SEQ ID NO: 127397 - protein, 334 aa, unidentified
MKKPSQHLIAEVPRRQAKVEMTIGIDLGDVWSHYCTLNQDGEVVDRGRFRTTPKAIEKWFTDVPSARVAMEAGTHSIWISEQLQELGHEVIVANVRELRAISHSDRKSDQVDAEKLARYARLDPNILRPIAHRTVGQQEALTLIRARAVLVRLRTAAVNAVRGLTKSCGYRMPASATTCFAQRCLAVMPPGLAQALGPVLQQIAEITVKIKQYDRQIQQLGQTEYPETQALLKVHGVGHLTALTFVLTLGSKERFGRSRDVGCYLGLRPRRSQSGDQDPQLGITHAGNAYLRSLLIECSNHILRPHGRDSALRQWGLHLAGRGGKQAKSKCCGI

SEQ ID NO: 127398 - protein, 388 aa, unidentified
MAAVMIGVDPHKGSHTAVVISPAEEPLGELRVRASAGQAGKLIGWAAAWPERTWAVEGAAGLGRLLAQQLVAAGERVLDVQPKLASRVRLLQAGDTNKNDPNDALSVAVAALRSTVCREVIADDYRVVLKVWSKRHRDLARTRNQVACRLHAVLCDLVPGGHQKEISAAHAARILAQATPSGAVALARAELAAEFLADLRHLDGQLRDTRKKLAAAVRASGTTLTQVFGVGPVIAGTVIGDVGDVARFPGRDHFASYNGTAPVEVSSGNRKIHRLSLRGNRRINHAIHMAAITQLRHKHSEGRAYYDKKAAEGKTHKEALRSLKRKVSDAIFARLQADARQARESGPGGQPGNGSDSSAASSHPERQLFGPATPGPDTTIRPGTTAGT

SEQ ID NO: 127399 - protein, 461 aa, unidentified
MTMRTKTKNSKKRKQKVSVEQAWPLINPHAAGIDIGSREHWVAVPTDRDPQSVRCFGTCTSDLDELAQWLVKCRITSIAMEATGVYWIPAFQLLERRGLEVVLVNARQTKNVSGRKSDVLDCQWIQRLHTYGLLGASFRPADPYCVVRSYLRYRDELVAARSTQTQHMQKALQQMNVQLMQVLSDINGVSGLAILAAILQGERHPLKLAAMVDRRVKSTQAEVAKALVGDYRAEHLFQLKTAFELYHTYEAKITACDEELARELEKLPDRVDVKLKPLPAKTNHKPIDESIRRGLYLKLGVDLTAIEGIGALVALTTLTEVGPDLSRFKTEKHFTSWLGLCPDNRISGGKVLSCRTRRVVNRLSDALRLAATTLERSQTALGAYYRRMKAKLGAAEGVTATAHKLARIIYRMLKHGQEYVRQGMEDFEKKHLARRLKALQKSAESLGLQLIEKQIVTETVS

SEQ ID NO: 127400 - protein, 367 aa, unidentified
MKTNTTPSLVSTSTPAVVSGFTLGLDLGDRAHHVCALDSAGNIVREASLPNTRPALAQLLAEFPRATVALEAGTHSPWISRYLTGLGATVLVANPRKLHAISRNERKCDRRDAQMLARLARVDAALLHPIQHGSAQAQHDLLGLKLRDALVRNRVSLINAVRFTLKSLGHPVRNPSSEAFHKTVLQDIPADCLPVVQPLLTVLAHVTEQIKAMERDLVRRSKKDYPVTQRLQQIAGVGPLTALCFVLKIGEPQRFSRSRDVGAYLGLCPRRDQSGGTDKQLRISKCGDGLLRRLLVSAAHYVLGPFGPACALREHGQRLTGTGSAREKKRAVVAVARKLAVLLLALWKHGRDYEPRVSPPKLALTPA

SEQ ID NO: 127401 - protein, 470 aa, unidentified
MNDNREAGRRRTKGSRQRTSPGLLERIQPDAAGIDCGAEYHYVAVPPDRDPEPVRPFRTFTADLERLADWLAACGVKTVAMESTGVYWIPLYELLEARGFQVVLVNARDVRNVPGRKSDVADSEWLRELHSVGLLRASFRPAGEIAALRAYLRHRETLVHGAATHIQRMQKALVQMNLQLHTVIADLTGVTGQRIVRDILAGVRDPHALAAHRDHRCRASADVIAASLTGHYRAEHLFALRQNFEAYEFLKRQIDACDAAIDAHLTTLAERQAPPPHTLPTPRRTRKPRDNDPRFEIRAPLFRLTGTDLTQIDAIGPSTALQLIGEIGTDMSRWRSEKHFTSWLTLAPHNKVSGGRLLSSKTPPSANRAAAILRRCAMSLGRTATALGAYYRRLAYRVGKPKAITATARKLAILVYRVLRGDLVYRDPGALAYEQLHRARTLRGLRKRANQLGFGLLNLETGEVLDAAVS

SEQ ID NO: 127402 - protein, 351 aa, unidentified
MTYQITLEGIATIGIDLGKNTFHLIGMDTRGRIVLRRKVSRGQLQPCLANLPVCLIGMEACTGAHHVGRQLAALGHDVRLLPAQYVKPFLKGHKNDFRDAEAIAEAVQRPTMRPVPLKSAEQLDLQALHRVRSRLIVQRTAVINQIRGFLLECGIAVRPGPAGLREALPTILAQRTDVLSPRMRHLIEDLAGDWRGLDDRIDALTRDITVLARQDAGCCRLMGIPGVGVITASAMVAAVGTGAAFAKGRDFAAWLGLVPKQISTGDRTILGGLSKRGNRYLRTLFVGGAQALLQRPHHWGGHGFGRWLQAAGTRLHRNALAAALANKLARIAWSVLSRDSAYEADFASRTA

SEQ ID NO: 127403 - protein, 346 aa, unidentified
MIIVGCDFHPGWQQVAVFDSATGEIREEKLENGNGEAERFYRRLPVPARVGFEACGNTQWFEDLLDGLGHEVWIGDAAEIRASYVRKQKTDRRDAAHILKLLIEDRFPRLWRPSQAERDLRQLLIHRHRLVGIRTRVKNGLQHLMLNRGVQLKQKLWNETGQKVLRELPLEGWAAQRRQDLLKLLSELNPQITKLDQAVERSAYQHPRARLLMTQPGVGPITALAYVITMGDVTRFQRGKQVASYLGLIPSERSSSNRRRLGSISKQGNPFLRMLLVESVQTVCRLDEGFRKQYKHRCHRMKKGVAKVAAARKLAVRLFWMLRTNTAYPEIARIESSPRDGVVGGS

SEQ ID NO: 127404 - protein, 368 aa, unidentified
MSHTESDLNKLVQLIKSLSGETKVVMEYTGAYYEPIANALHNQGIFVSVVNPLLIDDYGTNRVRKVKTDKKDSLKIASFAIDKWLDLREYIPANDIRKTLKILNRQYVQYNKILVMQKNNLISLLDSCFPNANTLFTSPRRESDGHEKWVDFVLKFPHIHSISKLSLSAFKVKYQSWCRKNNYNYSDKKVADIHSYCKTQISVLPMTDSVIKIITEAAVMLNSTLETLCMFRDEMDRLSSTLPEYNAVMGIYGVGKVLCSQLIAEIGDVRKLNNSKSLVAMAGIDPPPNQSGKVDTKSRSISKRGSPVLRKTLFQIMTIIIQNKPVDDPVYQFLNKKRSEGKPYRVYMIAAAHKFLRIYYARVMQALN

SEQ ID NO: 127405 - protein, 410 aa, unidentified
MDIQPIYRCSVGIDVHQSVIAVCVIIQEPEKEQEVHHRQFGGFRRGRQEMAKWIAGFSPDIVVMESTGIYWKSPYVYLERVGITAQVVNAQHVKNVPGRKTDTSDAEWLAMLARSGLLRGSFIPPEEIRNLRQISRHHHQVTRMLVAEKNRLLKILTDAGIRISVVVSDPHGVAATAMINCLLDGGTPEQALAYAGKLKAPREELLAALEGELSAQHIFIARMIRQHINFLKQSLNELENELFNKLQPYQAALELLQTIPGIDRLSAAKLLVEIGTDMRAFGTTGRIAKWAGLCPGNNESAGKRKNGKTAPGNRYIRALLCQIAWAASRTTSQFKSRFQGLVIRRGTKRAIIAIAHKLLKTVFVLLSRNEPYKDSLVDVAALAVKKRASRWIQQLRKYGYLPGAPAPVGK

SEQ ID NO: 127406 - protein, 322 aa, unidentified
MTRIICGVDVSSRWLDASIGCTGTPQRFANTSVGIAQLADHCLAQQVELVAMEATGGYERQAFALLSEHGLPVAILNPRAVRQFAQSMGRLEKTDAIDAAMIAWFAEINGAQPRTLSQPGQLELRALVTRLRQLTDLRTAQKNQQRLITAPRVQASFAELLAVLNRQMQTLADTIAELISADPLWRELDLAFRTIKGVADRTVARIMAEMPEIGTLSNKAVSKLAGLAPLAQDSGRHQGRRAIRGGRATVRDLLFIVASVAGRYEPDFIAFRERLAGAGKPPKVVRIALAHKLLIRLNAKARDVRQRMAALPPDLMALPVAC

SEQ ID NO: 127407 - protein, 342 aa, unidentified
MSEVSIIGVDIAKRVFQLHGAGADGSVVFRKKLTRAQFLSFLAAQPRCIVAMEACATAHDWGRQIERIGHTVLLLPPIYVKPFVKRQKNDAADAEAIAEAASRPTMRFVAVKTEEQQARAMLFRTREMFVRQRTQLINALRGHLAEHGVVAPRGRVYVKKLVDALADKNITLPEMVRQLGWIYVEQIGALDDRIAELDRSMHAEANQAEMTRRLQTMPGVGPITAIAVETFGPPMESFRRGRDFSAWLGLVPRQHSTGGKQRLGKTSKMGQRDIRRLLIIGAMSVIRAASRHGAPEGSWLERMLAKKPHMLVAIALANKMARGLWAMLIKRENYRNPVAATV

SEQ ID NO: 127408 - protein, 379 aa, unidentified
MEVFIKNCAGLDVHSETIVACVLKGRHENEVYQETETFPTLTKDLFRLLKWLESHEVTHIAMESTGVYWKPVFNILEDFFDITLANAQRIKNVPGRKTDVSDAEWIAKLLRHGLIEKSFVPPVEIRELRDLTRLRKKWIGHLTSEKNRIQKVLESSNVKLSTVISDVFGASGRKLLKRLIKQGYVDEADVEKNIHGRLAPKKQLITDSLFGTLNEHQIFLIRQSWRHIEYLESLVLEIEERINQLLQNYHEELQLLMTIPGIKKDTAAVIIAEIGVNMNQFPTSQHLASWAGVSPGNHESAGKRKSTRSIKGNPHIKSAMCEAAWAVSRSRNRWLANKYWSLAARRGKKKALVAISHRMLRIIYSMLLNKEPYKEPQLV

SEQ ID NO: 127409 - protein, 399 aa, unidentified
MNYLGIDISKKTSVIAHYHDDKFQMEFTIQNNKNGYNHFLKYLNKIDQFQLVFESTGIYSRGMVQFCRVNQINYIEMNPLEAKFKTTSLRSWKTDQSDAHKLALLAPSLKSMDSLNTKQDIFFELRERARFHLEIENDQNRLKIMIIELLHQTFPGLEKLFKNRYSIIALNIAEIYSHPDFVQQEDIDTLTSNIFESTDKGLSTQKAENYALKLYKLARESYPNVNQTSFLVKKVQLLIQQLKNSIQQLSQLDKEMVELSQQLECFEVIRSIPGIGELTAAMIIGELGDITKFKSNKQLNAYVGIDIKRYQSGNTQYRDTINKRGNKKARRLLFWVVMNIIRGQRHYDNHIIDYYYKLKKQPNEKPHKTAVVACMNRLLKTIHYLVTNNRLYDYQMSPH

SEQ ID NO: 127410 - protein, 338 aa, unidentified
MALYCGIDLHSRDCWLAILDEKLKIVQESKVGNGIEALLQVLEPYREDMEGVAVESTFNWYWLVDGLEDAGYQMHLVNTWAVKQWEGLKYSDDRHDARWLAHLLALGILPEGYIYPKHERSLRDLLRRRAFLVRKRTSFLLAMRGAFECRTGMRTTSNEVKQWTTEDVESYLDDPTAALGITCLLEPMKALDEQIRIIEKEAFKRARLRDEFAPLLTVWGVGKILALTMMYEVGEIARFRKVGNFASYCRLVKSARLSAGKRKGSGNPRNGNPYLSWAFSEAAHYAVRYYPPAKKYFQRKMSKTNGIIAIRALAHKLARAAYYVMKDQVEFDPDKVFR

SEQ ID NO: 127411 - protein, 443 aa, unidentified
MSASTGAMRHQRRPGNNGGGAVENAYRFYIGIDWASEAHQVCVLDAARRIVSERSFAHAGDAVAAFAEWLNELAGDDPGGVAVAIEIPRGAVVETLVERGFHVYAINPKQLDRFRDRHSVAGAKDDRRDAFVLGDSLRTDRDCFRRVGLDDPVVIQLRELSRVDEDLKRENNQLANRLREQLHRFYVQALKLCPAADEPWLWSLLELAPSPAAAHGLRTKRVERLLREHRIRRVSAEEVIAALRATALQVAPGVTEAATEHIGLLLPRLRLVHSQRQRCGERLEALLDQLQATPDQGPKQREHRDVEILRSLPGVGRVVAATVLAEASWALAERDYHALRAHAGIAPITKQSGKHRVVLMRYACNVRLRNALYHWARVAAICDPASTTYYAALRGRGHSYARALRALGDRLLRVLIAMLKNDSLYDASKRGSRPKPSPSKEVA

SEQ ID NO: 127412 - protein, 417 aa, unidentified
MNNLTNEFAAYVGIDWADQKHDICLSPTPDSTPEYDQIDSTPEALNEWLRGLHRRFSEGKIAVCLEQSRGPLMYQLMRYDFLVLYPVNPKALARYREAFNISGAKDDKPDANLLRELVCVHRNNLTPWTPDDEVSRALAMLSESRRKAVNERTKITNRLTAALKEYFPQAFKLTSTNLYDKMSLDFLEKWPTLEDVKSARDTTIRAFYTSHRSRPAKRIEERLQLIRSAIPLTTDKAILMDSVISVRMFVQQLKSLNQAISEYDQALEDMFDQHPDKDIFESFPGAGDVLKPRLAGAFGTNRAKFATASDIQEYSGIAPVTRRSGNSTIVQRRRACPTFLLQTFHEYASHSRFKSVWAKAYYELQRSRGKGHHMAIRSLAFKWLRIIHRCWRDRVAYDEAKYLQSLVKNQSPLLQFI

SEQ ID NO: 127413 - protein, 338 aa, unidentified
MTFKRIAVDTSKAVFTIHGIDEADRAVLRRDLSRSRFQAFVASIEPTEIVLEASGGAHHWGRLLEAHGHRVRLIPPQYVKPFVKRGKNDRADAQAICEAAGRPGMSVVPVRSLERQAQAMTLRVRERLVGQRTQLINSLRGHATEFGIVVARGSSRVPELLERLRADEAIPSAAIRELERLGRCIGMLDDEISVLDRELTEATKTHEVARRLTAVPGIGPIGAMTLVLSLEPAQFESGRHMAAWLGLVPREHSSGGKQRLGRISKAGHPRIRQLLVLGATAAIRHARPGGPNASPWLMALLERKPRKLAAIALANKMARIVWAMMARGTAYRQASAMA

SEQ ID NO: 127414 - protein, 333 aa, unidentified
MVEGTLGSHHKEGSRKMSKYSMNCAGIDTGKRKLDVALDGRAERLQVDNNADGHKALSAWLRRHRAKRVGIEASGGYEQAVVAELRRDHFQVIVFQPVQVRAYAKFHLQRAKNDKIDAALIAACTAAAKKIYAPPDPRLAPFSEHLTMIEQITEDIARFKTRRESCRDPRIGQFWDEEVARLKRRLRIELEQLVAAIREHRDLAERLDLIASVDGVGERTAVAILVRMPEIGTLSREQAAALAGLAPYDDDSGDQVGVRHIDGGRERLRKSLYAAALAASFRWNAQLGAMYRRLLAAGKEHKLALVACARKLLIFVNTVVARGTPWTKKTAPV

SEQ ID NO: 127415 - protein, 340 aa, unidentified
MTITTVGIDLAKNVFAVHGVDQNGKTILVKPKVSRAALSELIASLPPCVIGMEACSGAHYWARLFRQYGHEPRLMAAKFVSPYRMTGKSGKNDAADAQAICEAVRRPHMRFVPVKDESQLAMQCLHRTRQGFIEEKTAAYNRLRGLISEFGVVAPQSTDALRHTVSEQKVTLPLQVQHCVDDLLEHITHIEDKITGYGRILSRMAKTDHRSQRLMELKGIGSTTACALVASIGNAHDFKNGRQLAAWLGLTPSQYSSGGKAKLGRITKAGDSYLRTLLVQGARSVLIGANKKMDSFSRWVCSLVERRGYWRAVVAIAAKNAKLCWASLHYGDDFKLYSAS

SEQ ID NO: 127416 - protein, 412 aa, unidentified
MDIVHERAAGLDISKRDAKVCLRLPGQRAGTYTSTVTTWGATTGQVLALRDFLEGEHVTTVVMEATSDYWKPFFYLLEETLPVMLVNAKAARNIPGRKTDVSDAAWLAQLGAHGLLRASFVPPEPIRELRDLTRARAIAIRDRTREIQRLEKFLEGSGIKLSSVVSDLTGVSSRAMLEALVSGERDPEVLAGLAKGTLRSRVPELVEALTGRFKAHHAFMARLHLDQIDAQSRIIDALTGRIEEAMEPFRAAREFLATIPGVSLKVADVIIAETGADMSRFETPGRLASWTGVCPGANESAGRIKSAHILPGNKYLKGALGIAALSASRSKNTYLAAKYWRIAARRGPMKATVALEHSILTAVWHMLANGECYADPGADHFTRLDPIKAKNNAIKKLNNLGFNVTITPATAA

SEQ ID NO: 127417 - protein, 445 aa, unidentified
MKEKGTPGRKRRKLPKHLEHINQYAAGIDIGSRSHFVAIPEGIDEQSVREFSTFTADLERLAGWLNECGITTVAMESTGIYWIPVFEILESRGFEVKLVNARHVKNVPGRKSDVLDCQWLQQLHTYGLLRGAFRPDEQVCTLRAYVRQRAMLVRNAASYIQRMQKALAQMNVQLHNVVTDITGLTGMRIIKAILGGEHNPKVLAAMRDKRCKNNEATIASSLKGNYRPEHLFSLRQALEFYEFHQKKIAECDDRILEQLRSFDVQDAGDGELPLNVGDALQRMSGVDLTSIDGIDTTTALKILAEIGTDMSRWKTAKHFASWLGLSPGTKVSGGKVLSSATKPVANKAAIAFRMAAYTLFKSKSALGAYLRRQRARLGAPKAITATAHKLARLVYAMLTNGSSYVDAGQEYYEQRYRSRVIQNLKHKAQQLGFELIAAQGTPATT

SEQ ID NO: 127418 - protein, 309 aa, unidentified
MSALFVEVGVDVAKADLQGATSTQNVVYANTPAGHRLLIAWLRSLGSVRVVLEATGGYERALVEALHAAAIPVSVVNPRQVRDFARAQGRLAKTDKIDARVLVDYAAALRPKPTPALTPQQKCLTERVRARSQLIASRGIVQNQLEHLVDPLARRCLVEMVRAFDTRIARLEKAIAELIAHDPALSAKRQKLVQVQGVGLTTAALLLAELPELGTLSKTEAAALAGLAPRNCDSGQFRGQRHIRGGRHAVRTGLWMPTLVAVQHNPILKALYLRLRANGKPAKVALTACARKLLIYLNSLLKNPQLSSC

SEQ ID NO: 127419 - protein, 585 aa, unidentified
MSTATALDRIGVGIDTARYGHRVWFLRPDRQPAAKPLTVLESHAGYQALQERLERLHQQHPQAHFHVRIDAAGQYASNLEHFLRSLDLPMTLSIGEPKRNKDYQKAHFPKRTSDDTESQAMARFAVVEQPAATPPPTPQMSLLREVAGRLQAQVKQTTRAINRLHNLLARVFPELATLTDDLAARWVLRLLDKYPSAERIAQARLGSLEKIPYLPQDKALPLHQAAQRSVASLRGEVAETLVRDLVAQVGHCQQTEQNMRKLLSAAFAELPPSGHIQVVTIPGIGAATAAALVAKIVDIERFTTPQHLVSYFGIFPEENTSGVDKHGNPVPPGTMRMSHKGNDLVRGYLWNAARVAIVHNPALRALYRRLRAKGKRGDVALGHCMRKLLHLVFAVWKTNLPFDDQHFPWELPSDTAVSTPPATAPVAAAATTASNDKAVGHKADITAEKVVTTADSSVKPAPVPVNPPSAEAPPAARPPVDFAFLRQQVTMEQVLRHLGLFEQLRGRGLQRRGCCPVHSRPGQGPKTFSVHLGKHLFQCFEASCAVCGNVLDLWAAVRRLPLYEAALDLAATFHLPRNREEEPVR

SEQ ID NO: 127420 - protein, 339 aa, unidentified
MAILFVGIDLAKSVFAVHGVDELGKPALVRPSVPRAKLHELIATLPACTVAMEACSGAHHWARLFAAHGHTVRLIAAKFVSPYRLTGKRGKNDAADAAAICEAVQRPSMRFVPVKSEDEQARLCVHRVRQGLVEQRTSIINRIRGLLAEFGVVLPQTASVIRREAAARLEDLPGWANIAVGDSLSELHRLDERLAEYDRHVSRMAAEDSRSKRLMALPGIGCTTASALVSTIGSGRDFKNGRQLAAWLGLVPGQHSSGGKPRLGSITKAGDSYLRTLLVMGAKAVLQAAKGKTDRMSRWAIALEARRGYWKAVIAIAAKNARMTWAVLAKGELFKPLDA

SEQ ID NO: 127421 - protein, 576 aa, unidentified
MNPNDVAPSLTPIGVGFDTARYGHHVTFLREDLQPATTPCEVTESREGYQLLEQKFQELAQRIPNVLFRIRIDAAGQYASNLETFLRQLPFPKTISVGEPVRNQNYRQAIFPKCKSDPAESHCAGRFALREDPKPALEVPAELIPLREIASRLEAQTRQSTRLANQLHNLMARVFPELATIASDFQAQWLLRLLDQYPTPCQLARARASSLTAIPYLTADKAHKLQTAACTSVGSFRGTVAEELVHMLVGQLRRSGQEQDHLRHLLVKVRQALPQSNQIDTIPGIGAGTAAVLTAKMISIDRFETPDQLVGYFGIFPEKDASGLDKDGKPKPGCHTHMSKKGNDLARKYLWNAAKVACQHNPAVRALYRRLRARGRRGDVALGHCMRKLLHLVWAVWKSGKAFDPNHYPWEPASAPLGNTEAAGHNQGTSPERKVVTAADSTVSSEAPALNAPNPTAPENALAAADNAWVDFALLREQVTIEQVLAHLGWLSCLRGSGPQRRGPCPVHGTSADRVRSFSVHLQKNAFQCFHPPCASHGNVIDLWAAVHRLPLLEAAHHLTATFNLRTTRQTEKRNP

SEQ ID NO: 127422 - protein, 445 aa, unidentified
MFIQSQDDSQCCYSLFIKVVILMMKLKYSICCGLDVHKNVIVATIVTTNKDGISEYKQKSFSTINSDIQKFHNWLIENNCYHVCMESTGKYWIPIFNYLENDIDVCLTHPKYVKAIKGKKTDKKDSKWIADLYKFDLVRCSFIPPKDFRQLRELSRYRFKLVCMKSSEKNRIQNCMTVSNVGIASVLSDPFGKTATEIISYLLEHTADSMDEKAVRKLIKKGAKSKSDEIIEAIKGYTIETDQAKKLELARGHLEYLDDMITQTEVELYVRIKPYYEFVEFVSTMPGMTELSSTIVLAETGVDMDIFDDAKHLCSWCGLSPANNESAGKKKSVRIAKAGDYLKPMMVQCALAAIKSKKQPYFAIKYGRIKKRRGHKKAIIAIARMMMVCIYHMVSEKKPFTPTDYEELMNPQNHVERVVLNENNVFAYLESLGYDSSKLVKRNDN

SEQ ID NO: 127423 - protein, 333 aa, unidentified
MLPPNCGTATPYILRNTVGLDISKLTFDASAIVGNAEYSAKFDNDSKGLDQFSDRLKSLGCQNLHICMEATGSYYEEVADYFAQYYSVYVVNPLKISKYAESRFKRTKTDKQDAKLIAQYCRSAKESELVKRQKPTDEQYRLLRMTAAYAQIKSECAAMKNRHHAAKDEEAAKAYAQIIKAMNEQLEVLKEKIKEQTEKPNCKEGVKRLETIPAIGRMTAAVLFHHLTSSKFETSNKFAAFAGLSPQQKESGTSVRGKGKLTKFGNRKLRAVLFMPAMVAYRIRAFPDFIKRLEEKKKPKKVIIAALMRKLAVIAYHVHKKGGDYDPSRYKSA

SEQ ID NO: 127424 - protein, 361 aa, unidentified
MSTIPQTPPIIEITGGVDTHRDTHTAAAIDTSGRLLGAKQFKATTTGYRKLLTWLTSFGSLALVGVEGTGVYGAGLTRHLQAEAIKVVEIDRPDRKMRRWQGKSDPVDAEAAARAAQAGHRTGTPKQRTGAVEALRALRVARRSAVRQRTDTLRQMKALIISAPEPLRASLRTSSNPDLVTTCAAFRPDPARLVEPATATRAALRALARRVRNLDTEITDLDTDLAPLVASINPDLLALNGVGTEVAGQLLVTAGQNTNRIRNEAAFAMLCGIAPLPASSGQTHRHRLNRGGDRQANAAIHRIAITRLRWDPRTRAYMEKRTKEGLSKKDIIRCLKRYIAREIFTVLSKTTTPTENLQSTT

SEQ ID NO: 127425 - protein, 338 aa, unidentified
MVIIGIDPHKGSHTAVAIDESETQLAEVRVRADRRQLEGLLKWAIEFPERYWAIESAEGLGGLLSQQLLEVGEEVFDVPPTLSARVRVLATNKSQKNDPNDAYSVAVAALRSPRLRTAGAEEHVAVLRLLWNRHKNLTSAHTQAMGRLHALLVGILPGGARRRLSATKAAAMLAGVRTPTALERARKAQAQLLIADVRRLGAELKASKMRIAEFVDSVPTTLGELSGVGPIATAIILAHTKDVGRFPTADHYASYNGSAPIDASSGPRKRHRLNPRGNRQLNHALHIISMSQLSHPGPGRDYYERKLAEGKTHKEALRSLKRQISDVVYRQLRIDAGR

SEQ ID NO: 127426 - protein, 341 aa, unidentified
MYYIGLDIHKKTISYCVKDQSGQICVEGIIPATRGDLDRWMSGLPQPWTAAMEATMFTGWIYDHLVPHAPVKVAHPLMLRAIAAAKKKNDRIDAGKLADCLRCDFLPECYLASSEIRERRRTLRYRNLLVRQTVQCKNKIAQMLMEAGVSYNKEKLHQRGYFHQLLASNQEIDESLRPLLRLSRDNIVRLRRTEAALLRSLKRDPLLADRVKRLTSIPAVGPITVLTWVLELGDVKRFPSIKQVISYCGLCGAEISSAGTAKRTPISKQRNRHLQTVLVEAAHLAPRLNPNMALLYEKEAQKGNGNRATLAVARKLVAYLLAVDRGERTFVMNQDHSSAAA

SEQ ID NO: 127427 - protein, 371 aa, unidentified
MNSIVYVGMDVHKESYTLCCYCYDTDKVEYKQTIPSDYKLILKYIESMRKVYGEDTTFICGYEAGCLGYSLYHQLIDHAVDCKILAPTTMAITNTNRVKTDKRDAANIARCLAFHTYSEVYVPDDEDNSVKEYIRMRDDQKLMLKKIKQQILAFVLRQGKKFEGGKTYWTIAHMKWLKSLELKGLDKETLSEYLVTYEYLTEKIERLDNRIEELASGDKYKEKVQNMGCFLGIKTHTALSMVVEIGDFNRFEKAPKFAGFLGLVPSENSSGDDRNRYSITKAGNSHLRRLMVEAAQSYTRGNIGHKSIALKQRQQGCSAEVIAYADKANERLRRRFYKMTLNKGINRNVATTAIARELACFMWGMVTGNIS

SEQ ID NO: 127428 - protein, 310 aa, unidentified
MDANSIFVGIDISKLTLDVDIYPTSEPRRFLNDESSREELCEWLKTRTPTLIVMEATGGLEIPVAGLLAAAGLPVAVINPRQARDFAKAIGVLAKTDAVDAVVLARFAQAVRPAVRALKSEEAQELEAVLTRRRQIVEMITAERNRQTKAQARIAKQIKGHIAWMEKRLEEANDDLDRLIRKSPIWQHKAELLKSVPGVGCVVATTLVAELPELGNLNRREIGALVGVCPFSHDSGGRRGKRLIWGGRSSVRAALYMATLCATRFNPIIKAFYRRLVDAGKHKKVAIVACMRKLLVTMNVMIRTDTSWRF

SEQ ID NO: 127429 - protein, 461 aa, unidentified
MTIALGSLGVGAVVLDIEGTTTPISFVYDVLFPYARTNLREFLATHGPTGLLAEVDRNLREEHAADVARGDSPPPLPADVSSGNASDLEPYAVWLMDRDRKSPGLKLLQGLIWQRGFSDGTLRGEVFPDVAPALQRWRDEATKAGRTLKRVVVAYEAGRDGFWLARWLRERGVEAYVIHPTSVAVSREHRRAKTDRLDTALLKRVFLGWLRGEPKHCSMAAIPTLAEEDAKRPNREHESLVGERTRLVNRIKSGLVRLGIRTFKPMLRRAPEHLDALRTPEGAPVPVNTLAELRRDLARLHLIRAQIKVIEAARLERLQQGPEQGPHAMVRLLARVIGIGVETADMLVQEVLSRNLRDRRAVARYAGLTGAPDESGAKRREKGLAKAGNARVRRGMIQLAWRFLMFQSESALAQWFRSRTAQAPKTRKTMIVALARKLLIALWRLVRTGAVPEGLALRPAI

SEQ ID NO: 127430 - protein, 316 aa, unidentified
MVPSPLFVGIDVATATLDIAVRPTAETGRAPNDAPGIDALVMRLGAWAPTLIVLEATGGSQGPLVAALVAAALPVVVVNPRHLRACAQAVGILAKTDRSAARVMAHCAEAVTPAPRPLPDAETQELRALRGRRRQRVAMVSAERARLDTAPPSVQDAIQAHIAWLTTPITGLDDPLTHASQTHPAWQAKDDVWQSLPGVGPVLARTRLGQVPAWGPLGAQPLAALSGVAPCNRDSGTRRGRRTVYGGRAEVRAVLSMGALVATRHNPVIKAFYERLLAAGKAKKVALTACMHKLLTIMNAMVRDLKRWQPREVPIA

SEQ ID NO: 127431 - protein, 427 aa, unidentified
MLKHNPEPNPAEEFAAFLAIDWADEEHAFRLQVVGQNKIETGTLEQKPEVLGPWLAKLRERFGGRPIAVGLEQSRGALIHGLMAYDFLVLYPIHPTTVAKYREAFKSSGAKSDPLDAGQILEILTQHQDRLHRFNPDTVETRLLGRLVEDRRKAVDLRTTQVQALGANLKEYYPQALELTNRNLSSRLAGDLLLKWPTFADFQQAKPGTLKSFYYGHNVRSPQVLERGLALAEKSQALTTDPAIVESGSRLSQMYVRLIQALNPVIEQYDQRIQRVFDAHPEVKLFSGLPGAGPALAPRLLAFFGTDRSRYAAALNVQSFTGVAPVTKSSGKSRVVYARAACPKFDRQTFHEFSRLSVTHCQWARNYVQYYTDKGKKYHTIIRALAYKWIRILHKCWKERTPYNEDLYMEILKKRGSIFATLHLQTK

SEQ ID NO: 127432 - protein, 412 aa, unidentified
MDWADQKHVVALQETNREQRQRFSLDQTPEALQNWIQQLRDRFAGRPVAIAVEQKRGALIYALMHVDFLYLYPVNPQTLSQFRKAFYPSGAKDDPIDAELLLEILTTHRQHLCVWVPDDVLTRSIQLLTEDRRGLVDERTALTNQLTAALKMYFPQALEWFGDLHAPRACAFLQRWPSLQSLKAATPSSIRKFYKAQGYRGEDKLEQLIANIQKAQPLTQDGAVVLSGSMKVQALVRPISLLTESIQRYDQEIASLFDKHDDSTLFSSFPGAGASLAPRLLAAFGSDRGRFEFAAEMQQLAGIAPVTEKSGTGIWIHWRLACSKFLRQTFQEFAGCSILQSDWARACYDQLRKRGKSHHAALRALAFKWIRIIFRCWKTRTPYDETVYCNSLKLRRSPLAAELPVDEKFALT

SEQ ID NO: 127433 - protein, 345 aa, unidentified
MEEKMKHFVGLDVSMKETAVCVVDDSGQRVWEGSVPSSADAIAAIMREKAPGLVRAGMETGPQAVWLWHALREKEIVVDCIHARRAAAALKLQANKTDRNDAFGLARLVHSGWYEPVAIKSFDRYRMRAVLTARERIVRMCTMMINQIRGLAKTFGLQLSAGKGQIFEQSVRRALPDDAVLRDLFENLLSVLSGLKDQRRAFDRQLARFAQEDEACRIVSSAPGVGSLTAIAFVTAVDDPTRFRSACDVGAYLGLTPKRYQSGEVDIGGRISKAGDRLTRKLLFEAATVILYRASPSIALKQWGLRLSARSGSWKARVAVARKLAVTLLTMWKTNTMFENRSFAS

SEQ ID NO: 127434 - protein, 363 aa, unidentified
MVGSQRDPRRDWKPVAVLVFKPRMSLVLQSLLPDPDSCQGTSPYQQGWDTKMVHLSHGGIDVASDRLDVMLLPEGQCFWVANNAAGWAELVSRLRGLSIAAIGIEASGGYERGVIRALLAQGISVRQINPFKLRQFAKASGILAKNDRLDARMIALFVATIPTRPAQRNEAAERVAEVVTARRQLSDEKVAAENASRVFEDVGLRRLYRRRITRIALDMALLDKRLAEMVAADTTLANRYRLLTSMPGVGPILAFTLIALLPELGQMSRKQVAAIVGVAPYDFDSGKMKGMRSIWGGRAPVRRVLYMAALTACRFNPALKTFHERLAAAGKKSKVAIVAVMRKIITTLNAMIRDNVAWNARSV

SEQ ID NO: 127435 - protein, 427 aa, unidentified
MTDLTKHKTYGSWIAIDIAKDSNVVMVETVDGNVRRFRMANSGHDHERLVALARSLPQPCRIGFEATGNYHRTLGYRLVTEGLDVCLISSLASARYREIMFNSWDKNDPKDTFTLLQLLKQGITQVYVDPVASGFHDMQELSKTYWHITMSRTRLQHSILTHYLPLYFPEMGKWWSSTRCEWWIRYLLHFPTPAAVTQYDLTTFVQIASPIVGRKVNKAAKLAELYELAHQSIGLPSAEDSLACQTFRLQLQRLLDLNQLRQKLERQAQTLLGKHRDYGILLSIPGIGPIIALTILAEAGDLRRFQHHRQFLKYCGLDLAKSQSGSSRGQDKLSKRGNARLRQALYMAATVAIRQRENAFRNKFHRYTQSAPQDSDLKRKAMTAVMAKLARVIHALIKSGTLYESYHEALPSGSIPLSRAVGATRTP

SEQ ID NO: 127436 - protein, 387 aa, unidentified
MARKRTLSTLDTSIAYEAVGLDLAKEDTAIAAFGPDHEGPYLIDRMPYDKLYELLADMAPTLVAMEPCSGAHQIAEQIQELGHEVMMISGRHVQAWVKDHCNGQKTDLNDAFAILNLAYDRWLTPIRGKTREECRLLALQASYRQLKGQRTKTMVHVKATLHAWGFPIRAGSFNQKALHELIDANREAFGDEVAETLHLMINRVRDLDHDIATVLKLLTEATKRDPRASLLRSIPGFGVLTTSRWCAVIGNIARFDFPKQTMAFIGLVPNNRITGHHTETSSGREARGQGRMSKRGDKMLRSLCIMGAGSLCLMVRNDRLPDCPFVASIKERLASPRPWFKVLVYVAAKLVRIATALLKYGETFSFEKAGISKAVLKQWELEQAKAA

SEQ ID NO: 127437 - protein, 364 aa, unidentified
MNTTTVGVDLAKYLFSICMMDSFGRVQLRREFRRDAFAAWLAQLPAGTIVAMEACSGAHHWARRCLELGLQPRLMAAQFVAPFRKSQHSKNDRNDAEAIATAARQGNMRFVAIKTVDQQARLSWHRVREGYKDENLEVMNRLRGLLAELGIVIAKSAIALRRALPAILERADLPGAFVAAIQDLRGHWQQVQERIRACDQRVESHAQADERCRRIRALTGIGALTSDAVVACVGNGCDFKNGRQMAAWLGLVPMQHSTGGHDRLGHISRAGDAYLRTLLIQGARSSVLQASRVPADKASPEQIWINQLATRMPFGKLLVAIANKHARQIWAMLARGDAYDPHVWLRHPMTQRNASRKNALAVAA

SEQ ID NO: 127438 - protein, 355 aa, unidentified
MERTIGMDVHAASCTLAVISEKGRKLKDFPVETNGQARVEAIRMIPGHKHRVFEEGIQSAWLYETLNPHVDELVVAGITTSRGLKSDKIDAYSLAEGLRVGSLDKHVFKSPRQFTRLRELSRIHMTLVGDVVRVQARIKGLYRARGILVSGVDVYNIRHRNQWVGQLSSHTQPRATRLYAHYDFLSDQKKQAEADLLREAKKHPIAGILETAPGFGPIRAARLIPIVITPHRFRTRRQFWSYCGLGLVTRSSADWLQSPDGQWIRTRVAQTRGLSRQHNHALKSIFKGAATTVITQRNKDPIFGRYERLIDGGTKPNLAKLSLARMIAATVLRMWKEEERYEPGRARSSTQTRKG

SEQ ID NO: 127439 - protein, 338 aa, unidentified
MSILCVGIDLAKNVFAVHGVDESGTARLRQPKVARAKLHALIASLPPCVIGMEACSGAHHWARLFQAHGHTVRLMAPKFVAPYRMSGKQGKNDAADAAAICEAVQRPNMRFVPIKSVDQQSRLLVHRARQGFVEARTATINRIRGLLSEFGIVLPLKAGVVRTEARNHLEDLPGYANTVIGDLLSEVSHLDDRIKQYDAHIRTMARDCALAQRLMQLTGVGETTSTALVAMIGNASEFDNGRQLAAWLGLVPGQYSSGGKTRLGRITKAGDPYVRSLLVLGARAVLNAATTKTDSLSRWALDLRERRGYWKAVVAIAAKNARMAWAVLTKGESFVLPT

SEQ ID NO: 127440 - protein, 355 aa, unidentified
MSQEKYIGMDVHQATISVAVMDARGKLIMECLLETKAATILEFIQGLRGTLALTFEEGTSAAWLHDLLKPHVSRLVVCDPRKNALLKDGNKSDRVDARKLAELLRTHQVKPVYHGKHGTRALKELGRSYLTITKDVTRVMNRIKAVYRSWAIPCAGTSVYTPRHRAEWLAKLVEPGVRIRAEHLYQQLDSLQPVHLEARHELLLESRKHAAVKLLRQIPSIGPIRAALLVALLQTPHRFRTKRQLWAYSGFAVEIHDSGEYRWVRGKLQRNRERITVRGLNDNHNKDVKSLFKSAALSASTRPGPLHDFYVTRVESGMRPTMARLTLARKIAAITLTMWKKGVSFDPKQLQRQAA

SEQ ID NO: 127441 - protein, 411 aa, unidentified
MELLVARCAGLDVAKDEVVACVRVPDGRGGRSQEVRTFQTFTSGLEALAGWLAAEGVIQVVMEATGQYWKPIWYVLEEGGFELLLVNARHVKILPGRKTDVCDAAWLAELLEHGLLRGSFVPPAPIRELRDLTRYRKRLIQAHASEGQRVQKTLEDAGIKLDSVAADVLGVSGRAMLAALINGERDPQVLAELARGRLRAKLPQLRQALRGRFRGHHALLIRLALGHLEQLEGAIATLDHRVDEVIAPFAPARDRLDTITGVGKRAAETIIAEIGTDMTVFPTAGHLASWAGRCPGNNRTGGKRRSGKPTKGNRWLGEVLIECAWAAARSRDTYLSAQYWRLARRIGKKKAAVAVGHSILVIAWHLLTNDCDYADLGGDYFVRRDTDRQRQRAVAQLQALGYRVVLEPVAA

SEQ ID NO: 127442 - protein, 317 aa, unidentified
MENKELFVGIDISSETLDVACGPTDQPQRFPYTEEGLQTLITHLQGCQPTLVVFEATGGLEAALMQALEEAHLPFSRVNPRQVRDFARATNCLAKTDTLDARLLAQFGQALRPQPTPLPDEQTRHLRALITRRRQLVTVRVMEENHWRTAAPALRPAIRRHLDWLAEELASLDQEIADFIQQTPLAETVTLLQSVPGVGAVTAAVLVAEVPELGRLNRKEIAALVGVAPFNRDSGRQQRQRHIRGGRPAVRTMLYMATVAGIRCNPVLRALYQRLINAGKAKKVALVACMRKLLTILNAMVRHRQMWRPACAACAAA

SEQ ID NO: 127443 - protein, 474 aa, unidentified
MGNQSHFVCVPADSVPPGQSPVREFGVFNPDLDQMVDRLKQCRVETVAMESTGVMWIPVFQKLEAAGLEVLLVNTKGLKHVPGRKSDMLDCQWIQLTHSYGLLAGSFRPADIICRVRTLMRQRENLVHGASRETQHMQKAMQEMGVHLHVVVADVTGDTGLRIIDAIVQGERDPEELVKLRDPRIRKSTVAQMKAALQGDWRDELLFVLGQSRRVYAFFQEQLASLDVKIIALLAEVPEAPPPPTEGSQAPSPGSSGAPQQSAGGESPVSGSTEGAAVSAQGKSQSRGRKNPKFKPNGAGNPLPEDVSPQLAKIYGTDLTLIPGLGILGVLIILSEIGADLKGRWRSGDVFAAWMGLCPGSKISGGKVLSSRTPHVVNRAAALLRLAAVAIGGTETCLGLFYRRIKARHGAPKATTATARKLAVLIYHLVTTGQEYQARDLKQYDERLRKNRIIRLSRQAKELGFDLVPVEKAA

SEQ ID NO: 127444 - protein, 390 aa, unidentified
MIYVGIDVAKDKHDCCILGPDTEELFQVFTIRNNSDGYGELFHKIESVSKDKSQIKIGLEATGHYSYNILGSLLDHGYHTFVINPLHTNLYRKGQSLRKTKTDKVDARSIAEMLVTDKTLKPYTGTSYHSEELKSLTRYRFELVKERAKLKTSVSRLVNILFPELESLVPTLHMNSVYRLLQELPGAYFIASSNLTHLKALLADASKGHYGREKTIEIRETAKSSIGSLMPAKSMELRQTIRRIDTLTSDIKEVEQSIQKIMDECGSPITTIPGIKYRMGAMILAEIGDFTRFSNADQVLAYAGLSPSTYQSGQLISSYARMEKRGSKYLRYALFNAAIYASVWDERFRLYLSKKRAEGKHYYVAISHVVKKLVRTIFRMEITHTSYQPL

SEQ ID NO: 127445 - protein, 368 aa, unidentified
MGKSVLYVGLDVHKMSVDVAIAEAGAEVRFYGRIGGDLEALDKVTRKLQAKGAELRFAYEAGPCGYQVYRHLTAKGFECLVAAPALIPRRPGDRLKNDRRDALALARLLRAGELTPVKVPDEDDEAMRDLTRAREDSICVERRARQRTVAFLLRHGRVYQGKTTWGRGHWAWLLQQVMDHPAQQIVLQEYLDAVREASARVLRLTGQIRDLVPQWRQAPFVAAYQALRGVSLIVAATVVAEVGDLDRFNNPKELMAYLGLVPSEHSSGASVRRGRITKTGNSHARRVLVEAAWAYRLQARVTRHLLKRQEGLPECVRQLAWKAQLRLCARYRRLLARGKARQTIVIALARELAAFLWAIGRTVAPATA

SEQ ID NO: 127446 - protein, 340 aa, unidentified
MQLYTGIDLHSSNSYLAIIDETGKRVFKRKSPNDPEQILSALAPYKDTIIGIVIESTYNWYWLVDRLMAEGYKVHLANPTEIKQYKGLKYSDDQHDAFWLAEMLRLGILPEGYIYPKEDRPIRDLLRKRSHLVKLRTSLIISLQNIICRNNGFRLKTNDVKALNTDRVAPFLEQNEDLALAGKISKESIDFLTRQIKAVENVIEERMELREPYKKLLTLQGVGKTLGLTIMLETGPISRFAQVGNYCSYCRKVSTKWISNDKKKGKGNKKSGNKYLAWAFSEAAEIARRYYPEARAFYQRKMQKTNAMIAHQALSHKLARAAYYIMRDGVSFMPEKIFGS

SEQ ID NO: 127447 - protein, 387 aa, unidentified
MTLTCKSAPTTAALDYDSTMIAALELSSKKWVFAVQLPGSKKHTKHVVEPTGPALSALIEGLKTRSATAGKPITRVIVTHEAGRDGFWLARYLQRRGMEVRVMQASSLPVDRRARRAKTDLIDVEMLLRTLLAWLRGEPRVCSMVPIPSEADEEARRAHREREDLLGSRRSILNKIDGILATLGIEGFRGLRRDRREQLTNLRQPDGEEIPAAAQGRIERLLDRLELVMAQIKKIEAARDAVVKKPSTQDAAERMICDLVRLCGIGVEGATLLVREAFCRDFDNRRALGAYAGLTGTPFASGGMEREQGISKDGNRRLRALIVELAWFWTRFQPDSALTKWFRARVGGAKGRVAKIMIVALARKLLIALWHFAKDGVIPEGAKMKAA

SEQ ID NO: 127448 - protein, 365 aa, unidentified
MNAIHYIGFDVHKKTISFCVKTADGQIVEEGSLQAERTVLRRWAAGRKQVWHGAMEATLFSAWIYDTLKPYAQQLSMGHPAKMKAITAGKNKSDQIDARTIADLLRCNLLPASYVLPPQLRDLRRLLRYRNLVVQQSVRMQNKVAGLLMESGTAFNKQKLHQKKYFADLMKSLEEVPESVKDLLRMSRGSMEMFQSTQKQLVKRLLSEPALEQRVERLMSIRAVGPITALTWALEIADPQRFASIADAVSYCGLSAAFRSSAGKQQRGPISKQRNAWLQPVLIEAAKLAPLWNPQLAAVHARALERGHANRATLQVARKLVAYLLAVDKSGQPFQVHTPPPPAGTTAKKKPARKGKKAVALAPAA

SEQ ID NO: 127449 - protein, 437 aa, unidentified
MISAAVERCAGIDVGKMFLAVCVMIGPLDGEPRVVKRRFGTTISELESLRDWLKQEGITHVVMESTGSYWKPVFNVLEESVKVYLANPQEVKNRKGHKTDDKDGWWLAHLLRHAMIHPSFIPPRPIRELRDLTRRRKRLLGDATAEKNRVQKVLEDANVKLGNVLSDVFGVSGQLMLDALLEGKARPEEIAQFAKRSAKKKIPGIIQALEGHRMSDHHRKMIRYSLKHLEFLEEQIGEMDRDIASQIGEVGLDRQWQLLQTVPGIQDRSAAAILAETGAEMEQFPSRKHLSSWAGVCPGNNRSAGKNKSSHTTGGNPWLRCALTECAWAAAAKKNCFIKEKFWRITSKSGGKKAPAVVAVAHTLLELVYEVLCTQQPFQDRQAPPLDDRQRQRMIRHHIRRLGKLGISVPRYAVSVPLEEKTSQRCRPGRPKGSLPK

SEQ ID NO: 127450 - protein, 404 aa, unidentified
MWYVGLDWADTHHDVAVLDEAGKRVGARRFAHSHAGLNELKQFVLSIAAQPEHLACIVETNHGLLISFLLEAGIPVYPVNPKTANQLRKAAGAKTDQIDAQLLAKIGRLELAELRRLEPDSALVQELKTLTRDQDALIQTQTRLVNQLTACLKEYYPAALHLFAKVQQRSTLVFLQTYPTPQAAQAASLDEISATLHTGKHTNPTQVAPKIFEELHRPHLVANAVIVRAKSRLMLALVKQLLVVIQEMSSYDKQISTLFLTHNDQAIWSSLPGAGKRLAPRRLPEWGEDRSRYADASSVQSLAGTAPVPFQSGNYAKAHKRFACLKPLRNALHQFAWQSTRQEAWALAYYRRKRAEGKTHSMALRALATIWVRIIYRMWVNKTSYQTAIFEAARLTHAPRQHVA

SEQ ID NO: 127451 - protein, 362 aa, unidentified
MRIIGCDLHARQQTLAMLDTTTGEVVKMTLKHEGDNVREFYSKLPLPVRVGIEATGSMQWFLNLMEELGIECQVGHPAQIRASEPRKQKHDRRDAELILKMLVEGRFPAIWLPSKELLDLRALLRHRHQWVRMWTRVQNALQSIALANGLRRGTALWSHDGQSRIASLPLAPHAAYRRSELQAMYEKFEAEIEKLNQRVEEQACKRPGARLLMTHPGVGPITALATEVFLGDPARFADSKALASYVGMIPREYSSGEWQRLGGLSKQGNPLLRFLWGEAGAHAVRRDPELQRFYRRKLVQKGLGKASVAVARKLGIRLWIMLRDQIEYNEFCRRGQKQQKSSGACAGMPETRYGAKSHRPID

SEQ ID NO: 127452 - protein, 366 aa, unidentified
MDEITYVGLDAHAQTTAIAVAEGGGAAPRFIGTAGARFAELTKVLGKLGKPGQLRVFYEAGPCGFAMVRQLRQAGYHCEVVAPSKIPRKPGDRVKTDRRDALSLAGLARAAQLTFVTVPDERDEAMRDLSRARIDAVRARLKARQQLKALLLRHDRRYTGKTSWTSAHERYLAKMSFAHRAQEIAFVEYRRGIGEAQARVELLTQALSQELVGWRLRPLVQALMTLRGVDELSATSLVAELGEMKRFAHPRELMGYLGLVPSEYSSGQKRALGAITKTGNAHARRLLIEAAWNYRFPARISLPLQKRQEGQPAAIRDIAWRAQLRLTQRYRRLTARGLQHNKVCVAIARELAGFVWSIGQQITVSS

SEQ ID NO: 127453 - protein, 385 aa, unidentified
MRQVTEGQSTRDGPAAFVAMELSKSAWLLAAQGSPSGKTSSHRLEAGDVAGLLALLRRLQAREQQACGGGEVRIVLGYEAGYDGFWLQRRLAAEGIGCWVMDPGSLQVNRKARRAKTDRLDAAMLLRALIAWWRGDRAACHMVRVPSAEREDARRTHRERQRLIVERVQHVNRIKGLLATQGIYDFQPLRRDRWARLVELRSGDGHELPSRLRREVEREFKRLELVLEQIEAVEAERDATVTEPAAGDVDAAKVSLLAGLGGIGVELATVLVREALYRPFANRKEVAAYAGLTPSPYASGDRHREQGISKAGNPLLRKSMIELAWLWLRYQPDSALARWFAQRVGTAQGRMRKITAVALARKLLVALWKYVTTGLLPEGARTKVA

SEQ ID NO: 127454 - protein, 312 aa, unidentified
MTNQVSRRTLGIDVAKHELVIYCWELGDYQRLNNDSASIAGWLDSLHGPQRLAVEPTSEYHLELLEQAMARGHRVYLVNPRQLVHYRDSVNLRHKSDPDDAWLLARFLDREAADLRPVSLPDRKARSLWALLKRRALVVETRKQLRQSLDGLKLPHQALMSQFRCLLARIDRRIRELIQALGWQSHYASCLSVPGIGPVNAAALTCAFHRGHFDRSDTFIAYLGLDIRRRESGRYKGKSKLTKRGEPELRRLLYCAAQPARSHDRFDRYYLAQIDKGLPKTAAKVSLARKLARVAFALMTRNTTFQDNYQHR

SEQ ID NO: 127455 - protein, 359 aa, unidentified
MKTIVSNKQNWFNKINLTKDDEVYVGIDVHKISYAVAVWLNDAPAIDFVMPADNQKVLTMLDKLRIALKQVVYEAGPTGYSLARLLRDAKLPISVIAPSKTPRQSARESKTDKLDCRKLAQYAAKGLLRPIAIPTKQQEADRQLFRLREQLVEKQRRLKLQIKSFLLQHGISDPAGLKSWSVLAVEKLRTIVLPDKLRYCLDIFIDELTFLKTQIKKTEQRLKETFSSPQHAKKVELLLTHPGVGPVVAGQFYTEIFNPKRFKNSTEIGKYVGLSPMVTQSGQSRKNGPALKTGRPQLRSNLIEASWVWIRNDPHAYKTYLRLLHNTGEKNKAIVAMARRLAIHLWKMLSDNKPFVQAA

SEQ ID NO: 127456 - protein, 370 aa, unidentified
MNDSIFVGLDVHKATISVAVSEAMRGGEVRNLGIIPNRADHIDKLAKKLGKGDRQVSFCYEAGPCGYGLHRQLTGLGHNCIVVAPSLIPMKAGDRVKTDRRDAAMLARLHRSGELTAVWVPDAAHEAMRDLVRARATAMRVLGKARQHLQGFLLRHGRIYAGKKGWTLAYRRWLTTVRFDHPASQIVLQDYIHAVTDAEARVDCLTTRIEELAPQWSMTPFVEAVQAMRGVAFIVAVTVVAEVGDFSRFDNPRQLMAFLGLVPSEHSSGATIRRGGITKAGNALARRALIEGAWTYRMQARVSRKLHDRNERLPQAIRDIAWKAQVRLCARYRRLSAAGKPKVIVTTAIAREMVGFLWAITRQVRLRPAA

SEQ ID NO: 127457 - protein, 342 aa, unidentified
MFYAALDVSLRSVAICIIDDAGKVRLERATSSELPDLIRCLQDFGQPIHQVGLEAGNLSHHISAGLTEVGYDVVCMEARQVSAALSAMRNKTDKHDARGIAQILRSGWYSRVHVKSQASLYTRALLTSRKVMQRKCIDLENEIRGVLKVFGVKLPMRLSRGAFDRAVRDIITSDPGLSHALLPMLEARQMLFDTFVQLDRRVRQAAHEDGICRRFMGVPGVGEITALSFKAAVDDPARFRSSRTVGAHFGLTPRRFQSGEKDNPGRISHAGDADVRATLYAAANAMLMRSIAWSSLKAWGVRLMKTKGRRRAIVAVARKIAVVLHRMWVDGSDFRRGSEAAA

SEQ ID NO: 127458 - protein, 386 aa, unidentified
MYFVGIDISKYKHDCFICTETGEVIEENLSFKNTNEGFFQLLNLLKSLDNNHEVRIGFEATGHYGMNLKLFLEKNNYSFMEFNPNLVKQFINSQTLRKTKTDKKDATWITKYLISVDYKPHPKQFYHKYSLKSLSRKRDKLVFQRSYYLMQITNILDLIFPEFKPIFDNQFSVTSLYILSKYKTVNKIKNMKDYESLRKVSHGRFSYSKFLKIKDAANNTIGCSDDFLEFDLENMIDLYNNINNKIKFYDDKIIKIIKELNPPTLSISGIGPISCAGIISEYGDISRFKSADACVAFAGIEPSISQSGTQSHTGKMVKHGSGHLRYHLLNAAEMIFMHEPIFTEFYYKKRSEGKTHRVALSHVAKKLVRIIYKLESENIKFNSDIK

SEQ ID NO: 127459 - protein, 466 aa, unidentified
MAHKRKNVKSKERKRMPRSLKTIQPNAAGIDLGSREHWVAGPPLEDATPNVERFGTTTPELLRLADWLKEQGVETVAMESTGVYWIPLFEILDSREFEVVLANARQISNVPGRKTDMIDCQWVQLLHACGLLRGSFRPSDDICQLRALIRERNTMVEHRADWVRRMQKCLDQMNVCVHQAVSDITGVTGMAIIRAIMDGERDPHALARLRDRRCRKSEEQIAEQLTGNWRAEHLFNLRQALKMYDQLCAVIADYDSEILSYITTLQPAGTSDESAPPPASKSKAKNLIARGQEPMRQGLYRLCGVDLTTIDGIGVDTATVVVSELGMDFTVFPNEGHFVSYLRLAPNLSISAGKKVPKKFKASTCTRVATALRMAALTLRNSKTALGGFYRRVAWRKGASVAVFATARKLAQLIYRLVRYGQAYVDTGVEAYEARFNQRRLKSYTKALNAMGYNVEPLKTKEAILA

SEQ ID NO: 127460 - protein, 405 aa, unidentified
MMYNAVGIDVSKGKSTVAVLQPGGTVVRRPFDVKHSASGLKDLVGYISSLDGDTRAVLECTGRYHEPVVRALSDAGIFVSTVNPHLIRNFGNNTIRKVKSDPADSRKIARYTLDNWASLRQYSGMDTTREQLKTLNAQMDFFTKQKIAAQTNLISLLDMTYPGVNDLFDCPTRSDGSQKWVDYAASFWHVDCVTKIGLSAFTERYQAFCKRHGYNFQPAKPKELYDAAKELVAVFPKEKEYKDLILMGIKQLNATAASVEQIRHEMDRLASTLPEYSTVMSMRGVGPTLGPQLIAEIGDITRFAHREALTAFAGVDPGVNQSGQFSARSNRASKCGPPRLRKALFLVMDCLLKTSPADDPVYQFLDKKRSEGKPYNVYMTAGANKFLRIYYGKVKAYLASQAKSE

SEQ ID NO: 127461 - protein, 343 aa, unidentified
MESIYYIGLDVHKKSIAYCIKDVTGGVVCQGMVQAERRALQQWLVDLPGSWVGAMEATMFTGWIYDFLKPHAVELKVAHPAMLKAITAAKKKNDRTDAEKLADLLRVNLLPECIMMSAELRELRRILRYRNMIVRTASKMKNKISGLLMEVGAVYDKRKLHGKRYFGQLLERVEDVPDSVKDLLKLRRSNLELFVVIQKKLLKVLREDSLISKRVELLQSISGVGEIMALTWVLEIGDPGRFSNSRQVISYCGLCSAQRESAGKEYRGPISKQRNKYLQSMLIEAANIAPQWNPQLAMLKEKELTRGNCNRATLAVARKLVKYMLAVDRRGEPFVAEKESLVA

SEQ ID NO: 127462 - protein, 358 aa, unidentified
MVQRKELNFEGQNIYIGIDVHLKTWHVSILTESGCLKKHSQQSSAQALFEHLKKHYPNGNYLSAYEAGFSGFSTYYSLLDFVIECLPVHAADIPTGQYESVMKTDAIDSTKIARALKSGLLRGIYIPKKEVLDDRNVMRLRITLKRQLSGYKSRVKHLLYNNGVIYPECFQNSKSHWSKRYLKWVHEDVQLLSESRNSLDLLLRQVELFRKSLLEITRLVRTLSRNGRYGEAYENIVSIPGIGMITGMCLLTEIGDIHRFRNERQFASYLGLVPKSHSSGEKTSHGEMTFRGNKRLGPLLVESALVAIRQDRALAAAYGEYCKRMLPQEAIIRITRKLSNRILIILKSGKKYEHDRCY

SEQ ID NO: 127463 - protein, 341 aa, unidentified
MKQEMSILGIDIAKRLFHAVGMDERGKIVWRKRLSRHDLIPFIAKLPPVLIGMEACGGAHYWARRFRAYGHEVKLMAPQFVKPYVKSNKNDSRDAEAIAEAVTRPTMRFVPAKDVDQQDIQALHRVRERLIGERTALVNEVHGLLHEYGMVMPKGVAKFRQAVVGKLEAEKDKLTPLSQEMFWKLVEEFAALEEQLAYYQEKLEALAATHPECQRLMTIPGIGPFSATALVAAVSDASAFKNGRQFAAWLGLVPRQYSTGGKERLLGISKRGDSYLRKLLIHGARATLRWVGRKTDRRSQWMRQLVERRGHNRTAVAVANKHARIVWALLTSHQAYEPAKG

SEQ ID NO: 127464 - protein, 319 aa, unidentified
MFVGIDVAKAELVVVVRPSGETWTVPNDVTGVRALVQRLEQATPTLVVLEATGGYELPCVAALLAATLPVVVVNPRQVRDFARSTGQLAKTDRLDAGMLALFAERVQPAVRALPDPATRALEALMARRRQLVEMLVAEQNRLGLQRGRGDRQVTASLKQTIAFLTRQLAMTDTDIGTMVRASPVWRARDDLLRSVPGIGPIVSRTLLAALPELGHLDRRAIAKLVGVAPLNHDSGTWRGRRTIHGGRAHVRAVVYMGALVASRRNVVLKAFYDRLLAAGKPKKLALVACMRKLLTILNVMVRTATPWTTETASGALIPA

SEQ ID NO: 127465 - protein, 423 aa, unidentified
MGCGSDQVFTAFVGIDWADTKHDICVQAAGSERRELSCIAHEAGQIESWACSLRERFGGHVAVALELTKGPIVYALQKYDFIVLFPINPATLARYRQAFKPSGAKDDPTDAELALDLLVCHRDKFTPLQPQSAPMRTLIHLVEQRRQLVNDKLRFTNRLGNALKQYYPQALAWFDQRDTPLFCDFLVRWPTLAQVKRAHRAGLERFFWNHNVRFANVVEERIRAIKAATALTTDEVVISAFRLQVEVLVEQLRTTLKAIDRFDRQIAKLAPTLPDYALFSALPGAGPHLAPRLLVAFGEQRERFASAAELQRYSGIAPVTERSGKKSWVHWRWQCPTFLRQTFVEWAAQTINKSFWAGAFYRQHRDQGSTHQAAVRALAYKWIRILYRCWQTRTSYNEVTYLNALQRRGSPLFRHIAAATETG

SEQ ID NO: 127466 - protein, 472 aa, unidentified
MGTDRKLWRSQKEKKEWARRIQSKDPGLEVVHPQAAEIDVGNAAHYVAVRPELDPEPVRRFECFTADLHRLADWLVTLGVKTVAMQSTGVYWIPLYEILEEHGFEVYLVNARHTKNLPGRKSDVQESQWLLKLHTYGLLSNSFQPQAKIRALRTYWRQRAEHVRGAATCIQRMKKVLTQMNLQLANVISDLSGLTGQTIVRAILAGERDPWQLADLSHPRIQASREEIAKSLEGNWRAELLFVLQQEVEMYDTYQQRMAECDQQLQKHLAQFADKLPPQLPEAERELQKENPARKRRKPQGNAPRFNLNGELQRITGVDLTQIDSVDVMIAQTIISEVGLDMSRWKTEAHFASWLGLCPDNRISGDKVLRRGTRHVVNRAATALRMAAHNLIRSRSYLGAQYRRLRTKLGAPTAITAMAHRLARLVYRMLKYGQQYIDKGNQHYEVRYRQQQVMLLRKKAAKLGLSIVDAQP

SEQ ID NO: 127467 - protein, 362 aa, unidentified
MLYLGCDVHKNYTTMSFVTEDGKVADTSSFYNDIEELKNLLGQFPEEEFSAVLEAGLNWGVIYDMLDSLSEVKNVSLAHPPKVKAIASAKIKTDKIDSKILGQLLRTDLIPEVWIPCKETRILKDIVRSRAFIVKIKTMIKNRIHDILRKSHINPPDVKDIFGKYGRMWLEEIELSDKRADKLLRYHLKLKGVFEEMEKELKKWINKEMQTNEDLKLVKTIPGIREVFGPIIVLEIDDIDRFPDPAHLHSYSGLVPSTHVSGNTSYHGRLIKGNRWLRWAFIEGAHTSVRVSPYFREYYGRVKRKAGSQAASVASGRKLATIVYKVLKEKRPYIEEYRIKQNKGRSPSVRPSGGITSRSFQE

SEQ ID NO: 127468 - protein, 422 aa, unidentified
MKNRLEKKLDMVAAGTQIVGIDIAKKVQWARFCDHAGRELDKPLRFENTTEGFERLAERIEKLRREKALFRVVIGMESTGHYQKTLIHYLTHNGYTVVLVNPHHTKRAKELDDNSQTKHDQKDALTIARLVKDGRFYECYQPEGCWAELRVLTATRLDVKQQENACKNRIHTVLDEYFPEYETVFKCSLIGKASLHLLKTHPFPCDVLRLGSDGVLEEIRKVVKKSVGRKKAEQLVKAAENSIGLTYGREAARLRLRILLAEHESCQQRLEDIEAAMERELDKTGMKERLLGIPGIGIVSLASFLGETGDLSRFTNGQQLIRLAGYNLTENSSGKSKSQRGISKRGRKILRSVLYQMALVMVAKNAEMKRIYQQLKTRESNPLKKKQALIAIACRIAKMLFSIAKHGGAYNPGRVADIQRAA

SEQ ID NO: 127469 - protein, 446 aa, unidentified
MTAVKKVKKKASSKANTQLPTLHPHAAGIDIGATEIQVAVPCDADPDPVRTFVTFTADLHALRDWLLQCRVKTVAMESTGVYWIPVFQILEAAGLEVCLVNARHCKNLPGRKTDISDCQWIQYLHSVGLLRASFRPPEQICAVRSLLRHRATLGRYAGSHVQHLQKALTQMNLQIHNVISDLTGLTGLAILDAILAGERDPQKLAALKDHRIKASHDTIARSLHGDWRDEHLFVLQQALATWRHYQQLIGQCDEHIQQQMAQFDSKVDLNRHPLAANRRGKKKPQRNEPKFDARTELYRLCGVDLTEVPGIQVSTALVLFAELGPDFVTRFPTAKCFSSWLGLCPDNRITGGKIISVKTRDVKSRAAMALRLAAQSLWHCKDYLGDCFRRWKARLGTPKAITAMAHKLARVIWHLIKHRRPYDPSVWQQAEAKLKQKNGYAEEKNT

SEQ ID NO: 127470 - protein, 350 aa, unidentified
MTEAYDGRQIVGVDLHRRRSVLVRMTEDGRRLETARITNSAAELRREIAKAGECPKVVLEATYGWYWAADALTAAGAEVHLAHPLGVKAFSYRRVKNDEKDAGDLADLLRMGRLPEAWIAPPEVRELRELTRYRIKLVRLRASGKDQVHAVLAKLGIPVTCTDVFGAWGSTWLDELRLPQPYAGKMASLRQLIGWLSAEISLLDTVIADLLEHHQAYHALQRLPGIGPVLAAVIAAEIGDITRFPSPARLCSWAGLTPRHRESDLKVARGHITKQGSPLLRWAMVEAIQHQPAGSPVRETKDRIIARRGSQAKNIAKTAAARKLLTCVFYAMRDGQARSLAARTAAPDAA

SEQ ID NO: 127471 - protein, 415 aa, unidentified
MERLFERCAGLDIHKDTVVACVRVPGQEGGRYQEARTFGTTTEQLLVLLDWLRSWGVTLVGMESTGIYWRPVYYLLEDHMECWLLNAQHLRNVPGRKTDVKDAEWICQLVEHGLVRASFVPPREIRELRDLVRYRKAQIEERTREVQRLEKTLQDAGIKLSSVASRVLGVSGRLMLDAMISGTHNPEVLAELAKGKLRNKLPALREALQGRFTGHHALIVSRQLAHIDFLDEAIAELSQQVDEVIAPFASKVTLLDTIPGVDKRTAELLIAEIGADMSVFPTHRHLASWAGICPGQNESAGKSRSGKTRKGSKWLRAGLTEAAKASSRSKGTYLSAQYQRLRGRRGHQKATIATAHSILVAAWHILSRDVPYDDLGDDYFIRRQAEHAERYRNRLIRQLERLGHKVTLEPLQEAA

SEQ ID NO: 127472 - protein, 371 aa, unidentified
MTSILYVGMDVHKENYTLCCYSFEKDDLLYKQTIAPDYKMILKYLEQVRNRHSDEIEFVCGYEAGSLGYTLYHQLNDHGVKCVILAPTTMGVMNTGHIKTDKRDAGNIARCLAFRTYSEVFVPTHQDNEVKEYIRMRDDQKKALKIIKQQILAFVLRHGYRFTEGKNYWTIKHVNWLKSLDLGGILQESLDEYLVTYRYLSDKIERLDKRIAELAEDDRYQQDVKKLSCLIGVKTHTALSVLVEIGDFKRFAKPEQLAAYLGLVPGEDSSGGKQKRGSITKAGNSHVRRLLVEASQGYTRGTIGHKSLDLKRRQIGNEPKVIAYADKANERLRRKFYRMTLKNGANRNVAATAVARELACFMWGLMTDNVA

SEQ ID NO: 127473 - protein, 391 aa, unidentified
MIFIGIDAAKDKHDCFIVSSDGEVLCDVFTISNTLDGFNDLLSKIKSFSKDLSKTKVGLEATGHYSYNLLGFLLDNGLTTYVLNPLRTNLYRKSFSLRKTKTDRVDARTIATMLMSDVGLKSYTDTSYHNEELKSLTRYRFDKVKQRAKLKSSITRLVCILFPELEKLVPTLHIASVYALLLEYPGAKQLAGANLTHLKAVLYEASKGRYGRDRAIMLRDAARNSIGSYMPAKSLELKHTIRSIQVLDTEIEEIETEIEKLMEQIQSPITSIPGIGSRMGAMILAEVGDFYNFDSADKVLAYAGLSPSTYQSGRMNNCYAHMEKRGSRYLRYAIFNATKYVCHWDPIFKEYLEKKRSEGKHYNVAISHAAKKLVRLIYAMQRSGQPYRKAG

SEQ ID NO: 127474 - protein, 344 aa, unidentified
MNIATIGIDLAKNVFQLHGVNGHGKVVLRRQIHRGQMRGLFVNLSPCLIGMEACASAHYWARTLQSYGHTVRLIAPHFVKPYVKTHKTDATDAEAICEAVNRPNMRFVPIKSIEQQSALSLHRVRAGFVRARTAQACQIRSLLAEFGLVMPRGIGNIKQVPKLLQVAGKELPAPFCRLIERLLAHLKELDRQARELEEQIVDWHQRSEPSRRLAKIPGIGPITASALVASISDVRSFKNGRELAAWLGLVPRQHSSGGKPTLLGISKRGDRYLRTLLVHGARSVIVRVLKRDDAKDGWLKRLLERRHINVATVALAHKTVRTVWALLAHDREYCPNYKSLPVAA

SEQ ID NO: 127475 - protein, 451 aa, unidentified
MSKKTMSLEVVNPNAAGIDIGSRSHWVAIGQDAQDVKEFGVYSEDNEALCKHLTEKGIISVAMESTGTYWQNLFSTLVSHGFDVILVNGKQTKNIKGKKTDIKDCQWIQKLHSLGLLSSSFLPDSTTDIIRTYSRHRQNLIRQSSRTVLKVQKYLRLMNMRLDVVVNDIVGLTGVKIISDFIAGERSGKELAKNRHYNCRKPEEEIAKALQYNGREDYMFALKHEWNTYLHIQKQIEEVDSEIKKLLEDIIDKDDNKKQHVASPKKHKRKNKNTIKGTDMNQIAYQYFEGVDLMEIEGVNDATIMAIISEIGLEGIRKFGASKQFTAWLRLAPNNKISGGKVLSHHLPKGSSRLKIAFRNAANAIGNQKEGHLADFFRKINYKKGRATAISATARKLAVIIWNMLVKGESYNPPTKYMYLDEKRRLGLVKRIKKQIDKFEINPEQLGFTTT

SEQ ID NO: 127476 - protein, 344 aa, unidentified
MQPMYYIGLDVHKRTISYCVKDGSGAIHTEGTIPATRLDLDLWMKTLPQPWTAAMEATVFTGWIYDHLRPHAAALKVAHPLMLRAIAAAKKKNDRIDAAKICDCLRCDFLPECYMTSTAIREQRRTLRYRNLLVRQMVQMKNKTSMLLMEAGVSYNKQRLHKAGYFRELLATNPDINDGLGSLLRVCRETVVRLQRTESALVRSLERDRQLLVRVERLQTIPAVGPITALTWALEVGDVKRFSSIKKAISYCGLCGAEKSSGNTTQRTPLSKQRNKHLQTTLIEAAKMAPRYSPALAMLYDTEKQKGNANRATLAVARKLVAYLMAVDRGQRNFQVVEKNCIAA

SEQ ID NO: 127477 - protein, 339 aa, unidentified
MELYAGIDLHARNSYFAVVDAAGARVLLKRVANDSESVFSVLEPYREQLRGVVVESTFNWYWLVDGLRDGGFTVHLANPSRMQKYSGLKHADDKSDAVWLADMLRLGILPEGYIYPQQDRPVRDLLRKRMHLVRLRTSLINSLQNILARNGPARLGASKIKQVTQDHISPLLEGDDDLAMSGRVSKQIIDYFTAQIGTIEKFVEARVEVKQEYDLLRTIPGVGMILSLTIMLETGPIGRFAKVGNYASYCRKVPVCWTSDGKKKGDPNKRNGNKYLAWAFSEAAGLARRFDATVKAYYNRKASKTNFMVAYSALAHKLARAAYYIMRDQVPFDKERLFA

SEQ ID NO: 127478 - protein, 356 aa, unidentified
MNIHKVQDFVVKGKEVFVGLEDSKKTWKLAVRCERMVIHGTSMEAKYSVLIAYLRNKFPECTVHLIYEAGFKGFNLYDRLIEDGIDCVVIPPHMVTEPKVNRVKTDKRDANRLALILENHDFKCGCHVPDKERREDRQVSRTLIGIQKDIIRTRNRIRKVLDFHGVEVPFSDRWNRKEFAALKELSVSEPLKASIAVLLTQLEQLWDHQTTLRTYLRSLCRKERYRKAFQIARSLPGIGWFTAIRLILELGEDLSRFTSGKKIAGFVGLTCSEHSTGETERKGRITGMGSGFIRSALIENSWMAIRKDPALLAKFSRIWRASGSKKKAIVGVARMLIVRLRACVISGMPYTMGTVR

SEQ ID NO: 127479 - protein, 371 aa, unidentified
MLYVAVDQHAKQLTVSVRNEAGDVVLKRQVSTEWERVRRFWEEIRERSVGLGGFVVILEVCGFNEWLIAMLREHHCSRIVLVQANERAATKTDRRDANRLGELLWVNRARIASCQRVPGLKWIVIPSKEDAENRQLTSMRQRIVAQRTKCINRIKHILLKYNILQEMPTKGIQTIKAAKWLQELRLAEIDRLELDQCLAQWALIDVQRKQIDQRMASRQEPDAQAQLLATIPGASVFSSLALSCRIGDASRFNSPKSLSHFWGLTPRCRNSGASTDRLGSITKEGSKVARFILGQLVLHVLKKDRWMREWYRRIKTRRGSKIARVAVMRRLTVVIWNMLKHREPYQCGGPEAIRKRRKPAPATPINLTLSS

SEQ ID NO: 127480 - protein, 452 aa, unidentified
MVRTKRKRKALRVCHPDAAGIDIGANEHWVAVSPGCDDSPVRPFGTFTSDLQRLADWLATCGVRTVAMESTGVYWIPLYELLEERGFEVLLVNAAHARNVPGRKSDVLDCQWLQELHTFGLLRASFRPEAKIAELRTYTRHRQTLIEEAARQIQRMQKSLDQMNVQVHHVLADLTGKTGMAIVRDIVAGNHDPQRLAQHRDPRCKVSFAVIVEALRGHYKPEHLFTLQQALSLFDTYRQHLATCDARIEGLLSTLAEQTPQLANPPKPRKSYPVGNQIAIDVRTPLQRLLNGADPLTIVGIGPLTALNLLSETGTDMTRWKTEKHFTSWLNFSPGTRITGGRSVSGRRPPSANRAALVLRQAASCIGRTQTALGAFYRRIAARRGKPIAVVATARKLACAYYRLIRYGVEYVERGADAAERDYQNRRLNHLHRLAKTLGFSLQPIQPEAGVT

SEQ ID NO: 127481 - protein, 394 aa, unidentified
MKLIGIDIGKNKHFFCIMDKDSGEIVSQPASFSNDKEGFDFLLQKIKSYPKDSVIIGMEDTGHYHFALLKYLLDLQYTVALINPKTTDFNRKMQGGITKNDKLDTINICDVLDTPECKKQYRITKVNKFDLYEQKQLTRQHHNLKEELNVYKNRLQKSIDIVFPEFNSLFKSKYGTVYINILKTFGSAENIANTDIRTIRKCFEIDGRGNRISLTPERLKERARSSIGISSLAEVIQIKHLSAQIDLIEEQLSEIDKKIEEFSIQNNSPILSIPGISHFSGTSILAELGDISNYSKPSQIIKFAGVAPLHYESSQFNAQHTAITKKGSKYLRKTLYQIILPVIRHNPVFNKYYQLKISQGKGHRCAQGHCVRKLLRIIYHLLKTNQQFDPQLLR

SEQ ID NO: 127482 - protein, 334 aa, unidentified
MGNVTTVGIDLAKNVFSLHAVDGRGVVVLRKTVVRARLTALVAQLPPSLIGLEACSGAHEWARRFAQHGHTVKLMAPKFVAPYRRSGKNDSNDAEAICEAVSRPSMRFVPVKSVEQQALLTLHRVRLGFVEERTATINRIRGLLAEFGVVLPQRVVEVRRSAAAALNDLPVLAARALSDLLAHVRVLDERIGEYERELEQHARRDERAKRIRQLSGIGPISASAIVSSVADAHEFKNGRQFAAWLGLTPKQYSTGGKSRLGRITAHGDAYLRTLLIMGARSMLQTALRRTDRLARWALAVRARRGYHRACVAIAAKHARIVWAMLAKNESLKLS

SEQ ID NO: 127483 - protein, 362 aa, unidentified
MDVGQTVADRDVLGGVDTHKDLHVAAVVDEFDRVLESGCFATTRHGYKQMLTWMRSFGQLRRIGIEATGTYGAGLLRYMQNAGVEVLEVTTPDTHDRRKRGKNDDLDAQNAAHAAFAGRRTVTPKSRDGMVESLRVLKACRKTAVTARRVALQMIHNTIVCAPDDLRETLRKMTRMQLIRTLAAWRPDLTDHRSVVSAYRITLKSLGRRYLELHDEIADLDTMIVAIVDELAPALVARNSIGHASAAQLLVTAGDNAERLHSEASFAALCGASPVPASSGKTTRHRLNRGGDRAANSALHIIAIGRLRTDPRTKAYIARRVAEGHSKLEAIRCLKRYIAREVFSLIRQRKQEINQGRTSLDN

SEQ ID NO: 127484 - protein, 364 aa, unidentified
MKHVKDNVNRVVRYIGMDVHKDSTTAVVLDAQGNLVMQVTLRTEGTVLVDFLRGLSGALHLTFEEGTYSAWLYALLSPWVEKLIVCNPRQNALLKQGNKSDPIDTRKLAELLRLGSLTAVYHGSPGMRTLKELAASYVTLVKDGTRVMNRLKSLYRGRGIRCGGTQVYSPRHRAHWLEQLREPGAHQRAKLLYQELDLLLKLRSQARRALLAESRKHPAQKILRTIPGLGPLRVALLLAWLQTPHRFRNKRKLWGYGGMGLLTRGSAQYRLQQGELVVSPKGVTVRGLNPAHNAPLKDIFKGAALAACQRPGPLREAYERCLREGTEEHLARLTIARKIATLVLTLWKRGERFDAERLRREQAA

SEQ ID NO: 127485 - protein, 318 aa, unidentified
MPPAASVYVGIDVAKAELVMAIRPSGERWTAANDEAGIQRLLTRLREDAPALVVLEATGGYERAAVAALAAARLPLVVANPRQVRDFARATGQLAKTDQIDADTLARFAERVRPEPRALPDASAQALDALLTRRRQILGMVGAERNRLEHAVPAVRRGIVQHIRWLERQLRDVDDDVDRTIQVSPIWRAKENLLRSVPGVGPVVSRTLIGDLPELGTMPRKQIAALVGVAPLARDSGTLRGKRLVWGGRAPVRAALYMAALVATRRNPVIREFYQRLLAAGKPKKVALTACMRKLLTILNAMLRANTVWRHTAHAPIT

SEQ ID NO: 127486 - protein, 516 aa, unidentified
MVPSCPFKSLVPRFSADSLVKGRRFWTTCALILFKRLQLFMPLLGRNHNTNMNKKTSKTKKHKQKIILQDNWEPINPNAAGIDIGSREHYVCVPRDRAEKNVRPFGTFTCDLEALADWLKACGVNSVAMEATGVYWIPAFQILEQRGFKVLLVNARQTKNVAGRKSDVQDCQWIQRLHTYGLLRASFRPGDAYCILRTYLRYRDELIGARSTQCQHMQKALQQMNVQLHHVLSDVTGVSGLAIIGAILEGQRDPAKLASLVDRRVRASQATIQKALAGDYRAEHLFELKTAFELYHTYEAKIQACDERIVSETARLPDQVDLNLKPLPDRKPGRPAAKDKMLGQDMREWVCKKLGVDLTAIEGIGVTTALVILTEVGPDVSRFPSEKHFTSWLGLCPDNRISGGKVLSSRTRRVINRVADALRIGATSLERSPSAMGAFHRRMKAKLGAAEGVTATAHKLARTVYRLIKHGEAYVRKGATDYEKKYQEAKLRALRKTATALGFELVEKQGVAQGVS

SEQ ID NO: 127487 - protein, 405 aa, unidentified
MEIFCGIDWSEAAHDVAVVDETGRLLARRRIADDAAGFTALTELLAGYAGRPERVDVAIETGRGLLVAALRAAGHRVFAINPKAVDRYRDRHGVAGAKSDPGDARVLADILRTDRDRHRPLPADSDLAAAVGVLARAHQDAVWARVQDANRLRSLLREFFPAALTAFADLTTNTALAVLAAAPTPTAAARLSRANLTGLLRVAGRGTRPTEAVRLAEIFTVDQLRQPPVVEAAMGQAVRAIVRTLTAANQSISDLEAALAVAFDQHPDGEILRSLPGLGPILAARVLSEFGDDPTRFPDPASRRAYAGTAPITRASGRSRVVLARHVRNKRLADACYLWAFAALNRSPGARAYYDTRCAAGDRHNAALRRLASKLLGQLHHCLTTSRPYDEALAWPQPDTTPAAA

SEQ ID NO: 127488 - protein, 364 aa, unidentified
MELSRTNWLLTSLSPGGGQKMSKHAVRSGDIAGLRVRLSLLKDRVRARTGQVVPIIVLQEAGLEGFWIHRLLLGEGIESYVVDPASIATSRRRRRAKTDKIDGEALVRALLAYKRGEPRVCAMVRAPTPQQEDERRICRERKTLTAERVEHVNRIKGLLFAQGISNYEPLLRTRRERLEELSTGDGRPLPQHLKAQIRRELDRLELILLQIKATETERDALPSSSDEGKSAPATLLRKLKGIGPEFASVLWSEGLFRTFSNRRQVAAYAGLAPTPWQSGSVAHEQGVSKAGNPRLRTTMIQLAWLWVRHQPHSILTQWFQHRVRLNGGRIRKVLIVALARKLLIAFWKYVTAGIVLEGAKTAAA

SEQ ID NO: 127489 - protein, 419 aa, unidentified
MYKRVTNRTNYVQNKTLIVGIDVSKGNLSAYGRGNDQEMKTFEIPNNYEGLSMMWANLKIYQVKYGCDQIIVGFESTGHYSEPLINFMSDKPVKLVQVNPMHTKRVKDVNDNSPGSTDRKDPRVIVDIIQLGHYLSLVTPVGPSAELRSLTHAREFLETEKIRHLNRLESLVFRVFPEFVRTMKSLSSKTAQYLLKHYPTAQEIKAVSVEHLSSEIKKISRGQLGREIAERLKQASETSLGTKEGKDGLLDEIAYIVEEITRLEIRVKQIEGKMEEQIEKLPHAKKLLSIKGIGVVILGGILGEVGDFRNYHKQAELVKLAGLDIYEISSGKYHGERHISKCGRWLLRKLLYFASLNVVRKGGIMRGTYLRLTKRMAKTKALIAIARKLLCLMFAMVRDCTEYQQKISERVLGKEKIPA

SEQ ID NO: 127490 - protein, 356 aa, unidentified
MDFKQNQKINQVTEQTLVVGIDIAKRTHYACFVDDRGRVIQKSFSVQQSHDGFETFYQRILKAMKNFGKTEVLVGIEPTGHYWLNLAYFLDDVGIPLVMANPMHVKRSKELDDNLPTKNDRKDALVIARLLKDGRFSYPRILKDMEAELRAGSTFRGKLTEELGSVKNQMIRWLDRYFPEFTQVFPSFGKMALAALECTPFPSDLVQKQPEDVLSLYRKVEGIKSPQRPKAIRLIKLANQSIGVTEGRQMARFEIATLVHRFRQLEEEIETITSQLIELVQTSVEYEWLSTVPGLGDTTIVDLLAEIGSFSHYQDPRQLMKLAGLTLRENSSGQHKGQKRISKRGRRRLRASYSGL

SEQ ID NO: 127491 - protein, 366 aa, unidentified
MSAMNVISVGCDSHEKTLVNKVAVNREAPEQLNVSGRRSGRQKLIAVLKRKAQEIGGARIVLAYEASSQGFILYDELKAAGIECHVLAPSKIERSPQQKLNKSDKKDGKRLLDIVRSHVLAGTALPAVWVPGRQTRDDRETVRTRDDVSDKQRVLKTQIQMLLKRWGIEKPSELRGSRSKGYRQWLKALSEDSSRGTGFRTTLSSLLRQLEFIERELEQLDQAIGDLGEQPHLKPIVDALDAETGVGRLGAVMYATETADFGRFRRRQQISAYWGVTPRSNESGESQDRKGHITRHGSRRVRRMLCQSYWVRVKHDPDEREVYQRLVAKNPKRKKIAVVAGMRRLAVRLWHVGRQAQLRMHGLTAQ

SEQ ID NO: 127492 - protein, 391 aa, unidentified
MSCFRGAIQNRLRKEDFMKKQDSYDYYVGIDCAQNKHDFAMKNNQDKFLIKKGHFSNTLQGYEKFLNTVLSKCLNKDKILFGMEVTGIYGTNLYERLKSDGYHVVMISPDSVKNYRDYKRLNKTDKIDSACIAELLLNGDAQIVHVEKNGYIDLKAYIRRRNALKVTCTQETNRFLAKVCLYFPDLLKVFPSGRATLKAIFSIYPTPHSIIEADFDELVSVLQKASKNKFGVDKANELIHAARNSIVVRKSISDGELYNIHSLIDSIDSLESEIRNLEKIIDSKAEEFPAYHVLLTLTGCGKITAATIVAEIGDISRFHKASQIVSLAGLYGDNSKSGSSVTSVEKFPRKVLVIFAMQSTWLLNLHEETTQYLKLILLRKRMEIVPNIFLQ

SEQ ID NO: 127493 - protein, 377 aa, unidentified
MFEKVSGKAIKLLVDKNNNRKPETMSEVKTKDQKDQLVYCGIDTHQHSWKVAILQNGHFVKVFSQEPGTKQLATHLQQHYPGAHYQLGYEAGFCGFWIVEEFKSLGIDCKVLHAADIPTTDKERRQKTDARDCRKIALSLANPGGIRSIHVPEKELQYDRSTVRARLKISRDATRVRNRVKAHLHFYGLSLGKDLPRYWSKVFIDSLRQWSIDQRDVALGLLLDELMALRHLKAKALQELRKLARQDRYASKIKLLMSIPGLGLLHAVSFATEIGDIKRFKNLDQLCSMIGLIPNTNASGEKAGVGRMTKRGKTEVKNLLIEAAWVAIRCDPDLKVSFERLSQRMQKNKAIVRIAKKLLNRIRTVLIQNKPYKIAVC

SEQ ID NO: 127494 - protein, 445 aa, unidentified
MTQGSSLSRGDKRRNARLAQMRGLVPLCNAIVGIDLADEKQAVVVTDHDSQVLARRRVRAKAWNLTPVLAWARHVAREHGYIDVTVGCEPTGHRWRVLDQLAAQQDMALVCVQPLLVGRAREAEDYTRDKSDDKDAVLIARLVGQLRCYAPERADETWARLRQLGARREQLIVEATACVQQLRDLLECAWPAVLGAAGSPFDSTNWCAALAVVLKRCDGDPTRLARLGLVRFQAAVRRELPCWGGQRLWRRIVGAVFASLTDPAGVITQRRGALERAGWVLADWHSTKARLAQVEGCMVDILDQLELTALVTSIPGVSAIGAAAILAETGDPTRFDTPRALAKHAGLCPRDNSSGTATGRSRISGRGRPRLRLAAWRAVWGALPSNPVMASRYRYLTTRADNPLSDGQARAAIAAALLRWLHVITTQRVSWDPVMAGVSEISPAA

SEQ ID NO: 127495 - protein, 346 aa, unidentified
MTIIVETRSITGGVDTHLDTHVAAALDANGGVLGVESFPTTSAGFGELHAWLSSFGMLCRVGVEGTGAYGAGLARYLRGAGVAVIEVGRPNRQARRQHGKSDSIEAVEAARAALSGRAHGVAKTADGNVEAIRVLLVAYRSGRDARTKCLNQLRHLGFCGPDELRERFRGVTVSALARDAAGLRPNRNGDPVLYATKLAMHTLGRRVVDIDTDCARLHGELTDLVKAAAPTLLELPGVGTHTAALLLAAAGDNAERITSEAAFAHLCGVAPIHASSGKIVRHRLNRGGNRQANHALWRIVFTRMGSDPRTRTYVERRLAEGRSKPEIMRVLKRYVAREVYRHLPGV

SEQ ID NO: 127496 - protein, 487 aa, unidentified
MAAEELELESELVERVAAIDIAKASGMVCTRVPHATRPERRVQEAWNVASTTEAIMELGQALVALGVTRVVMEATGVYWRPFFFLLESCGLECRLVNARDVKNVPGRPKTDKLDAIWLAKLAEWGMLRASFVPERPIRRLRDLTRLRAALSQERTRHKHRVEKLLEDAHIKLSSVATNLFGLSARNMLDAMVAGERSPERLADLAQGKLKAKHAALVAAFNGRFDEHHAYVLGTLLGAIDHVQSQIDDLTRHIETSLTQLSGPQADLDAKRPASVGGALTPAERLDEIPGIGAITAQIILAEIGLDMSVFPTPGHLVSWAKLSPRTIQSAGKTFPGGTGQGNPWLKAVLGEAAMAAARTDTFLGARYKRPVRRRGHGKALVAVARSMLVIVWHLLGRSPSPLPRPRGRLPPAPDGQGHPHPRAHPPVGSPRARRHHQSAHGGRLRPTATRGPGEASRAAARWHGPTFGLDHPLRDSPRAVRPGRGPS

SEQ ID NO: 127497 - protein, 420 aa, unidentified
MSFKIFRKNCCGLDVHKTWIYACIGITDTNGRTDYKQTRFSSFSKRLKELSDWLAKYHCTEVCMESTGKYWIPVFNVLEKAYVSVILSHPKYTKPQKGNKTDRKDAKWICDLFMCDMVKPSFIPPADIRHLRDLVRYRFKLICMITGEKNRAQNCLTVSNLKLDDVFSDVFGKSSRSITEYILEHPGDLFDVTPFVDRRCKTPIEEIQAAVDGAISPEQAVKLRQCLNHIDELEKHLEEIEQEILRLSDKYQAALDLIRTVPGFDKNPMTAIQVLSEIGGDMSVFPSAKHLVSWAGCCPRNDQSNKKIKSTRISRAGSYFKPVLVQVANGLLRSKKHPEITDRYKRIKARRGHKKAIIAICRMLLTAIWHILSDLKPYTAEGFRESRPVNESKVLTTSQALNLLKQRGYIIKDDLTPAMN

SEQ ID NO: 127498 - protein, 479 aa, unidentified
MPTITKSKANLKSRGAAPVTALASRDRVDVPTAKRRARRRSGQADTPTMPVEENKVAENRATLPPPGEYPDSAPTRFETQISQGAEGRMTMRIVALDLGAKKTSYCELSQGQVVHRTTVSELSSLQPLLGPDQPAAKVAIEACREAWFVHDLLVEWGNEVVLVDTTRSRQLGIGQHGRKTDRIDAETLARALEAGRIPVAHVLSPKRRELRRVLGVRRALVESRAQLVTTVRGLVREQGGKIPSCNTEHFVSKVRGQKLVSNIAQLIEPLLVLVHGIDTQLVNVEGQLAALCAQEPIIAALTTTPGVGAVVAATFMSVIDEAKRFQSAHQVESYLGLVPSEDSSGGKRRLGAISKKGNCYLRSLLVQAAWTIVRSSDKSDPLYLWVNQLIQRRGKRIAVVALARRLVGVLWALWRDGTVYDAPHLAHQGARGLRGAVQSLEQQTAAIAQAIKKSSIKHPATSSIATSRRSRKTLAANAA

SEQ ID NO: 127499 - protein, 383 aa, unidentified
MRTVCGLDVHKDSVYLCILSSTGEIYEKKFGVLTTELIEMRDLMLSHHVLEVGMESTSVYWVPIWRVLEPHFKLKLINPYFIKQLPGHKSDIKDAQWIAECMLKDLVNGSFVPPERIQQLRQYDRRIYDLDDEIIRKLAKLDAAVQRCNIRLSNYVSNTDSVSYKAVIDKICEGVTDPNVLVEEIHGRIINHHGKETIIASLTGSITECDIDIMRQLKAEIDLAEQHKQECMDKMLAICENEYSTQLHNLQTIPGVKMRAATSLIAEIGTDMSHFETANHLASWSGLKPRNDQSNKTIKSRRITYGNRYLRRTIIQCSWGASRTKNCFFSRFSYHQTQVRKKNRMKVQVAIARKMLICAWHILKDGVSYKDFNNIIEASVTNG

SEQ ID NO: 127500 - protein, 351 aa, unidentified
MLQKTNAVALRTIGIDTGKNTLHLIGLDQQGTIVLREKLARGRIGRRLANASPCLIGIEAGMATHYVARELLALGHDVRQVPPAYAKPFRQGHKNDFRDAYAIAEAVLRPSTRCVPVKTDDQLDLQALHRVRSRLVGQRTAVINQIRSFLLERGIAVRQGPRFLRQQLPEILAKRTDVLSPRMIGIIEDLSGDWRRLDERIECVTEEIEQLAHGSESCRQLMTVPGIGPLIASAMVAAIANGAAFAKGRDFAAWLGLVPKQMSTGDRTILGHISKRGNRYLRTLFMQGARVILLRPANWARHSFGPWLRAAAKRLHHNVLATALANKLARIAWTVLAQRRNYETRVVTEAA

SEQ ID NO: 127501 - protein, 411 aa, unidentified
MRLFAGDDWAEDHHDIEVMDAAGKVLAKRRLPEGAAGMSQLHELIGRFLPEDADEVEVVIGIGTDRGPWVAALVAAGYTVFPVNPLQASRYRERHGVSGAKSDQGDSHMLADMVRTDSHQLRPAAGDSPEAAGVKVVARTHKTLIWDRTRQVQRLRHQLREYFPAAIEAFEDLDAPDVLELLGKAPDPARAARLTRAQISAALKRARRRNIADKTDAILAALRGEHLTQPAALTVAYAATVRSLVAVITTLNEQAKLLEEQVKEHFGRHPDAEIYQSQPGIGAILGARVLGEFGDDPRRYVSAKSRKNYGGTSPITRASGKKKVVAARFIRNDRLIDALMSWAFASLNASPGARAFYDQQRAKGLEHNDALRRLANRLVGILHGCLKTRTLYDEATARGHRENLPQSSVAA

SEQ ID NO: 127502 - protein, 316 aa, unidentified
MSIIHWIGIDDHADKWTIAHLRGDEERARNVFELVPEDAGYRRLIGFLKSLDGEVRVVYEAGPCGYTLYRRLRKAGVNCAVAAPALTPRKPGDKVKTNRRDASKLARYLRGNDLTFITVPDEDQESLRDLVRSRGAVQKDVGRVQKQIIHLLLRYGHRYRSGSAWTTRFWMWLKKVELAGSHGRFVLDELMMELEHRIEQLKRFDAEIETASQQPEYAPYLGAMRTLRGISTLSAMTLLSELGDLRRFPTAPQLKAAIGLVPSEFSTGNQTSRYSITKTGNAHVRRIVVEAAWQYQRRLTLGRTIKARRKGQRSTA

SEQ ID NO: 127503 - protein, 346 aa, unidentified
MKNLNAQSQLTVLGIDLAKSSFQLHGVDAGANTVIKKTVNRNKLVQYIAQLPPCLIGIEACGGANHWVRVFEQFGHTVKMMAPQFVKPYVKSNKSDAADAEAICEAVQRPSMRFVPAKSLEQQDLQSLHRIRSQAVARRTAQANQIRGLLMEYGRVLPQGIAYIRKAIPSILEDAENELTVLFRALLADLYREMVHLDNRIQRLETKLEAICAQNEDCQRLLSIPGVGLLSATALVAAIGDINVFKSGRELAAWLGLVPRQHSTGGKPALLGISKRGDTYLRTLLIHGGRTVVRVADKHPDKRSQWISRLDARRGKNIAAVAVANKNARVAWALLKSGSVYQTQAA

SEQ ID NO: 127504 - protein, 356 aa, unidentified
MNKYIGFDIDCKKTVCCVVQAGQKERYVTIRSDVNAMKTFLRSEKRDGYRVELVFEISGQAGFIYDSLIDCVDEIKVANPSKMTWIYRTAKKNDRIDARKMAVLLSIGEIPEVYMPSGPVRQWRETILHRKKIVCKIVQVKNRIRATLKSQGYSKAANKGSWWKRANRFWMRRVCEESIGVSDLWHMHVCNLLDELELLEGQLKRLTQYLDGYLDTKAGGKLLMSIPGVGPRTAEAVLAYTDNVRRFGNYKQYCSYFGLTPKLDESGSCRRIGHISKRGPSVVRWLLCESSWKVIGKSKGMREFYDRVMAGQKGRKKIAIVAVARKLLSIMRAMMLTGELFNEELFNRVDELIEAA

SEQ ID NO: 127505 - protein, 361 aa, unidentified
MRLEQSNKLDFNGQNIYVGIDVHLKSWSVEVLSEHSSLKKFRQNPEPEALHKFLAANYPGASYHSVYEAGFCGFWIHEKLARLGINNIVVNPADVPTMVKEKLRKTDAVDCGKLARELRSGTLKGIYVPGTETLEIRSLIRLRNTLVKDITRGKNRIKSLLRFHGIEIPEQFTRCSVGNWSKRFLGWLREVRLSTEYGRKALDLHIEQFVRLRGMLLEETRAVRSLSRSGSFAEPLRLLMTVPGIGITTGISLLTEIDDIGRFACADQLASYIGLIPMCHSSGEKEGTGDMTVRKHAMLRCYLIEAAWIAIRKDPAMTMAYEQYRKRMIAQKAIVKIARKLVNRIFFVLKRKQEYVPCVVK

SEQ ID NO: 127506 - protein, 381 aa, unidentified
MKWQYYPSQSMKTKNDTIPQITIGVDLGDKKHHYCVVDQGGNILKRGKLLNTREAFTHLAAEYSGARVAMEVGTHSPWISEHLLKEGCEVYVANARKLRAIYQNERKCDDYDAEMLARLARVDTSLLKPVTHISQDAMTDRLVLGAREQLVEARKGLIQSVRGSVKSLGYRIDSCSAAVFGKKARGLLGANEAAMRGLEPMLTAIEAMSESIRELDAEVERLGREEYEVTKIFRQIAGVGPVSSLGFALAIEDPGRIGKTRDVGAYLGIVPRRDQSGDTDKALGISKTGNAYVRKLLVQCAQYILGAHGPDCDLRRFGLKLAERGGKAAKKKAIVAVARKLAVLLLSLWKSGEDYDPDHVTTRREKAVKAPEAKLEERLAA

SEQ ID NO: 127507 - protein, 323 aa, unidentified
MPDSFIVGVDVAKATFDIALPLDKPGKFQTRSKLPNDPKGFAELKAWLDKHAPSAALCMEATGIYHEALATFLYEHGFTVYVVNPYQIAHFAKSELLRTKTDRTDAKLIARFAASRPDLRPWQPLSPAQRTLRAYVYRLEDLMQMKQMEENRLDVANPLVVDSIQRHLADLSGQIAEVRRLIDDHIDSDPDLKGDRHLLESIPGIGPRVSSILLACVGDLRHFDDPGKLTAFVGLNSFLRESGTWKGSRAIAKLGSALVRAKMYMSAVTAMTHNPLIRAFVQRLRARGKPYLVAIVAAMRKLLHIAWGVVRSGRPFDARIGVA

SEQ ID NO: 127508 - protein, 353 aa, unidentified
MDTITRVGVDLAKNVIQIHAVDAAERVVARRAIARNRFLSWFANLKPCLVAMEACSAAHYWARKLRALGHEVRLIPPQFVAPYRKGGARVKNDARDAEAICEAASRPQMRFVPVKSPTQQSVLVLHRMRTGYVEERTALINRLRGLLAEFGLFFPQRINQLHKYFVDCVEDGSNELAGPAREALMRAWVQWQALDQEIAWFDQQIAEHANQDTQAKRCMEMCGVGPLTASATVATVVDARQFRNGRQLAAWIGIVPKQNSSGGKRRLGRITKQGNDYLRTLLVLGARSAIAAAARHDDRLSRWIVQLQARIGYQKTLVAVANKHARILWAILAKGEKFDPSHAPARPRPTAGA

SEQ ID NO: 127509 - protein, 485 aa, unidentified
MKEATLIRSVGIDLSRTGSHQVRCLDEQAKPCDSFSFDSTLEGLENFEKRVFSNGDTPTIIFEPTGLAWIPMAVYLRARHPECQMVKARLQKVAALRRYLRSYTKSDRVDGVTLAKMPFIDAEQLDEAYLPPAEYHSLQRLTRQRERLMKSITIRKNRIGSIINGYLPGLRKAFSDEWSDRARLFYRQRLNPFTVVRDGKSALETFLVSVKAKGALTESHRVYQACQKLAEFYEKSKAAGMINEDFFDDLQDEIACELRLMETEEAEVERVSVRIEELYGHLHPSDYLRSIPGIGVRTAQVFLAIIGDPHRFRSQAAFANWTGVVPGARQSAGMEGKGLRMTKAGPSMMKRSLFQAGDIARRYDPQLAHLYYREMVHHGKTHLQAMGAVMSHLGARIMAVLREDRPYELRDTQSKLITKKMAMELIRSEHKVPEETRQARRRRKSNEGRLNGRRTHEAAKAPQSGPLIPPQKTVYCAEKSQSIAN

SEQ ID NO: 127510 - protein, 407 aa, unidentified
MRLFVGDDWAEDHHDVELMDAAGRVLARKRLPEGVAGMARLHELTGQQLGEDAEDAEVVIGIETDRGPWVAALVAAGYTVYAVNPLQASRYRERHGVSGAKSDRGDAHMLTDMVRTDSHQLRSVAGDSPDAGAVKVVARAHKTLIWERTRQVQRLRHQLREYFPAALDAFADLDAPDALELLGKAPDPARAAKLTRAQVSAALKRARRRDITGKATAIIAALRSPQLGQPPAITAAYAVTVRSLIAVITTLNEQVTTLQGQVEADFGRHPDAEIYLSQPGLGHILGARVLGEFGDDPDRYISGKARKNYAATSPITRASGKKKVVAARFIRNDRLTDALMAQAFAALGASPGARALYDAERARGAEHNPALRKLANRLVGILHGCLKTRTLYDEATAWSHHENKLAT

SEQ ID NO: 127511 - protein, 428 aa, unidentified
MSNQELIRRKQYCQIVKEITGSDQYLVVGIDVGKDTHHGFMGSATGKSLFRKLIFKNNLDGFSRLLKTADEIKVQNGLSKIVYGLEPTGNYHKPLARHLIRCDSNVVLVSGEAVNKNRSLLDGRWDKHDTKCAANIADLVSRRRCLYYDSPSPSIIELRSLLSLRRRLKKEEHGLKMRIRNNLLAQYFPEFDRFYSACESESLAIVQWFLNPDTIAAMEFGEFFHLVTKTHRGIAQTLRLRKIHGLATESVGCPMGPAGEFEADLLVEKLKQVRQQIQKTADLIKNFCLEFDEYSYLLTIPGFGPYISARVLASIGDPFRFENRKQLIKLAGYDLCAKRSGKTSDKAVPVISKKGNGELRYALYQAAHVAAARVDLFRTYFTRLLRGRERERGIKTKMRVKLATKMLVIAWTLMKKREVFDPAHLNIE

SEQ ID NO: 127512 - protein, 359 aa, unidentified
MLTQSNKIDFNGQHIYAGIDAHLRSWNVTVMTEELIIKTFSQNPSPEILHQFLTRNFPNAIYHTAYEAGFCGYWIHNRLSALGVDSIVVNPADIPTTDKEKVNKTDQRDSKKIARSLRSGHLKGIYVPSLKTLEDRNLLRTRGVLVRDLTRNKNRIKSFLYFHGIEIPERFKSKSTHWSKRFMSWLKSVDLSEKSAQKSLNLIIESSENLRLTILGATVEIRELSQSEAYAGQVLLLRSIPGIGSLTAMTILTELEQINRFSNFDQLCSFVGLIPSTNSSGEKENIGELTHRGNNFLRCIIVECAWIAARRDLALNKSYHEYCKRMEPAKAIIRIARKLLNRIRFVLKNNQPYECSVVK

SEQ ID NO: 127513 - protein, 318 aa, unidentified
MRQLEDSTSVAGIDVAKAHLDVGLLGSGEVRRFEHDEAGFRALGDWLRSQGVTRVGLEATGGYERQLMQHLQSSGFTVIRHQPLEVRLFARLQRVRAKNDRIDALVIAAITARTTTTSRPPSPALLELAEWLTAYEQVTDQIARLKTACEHVHLDALKRHYEVLIRHCKDSKTRILGDILARIRICPELCQRYELLRSLPGVGEVVAAVLVVRMPELGDLSRGQAASLIGVAPFDRDSGSQKGSRRISGGRERPRRFLYIAALTAKRNSQTFASFAARLKDAGKPPKLVNVAVMRKLIEAANIILKRQTPWKPEMQTT

SEQ ID NO: 127514 - protein, 297 aa, unidentified
MVAVVVGIDVAKAHVDVWVLGTKLDVQRFDNEAEAHSALAAALKPLDVALVVMEATGGYEAALACALQAAGLPVAVVNPRQTRDFAKSMGRLAKTDRIDARMLAEFAAVLVRRDDLASFIRPLADQEQQALAAMVTRRRQLVTMMLSERQRLQLAIAVVRPSIEAMIEAIRKQLDDVEAQMVGHVQAHHAELDKLLRSASGIGPVASATLIAELPELGKLNRREIAALVGVAPMANDSATRRGDGACRAGASRYAACSTWPRSRLHATTRPSSASMTGCWQQASCPRSLWWPACASS

SEQ ID NO: 127515 - protein, 439 aa, unidentified
MRVMVKCGAGIDVHKKDVVVNCRRVEGKTVERETRTFGTTTPELLTMTDWLASWGVTHVAMESTGVYWHPVYNLLEGSYELLVVNAKHIKHVPGRKTDVKDAEWIAELLSYGLLKASFVPEKPQRDVRDLTRYRTKLVQERAREVNRVQKLLEGANIKLASVASDVLGVSGRLMLEALIVDETDEKAMADLAKGRMRSKIPELERALTGVVSDHHRFLLGQQLAHIDFLDEQIANISQEIVVRLEKMSQEPPESPNGGEVEESGKAGTSLTWSVAVNLLDTIPGINQRAAEAILAEIGLNMQQFPSDRHLTAWGGLAPGNNESGGKRYSGRTRKGNQTLRTVMVQAAHAASRKKGSYASALYKRLVGRRGKKRAIVAVARSLLTSIYHMLTRQQEYEDLGSDYFQERRKDSKVDYLTRQLAKLGYEVRLAPNLDPAGAG

SEQ ID NO: 127516 - protein, 339 aa, unidentified
MAIITTIGLDLAKRYFQVHGVDKQGKVVLKKKLSREGVLSFFGNLPPCLVGMEACGGSHYWAREIGKFGHTVRQISPQFVKPYVKSNKNDANDAEAICEAVSRPSMRFVTTKSIEQQDIQALHRIRDRLVGNRTALANQTRGLLLELGIAMPQGIRHLRTMLPIIIEDLDNNQTLLEKDYLSDLYSELVELDEKVAVYDAKLAAICKQSAECMRLLKVPGIGPLSATAIVAAVGQAKEFKNGREFSAWLGLVPRQNSSGGKTKLQGISKRGDIYLRTLLIHGARAVAYRVSSGKDARSEWLRAVCDRRGMNRAVVARANKTARIVWAVLAKGEDYKEAA

SEQ ID NO: 127517 - protein, 430 aa, unidentified
MTTVQPAASNDEPAWFVGFDWGSEKHRVALFDRAGKLIERRDVAHSAAAYAELGDWLLRTTQASPAEIAVAIETTHGPVVDALIDRGFRVYAINPKQLDRFRDRYSVAGAKDDTRDADTLGRSLRTDPEAFRVLSPDNPLIVQLREASRTAAELTRDLGRLTNQLRDLLWRYYPQMLALDDNLAAPWLLELWQHAPTPAKGARLHKETVARILKTHRIRRLDADQVRTVLREPPLPSAPGVTEAATGHIRLLLPRIRLLNSQIKVVHAEIDALCQQLAGPQTIEPGESVPGQSIEQRDVAILHSVPGVGRIVGATLLAEASEPLRRRDYHAIRTLAGQAPVTKRSGKSCFVQRRLACNKRLAYAMYHWARVAVVCDPRSKQRYAALRARGCSHGRTLRSVADRLLKLLCTLLQRQVSFDPNHNAKEAAAG

SEQ ID NO: 127518 - protein, 482 aa, unidentified
MGHVGDIGESVATDIPFERVSTTTYLNQRDIPIEIMEDVMAKFKRSKLELIHPNAAGIDIGSASHFVAVPPDRDNKPVREFKSFTADLNGLADWLEACEIDTVAMESTGVYWIPLYELLESRGLTVYLVNARHVRNVSGRKSDVLDCQWLQQLMSFGLMSGAFRPKDEICALRAISHQRDMLIRYQARHVQHMQKALAQMNIQLANVISDIVGETGQKIVRAIITGERDGHILANLKSNRIRAGKDEIEKSLVGNWREEHLFALKQAMSLYDAYSERLTECDRQLETMLAVLQVHKVEICQKKRRSNVKNAPKFDLRAHLIGMCGVDLTRIDGIEVMTAMKVLSEVGADMSRFKSAKQFASWLGLCPGTKISGGKVLSGASKRTANRAAQALRMAAVSLKSSQSALGAYYRRLCGRLDKAKAITATAHKLARLIYTMLTKGTEYVDKGQEYYEERYRQRVLHHLTVRARKLGFNLTPVPEAT

SEQ ID NO: 127519 - protein, 408 aa, unidentified
MYYLGIDISKKSFTASILDEEGEAITKVLTFPCTRKGMERLVDKISSLKLKKSEVVIGIEATGNLWENLYSFLEGYKVIILNPYQTRKYHQVLSKKAKTDKVDSLVIAGLLRSKEALASYVPEEEVQVLRELVRLRHHLQKDKKNYLRKAYNLLNLVFPEYTDLVKSPFKKVSSMILKKYPTAIHMARARKTDLIKMARKIQGNNYSSELAEKLIQAAKESIYSGKASEVRGMALRIIIDEIQFLKNKIKEIEDKIEEILSFNNEPSSPQKRLLGIPGVGPKTVAAFLGEVGGDVTRFSSANKLIGFIGWHPRISESGEKKNLHPKMSKKGPSALRASLYMAAVASLKHNPYLRSLYHRKISEGKESKQALICVGKKIISIMYSMLKYEADYDPQRIFFQFEKEQVLI

SEQ ID NO: 127520 - protein, 469 aa, unidentified
MQEKKYTSKQSNDKCKTTGTINCTPVLHPNAAGIDIHPTTIFIAVPPGRDDKPVRKFNTFTADLLEAIEWMKHCRVDTVAMESTGVYWIPLYQLLSDHGIEVYLVNARHVKNVPGRKTDVSDAQWLQYLHSVGLLRGSFRPPQEICALRSIARHKDSLIKIGAIHIQHMQKALDQMNLHLHHVIDDIVGVTGLAIIEAILAGERDLSRLADLRHPKIKSSKSVIKKALKGDYRSEHLFVLRQSLNSWKQIQKQIAECDLEMESVEKQRQAESHPQPVALAPHPRRKISKNQPKGEWQNLLAREFGVDLTAIPGIHTATVQTLYTELGSDWRAFPSAAEFSSWLNLCPNYGLSNDKIVHRQTKRGHKRLRVALRMAALSLHRDQSPLGDEYRRRRAQLGPTGAITALAHKLARILWHLVTHKVPYDSSVFWEAAEKYKQRYKRNLIKRIESMGYRVSENPTAPALALGVP

SEQ ID NO: 127521 - protein, 393 aa, unidentified
MPVTREGPDLHGLVTVLSAHSVPAKPFMQGYGEAGMAVTGGTRRIVGGVDTHKDLHVAAVVDEQDRVIGTRSFATTRQGYRQMLAWMRSFGELQRIGIESTGSYGAGLLRFMQQAKVVVLEVTTPDKQDRRRRGKNDDLDAQNAAHAAFAGQRTVTPRSRDGMIESLRILVACRKTAVSARRVALQMIHNTIVCAPDGLRDQLRSLTRMQLVRTLASWRPDLTAYRDLDSAYRIGLKSLARRYLELHDEIADLDVMIAAIVDELAANLVARNSIGHIGAAQLLLTAGDNPERLRSEASFASLCGVSPVPASSGKTVRHRLNRGGDRAANSALHIIAIGRLRTDQRTKDYVARRIAEGHSKLDAIRALKRYLAREVFTLITQRRKEINATRIAA

SEQ ID NO: 127522 - protein, 316 aa, unidentified
METQEVSFPQIVEVGCGIDVHQAVIVATIRRSDQSYETRTFEAYTSSLKELRDWCRQKGVTHIAMESTGVYWKPVYNILEEFFEVILVNARHVKNIPGHKTDKKDSAWLSKLLLGGLLKGSFIPPVEIRDLRDIVRYKKKQVQQVSSESNRQYRILEDANIKLGTVMQVGSVSAKKIIADLLEGVKDPVLLAKRVHGKTKASKPEIIKALEGNFREHHRFMMKAIQQSIEAKEKLIKELDAQIDLMVQKYSVEIDLLTTIDGVGRDSAIAIISEIGTDMSRFPNEHHLSSLGGMSPGNNESAGKKKALKLSRGINI

SEQ ID NO: 127523 - protein, 350 aa, unidentified
MTMVGGLDVHRQQITFDCIDSDGLVRWGQIRPATRKTLRAWLAEHCPDGDGEFALEGCTGWRYVSEELAAAGVGVHLGDPAEIAALRGPKKRAKTDRADARLLRTLLLEGRFPESWIPPAPVVEMRTLGRLYYTLMDERRAWQQRIHAQLFHQGCPPVTALLSAAGRDTLGRAELSAAGRQYVDTALRRIDELTAEIDPLRTQLVNFAQHQTGCRALQRHYGIGWLCAVIIWAEVGDARRFRSSDQLVRFAGLDVTVYSSDSKRSPGHLSRQGSPELRWAAFEVAKSASRRGSPDYAYYHKLAAKHDHKNGKNPTLAVERKVLRRCYHSLRELGEAALALPDTRPQQAAA

SEQ ID NO: 127524 - protein, 357 aa, unidentified
MTTLQKQSCMFVGIDVHKDTHTAVGISPYGEKLFEITVGNYNADFKKLTEKVEETKGILSPFVGLEDIRGYGERLSEYLYQKYPVYHVPSILVDRQRQNATHPEKSDSLDALGVAKVMIQSIDTLLPYTISQESKKAKQLKEISIDREDLVLERTRLKNQVHTLLYRIHNTEYAKMYKDPFSLKALRFWRNAKPKCDPFLLKTMRRKVRRLLDIHVEVTDLEKDMKTLLDAGGYTIQTASGCGMVLASTIIGEIGDINRFTSPGALSKYAGCSPRERSSGKKVRHVKSRSGNRRLNCAFHRMALSQISRMGNGLAKTYFKRKISEGKSKSQALVCLRRQMVNIIWMMLKHKTIYRNA

SEQ ID NO: 127525 - protein, 317 aa, unidentified
MEASPGLTFVGIDVSKRYWDAHLLAGARQFHLDANEQGLKQLLAELPAPGSCLIVVEATGGLERPLAAGLVDAGHTVAVVNPRQARDFARSTGLLAKTDRIDARALASFAEKVRPRPLEKHPEKQGDLDALVTRRRQLVQVRSAERTRREQTTSQEVRKSIDHLLDVLRKELKSLDAAIAKLIEDHDDWRHKMELLKSVPGVGNVTSATLVAELPELGKLNRQEIVALAGLAPFNRDSGQFRGTRSIWGGRASVRCVLYMAALTARRSNPVIRAFAERLQKAGKKPKVVLTACMRKLLTILNTMLRTNTAWQPKNAL

SEQ ID NO: 127526 - protein, 373 aa, unidentified
MKKNITETPKMSRTKRLSRGQLTGSLTAGIDLGDRTSRYCVLNQAGDVVEARAVATTRKDLTRVFGALRHSRLALEVGTHSPWVSRHLQALGHEVIVANPRRTRLIAESDNKHDRVDAETLARLARADAKLLFPIRHRGEQAQADLAVIRVRAALVEARTRAINTARGLTKSFGERLRKCDAQSVDERLAEDLPPAVQTVVAPLLAQTRELNARIREHEETIQKIARERYPETALLTAVHGVGVLTALTFILTIDDRSRFARSRDVGAYLGMRPRRRQSSGSDPALGISKAGDRYLRKLLVQGAHVILGRHGADSDLRRFGRKLAERGGKGANKKARVAVARKLAVLLHHLWVTGEVYEPVHHTRTAPVAAAA

SEQ ID NO: 127527 - protein, 366 aa, unidentified
MKKTSTVRVNKNTIFKGHKLTIGLDLGDHWSCYCVLDEAGEILLEQKVAMTPEAMKQTFERIPRSLVALETGTHSPWLSRLLKELGHEVLVAHAQKVELISKSNRKDDRHDARTLARLARIDPELLGPVRHRSAKAQIHLTVIRARAELVRARTALVNAARGLVKSYGQRLPKCGTRQVSRELGAGLPAELREVLEPLLKEIESLNERIKEYEVRVEKIAKESYPHVELLKQVKGVGTQIALTYVLTLDDPQRFAKSREVGCFLGLKPGRRDSGESQPEMHISKEGDRYLRTMLVQGAHYILGPFGEDSDLRRWGLKLAARGGKSAKKRAVVAVARKLAVLLHKLWVSGEVYEPLRNSQKAIRAAA

SEQ ID NO: 127528 - protein, 364 aa, unidentified
MDVHTTNYTLCCYSMEDDRFFAEVQVEPDAKNILKYLARIEKQQSRDCRIVCGYEAGCLGYSLYHQLHAHGIDCVILAPTTMMTKPGKRIKTDRRDARLISKCLAFHTYSPVYIPTEVDDAVKEYIRMRDDANSALARVKQQIIAFCIRHGKIHDGKSYWTNKHLEWLSSLDLGNKILSEVLQEYLIRYYQLREQVDMYDMRINELAQAEPYRQKVEKLGCFRGIAAHTALPFCVEVGDFRRFATAQQFASYLGLVPGECSSGDKQQYTGITKAGNSHLRKLLVETAQVFGRSATKSGKSVALKERQAKCDSLTVAYADKANARLKKKYFKIVMRSKVNIAKTAVAREMACFIWGMMTDNISCA

SEQ ID NO: 127529 - protein, 415 aa, unidentified
MNHPKMRYTYVGCDSHKDTHTAVFLDCFFEKLGEITFPNLPSEFGMFLSKAEEYKLDGTEFLFGLEDVSAYGRTLAVFLMNHHQQVKHVNALLVARERKNQNVVEKTDSIDAQCAARVLLSKFHELPNADIQDKYYILRTLVIRRDFIVKNNTCLKNHLHSLLTPHYPNYRAFFPNIETQSSLAFFMKYPSPSTLNHTTHEELTDFFKEKSQGKVGAEKAREIIDHLEDTTVQFQEIRDMAVQSTVRQIEFNLQEIERIETTMSIFLDKFDCTLLTMAGINVVTAAQLLSCIGDIKKFSTPAKLARYSGVAPITQSSGKKELQFANQRGNRELHSIIYKLAVRISMTVGCTNKAINPFFYEYYHRKMSEGKTKRQAIKCVERRLVTILWSMLTHGEEYINPPMYDVPKNKKKSEK

SEQ ID NO: 127530 - protein, 419 aa, unidentified
MNSVGIDISKGRSTVAVMRPFGEVVISPFEVRHTDSELSELARQLKSLDGETRVVMEATGNYHASVAKLLHDAGLYVSVVNAKLVHVYGNNDLRRVKTDKKDSVKLANYGLDRWLTLTRYVPEEDTRLLLKNCYRQYRQYSKVQTVLKNNLISLLDTVFPNVNRLFSSPIRGDGSEKWVDFVAEFWHCRCVSEKSQKAFTNKYQRWCRKHGYNFSEAKAHTIHAEACGHIDVIPKSETTKLLVEQAVAQLRATSTALAALKHEMQSLASQLPEYPVVMDLFGVGPTLGPQLIAEIGDVRRFYSKKALVAYAGLDAPPNDSGDVIGRHKSMSKVGASSLRRTLFLVMSKIGASCLRRTLFLVMSVYLQTAPLDEPVYQFMDRKRAEGKPYRVYMMASANKFLRIYYATVKAYLESLEQTA

SEQ ID NO: 127531 - protein, 354 aa, unidentified
MYSPYVSVGRHIVFSFNPNSCRGIQARIFARLGTENMVNESFVGIDVSKQWLDLGWEPAGQAERLAHDEVAIAGLCERLAQERPTLVVLEATGGLETHLASVLAAAGLSVAVVNPRQVRDYARACGRLAKTDRIDALILAAFARAIRPQVRAPKDDETLELGALLARRRQLLDMRVQERLRLERASPVQRDSIKEHIAWLTERIARLDTDLMRRLRSSSLWHEQEDLLKAIPGIGPITRVTLIALLPELGKLNRREIAALVGLAPFNRDSGQHRGERVIWGGRAQVRQVLYMAALAATRSNPVIRTFYQRLRAQGKPAKVALVACMRKLLTIMNAMLKHNTPWNPNTLDLKHSC

SEQ ID NO: 127532 - protein, 391 aa, unidentified
MVCVGIDVAKDKHDCFIISSEGEILADVFTIPNNAEGFDTLLQAIRRSTRPEDKIKVGLEATGHYSYNLLGFLLDNGLTTYVLNPLRTNLYRKSLSLRKTKTDRVDARTIASMLLSDAGLKPYTDTAYHNEELKSLTRYRFDKVKERAKLKSSIARLVCILFPELEKLVPSLHIASVYALLEAFPGAKQVANTHLTRLKALLETASNGHYKRDMALKIRNAAKNSIGSQMPAKSLELQHTIRLIRELDREIDEIEEQIQSIMDELHSPITTIPGLGFRMAAMILAEVGDFTRFDSPDKLLAYAGMSPSTYQSGQLKNCYPHMEKRGSRYLRYALYNATKYVCHWDPAFADYLAKKRAEGKHYNIAISHAAKKLVRLIFAMEKSRQPYCSAA

SEQ ID NO: 127533 - protein, 354 aa, unidentified
MKRTTKHVALDVHQATTIASVREDSGRVIARTILPTEAGPIVEFFRGMRGAIHVAFEEGTQAQWLHDLLDPLVQEVVVCDRRGEARRGNKGDQVDADALSELLRRGSLRAVYHGSAERATLKELTRAYQNLVEDATRVMLRLKALFRARGIPAPGKRVYHPAERAAWLARLTNRGARCRAEALYAQLDPLRALHPRVKAAMVAEARRDPAWGLLQTIPFYGPVRVALLLATMQTPWRFRTKRNLWAYAGLAVVTHTSAEYLLVAGRPVRRRRAPLTRGLNRNYNRVLKNVFKGAATAATAQPGPFLDFYQGLLARGMREELARVTLTRKLAAVTLRRWKKGERFDPTKLTVQAR

SEQ ID NO: 127534 - protein, 324 aa, unidentified
MMYVGLDVHKRVCYGTIMSERGEIVREGKFSKDPRCLDEFMENIGEATVVMEAGYCWQPVYEWLEKDGYEVKLAHPLETKAIAKAKVKTDKIDSKILAHLLRADLVPESWVPPKEVRELRSLVKHRAFLVRTRTKLKNRVHAELDKRDIDLKIPLFTRRGRELLKCLGIDAVNQLLSVMEVLDVQVREVSAEIKNLVKESEDAMLLTTIPGVGYYNALLLVAEIGDVNRFPDSEKLCSYAGLVPSVSRSGKKAVYGPITKQGSKWIRWALTQSVHAHVRHDTRLSRFYHRLAGRKRKQVAVVATARKMLKVIYWMLKNREEFHP

SEQ ID NO: 127535 - protein, 384 aa, unidentified
MGEAQGRGPPWSPNGIDVPEWRCSVTTRGTGGSTMNVTTYGLDLAKRVFQVHWVEPETGELKRKALSRSDVSVFFARRQPGVVAMEACGSAHHWGRRLRDLGHEVRLIAPQFTRPFLKTNKTDVADAEAIWEASQRPGMRYVALKSEEQQAVLSLHRIRAQLIKVRTMQANQVRGLLYEFGMVVAKGWRVLLAEVAPVLAEGGRGLVPELVRRELLTQVEGLRMLTSRIHELERQIGAWQRRETECRRIAQVPGVGQLTATAVVAMVGDARTFRSGREFAAYLGLAPRQWGTGGRVRLLGISKRGDPYLRTLLIHGARAVVLQQSRADREQDPWLKELLSRRPKNVAIVALANKMARTIWALLAYGREFDRSWSRAQMPAAAQS

SEQ ID NO: 127536 - protein, 464 aa, unidentified
MERSIGIDLGVTSSSRIAVADGARIISNRRVRSTPEALTRAIRDACGEQPVDIVVESTAMAWFVAAVAAERAGIEHTLYRVSGRKAAALRAFYRAHTKSDRIDAPVLARMPRVDDALHAFTLPSAAELALKRLVSYRQRLDQEAIRAVSRVRSLLHWAAPLLLPASGGTNPALLRVLRRWPDLRKLASAHAPSIARQGGISVTRAREVRECARDAVRFYAERVDYALLALELEIGLAHHATLQEQLERLHAVIESEYARQYPNDVLRSIPGVGHVVGSVIRATVGDARNFTNASAFRAYTGLTPREDSSGDRQQRGRISKGGPSLLRWALYLAADTARKHDPQLAALYRRLMEERGRHHNQATCAVASHLADRIYAVLRENRPYQPRDLDGAPVDNAHAKRIAASLAVTPETRKRLRAINKRENRGSREPDSRQPRVTPHGTARPSPHSLPTAQPSTPTGVDTG

SEQ ID NO: 127537 - protein, 346 aa, unidentified
MMIIGCDFHPSWQQIAWLDTATGETGERKLVHASGEAKKFYRQLAAPVLIGMEATGNSQWFVELAEDLGHEIWVGDAAQIRASYVRKQKTDKRDAAHILKLMVEGRFPRLWTPDREQRDLRQLVVHRHKLVEIRSRVKNELQHLSLNKGMQKQNKLWSAAGQKLLRELALKPWAACRREDLLGLLAMLNQQIGKLDAAVQHAADEHPQAQLLMTQPGVGPNTALAYVLTVGDVSRFPRGKQVASYLGLIPREHSSGGHQMLGSISKQGNRLLRSLLVEAAQIAVRFDPGMKKEYLHRCHQKPKGVAKVAAARKLAVRLYWMLRTQVAYPEIVRIESSPRVALVGAS

SEQ ID NO: 127538 - protein, 390 aa, unidentified
MNSVGIDISKGRSTVAVMRPFGEVVISPFEVRHTDSELNELARRLKSLNGETPVVMETTGNYHAPVAKRLYDAGLYVSVVNAKLVHGYGNNDLRRVKTDRKDAVKLANYGLDRWLTLPRYVPEEDTRLLLKNCYRQYRQYSKVQTVLKNNLISLLDTVFPNVNRLFSSPIRGDGSEKWVDFVAEFWHCRCVSEKSQKAFTSKYQRWCRKHGYNFSEEKAHTIHAEASGYIGVMPKSETTKLLVEQAVAQLRATSAALTALKHEMLALAAQLPEYPVVMGMFGVGPTLGPQLIAEIGDVRRFYSKKALVAYAGLDAPPNDSGDVTGKHKSMSKIGASSLRRTLFLVMSVYLQNAPLDEPIFRFMDKKRAEGKPYRVYRVRPGFQRRTIRSQ

SEQ ID NO: 127539 - protein, 346 aa, unidentified
MVEYIGLDVSKEMTSYCVKSRQGKVLARGKVETDPDALFKALKKHCLCPERIILETGTLSHWLGRELCRRGLPAEVIDARHAHAIMRMQHNKTDENDATLLAELARTEFYRAVAIKNEAAQKQRILLKARSHLVGARQSAQNTIRGLMGGLGIRFAKGSGTFVRRVREILQGHPDLALMIDPLLAHVEAAEREIKKLDRLVTAHAKADPACRLLMTIPAVGAVTALAFVSTVDEADRFGKSRSVGAYLGLTCRRNQSGEMDYSGRISKKGDKMLRSLLYGAANTLLTRSRRAHPLKTWARQVKKRTSHKRACVALARKLAVIMHTMLMTGEAFLWPAVNAKEKAAA

SEQ ID NO: 127540 - protein, 339 aa, unidentified
MDHVAIDLGAKKSQICVRGADGQILEEKRWPTMDLDTYLAGRPTSRVIVETCAEAFCVADAARKLGHETRVVPATLVKTLGVGARRLKTDLRDARALSEVSSRIDLPSVHIPRTESRDRKTMCGMREALIGARTKIINTVRGWLRSRGRRIERGGKASLRKRVEAAWEGQLPSYVDRQLKLIEVLNTQIAEADAEVKSWATADETCTRLMTVPGVGPLTALRFVAALDDVARFESAHQVESYLGLVPGESSSSERQQRLSITKAGPRALRWVLVQAAWALHLRCRRPEAIPLQLWAHRIEQRRGRRTAIIALARKLAGILFALWRDGSIYEGSRGAKMI

SEQ ID NO: 127541 - protein, 435 aa, unidentified
MIDTILPGFAALDLGATKLFAATAETPVKVFGTFTGELRALCAWLEQHQVRAVAMEATGVYWIPVHDLLQAQGFKVTLFHGAHARNLPGRKSDVSDCQWHAMLHSHGLLRACFIPAEPIRKLRSFYRLREDHLSMAGAHIGHMQRALDLMNVRLHHVLSQLHGVSGLRVLDAILAGERDPVVLSLLCEAQVLKKKKAQVVASLEGDWQEHHLFALRQALEAYRFYQVQISACDGQIEALLHALTAELPVQAPRPGQKIKIVRHNAPAITNLHGQLLTLAGGCDATLVPGLSPLGWMKLTGEVGTDLSAWADENHFTAWAGLAPQRHQSGRRRRRLPRPKPVVGQIFREAVLSIAKSKHLALGGFYRRIKGRRGAAVAVVATARKLAVLFYRAMTRGLEYVERGLAEYEAAYRKQSERHLRKMAARLGFTLQPKTT

SEQ ID NO: 127542 - protein, 354 aa, unidentified
MASMPPQLDPVSRVVVAGIDTHKDLHVAAVVDTDGVVLGTESFSTTRAGYRAMVRWLRTFGDVRKVGVEGTGSYGAGITRHLTEAGIEVLEVDRPDRADRRRRGKSDTLDAEAAALAALAGRRTSIPKRKDGLVESLRVLRLTRATAIRSRTKALQLLRMHVISAPEELRDQVRNLTRMQLLRTCACWRPDTIGFRDPVVATRIALKSLARRILELNDEIATLDELINPLVAELAPRLLARPCIGVEIAGQILVILGDNPARIRTEAGFAMLCGVAPLPASSGKTQRHRLNRGGDRQANRALHMAAISRMRTDDKTKAYVARKTAEGHSKLEIIRCLIGGLSRSRLVGRAVASR

SEQ ID NO: 127543 - protein, 360 aa, unidentified
MTTKPPSRHIVAGVDTHKRTHHAAVLDANTGKLLADHEFAATQAGYRKLLSWMGSHGTVIKAGLEGTGSYGAGLQRYLQAHEITVIEVSRPNRQDRRRQGKSDPIDAINAARAVLSESATTTPKARQGYVEAVRQIRATRRSAVKARRSALNQIHGLLGCAPERLRAKLSGYDRAALVLRCAQLRIPKDAALDDPTINARRMLRRLAKRIQMLDDEITEANQELDDLLTRNTPNLLAINGVGTEAAGQILTTAGQNIDRLKSEASLARLCGVAPIPASSGNTTRHRLHRGGDRDANSAIHLIIINRMRWHEPTKRYLHRRTEQGKSKKEVIRCLKRAVVRELFRALQADLNPSLDTLDAA

SEQ ID NO: 127544 - protein, 412 aa, unidentified
MDVVYQRCAGIDIGKRTAKVCVRVQGRGSQPTVSTVTSWSSMMPQILKLRAKLVNEGVQRVVMESTSDYWRPFFYVLAEELDVILVRASDVKAIPGRKSDVSDAEWLADLAAHGLVRASFVPPQQQRQLRDLTRARSRLLADRAREVQRLEKELEDACIKLAAVVTDLQGVSARLMLQALIEARDDPAAMADLAIGRMRTKIDQLTEALTGRFNDHHRFMVTFRLKRIDAATADLAELDARIDALIVDAGFDPARDLLLSIPGLGPHSADELLAEIGPDMSVFDAPEQLAAWAGVAPGSHESAGKRKNAPARRGNRYVKRALGIAAKSAARKKTGFLAARFRRLAARRGYQKALVATEHSIIIAIWHMLSTGEYYHDLGGDHYHRLIPARIIRRKIAELEAAGYTVTHQVAA

SEQ ID NO: 127545 - protein, 409 aa, unidentified
MAKVFIGVDPHKLSATIEVVDERETVLATGRFDTDKAGYAAMRKTVSRWPDRVWAVEGSNGAGRPLAQRLLADGEHVVDVPAKLSARARLFDTGHNRKTDAHDAHAVAAVALRTQGLRVLSYDVELETLRMLADRREELTRARVQSVNRLHRLLSELTPGKSKKDLTTGQAKTILASVRPRDLAGKTRRRLAAEQLAELVVIEKKIKTITKELKGMVLAGGSTLMDPPGVGPVVAARILADVGDVARFADRNRFADRNRFVSWTGTAPLDASSGEQIRHRLSRAGNRKMNHMLHIAAATQARLDTPGRAYYRRKLAAGKTRMEAMRCLKRRISDAVYRQLLADTRAGQAGPVGADPGGHCGATQESSAVDLPPHIDTSDQPLPGPAQPTLQPTPRPRKTLIDRPLVPAP

SEQ ID NO: 127546 - protein, 340 aa, unidentified
MKLYCGIDLHSNNSYVVLLDESDKVIYKKRLDNEIDLILKELSNYREEISGIVVESTYNWYWLVDALEAAGYKVHLANTAWNVQYSGLKHTDDKDDAIWLARLLRLGLLAEGHIYPREERGVRELIRRRMVLVRQQTMCILGIQGMITRYENVRLSGDKIKRLKADEEKLLSYLKNEHVRIAVKSQLKILKCIMEQIDILEKIILAKIKEDPLFKLVMTIPGIGPILAMVILLETGQIKRFAAPGNYSSYCRCVESKRISNAKKKGENNRKNGNTYLAWAFLEAANTAIRRYPQIKKYYQKKLNKTMRVVALKTVANKLSRACYFILRDEVGFDMKKLFI

SEQ ID NO: 127547 - protein, 460 aa, unidentified
MSQSKRKNRKRNKAAAAQGALGSLIHPDAAGIDVGAEELVAAVPWGRSEGPPIRTFSAFTEGLHALRDWLLACKITTVAMESTGNYWLCACILLEDAGIEVCLVNARHVKGVPGKKTDVCDAAWLQQLHAAGLLRGSFRPQKEILPLRYLARHRGDLLAQAGQQVQLMQKVMTEMNLHIHHVFSDVDGVSAQAIITAILAGERDATALAALRDRRCRTPLETIKAALVGDYREEYLFVLRQCQARWQQLCESISQCDGEIARRTAAIGGVTDAPLPNAPATQRCIQKNMPNAMPVYEEAHRLLGVDLSGIPGISGGVLCTLMSELGCATHIREKFRSAEAFASWLGLCPDNRISGGRVLKAGTRKVSNRIANILRMAAQAISRSSDRMGDYVRRFKGRLGKAEGIVAGAHKLARIIWAMIVTGQPYDEAKAFKTSPGSLARRLKNLQNQAQSLNMKLVPA

SEQ ID NO: 127548 - protein, 392 aa, unidentified
MEVMIETCCGIDVHQKTIVCCILEGPLDTNKPKKSYKIFGTRTSELRKALEWLEENEVTDIFMESTGQYWVPVFNIFSEGNFNMILANPEHIKNVPGRKTDMKDAEWIAQLGRVGLIQNSYIPAPEVMELRLMTRRRQSYTQKRTQSKNELHNILQRSNIKLTGYLSNIFGKTGQALLQLFINGEVLTLESVGACLHGRVKASPKDILQAMDGKISLTDRRLLDDSLDEYQFYTRKIKKIEHDIEQYILSHFPLEYELLQSIPGVKQHSAAIILAEIGPSIEAFRTASHLASWAGLSPGSYESAGKKKSSRVTRGNKYLKTALITSGGMAGRSRDPAFGSLYHRISNRGTKIKAVVACGHKLLRIIYKILNDKVPYDEKRALGLRQQKLVLN

SEQ ID NO: 127549 - protein, 416 aa, unidentified
MNDQRDKACGADIHKNKIVATILSLSGTKNQSEFGTTLPELLKLKSWLIDNGCNVVAMESTGTYWIPVHSVLEDSMEVIVANPYMIKHIPGKKTDLIDADWLAELCLKDLIVPSRIFPKEARILRNLTRAREGLVKIRTRFKNKIHRDLSSSHIKLSSVVTDIFGKSGLHILRGMLDGRSIDDIIKSIPSNRVKKNADKIKEAIENNLDPGQIFLIESSLDLIGNVQDKINAIDADLKRKMSTKQKDLKIAMSIPGIEFTSAATILAEIGNYRNFSSPEQLASYFGIVPFVNQSADKLHNGCITKHGSPHLRWIMVQVAHAASKKIGSKLRKFYLRIRARRGANVAIVALARKILCILYHLLMNQEMYEEPGVAKKTRSIRIDQSSSQREFTAQEMIDILRKSGYQIRKMDSGACG

SEQ ID NO: 127550 - protein, 342 aa, unidentified
MRRPKYYVGIDISSASFTAATGTMPWKVVIKAAEFENTTDGFVAFMDWMKERSILADNAVLCMEATGVYGEKLAYYLYANHYRLAVEPPLKVKRAFMPHGHKNDRVDSQQIAEYSCRFYDELRYWEPKEELLEQIKVLLATREQFTVQKTTHQNILKALKRKVVATPLAEQLHQQSIRQIKQNIKQIDAEIQRLIDQDPKYGQMIKLLMTVPGVGLLLASNILLMMETTPDDPTNPRQLASYIGISPYECHSGSSVYRPASSRHYGPAMARKLLYLASLSVRTHNQTFKKYFLRKVAEGKSKKLVLNNIANKLLKIMCAVVRTNTPYISNYRSVHPSLLLNP

SEQ ID NO: 127551 - protein, 367 aa, unidentified
MKQITTYVGIDAHKKDLFIAMLVGTEAAPVSWTVPNEPTAVRRLVRKLERDAPGPVRVFYEAGPCGYALQRQVTTARVSCDVVAPALIPRKPGERVKTNRRDARKLVELGRAGLLTAVQPPTLEDEAVRDLARARDDAREDLQRCRHRLGKLLLRRGLHYAGRNWTRAHRQWIDGLAWTHAAERAVVDDYLLAIDHTEARLLELDARLAEIAARDPYREPVGWLRCFRGIDTLTAMLILAELHDFRRFASAPALMAYLGLVPGEDSSGEKHRRGRITRTGNALVRRLLVETAWHYQHRPSVGVALTRRRKGQPGRVIAIADKAQQRLCRRFRKLAAEHKPAPKIAVAIARELAGFLWAALQPVPVAK

SEQ ID NO: 127552 - protein, 436 aa, unidentified
MFVGHRFRTDPDELDTLWARLPNDAERIEVVMEPTRNAWVALAAWFRRHGATVVMVPPEQSADLRDYYNKHTKTDRLDSKVLARLPLLHPEGLHREDSLGPGDELKRAVKIRSGLVHRRTACMARLDALLEILGPAWIAALGSDMTLTALRFLARYANPVQVKRLGKARLAAFFRRSSRQAWADERADAVIEAAATTLRLWGTDGGELDFDALAADIAAEARLALTLTDEINGFDKRIGALYDKADPAGIVRSVPGAGRVCAPQILGRLGDPTRFANLAAVRSFAGLVPAADSSGQADGHRGPTKAGDSCLREALFIAADHARKVDPTLAVRYQRLMLAGKHHDSAVCTLAAVLLTRIAACLRAGTHYLLRDTDGRVITEAQGRAIVAERYTVPPEVRAARRKVTPHRHPRRNERNERAKTGVATRSKASPVPQPA

SEQ ID NO: 127553 - protein, 337 aa, unidentified
MKAKKYTYFIGVDISARELDWAVSSGKDHLFHRKTENSAEAVNIMLAELKKIPGLMLSRTVFCMEHTGIYGNHLCAALQRCRANFAVESATHIQNAIGNPRGKTDKMDAMRIADYAYRNREHLRFWAPKRLVVQQLGQLNALRKRLQGIQHILKVSLKQQQGFMAEGQIRQHSGLCSQTIGALDQDVAEINGLIEKTIAGDESLSRLMKVITSVSCIGPVTALNIILCTNEFKDFNSPRKFACYAGIAPFLKESGPQKGKARVSPMANKYMKSLLHICAVRAKINVPELKAFYERKVNAEKKHKMSVLNAIRYKLVLRVFSCVKQDRLYESRYQRPG

SEQ ID NO: 127554 - protein, 428 aa, unidentified
MEVVHRRCAGLDVSKKDAKACIRVQGQGRRGTSSTVTTWGSTTNEILALREHLLAEQVSCVVIESTSDYWKPFYYLLEDAVPVMLVNAKAARNVPGRKTDVSDAAWLADLGAHGLLRASFVPPEPIRVLRDLTRARTVITRERTKEIQRLEKLLEDCGIKLSAVASEILGVSGRAMLEALIAGQRDPAVLADLAQRGLRKKIPALTEALRGRFNDHHAFMARLYLDRIDAHNADIARLDDRIEEAIAPFRPARELLMSIPGWSAIVANVFIAETGADMTVFPTAAHLASWAGVVPGCNESAGRIKSASIRPGNRHLKAALGVAALSAARSKDTYYSARYRRIAGRRRPLQKRKNTNQRSAPAGQIAQVAIEHKMLTDAYHMLLNGAFYNDPGPDYYTRHHPGKTKAKAVKQLEALGYHVTLEPLTDAA

SEQ ID NO: 127555 - protein, 347 aa, unidentified
MSEYAGQQFVGIDLHRRRSVLVRTTESGEVLGATQILNDVDRLNAVMERAGESPEVVLEATYGWYWAVDALQAAGAQVHLAHPLGVKAFEYRRVKNDLRDATDLADLLRMGRLPEAWIAPPATRELRELVRHRAKLVGLRSHCKAEIHAVLAKCGIQVVMSDLFGPCGQDLLDRCPLPGPYAARVESLRRLIDDLDGEVDLFARLTRGRLAADPGYTALQQIPGIGPVLGAVLLAEIGDVSRFRTAAQVACWAGLTPKHHESDTKVRRGRITKQGSRLVRWAAVESVKVLGPSTVVGAFKRQVADRRGKNIGTVAAARKQTEFAFYALRDHHVRALHRPRPPEGAAA

SEQ ID NO: 127556 - protein, 334 aa, unidentified
MSNVTTVGIDLAKNVFSVHAVDGRGVVVLRKSVSRARLLGVVAQLPTSVIGLEACSGAHEWARRFSGFGHTVKLMAPKFVAPYRRSGKNDSNDAEAICEAVSRPSMRFVPMKSVDQQAVLTLHRVRLGFVEERTATINRIRGLLAEFGVVLPQRVVEVRRGAAATLDQLPALAARALSDLLAHVRVLDERIGEYERVLEQHARRDERAKRIQQLSGVGPISASALVASVADAHEFKNGRQFAAWLGLTPKQYSTGGKTRLGRITAHGDAYLRTLLIMGARSMLQTALRRTDRLARWALGVRARRGYHRACVAIAAKHARIIWAMLAKNESLKLT

SEQ ID NO: 127557 - protein, 471 aa, unidentified
MSCKECNTRNQSKQYRKRKGRAMPKNLSVVNPDAAGIDLGAKTHYVSVPEDRDPEHVRHFGCYTPDLEAMAQWLLACDIKTVVMEATGVYWSPVFRMLESKGLEVLLVNPRHVKYVPGRKTDVSDCQWLRQLHTFGLLRGAFVPPQIIAEMRTFWRQRRMLVDSAARSIQHMQKALTQMNLQLHVAISDISGVSGMRIIRAIVDGEHDPAVLSRMADPRIKASQKELVAALSGHYCQAQLFALKQALECYNMHQKQIYECDKQLEQFLGQFESKANPVDLGAHPKRSKGTKRRKSDPHFDLRTELWRITAVDFSRIDGIDCNTAFCVLSEIGFTVDAFPTEDPGVAWLGLCPNNQITGGKVKQRRTRKVANRAAAALRVAAQSLWHSESYLGAYYRRLASRIGSAKTITACAHKLARILYRCLKYGFEYVDKGQEHLEQQHKERTLKILKKQAAKHGFMLVDIETGECLCT

SEQ ID NO: 127558 - protein, 355 aa, unidentified
MESVKYIGLDVHQSTISVAVVNGEGKLTMQSVIATRASAVVDLLKGLRGMLHVTFEEGTYSAWLYDLIVREVAQVVVCNPRKNALLKSGNKSDQIDARKLAELLRAGMLSPVYHGEQSTRILQQLVASYTALTEDTGRAMRRIKALYRSQAIACAGKKPFGKRHRGEWLARLNDSGQRRRAEWLYQELDAVQILRREAKQAVMVECQKNPAAKFLRSLPFLGPLRAAVLIARVQTPHRFRTKRQFWTYCGLGLETRSSADYVEQDGQILRRRRPVYIRGLNWNYSHELKNVFKSAATTASVMDGPFRAFYESRIANGMLPAMARLTLARKMAAIALILWKKGETFEAEHLKPQTA

SEQ ID NO: 127559 - protein, 418 aa, unidentified
MKPWNELTHFAALDWADDHHDLVVVDAKGQIALELTFPHTAEGWQQAQEALAAWPGLPVAIETSAGPAVDQLLQRGYAVYPVMPQAAARYRERKRPSGSKDDRHDAWSLAEALRTDGQGWRALSPLDPLTAELRALCRDEIALIEQRTALVNQLLAALKEYYPAALQAFEDWTAPYTWAFVLAFPTPEALAQAGQRKWEKFLHTHKLWRPQTAPERLKTFAQARAFKGSPAITAAKSLLVRSLARLLQTLEQQLAAYRARIADLFAQHPDCALFGSLPGAGTKLAPRLLAELAGSNWAEVSQVQARAGTAPVNYQSGTLQRVRIRRACTLPLRATLHLWADLSRRYSSWAAAYYQAHRDKGQSHACALRCLAHRWLEIVSAMCRTRTRYDAEQHLREIQKHGSWVLRLLPAQARTQPL

SEQ ID NO: 127560 - protein, 429 aa, unidentified
MNCTQNKKIEQVKETTMIVGIDVGSEKHYFRAFNWRGIELTRKPVAFSNSMEGFNSFYNTIVELMQKSELEEALVGIEPTGHYWFDLGQFMGEKDIKFVMVNPHHVHKTKELDDNSPSKNDRKDPRVIAGLVRDGRYFYSYMPTGAYAELRNASNRRFVLVEEQTRAKNRLQKWIAVYFPEYKGIYTHIDAKGGMLVLKKAPTPEEIVRLGVEGIIKIWKDAKLRGNGHKKAMLILAAAMRSIGLKAGLTEARMEIQDLIEDYELQTKRLERVNDLIKGLCQQVRYADKLLEIKGIGITTVAGFIAEVGDITRFDSTKELQKLAGLELVADSSGKHNGKTKISKRGRKRLRYLLFEAAISVVGKNEEFKEIHRYYTTREKNPLKKMQSLIVVACKLIRVFHAILTKGIRYDASKMLKDIRHQGEQLKAA

SEQ ID NO: 127561 - protein, 387 aa, unidentified
MLQVNDLSRSLAAFDPISTLVVVVEMSKASWLVRSVVPGVERQPLKKLEPDAMALLRLIERWRSEAVRAGRPISRVALAYEAGRDGFWLARWLIARGIEAHVIHSASVAVSRERKRAKTDRLDTAMLMRVFLGWLRGERGHCGMVAIPTMEEEDARRPSRERESLVNERSRIVNRMKSALARLGIRGFKPHLRRAPERLACLRTAEGTGLPANITEELRRDMARLALVREQISSIEKTRAERLERAPDTGPHAMVRLLSRVIGIGIETADMLVREILSRKLRDRRALARYAGLTGSPDESGLKSREKGLAKAGNARVRRGLIQLAWRFLMFQKDSALARWYRTRTEGPSGARKTTMIVALARKLLIALWRLATTGEVPDGVELRPAA

SEQ ID NO: 127562 - protein, 323 aa, unidentified
MTAFVGIDISKKSFDVYFEQQGKGSHLTLQQTESDYKILVHLLGRSRICVMEATGNYHIKLASYLYKSGIKVVVENPLKIKRFSQMNLQRTKTDKADSKMIYDYGKTVLSTKEVHAWMPDSTSISDLKQYDTVRHQLMKQQTSLINTQEALMGLTGLNKEVTKILKDMVDAVDQAIARLDKGMLKLVKEHHADSFELITSIPGIGPKSAMMMICLTDGFQKFQYHQVKQFISYIGMSPRTFESGTSVKGKAHISKVGNGRIRSMLYMCSWTAKHSNQQCAQLYERLAEKGKPEKLIKIAIAHKLIRQIFGVIKSGTPFSNEFA

SEQ ID NO: 127563 - protein, 427 aa, unidentified
MKAEYKTSGQEKRYIGLDVHKHYITVGGMNAKQEIVLKPRDVAMDRFKTWAEQNLRASDEVVLEATTNTWDVYDTVASLVKRIVVAHPAEVKQIANARVKTDKQDVNRLIRLLIADLVPEVWVPPVDVRQLRALISYRWRLVTPALAGGAREMATAIQNRMHSLLHRHNIPAPEGKVDTGENREWWEQLRLSELEDLRLKQEIRMLRRVREHIVEMEKELGRLSTGARWRDQAVYLMQIPGVGIIVTMTILSAIGDIRRFESPKKLVGYAGLGAGVHDSGQKHSDKGITKSGRKELRWALVEAAWQAIRANARLRAQYDELCKRKLPNQAIVAIARKLLVTLWYLLSKQESYDRSSDEDLAYKMLTWAWHIDQTALNGLTNQQFAKYGLLQLGRGEQLTRIVKGGVPRRIAPKEEVLALKPDLRPPH

SEQ ID NO: 127564 - protein, 425 aa, unidentified
MIPDNPCPTPSFAALIGLDWGDRQHAVALWTPDSQAPESFDLEHSPENVRRWLKQIEERFSGRPVALAVETSKGPLINMLFEVPWLSIYPIHPATSARMRKAFTPSGAKDDPQDALLLLGLLRDHLDRLRPLPPEDLLTRKLGALCELRRKSVDRRTQLTNQLRAALKGYYPQALELVGDILHSPLALAFLKRWPDLIELKASRPSTIKTFYYRHNLRRPEAIQKRVDRIAQAVALTVDEAVVSAGRREVARLIEELAVIQKHIRQDEKLIAEHFAQHPDAPLFRELPGAGAALAPRLLVAFGTDRDRYPSAAALQRYSGVAPVKEKSGNRVWVHWRWNAPRFLRQTLIEWAGQTVLYSQWARAYYQQKKEHGKHHWSILRSLAFIWLRILWKCWQTNTPYNEERYLEALRRQGSPLLQSMSKSC

SEQ ID NO: 127565 - protein, 429 aa, unidentified
MQNESTPGARGPVFCGVDTHADSHWLCVLDWRGRKVLSRQFPADAAGYEALAGAIAAAGEPACVAMEGTSSYGAGLTRHLASLGMPVREALSPARMQRRRPGQGKCDEADAERAARAAMSGSKLGTPKSQDGWVDGVRCMLAARSGAVKARTSAINTARSLLTTAPEGLRSRFRGMGGPRLMEELPSVRAEGALGAALGALADLWAAARDAALDMERAIEASLEENCPALLAMYGCGPVSAAKLAVAAGDNPGRLRSEASFAAICGACPIPASSGKTVRHRLNRGGDRQANSALHEIARQRVMRDPETAEYAERARARGKSDREVMRCLKRYVAREAYRALMHPHEIRRPGDASGLVAARRAARVSQVRAASILGTSEKYISMLERGQRELKPIRRAYEAWVEAGLPLDWDRQAFEAERKFDSKKHLAK

SEQ ID NO: 127566 - protein, 336 aa, unidentified
MNKFKQIIGIDISKHTFDATFLQVSNSETRHEVFAQNEKGFTAFLKEVQHAGVATEETLICLEHTGMYIHPLMDALKICKCFVWVEMPLRIKRSIGLHRGGDDKLSSLLIAQYALRYQDQAIAWVVEDSFLQKLRYFTAQRERLLTSIKQLQVPLKELQEIGMKDLSVLLTKTQKKVIKELEIAVKNIEQQIQGMLKDNEEAQKVIQRVCSLKGVSTQTAINLYVYTKGFKTFSNAKQLACYCGVVPFEKRSGISIRYKPKVSPYANKNLKRLLHLCAMSAIQCDAELKTYYQRKVAEGKNKMSALNAVRNKLVLRIFAVVRDGRNYEVNRPYKCA

SEQ ID NO: 127567 - protein, 355 aa, unidentified
MKYYTSTTEYNCGIDLHARQMYVCVMDRQGKKLVHTNIKNNDFQFFLNLITPYRHSLTVCCECMFGWYWLADACQAAGLSFVLAHALYVKAIHGGKNKNDRIDSEKLTHLLRSNLIPPAYVYPAEKRPLRALLRQRIFYVWRRAELLARIHSHQLAHNRTPARQTRRVRDQWEEQLLKAEDHPLRQLALQNDLAMIRHFDQQIFALEEELQRQTRRVACRDYALLQTVPGIGETLGLTILHEIGEIHRFPTVKDFLSYCRLVKGTVASAGKIKGLRGAKLGNPYLRWAFGEAAIIAKRDHFRIRPLAQRLEERMGGNKFKANTVIAIKLARATYFMLKNKTVFDPERLISALAKK

SEQ ID NO: 127568 - protein, 425 aa, unidentified
MNNNFMSTLFVGIDVSSKTNVLCALDFQGNKLLNLKALNNQPGAESILDSILGCLNSNSLEYVVIALESTSFYSTHIANFLSSSEELLPFKPLVYCLNPKSVANYRKSFVDIDKTDPLDAFVIADFARCGRITSEPWRGAQFLALQRLSRHRLHLVECITREKAYMVSNIYLKFSELAILDKDEQPFSNTYGVTSAAVLTEFLSLDDITYSSIEDLVAFVSAKGKNRFSDPYETARLLQKAARDSYRLDKILYEPLNTSIASSFNLIKAFDAEIKIIDKAIEKTIKGVNPVEYQSLTSIPGIGPVLASGILAEIGTIASFGSHDALAKYAGLTWRVNQSGDYSSDDTRMTKTGNKYLRYYLIEAANSVRNHVPEYRDFYNKKYGEVTTHCHKRALALTSRKLVRLIFGLLTKNQIYSSSKVGEIQ

SEQ ID NO: 127569 - protein, 399 aa, unidentified
MMYQQFCGIDVSKDSFDITLLNSNGEIKLQDKLLMNRDGFNTLLKYLSSYSKENLLVAMEATGIYHLPLLSFLLENSFKCVVINPILIKSFIGSTTLRKTKNDKKDATSIALFSLKSYQSLHLATTDAIENIKPLIRERETLSKEIARLKTEIKAILTQLFPELSKNTNIFTRSILNLLLKAPSRKAIRNLKKQRIQKILDDTSGNKVRISADEILSLAKNSIAISDKYLEKVLTSKIRRLIYIQDELSFLDTELQNSLEDTDINNDIEILQSIPGIGSVTSKNFMIEVSSVEKFKSVKQLCAFIGIDPSVKQSGTSINYRGKISKRGNANLRRTIWQMAIGVIRSCDKFNAYFSKKREEGKKFKQAVIAVANKLLRTIFVLLKNKTKFDENLASGVSE

SEQ ID NO: 127570 - protein, 370 aa, unidentified
MSVYVGIDVHRKRSQVAVIDAKGEVLANRNVPNGVEPILKVIGGLPPGTPAALEAAFGTGWLVELLEDYGFDPHLVHPLRCKAIASARLKNDKVDAAILGQLLRADLLPEAWIAPPPVRQLRALLRHRVQLVRLRTLLRNRIHAVLADHGHDRPAGCWSGPGRAWMASLQLPAVSREVVDDDLALIDALETVIDRLDWEIHQRARSGPRVKVLTQLPGVGPFTALVILAEVGDVSRFGSARKLASWAGLTPTVRGSDRVAHYGHIWKAGLGVAAVGAVRGGADRQAVPAVRRRLPGHRHTAGEEDRHHRGRPQAAHPRLAPAHRRRARRSPATCRAPDSGAVTPPGGVAWPRVSSKICLSRAPARARRTD

SEQ ID NO: 127571 - protein, 341 aa, unidentified
MEHILGIDLHSDNGYYGIIEPDGKRVFKKRIPNDLPTVLTALGPYKGTITNIVVESTYNWYWLVDGLMENGYNNRVRLANPAGFSPYKGLKHADDKTDAFFLTELERLGILPVGHIYPKEERPVRDLLRRRMMLVQQKTSHILSFQSLITRQTGTSMSSNNIKKFEEDYVKEILDEEHLILAGETNISIIRFLTKKIHLLERAVLKKIKLKLEYEKLLTVPGIGKILGLVIMLETGDIRRRFASAGNYTSYCRCVKSKRISNSKKKGEGNRKNGNKYLEWAYVEAANFAKRFSPEAKKYYQRKMAKTNQIVATKALASKISKACYFIMRDQEVFKTEKIFG

SEQ ID NO: 127572 - protein, 359 aa, unidentified
MKDNIKDDKYIALDVHMETTVVCVLDAAGREVSTAVMATRADSILSFLQGLRGRLHVTFEEGTYSAWLYDLLEGRVAELLVCDPRRNALLQAGNKSDHGDAHQLAELLRAGLLRAVYHGSRSMRPLQELAHSYQALVEDTTRAMNRVKALYRSRGIDCAGRGVYRQAQRATWLSRLPEGPARLRAELLYDQLDHVGSLRRKARRALLAESRKHSACPRLREIPGLGPVRVALLMARVQTPHRFRNKRCLWTYLGLGLVTRDSSQFSLVEGRIVRRAKPVAVRGLNPNHQPQLKAIFKSAALAVIHRPGPFKDYYEQRVQQGHKPELLRLNVARKLAALTLSLWKKGGRYRAEAVKQRQA

SEQ ID NO: 127573 - protein, 419 aa, unidentified
MSCLTGPAGADPSDRKGSTIMTNEQHHVGGVDSHKDSIHVAVITGLGQPVDDREFPTTTAGYRRAVAWLIEHGPLAAVGIEGTSSYGVGITAAATGAGIRVVEVNRTRPAERRKQGKTDRLDAYRAARSVLSGEATTDPKAASIEPLRALSVTRRSAVKAQQAAWRQIGALLVNAPSQLRDRYRDLPDAKLIAALTSTRPDQVRDRGQSNTLHALRSLARRHRHLGEEIAELEQRMLTLATTANPALLAIKGVGAVVGAQLLITAGDNPHRLRSSASFAALCGTAPIPVSSGRTDRHRLSRGGDRQANAALHHIVKNRMTNDPRTRDYRDAHLAKGWTQKAVYRALKRAVAREVFAALTGHCAVPDYTDLRPARRAKNITLTAVATALDVWPARVGELELGRRRDDDFADRYRAWLTAA

SEQ ID NO: 127574 - protein, 419 aa, unidentified
MSFKILKNNCCGLDVHKTWIYACIGITDSLKRTEYKEARFSSFTKGLQELCDWLSKYNCTDVCMESTGKYWIPVFNILEKNNIWVTLSHPKYTKPQKGNKTDRKDAKWICDLYMCGMVKPSFIPPVDIRELRDLVRYRFKLTCMITGEKNRAHNCLTVSNLKLDDVFSDIFGKSSRSITEQILQHPGETFDVSPFVDRRCKTPIEEIQAAVDGAISNEQAVKLRQCLNHIDELEMHKAEIEREIFRLSDKYESVLNLIRTVPGFDKNPLTAIQVLSEIGGDMSVFPTAKNLVSWAGCCPRNDQSNHKIKSTRISRAGSYFKPVLVQVANALIKSKKHPEFTTRYRRIKAHRGHKKAIIAICRMILTAIWHILSDLKPYTSEGFLESRPVNKSKILTTSQALNLLKQRGYIIKDDVVPVT

SEQ ID NO: 127575 - protein, 320 aa, unidentified
MRNAVGLDISKLTFDATVIVGNAEYSAKFDNDSKGLNQFSDRLKSLGCQNLHICMEATGNYYEEVADYFAQYYSVYVVNPLKISKYAESRFKRTKTDKQDAKLIAQYCRSAQESELVKRQKPTDEQYRLSRMTAAYAQIKSECAAMKNRHHAAKDEEAAKAYAQIIKAMNEQLEVLKEKIKEQTEKPNCKEGVKRLETIPAIGRMTAAVLFHHLTSSKFETSNKFAAFAGLSPQQKESGTSVRGKGKLTKFGNRKLRAVLFMPAMVAYRIRAFPDFIKRLEEKKKPKKVIIAALMRKLAVIAYHVHKKGGDYDPSRYKSA

SEQ ID NO: 127576 - protein, 332 aa, unidentified
MDNFYFIGVDVSKKKLDFCVLFEGKVLREEQVSNHQQAVARLIGELKNDLEMDNEQFLICAEHTGQYTFPLVCACKSVECKLWLENPSQIKYSSGMQRGKNDKVDAKRIAIYASRFGDKVKYYDRPTEEIERLKQLERERALYVTDLAKYKGQMYDQKDFMPAALYRKKTKRMKGLIQELQAAIDAITAEMEKIIGSTEVLARQMELLMSMDGVGKVVALNVIIETEAFSRFDNPRKFCCHAGVAPFSYTSGSSQHSKNKVSHRANKNIKKLLHMAAVSVTHRKEGELKAYYMRKVEEGKNKMSVINALRAKIVARMFAVIKRNEFYTPIYS

SEQ ID NO: 127577 - protein, 361 aa, unidentified
MAKSTTIVAFDQHAATTVAAVLLPGQRTPALHTLTSDSPTILRFVQRLRATSVQCCYEAGPCGFELQRALTGHDIPCEVIAPTLIPRRAGDRVKTDRRDARQLAVLYRAGALTVIHIPSEQEEAARDLLRCREDIRADLLRARHRLSKFLLRHGRRFTGTKKAWTARHAAWLQAQRWPIAALEHTHRAYGRAVDEAVGRLHAVDAELRDLLTIEPLRARVERLRCFRGIDDLTALTIAAELGDARRFPSAPRVMAFTGLVPSEYSSGAKQARGRITKTGNAHLRRVLVESAWQYRHHPFLGRALRLRQRGAPAAIIEQAWHAQHRLHRRYRRLAARGKAKQHIVTAVARELSGFLWAALTH

SEQ ID NO: 127578 - protein, 345 aa, unidentified
MKILKQVLGIDVAQKELVVSLGRMHEDLTAEIYAGKVFANTEKGFSALLEWVERSTDSNLPVRFVMEATGVYHESFAYFLDERLRQVSIVLPNKINHYFKTLDVKTVTDYTAAEAIARFGLERKLTVWKRPNAVFKNLKQLTRERDQIVDARTVTKNQLHAESCEAEPSKNTIKRLNALIAFLDKQEKEIMQEITAVVKKDQRASDTIKLLTSIPGVGVLTAAIVLAETNGFELIRNKRQLTSYAGLDVREKQSGTSIKGKPRISKRGNRYLRKAMHLPALSAIQCNERFKTVFARLVSRHGIKMKAAVAVQRKMLELMYILYKTNTRFDAEFTREIKKEKQLLQ

SEQ ID NO: 127579 - protein, 340 aa, unidentified
MVHVGVDLHKRVSQIAVLTAEGVLTQHRIANTPDRVHRFFAQLPSPARVAIEASGTWWWLADLLEGLGHQPILSHPKHTKAIAAARLQNDRVDAARLVHLLRGDLLPQVWIPPPAVREARELLRHRVALVRVRTGIKNHLFALLARRNLHPTSATRWCTARGLRECQDLPLGPLPTMVKEGCLALLRVLDEQIRDLDHELTRRWGADPRVRRLMSIPGIGPFVAIALVLELGDIHRFPTAKHVASYVGLVPRVRDSGERVRRGHIVKEGNRLLRWALVLAATQATRRPGPLRTWFRTMQQRKGKMIARVALARRLAEIAYRVWKEDCDYLALLRHGAVQG

SEQ ID NO: 127580 - protein, 335 aa, unidentified
MEFEFFIGIDVSKNELDFAVQQGKCFLFHREIANEPVAINAFIKELGKLPGFKLNQAIFCMEHTGIYNNHSLTCLYKKKARICLEAATQIRNSLGNIRGKNDKIDAMRIAAYAYDKRDRLRLWVPKRDMVQRLAHLAATRLRLITVKKQLRTPLKEHESFSSGKVSRQNLQICSHSLKAIDEDLNRADKAIEQLIQADPELHRLFNLVTSVSGIGKVTAVQIIVATNEFKDINNPKKFACYSGVAPFTDDSGKIIKKARVSHMANKKVKTLLHLSAIVAIQYNADLKQFYQRKVLQEKKNKMSVINAVRNKLILRIFACVNQNRPYEKNYCKLVA

SEQ ID NO: 127581 - protein, 420 aa, unidentified
MNPSYFVAGIDVHKSMLAVVIADAAREGEFQFQKRKFGTTASQLRDLTQWLTEHQVRVAVMESTAQYWKPVWQELEGHCELQLAQAHSNRAPKGRKRDFADAERLLRRHIAGELIVSFVPDAEQRLWRTMTRAKHQLTRDRVRIHNQIESLLEEARIKLSGWVSDLFGVSSRRILRALADGEADPAKLAALADRSLRATPEQLQDALSAASTLGALHREILGLFLARLDLIEQQIQTLECNVAKALQAHHEAVQRLAEVPGFGIDSAQQVIAEVGPTAASFPSPEQLSSWVGTCPGREESAEVSKSNRSPKGNRMMRRVLTQVANAAVKSKGSVFEILYRKMVARLGHNKAIWAIAHRLCRLTWKILHLKVRYVEYGSRPNPQAVQKRANKLMKQLRSLGYQVHIQAVTVQGTTPQAVIS

SEQ ID NO: 127582 - protein, 390 aa, unidentified
MVYLGIDVGKSHHAAALINSEGNTIATLPSFANTGAGFRKLLRFVSSHVSKEEELSVGIEATGPYWIPLCRWGRKQGWEVTVLNPLKVASLRNYGVRGSKTDRIDAVLVAQALHWEKRPPSEEPSYETLELRHLTRLRSQIIKDRTRISLRLISLLDTLFPELLTLFSKPISPSTLAVLEVAPTPQKVVALGKENLTAILRKASGSKLGQERAQQIIDAAQRSVGVPAETLEEVTALIVAQIRLLGEQLTTLNRRINELYARTGLTLDTLPGVGTVLAATFLGEFGDVNRFKGGTQMVAYAGIDPKLRESGSHQGQVRMSKRGSPYLRHAIYLAAQTAARTDEYFQDILQRQLKRGKSKRKALGAVMNRFIHVLYAVWKDNRAYSPLTPS

SEQ ID NO: 127583 - protein, 334 aa, unidentified
MENIALIGIDLGKNSFHIHCQDHRGKAVYRKKFTRLKLIEFLATCPATTIAMEACGGSHFMARKLAELGHFPKLISPQFVRPFVKSNKNDFVDAEAICEAASRPSMRFVQPRTESQQAMRALHRVRESLVQDKVKTTNQMHAFLLEFGISVPRGAAVISRLSTLLEDSSLPLYLSQLLLKLQQHYHYLVEQIKDLESQLKRKLDEDEVGQRLLSIPCVGTLTASTISTEIGDGKQYASSRDFAAATGLVPRQYSTGGRTTLLGISKRGNKKIRTLLVQCARVFIQKLEHQSGKLADWVRELLCRKSNFVVTCALANKLARIAWALTARQQTYEA

SEQ ID NO: 127584 - protein, 400 aa, unidentified
MKRLSGGIDVGSVAHHVTILDEEDHVLYNRKISHTLDEFTESIKQFKKIEKKEKGEISFALEGKNGYSRPFDRILLDQGFALYNIDNLKLKRFREAFAGEWKDDERDALMLSKMLKLKEHINGKKEKVFIKIEKPSLITESLKLLSRHQQTLIDEKVRLTNRLSKKLLEVCPEILRLGKAKSKKLIAILTKYPDFSKYKSMTLKSLLKIKGIGEIQAPFLLKRLNHITYVGLTDIYKTIISSYAKRILELQEEIKAIDQKLDEIGGKNQSVKHLKTIPGVATKLASRFIGEIGDINRFPSEKQLAIYCGIACVNNNSGKVTKAKAVYKANKICKQTLITMAGCSIRIIPQCKCYYLKKRAEGKGHNHSLRCLARQLIKIIYKMLTENRDYIIKKELKKVA

SEQ ID NO: 127585 - protein, 308 aa, unidentified
MTPIVGVDVAKNELVIFQAELDLLETIPNNKTAIKRWLKDLPGAVEVAIESTNIYHLEFADLAHEAGCTIYMVDGYELSHYRKGVKIRAKTDALDAKLLARYLKNEHEELHPWIPPSPLYRRLLSLFRRRSALVQARVGLVQSWSNEPLLKTAFAAQVASMQKLEVLVEKMINDHLKEAGLLAQLKRCMKVEGIGFLTGARLIAAFQRGDFRNADAFIAFLGMDLRVSKSGQKDGRRSLTKRGDPEARRLLHNAAMSASRTSTWKGFYQEQRDRGFSTTQALVILARKLARIVFALLKGQSEYQPKAG

SEQ ID NO: 127586 - protein, 427 aa, unidentified
MLRAPQYKGTGAQERDLQRRSYTRWYAGIDWADTHHDALVIDEKGRQRGSLRVDHTPEGLAKLTTFLETITGSDQKEQMACIIETTHGLLIAPLLEAGWPVYPVNPRTVDRRRGASGAKTDIIDASLLAKTGRADLADLHRLTPDSEVVQELKMLTRDQDALIQMQTRLVNQLTATLKAYYPVALQWFAKLQQHSTLTFLQTYPTPQAAMDASVEQITEILKHAGHTTAEKVAPKIFERLHQPQLPADAITSRTKSRLMLALVAQLLPLVEQVAAYDKEVEHLFLTHKDHEVFSSLPRAGKRLAPRLLAEIGDERTRSADAASLQALAGTSPVLFQSGNYAKAHRRLGCIKPLRNALHQFAWPSTQQDGWARDSYQRKRAEGKSHTVAVRALSNVWARIIFAMVNKHQLYDSATFEAAQRLHAHRVA

SEQ ID NO: 127587 - protein, 363 aa, unidentified
MDPALAAVESRASTAAKEDIMQVVRIGLDLAKYVFEVHGVDNHGKVVVRKRLRRDAVAGFFANLPTCLVGMEASNGAHYWARVLTALGHQVRLISPQFVTPYVKSNKNDQNDAEAICEAVGRPSMRFVPPKSTDQLAVQAVHRIRRRLVADRVRLANQIRGLLSEHGIVIARDIAQLRRGLAVIVGNINDGLSEMLRALMRELQEELSELDTRVAAYDRRIREIFRTNEQCQRLGKIEGIGPVTATALIAAVGDRSCFKNGRQFAAWLGLVPKQRSSGGRARLFGISKRGDRYLRTLMIHGARAALSRATGKQDPRSLWLGKIRQRRHPNVAAVALANKNARIVWAMLTGDAAYEPALSVKAA

SEQ ID NO: 127588 - protein, 429 aa, unidentified
MNYKQNERLNQLTDETLIIGIDIAKEFHVARAQDIRGIELGKTIKFNNSFPGYQEFETWINEIKLAEDKIRVILGMEPTGHYWLNIARYLKGNGYTVVTVNPMHVKKIKELDDNNQTKTDKKDAKIIAQLVKDARYSTPNLLEGEYEELRNAKNLRQAVVKDLNRAKNQIHNWLDRYFPEYTEAYVNWESKSFIKIIKKYAFPSEIAKLTPNEVYEMLPPKMRRGVGLRKIEKLAIASKRSIGIKEGLSFAKIELKFLLDKYKGLLKQIEEIDEYVTKICNQLDETKKIMEIKGVGLVTASGIVAELGDIRQYKNPKQIIKMAGLSLIENSSGKKKGQTSISRRGRKDLRRLLYQAILGMIRTNTAFREMYIYYTTRSKNQLTGKQAIIALCRKLLRIIHAIILKDVDYDESKMMSQIKYPEEFLNTAA

SEQ ID NO: 127589 - protein, 411 aa, unidentified
MQVVHERCCGLDVPKKTVVACILITLANGEVQRHIRTFSTMTAGLLALSDWLESLAVTVIAMESTGIYWRPVFNLLEEGRSVILVNAQHMKAIPGRKTEIKDSEWLADLLRHGLLKASFIPPAPVRELRDLTRYRKTLVQERAQEVNRLHKVLETANVKLTAVATDVLGKSGRAMLEALVKGATDPEILAELARGRLRQKLPQLQEALDGRVEPHHRLLLKHILAHIAFLEETLEQLQRDIEERLHPFEEAMTLLMSIPGIQALAAATIVGEIGDDMTRFPSAKHLVSWAGVCPGNKQSGGKRLSGKTTRGNATLRAILAEVVWVLSHMKDNYLSAQYHRLARRLGKKKAVMAVSHSLLVIIYQILSTKQPYSDLGADYFEQRDSARLTQRSVRQLEALGYAVTLVPKEVA

SEQ ID NO: 127590 - protein, 416 aa, unidentified
MNEDLLARLSRRYLALDIHKHYSVVAGVNFDSQVVLEPVRIEHIDLETWLGEHIRETDHVVIESTTNAWHVYDLLESLAGKVLVANPIKVKQIAGARVKTDIRATLILARLLVANMVPTVWVPPVEVRELRQLLSQRRRLVGMHTQVVNRMHSVSHRHHLGHPRGKRFQEKDMVWRERLGELERFQLDLDLETKQYLKSQIDRITKKLGKMSHQELWAGQLMYLMQLPGFGIITGMTVLAAIGDISRFEDPKKLASYSGLTPGVEQSGMKNRGKGITKEGRKELRWALVEVAQRAVKSDPLWKRRLNELQRRMHRNQAVAVIAHLLLELVWFVLTYRQPYRHFSHERIAYKYLTWSWQLDEEARDGLTRQQFTRYYLMRLGIGHDLERITLNRSYPRRLASEAELLALRPELSLIE

SEQ ID NO: 127591 - protein, 333 aa, unidentified
MQENSKIFVGLDTSKMKISVALAEEGRRGEVRFLGDIDNTSDVIRRLIRKLTGKFCELLFCYEAGPTGYGLHRQITALGHACSVIAPSLIPKRPGEHVKTNRRDALTLARLHRAGELTTIWVPDPGHEAIRDLVRAREAAMEDLRKKRQQLQSFLLRHGRIYPGLRSWTLVHARWLSNLTFEHPAQYLVLREYRQAIEDAEARLERLTQQVADVVSTWSMAPVVEAYQAMRGVAFLTAVTFVAEIGDVRRFETPRQLMAYLGLVPSERSTGEQVRRGSITKAGNPRARRVLIEGAWTYRYPARLSRALQVRQERLPKTVRAIAWKAQMRLCAR

SEQ ID NO: 127592 - protein, 387 aa, unidentified
MARKRTLSTLDTSIAYEAVGLDLAKTDVALAAFDSDHKEPYLIDRIPYDKLYELLANMAPTLVAMEPCSGAHQIAEQIQELGHEVMMISGRHVQAWVKDHCNGQKTDLNDAFAILNLAYDRWLTPIRGKTREECRLLALQASYRQLKGQRTKTMVHVKATLHAWGFPIRAGSFNQKALHELIDANREAFGDEVVETLHLMINRVHDLDHDIATVLKLLTEATKRDPRASLLRSIPGFGVLTTSRWCAVVGDIARFDSPKQTMAFIGLVPNNRITGHHTETSSGREARGQGKMSKRGDKMLRSLCILGAASLCLMVRNDRLPDCPFVASIKERLASPRPWFKVLVYVAAKLVRIATALLKYGETFSFEKAGISKAVLKQWELEQAKAA

SEQ ID NO: 127593 - protein, 413 aa, unidentified
MRLFAGDDWAEDHHDVELMDVTGRRLAKARLPEGVAGIARLHAMIGGQLGEDADEEDAGQVAVGIETDRGPWVAALVAAGYTVFAVSPLQASRYRERHGVSGAKSDAGDAHVLADMVRTDSHQLRPATGDTALAAAVKVVTRTHKTLIWERTRHTQRLRHALRDYFPAALEAFEDLDAPDTLELLARAPDPASAAKLTTAQVSAALKRARRRDIAHKAERIQAVLRAAHLGQPDVVAAAYAASVRAIVAVLATLNEQVKILQGQVEAYFGQHPDAEILLSQPGPGPVLGARVLAESGDDPGRYASAKARKNYAGTSPITRASGKKKAVMARYVHNDRLIDALMTRAFAALTGSPGARACYDQQRARGSEHNPALRQLASRLAGIQHGCLKTRTPYDEATAWPHHAAKPEKAAA

SEQ ID NO: 127594 - protein, 417 aa, unidentified
MSNPLIVGIDVHSRTNRTCLLDREGEPWGKRFSTANNRPGTQTLIGRLVETLQQGQFDSLRVALEATNWYWFPLYQALSQEPALAPWPQTFYPFNPRVTARYKDSFSDKDKSDDSDAYIVADRLRTYNRQELPAPFAPDLRYLSLRFLTRYRYHLVKDLVREKNYCMSLLYLKANEYREAHPFADVFGATSRAVIEEFASLEEVAAMPLAELAIWLDTQARGRFPDPAKVARELQQVAQDSYPLDPQLQQPINFVLTWSFQLVNFLDRQVQRVNTAIADAMRDIPHTLDTIPGFGPVYSGGVIAEIGHAERFAQDEAKVAQYAGLHWRKHESADFKAEETRLTKRGDAYLRYYFCEAANAVRMRDAEYAAYYQRKHDEVRTHQHKRAVTLTARKLVRLVVRLLTTNQPYQPRRQSSG

SEQ ID NO: 127595 - protein, 346 aa, unidentified
MEYIALDVHKKYTWARVENTQGERLYESRLAHAHGTIKNFVHRWSEGSPVAVETVGNWYWVVDEIEAGGGMPQLVNARLAKLMMGSVNKSDKLDAKGMNRLQRTGTLPTVWIPPSSVRDARELARTRMVLSRQRTQLKNRVHATLGKYGYTVEGASDAFGKKGRKIMEEVLLKLPPHTQQALGLILDELDHVTDNLQVIEGQMIEVFAPCAQTELLKTLPGVAEILAVVIWTEIGAIERFSRAEQFASYCGLVARENSSGGKIRFGAVRRDVNVYLKWAFVEAANSALLNAERCGYNHISRLYQRIKPRRGHGKAKVAVARHLSEASFWMLTKGEPYREPTSSTQR

SEQ ID NO: 127596 - protein, 344 aa, unidentified
MMTQFVGLDVSQKMTAVCVVDNAGRRVWRGQCPTAPEQIAAMVHQHAGDDARIGIETGAMTPWLVHELRALGLEVICLDARHARAALKMQINKTDQNDAEGLAQIVRTGWFRSVHVKSFDSHRARALLGARAQLVGMTTRLSNHLRGVLKTFGLLPGAMRGLRFDRKVEVLLENRSDVAPIVRPMLVAWRQLREQISAFDKAIRVLVRSNSPCRLLMSVPGIGVLSALAYVSTIEDPARFSQSRSVGAHLGLTPRQYQSGDVDRSGRISKCGDTLARTLLYEAAVVIMTRVKKASELKDWALAIAKRSGIGKARVALARKLAVILHSVWRSGKPFRWSEHAIAA

SEQ ID NO: 127597 - protein, 315 aa, unidentified
MERQVVAGIDVAKLRLDVAVRPSGERLTVSNASRGISRLVNLLKREQPECVVLEATGGYELKLLERLLAEGLPAVVVNARQVREFARATGRLAKTDAIDADVLAHYAEALKPEQRTLPDLKTRELRALLARRRQLLGIVVAEGNRAAHAIDVVKRGIAATVRCLEKQIAALDRELARLIREFPAWREKAEVLRSVPGVGAVTSATLIAELPELGTLNRKQIAALVGVAPFNRDSGTLRGRRTIWGGRSSVRAVLYMSTIAALRSNSIIGDYYRRLHAAGKPSKVALVACMRKLAVILNSMLRSGSAWSPPLVGSA

SEQ ID NO: 127598 - protein, 381 aa, unidentified
MTTAATHNEHENTPEATLFVAFELSEKTWKLGFTTGHGQKPRERTVTARQQERVLDEIAHAKRRMGLPESAAVVSCYEAGREGFWLHRFLQEHGITNQVVDSSAIEVNRRRRRAKSDGLDVRKLLSMLMRYHHGERQVWQVVKVPSVEAEDQRHLHRDLETLKQERASTMTRIEGLLSSQGLRVTSLTKLPEQLEALRLWDGSPLPPGLRRRVLRVYAHYTFLSEQIAEVEAERRAQLQTSSEASIDKVRQLMQLKGIGINGAWLLVMEFFGWRAFKNRREVGALAGFTPTPYQSGESAREQGITKSGNRHVRWMTTELAWSWVRFQPDSALSCWFRERFGGGGKRLRRIGIVAVARKLLIALWRFLETGVLPAGAVLKEG

SEQ ID NO: 127599 - protein, 353 aa, unidentified
MIVIGADTHKGSHALAAVDEGTGRVRGSREIKADEAGHLAAVRWVRGLDDDRVWAIEDCRHVSRRLEQALLAAGERVVRVPPHRMGASRKGEREPGKSDEIDALAVARAVVKDGVERFPVAYLNEQAMEIRLLVEHRNDLVAERTRTVNRLRWHLLELCPELEASLKRKALNQARTLDRVDRQLRKLPTGARVRIAREQISDLRGLNRDIERLAAELAELVTAHRPRLLAEYGCGALTAAILIGHTAGNERFRSEAAFALQTGTAPIPCSSGKRTQHRLNRGGDRQLNQGIPRPQGGRGQDQEGRAALTQTAPRPPLPPAALRAARRPTANPRARIDHRARASHHPRTTQAPA

SEQ ID NO: 127600 - protein, 392 aa, unidentified
MSQQGCHFEASRSLTALEQDSTIIAVIEMSQSKWLVAGLVPGIERHPLKKLDAQEEGLLKLLHRWRNEAGQAGCEIRRIVVAFEAGRDGFWLARWLRARDVEAYVIHPTSIAVSREHRRAKTDRLDTELLMRAFVGWLRGEKRHCSMVAIPTIEQEDARRPSRERQNLVTERTRIVNQIKAVFARFGIRTFRTTLRKAEEKLKGLRTAEGTLLPENTRAELCRHLVRLRVVREQIRAVEQDRLRKLAAPTGAERSSHAMVRLIARVLGVGIETADILVNEVLSRRWRDRKAIARYAGLTGSPDESGKRRRERGLARAGSARVRSIMIQFAWRFVRFQKNSALAQWFAARTADRRASTRKTMIVALARKLLIALWALVTRGEVPEGVILRPAS

SEQ ID NO: 127601 - protein, 317 aa, unidentified
MNDAFTFVGIDVSKDKLDVFIDSTGQHLTVDNQAKGIGSVLEHLRPLSVKLVVVEHSGRYERRCAVELMDAGLPVALVNPRQTRDFARAINWLAKNDRIDAKLLAEFGRRVQPRLSEKVPENRVELDELIRRRRQLVQMRATEMNRLQQAPIKSVQHSIEKLLRQLDQQVQDLDHRIAKSIENDDDWRGQSQLLQSVPGVGAVVAHTLVAELPELGKINRQEIASLVGLAPFARESGKWKGKRSCFGGRAAVRSVLYMATITAKRCNPVIAAMARRLEAAGKPFKVIMVACMRKLLTILNTLARSGQTWSPKLVSCS

SEQ ID NO: 127602 - protein, 403 aa, unidentified
MARYHVGVDVGKLRHHVCIRDLPNDTYGRAFSVSNDQEGLTHLVAFLNALSPDHHDFLIGVESCPYGLNISYFLMSAGFNLVEVNTFRAGQFRKAKGKKAKTDKIDARVVADILSLGDHKPLRIPDPVLDNLKELTRLRADLGNEKSMAIIHLRESLSILFPEFEKVFRHLDSAGSLALLVEFPGPEYVIAAGEDRVGEVLSIASPRRMGKGMAKRIITAAEHTVGVIQKQPALGIKISILAKRIVDLRSTMRQLDQQITALFNTLPSKPEGFPVGQAPSLAAIMSEIGDVYRFPTLKKFLSHLGWCPQSFQTGNYRMEHPRMSHAGNKYVRRLIWMLSISAAHYVPRYRKYFQLRVSEGKAKMHILVAVGRKLLSVLYAMLKTGTAYDPDWEENRRLALARH

SEQ ID NO: 127603 - protein, 316 aa, unidentified
MSSASRFIGIDVARADVVVAQHPPADVWTLPNTDAGAADLVRRLRPLAPTLIVLEATGGYERTVVAALAAAGLPVVVANPRQVRDFARGVGQRAKTDAVDAQILALFAERVHPEPRPFPDAALRALEALVARRRQLLDMLTAERNRLEHAAPPVRDDLQRHIDWLARRVGKLDRDLDKKIQASPLWRTMDNLLQSTPGVGPTVSRTLLGALPELGTLTHKQIAALVGVAPMARDSGRWRGRRRITGGRAPVRAALYMAALVASRHNPVVRAFYRRLLAAGKPKKLALTACMHKLLTILNAMVKSNTVWRPILAQTT

SEQ ID NO: 127604 - protein, 316 aa, unidentified
MVGIDVASMHVDVATVGAELPAALGRVNNDTDGHSALADGLARLRPELVLMEATGGYEAELACALQAAGLRVAVVNPRMARDFARAMQRLAKTDRIDATTLAEFAGVLARRPDCERFIRPVSVPEQQDLAALVTRRRQLVTMQLSERQRLRLARPVTRPSIEALLEAIARQLDDVDGEMARHVEQHHAQMAKLLQSVAGIGRVAAATLIGELPELGRLNRRQICALVGVAPYANDSGASRGRRRIVGGRFEVRRALYMATLTATRHNDAIRTFYERLVAAGKLKKVALVACMRKLITHLNAIARDHLNAQVRPINT

SEQ ID NO: 127605 - protein, 395 aa, unidentified
MDKDRIVAGLDVHKDTIYLCVMDNTEAVIFAKVYGTLTPDLELMCSEMVSHGVTEAAMESTSTYWVPVWNALCESMSLKLVNPYFIKQLPGRKSDVKDAQWIAECLLKNLIRGSFVPDKRVQDMRKYNRRIFDLNEDLTYNSNKQDAALQRCGFRLSNYVSRVNGKSYQKCVRAIITGITDPEELVKLIHGKTLRKYGRNIIKDAVTGDFHQADICLLKQYAELIEVIERQIEECRNALIAMCQEHFPKQFKRLQSIPGVKERAASAIIAETGADMKPFEKATNLVGWCGLKPRNDISNNKVKSNRTTHGNRFLRQILIEISWVASRTRNCFFSNFSYVQCTQRHKNKMKIQVAIARKLLVAVWHMLTKDEDFIDVYLKRLEKQAEWQNDIQALE

SEQ ID NO: 127606 - protein, 345 aa, unidentified
MSTIIKQSAGIDCGSEELVVSLNQMFASGDLVCVGTKSFANSHSGFDKLLKWISKISAPDIKCRYVVEATGIYHERLAYFLFEQDQEISIILPNKINAYGKTCSSKQQDDYQASKVIAEFGCVKKLEIWQPPSPVYRSLKQLSRERDQLQKEHSAISTQLHAEVNQAFPYLESIKRMKARIKLIEKQIEDIENEVGELVNENKELKERVLNVCTIPGVGVQTVITIVAETNGFNLIRNYKQLVSYAGYDVIQKKSGTSVRGKARISKKGNTHIRKALHFPAFSAVRYNQPLKKLHERIMERQDVKMKGYVAVQRKLLVLIYTLWKKNEPYKLLEQPVEAALTELD

SEQ ID NO: 127607 - protein, 367 aa, unidentified
MKHYAGLDVSLEQTSVCVVDESGSILCEGKTESDPAALTAWLGRVGHAITQVGLEAGPLSVWLHRGLLAQGYASVLMETREVKARLNSGRHKTDRADARGIAQILRVGWFRPVHAKSATAQDDRLVLTQRKFVQGQLRALENSLRGTLKGFGLKLGKVSVKGFAGRVRELAAGRELMVEVSEAMLAARETMLASFQRLDTLMRARARDPLCHRLMTCPGVGPQTALAFRATIDDPHRFKTSKQVGAHLGLTPRKYQSGETDRNGGISKQGDTLLRATLFEAAQALLMRVRRPSALQAWGRRLVRKRGRKRATVAVARRLAVILHRMWVDGSEFRWTAPAEAATAKAVTAKAATPKTVLSRRAQLAAV

SEQ ID NO: 127608 - protein, 347 aa, unidentified
MRFYTKQHTHHCGIDLHARSMYLCILNQVGEVLLHRNMRANPEAFLKAVAPYREDLVVSVECMFTWYWLADLCRSEQITFVLGHALYMKAIHGGKAKNDRIDALKIATLLRGGMIPQAYVYPPEMRATRDLLRRRLHFRRKRSELLAHIQNTNSQYNLPEFEKQLTYASNRSGVVERFADPSVQKTIEVDLGLLAYYDQMLRELEYFILRTAKDHDHNTLYRLRTVPGIGKILSLVMLYEIHDINRFERPQELASYARLVKCARESAGKISGTGGRKIGNVHLKWAFSEAAVGFLRKNEEGKKYYARLERKHGKGKALTVLAHKLARAVYYIWKKDKVFDQEKFLAA

SEQ ID NO: 127609 - protein, 348 aa, unidentified
MSHYVGLDISMKETVICIVNDKGESVHKGRCKTDPEKITCHLKKTGLIIEKIGLESGSLSHWLVSNLRELELPAICIDSRKMAAILSVQVNKTDDNDARGIAEAMRCGLYKEVSQKSQEAVETGTLMQSRRTLVQQRVQLINAIRGFLKTYGIQLGSCGKEEFPERVRKVLPEALMIAREGIEGLVNCYEKLCEEIKKMERKIEDLARKDVDVKRLMTVPGVGLITAMTFKIELDNPHRFKKSRDVGAYFGMTPRQYSSGETKRQGHISKCGSAEMRTLLTEAGLVCLTRSKKWSKMKAWGLKVMRKHGAKKAAVAVGRKLAVIMHRMLIDQTDFIHGEEKAKKVKAA

SEQ ID NO: 127610 - protein, 381 aa, unidentified
MTATTRPALGSVSEPTLYVAFELGKKEWTLALTSGFRVTPWVRTVPSGDFEAVARAVQAARSRFLFSAPPRVVSCYEAGRDGFWIHRALTSRGIENRVVDSASIEVNRRARRMKTDRIDALKLVMMLVRVWSGEARVWREVRVPSGDEEAARHVSRERTTLTQERTRLTNQIGSWLATWGCVVSARRRQQAQWWTTVRDWADQPLPRDMQARLARTDGRLALIAEQLRTIDAQQAAATRAAHPDSALGRLVHLKGVATTSASVLLQEGLVWRDFHNRREVGGLLGFAPAKYDSGESMRDQGISRAGNVRLQAVSIQLAWSWVHWQPLSALTQWYHAHFGPRQRARRVGIVAVARKLLIALWRYATRGILPAGAILKPTRLA

SEQ ID NO: 127611 - protein, 292 aa, unidentified
MFAESTDEEQIIDRVAVTRNCWVRDGSPPTGAGYSAMRTYAKAWPDRVWAVEGANGVGRPLAQRLLQDGEQVVDVPAKLAARIRLFDTGHNRKTDARDAHSIAADAVRTKTLRVLQLDGELEALRMLTDRREALTRRRVQTVDRLQALLAELLPGQAKRDITTGQAKAMLATVRPRDIAGKTRRRIAAEELAELVAVQAKIKKSTAELKAIVLARGSHLMDLHGVGPVVAARVLADTGDVTRFADRNRFASWTGTAPLDASSGEQNRHRPVPGRQPPDEPHDPHRRDQPDPP

SEQ ID NO: 127612 - protein, 323 aa, unidentified
MNHKVGKDNTVARFIGIDVSKQWLDVACLPERETRRYGNDCAGLEQLCTWIVPLAPELIVMEATGGFETNAATALAAGGLALAVVNPKHVRDFARAFGILAKTDRIDALVLAAFAQKVHPPVRPLPDEERRELIDLVDRRRQLVTMRAEEKTRLTQATPAARQDIKEHIEWLNERLRRLDIDLTAKLRSSSLWKTKEQILTSAPGVGRVTVATLVARLPELGTLNRRAIAALTGVAPFARDSGQHRGRRMIWGGRADVRNVLYMATVTAARINPVIRSFYLRLKQAGKPAKVALTACMRKLLTILNTMVRNNQPWQIPPTQTI

SEQ ID NO: 127613 - protein, 339 aa, unidentified
MELHCAVDLHGNNGYYGIVNETGKRIFKKRIPNSLPAILTALEPYKEHIGNGVVVESTYNWYWLVDGLKANGYETRLANPAAMQQYNGLKNTDDETDAFFIAELSRLGILPEGHIYPKEDRPVRDLLRRRLLLVRHRTAHILSFQNLIARERGEQISSNKIQKLWSNEVAQFFDDTRLVLMGQTNIETIRFLTQQIRRIEKVVLEAVKLKPEYEKLLTVPGIGKILALTIMLETGDINRFKKVGNYSSFCRCVKSSRLSNLKKKGENNRKNGNRYLNWAYIEAANFIRRYCPEAKKWHQSKTARNKQVVATKALASKICKACYFIMRDQEDFDVSKIFG

SEQ ID NO: 127614 - protein, 341 aa, unidentified
MSEYIGLDVSLKETAISVRRDGERIWRGKCPSDPKLLAEVIRHRAPAAERVVFETGPLSVWFYHALSAEGLPAICIDARHAKAALDMAPNKTDAKDADGLAQLAEVGFYREVRVKGYDSMLIRTLVTARTKLIRIMTELSNQIRGLMKTFGLVVSKGSGLVFATNVRNLLGSNAALEQIILPLLEAWRSIRGRAAELDRQLVAMARRSDACQVLKSIPGVGAVTSASFVAAIEDPKNFRISRSVGAWLGLTTRRYQSGEVDYDGHISRRGDSHLRGLLYEAATVILTRAHADSSLRAWGMKLREKVGFKRAAVAVARKLSVIMHRMLTTGEFFDRSAGMTA

SEQ ID NO: 127615 - protein, 356 aa, unidentified
MSEKLNSKIAVIGIDIGKNSFHIVGQDRRGALVLRQKWSRGQVEARLADLPPCVIGMEACTGAHHLSRKLQTLGHDARLMPAKYVRPYCKGDKNDYRDAEAIAEAVQRPTMKFVATKTAEQLDLQALHRVRERLVSQRTGIINQIRAFLLERGIAVRQGLRFLRAELPSILAKRTDVLSPRMLRIIEDLSGDWRRLDERIENLSGEIEALACQDKGCERLMTIPGIGPLISSAIVAAIGTGDPFSKGRDFGAWLGLVPKQMSTGDRTILGNISRRGNRYLRTLFVQAAWVVLVKVGPKQWERYGLKSWIEAAKKRLHHNKLAIALANKLARIAWAVLHKGRAFEYVKTNATASRSA

SEQ ID NO: 127616 - protein, 345 aa, unidentified
MEPMYYIGLDVHKRKISYCVKDSGGKVYSEGSLSATRLDLDVWMKTLPQPWSAAMEATMFTGWIYDHLKPHAAALKVAHPLMLRAIAAAKKKNDRIDANKICDCLRCDFLPECYMAPTAIRERRRTLRYRNLLVRQMVQMKIKISSLLMEAGVSYNKQRLHKAGYFRELLATNPDIDEGLRSLLRLCRETVVRLQKTESALVRSLESDSLLMDRVERLMTIPAVGPITALTWALEVGDVQRFSSIKKAISYCGLCGAEKTSGSTVQRTPLSKQRNKHLQTTLIEAAKMAPRNSPELAMLYDKEKQKGNANRATLAVARKLVAYLVAVDRRQKEFLTVERENRTAA

SEQ ID NO: 127617 - protein, 412 aa, unidentified
MQDILTCVMGLDVHRDIIVACLAKGELGTDPEIEIRSFSTLIPEMQKLRDWVLEADCHHVAMESTGIYWQPIYEMLELCFDGQINILVVNARHMKNVPGRKTDMRDAQWIATLLRAGLLKGSFIPDKTFRELRHLTRYRKSIVHDITAQKNRIDKFLQSSGFRFTAFLSDAFGASGRNIIRHLMEYGNISREALDRCLKTQTRKRIDEILIALNGSLSEHQRGFLRMIFEHLEALEQHRHSVENAIAEEITKHEKALSLLCSIPGIDVTAAAAIIAEIGTDMSAFPDSQHICSWAGLSPGNNESAGKRKSAHINKGNPYLKSMLCEVGWVISGKRTLYLSGWYWRIKQRKGAKRATIALARKLLALIYTMLKVGTPYNEECFETRRKQSEHKRASRMVNELQKLGYFVVAPD

SEQ ID NO: 127618 - protein, 389 aa, unidentified
MKIYVGIDIAKLNHFAAAISSDGEILIEPFKFTNDADGFQLLVSKLESFDKNSIIIGLESTAHYGDNLVRYLVTEFYQVCVLNPIKTCQMRKNNIRKTKTDKVDTYVIAKTLMMQDDLRFVSFYDLDMMDLKALGRFRQKTIKQRTRLKIQLTTYVDQVFPEIQYFFKSGLHQNAVYALLKEAPSPKEIASMHMTHLANLLKVNSHGHFTKEQAKELRVLAQKSVGANDSAISIQITQTIQQIELLDSQLEKIEAEMTDIMKFNDSVIMTIPGIGYINGGMILGEIGDIHRFSNPNKLLAFAGLDPSVYQSGNFQAKTTRMSKRGSRVLRYALVNAAWNVVRNNATFKAYYDAKRAEGRSHYNALGHCAGKLVRVIWKMLTDEVEFNLE

SEQ ID NO: 127619 - protein, 401 aa, unidentified
MKEFNPEQHQVETASALARVSDAGRGECHAAYVGLDVHKETIAVAVAEPGRAEPVYRGEIANRPKSVEKMLAKLSETYDGGLLAFCYEAGPCGYGLYRQILASGHDCQVVAPSRIPKTPGERIKTDRRDALKLARLLRSGDLKAVWVPDKDQEMMRDLSRARDDMKGQERKARQQLNAFVLRHGHHWPRGKSRWSQAHYNWLESLRFEQPWQQVTLQEYIDAAKAASTRVAQLGEHLMRALPEWSLAPVVDSLIALRGVDKLAAIVLLAELGDISRFDSPKELMAFLRLVPSEHSSGQRRRQGAITRTGNAHARRMLVESAWSYRFAARQTMHLKRKAVKASESAKQIAWAAQKRLCGRYRTLTRSGKNTKVVCVAIARELAGFIWDIVRQEMPRLAPQAA

SEQ ID NO: 127620 - protein, 351 aa, unidentified
MNEITTVGVDLAKEVIVVCAGDGSGHTMFFKQFSFAGFSVWAANLPPCTIGMEACSSSNHWARVLSAYGHRPKLMAAEFVKPFRKSQGAKNDRNDAQAILCAVREPNMRFVSAKSLEQQSILASHRLRQGWHAERTALLNRTRGLLAEFGIWLGRSSAAVYRGLPRLSQEEAVPAPVRALLTQVYEHLQQLDEQIARCEAQIRLHAKKSEAAQRLTAVTGIGPITASAVVATVGNARDFRNGRQMAAWAGLVPRQSSSGGKERLGSITRRGDRYLRALLTQGARSTMQSALIRAPQKRSRLEQWIVDLRHRVGYHKTLVAIANKHARICRAILAKGESYDPQAWQRIARAA

SEQ ID NO: 127621 - protein, 322 aa, unidentified
MHRFHLGIDIAKAKLDCALRLPEGKLRHKVVANTAAGFEALRAWLASQGATSVHVCMEATGIYWEPVAELFAGFETVTVSVVNPAQIKAFGASQLVRTKTDKVDAKLIAQFCCERCPPAWQAPTPAEQALRALVLRLDALQTMRTQESNRLEVARPAVREGIVQHLDWLDEEIKRLSKAIHHHIDADPTLHDKRRLLDSIPGLGERTIAILLACYVDPGRFGNARQAAAFGGLDPRQHESGSSVKAKPRLSKVGHAFLRKALYMPAMVTLYKTAWGSRFRARLAAAGKPPMVIIGAMMRKLVHVAYGVLKSGKPFDPALQGA

SEQ ID NO: 127622 - protein, 394 aa, unidentified
MDSFLVGIDVSKALFSVAGIDSEGNESFSGSYPMDSGGFDEFLKTITSHCEDLSKIIIGMESTGCYHINLYSFLTSRQIHTLVINPLLIANYAKLSLRKTKTDKKDARTIAKFLLDHRQEISQLSVSQDLQDLRDLSRERESLCHLISATKVEIKRVVRTTFPELESMGDLYTRAMIRFLQEYPSARLVRAAKPKAIAKVLKRPSVGNKLTLTAEDIVKAAQSSVATVSPAKEIILRGKIATLLHLQERLAEVSKLLTELCQRTKLEDFEILRSIKGVGPNTAAPFLAEMGDVENYSSHKKIIAYAGMDPSVHESGKFVGMSKLSKRGNRHLRRAIYLMTASVVSQNAFFKAYFLKRKREGLAPQKALFATAHKLIRVIFAMLSQRTHFKVKEA

SEQ ID NO: 127623 - protein, 395 aa, unidentified
MFIVGIDIAKRSHEAVIIAEDGQVVRKAFSFRNNCTGYNLLLEQVRRLTLVKSQIVFAMESTAHYWLALYARLLKDGYAVMVLNPIQSHSLRELYIRKAKTDARDSLIIADLVRFGRCKASNVPQDKILALRELCRSRAYLVDMAADLKRKLIALLDRIFPEYESLFDSVFSKASIAVLSKYSTPQKVKNANLRKLTDLLMESSNGHFGEWKAHQLKEAACSSFGIDDSGGVYSTLLGMFLEQILSLTAQADSLEKQISIFFQEFNNPLTSIPGVGTVLAATILSEIGDITRFSSADKLLAYAGLDPSVKQSGEFKSNQNRMSKRGSPYLRRAIWLASTVAVHRDPMFQTYYEKKISEGLHYMNVIGHVSRKMTAVIFAVLRDGQPYQPILQSAG

SEQ ID NO: 127624 - protein, 367 aa, unidentified
MKKVSTAVTKQSRNISQQKLTIGLDLGDRNSWYCVVDEAGQIQLEQRVRTSAKALQEAFGGMPRSRIALEIGTHSPWISRLLSELGHEVIVANARKVRLIGESRKKDDRLDAQTLARLARIDPELLYPVKHRSAQAQADLMMIRARAGLVRARTGLVNTARGLAKSYGERLRGCNVRNMNPEKAESLSPELQAALEPLLNAIESLSERIVEYNQRIENLAQQSYPQVALLKQIKGVGTLIALTFLLTLEDPHRFRKSRDVGCYLGLQPGRRKSGQSEPQLHISKEGDPYLRTLLVQAAQHILGPFGIDCDLRRWGLKLAERGGKNGKKRAIVATARKLAVLLHHLWVSGEVYEPLHNSSRTTVAAAA

SEQ ID NO: 127625 - protein, 348 aa, unidentified
MVYFVGLDVSVKETSVCVVDDAGKVILAQKVPTEPADIIAVLASLGASFGRIGIEAGPLSQWLVNALAAAELPVICVETRHMKALLKAQQINKTDRNDARGIAQMMRVGLFKPVHVKTLVAQEQRMLLTSRKLLQRKLLDLELDLRGTLRNFGLKVGVVGRSRYEVRIRELVESFPVLAAIAEPLLAVRRVMRQQLAVLHKMLLDTVRSDPVCRLLMTAPGVGAVVALTYRATVDQPQRFVHSRAVGAHVGLTPKRYQSGETDYDGRVSKCGDALLRTMLYEAAQVLLTHSGKWSWLKAWGVRVAQRRGMRRAIVAVARRLAVVLHRMWVDGSEFRWRKDNAAVPAVT

SEQ ID NO: 127626 - protein, 407 aa, unidentified
MMVVGVDAHKKQCTTCLFDDVKGTAVESGAFPTTRQAVTEFMERFPQGTTVVIESSTTGKTVSKILSSKFQVHMVAPPERKATIKTNKRDAERIIKEDLLGYLRRCYIPSPYVEGLRFMVTKQMEIGQKISRVKDQVHALIERNMLQSEFSDLSDIFSVKGLERLSSLTLPREEAVALAMYLEELKLYTKQHRQMESEIANAAISDEDCQLLMSIPGVASFTSVTLKARIGDASRFPSKKHLCSYAGIVPKANNTGENISMHNHVKHGDATLKYALTCAVRGAVAAGKNSAVKRFYLKQIRKGKSPQEAEVAAARKLACITWKVLTSKQKYVEEDRYLTARKIKRISFIAKRHLTYASKPEDVPSLIKSLTENSDVLERYSEHMHRRGKGSRSSTSLLQDVTRRKGP

SEQ ID NO: 127627 - protein, 400 aa, unidentified
MRTVFGIDVSKASSEVAILVNGERVYGYTMPNDIIGFSRLLEDLKTVSNPEIIFEATGVYSRRLQAFLEENSYDYTRLNPLEAKKQLDGLRVRKTDKIDAEKLASSQFVLNRKPTYVQEEVYQNLHDLSRFYQNLTEDIVRTKNRLHKVLQVAFPEIENLLSTPTGEQYWNLVSIFPTKHWVLELSEVELKETIRQSTSKRISENRVGNLAEKLVGLAKQSYSAISKTSPIIEEVKYNAQELIRLTNRRKQVLEQLIELAEPLPEYEILLSIPGIAETTATSIIGELGDIRRFKSANQINAFIGIDLKHYESGDFLGQEHITKRGNPYARKILYKCIHNIASASHTNPCHIADFYEKRKRQSQTTSTKPHTIASIHRLIRTMYYLIMHNKLYDYTLAQSH

SEQ ID NO: 127628 - protein, 346 aa, unidentified
MLHVGLDLSRKRLDYRVLTPEGEEVEAGACPPDGDGLDGLARRLARHDRPILAAVESMNGARFVHDRLERAGWEVEIADALKVKGLAPLAAKTDKIDAWVLAELSRRDLVPAIWLPDPAIRAERERARFRLHLVGHRTRLKQRIHATLLAHGLPCRPTDLFGRRGRELLARLALPEPWRPDVDTSIRMIDELDREVGELERQMRRLGAEHRYVGLLTSVPGIAWVLGYTIASEIGEIERFATPAKLVGYSGLCPRVYQSGGSDRRGSLSKQGPKYLRWALMEAAMHACRHPLYAQRYQRNKRRLGKQRGPRVAQVDIARKLAEAIWHMLTRNESFAPAGAALSQAA

SEQ ID NO: 127629 - protein, 362 aa, unidentified
MKKNRTEKTLETTIGLDLGDKNHYYHMIDQECVVIKKGKIGANVRAVRRFFSAQPPSLIAMEAGTHSPWISREAHQHGHRVLVGNPRKLRMIYRNEQKSDERDAEMLARIARMDPQLLYPIVHRGPRAQSHLAVLKSRDVLVGARTKLINHCRGIVKSSGERLPTCSAASFARHRDEIPEDLAPALQPVFEMIGELTKRIKNMDYTIKKLCEKEYPETGDLQAIKGVGPITSLAFVLTLEQPERFAKSRAVPVYLGLTPKRDQSGDSDKQLRITKAGDMFLRRLLVQCAQYILGPLCEDSDLRRWGLKLCARGGKNAKKRATVAVARKLAVLLHRLWSGKQPYDPFYHSKQHDDENKAKQAA

SEQ ID NO: 127630 - protein, 407 aa, unidentified
MTNETLKVIAGIDTHADTHHVALITEYGKHLGDRKFLAVGTGYREIAAYLTSLGPVTAVGIEGTGSYGAELSRVLANRGFAIKEVNRPNRAERRLHGKSDPLDAYQAAESVLAERGTSTPKSRNGFVEALRVLRTARTSAMKARTAVLSQISAVLTAAPEPLRAKYRGMTSEARVKAMTATRPTGDPADPGVATALTLKRMGSRHLFLSEEIAAIDLELSQIVAVHAPALLEVNGVGTVVASQLLVTVGDNPERLSNEAAFAALTGTAPIPASSGKTTRHRLSRGGDRHANASLYRIVLVRMSRDRRTKEYVVKRTANGKSKKEIIRCLKRYVAREIYRVLQNPRLAPPTNDLQPQRITLGLTMTAAAMDLGVWPTTILRIERGQMRDHDAIKRYRDWIEHKTLINA

SEQ ID NO: 127631 - protein, 469 aa, unidentified
MGPGPRWNESATGTADVVPMKKRIPSRKGGAAAGKAAATSALALEERKDAVRRASSRRKEADLSPPVKTGSGPAHSEVQKMGTQKERPAMRSVALDLAVRKIAYCEVRKGQVLSRRTVSSLESLRDLLGPDSEPSRVAIEACREAWHVHAELTRWGNEVILVDTTRVRRIGVGEHGRKTDRIDAEKLALALEQGGLPKAHLLSPARQQLRFELGIRRALVQTRAEYVTTIRGIARAHGVRLPSCGTDHFVSRLRRAPLDPAQRELIEPLTSIIEKVDLQLAQAERHLQAIVENDAQIRLLMTMPSVNVIVAAVFVSVIDEARRFQDAHQVGAYLGLVPLEKSTGEHRRLGAITKQGNSYARAMLLQTSWGILRRTSGSDPLQCWAQAIAQRRGKCIAAVALARRIAGVLWAMWRDDAAYDPARVGLRSATGLARHAEDIEFRAAAMKRAATKAHRRARVHERKLQEMSH

SEQ ID NO: 127632 - protein, 331 aa, unidentified
MTTTTPLASQTLCSSCVFAGIDVAKHKLDLARSDSGELITVCNDAEGIACILELLGQAKPKCIVVESTGGLERPLLEALLEANLPVALVNPGRVRYFAIGCGILAKTDPIDAAVLVKFAQLAEPRLSQKRSANQSELDALITCRRQLSLMRSQQTNCRLATRSKNAIKSIDAVLATLDKQIQQLDKKIRQLIDSDDDFKHLDQQLQSVPGVGPILSATLIAELRELGDANRRSIGALVGVAPFNHDSGAFKGKRSIRGGRTQVRCVLYMAALAAMRFNPVLRRFAQRLSRCGKSPKVVIVACMRKLLTLLNAMIRNNLMWHDLNVVKMLDT

SEQ ID NO: 127633 - protein, 345 aa, unidentified
MKRKVISIDLAKDVFELAIANSQYKVLERKRLNRSQFKRFLIKQAEALVIMEACGTAHYWGREATALGHRVELIPPQYVKPYRRRGKSDRIDTDAIIEAHRCEGITPVPVSTVEQQQIQQLHRIREQWKKTRTQRINSLRGFLRELGFAIPQGPNHVKQRAVQHLEDDRIPGPLKSMYAALLHEIDELNQSIKNAEREIIALTKNNEDVQLLQQIPGIGVLTSTALIASVGSVHRFSKARKLSSWVGLTPREHSSGNTRFLGGISKQGDAYLRMLVTHGARSVLHRAKSLHKMNESLTPLQHWACQLEQRVGHNKATCAIANKLIRTCWAVLTTRKSYNPNASIA

SEQ ID NO: 127634 - protein, 466 aa, unidentified
MENNYILYVGMDVSKGKADAAILKVSDRRSVKPKFLRKKLSFKFVKSEVASFLETVRSYSDVNCTSICFALEVTGIYSTNVYDYIKANLYENESIKFLNTDFVNQWRIAHNIAKSDPLDAQTISTIIGTDSDVQYVNDNVFENKNGYQDLKALVHRHYQIKKIYSQEINRLIAQCDCLFPELQYVFEPKSAAFIAVLSSYPTTHDIINASRLEVFNVVYEATKHRCSMDKIDKLFDLCHDTLVPDNISSYGRSIILDLVENIKNIKGQLKMIERYIRDVASLNPAYKLLLTITGCGPLTAATVIAETGDIKRFKNADCFVSYSGTSPRNKRSGTSVETMGKISKRGSRYLRHAIYMIAEFARRHNPVLKHQFERIKNGNKKRHKLANIAIANKIARYIYSIMKNESGFVILHEHIMRLPEETQNTFFNSISLDFPENTRKQIYQYSDIDGEVHKFVYTKLEETMII

SEQ ID NO: 127635 - protein, 376 aa, unidentified
MSYSTKYVGLDVSKSKIAVAIAEEGRQEPRYWGTIDHTKEAVRKLMERLRTAEDIVLEVCYEAGPTGYALYRWLLEMGISCTVVAPSLIPKRSGDRVKTDKRDALRLAQLFRAGELVSVYTPTPEDEALRDLVRAREDAKEDLNRHKQRLGKFLLRYQLADPKGSNPWTHAYEEWLDTVKFEDDCQRLTFQEYRRSIQETKERIKRYDEEIKRQSETHTQAPLIQALQALRGVAVLTATTLASEICNISRFPSPSAFMSYCGLVPSESSSGNSQWRGRITKAGNAHLRRILVEAAWSYRYSPIVARKMRERTTGLPPEVQLISWTAQNRLHKKYKNMLRMGKHKGTIAAAIARELAGFVWAIAKEMEKTQQPKDAA

SEQ ID NO: 127636 - protein, 379 aa, unidentified
MATSIFRANFPGALTIQQATDKSRFVIGLDLHKKTTAVCVFDRTSPDEPVLQRKRVPNARLLEVLQRFDGRKTVVCEAAYGWHLLRDALRGAADITFVPLDARKTAAWIASSGVKTDQIDAEVLCHVALLGGIPRLAVYVPEANARDNMQLVRHRDQMVRHRHRILMQLSVLDRDRGPNPYSGEVPTVSDAAATLHDDLQSALEAVQARIARLDAEMAHAASGDPIVALLRTIPGVGRITAFALRNKIGTIARFSDAAHLASYFGFGLRERQSGDNRVKGSIAKTGDSLVRSLLVQGAHIVLYKHPELVPLYFPHLGTSERLSDWRHKNKVVTALARKNLTFAYHVWKREAAFDLELYRARRLEASVNTPESVSVHSGG

SEQ ID NO: 127637 - protein, 429 aa, unidentified
MNYPPVAGIDVGKNFSEMCILSPNNEIYHRIKIYHDSINSIKKAIGLLQKAEKDFAIRPVVVLESTGHYHKILFHYLSDSGFEVSIINPIQSDCIKNIGIRKVKNDKFDAHRIALLYRFSFIKTTVVPDDVIDCLKSLCRQYYKLGDELTTYKNRLIGIIDQVMLNFTDVFQNVYSNTALAVLDRYPSPKQILKANKQTLISLIEKTSKKGLAWSTEKYELLVLKAKEFKDLSINNPGNLAILKVNISMVRTLQDAQKDILDAINEIILADSLEDNPVLAPIINLLCSIPGIGILTAATILAEVGDFSAFSSPNKLVAFFGIDPSVNQSGEFTGTRNKMSKRGSRLLRRVIFTTALANVRSKRNGDKTNPVLYEFYQKKCINKPKKVALGAVMRKLVNIIFAVMRDKKPFELRTPEEHEKLLFTKSLVA

SEQ ID NO: 127638 - protein, 349 aa, unidentified
MKDTITIGMDLGDRIHFIVVLDEQGNELEANKVGNTKTAIRKYFDRFKTATVVLEAGTHSPWISRELEQMGFTVYVGNPRKLRFIWDSTDKSDERDARMLAMVGRMEPKLLWPVHHRDKQSHADLTVIKSREVLIKSRTQLINHARGVVKSTGERLPTCSSASFARRCREHVPCALWPALSGVFEIICQLTEQIRHLDREIDRLCRERYPETHHLQQVPGVGPVTSLAYVLSLEEPGRFAKSRQVGPYLGLTPRRDQSGQTDRQLRISKAGNKYLRQLLVSCSHYILGPFAPDSNLRRHGLAIAARGGKNARKRAVVAVARKLSVLLHRLWADGQEYQPFYGKRIQMAA

SEQ ID NO: 127639 - protein, 310 aa, unidentified
MDAVYVGIDVSKDRLDVHVRPSGEAFAVGRDGKGLGELVARLRGVEPRLIAVEATGGFETVVAAAVAGAHLPLAVVNPAQVRHFAQAVGKRAKTDPIDAAVLARFAEAVKPEPRELPDEAVRLLAELVGRRAQLIEMLVAERQREKRASATRVRKSLARHIAALEKELSEIDRDIDTMVRGSPVWREKENLLITFPGVAHTIARSVLADLPELGRLTRREIASLVGLAPFTRQSGQWKGKSMIAGGRPSARAAIFMAALSAIRCNPVLRAFYQSLLARGKPKMVALIAVARKVLTILNAMLRDKKQWQRA

SEQ ID NO: 127640 - protein, 391 aa, unidentified
MLPARLREQNESVKFLVKGDSMSVRRILAKTIDTDLEYEAIGIDLAKNCVSAALLTTDGEVVCIDRLDYSELEKSAQVLCPTTFAMEPCTEMNYLVQKLEAWGHRCLVIGGKNVQNYVENHYSGQKTDLNDAQALAFLAQDTQLRTIKAKDVEQQKYASLTTLREQYIKQYRQTIVSLKGICQAWGLNISKGISGKARLKDLIENHAAFPEELKESLVDMVTHAQTAQKALNKITKTLEELAKNDKLCQLIQTIPGLGPVCSCRLRATIGDIQRFKNPKDFPAYYGLVPRSIATGHNEKKGKITHRGDKTMRSLMVQGAGSVINMATKGKLKSKQLTKWILKKQKEKMPWGKLVCAVAAKLLRIVRAVLISSKPYNPKIAGVAKCSLPKGT

SEQ ID NO: 127641 - protein, 340 aa, unidentified
MNDIRTVGIDLGKNVFHLVCMDEAGEIVKRRKCTRPQLFAFFKKLQPVLVGMEACASAHYIARTLVELGHDARLMPAQFVKPYLGTQKNDFLDAEAIAEAVQRPRLRTVPIKTREQLELQAMHRVRDRLVSRRTAVSNQIRGLLVEHGITMRKGRGGFRGFVPTLLLEDGPLSPAMHSLISGLWEEWLATDCAVKTLTRELERLAREDAACRRLMTVPGIGPLVATAMIAAVADGSAFGRGRDFAAWLGLVPRQMSTGGKTRLGGITKRGNTYLRRLFIHGARSFRLNGDRSRHRIVRPSRWPTSLPGLPGPSSPEDESTKDCLLPAERAQALPHERRAW

SEQ ID NO: 127642 - protein, 343 aa, unidentified
MDKDTMIGVDLAKNIFQLHIATMTGKVLSTKKLSRQRFKEFMETHAPAVVVLEACGSAHYWAETLCKMGHAVKLIAPQYVKPFVKRQKNDAADAEAIVIAAQRPEMRFVEPKTKEQRAKAVLFRSRERLVHQRTEQINALRAMLYEYGYIIPQGIASINRIEELLSEPNCDLPNLVCDECRDLLGLIATNTKLITTKTELIKELAKQADMARQLQTIPGVGPMTAMAIEAFAPPMNVFKNSRALSAWLGLVPRQYSSGGKERLGRVSKAGQADIRRLLIIGAMSRLTWLGKKSISEGSWLAQMMARKPKILVAIALANKMARMIWAMLKTGTDYRDPMKTATV

SEQ ID NO: 127643 - protein, 462 aa, unidentified
MKRSQKRRSTALKSTSETAGGIDPHQNPHAAGIDIGARELVAAVPPQSTTGPAVRTFTSFTADVEALRDWLLSCGVRTVAMESTGNYWITAYDLLEEAGIGVFLVNARHVKGVPGRKTDVQDAAWLQQLHAAGLLRKSFRPAQEIVSLRYLMRHRQTLVSAAARQIQAMQKIMTEMNLKIQHVFSDVDGVSAQAIITAIIAGERDPAKLAALRDRRCRSSLADIKSALAGNYREEYLFVLKQCQSTWQRIQDDIAACDEQIAILTQRVHAEAPGPLPDPLTGHQHKASKNSPQIDIFEEAWRYYGVDLSAVPGVSTGLLSVLMSELGTGAQILASFRSGSAFASWLGLCPDNRISGGRILKAKTRQVSNRVANALRMGVFGLHRSQTKMGEYTRRMKGRLGKAEGITAGAHKLARIVYALIATRKPYDESEAFKITPRSLERQHAQLIKQAQSLGFQLVPAA

SEQ ID NO: 127644 - protein, 323 aa, unidentified
MVPVLGIDIAKATCALALERPDGKVQHKSVPNTPDGRARLVAWLAQHAGGPVHACLEATGPYGDAVALDLVDAGHTVSIVNPAAVAAYARSELRRAKTDRTDADVIRRFCAAQQPRPWVPPAPEVRTLQALARRVVAVEAMRQQEANRLAAYQPHDAVRQSIAAVLADLTAEVARLRQLIHDHIDQHPGLRTQRDLLTSIPGIGDITATTLLAELFAPRPGLSVRQLVASAGLAPRVCHSGTSVHHRGRLSPLGSRRLRKALYFPALAALRHNPVVQALAHRLTAAGKPKMVIVAAAMRKLLHLAFGVLKSSQPFNPAIALNH

SEQ ID NO: 127645 - protein, 349 aa, unidentified
MSPKLDAAIAVIGIDIGKNSFHVVGLDWRGAIVLRQKWSRGQVEGRLANLPPCLIGMEACVGAHHLSRKLTSLGHDARLMPAKYVRPYSRGQKNDFRDAEAIAEAVQRPTMKFVATKTAEQLDLQALHRVRERLVSQRTGIINQIRAFLLERGVAVRQGLRFLRAELPRILATPCDVLSPRMVQVLEGLAVDWRRLDERIERLSSEIEALARRDAGCERLMSVPGVGPIISSAMVAAIGAGEAFSKGRDFAAWLGLVPKQISTGDRTILGKISKRGNRYLRVLFVQAAWVVLIKRKSWQRHGLKPWLEAAKRRLHHNVLAIALANKLARIAWSVLAHGRAFEASKIQVA

SEQ ID NO: 127646 - protein, 358 aa, unidentified
MVVMVGVDVHKDTHCAVAVDGVGRQLGRDRTFRTTNAGCLQLLRWARQQAAQQQAELVVAVEDCRHLTTRLERALLAAGARVLRVPPKLMAGARQSARTRGKSDPIDALAIARAALREPDLPIAEHTHASRMVKLLVDHREDLVRMRTAAQNRLRWHLHELDPGVDPARRGLDRTVELDRVQSLLQALPSEELTATTVRIALELVADIRAWTVRINALERELQDLVRRQAPQLLELPGCGVLTAAKLLGETARPQRFRSEACFAMHAGVAPIPASSGRTQRHRLARGGNRQLNAALHRIAVTQTRLDGLGKAYYQHRLARHDTKMEALRALKRRLARIVFQLLTTTPNPAAAALPQAA

SEQ ID NO: 127647 - protein, 367 aa, unidentified
MRAYVGLDIHSKSSTYVVQDARGRELGRGEVPTSPEGLAEMRERLGLEAGTEVSLESGTMAFYVARQVRALELKPVVVDAHEVRLKAHRPRQKSDERDARELCIGVRTGLYRSIVHIPSEAVLLLRETLSRRRHFVRIQTGEINAAKRVLRSGGYRTLGRKSLTTAGAWKRVLKEATEADGTRTFVDLHFQAWQAAGERVQDLEQNLETQVAGLEPACRRLRSVPGVGTIVAATALAFLSEPERFGDAKHAASYAGLVPQMDQSGDVHRGGHITKGGPAELRAMLCEAAHQAARRSNPLNPLFLKLSARLGYKKAITALAHRLCRVLYAILRDATEFDLARLGLEKGPFQVTRTRMYRLRKVPPTKR

SEQ ID NO: 127648 - protein, 344 aa, unidentified
MDYFAGLDVSVKETSICIVDDTGKIVREAKVASEPEALLAALKKPAYHSKRIGLEAGALSQWLFSALAEAGLPVICVETRHMKAVLKAQINKTDRNDARGIAQMMRAGLYRPVPVKTLRRQKLRMLLTHRKLLQSKAIAIENDLRGTLRNFGLKVGMVGTVKFEARIKELVENLPDLAALVDPLLVVRRVLRQQLGILHRRLLAVVRDDEVCRRLMTVPGVGPVVALTYRATVDVPARFRTSKAVGAVFGLTPAKYQSGEINRTGAISKCGDDMMRVMLYEAAQIMLVRSAKWSWLKAWAMKIARHRGMKKAIVALARRLAVIMHRIWVDGTEFRWTREGAATA

SEQ ID NO: 127649 - protein, 343 aa, unidentified
MYEYEPVTQFVGVDLHRRRSVIVRHNGEGQQLSVARIANDPDTLGQQLDDAGPHPEVVVEATYGWYWAVDALQAAGASVHLAHPLGVKGFRYRRVKNDVRDASDLADLLRMNRLPEAWIAPPEVRELRELVRYRAKLVAIRSSLKAQVHSVLGKAGVQIAVSDLFGVTGRARLARVPLGEAYAHRVLSLLQLIDTLDTQEARFTALIARRLDGDPGYRAIQEIPGVGPVLAAIFVAEIGDVHRFSGPDRLCSWAGLTPRHHESDTTVHRGHITKQGSKLVRWAAVEAIQLHPSTAKIVADRTRIQSRRGKNIAKVAAARKLLTLVYYGLRDGHIRALTRQVAA

SEQ ID NO: 127650 - protein, 353 aa, unidentified
MDEVKRFVGIDVAKVTLDVFIGSTGVAFTVANDEAGIQQLLRQLAAADFVILEATGGLETPVASALAAAGIAVAIVNPRQVRDFARATGRLAKTDRLDAEVLARFGEAVRPEARPLANEQAQALEALVTRRRQLVEMLTAEKNRRARAPKLLYRSIDEHIRWLEKRLSGFDDELGELIRTTPLWRERDELLRSVPGVGKVLSSTLLAQLPELGMLNRKQIAALAGLAPFNRDSGNMRGSRRIWGGRAQVRRVLYMATVAGIRSNPAIKTFYLRLRAGGKPAKPALTACMRKFLVILNAMLHNKTHWQTPALISPTSPFSPSWVRFLNTVAARAIFGPIDSRNGVTVGYCERIV

SEQ ID NO: 127651 - protein, 369 aa, unidentified
MNKFSKYVGLDVHQETIAVAVADTAGEVRYMGEIVNTPEAIAKVVGQLKRGTGRLAFCYEAGPCGYTICRQLRQLKLDCQVVAPSLIPKKPGERVKTDRRDALSLARLHRAGELSPVWIPDESQEALRDLTRAREDMKHLQRQAKQRLLSFLSRHGHRYTGRSRWTQAHWRWLEGIKFARPEQQIVLQEYIDTVQACGGRVASLDREVETAAHANAVWPVIEALMALRGIGLLAAVTVVAELGDLARFSGAPQLMAYLGLVPSEHSSGKRERRGGITKTGNGHVRRVLIEAAWTYRHAARKTAILQRRAERTPPEVQEIAWSAQKRLCQRFRNLMARGKLKNQVCTAIARELVGFIWAIGQHVIPLSRA

SEQ ID NO: 127652 - protein, 350 aa, unidentified
MAMTIVGTNPDAVIGGVDTHAEVHVAAVVNHVGGVLGVESFPTTRIGYRQLVSWLRSHGELSLVGVEGTGSYGVGLSRYLARAGIAVVEVDRPNRQTRHRKGKSDPVDALSAARAALSGTATGLPKTRDGNVEAIRVLMIARRSAVDTRIETLNQMRHIVFTATPEIRGKFEGLTAISLANTAAGLRPREGDDPVRYTTLVTIRALGQRVQYLREETKRLNRLLRPLIRQTAPTLLEVYGVGYDTAAKLLVAAGDNPERIRSEAAWAHLCGVAPIPASSGKTARHRLNRGGNRQANSALYRIMLSRLRHDQATRDYVARRLSEGKTMGEIGRILKRYIAREIYKHLPRPV

SEQ ID NO: 127653 - protein, 313 aa, unidentified
MIVVGIDVSKETLVGIAINRASKSVGSFTLGNNRAEIGSWLTKMCVKYKHLLVASEATAEYHRTLALECLASGVSFRLLNPIVTKQFTRSTVRKRKTDPADALTIAKLALAGEGAVVTAKSFDITKSYSRTASKLVQIEQKLHLMQLRFSSLAPEDKDSRESFEKCIDQLKQSVVDFRAQALSRVDKTQLKLLLSIPGIGKTIATTLVAEIGDISNFKSGKALVAYAGIDPRVKQSGRGLHHNTRLTKRGSPYLRQALFQAAFVARVHDDELKEYYQKKIAEGKRYKEATIATSRKLLYRVYAVLKRQTPYTR

SEQ ID NO: 127654 - protein, 459 aa, unidentified
MSGKRAREERRNNKNAEQEINNSGLQIVHPICCGVDVHRDFIVACIAITDALGVTSFERRRFSTYSGSLREFREWLIMHNCFDVCMESTGKYWFPVYNILEEAIAYPPLANPESRFHIVVTHPKYVKAIKGKKTDKRDAKWIANIFKFDMIRGSFIPPLDIRQLRDLCRYWVKLTSFNTSEKNRTQNCLTWSNFKFDAVFSSVFIKSASGIIDYILGRPGEKFDVTPFVDKRCKTPIAQIQEAADGEFNPIQAEKLKLIKEHMNFLSELKTKLEELILKLAKPYERQIELLLTVPCISEPLTAIRIIAEIGTDMSVFDSAKHLSSWAGLCPQNNESAGKKKTTRISKAGAYIKPLLVQLALSVGRSSKKHPEMSGIYKRIQKRRGGKKANIAIARKLLVAIYNMLLKDEPFNAELYAKADKIPVERSFTPEQALAFMRSRGYTIVDSGESQELDSKLAS

SEQ ID NO: 127655 - protein, 451 aa, unidentified
MSKLKEFEKMAVVHPKAAGIDIGSKSHWVAIGQNKEDVKEFGVYTEDLNAICLYLKKHGITSVAMESTGNYWKALFILLQGYGFDVILVNGKYTKNAKGKKTDLLDCQWIQKLHSLGLLEGSFIPDNETEKLKHLSRHRQTLLEDAASYIPKMQKALRQTNIRLDNALNDITGHSGKAIIEAIIEGSRDPNYLASLVNYRVKKSKEEIVKALTGDWRDEYIFELKQSYELYLFYQQKIQECDKQIEATLQERILREKAGTSGNLPLTSIKRKKYNKNDPKINLQELSFKLTGGIDFSAIDGVGPSTLLSILSEVGIDFSKFQTAKHFSSWLRLSPNNKKTGGKIISSKTPKGKHRLADALRHVAVVIGNNLKQGTLHHFFKRIEFKKGKQAAITAVARKLAVIIWNMMTKQIPFKAIDDKHYLKKIRENQIKGLKKKIISLNIQAHELAFV

SEQ ID NO: 127656 - protein, 321 aa, unidentified
MTDSILGIDIGKQKFSVALLIKNKTKSKSVKNSKEGFAALSDWLKKHSSKHVHACMEATGSYGDELALYLHDAGHTVSIVNPARIKGFAQSELIRTKNDTVDAGVIARFCLAMQPKPWTPPPPAIRRLQAVVRRIDALINIRTQEENRLGVAHSLVEPSIKEHLAYLYSEIKKLKAQIRSEINNDPDLKGKRELLISIPGISDTTIAIILAEIDFQKFKSVKQVVAFIGLAPKETLSGSSVKGKPRICKIGNARLRKSFYMPALVATRFNPIVANFYRRLKESGKNGKVAVCAAMRKLVHIIYGVLKTGKPFNANYETNIA

SEQ ID NO: 127657 - protein, 457 aa, unidentified
MSKAKRSSRKRAISPVHPHAAAIDVGATTHVAAVGPDRDPEPVRSFGTFTADLHRLADWFERCGVRTVAMESTGVYWIPVYEVLEQRGFTVVLVNARDAKHVPGRKTDVSDAEWLRRLHEYGLLRASFHPEARIAALRDYLRQRERLLDYAASHIQHMQKALTQMNLQLHHVVADITGASGLRIIRAIVGGERDPAVLAALRDHRCKASVETIRQALVGNYREEHVFAPAQALELYDLYQAKVAACDARIAAVLDRLQAERPVPTAPLPAPRHQTRTPNAFAFPAREALHRILGVDLTRIHGLGPYLALKLVAECGTSLTAWPSAKHFTSWLCLAPSNKISGGKVLSSKTRRSNNRAAALLRLAAVAVGRTETALGAFYRRLSGRVGKAKAVTATARKIAVLFYNTVRHGMTYADPGASYYEERYRQRVLTNLRRRAKSLGYVLQVADPTAPVAEVS

SEQ ID NO: 127658 - protein, 346 aa, unidentified
MKISRVGVDLAKNVFQLHGADRKGKTLWKRQLSRDKWLKVLFATVEPGAVIGMEACTGAHHWSRILMSKGYEVKIIPPQFVKPFVKSNKNDANDAQAICEAMARPNMHPVKVKTIEQQDMQAIHRIRNEIKTHRIAKANQIRGLVAEYGLVAPKELSSLRRVIPDWLEDADNGLTLCFRQLLQGLYEDLSSMDKRMTELDKQIAVIAQQNPIAKRLQQLRGVGPLIATALVSTMGDGKQYRKGRDMAAAIGLTPRQHSSGGKDRLLGISKRGDAYLRCLLVHGARSAMRTAKDKDDRLSRWITNLQDRRHANVAACAMANKMVRMAWAMMAKEVDYDPDFSSVSAN

SEQ ID NO: 127659 - protein, 338 aa, unidentified
MKIYAGIDLHSSNNYIGIIDELDHRLYQKRLPNQLAHIKQALEPFKESLEGVVVESTYNWYWMVDGLQEDGYKVHLANPSAIKQYEGLKHTDDKWDSFWLAHMKRLNILPEGYIYPKEERPVRDTLRRRLLYVRHRTSHILSLQSAITRNLGYKMSGQDIKKLNESDADKLFDEPFLILSATNSISTIHFLGKKIKEIEKAVKSHVHLKPEFEYLLTMPGIGDILGLTIMLEAGDISRFPTVGKYSSYCRCVKSERLSNKKKKGEGNRKNGNKYLSWAYVEAANFAIRSYPEFQSFYNRKKAKTNGVVAIKALSNKLARASYYVIRDQVPYDASKLFR

SEQ ID NO: 127660 - protein, 312 aa, unidentified
MDTLIFVGIDIAKEHLDIAIRPSGETWSISNDEQAVMELAQKLKELCPVVIAMEATGGLEMCVASGLTIVGLPVAVINPRQVRNFAKSTGKLAKTDTLDAQVLAHFAEAIRPEARFLSDEQGQKLQALVTRRRQIIEMLVAEKNRSHASHKTIQKRVKEHIVWLETELEDLDKNLGQFIRESPVWREKDNLLQSVPGIGPITSSVLLASLPELGSLDRKKIAALVGVAPFNRDSGNMRGKRSVWGGRSHVRSMLYLATLTATRFNPVIKKFYTRLIEAGKKPKVAITACMRKLLTILNAIIRYSQPWRFQSD

SEQ ID NO: 127661 - protein, 352 aa, unidentified
MEIIGLDLHKRETQLCRQQPDGHIVDERIPTSRVRFTQTFGGVAPARILLEASTESEWVATHLERLGHTVIVADPNFAPMYATRSRRIKTDKRDARALMQACALGAYRPAYRLSAPRVHARAALAVRDTLVRTRARMITLIKTLVRRDGLRVPTGTSRTVVQRVATLELATTAPALGAELAPLLAMLPGLTAQIATLDATLAAVAADDPVVARLATAPGVGVVTAVAVVATLDDITRFRSAHAVEAYLGLVPSEDSSADRRHLGHITKAGNARARWLLVEAGWRILRSKQPEMAALRAWGRAIAARRGARIAAVAVARRLAGVLYAMWRDAVPYDATKLQRRARRAGAPPVP

SEQ ID NO: 127662 - protein, 363 aa, unidentified
MNYIFVGCDSHDKTLVTKIALNLEPAEKKTFSGTRRGREKLIAYLSRRSAAAGGAKAVVAYEASGNGFILCEEIKAGGHECHVLAPTKIERSTKQKRNKNDERDADRLLEILRGHYLAGNRLPSVWIPDAQTRDDREPVRTRHDLSQKATAVRTQLQMLLKRNGIEKPEGIGKGWTKPYRQWLKALTESGTANRQGMRTTLASLLRQLEFLEEEIGRLDEAMQSVANTARWKPIVDALMREKGVGLKAALKYATDIGDFSRFRRGRQVGAYYGLTPSSQESGDNNDRKGHITREGSPSTRQILCQSTWARVRHDPHERAVYQRLVAKNPKKKKIALVACMRRLSVRLWHVGLQAQLNMTKQEN

SEQ ID NO: 127663 - protein, 355 aa, unidentified
MNSEKYIGLDVHQATISVAVMDSMGKLIMESILETKAATILEFVAGLRGTLSVTFEEGTWAAWLYDLLKPHVDELVVCNPRKNALLKDGNKSDRIDARKLADRLRLNDLKPVYHGETGVRMLRELARSYLNLVKDQTRVMNRLKAMYRSWAIPCAGRDVYYARHRAEWLGKIREAGVRRRAEHLYQQLDMLQHLRQQARRELLAESRQHPITAKLRQIPSLGPIRSALAVALIRTPHRFRTRRQLWAYSGLALETRTSGEYRCVEGQIRRSKKQISIRGLNKDHNHDLKALFKGAATRASVQPGPFQDFYQRSLAKGIKPTMVRLTLARKIAAITLTLWKKGENFDAEKLKSQAA

SEQ ID NO: 127664 - protein, 343 aa, unidentified
MDHFAGLDVSVKDTSVCIVDETGKIIREAKVASEPDALLQVLRTAAYHFKRIGLEAGPLSQWLFSALAEADFPVICVETRHMRAVLKAQINKTDRNDARGIAQMMRVGLYRPVHVKTLRSQKLRMLLTHRKLLQSKAIAIENDLRATLRNFGLKVGMVGTARFEARIKELIENLPDLTLLVEPLLVVRRVLREQLDLLHRRLLAVVRDDAICRRLMTVPGVGPVVALTYRATVDVPARFRKSKSVGAVFGLTCSRDQSGERDRPGAISRCGDEMMRAMLYEAAQAMLLRSAKWSWLKAWAMQIARRRGMKRAIVALARRLAVIMHRIWVDGTEFRWTKEAAAA

SEQ ID NO: 127665 - protein, 460 aa, unidentified
MKDRGRSQSSCAQSHRSSEPLRIVHPDAAGIDIGSRKHYVAVPPDRDPEPVRCFGCLTPDLQAMAQWLKACGIKTVAMESTGVYWIPVMQVLEEYGLEVYRVDARQAKNMPGRKTDVKDCQWLQQLHVHGMLTRAFRPADAICVLRSYWRHRKDLVEMASMQIQRMQKSLEQMNLQLHKVLSDITGVTGMRIVRAILAGERNPLVLAQMRHPLVKSSEDTIAKALTGDWRAEHLFTLRQAVELYDVYQQKIEACDGEIDRYMQSLEARGDPKDLPPRGRGTRRKNQVHFDLRRQLHRLTGADLTSIDAIDAMTAQTVISECGIDMSRFATEKHYSSWLGLCPNHQITGGKIRRRRTRKVRNRAAQALRVAAQSLHKSKTALGAYYRRMRGRLGPAKAITATAHKLAILIYRVLKYGMKYVDQGQQAYENQYQQRMLQMLVKRAKQMGYAMVDLRSGEVVS

SEQ ID NO: 127666 - protein, 356 aa, unidentified
MKKFSKQPVATIGIDLAKNSVHVFGVDAQGEVVFSRKLARHALSAFIAQQPPCRVAMEACGSAHHWARTFRGFGHEVVLIAPQHVKPFVKTNKNDAADAEAICEAARRPRQRFVPIKSVEQQDIQAIHRMRSQVIAQRTALVNQARGLLAEYGIVMPQGRAAAMRRLPEILEDADNGLSERFRAELHGLLEELRHLDGRVAHYDAHIKTVADTSEPAQLLMSIPGIGPLVATALLATLGDQWELFNNGRALATWLGLVPRQHSTGGKARLLGISKRGDVYLRQLLIHGARAMMRWVEKKEDAFSHWARDLKQRRHANVAIVAMANKLARIAWAVMTTGKRFDPARGALAKPAAVKA

SEQ ID NO: 127667 - protein, 354 aa, unidentified
MQNDRQSSETVILGVDTHLDIHVGAVISQAGKLLGTHIIQTNQAGYLELLDWARSFGSLERAGIEGTGTYGAALTRYLIKNSIYVVEVNRPDRSKRRLEGKSDPLDAENAARTVLSGSSKAIPKMQSGACEALRIISVARRSAVKACTQAINQLRALLVSAPQDVRDKLWKSKPHECVTACINSEVSERSPLRIALCSTLRSLAKRWMALTEELNELDESLDKLTRKYASNLRSQFGVGPQTAATLLAVAGDNPERLKNEAALASLCGVNPLPASSGKTVRHRLNRGGSREANNALWTIALVRMRSDPRTRIYVDRRTGEGLSTKEILRCLKRYIVRELYPLILSDLAYANRRS

SEQ ID NO: 127668 - protein, 396 aa, unidentified
MRNDVTIYVGIDFSKEKFNACLLMEQGVMGESEFPNSKTGYLKLTKWVKNTSELGRSFDSSLVLFCGEHTGTCSIGLCEYLYAKGMKIWLESALKIKYGSGLKRIKDDKADAEMIAYYAKRFYEPGSCALFEPDSADLKTLRTLYQFRNRVVCDRVAIGNRISSGAFDCSTLVRNRMVKHHKEAQKDEKDIEKEMVRLMETSEELASNYQILISFKGIGPITAAALIIYTSNFKKFDNPRKFACYCGIAPFGKQSGTSINTKPHVSLFAHIGIKAAMVQACKSAMQHNAVIKAYAQRLYAKGKHEGIVMNNVKNKVMHIIFKMIQTQTLWEQEYQQKHMKECKAIPGKNGIGATEAAPIINATLKTSSSVVECTFLEEHSFQKNCKKTSSFSCVET

SEQ ID NO: 127669 - protein, 506 aa, unidentified
MSLMTSPASSGKDGQRVPAIFTEPEYPNRRRRMIKSVGIDFHQGKHVVRCLDEMAQLCDGFSFQTTPEGLDTFEEHIFHDGSNPVIVFEPAGLTWFLMAICIRARHPDCRLVRAKGQKVAALRRYLRGSSKSDRIDALTLAKMTFIDPEQLDEVYLPPAKIHALQRLARQRKRLESDIAARKTRIGAIVESYVPGVRKTFSDPWSAQARAFLRCQLNPLAVAHDGEKALHAFLVRARHRNKTDKEESHRIYLACQSAADLYELSSRAEAVDDEFFSVFQEEIERELRLMEFEETESEAIAKRMEELYRDLHPSDNLRSIPGVGWVTAPTFLATVGDPARFHNQSAFVSWTGVVPRTRQSSDVEAKGLRMTKAGPAIMKWALFQAGDIGRRFDPQLASLYYREMVHHGKNHKQAMGAVMSHLAARVLKVLQDDRPYELRDNEGKAISPAEAKKLILLNFQVPENIRRERRRRNPVKRGSLKSQGTALPRTNEAVVTPQPVKVTIPEN

SEQ ID NO: 127670 - protein, 362 aa, unidentified
MVYIGVDLHRKVSHVVALDEAGATILSRRFDHSRDAFRRVFGELEPEPISVAFEATYGWGWFADLLADAGIEAHMAHPLATKAIGAGRVKNDAIDAATLAQLLRTNLLPEAWIAPPEVRELRRLVRMRASLVRIRSRLKCQVHAICADAGIPVAASDLFGRKGRTGLETLVLPPVTASRLAAHLRLIDDVGREIIAADREIVAAFRGDDRVRRLLPIPGIGILNAATIVAEIGDVTRFPSAAHLASWAGLTPTERSSADHVRRGHISKQGSRWLRWTMVEAAARIGTSRAAKLHRFADPIADRRGTKIARVALARRILTLVFYALRDERGCRDYPALPRPSRRPVTARSRSVMASPDGRSLD

SEQ ID NO: 127671 - protein, 347 aa, unidentified
MNFYTQQHKHYCGIDLHARAMYVCILDEQGTKLVHKNLPTTPEAFLRLIAPYREDLVVGVECMFTWYWLADLCSQEGIAFVLGHALYMKAIHGGKAKNDKIEAHKIAVLLRGGMFPQAYVYPSEMRATRDLLRRRCHLARKRAELLAHIHNTNSQYNLPEIGKRLANKSNREDVAEHFPDPSVRKAIEVDVALIDQYDQLLGEVELYLTRSAKAHDVQTFARLQSVPGIGQILALVILSEIQDIARFPRVQDFVSYCRLVKCAKESNGKRFGTSGKKIGNVHLRWAFAEAAVLFIRQSQPGKEYFAKLEHKHGKAKALTVLAHKLGRAVYYMLSREQAFDLKRFVTA

SEQ ID NO: 127672 - protein, 408 aa, unidentified
MKVLIGVDPHKASVAVAVVDEAKGELIERASFPQNRTGLRALERWAKLFPVRRWAVENASGLGRHLAQRLAASGESVVDVPSKLSARVRVLSSGNARKNDGLDALATALAASRNERLAAVDPEVGSEMLRLLSERREDLVAERTRALNRLHGLLRDLLPGGVAGTLSAPRAARILRGIRPQGASARLRRRLASEILRDVRALDRKIADLSGRIEAEVEASGTTLTEIFGIGPILAARIIGTVGNVARFPTKAHFASYSGTAPVEASSGEVVRHRLSLAGNRKLNYALHMGSPLARPGRTLGAEDTTARRSRRASPARRRCGASRGASPTPSSRVSWRTRRRLRAAPLDKEEPRTLLLGSRVDKPSSDMHWGVLGCHHDRGKQPAAVARQRGESLCLLSDATRSSPSSS

SEQ ID NO: 127673 - protein, 380 aa, unidentified
MAKDKFDYCAMDSDLNVLCTGNNCSNSKEDFQVFADVLNALRSPGVVMQIGMESTGIYHLPLYNYLRARGYRIRLLNGLEVRGMKKSRVRKSSNDAIDAQSIAQYLMTTKEKDSEPFPEDLLDLKELVTAYSIITDKIRTTKNNVIRVMDMLFRGLSNIVDLDYDSIDMLSRYSTPEEFLQADQDELLHHVTKRRADRIRNAAESAPDPPGCTKALKIELGSLLRILRVLEKEKESIEEAMGREMCNRDHVIKSIPGIGDTIGSIILGKIGDIARFKSPEKLVAFVGLDPVIKESGKMRSERPISKRGDPLLRSAIYMSTVVATRSNPVISEFYRRKVEGGMPKTKALVAASRKQCHIIWSVWYNNRIFEIPEKFRTKEE

SEQ ID NO: 127674 - protein, 361 aa, unidentified
MAMNTRLSKKQMFFNKVKLTKDDNLYIGIDVHKESYGVALWLNDTPAIDFIMPADTEKLLKLLEKVRIALKRIVYEAGPTGYSLARTLRKADFPTTVVAPSKTPRQSARDSKTDQLDAKTLARYAAKGLLRPIAIPTRRQEADRQLTRTRDQLVAKQSEVKLQIKSFLLQHGIEQPPAVRAWSANAVRALDALKLSKQLRFCLDLLVQELQFLQNQLRTMEKQLKQTFDNDRHAREVALLKTHPGVGPVIARQYTAELFNPKRFKHTTEVAKYVGLAPTIIQSGQSLRDGPVSKTGRPRFRSNLIQGAWVWVTKDPKAHITFLRILHNTGSKNKAITAMARRLAVHLWKMLCDNKPFTNIA

SEQ ID NO: 127675 - protein, 465 aa, unidentified
MARKRKTKRSGQAAKPEEIPILNPNAAGMDIGADEIYVAVPADRDEQPVQRFATFTGQLSRLSEWLKQCRIDTVAMEATGVYWIPVYQTLETSGFELCLVNARYFQNVPGRKTDVSDCQWLQRLHSAGLLRGSFRPAQEVCVLRSLTRHRDNLIRLASTHVLHMQKALDQMNVQLHHVLSDITGLSGLAILDAILAGERDPQVLARLRDGRVKASEETMVQALTGDYRAEHLFTLKQSLAAYRQYQKLMGACDLEVEQQLKQFDAKVDVKEVPLAPPKVRRRKLFSNEPKFDLRSHLYRIFGVDLTAVPGISVLTAHTILAEVGPDISKFRSASAFASWLGLCPHNDISGGKVLSVKTRRVNNRAALAFRMAANALFRSQSPLGDFFRRMRAKLGAPAAITAAAHKLARIVFHMLSTRDAYDEAILSKNERGFRARAEARLRAQAKSLGYSLVAAAAQTAQSRTV

SEQ ID NO: 127676 - protein, 351 aa, unidentified
MMIIGVDYHPSFQTIAFFVEETGECGEQELNHSDGQAERFYRDLKQRGICVRVGMEATGYSRWFERLLAELGFELWIGDPAEIKAKRVKKQKTDREDARLLLKLMREDRFPRIWVPSPENRDVRQLLWHRHRLVQTRTRIMNQLQALAMNEGKRWKSRLWSQQGRAEFEKLALGPWTSRRRSELLELVDRLNPSIEELTAAVEQEANKRPEALRLMTHPGVGPMTALAYVLIIGTPERFARGKQIGTYVGMIPTEDSSAGKQRLGHISKQGNSLLRYLLVEAAQSATRFNPHWRRRYMRLAMRRHRSIAKVAMGRRMAIRLYWMWRNGCDYSPSLEFGSYAGQLEKRQGGR

SEQ ID NO: 127677 - protein, 360 aa, unidentified
MNEITRVGVDLAKRVIQVHAVDAAGRVVVAKALPADKFAAWCAQLPAGCLVAMEACGGAHHWARKLRGFGLDARLIAGHFVTPYRMAGKGGKNDAADAAAICEAAARPHMRFVPVKTPAQQALLAIHRLREGYKEDRTACINRIRGLLTEFGIVFAQSPDALRRGLADVLEDASNELPGIARLAIQEARLHWIELECHIASCDERITAHVRSDAQAKVAAQLAGIGPVTASALVATVGDFTQFKNGAQFGSWLGLVPRQNSSGGKTQLGRITKRGDDYLRTLLIQGAKSAVMTAHKRSDKISQWLVQLLARVGWQKAVVALANKNARIVWALLSKGRVFDPNHVSTKPDVGLVISETALT

SEQ ID NO: 127678 - protein, 347 aa, unidentified
MLADELDYVIGVDPHRDTHAFAVVDVRSGGVVFEATAVADGEGYASVLRLATQRAPGRRAFAVEGTGSFGAGLARFLVSHEERVLEVGRLRRERQSGKNDALDAIRAARSVLGQTRPARPRAGGEREALRALSAAREGAVTARRAGLCQLRGLLVSTPEPLRAELRSLTRAQLLRRLVAVRPEGRQDPELRGTLLALRALARRVNALTVEERELAREIETLTRKLAPQLLEQPGVGPLAAAQVLISWSHPGRITSEAAFAHLAGVAPIPASSGQTVRYRLDRGGDRRLNRALHMILVTRRRTHAPTIAYIERRIHEGKSRREAIRCLKRYLARNLYRLLENSSPLPT

SEQ ID NO: 127679 - protein, 372 aa, unidentified
MTSIIYIGMDVHTTNYTLCCYTVDSDDAFAVVNVKPDYHEILKCMERVRSTRGGNCDFICGYEAGCLGYSLYHQLAKHGVACIILAPSTMPQQKGKSIKTDKRDAKNIAKCLAFNLYSPVYVPTAEDDAIKEYIRMRDDVKADLKRTKQQIISFCTRHGFHYEGKSRWTQAYFKWLDSLVFENALYKETLQEYLALYYTLDEKIAVYDARIEELAHQKRYEENVRKLCCFKGVSTHTALPLLVEVGDFHRFRTAQHFSAYLGLVPGESSSGEKVIHTNITKAGNSHLRTLLVESANSYSRGVVGKKSKVMKDKQGGNSPEIIAYADKANERLHRKFYKIAIRSKKNVAKTAIARELSCFVWGMMTNHISRAV

SEQ ID NO: 127680 - protein, 428 aa, unidentified
MQIQKRIQRITPTTLIVGIDVAKEVHWARITDYRGVDLMKPVKVHNSIDGFESLLSKTEKMREKHGCKQVMIGMEPSGHYWRALGWYLKLHESKPVLVGVNPYHTKQAKELDDNSQTKSDPKDAQVIAHLIRDGRFFDTYLPEDEYAELRQLNAERQRLMKQISRANNTLIALLDEFFPEYSTVWGNVTCPTSLELLKTYAFPSDVLPAPKEQMLEDIREASGGTEGAKLMAEMIKAASRSVGVKEGLRVTRLRMMSLIDELAYFEKKKAEIEKELEAVMDTLQLGEVLQSMLGVGPIISAAFLGEVGDINRFTNWKQVRSLAGLNLVENSSGKHKGKTKVSKRGRPYLRHMLYLAGECGCRCNPEMRKFYHYLRNRKSNQLNGHQAFVATGLKIMRILFHLAKTGEKYDPSKALGAVRQQQIASLAI

SEQ ID NO: 127681 - protein, 339 aa, unidentified
MNKIITVGIDLAKNVFAVHGIDEAGKPALIKPKVPRDKLLELVAQLPPCLIGMEACSGAHHWARQFRRQGHTVRLMAPKFVSPYRMSGKNDAADAAAICEAVTRPNMRFVPIKEEHQQIILCLHRTRQGFVEERTATYNRLRGLVSEFGIVLPLKVTGLRRSIVDHLEDLPGYANPCVGDLLAHADRLDERVAEYDRLIAQVARADARSKRLMERPGIGPVTASALLASIGGGHDFKNGRQVAAWMGLVPGQYSSGGKARLGRITKAGDPYLRSLLVMGARAILSGLGDKQDGFSRWARSLVERRGYWRAVVAIAAKNARLAWAVLRYREDFRLHPSAA

SEQ ID NO: 127682 - protein, 347 aa, unidentified
MLYVGLDLSRKRLDWQALEPGGAVAGVGAVPPDRDGLRLLARRLGDAGQPIKAVIESMTGARFVHDQLELAGWDVRIADAVKARGIAPLACKTDRIDCWVLAELARLELVPEIWLPDPSVRAERERARFRLHLVKHRSSLKNRIHAILFQHGIPNASSDLFGAGGRRLLERLALPEPWAATVRASLALIDTLDEQIDACAQELRELGAEHRYIPLLLTCPGIGWALAYTIASEIGDISRFASPRKLVGYTGLCPCVDQSGERDRRGPLRKNGPNYLRWAYVEAAHTAARRHPPYTAIRERMQTRHGKKRGTKIAAIEIARRLAEANWHMLTSNQPFTPAGAAASLAA

SEQ ID NO: 127683 - protein, 388 aa, unidentified
MQVAADRSQVPTAIHTDLGAIFVSLELSRSTWLITSLSPGSGEKMSKHSVHGGDIAGLMERFTQLREKARARTGKSFPILVIQEAGLDGFWIHRVLQSRGVDSHVVDPASVATSRRRRRAKTDRIDGEALVRALLAYKRGEPRVCAMVKVPTPEEEDRRRLCRERKVLIAEQVRHVNRIKGLLFSQGISGYEPLRRNRWVRLEELQTGYGRLLPEHLKAQVRRELDRLELLLRQIKAVEGERDALFAAKEASAPAPAAMLLNIKGIGPEFAAVLWSEGLFRHFDNRRQVAAYAGLAPTPWQSGAVDREQGVSKSGNPRLRTTLIQLAWLWRRHQPQSALTLWFEARVKRNGGRLKKTTIVALARKLLVALWKYVTAGVLIEGAAMKTA

SEQ ID NO: 127684 - protein, 303 aa, unidentified
MQGKVSFQEDAMPVVYAGVDVSKEWLDIHLHPLGESRRFCNDKTGIRQLKRLLARHRLASIVMEATGKFHRPAHRSLWLDGFAVAVVDPLRARMFARACGYLAKTDRLDARFLALLAESLRPPADTPPSPHVEALQELVNARSAAKCDITALQNRSKTATTALLRGELNRLVRRLEQHVERLDKEIERRVGEDPQLYRKAEILTSIPGIGRVTALALMAGMDELGSCSGKQAAMLAGLAPIANDSGARTGRRSIRAGRPAPRRALYMAGRLVGMSLQSRPCSFCRHTQSRRKTSEGHPGRRHA

SEQ ID NO: 127685 - protein, 345 aa, unidentified
MRPMYYIGLDVHKQKISYCVKDSSGRISAEGWIPATRHDLDCWMKNLPQPWTAAMEATMFSGWIYDHLKPHAATLKVAHPLMLRAIAAAKKKNDRIDANKICDCLRCDFLPECYMASTAIRERRRTLRYRNLLVRQMVQMKIKISALLMEAGVSYNKQKLHKAGYFRELLASNPDIDGSLRSLLRQCREMVVRLGKMETALIHSLQQDRLLLERVERLMSIPGIGPITALTWALEIGEVQRFSSIKKAISYCGLCGEERRSANFVQRTPISKQRNKHLQTTLIEAAKMAPRYSLTLAQLYNKERQKGNVNRATLAVARKLVAYLMAVDRGQTHFLVIDQETRTAA

SEQ ID NO: 127686 - protein, 344 aa, unidentified
MDATTVGIDLAKNVFEIALADERGHIVERQRLSRARFDGFFVNRPACRVVMEACGSAHHHARRLSSQGHDVVLLPAQYARAYVRRNKTDAADAAALIEAARCPEIRPVPIKSVDQQAVQQLHRLRSQWMAARTARINFLRGSLREFGVGIPLGAQRAIQAVRDTLANPHSPVPPLLHSSLLELLEEIDSLEQRCKRIDRDLARLNDQDPVVERLLQIPGVGPLTATALRASVVDIQRFPTGRHFSSWLGLTSREHSSGQRRRLGRISKQGDPYLRTLLIHGARAVLLAARSAQRRGSSLDRLRTWALDLQERRGHNKAAVALANKLARIVWATWRHERDFTSKP

SEQ ID NO: 127687 - protein, 355 aa, unidentified
MQSNKISFKGQNIYVGIDVHLKTWHVTTLTESGYKYSFAQHADAKELFDRLNKKFPGAHFKSAYEAGFCGFSAHYALTELGFENIVVHAADIPTTGKEKALKTVAVDAEKIAWSLKRDELTGIYIKDKDYMDDTNLMRLRQRFIKDLSRQKNRTKHLLYTQGVTYPKRFCKNGTHWSRNFMKWLREEVVLLSEEKRTLMLLCDQVEHSRKDILAVTREIRRLSTSDKYKENFSLLSSVPGFGLITSMSMLTEFDNNPMRFPNERKFVAMLGLIPTCHDSGQKKVSGEKINRGNKQLGPLIVEASWVAIHRDYQLGCYYTNCCQCMKPQKAIIKVARKLACKAYAVMKTKKPYVLS

SEQ ID NO: 127688 - protein, 352 aa, unidentified
MQMRIESKQLLPAWNGLDVAKETFDSALYMPVEPGQAPRDIMSLPKKTFARTLEGVKEFHDWSFQVRDKAGLEGGNMRIVMEATGRYSKELAGWLNAEMPFTRPVIEDPRAVKDFIKSLKLRNKTDRIDAGALARYGAERMPEPSEDMPEEYQYLRELTRQREALKDQLTAARARLTEMGEFKKMIKIQQAVIKSMEQAVAKMELEIKRCINDSEELRKSLKYAVTVPGVALITSATVLGECGPLYRHTSRQLGSYSGIAPQIRQSGTSVCGSRISKRGSGNLRRVLYMASIAAIEHNPEMEMIYNRLIAKGKKPLQARCAVMRKLLILIRAVVVNETEYDKNFAQKSILKT

SEQ ID NO: 127689 - protein, 406 aa, unidentified
MPEETIGWFAAVDWGSEKHQACVLDARGGVAGEREFPHSGAGLTELADWVQSITGEAGVVAIAVEVPHGPVVDVLLDRGFMVHSINPKQLDRLRDRFSVAGAKDDRRDAYVAASGLHTDRHLFRRVQAADPRITELREWSRLAEELKQERVRLGNRLHHQIWRYYPQLLELTDDVAADWFLDLWAIAPTPAKGEHLRKAAVEQLLKRYRIRRIDAEAVLRNLRQPAIKVAEGVAAAASVHIRSLIVRLHLVNRELRDAERKLDEFCASFEGDRQDDVAILRSLPGIGRINLATLLAEASGPLSRRDYPALRTLSGVAPVTKRSGKSHIVIMRYAAHSRLRNAVYHWACAAVRHDPKSRCRYTALRQRGHSHGRAIRGVADRLLNIACVLLQRQTPFDPEHEQPAAA

SEQ ID NO: 127690 - protein, 409 aa, unidentified
MDRTHYLYVGMDIHKETHTAVLLNYLEEKLGEVKITNNLQGFHKLEKYVTTKQGELIPIFGLEDVTHYGRNLSIFLLDRDYSVKEVNPSLSYMERMSYASTRKNDTWDAQCISSVLMRRSHLLPDANPQDYYWTMRHLVNRRNALVKASTKLMQQFHEQIQTAYPNYKGFFKELDCQTSLAFFESYPSPNYLENVSEDELGAFLRVPSHNTCSTSRARKILNLVAQETTKERDYQFARDIVIQSITRQLKAYQREIKELEKTERKMYQELGYSLETIPGIDIVTACALVGHIGDIHRFSSPHKLANYAGVAPLHFSSAGKGKDVQNKSQGNRKLYSTLYFLAIQQIYLTNKGEPRNRVYRAYFESKLSEGKTKIQALICIMRKLIRVIYVMMKKKTVYQMPEIKEKIAS

SEQ ID NO: 127691 - protein, 306 aa, unidentified
MKKIAIGIDFSKKTFDATIKRRVEDDYIEVAYSKFDNEEKGFKSFVSWVRKSVKHFPEGKGRASLIFCGENTGICSAALSDYLAEKGFDMWLESALRIKNCSGIVRTKDDKADSNRIAEYALLYFSSKVRLHEPDTKILKRLRALFTLHNMLTKDKVAKINQIKSGILEAAPQALKLAKEHLEMIEQQLKDVDRQIEKMLKDNDEFSENYRIITSIKGVGVITACCIIIKTHNFKYMDDARTFGNFAGVVPSQTEKSGTSVNIPRRVSKFHDRETNMVLSQAVNSAWSGILPYVSTMTDWLLEGCI

SEQ ID NO: 127692 - protein, 453 aa, unidentified
MASIFNAEWACFGGQSGHKGLPLKLLYLGLMVFLWAIQWLQAVGLVGEGGRGGQRSALSTASPPVRPRRIVHKSTAFAGLVLQLDSLLVRVFTLDPATEHGAQHQFFTGSPNGCFGARGLSLVQPACLTRMGVMSETIERFVGIDVSKSSLDVFVDPPVQALAAHHDYGDAALRKLAKTLAGLAPTLVVLEATGGLERRAAAQLSACGVPVAVVNPRQARQFARASGELAKTDAVDARVLCAFARAIRPAVRAVKDADTFALSQLLVRRRQLVDMRTQELQRQHSASTAAMKKSLAEHLKWLDKRIAQLDEAMGERLRASALWCVKDDLLRSIPGVGPTLSRTMLGLCPELGTLNRREIAKLVGVAPLANDSGRHRGRRRIWGGRAEVRRVLYMATQSAKRYNPDIAAFAQRLDKTGKLPKVVTVACMRKLLTIMNVMIKTGEPWQARLTPQN

SEQ ID NO: 127693 - protein, 411 aa, unidentified
MERVYDKCCGIDVHKKLIVACFRNGNKQEIRDFGASTRELLEMCDWLKEGGCEMVAMESTASYWKPLYNILEVCELNAMVVNARHMKAVPGRKTDVKDAEWIADLLKHGLLQASYIPNRDQRELRELVRYRKSLVGERNRELNRLQKMLEGANIKISGTITDINGKSARNILEHILSGKMIDSAEYDILYEKKIIAHNLKASKEQIIDDLNGVLSDLQKKMMRLLLKHLDELDAIIGELDDDIDNFMKPDEKKAAEVIQDIPGIGNTSAQAIISVIGTDMSRFPTDSHISSWSGLCPGNNESAHKRKSGKTRKGNALLRETLVVCANAAVKNKISYFYAQFTRISAHRGRKRALVAVAHSMLIAIYHILKDGVVFKDLGADYYNQFNKERKINAYLKKLKALGWEAPVVAA

SEQ ID NO: 127694 - protein, 344 aa, unidentified
MELVIGMDVHKDTVAVSLIDGTGREQAATTVENTVAGHERLITWLSERAPTARCGMELSGGIARGLATALGAAGHLVVAVSPRLSSREARRLRSRGKADPSDALAVARVTAREPALPAVRTGDAEEDLKLLVDHRDQLWSERTRVANRLHADLSIAYPGYQRTVGRALTSRSSLARVEELLAADASTRAELARRRICRLRDLDGELRELERRLTVQVGSLPTTLTTIVGISTLTAARILGEVGDVRRFPSQAAFASANGTAPLPASSGRTERHRLNRGGNRRLNRALYVIALTQTRHEPRAIAYLQRKRTEGKTRREAMRCLKRRLSDVVYRQLVADAEARVDT

SEQ ID NO: 127695 - protein, 347 aa, unidentified
MNFYNNMHPYYCGIDLHARILYVCILDQDGEICVHKEIKASPEALQALLEPYIGNIVVGVECMHCWYWVSDYCEEIGVDFILGHALYMKAIHGGKAKNDRIDSFKIAKLIRGGNFPLAYTYPKRMRATRDLLRRRTKIVRHGAQLKGHVANTTSQYNLPPNKVNLKNKGSREIIRETFPDPVVQRNIDLDMALLDCYAAELSKIEWFIEQQAKQHNPIHLHILKSISGVGRILSLTILYEIGDIARFESVQKFASYSRLVKCKAESAGKNYGTLGNKIGNAHLKWAFSELAVLHLRGNDKVQKYLEKLQKRMSKAKALSALSHKMGRCVYFMLKNETVFDEDKFLKG

SEQ ID NO: 127696 - protein, 382 aa, unidentified
MNENAKSSVSVYAAIELSKSIWLVAVLSPSSDRVKLRQVRGGDTAALVGMLEREQACAAQVDGRHPEITVCFEAGYDGFWLARFLRKRGIRTSVLDSTSFLVNRRSRRAKTDRLDAESMVRMFKSFDQGDRTVCREVRVPTPEEEDAKRLDRERLQLSAERTRHVNRIRALLNLHGIREVKALWGGDWRKWLQVMRTADDEPLGKFLAAELTREFERLELVHAHIRDLDRQLEEGLTDGTLGIPNVDKVRRIATLKGIGKMSAVLLVSEVFHRQFANRKCLASFLGLAPSPYASGAVKHDQGISKAGNRFARRLLVELAWCWLRYQPTSTLSQWYRSTFGAGSGRSRKIGVIALARKLAVAIWRFVEDGLVPQGASLKPEAP

SEQ ID NO: 127697 - protein, 377 aa, unidentified
MFRIRFVGLDVHADTIAVAVAELDGEVRSLGTIPNRLESVRKLVAKLGPAKQLRACYEAGPCGYVLYWQLTSLGVACQVVAPTLVPVKAGDRVKTDRRDAAKLARCYRAGDLTAVWVPDADHEALRDLVRAREDARQDQHRARHRLSKFLLRHGRRPPQDVKKGWTLKYMTWIKEQVHFDQPALEATLLDYVHEVDHMAARIERLEKAIGEAIQKAPPAMRAVVEALQALRGVAQITAVTVVAELGTVSRFDSPRQLMGYSGLVSSEFSSGNRIQRGSITKTGNAHLRRVIIESAWSYQYRPWIGGHLLKRQQGLDQEVKDIAWKAQWRLHTRYKKLAAAGKKKPQIVTAVGRELLGFIWAIAVKTEAKFQPQRKAA

SEQ ID NO: 127698 - protein, 354 aa, unidentified
MTSLTDLVEVVIGVDTHVDTHTAAAVDTRTGGVLAEVTVTTDPVGYAELLRFADRHSRLRAWAIEGSGGHGNGLARALTERGEVIVELDRPQRPARRGGEKSDPLDAIRAAREAMSRSKLATPRSTGDRQALSVLLAARRSAVQAAADAQRQIFALVITAPETLRARFRGKKLPAMLTIATRLRAHPTWDTETATTATVLRDLARRALSLASEARRHEQAILAIVRSWKPELLDQRGVGPIVAATILCAWSHPGRLRSEAAFAKLAGVAPIPASSGQTIRYRLSRHGDRQLNSALHTITLSRLQYDPATKAYANRRTIEGKTPREIRRCLKRYIARDLFRLLENPPHHETLNTP

SEQ ID NO: 127699 - protein, 451 aa, unidentified
MTRRTEKSAGLPIIHDRAAGIDIGARFHVAAVTPDLCGEPVQTFQAFTGDIERMADWLVSVGIKTVAMESTGVYWVPVYEVLEDRGIEVIVANAREARAVPGRKSDVNDAQWLQRLHACGLLRASFRPGRDIVALRTYLRLRERHLEYGAAHIQHMQKALTFMNLQLHHVVSDLTGVTGMKIVRAILNGQRDPKVLAAMRDVRCKASMETVRAALVGNYQPEHIFALKQAVALYDFYQTQVDECDAEIERALAGLNADRESPASPLPEPRHKTKQPNAVNFDTRPLLYQLTGVDLTQIHGIGPYLALRLIGECGTDLSRWPTAKHFTSWLTLSPGCKISGGKVLSAHTRKTTNRVTAHLRLAAVTVGRTNTALGAFYRRLAARIGKAKAVTATARKIAVLFYNAMRFGMAYHDPGADHYESRYRERVVKQLHRRAAEFGFTLQEAAPQGVS

SEQ ID NO: 127700 - protein, 387 aa, unidentified
MAQYTINSNYASFIGMDVHARTTTARGMDLETGELHKKRFSDCPNPEEIASWAQATLTAPHYGAYESGCTGFHMCRELIKCGIDCDVMAVSSIARSTEDRLNKDDHMDAKRMLSELLNPMSTLSRVWLPDTECEGVRDFLRCYRDVSDCVRRAKQQTTSLLLRHGIVYNEKTPSGNVKSTWTKDFMKWLDTIDLGTVEANGALSYCLAAVAENTARKERMFAQVKEIANKERYKPYVDAFCCISGIDVYTAMVYAAEIGDFSRFKNGRSVSKWAGVTSKNSSSGDKHSSGGHITKAGSAHVRCALVEGCSSMDRRRYKPVTLERGQMVSERIIAACNRCNRRLIDRYRHLVSNRKKKVNVAKIAVASEMIRWVWAIGCMVQEEQRTR

SEQ ID NO: 127701 - protein, 345 aa, unidentified
MEIITIGIDLAKTLFQIHGVDVGGKVVVRKLLRRSQMLTWFADLPPCVVGMEACSSAHHWARELIKLGHDARLMPPSYVKPYVKRGKTDAADAEAICEAVRRPTMRFVPIKSPEQQAVLMLHRSRAILMRQRTMTVNALRGHLAEFGIVAGQGSKGLWGLVERVFGNDAENALVPPATRIALGALVSQIRHLQVEIRRIEAELLAWHKTSEASRRLETIPGVGIITATAIAATVTDPAHFTSGRQFAAWLGLTPKPHSSGGKERLGGISKMGDKYLRTLLVVGATSMIRYARGNGAASASWINRLLAKKPARLVSVALANKMARIAWVLLVRKENYRAPATTAAA

SEQ ID NO: 127702 - protein, 338 aa, unidentified
MRYFVGIDLHSDSNYTGVIDKKDSRIFGKKLPNELGVILKELKPFKKEIQGIVVESTYNWYWLVDGLQEAKYKVHLANPAAMQQYSGMKYTDDKWDSYWLAHMLRLGILPEGYIYPKEIRPVRDLLRKRTMLVRHRTAHVLSLQNMVNRNTGRKLKVNDAKKLSEEEISKQFEDGHLIMAVQSDKAVIDFFNEQIERIEKVVLKEVKLRYPYKELVTVPGIGEILGITIMLETGDINRFPTVSDYSSYCRCVSSKKVSNGKKKGEGNKKNGNKYLAWAYVEAANFMRRYSEPARSWHQRKASKTNQIVAIKALSNKIAKACYFIIKDQKSFDPRKLFQ

SEQ ID NO: 127703 - protein, 341 aa, unidentified
MKKFIRIGVDLAKNFFQVHGIARDGAEAVSRKLTRAKFRAFFEGVAPCRVGMEACGSAHYWGRELKRMGHDVVLIAPIYVKPYVKRGKNDAADAAAICEAMSRPDMRFVPIKSADQQAVLMLHKTRELLVKQRTMIVNALRGHLSEFGLIAAKGIQRVHELVAMALGEEGFPEAARQAVAALAEQSEQLDGAIDGLEKQIAQSGARNPMVRLLKEIPAVGPLISSAMAASYPDPSVFKSGRDFAASLVRPPSQHSSGGKEKLGSITKKGNRYLRKMLVVGCTSVLRVAHKYKGALAEWIVAIKAKKPERVAAVALANKLARVCWAMLSTGEGFREELYAKA

SEQ ID NO: 127704 - protein, 460 aa, unidentified
MPTSSSRTKKRKQKVSVEQDWPLIHPDAAGVDLGSREHWVAVPPGRAAQSVRRFGTFTPDLEALAQWLRECRIRTVAMEATGVYWIPLFQLLERQGFTVLLVNARQIKNVSGRKSDVQDCQWIQRLHSYGLLGASFRPADAYCVMRSYLRYRDELVAGRGTQTQHMQKALTQMNVQLGQVLSDVNGQSGLAIIGAILQGERNPLKLAGLASVRVKASQERIARALIGDYRAEHLFQLKIAFELYETYAAKIAECEQELARELERLPDRVDPNVKPLPARAQPNKNLEESLRLGLYRKLGVDVTAVEGIGAVAALTLLTEVGPDLSRFKSEKHFASWLGLCPDNRISGGKVLSCQTRRVVNRLSDVLRLAATTLERSQSALGAYYRRMKAKLGAAPGITATAHKLARILYRLLKHGEDYVRQGMADYEKKHHQRQLNHLNKLAASMGYGLVQNQTLAPSVS

SEQ ID NO: 127705 - protein, 346 aa, unidentified
MSEAAVYWIGIDVAKKTFDAALVRPGQHFPETKLRDVPVERFSRDPQGVEQFVAWWRGLLKQAPQAPAVRAIMEATGAYSIELTAWLCRQCPQLAPAIVNPEQTSAFMKSMGLRNQTDRLAARALAFYGAERRPAPYEPLTPGHRPLRELSRYRDALVGERVAESNRKEQRMQSKCVCVLRDRRERQRKRDIAKVEAEMKRVIETTPHLKKDFELLVTIPGVAFITAAVILAEMGDLRRFARARQATAFAGVSPRETTSGTSVNGQPHLCKKGSARVRQALYLAAMAAVRGKNQLRHTYEELLQHEKVPMVALGAIMRKLITIMRAMLLSETTFKTLWKTPLRKTA

SEQ ID NO: 127706 - protein, 407 aa, unidentified
MDWADQKHQYALRESDSSRVEEGEIAQKPEALREWLNRLRERAGGRWVAIAVEQSRGALIYALMDYDFVLIYPINPKSLANYRKVFYPSGGKDDPRDADLALDYLFKHRDRLRLWKPESPEIRCLRLLTEERRKWVDLRTELTNQLTSNLKTYYPQALEWAGLLKDDTACDFLERWPTLAELQKAGTGTIRRFFRAHGARRQNLEEQLGQVPGAQPLTRDSAVLTAGAMLTVSLVQQIRPLNRSIERFDRKIAELFKNHPDHFIFTGIPGCGPALGPRLLTLFGDDRDRFDSAEQVQIVTGIAPLIESSGKKTKQSPGVVHFRWACPKFVRQSVHEFAVHSLSRCPWARAYYKMQLSRGKTHHMAARALGFKWLRILFVCWRDGVAYDDGRYMESLKANNSPLLAFL

SEQ ID NO: 127707 - protein, 341 aa, unidentified
MEYCGIDLHAEQSQICILDEDGEVMETSRVRTSRKALERFFSRDRMRVVMEAGGSSPWVSRLLDSLGHEVVVCSPRRVRLIAESKLKNDRVDAEVLARLVRLDPGFLRPIQHRSEEAQLLRANLKVRSAMVEARTKWINTVRGLLRSFGYKVSGKVPHTFAERVDKMELPGELRAVIEPLLEQLDLLSGEIIRRNEHLEGMVKELPEVQHLREIPGVGPVVATYFVLTIDDPHRFKNSRDVASFFGLRPSMRESASVSHFGRITKEGDPEMRRLLVQAAHACLLTKADSELKSWTLALAERKGKGKAVVALARKLAVLMHHLWVTGEVYQASPNKKDTQAA

SEQ ID NO: 127708 - protein, 428 aa, unidentified
MKYNTQNAKIKSITEKTLIVGIDVGSETHFARAFDWRNYEYSKKPLEFSNTEAGFMTLKAWMADFAEKYGKNVVIPGMEPTGHYWFNLGAYLQDNGMKPVHVNPHHVKKSKELDDNNPNKNDRKDPKTIAALVNEGRFSYPYIPTGIYAEIRSLSNLRLQTQEEITRIKNRIARWFSIYFPEIKDVYRNPDSVSGLMILKEAPLPQDIVKLGVDGINKIWRDAKLRAAGLKRAKTLVTAAEHSIGSQEAPDSARIELKNLLNDYEIYKNREEDLMSLTAEKLSEIPHIDKLLEIKGVGLKTVSGFVAEVGDITRFDNPKQLQKLAGYAIVECSSGKHKGESHISYRGRKRLRYVLYEAAISLIARNEEFKEVHRYYRTRKENPLKKMQSVIAVACKVLRIFYTILTKGVTYDGAKMMQDIKRPQMLAA

SEQ ID NO: 127709 - protein, 347 aa, unidentified
MPMLADRVDYVIGIDCHKERHVAAIADGLGSLKASLSVTTDADGYRSLVKWADKNASGRRVWAIEGAGSYGAGLTDWLASKEEWMVEVDRPKRPKRKAGIKSDEVDALRAAKDALAAKRLAEPRRRGGLEAVRVLKISRKQAVQVSAVAVVQLKALVVSAPEGLRARLRALSAAQLVDTCAALRSQPSQSVEWVATLLALRTVARRAQAAAADAAELDRELSAAVKAQAPPRLLGEVGVGTVVAAELLSVWSHKGRLHSEAAFAMVAGAAPVEASSGQVIRHHLNRSGDRQLNSALHTVVLTRWRQDERTQAYIARRRAEGKSDREIRRCLKRHIARHLFRLMEAAA

SEQ ID NO: 127710 - protein, 355 aa, unidentified
MNDEKYIGLDVHQATISVAVMDTTGKVVMESILETRAATILEFFAGLRGTLWVTFEEGTWSVWLYDLLHLRVDKLVVCNPRKNALLKDGNKSDRIDACKLAELLRGNQLKAVYHGETGVRMLRELSRSYLTIVKDLSRVMNRLKAVYRSWAIPCAGRDVYYRRHRTQWLAKIREAGVRRRAERLYEQLDMLQHLRQQARRELLAEGRKHAITAKLRQIPYLGPIRSVLAVALMQTPHRFRTKRQLWAYSGLALETRTSADYRYIEGQLRRSKKTVSIRGLNKDHNHDLKGLFKGAATMASVRPGPFQDFYQASLAKGIKPTMARLTLARKMAAITLTLWKKGENFDAEKLKSQAA

SEQ ID NO: 127711 - protein, 355 aa, unidentified
MKNVLPQRTVGMDLGDRYSYLHILDQLGECVEEGRLRTTPQAMTHRFGAAPAARIVIEAGTHSPWVSRLLDSLGHEVFVANPRRLRAIYDNDAKSDRVDAEYLARIGRLDPKLLRGIQHRSEETQACLAVIKARDTLVRTRTRLVVHCRGMAKALGTRFPTCSTASFHRKAPEHVPLALRPALAPLLEMIEQITTAIRAYDREIEAIIDAKHPECRTLQQVTGVGSVTSLTFALVIEDPARFRKSRDVGAYIGMVPRRQDSGDSTPQLRITKAGDPLLRRLLVQSAAYILGPHGPDSDLRRYGERIAARGGKNARKRSRVAVARKLAVILHRLWASDATYEPLYNSNTEEPPIAA

SEQ ID NO: 127712 - protein, 343 aa, unidentified
MHGVTTIGLDIAKSVFQVHGIDAIGKVVIRRQLKRRYVLAFFQKLVPCLVGIEACASSHHWSRALTALGHTVRLMPPAYVKPYVKRQKNDAADAEAICEAVTRANMRFVDTKTAEQRGCLMLHRTRHLLIRQQTAVINAIRAHLAEFGVVAPVGRRGVEELLDIATASSEERVPEVARACVGALGVQLRLLKAQILEFDRQIMAWHRSNETSKRLDEIPGVGPALATALVASVADPKAFRSGRNFSAWIGLVPKQHSSGGKDRLGSISKQGDRYLRSLLTAGALAVIRYAKIHGTRHRPWLAALLARRPTKVAAIALANKIARMAWAMMVKGERYKEPAALAA

SEQ ID NO: 127713 - protein, 423 aa, unidentified
MRVVYQVCCGVDVHKSFLVATIITTVNNSIFPSYKKKRFSTFNKGILEFKAWLLENNCHHVCMESTGKYWVPVYNLLEDVIHVTIANPKWVKAVKGNKDDTKDSKWIGDLFRLGLVPGSFIPPKDIRQLRELTRYKAKLINARTAEKNRFQNALTVCNVALDSVVSDIYGKSATSIINYLIESPDNSIVEEEITSRLLRSLKKKSATVIESIEGYTMTDSQKERMRIIRSHFDFINECIARIDEKINLLIAPYENYITLLCTIPGVDRNAAIVIISEIGTDMSQFSNTKRLCCWAGLTPGNNESAGKKKSVRITRAGVYLKPALVQVAHASVICVDQPYYANKFRGIMKRRGKKRTIIAIARMILTAVYHIMKTGEVWNPSDLSEIDLTPEMAEKRRTRDIKRAVNLLVAEGIISAETQLSLS

SEQ ID NO: 127714 - protein, 366 aa, unidentified
MEATERRGRWPPAPALGDVARPPSGHNRGRARDLRHRHARPNSRWLPIVRTRQVTVTQIVCGVDVSKRRLDAHVAPSGAFASFNNDAAGIAELASFCRRHDVQLVAMEATGGFERMAFLSLWEVGIACGLTNPKSVRRYAEAMGILEKTDRLDAAVIARFAIAKELKPTNPPSAAQLRLNALVARLRQITDDLTVQKQRLSSAASQEVIDSINEVVALLKRQARALEGEIASMIDDDPLWACLDAALRTKGLANRAVARLLSELPEIGIYSNKAAVKLVGLAPLADDSGAKTGKRHIRGGRAGIRSILFLVADIVRRFDESLGAFHHKLTAAGKPKMVVRIAVARKFLVRLNARAREAREQYALAT

SEQ ID NO: 127715 - protein, 420 aa, unidentified
MECSEPSSSPRGSSSFQFVVGIDIGSEVCSFCVLNQDKSQVIKPTEFGNATPGFALLTKKLEGLGSSPKQVLIGLEATSRYGENLYHHLENLGYHLCLLHPRQTHSFAQQRGLRAKTDKLDASTIARLLLSGEARHGYVPSELITTYRELVRLHTQLQDEGARYKNEIHALLSVLFPEIGQVFIDPCRPTALGLLKCYPSAQAIAGAGVDAIAAILHELAPRSYGRRTAEQLVQLAQQSVSSAIAISARSTTLKILCDQLEHTQKNRAQLEEEIDTLIEHDDDIKGLKSVPEFGRKMIAVLRAELGDVARFQHIDQVVAYAGMDIEVKESGKWRGQVKLSKRGSGRLRQILYMTAVRCVRLKNSAFGAYYHRLVARGMKAREALVAVMRKMLIIASHLMKTGEMYDSAKVGAPSVIQPRG

SEQ ID NO: 127716 - protein, 403 aa, unidentified
MINIGIDWSDKHHDFCILDEVGERLDLFNITHGQDGFELAHRRIAKHASPEQVKVAIETKDSLLVDFLCEMGYTLYFLNPKQTDRFRDRHRMSRSKSDAFDAYVLADAVRTDAHLFNALSPLDEESLRLRILTRTRAGLVGRKVAVQNEITTYLKRYFPVASELFGGIDNLEAISFLLQYPTYEQAKTVSQTRIASILGKHADVSKAIAARHAEQAHAKLRQAQPVPAAGVSRSYPLAVKSLLRQLKSILLEMEALEADIRDSYDKHPNKDLVGSLPGVADTLGPVIAAEIGADVTRFSDLRTLKAFGGSSPVTIQSGKFRSVHFRRACNVHLRRALHLAAQGAIRKAGWARELYDRLRAEGKSYGRALRSVADQLLEMLYVILIRRTPYDEAYHLRMKALHG

SEQ ID NO: 127717 - protein, 321 aa, unidentified
MTYVGIDVSKATFVVAYSSAKSSETKTFKNTTKGIREFIRTISPKENHCVLEATGNYSMLLVYLLSKAGVTVSMENPLKIKNFARVMLSVVKTDVIDARLIALYGERMQPAPFKLRSDSLLLLKQKRTVLRQLKKQLTANRNLEGSLKVLPFIDSKCKKVLEKTIKFLEKQIEEMEEELTSLAEIEYKKQMDLLTSIKGIGATLAAALIIATGGFTYFDNAKQLTRYLGLSPTYQQSGTSVNVKGHINRNGDAYLRSQLYIGAMASLRCNTECKACFDRLRSNGKPGKVAIVAVANKLIRQAFAVVKHEKKYIDGYKSVKP

SEQ ID NO: 127718 - protein, 345 aa, unidentified
MPIVGGLDIHRRQITFDYLDTVTGQVCRGQISPADREHVRAWLARFADRDDVAFAVEGCAGWRYVAEELAAAGATAHLAEPADTAARRGRKRHAKTDKTDARHLRMLLAEGRLPECWIPPGHILECRALLELYNDLRRERTAWAQRIHAVLFHQGAPVLAEGALRTEKGVAELQAAAAAHLSAAGQLQVATALEVIDALEARLHVVRHQLTDAARHLAGAKALAARLYGVGPVTALAITCWLAGAGRFSSSRQAVRFAGLDITVSSSDRKGPPGKLSRQGPPVLRWAVYEAGKTHARTSAPDHRYYAQVKDRKNSKRACLSEARKILRQAHHILAELGDDALAAA

SEQ ID NO: 127719 - protein, 352 aa, unidentified
MSEITTIGVDLAKEVIVVCAGDRSGRPLFSRQFTFHGFAQWAATLSRATFGMEACSSAHHWARWLTEHGHVAKLMAAEHVTPFRMSKGAKNDRNDAQAILAAVVQPAMRFVSVKSVEAQAMLAVHTMRRGWTAERTALINRTRSLLAEFGIWLGRSASRLERELPELIDGERVHPRVRLLLHQTRVQLTALDQQIGDCDRQITNHAKHSDAAQRLQAVAGIGPVTSSAIVATVAHAKDFRNGRQMAAWLGLVPRQSSSGGKARLGKITKRGDTYLRGLLTQGARSALQSAVTSAPDNRSRLQSWIVSVHDRIGYHKTLIAIANKHARILWAILAHGDEYNPDAWRRYATAAA

SEQ ID NO: 127720 - protein, 324 aa, unidentified
MSASCVVVGIDVAKAHVDVCVLGAQFKAQRFDNQAEGHSALTAALQPLGVALVVMEATGGYETELACALQAAGLPVAVVNPRQARDFAKSMGRLAKTDAIDARVLAEYAAVLLRRDDLARLLRPLPDAQQQWLAALVTRRRQLLAMLLAERQRLQITPRGLHPSIEAVIAVIKAQLDEIDGQMVGHVREHFGELDALLQSARGIGPVASATLIAELPELGRLNRREIAALVGIAPMANDSGASKGRRRIQGGRFDVRRVLYMATLSACRANPVIKAFYERLIAAGKLPKVALVACMRKLLTMLNAMVRSNKPWDSSLHNSPLGA

SEQ ID NO: 127721 - protein, 349 aa, unidentified
MMVIGADYHPSFQQIAWTDTTTGECGERRLTHSDGEADSFYRSLRGCEVRVGMEATGHARWFERLMAELKYELWIGDPAQIRAMRIRRQKTDRRDAQHLLKLLLEDRFPRIWVPSAEERDLRQLLCHRHRLVQMRTRIKNQLQALAMNEGVRRKHGLWTPSGRTQLESLRLARWAGRRRQDLLELLDRLTPRIEELTQAIQQEAERRPDVRRLMTHPGVGPITALAFVLIIGSTARFRCGKQVGSYLGLTPCEDSSADHRRLGHITKQGNSLMRHLLVEAVQVVVRCDPDWRRRFVHLTMRRQRAIASVAMARRLAVRLYWMLRKQWDYDQLQKFGSHVGQLAQANGVK

SEQ ID NO: 127722 - protein, 453 aa, unidentified
MAQRNRSISLKPGRSRAALTITHPNVAGIDIGSASHFVAVPPDRDDEPVREFASFTVDLNANAEWLQACGVDTVAMESTGVYWIPLFELLESRGFTVFLVNARHVKNVSGRKSDVLDCQWLQQLMTYGLLSAAFRPAEQVCVLRALARQREMLLKSQARHVQHMQKALTQMNIQLANVISDVVGVTGQKILRAIVAGERDGLALAACKDVRIHASAEDIAKSLQGNWRAEHVFALKQALALFDFIGTQLGECDREIEAQLQGLQAHDGEPAKGKKRSKARNAPKFELRTQLFRMCGVDLTRIDGIDVTTALVVVSEVGADMSRFASVKHFTSWLGLCPGTKITGGKVMSGKTRRCVNRASQALRLAAAALRSSKSAPGAYYRRMCSRMDKPKAVTAAAHKLARLIYTMLTKGQEYTDQGQDYYEDRYRERVLRSLSQRAAKLGLKMVPITQPS

SEQ ID NO: 127723 - protein, 347 aa, unidentified
MNFYNNMHPYYCGIDLHARTLYVCIIDQDGHTCVHNQISADPNKLLNILKPFIGNVVVGVECMDCWYWVSDFCDDMGVDFILGHALYMKAIHGGKAKNDRIDSFKIANLIRGGNFPLAYVYPKAMRPTRDLLRRRMKIVRHGADLKAHVANTTSQYNLPPNKVNLRNLDAQEKLKSSFPDLVVQRNIDMDMSLLQCYANELNKVEWFIEQQAKQHNPVHLHLLKSIHGIGRILSLTIIYEIGHITRFHSVQNFASYARLVKCKAESAGKSYGTQGHKIGNAHLKWAFSEAAVHYLKGNDKAKKYLTQLQKRMSKAKALSVLAHKLGRCVYFMLKNETVFDEEKFLKG

SEQ ID NO: 127724 - protein, 373 aa, unidentified
MKDVTTYVGIDAHKKDLFVAMLIGGQTTPVTWQLANEPQAVRRLVRKLEREAPGAVQVFYEAGPCGYALQRQVTTARVHCDVVAPALIPRKPGERIKTNRRDARKLVELGRAGLLTAVQPPSVADEAVRDLARARDDAREDLQRCRHRLGKLLLRRGLHFSSRNWTRAHRAWIDGLSWAHAAERAVVDDYLLAVDQTEARLTELDARLADLAERDPYREPVGWLRCFRGIDTLSAMLILAELHDFRRFASARALMAYLGLVPGEDSSGEKHRRGRITRTGNALVRRVLVETAWHYQHRASVGVALARRRTGQPARVIAVADKAQQRLCRRFRKLAAEHKPPPKIAVAIARELAGFVWAALQPAPAGAIEAAAH

SEQ ID NO: 127725 - protein, 401 aa, unidentified
MVSDFMKGRYNLMKIFVGIDIAKLNHFAAAISSDGEILIEPFKFTNDADGFQLLVSKLESFDKNSIIIGLESTAHYGDNLVRYLVAEFYQVCVLNPIKTCQMRKNNVRKTKTDKVDTFVIAKTLMMQDDLRFITFFDLDMMDLKALGRFRQKTIKQRTRLKIQLTTYVDQVFPEIQYFFKSGLHQHAVYALLKEAPSPKEIASMHMTHLANLLKVNSHGHFTKELAKELRVLAQKSVGANDSAISIQITQTIQQIELLDSQLEKTEAEMTDIMKFNDSVIMTIPGIGYINGGMILGEIGDIHRFSNPNKLLAFAGLDPSVYQSGNFQAKTTRMSKRGSRVLRYALVNAAWNVVRNNATFKAYYDAKRAEGRSHYNALGHCAGKLVRVIWKMLTDEVEFNLE

SEQ ID NO: 127726 - protein, 408 aa, unidentified
MELVALYKRVIGLDIHQAQITACALIEEADGKPPRIEQRQFGAFKRDRRELADWVAALKPDEVVMESTGIYWKSPYAALEAVGIRAKVVNARHVKNVPGRKTDVGDAHWLATLARAGLLRGSFIPPTKLRELRLIARQRQKLVGQLASEKNRLHKVLTDSGIRLGVVVSDLHGQSARAMVKAIIAGEPLLEVLKLASRRLKASREELFDALQGDMTASHRFVLDELLRHIEEIEARITRFDARLLDELESERNTLALLQTIPGVDLIGAAMLLVEIGGDMNAFGSADCLASWVGICPGNNESAGKRKSGQIRKGNLYVRRLLCEFAHAASRTTSVFKSKFQSLVVRRGYKRAIIAIGHKILRTIFFMLKRREHYRDSAVDYEALSVQCNAPRWIKSLIKFGFIPPAKA

SEQ ID NO: 127727 - protein, 421 aa, unidentified
MAQQVFDRLLERVAGLDVHKAQVTAAVRVPDGDGGRVQHVAEFSTTVRGLMALRDWLEAHRVTDLAMEATGVYWRPVWAILEDRFKCILVNARDVKQVPGRKTDVGDAAWIAQLLEAGLLRASLVPPKPIRTLRNLTRYRKTQIEERQREANRLHKILEDTGIKLDCVASDILGKSGRAMLDALVAGTTDPVVLADLAKGRLRAKIAALTEALEGRFDSEHALIVSAILAHLDFLDEQIDRLSDAIGAQLGPFATAVELLCTIPGVQRRTAEVIIAETGGDMSAFPSSRHLASWAGACPGNDQSAGKRRSGRTRKGSRWLGIALTEAALASTRTKDTYLAAQYRRLRPRRGHKRALGAVKHSILVAAWHMLSTGELYREPGGDYFERRRDPQREINRLVAQLQRLGQNVIVEPAPSTPAPA

SEQ ID NO: 127728 - protein, 363 aa, unidentified
MPINLRYVGLDVHAETIAVAVAEADGEVRSLGILPNRLEAVAKLIRKLGPREHLRVCYEAGPCGYVLYWQLTRLGVPCDVVAPTLVPMKPGDRVKTDRRDAEKLARCYRAGDLTAVWVPDAAHEALRDLVRAREAAKQDQLRARHRLGKFLLRQGRRPPEGVKPWTQRHRRWLDALHFELPAQQATLADYLYEVDHAAARVARLESALDEAVAAAPAPMRAVIAALQTLRGIRQVIAATIVSEVGSLARFRTVPSEHSSGDRVHRGAITKTGNAHLRRVLVEAAWAYRFPPKCAKGLRQRQRGQPAAIIDIAWKAQQRLCHRYHRLLARGKPTPHVITAIARELVGFIWAIGIAVERGQAMAA

SEQ ID NO: 127729 - protein, 432 aa, unidentified
MISVSQPVAPEDSVFAAFVGLDWADQKHDLVLYDPRGGPPQPRQLPHTPEAIDEWACDLRQRFGGRPVAVCFEQTRGAIAYALLKYDFLVLFPLAPARLTSYRESFSNSGAKDDPTDAALLVDYLLRHRDQLRVWQPDSPATRELLLLAEARRNAVDQRTRLSNQLTAVLKQYFPQALVLVGHDVDTPLACDFLSKWSTLAAVQAAAPVTLRKFYYGHSCRNEERIVERLNLAKAAIPLTTDVVLIQVGTLQVQCLVAQLRVLHKAVAIYEARLVELMDQHPDAALFRALPGAGPALAPRLLAAFGTDRERFQSASELQTFSGVAPVTKRSGKRCSVQRRWACPRFLLQTFHEFAFCSCKRSTWAKAFYLQQRTARKGHHAALRALAFKWIRILFRCWKSSTPYTEERYLASLRRRNAPLLTFLPAAATARA

SEQ ID NO: 127730 - protein, 429 aa, unidentified
MSYRIAGIDVHKKMLAVVVSDVEIESEYQFERRMFSSNPEQLRSLATWLVEQKAEEIVMESTAQYWKPVWETLERYWKPFCEKREGARRRSGTLHLAQALSNRGRRGRKRDFVDAERLVKRLVARELTLSFVPDTEQRLWRTVTRKKYQLRRDVVRLNNQLESLLEEAHIKLSSLVSDLLGVSARRMLKALADGETNPAALAALAHERLRATPEQLCDALGACTELNPVYRRLLKMTLEHLQILEQQIGQLDQELATLLHPHQDAVERLAEVPGFAVDSAQQIIAEVGPAAATFPSEKCLSSWVGACPGEEESAGVNYSHRSPKGNRHMRRLLNQTANAAVKAKGSIFEIIYRRCVPRLGHNQAIGVIAHRQCRLIWLILHQGTRYEERGPAVTKRSRYQRTWRMIRQLRNLGYRIELPNPQASQAQAQ

SEQ ID NO: 127731 - protein, 379 aa, unidentified
MKLNSQMELGVFFRQCVGVDISKDKFTACLYMFDRAADVGCHTASVDFANTRQGFNQLVRWSRKEAQRGYPLTYLMEPTGVYYESLAHHLHKIGQTVYVVLPNKARKFCEAEGIKTKTDAMDARCLALMGCVSRKLCPWSPPEPIYRELRQLTRFRADLCKVRTSMENRKEALQHMVGVCSDVLGGCDKLTREIDKLLNQNEKTIALKLAENKDLMTKVNRVATIKGVGWTTVVSIVAETEGFHLIKNRKQLASFAGLDVIARQSGKEDPKHGISKKGNANIRAALYMPALSATRCNRQMKDTYNRICLKHPKEKMIGLVAVMRKLLLLIYTLWNNGEQYDPAKGQTDTTSEAESGEYSQQMTQEPDWNAVNQDGEPVS

SEQ ID NO: 127732 - protein, 348 aa, unidentified
MVRFVGIDISKTKCRAAIMDRAGVILEEFTFTNNHEGIEGLTSRLTMHDRVVMESTGSVWTNLYNHLDDRHIPVTLANPLKTKAIASAKIKSDKVDARILAHLLRSNLVAESYVPPKHLREIRTLIRHRLAIVKIRTMVKNEVHALIDKHGFACPCSDIFGKAGLEWLRSLQLPALDRLILDNHLTHLESLNQQTDRVDDEIQSKAVEDLDVRLLLSMTGLNVYSALLVKSEIGSITRFPHYKKLASWTGIAPSLHQSGRIEYHGSITKQGSRTLRWVMVEAARVAVNHDPRMRAFYERVKHRRGDQKAIIAVANKMLKIIWFMLTRREPYESRNEKRYQRKLNSITD

SEQ ID NO: 127733 - protein, 344 aa, unidentified
MEITTIGLDLAKSVFQVHGVDATGQVVVRKSLRRAQMLPFFTRLPSCLVGIEACGTSHYWARELIKLGHQVRLMPPAYVKPYVKRGKTDAADAEAICEAVARPTMRFVPVKSPEQQAARSMHRTRDLLVKQRTQLINMIRGLLAEFGIDIPKGIERALLMARRIVDGEAPDVPMEAAKIVSTLSQQALDIHVRLREIDRDLAVCLRGNDVARRLMTIPGIGPVGATALAASVTDPHQFRSGRQFAAWLGLTPLQKSSGGKERLGRISKMGDKYLRKLLIVGMTSLVRRAKYNPKTVDPRLADLLARKPVRVATVAMANKTARVIWSIMARGETYHADHRPALAA

SEQ ID NO: 127734 - protein, 270 aa, unidentified
MHIASIGIDLGKTTFHLAALGERSKVLVRKKFSRAQLLAYTANLPSSLIGLEACSGAHFLGDALREQGHRVRLIPAQFVKPYRKSNKNDFIDAEAIAEAVTKQNMRFVPIKTQEQLDVQAMHRVRDRLVQRRTALINEIRGFLLERGITFPAQPIHLRKNLPTVVEDCAQNLTPRLRWLLDRLWQEWKQTEIDIETVTDEIERISAEDERCRRLRQIPGFGPLVSTAMVAAIGNGAAFRRGRDFAAWVGVVPRQYSTGGKQKLFGKFKAD

SEQ ID NO: 127735 - protein, 343 aa, unidentified
MPHYVGLDVSQKTTAICVVDAQGKRLWRGVCATDPGPISARISQHAGVDAKVGIETGSMTPWLVHGLRAAGLDVACLDARRVKAALQMQLNKTDENDAEGLAQIMRTGWYRAVHVKSLDAHRARALLGARAQLVGMTTRLSNMIRGVLKTFGLLPGAGRGLRFDRKVEALLEGVPEIALVVRPLLATWRQLRQQIAVFDKAVLQQVRADPICRLLMTVPGIGALSSLMYVSTVENPSRFSRSRAVGAHLGLTPRRYQSGETDRSGHISRCGDGLARTLMYEAAIVILHRVKRSLHLKDWAEAIERRSGSGKARVALARKLSVILHSVWRSGEPFRWAAPAMAA

SEQ ID NO: 127736 - protein, 434 aa, unidentified
MEEVTGEPLYRDRVCGIDIGKAELYATIRVPSDKDPARRASETRRFATTRRGVLALADWLRCWQVPAAVMEATGDYWKGPFYRLEAEGFECVLADAKQVKNLPGRPKRDPSDSSWLAQCSERGAVRPCFVPDPEFRVIRLHTRYRRDLTEERTREKNRAEKLLESAAIKLSSVVTDLHGVTGRDIMDHLIAGERNAKALAQLARARARRKITELEHALEGAEFFTPELAALLKAMLERIDGLTAEIGKLSEVIERLLAPYEEPLAQVESMPGWGRRSAEDAVAETGAGMSKFPTGGHLSSWGGRTPLDHQSGKRNGRARHKKGNTYLGAITGETAVAAGKTQTREGARYRKLARSRGKNKACVAVGNTQLKVSRKLLSNPGMRYQDLGPDYYERRAQTRRKIAYHVRELEELGLEVTLCRPGPAQDDPEPTQAA

SEQ ID NO: 127737 - protein, 334 aa, unidentified
MWHVGIDLHRATVVIAAVNDAGEAMDAVTIRCEDTPAIVETLQKLGVFRAVIEASGTYRWLYNLLRPYGTILLAHPLRLRAMIQRRSKTDKLDAHLLANLLRINQIPLAYIPPEPYQQLRDLTRCRVRLAREQAEVKIKLRALLARQNRQAPYRMPFGVYGIAWFRKQDFGPIENLVRDELLQRLGHYQRQLAIIDEHIAPLAENFPQVEVLVDIHGIALFSALLIVAELGEVERFRTARQVGAYAGLTARVQQSGGHCYRGSITRQGSPWLRWILIQAAMKAIHNDAALKNFYTRVRKRSSAKIARVATARKLAEICWKRLRRWQREHAGLAA

SEQ ID NO: 127738 - protein, 365 aa, unidentified
MRDCINWIGFDEDASKIVVAHVVGYEQRARERFTVEFNERGLRQLMRRLKQLEGEVRCVYEAGGSGYELYRYLHGHGMGCEVAAPSLTPRKPGERIKTNGRDAEKLAILYRGGELTMICVPDEARESLRDLVRAREDAQQDLLRQKNHLTKLLYRRGLRHGDGRRWTRAYWQWLRGLRVDDAHLQTVLDESIVAIEDAAERLRRLHAAVMAAAEEPAYAAMVRRLMVFRGVGVLTAVSLIAELGDLRRFTQASKLMAAVGVVPSEFSTGPHQRRFGITKTGNAHLRYLIVEAAWQARHRPSAHRAILRRRAGQPPEVVAIARRCEQRLHRKYIRMIARGKPSSKAAVAVARELLGFIWAVAQIPL

SEQ ID NO: 127739 - protein, 477 aa, unidentified
MAAKQEATSQVKPNRKQRRDQQRRIWTADPGLEVVHHDAAGIDVGNSEHYVAIAPEKSAEPVRKFGCFTGDLREVVLFLKAHGVRSVAMQSTGVYWIPLYDVLEEEGFEVYLVNARDTKNLPGRKSDVQESQWLLKLHTHGLLRNSFRPVSEIRVLRTYWRQRGDHVHTASECVQRMQKALTQMNLQLANVISDIMGWTGQKILRAILAGERDAEKLAEMRNWRIHASQEEIVASLTGNWRPELLFTLKQEMERYDFCQRQIAECDHEIKQHLDTLPARHRETDPAVQPVAPPKKNKKVQGNSPQFALDKELQRITGVDFTRIDGINVMTAQTIISEVGLDMSRWKTEAHFASWLGLCPHNASSGGKVLRRGTRKVVNRAATAFRIAGSTLRRSNSYLGAQFRRFRSKLGAPKAITAMAHKLAVLFYRMLRFGQEYVDRGRHFYEEKYRQQQISLLNRKATQLGFSVIPATNRPPSI

SEQ ID NO: 127740 - protein, 338 aa, unidentified
MDHFVGIDLHSNNSYLAVIDTDNNRTFKKKARNNLSEIIKHLAPFEKQIKGIVVESTYNWYWLVDGLMDKGYKLHLANPSAIKQYEGLKHSDDITDAFHLANLLRLDILPEGYIYPKHERPLRDLLRKRIHLVHHRTALILSFQNLVARNLGSKMHVSTISKLTEEDLEELFEDEYLILSAKASISTIHFLRSRIVQLEKVIAKAAKLKSEYKLLKTVPGIWNILAQMIMLETGPIERFKKVGNYASYCRCVQSNRFSNSKSKGKGNRKNGNKYLSWAYVEAANHALWSYEYVKRYHQKKTAKTNNVVAIKAIAHKLARACYYIIRDQKEFDPLKAFS

SEQ ID NO: 127741 - protein, 337 aa, unidentified
MSYLGVDLHTNSFTVCYQTSVGKQRLATFELKKIDSFRKTLRKQDQIAVEATGNTRWFVEQMSARVKKVVVVNPHQFEVIRKSVKKTDKHDARTLAYFLSKDMLPEARMKSKENSQLHSLAGTRDKLVKQRTALINKIHNVLNGHGIKFAKETLSTEKALKSIWSYDWDPIVRVELEVLIEQIRSLTGSIKKLDEQMSEHGKDIDGHKSLTSIKGIGERSATILLSVIGDVSDFADENKLAAYFGIVPRVSDSNETVHHGRITKNGSKIGRTTLVQCTLAAKRYSPYLNRYYERIKRHLGSGKAIIATARKFLGIIYQTLKNGWIFEDFPNFVIANT

SEQ ID NO: 127742 - protein, 348 aa, unidentified
MDHIGIDVHKRESQIYILAEGGEVVEQRIRTEPERFATVLGARPRGRIVLETSTDSEWVARCLEELVHEVIVADPNFAPMYATRSRKVKTDRRDARALAEACLLGAYRPAHRLSDPQRHVRGRLGVRDALVHTRTRYISVIRALLRQQGYRVPSGSAEGFTQRVRAVPLPGRLLSLIAPLLAVMRPLNQQLAYSDATIEHLAVQDPRVPRLRSVPSVGPVTAAAFLAAIDDVGRFHHAHQLEAYLGLVPREYSSGETQRRGPITKAGHSRVRWLLIQAALSILRRRPPAAEALWTWALRIAARRGKHVAVVALARRLAGILYALLRDGTVYAPRGPAALPDSVAALHA

SEQ ID NO: 127743 - protein, 430 aa, unidentified
MKSNTQNAKIEAITEKTLVLGIDVGSETHYARAFDYRGVEYSKKPFKFSNTEAGFVTFKEWILDLKDRHEKEKVVPGMEPTGHYWFNLGKFLQDNEMKPVLVNPHHVKKSKELDDNHPTKNDRKDPKVIAGLVREGRYMIPYLPDGVYADLRTASNIRFQLQAELTRIQNRINRWFNIYFPEYKTVYGKPDAKSGMLILKAAPLPEDILTLGIDGVNQIWRDAKLRAVGKARAKTLIEAAGHSVGSKEGAVSARMEIRMLLEDYESRNIRLQEVMGLIEGLVNQIPMAEKLLEIKGVGIKTVSGFLAEVGDIRRFNDPKELQKLAGLALVENSSGKHKGKTTISRRGRKRLRYLLFEVAMSLVAKNPEFRELHNYYTTRRLNPLKKMQSLMAIAAKLLRVFYAILTKGVGYDPKKMVNDIRRPAAYAQAA

SEQ ID NO: 127744 - protein, 341 aa, unidentified
MRMFAGLDIGGKRTAISVIDGSGKLVWRGIVDTHPDMIDAALQRFKGSLDKVGLESGPYTPHLFRSLEAIGYPMICMDARRAADAIKSRRIKSDKGDAWALAEMLRTGWFSSVYVKSVDTHRLKALLGARDQLVKLKRSLGNQVRGLLRPFGIKLPSRAGGKKFDEAAYLVTRNDPMLHAAIRALLEALAAIEGQQARLDDELDELAKRNEIAWRLMSVPGVGRITALAYMAAIENIDRFRRTRDIGAYLGLTERRYQSAETDVGMGISKQGDAMARHYLYEAANVLLTTVRKRFALRNWGLRLVKTIGPKRARVAVARKLAVLLGRMWKDGAHFEATVAA

SEQ ID NO: 127745 - protein, 483 aa, unidentified
MTFLSTVVRQLDGERYFGLDLAKRETQLAVLDASGSEKQQKRFATSRNEFLAFSAELRKGDTVALEVTTNAIAIARLIRDNSPARVIISNPVKTRVIAEARIKTDKIDARVLAELARVGYLPKVWLPDEDTESLRQFTSDRTSLVRRRTECKNTIHSVLHRNLVHQEYSDLFGTGGRTWLEKIIKGDDASLSVPVPQLDRLRIGSLLNEIDRIDALVADLESVIASFIAVRPHLKEQMDRLLSITGVSLVVAAGLLGAIGDVTRFSKKRSLAHYFGVTTSVKQTGDGPARYGRITKQGPAEARWLLIEAAEHLRKSPGPMRALYTRVQRRRNHNVAVVAVARKLAELVHHLLINKEDYIYRIPRLTQEKRAHWRYLARQKTGVKLASAARKISGRPTLYGTGIGIQGRKLKSQIAKQAASNAERLYEAIIEQRRIRLTDPSAPVIETSDLVFDPTKPTDTDWEKILAAATTNIIRKRRKRVDN

SEQ ID NO: 127746 - protein, 362 aa, unidentified
MSQPKSVVGLDVHATQTHACVLDPGSGELRSRRLSGPPRAALDLLAELPDPLLAVYEAGPTGYGLARGASEQGLDVRVCAPGSIPRAPGDRVKTDRRDAERLARLLLSGELSFVRVPTPEEEGFRDLIRCREAIRSDLMRARHRVTKFLLRRELRWEGSACAWTQAHWRWLEGLELAQPSSRVVLADYVCAVRSLEQRRQACELQIEELWPSSPWAKTVARLRCLRGIDTLTALGLCAEAGDLRRFKRPSALTGYFGIVPSEYSSGEMRRRGPITKAGSPHARRLLVEAASHYRHQPRVAGHLERRQRGADPRAREIGWRAQRRLHSRWRHLREQRGKPGNVVRVALARELACFVWEVGQLD

SEQ ID NO: 127747 - protein, 394 aa, unidentified
MIGGLDAQQRVVMPPRKIDLHRWPAWAATQLTQADAVVVEATTNAWTIYDHLLPLVGRVVVADAFKIRQIAQSRVKTDKHDVLILAQLLRADFVPSVWVPPAHVRELRALIAHRHRLVRTGAMAKNRLQSLLHRHNLRPPNGKLFAAKQRPWWQQLDLPLSERLRVDQDLATLDHFAPQVATIDRELHRLSTTEPWAPQVPYLLQLPGVGVVTAMTVLAAIGAIERFPSAKQLVGYAGLGAGVHASGETYRTGGITKDGRRELRWVLVEAAQTAVRSHPYWRALYARLERRIGAGKAIVAVARKLLVAIWHVLSTQQADRHADAEQVAFKLMTWAWKLSDAERRGMRSRQFIRYHLLRLGIGDDVTHITRGGTRRPLATREEILAQYPELRARP

SEQ ID NO: 127748 - protein, 369 aa, unidentified
MVPTMPKRIALSNPDHAGEPLLVFGGVDTHADTHTVAAISHLGAMLGHQSFPATAKGYRQLYSWLAGHGTLMRVGMEGTGSYGAGLAAALTGRGVELVEVNRPARATRRARGKSDPIDAEAAARAGLAGVATAVPKTHTGVVEEIRVIFVARRGAVQARTAAINTLHQMIITAPLQLRAQLQPLTRTQQITACAGLHTGDITSPTRATKLALRRLARRIGHLTAEITDATNDLTTLVQAHAPQLLTQVGVGSLSAAQLLITAGDNPDQMTSPASFAALCGTSPIPVSSGKTNRHRLNRGGDRQANCALHTIVLSRLRYHPETQAYAAKRQTEGKTERDIRRSLKRYLARRLFTLILTASQATDNTLIAT

SEQ ID NO: 127749 - protein, 388 aa, unidentified
MYYCGIDVAKRKHSTTVLNERAETVQQNFTFRNDRDGFDKLLSALAPFSGEVLVALEATGHYWLSLYECLAKADYPVVVLNPLQVHAYQRSGVRKRKNDRIDAFWIADYARISNCQATDQAAPELLQLRDLTRFRLRLRENIGDCKRKLLSILDRVFPEYETLFSNVFLTTSRQLLSQAITAQEFADFDLAELTELLSSASRGRFGQDKAEAIIEHARRSVGVNLFANSARIQIRCLLDQLNLLEQQTQQIDQSIEALMDQLPQHITSIPGVGPVTGAAILAEIGDIHRFAAPEKLVAYAGIDATVYQSGDFEATEAHMSKRGSPFLRLAIWQAASMAAIYDPQLKAYYQQKKAEGKHHGVVIGAVARKLLARIYIILKENRPYEIRY

SEQ ID NO: 127750 - protein, 416 aa, unidentified
MKIVRPICCGMDVHKNIIVATIGITNKKTRITEYIQETFSTLNSDLLNLKQWLINHKCFDACMESTGKYWIPIFNILEDEINIYLTHPKYVKAIKGKKTDKKDSKWICDLFKHDLIKFSFIPPKEIRALREISRYRYKLVGMRSSERNRYQNCMTVSNIGIGSVFSDPFGKSAQAIMKKVLESDIIEDEKILKCIHRSCKNKDKILDSIKHCNIETDQRFKMNESMTHMEELKVHIDNCEIEMMKRAAPMFDQFMHITQLPGISTLSAILIISEIGVDMKQFESDKQLTCWAGLAPANNESANKKKSVRISKAGQYLKPLLVQCALGAIKDKEGYFGIKYSRIKKRRGHKKAIIAIARMMLVSIYHMILTGEKFNPSDYESFKNPKPPIKQQDLTEESAIEFLKKSGFDVSKLTKP

SEQ ID NO: 127751 - protein, 318 aa, unidentified
MRKVFVGVDVASGKLDISITLDGLIYDPLQILNNESSILGFFDYLKTTYKKSEFYFGYEATSNYMHVLQKLAHKNDFKQIMINPYVMAHYLKHLSSRKKNDKIDSKGIAKFIQTLDQEDFKTIFNQDHKSLRKYTSAINLLRKLETQLKNFIHSQKENPIDSLDLFLVSLELKIKETKKGLEKEAEKVLKELFPHVVELQKEIKGVGYALLLELVPIFLKSQNYTLKQLQSFVGLSPRIFESGTSVRKKESLSKRGSSLVRKLLYLSAMSAIRFNDIIKEKYTRLVEGGKNKMVALVACMSHLFRAVYIKFNQGLVHA

SEQ ID NO: 127752 - protein, 347 aa, unidentified
MLIIGCDFHPSFQMVSIFDKKTGEVRPMRLGHREEAERFYRSLPPAVRVGMEACGRWIWFERLLAELGHELWLGDAGQIRAMVVRQQKTDRRDADHILSLLLQERFPRIWVPSLEERDVRQLLVHRHKQVQARTRVKNQLQALALGQGVQRKRKLWTEKGRAELEQLPLLPYAAQRRQQLLESLDRLEQEIQQLNLRVEQEVGQRPAALQLRTHPGVGPVTALATVLTLGPVERFGSARQVASYLGLIPREHSSGGRQQFGRLSKQGNPFLRFLLVEAGQSAVRGDAELRRLYQRLAARKHRALAKVAVARRLAQRLYWMLRQDLTYAQLRQGRPAGEPESFCGRGS

SEQ ID NO: 127753 - protein, 459 aa, unidentified
MGKRGEKRERRSAILEPDAAGIDIGAEEIYVAVPLDRDEQATRRFSSFTCDLYALAEWLESCRVRTVAMESTGVYWIPLFQILEERGFKVYLVNAHSLKTVPGRKSDVSDCEWIQYLHSVGLLKASFRPAEDICAVRTLWRHRSSLLQMAAEHTQHVQKSLSLMNLQLHHVLSDITGASGLAILDAILAGNRDPVCLAQLCNIRVKSPRETVAQALVGDYRPEHLFTLKQSLDGYRYYQKLIAQLDNEIARLMHTLPNATEHPSPVPKRTKRTAYQRMGNDPSFDLRSELYRIAGVDLTDIPGMSAIAAQVVLTEVGPDVSRFRNASAFASWLGLCPDKRISGGKVLSTKTRKVNNRVAIVLRLGAKSLSRAKDYFGTFFRRMRARLGNAQAITATAHKLARVIYHVLHSKEPYTETVFHRCDEQENQRAEIRLRKHAAQLGFQLLPISTNPAASQISS

SEQ ID NO: 127754 - protein, 337 aa, unidentified
MKFTYFIGIDISKESFDVCFCSEEQPDKFVHEKFVNSTVGCRQLLTWLRKHNVVLGQGFFAMEHTGWYTLELCCFLQDQQVAFALYSPLHLKRSLGLARGKNDRVDAQRIAHYAFLHRHKLTPTILPSASLLKLKNLFAFRERLVKNQASLKQTIKDLKDTAHLVDNKFIVKQSEKQLKLVKDQVKQTEKQVEAIIKEDDQLQNSLKLLCSIPGIGLVTAVALILATNNFTAFSDSRKFASYCGVAPFENTSGTSIRGRTKTSHLANKRIKTLLSNGAASAIQSDEELNAYFRRKVAEGKPKMVVINAIRAKLINCVFATINRGTEYVVLRQYNQAA

SEQ ID NO: 127755 - protein, 375 aa, unidentified
MQEKVRFLGMDVHAETIAAAIAEPDGEVRSLGTIPNRMESVRKLIRKLGPAEKLRVCYEAGPTGYVLYWQLAELGVECEVIAPSLVPVKAGDRVKTDRRDAEKLARSYRSGDLTAVWVPDEGSEALRDLVRAREAAKQDQLRARHRLGKFLLRSGQRPPSRVRAWTHLHLIWVSQIRFAQVAQESTRLYYLHEVEHMRERVLRLEQAIAEAVKLASPALQEVITDLQALRGIAHISAVTIAVELGQVSRFPGARELMGYCGAVPSENSSGKRTRRGGITKTGNAHLRRIVVEAAWSYHRPPAIWAGLRKRQQSASEEAKEIAWKAQHRLHKRYARLAATGKDKRKIVTAVGRELLGFIWAIGTKAEATVSQRIGA

SEQ ID NO: 127756 - protein, 356 aa, unidentified
MVKTRIASNDRFVKDFEDHPFCIGIDVHKRSYHVAIRRTDGKTVTWVCPADPEGFVEQIRRLSIRVSTVAYEAGPTGFGLARTLRSAGIETLMAAPSRIPRAVSVGAKTDRLDCLRLADYAAKGMIRPIAIPTPQQEAQRSLERRRHDIVDSLRRCKQRIKGFLLFLGLPEPKETERWRRGADAALLAMPLHPHARLTMKSHLRELAFYQNELSTVEEELRQMAQEHGDVLKCLQSVPGVGEVVATTFILELFDPERFRRAEEVASYLGLAPMVRHSGEKTPSGRLRPAGQTRLRSLLIEAAWMWRQYDPHARNLYNRFLGRMGIAQKAIAAVARKLAVILWRLYVERRHYRPVLV

SEQ ID NO: 127757 - protein, 392 aa, unidentified
MVVSVGIDVSKDKHDCFIVSSEGEVLADAFIIPNTMDGFHYLLQRIRHCTAPQDKIKVGLEATGHYSYNLLGFLLDNGLTTYVLNPLRTNLYRKSLSLRKTKTDRVDARTIASMLLSDAGLKPYTDTAYHNEELKSLTRYRFDKVKERAELKSSISRLVCILFPELEKLVPTLHMTSVYSLLEEFPGAKQVAAAHLTRLKSLLEAASNGRYKRDMALEIRNAAKNSIGSQMPAKSLELQHTIRLIRELDREIDEIEEQIQSIMDELHSPITTIPGLGFRMAAMILAEVGDFTRFDSPDKLLAYAGMSPSTYQSGQLKNCYPHMEKRGSRYLRYALYNATKYVCYWDPGFADYLAKKRAEGKHYNIAISHAAKKLVRLIFAMEKSRQPYCSAA

SEQ ID NO: 127758 - protein, 424 aa, unidentified
MKVTYQTCCGVDVHKSFLVATIIKTTAGIEPSYQKKRFSTFNNSILDFKSWLLENECHDICMESTGKYWVPVFNLLEDQINVTIANPKWVKAVKGNKDDTKDSKWIGDLFRLGLVKSSYIPCRLIRILREYTRYRYKLVSCRSSEKNRYQNALTVCNIALDSVVSDIFGKSSSSIIDYLLEQSGTTINHEEIASKLLKSLKSKEDAVIESIEGYQMTDAQKYRMRLIRAHMDYITAEINDIDKQIESLISSDPDYDKAIRLLTTIPGVKRDSAITIISEIGIDMSQFCNSKRLCCWAGLTPSNNESAGKKKSVRITRAGVYLKPALVQCAHAAVKSDKSPYYKTKYESLVKRRGKKRAVIAIARMILIAIYRMLSTGEVWNPSDLYKIDMPAPLAEKQKAKAIKQAKKLLQKEGLLPPDEPLAS

SEQ ID NO: 127759 - protein, 428 aa, unidentified
MNCNTQNAKIASITEKTLIVGIDVGSETHFARAFDWRNYEYTKKPLEFSNTEAGFMMFKAWVEDIAEKQGKTAVIPGMEPTGHYWFALGKFLQDSGMKPVHVNPHHVKKSKELDDNNPNKNDRKDPKTIAALVNEGRFSYPYIPTGIYAEIRSLSNLRFQTQEELTRIKNRIARWFAIYFPEYKDVYGDLMAVSGRMILKEAPLPEDIRILGVNGVNQIWRNAKLRGTGMKRAKILVSAAEHSVGSKEAPEAARIELKNLLNDMDVYVSRMEELLQTIEEELKTIPYVDKLMEIKGIGLITVSGFIAEVGDIGRFDNPKQLQKLAGYAIVANDSGKHNGESRISYRGRKRLRYVLYEAAISLVGKNAEFKEIHEYYRTRKENPLKKMQSVVAVACKIIRVFYTILTKGVDYDPMKLMSDIRRPQLQAA

SEQ ID NO: 127760 - protein, 427 aa, unidentified
MRVLYDRVAAIDVHKDMVKVAVRVPGARRGARKTDVAEYRTFYGVLQEMGRELRRRGVTHVVMEASGIYTEPVYYALAELDFTQVLVVNPAHVKALKGHKTDAKDAVRLLDLYECGAVVRGSYIPSPELKEVRDLTRYRVKTVQARTSEIQRLQKTLESAGIKLSSVVSDVTGASATAMIEALIDGERRGRVMADLAQTRLRTAGKMADLSMALSGRFTEHHALMCRLHLDQIDGLGQQIDGLDERIAVRTARYSRETGLLATIPGFGDVVIAGWLGAIGPAPHQHFATAQRLASWATLCPGNYMSAKKSKGGRTGDGGAYIKPLLVQAAWAAIRVPGRLQARFHRLVRRFGGPRNKGAQKRAIVAIAHTLLKIAYQILKTGRPYTDLGDGFYDTRDTTQAKQDYLIRQLRKLNPGCHITITPAEAA

SEQ ID NO: 127761 - protein, 420 aa, unidentified
MRSIGLDIHRDFGEVAIGEGAEIRSARRIEMAPQALELFAQSLGRDDQVALEVSGNAWEVARIIEPYVARVVVVSPADTGIRSARAKTDRLDARALAKLLASGSLDSVWVPDENTQAMRRRLQRRSQLVRVKTKAKNEIHAALMRRLIPKPGFSDLFGIKGRRWLAELELPAAERETVDGCMRQLDFCEAEIAEIERAIAAEALKSREVLRLMTVPGVNVITAATFMAAIGDIGRFADRKKLVGYLGLDPKVRQSGTTTASRARISKQGSSSARYALVEASWSVVRAPGPTRAFYERIRARRGHQAAIVAAARKLACLFWCLLTRCEDYAYAQPSLTKKKLRRLELAAGAQRGKAKPGTWAANKAMREAERELARQAEVADKRTVADWQRAQAKKGASVTTGRASDRPSGGEAARQTISP

SEQ ID NO: 127762 - protein, 349 aa, unidentified
MADKLIVGIDVSKDWLDLCASNAAGVERIANTREAVAAWLERVAPGLIACEPTGGYERTLIAAARERGIPFVRVHPNDVVAFRKSRGIKAKTDAIDARLILAFVCDKLARAELPTSLIGDERLRALAARRRQLVDALQAEGCRLGVAALPAVHASLEAVIAVLRHSLEALEAELADAIAAHPQTAELAKLLQTIFGIGPVAAITLIADLPELGLLSAKQIAALVGLAPHTKRSGKTRYRETTGHGRPGVRRVLFNAARAAVRHPSLFKDFYDRLVTDNRRPGKVALSAVMRKILITANAVARDRQPWRGRPAAGTPCRPHAEQTAHRAGRVKAAAAPRAVARSASLEAA

SEQ ID NO: 127763 - protein, 338 aa, unidentified
MEQITTIGLDLAKNVFQVHGVAAAGKVLVRKQLRRAEVLRFFAALPPCLVGMEACGSAHHWARELTKLGHTVRLMPPAYVKPYVKRGKTDAADAAAIAEAVTRPTMRFVAVKTVDQQSVLMLHKVRELLVRQRTMLINALRGHLAEFGIVAARGPGGVTAVITALHEAQDGLPDLARQVLHGLIDQMRVVGAEITKAEKRIMAWHRASEASQRLATIPGIGPITASAIAAAVPDATLFRSGRQFAAWLGLTPRAHSSGGKQRLGGISKQGDGHIRRLLVIGATAVIRFARQDNASKTWAARLLERKPARLVSVALANKTARIAWAILARNQSYTAPAV

SEQ ID NO: 127764 - protein, 430 aa, unidentified
MSVQSLPVPSNTVSRGCVMLKIVYRVCCGMDVHKSFVVACIASTNEYGVTTYKSKRFSTFTGDLRRCAVWLAENNCKDVCMESTGKYWIPIYNILEHTCNIVLAHPKYVKAIRGKKTDKRDAKWIADIFKHDLVSGSFIPPADIRQLRDLVRYHWKLTNFNVGEKNRAQNCLTVSNIKLDDVFSDVFGKAASAITTRLLESNEPFDVKPYLTKNIKKPIEQIQAAVDGEMCAEQAEKLRIIRSHMDSLELCKLNLESLILSTAEKYIPQLNLVMTAPGIQSFAAIGIISEIGVDMSVFPTSKHLCSWAGLTPQNNESAGKKKTTRISRAGAYIKPLLVQCALCAIRTKQFPEVRNRYLALKKRRGHKKAIIAIARMLLTAIYNILKWNEVYNSELYRKADRPPAHREVSVEEAVFILQRQGYLVTAPAVT

SEQ ID NO: 127765 - protein, 389 aa, unidentified
MIYVGVDIAKLNHFASAISSDDEVLIEPFKFTNDADGFQMLVSNLISLNAEPDSIIIGLESTAHYGDNLVRYLVAENFQVCVLNPIKTSTMRKNNIRKTKTDKVDTYIIAKTLMMQVSYRFYTFYDLDLMDLKAMGRFYQKTIKQRTRLKIQLTAYVDEVFPELQYFLKSGLHQKSVYALLKEAPTPETIASMHMTHLASLLMKNSHVHFTREQAKELRVLAQKSVGTSDSALSIQITHSIAQIELLDSQLNKIEEEMTDIMKFNDSVIMTIPSIGYINGGMILCEIGNIHRFSSPSKLLAFSGLDPTVYQSGNFQVRRTKMSKRGSKVMRYALINAAHNVVKNNATFKTYYDIKIAKDRTHYNALGHCAGKFVRVIWKVNSVRKETAQ

SEQ ID NO: 127766 - protein, 362 aa, unidentified
MSTMTELEVHVTGGVDTHKDTHVAAALDQLGRTLGTESFPATAAGYRQLWRWLTGFGTLDSVGIEGTGSWGAGLARFLTANDVGVIEVRRPNRQHRRRHGKSDPTDAISAARAVQSGEEHGTAKTANGSVESIRLVLVARRSALKARSQTANQIYAVIDTAPEELRARFHGQPVREVVRVAARFHRSDIDSPHAAAKCALRHLARRWQFLDDEITELDDHLDQLTTSTAPTLVALNGAGTQTAAALLVAVGDNPHRLRSAASFASLCGAAPLDASSGRQRRHRLNRGGDRQANAALYIIVISRLRWDPATQAYMNRRLAEGRTRREIIRCLKTYVARQVYRAITTDLHPPDTIQIKQPELAA

SEQ ID NO: 127767 - protein, 320 aa, unidentified
MNIIGFDVSKKELIGIRTDKSALVRDKIIINNNSESIQTFIEEAKDKYPHLMVASEATADYHRSLAEHCLKLNIPFRLINPILTKQFTRATIRKKKTDLTDAWIIAKLALQGEGSLLNIKSLDPLKSINRIAFKIQRINAMLSAIYERFERVFPENKGVLEELIKPLPILGTVVKNLRLRVDQQADQTIKKLLVSIPGIGPTIANTLIAEIGDIQRFSSGKSLVAYAGLDPKVKQSGVSLKHNTKITKRGSPYLRKSVYISAYIAKRHDPELKEYFDKKISEGKRYKEATVATARKILYRVYAIWKRGTPYVKYSQKMLT

SEQ ID NO: 127768 - protein, 414 aa, unidentified
MDVLYPRCAGLDVHKDVVVACVRIAQPGGQASQEVRSFATTTTELCELAEWLNVREVTHVVMEASGVYWKPVWHVLEETLELVLANAHHVKNVPGRKSDVNDATWLADLLAHGLVRGSFVPPTHIQEVRDLSRTRKQLTREIIQHTNRIQKVLEDANIKLASAISNVLGKSGRAILEAIIGGQSDPEKLVDLCIGRLKATRKELVEAMRGRVTAHHRFLLKLHLAQVDQLTAGMRELEARMGEILAPFQEHVDNLTTIPGVSDTTARVLAGEIGLDMSRFPTVGHLISWAGLCPKLDESAGKHRSVRIRKGAPWLKTSLISAAWAAVRTKHTYLRAQFARLKARRGAKKAIVAVAASMLTAAFHIIRDRVVYRELGADHFTKRDPAKAAKRLLKRLEGLGYAVEARPTTAVVSI

SEQ ID NO: 127769 - protein, 377 aa, unidentified
MKRVKFVGLDVHAETIAVAVAEQDGEVRSLGVIPNREESIRKLVKKLGAVEELRFCYEAGPTGYVVYWQLGALGAICEVVAPTLVPMKSGDRVKTDRRDALKLARNYRAGELTPVWVPDAAHEALRDLARAREAAKKDQLRAKHRLSKFLLRHGRRPPMGVKAWTLKYLAWIEREVHFLQPAQEATLLDYFQEVEHMTARMARLDLAIEEAVKLTPPKMRAVIEALQALRGIAQISAVTIVAELGEVSRFTRARQLMGYGGIVASEHSSGEKTRRGGITKTGNAHLRRVVVEAAWAYRHRPGVGGVLRKRQELVSADVREIAWKAQHRLHTRYQKLTARGKNKGKVVTAVGRELLGFIWAIGVKVEAMHKEPLRQAA

SEQ ID NO: 127770 - protein, 414 aa, unidentified
MTPAIQKTEDIHAQSEKEAQAQSLNLTHIFKKMKPFPEKMDRPLVTVAIDLAAYSWQAAIVSGKKIFTPKFQELGKPQALLNAIHEKMRYFGVSDTRDVVACYEIGRDGLWIAEFLEANGIACVILSPDVLSGNGREVKTDRLDARRLSVRLANFFNGELECDHVHLRPSHAVQAGRAVSRGRAEAVEIRTQFSHLFKSILARHMELPRRLKVRNVDVDTLRDALGRPLPPEEVEELRLYQEHYLRMDRDVAAADSLMRARALAARKAARDGGETSREDAMIGKLVRLRGVGFRISWVLVHELFYKSFGNTRQVGCATGLAAIPRASGSTDRCAGISRRSNHRLRAALVELAWLWLRHQPDSALTKWFLERTKAGVSARRMKKVAAVALARKLAVALWKFLEHGEVPEGAAVAA

SEQ ID NO: 127771 - protein, 349 aa, unidentified
MKLSKKSSDSQTQQMYDYYIGIDWSLEKASIAHMKSNSIEPKVRDIVSPDIRSIKEYLQELRGTKILTIEETTGSQWLYVELKESVDKIIICNPLRNKLLDEGPKTDKIDSRKLCQLLRGNLVKEVYHTDNEQYKIRKLASGYEDLVKSRARVKNEISALYRSIGIRDKKGRGYDKSDETLNFILGQKKRVLETLELESKEYEELFKGIAKKNAVIRSIKKISGFGPILSVEGYSIVIDAGRFKNKYKFWAYSGLVKIKRESGKTSYTRNSKQYSRKLKCIFKMATKAALIGKNDIREYYEYLLQNGNTQKDSQNAVTRYIATSFYAVMKHSVNYEPYYWRKKIEQKAA

SEQ ID NO: 127772 - protein, 351 aa, unidentified
MPRTSTVHAVTTIGMDMGKNTLHMIGLDKRGAIVLREKVSRGRIASRLANMPSCLIGIEAGLATHYVARELAALGHDVKQVPPTYAKPFRQGHKNDFRDAYSVAEAVQRPTTRFVPAKTDEQLDLQALHRVRSRLVSERTAVINQIRGFLLERGIIVRQGLRFLRQGLPDILAKRTDVLSPRMVRIVADLASDWRQLDERIEPVTDEIETLAKSDDGCRRVMTVPGIGPIISSAIVAAIGNGAAFARGRDFSAWIGLVPKQMSTGDRTILGRITKRGNGYLRMLFVQAARVILLRPASWPKHSFGVWLARAAQRLHRNVLAAALANKLARIAWTVLAQERSYEARVTKAAT

SEQ ID NO: 127773 - protein, 432 aa, unidentified
MITIGIDPHKASHTAVALDGGGRVQGELRCLANQATLERLLRWAERWPERIWAIEGAAGLGHLLAQQLVAREETVLDVPATLVARARLLAPGHGRKTDGIDAASVATVAQNQPDLRRVGPEDHSAVLRLLSDRRDELSGERRRAVNRLHRLLRDLRPGGAPTELSAARASELLGHIRPGAVVDLERKAMARALVADLRRIDRALVENRARCAVAVAASDTTLTDIVGISDVLAAKILGHVRDITRFGSADRFASYSGTAPIEVSSGEVTRHRLSRSGNRSLNNALQLELRRLGAEHPSMRLLMTVPGIGWVLAYTIASEIGDIARFASPKKLAGYTGLCPLVRQSGGKDRRGPLAKNGPTYLRWALIEAATHAARDPRYRERYERTKQRLGRQRGAKVARVDLARQLAEAIWHVLTKNEPFHPAGPAMGLVA

SEQ ID NO: 127774 - protein, 347 aa, unidentified
MQIHQIGVDISKAKLNVALLLAPAFLKKKTKVVPNNPDGFKSLIEWLQHQVKDQKAFRFIMEATGSYHQALALFLSDHGFEVCIVNPALIKRHGESMAARTKTDEKDCVIIAHYGAKMNPKPWVPPSPEYRGLEQLLRRLNQLDKMNRQEKNRLEALGPGPADKNVLDSIEKTLSYFDEEYKELLKKIRDHLDRHPGLKDDVKLLTSIPGIGELTALRMTSALEGGTRFSSARQFAAYLGLTPRQNQSGIIKGKTRLSKMGPSALRKALYMPSVAACRYNPDVNALYERLLKAGKTKMSALGAAMRKMAHLAFGVLKNRQTYRAFFHPILEPEVGKEANPLAVGLLS

SEQ ID NO: 127775 - protein, 412 aa, unidentified
MRRVIGMDIHRTFAEVVVWEDGRLRPHGRVDMTRSGLEGFARGLTKEDEVVVEATGNAMAVVRVLSPHVARVIVANPLQVRAIAHARIKTDKIDAGVLAQLRAADFLPEVWVPDPETERRRRLVARRNQVVRHRTRVKNEIHAILAAHLVPPCPHAELFNGPGRTWLAEQVLPDDERATIDRHLRELDRLGEDLAVLDREIGVAVVDDPAVKRLLTIAGVNVTVAAGLVAAIGDVRRFPSPQKLVSYFGLNPRVRQSGLGLAQHGRISKIGRAHARGLLVEAAWAAAKAPGPLHAFFVRIRARRGHQVAAVATARKMAVLVWHLLTKEADYLWARPALVAQKLRGLELQAGRPSKKGNKRGSTYAYNVKELRDREKAIAEQAERAYEHRVASWRPKPGRKRTGAASAAGSTT

SEQ ID NO: 127776 - protein, 313 aa, unidentified
MSQNTMTTIYAGLDIAKLNLQLHLADRLHDLPNTTAGHRRRLKLLAARSGVQVVCEATGGYERDVVAALHQADVPVSVLNPARVRYFARATGQRAKTDHIDAAVLSAYGQALQPKSTAPRTQPEQQLAQLVRRRVQVLDILVAQRLQVQQLTLPALRRQAQSLVRRLEHDVEQIEAQLRALRTQTAALDERAQKLEAITGVVTITALGVLAELPELGTLNRRQAAALAGLALHPRESGQWHGCRSIGGGRAPVRRALYMAALVAAHTNRHLKQFYQRLRAAGKPAKVAITAVMRKLVVLMNHILKNLDFALQN

SEQ ID NO: 127777 - protein, 461 aa, unidentified
MRKMKSTGPQKGSARAKVDWKALDVVHPEAAGIDVGGSEHWVAISPDRDPEPVRRFGCFTADLREMAKWLIDKGVQSVAMQSTGVYWMPVFEVLEQNGLEVYLVNARHTKNLPGRKSDVQECQWLLKLHAFGLLNNSFQPTHEIRIARTLWRHRGNLVAEAGSAIQRMQKALTEMNIQLGNVLTDLSGVSGMKIIGAILEGERDPSALAALARPEVKATPEDIAKSLEGNWREELLFVLKQEVELYRVYQQKIVDCDRQLRQHLESLKSTVDLQAQPLGPKPKGKTRSRNAPQFDLRTELYRITGIDWTQINGMDVLTAQTVIAETGADLSAFPSEKQFASWLGLCPTNEQSGGKILNRRTRKVVNRATGAFRNAAVTLIRSQSYLGAQYRRLRTRLGAPKAITAMARKLACLFYRLITRGQQYVDKGTEYYEARYREQQIRSLAKRAQKLGLQLVIPKTA

SEQ ID NO: 127778 - protein, 385 aa, unidentified
MLAHPTQTQAAARCQANTLFVSLELSKVRWLVTVSAPASDKLSRYDVPGGDGQALLKLLARLQAAASERTGAPVAIVVIQEAGLDGFWIHRLLVRNGIDSHVVDPASIAVNRRHRRAKTDRIDGVKLVRTLMAWMRGERQVCSMVQPPSPEDEDRRRLTRERARLLKERIQHTNRIKGLLCGQGIPDYDPLHRDRRARLVALTTGDGHSLPERLKTEIGRELDRLEVVVSHLAAVERERDALMAQTIAADPCAAPAALARLRGIGPELASLLWLEALFRPFDNRRQIAAYAGLTPSPWQSGGIDREQGIAKSGNPRLRRAMIELAWFWVRHQPGSALSRWFVERVGTVRGRVRRIAIVALARKLLVALWRYVTQGVVPEGAVLKA

SEQ ID NO: 127779 - protein, 366 aa, unidentified
MRKPSTTAVRGRGKLQSEQLTIGLDLGDRSSFYCVLNGAGEVIVEERVATSPEAMKKTFGKMPRSRIALETGTHSPWVSRLLSELGHEAIVAHARNVRLIGQSRRKDDRLDAQELARLARIDPQLLSPIQHRSAQAQADLSVIRARYALVRTRTALICSARGLTKSFGERIHSRYVRGFKPAMGETLSPQLQVALAPMLSALEAITARIREYDAQIEKLAEESYPDVALLKQVKGVGTLIALTYILTLEDPRRFRKSRDAGCYIGLQPGRRNSGQSEPQLHITREGDSYLRMVLVQGAQHILGPFGEDSDLRRWGLKLAERGGKRGKRRAIIAVARKLAVLLHHLWVSCEAYEPLHNVQKRRLAAA

SEQ ID NO: 127780 - protein, 416 aa, unidentified
MDTMYERCCGLDIHKKTIEACFRSGKKKAQMSFGTTSAELRKLTMWLVENDCQSVAMESTGSYWKPIFNILELSGTDMEIIVVNARHMKNVPGRKTDVHDAEWIAELLQYGLLRPSFIPDREQRELRELSRYRKSLVGERAREINRLQKMLEGGNIKLTSVVSEVTGYSSRRLLDRLLRSDEPMTEEVISELVHTNLVGKSKELEIALDGLLSELQKELLIKVLDHIDDMSRRIADLDDFCRKQMDRYEDALDKLDEIPGIARRTAETILIETGLDMSRFPTAKHFARWAGLAPGNNESAGKRSSGRTTKGNPTLKSTLIQSAKVAARKKNSFFKARYQKIAAKRGANRASVAVAHSMLIAIYHILKSGERFKDLGEDYYNQFNKEKKKKYYLKKLTKLGVNLKEATLSISIQAAT

SEQ ID NO: 127781 - protein, 477 aa, unidentified
MVATGLHGLNRKQRKELARRMRAQDPGLDIVHPHAAGIDIGNSSHYVAVRPDQDPDSVRRFECFTGDLHRLADWLQQCGVTTVAMQSTGVYWIPLYEILDARGLEVYLVNARHTKNLPGRKTDVQESQWLLKLHTYGLLRNSFHPSADIRIVRTYWRQRGGHVQAVSTCIQRMQKVLTQMNVQLANVISDLSGWTGQRIVRAILAGDRDPQTLAALSHPGIHATRDQIARSLEGTWQSDLLFVLQQEVTMYDAYLQRIAECDQALEHHLKTFADKAIPDAPSDAEPSSPVAPRQTRVKHRRKAGSHTPQFNLGHELHRISGVDLTRIDGIDVGVAQTVISEVGVDMTRWKTEAHFASWLGLCPDNRITGGKVIRKGTRHVINRAATALRLAATTLLRSQSYLGAQYRRLRARLGAPKAITAMAHKLARLVYRMLKWGHEYVDKGLQYYEERHRDQQVQLLKKRAAKLGLQIVEPDAA

SEQ ID NO: 127782 - protein, 312 aa, unidentified
MAQMVITAGIDVSKAWLDVALWPTKAELRVERNAAGYHRLGAWLSEHGVMRVGLEASGGYEVEVIDALQARGFEVARFNAQRVRLFAKAKGRLAKNDRADARTIAQATAVLLDAAPPQRRRDLEPLVEHLTYRRRLREWIVDCTNQLEHLKDKALRRKLIARRAAWQNELAAHDRTLASLVAQHDEWHDLEQRLRTVPGVGPVLAQTLLALLPELGRLSRRAIASLGGVAPFDDDSGKRAGERHIKGGRAVVREALYMAALAAKRYNPAIAAFANRLAGKKPKVIIVACMRKLLVILNAMLRDGTDWQAKAA

SEQ ID NO: 127783 - protein, 405 aa, unidentified
MFVGWDWASTTHDVTVLDEAGAVVDRWAFRHTEQDLAAALDRLARLGEPAALPVIIERTSGLVVDRLVAAGHPVVPVHPTAFWAARPRWGASGAKSDAGDSYKLADYLRTDGHRLRRLDRSDPGLQELQALVRLREDHVRARTAASNQLGALLEAHWPGPKAVFYRLASPIALAFLADYPTPQAAAHLGEARMASFCRRHSYRGGKPPAALLARLRSVPTAPVGIPPATLATLVHAQVQLLRTLLVTIAELEATIAARVACHPRAKLLASLPGVGTINLAQLLAEVGPILDRVESAEHAAAECGAAPVTKASGKTSGVYFRWAANRRARKALTAFAHNSRLASPWAGRLYADARARGKRNPTPSASSPVPGSGSSGPAGSKPRPTTPSCTPPLSELPPARLDSGD

SEQ ID NO: 127784 - protein, 387 aa, unidentified
MGVIIGMDPHKRSATIEVINDRGRILAVGRYGTDKTGYADMLRAGRKYEDRLWAIEGCNGIGKHVAHRLVHDGEAVVDVPAKLSAQVRVFATGNGRKTDPVDAHSVAMVALRAPNLVRVQVDDDLIVMGMLVDRRDELGRARTQTINRLHRLLLELFPGGAPQFLSSYKARAHIATIRPRELVGKTRRRLAVELIVELEGIDKKIKAIKKELAALVEARDSTLMTLTGIGPSGAARLLADAGDIHRFADRDKFASWNGTAPLDASSGEQQRHRLSRAGNRRINRALHIMAVVQLRNPTEGRVYFDAKKAAGKTSMEAMRALKRRLSNVVYSRMLADQKRREATGPGGQSGTTLQSSVTDLTPDVGSSDKPLPGPASAKPRTLVVATP

SEQ ID NO: 127785 - protein, 353 aa, unidentified
MEHFIGCDAHKKFSVFASMNEKGEYGRTIQVRHDLEMFREFLKELPAGSKIALETSGCYYWMVDEMERAGHLPQLAHALTAKRRMEGRHKTNDRDARGLAMLLRNGTLPVVWIPPAELRDQREMLRWRMYLSRMRTQVKNRIHGVLQRYNVDIAVSDLFGDGGRVKLLARLGELPPHNQESVLGQLKTIDSVETQIGECERILGEILYPSVERDLLDSLPCVGKILSAVMALEIGDVRRFSGPDRLVSYAGVAPVARESADKKRKDKCPRDCNVYLKWAYVEAANLISAHSKHWADRHVVQLYQRVKESTKMHGKATTAVARHLAEASYWMLSKQEVYREPQNKWQVLSSTHG

SEQ ID NO: 127786 - protein, 355 aa, unidentified
MDSAKYIGLDVHKESISIAVLNAAGKIVMEGVIETNATLIVQFLRGLRGELHVTFEEGTSAAWLYDLIQPHVTEVVVCNPRQNALLNAGNKSDRIDSRKLADLLRGNQLKSVYHGEHGVRTLKELVRSYLTISKDVARVMTRVKALYRSWAIPCTGKQVYAPGHRAEWLAKIREAGVHRRAEFYYQQLDALRSLRQQVRRELLAESQKHPKWKLLCQIPSMGPIRAAVLIGIVQTPHRFRTKRQLWAFSGFGIETHSSGDYRSVDGQLRRTNRPVSVRGLNTNHNHDLKNLFKAAAIVAAHKPGPFQEFYAALLAKGIHPEMARLTLARKIAAITLHLWKKGARFDAQYLKPQAA

SEQ ID NO: 127787 - protein, 340 aa, unidentified
MAIVMGLDQHRAQIAAEWIDTVTGEISRARIVPADRAAVRRFLAPFEGVGLEVALEATTGWRFVVEELERVGAEVHLAEPAEAAALKGKKKRAKTDWADARHLRELLLIGRLPESWIPPAHILDLRARVRTRHLLSHQRTEWQQRIHSVLYHHGVPRQRNLLSLANREWLDGLTLPAAAREQITIALSVIDTLDLELVPFDQALRAQARSQPGCQALIKAIYGVGELTAITILAELGEVRRFHNSRDVVRYSGLDITVYQSDDHRAPGHLSRQGPPALRWALYEAAQRARFPASPDRPYYEQLAARIGGNRACLALSRKLLKRSYHILKDLGDEALAPVA

SEQ ID NO: 127788 - protein, 311 aa, unidentified
MEHSRFVGIDISKDHLDVHVRPTGDSFRVRDDDAGLVTLVAHLRPLAPVVLVLEATAGYEVTVAATLASAALPVAVVNPRQVRDFARATGQLAKTDTLDARVLALFAEAVRPAARPVPDAQAAALGELIARRRQLVDMLGAEHNRRRLRRDRRLQRHLEAHIAWLEEALRRLDHDLTTLIRSTPVWRETDDLLRSVPGIGPVTAGTLIADLPERGRLDRRRIAALAGLAPIARDSGAFRGRRMIMGGRAHIRRVLYMATLTAITHNPVIRAFHQRRVAAGRPGKVALTAAMRKLLTILNAMLRDRRPWHPA

SEQ ID NO: 127789 - protein, 425 aa, unidentified
MNYKQNEKINQVKESTLVIGIDIGSTTQYARAFDWRGIELGKVFTFSNSREGFESFKAWMQHLQDKYRKSDVIVGIEPTGHYWFDLGAYLEDEGILLVMVNPYAVKQTKELDDNSQSKNDRKDPKVIAKLVTEGRYSAPYTPDGVYADLRIMVANRKRLIREMTQIKNRFARWFAIYFPEYTDVFGDYEAQSSMLLLKKVCTPEAIVELGAEKINQIWRDAKLRAVGMKRATTLCETAKRSIGLKKGSSAAQYEMKLLLEDYEYKKAQLDAVIEEIEKLCRKIPESEQMLAIKGIGVITVAGFLAEVGDVRRFESPRQIQKLAGLSLRENSSGKHKGQTTISKRGRSNLRAVLFNAAIPLIATNPEFKSLHEYYTTRANNPLKKKQSVIAISCKLIRVFYAILANGVTYDAQKMLSDIHRQPQAA

SEQ ID NO: 127790 - protein, 401 aa, unidentified
MVNPVIRVAVDIGGKTHHAGIAGPEGKLLDQFTFPHSQEGFQEFFDRVERHQRELNLPVAVAMEGYNGHARPLDRLIQEKGYKLYSVNNLKLARFREIFPGPAKTDSLDVHRILELFHLKDHLPLAKDVLQEVTEVPPENEKLKRFTRRRRQLVLEKVRVMKRMQADLQSVCPELLSLTRKVDNLWFLRFLASKDDLRELARLDRKELLGIPGVGRKYSGIIGAWQRKARFSPEVEYVGPMIVSDAKRILELLEEIASLDRAMEELSRESEIARRLSTIPGFGKTSVTELAGEIGTLDRFPSEASLALYLGMCPLDRQSGKFHGTRSPKQVNRRAKAAMMVAVAHHIRAVPESRAYYEKKREEGKRHNQAVRALARHLVRVIWSMLKRGRDYELREVLCAV

SEQ ID NO: 127791 - protein, 430 aa, unidentified
MGFIVPTDMHPEPADQPMPYECFVGIDWGSQQHQVCVLDGDRRRVGERTVDHDGASLARLADWLWTVSAGQPQRVAVAIEVPRGAIVEGLLERGFHVFAINPKQLDRFRDRHSVAGAKDDRRDAFVLADSVRTDQPSFRRLHLDAPQLLRLRELSRAEETLLEDFRRSANRFRDQLHRLYPQMLQLCSAADEPWLWDLIDVAPTPAHVALLSEEQVQRVLKAHHIRRVTAQEVLTCLQALALPVAPGAAEAAQAHCQFLLPCLRVLAEQLQACSQQVSALLHTLAEAPGDGEGPSDVAIVLSLPGVGRKITAWLFAEAAQPLAERDYQMLRTHSGVAPVTKQSGKRRVVVMRRGCNPRLRHALYHMARVAMQCDAHFNSVYAALRAQGQRHGQALRHIGGRLLRILIAMLRHRTCYDASRIRREPVVQMG

SEQ ID NO: 127792 - protein, 355 aa, unidentified
MSSEKYIGLDVHQATISAAVTDSQGKVIMESILETKASTLLEFLAGLRGSLFVTFEEGTWAAWLYDLLKPHVTEVLVCNPRKIPLHKQGNKSDQIDARKLAERLRLHDLKPVYHGENGIRMLRELARSYLTVVKDLSRVMNRLKALYRSWAIPCAGRDVYYRRHRSEWLDKIQEPGVRCRAERLYQQLDMLQHLRQQARRELLVESRKHTITAKLRQIPSLGPIRSALAVALMQTPNRFRSKRQLWTYSGLGLETRDSGEYYVVKGQVRRRKKQATIRGLNKDHNHDLKGLFKGAATRASVKPGPFQEFYQRSLAKGIKPTMVRLTLARKIAAITLTLWKKGEDFDINKLNSQAA

SEQ ID NO: 127793 - protein, 406 aa, unidentified
MFYLGFDIALNTHRLVMLDDSGERVSSGISFQNNTADFEKVLSKLKELSINPDDSICGLEATGNNWENLYCFLTGNNFKTILLNPHQTNKFREALRKKAKTDDIDAFVIAGLLRSNEFASSYVPEDKIQTLRELTKLRYEFIKDHKNYQRQVQALLTIIFPEYRQTALKNPFAIASIAIFKAFPTAKHLSLAKPKHIEKIVRSIKGNNFNVKEIENLISIAKTSVYSGRCQESRALTLNILLTQVENFDKSIHQLEEQINLILSPTSNDDINSFPGSNLLTIPGVGPKTLAAILSCVGESGQAFSGGVKLIGHIGFFPQIYESGETKRANKLSNKGPAYLRHALYMASVACVKHNLQLRNLYHTKVSQGKKPKQALICVAKKLAHICLSMLHSGQDYNPARVFSYV

SEQ ID NO: 127794 - protein, 416 aa, unidentified
MKKEVMSNSKIKPSWFFAAELLRLLLRLSRQGLERSLSQPLTKKLLNWYVCFCKQQEQTNKEPAMKTASKKMNYKGAKVYIGIDVHKKTYTFSAYCDGAIVKTATVPADSRKFVESLKKWFCGAEIYSIYEAGFSGFKLHRVLESAGIKNRVINPASLEIAAKDKVKTDKRDSKKLAEQLGVGRLKGINIPTEQEELARLITRTRGQVLKDRNRVGHQIKSRLHYFNLIEAEDDRVISDKLLREYEAEDYPSELRLSLQMLIDHWRFLTQQLEDLKIEMKAQSFEDSYNEMVYQSIPGVGDVSARVLSNELGDLSKRFKNQQALFQFVGLTPSEYSSGENQRLGHIDRQGSARVRKILVECAWRAVTIDGALKECFERIAARRGKKRAIVAIARKLVGRTRACFVSGYEYNLGVAV

SEQ ID NO: 127795 - protein, 355 aa, unidentified
MDSTKYIGMDVHKETISIAVLNSSGKLVMETTIETKASTLLQFVQGLRGSLHVTLEEGTWAAWLYDLLKPHVTKVVVCDPRKNALLKAGNKSDRIDARKLAELLYLNKLKPVYHGEHGVRTLKELSRSYLTISGDLARVMTRLKALYRSWAIPCAGKQVYAPRYRSEWLGKISEAGVRRRAEFYYQQLDALRSLRQQVRRELLAESAKHKASKLLCQIPSIGPIRAAQLIAILQTPHRFRSKRQLWAYGGLAIETHSSADHRYVEGQLRPSKRQVSLRGLNRNHNHELKNIFKGAAIIAATKAGPFQEFYAALVAKGIRPEMARLTLARKIAAITLIVWKKGVCFDAQHLKRQTA

SEQ ID NO: 127796 - protein, 347 aa, unidentified
MTKIIRIGIDTSKSVFVLHGVDAAEQPVLRRKLRRKEMVGFFAKLPPTEIGMEACGAAHYWARVLRELGHTVKLIAPQHVKPYIKRNKNDGRDAEGLCEAMSRPTMQFVPVKTEEQQAALMLVGMRERLVARRTQLSNAIRGYAAEFGLTAAKGLDKIEPLLAGIAADEALPVLARDLFAMHGREYVQLQAELKKIEARLMAWHRANTDSRRLAQIPGIGPVVATTLVMKAPDPRLFPSGRHFAAWIGLTPKDHSTAGKTRLGTITRAGDEMLRSVLVAGATAVIQQAKQGRGHPSPWLLALLARKSSPKLAAIALANKIARIAWKLLVTGESYHAGGKPIASAHAA

SEQ ID NO: 127797 - protein, 325 aa, unidentified
MDAYIGIDVSKDSLDVCLMTEGSKDRLRAFPNKKSGYKQLLDWTNRYAPNTSKRFCLEATGSYSDGIAFFLAEEEQWVSVINPYRAKHHGQSRGPSNKTDQADARLLADFCRTQKPPLWRPAAPEVRLLTALSRRLESVKDLIGQEENRAKVPNLQKEIERSLKTTIRQLTKERERIERQIRDHIKKHPDLKRDRDLLLSIPGIAETTAWVILAELPDVTQFESAEAAAAFAGLNPRQYRSGTSVHKKTRLAKTGNARLRKAFYFPALTAARHNPIVSPFAQRLQQAGKPAMVILGASMRKLLMIAYGVLKHQQPFSSEGYQPAT

SEQ ID NO: 127798 - protein, 364 aa, unidentified
MKIVGCDLHAGQQSIAMMDSETGELTEKVLQHEGNAVGEFYGSLQGPVVVGIEATGAMQWFLELLEQLGIECRVGHPAKIRAAETRQQKHDRRDAEVILELLLMKNRFPDIWMPSSEQRDLRSLLRDRHQWVKMRARLQHTLQAIALNHALRKGKALWTATGRQALQDLALPDYTAQRRDELLRLYMQLEQRIQQLDKQVEKEALGRPQARRLLTHPGVGPVTALATEVFLGDPHRFDTANQVASYIGMIPCEHSSGKRRRLGKLTKEGNSLLRYLWTEATLHAAVKDPELKRFYRRKLVQKGMGKARVATARKLGIRLWIMLRDEIDYEEFCRRGKLPQKGKTHAGMPDFNSGPARAVTGSTE

SEQ ID NO: 127799 - protein, 388 aa, unidentified
MYYVGIDIAKYKHDCFIFTSEGEIVLESFTFENTREGFSKLKLILDALDHSQKIKIGLEATGIYGKNLKLFLSSIGYDFDELNPLQVKRFTNALSNRKTKTDKIDASQIARFVSTGASRTYVYSSYHTEALKQLTRARNSLIDERSKHQTVLTGILDVEFPEFKGFFNNKFTDTALCLLNKYKTVKRISRLSHNDCVLLHNKSRVISTSRFEELRESAKNTCGHHFDYNDSLISANLQIIKCLNNEIDKIEKEINSIMSTINSPVVSIPGISAISAASIIGEFGDFARFDNAKQLCAFCGVEPSIYQSGTSYHEGKMVKHGSSNLRRTLFNAVPYIIMHNETFKTFYNKKRSEGKAYRVAQSHVVKKLLRVIFTLEMTGSTFDPSKLY

SEQ ID NO: 127800 - protein, 338 aa, unidentified
MAIVTVGIDLAKSVFAVHGVGESGKPELVRPEVPRARLLELIAHLPPCLIGMEACSGAHHWAREFGKFGHSVRLMAPKFVAPYRMSGKRGKNDAADAAAIAEAVTRPNMRFVPIKTIGQQSQLFVHRARQGYVEQRTALINRIRGLLSELGIVLSLKAVTIRREAHKALEDLPGWCNTVIGDALSELTHLDERIGQYDKYITQAAAEDQQCRQLMQLGGIGPTTASAIVATVGKGHDFSCGRQFCAWLGLVPGQYSSGGKQRLGRITKAGDRYLRTLLVLGAKAVLASAAKKTDQVSRWAIAVQERRGYWKAVVAIAAKNARMCWAMLQRGEAFKMPA

SEQ ID NO: 127801 - protein, 344 aa, unidentified
MTYYAALDVSLRSVQICVIDDQGEIQAETKLDSEVTDIIAYLDSLDLELASVGLEAGTLCQYLTYGLQSAGYEVVCMEARQVKAALSAMRNKTDKNDARGIAQLLRTGWYSRVHIKSMASHRIRALLSSRKAVLCKCIDLENEVRGLFKVFGIKLPPKLGHGAFDAAVRDVITTDATLSFALLPLLDARLVLYHCFRELDNRTRNLAQQDPVCQRLMSAPGVGFITALTYKAGVDDPTRFKRSRTVAAHFGLTPRRRQSGEIDIDGHISRCGDQNVRCTLYTAANALMTRSSRWSSLKAWGMQLAKTRGHRRAVIAVARKLAVILHRMWLDDTQFNWGTEGARS

SEQ ID NO: 127802 - protein, 401 aa, unidentified
MHDRDRQVTGGVDTHGEVHVAAVIDATGPILATSSFAAALAGCRGLLGWLRRHGRVVGVGVEGTGSYGAGLARCLTGEGVAPTEVNRPDRQRRRRHGKCDTVDAEAAARAALNGDAARTPTASGGPVDSVRVLRVARRSAIKARTQAANQIRDLIVTAPDRLRSRLRGLDTDQRVAVCSRFRTGETTDPGEATKLAVGSLARRHLELSAEIAAQLAALCAAINPALLAAHGVGPEVAATLLAAAGANPARMGSDAAFAALCGVSPVEAFSGKVTRHRLNSGGDPQANNALWRIVVVPMSSDTRTHAYVARRTREGKSKREIIGWLKRHIACEVFRLLTRPATVPLRADLRAKRRRSGLTLADAAQALGTWPTRLSEIERGLAHNAELSRRYELWLQPDQAA

SEQ ID NO: 127803 - protein, 404 aa, unidentified
MYNAVGIDVSKGKSTIAVLQPGGTVIRKPFDVSHTSQNLIELADYLGSLEGPTKIVMECTGRYHEPMLKALYEAGLFVSVVNPHLIKNFGNNSLRKVKSDPADARKIARYTLDNWAELRQYSDMDDTRTQLKTLNSQFSFFMKQKVAAKANLIALLDNTYPGVNKLFDSPTREDGSEKRVDYAYSFWHVDCVRKIGLKTFTERYKAFCKKHHYIFQQDKPEKLFNASKELVAVFPKEKTYKLLIQQSIQQLNLASGHVERLRQEMNALASTLPEYSTVMGIYGVGKTYGPQLIAEIGDVSRFTHREALTAFAGVDPGVDESGQHKSKSNRASKIGSARLRKTLFQIMTTLLQNAPEDDPVYRFLDKKRAQGKPYYVYMTAGANKFLRIYYGKVKECLRNLEQAE

SEQ ID NO: 127804 - protein, 309 aa, unidentified
MGIDVATATLDIAVRPTAETWRAPNDAPGIDALVMRLGAWAPTLIVLEATGGSQGPLVAALVAAALPVVVVTPRHIRACAQAVGILAKTDRSAARVMAHCAEAVTPAPRPLPDAETQELRALLVRRRQLVEMVSAERARLDTVPPSIQDAIQAHIAWLTTQIAGLDDALTRASQTHPVWQAKEDVLQSIPGVGPVLARTMLGQVPAWGPLGAQPLAALSGVAPCNRDRGTRRGRRTVYGGRAEVRAVLSMGALVATRHHPVIKAFYERLLAAGKAKKVALTACLHTLLTIMNAMVRDLKRWQPREVPIA

SEQ ID NO: 127805 - protein, 443 aa, unidentified
MSELAVLDPRAAFVDVGSEKMHVSIAGGPPALFGTVTSQLHALRDYLAEHQVRSVAMEATGVYWLPLYGVLEAAGMEVVMVDGRQTRNLPGRKTDMKDCQWGATLHAHGLLRAGFVPPASIRRLQDYLRLRGDHIAAAAGHVQHMQKALERMNIKLHEVISSLTGASGLTVIRAILAGERDPQVLLGLCDIRIRNVKAERVVESLRGDWAEEHLFALAQAVQSWDHYQGLIAACDRQIAVVLRQMPDAKVPPPAASTKAGKPRTRPGVNAPDIADLREILAQICGAKDLTTLPAHSEYSVLQLIGEVGTDLTKWRTEKHFTSWLGLAPGSAQSGKRKASVKRRRNRAGQIFCVMARALARSKYVALGGFYRRMAARRGGLVANKALARKPATLFWRVMVKGLDFIETGVAQYETRVLETKHRILHRLARQLGQQIVPNPAAVV

SEQ ID NO: 127806 - protein, 384 aa, unidentified
MQKPNDLNQSRIVLKQDSTLIAVIEMSLSSWLVAGIVPGVERQPLKKLAVDESALLKLLNRWREEAEKAGRRIERVAVAFEAGRDGFWLARWLRARGIEAHVIHASSVAVSREHRRAKTDRLDTELLKRAFLGWLRGERDHCKMVAIPTTKDEDAKRPNRERQSLVGEQTRIVNRMKAALIRLGIRGFNPKLKKAAGRLEDLRTPEGEPIPPNTLAELRRDMERRRLLSDHIRQIEEARLERMEQAPGDGPHAMVRLIARVIGVGIETADMLVHEVLSRKLRDRRAVARYAGLTGAPDESGSKRREKGLAKAGNARVRGGMIQLAWRFLLFQKDSALAQWYRTRTEGGRNRKTIIVALARKLLIALWRLVTTGEVPAGVVLRAA

SEQ ID NO: 127807 - protein, 355 aa, unidentified
MLYLGIDQHARQITISLRGESGDVLLARQVSTEPEKINAFFQQLTRERLRENEPFVAVLEVCGFNDWLIRLLQDYRCHKVILIQPEERKKRKTDRRDSAALSELLWANRDRLLQGKPVRGLRQVDISSSTDQENRRLTTLRKDAGQARTRLVNKVRHILRRHNLQWDMPTKRLPTQAAIAWLKKVVLPAIDRLEMDHLLTDLERVQHRLKELEAVIAERSGASKEAALIASIPGVSHFTATALACRVGSVKRFPRAHSLANYWGLTPGCRNSGENDQRLGSITKAGSALARWLLAQVTHKVLRKDARLREWFKRIKRRRGASIARVAVMRKLATIIWHILSKRKTYVECRELAAA

SEQ ID NO: 127808 - protein, 330 aa, unidentified
MEAYNVILGVDVSKLTLDISCAERLLHTKIDNGSKGFSVFKKWCKINGINLNDILIVMEHTGGYEYRFIQFCESLSIPYCRVPGLEIKNSMGINRGKNDKDDSFRIGQYGEDKIKRLRPSKPLDDNMLKLKQLLSFRKRLVRENAGLEATVKERIHMYEPKKKDLIISIARKKMVANKKDIQLVEKEVMERIKANESMLLNYRILTSIKGIGPVNAWMTLAYTENFTLFTDARRYAVYVGVVPFKNRSGTSLKGKDRVSHIANKELKQELNQAAKTAINHDPEIGAYAVRKLQNKPYPLVLNNVKFKLILRMFALVKRGEKFVKDYNRAA

SEQ ID NO: 127809 - protein, 412 aa, unidentified
MRRVIGFDTHRTFGEVVIWEDGRLRHAGRIDMTRTALEGFGKSLLATDEVVIEATGNCMAVSRVLSPFVKRVVIANPLQVKAIAHAHVKTDKIDAGTLASLYAAGYLPEIWTPDAATERMRRLVARRYQVVRHRTRIKNEVHSILYAHLIAHCPHADLFSGVGRAWLARQACPDDERIAIERHLRELDRLGEDLAVLDAAIADSALADPAIKRLITITGVNVTVAAGLVAAIGDIRRFASPQKLVSYFGLNPRVRQSGLGAAHHGRISKVGRSHARAMLVEAAWTAAKAPGPLHAFFVRIRAKRGHQIAAVALARKLTVLCWHLLTKDVDYLWARPALVANKVRGMELQAGRPQKKGNRRGPAHAYNVKELRDQEMNVARRAEAAYEHFVGQWRPQGPRKEVRERLNPARHE

SEQ ID NO: 127810 - protein, 397 aa, unidentified
MYIVGIDIAKRKHEAAVIDGEGTVIIKPFSFTNNCSGYNRLLAMLTKAKLPLDEVSFAMEATGHYWLALFTRLQKEGFRVQVINPVQTNSIRSFYIRQAKTDPRDALLIAEVIRFGHFSESTLHPENIYELRELCRGRHAIVSMQADVKRKVVALLDQVFPEYETAFTNLFGDTSMAILQTCPTPKELSEMPLEELCHLIEVPSHKRFRMAKAQELQEIARNSFGFAMAGDVFSTMIRLYAKHLVFLKQQVQEMDRKIAEIMDTLDTLITTITGIGPTLGAYILSEIGDISRFSSAAKLAAYAGIDPTMRQSGEYNGVRNRMSKRGSPYLRHAIWLAASSAVLHDPALKLYFQKKRDEGKPYMASVGHACRKMVSIIYAVMRDNKAYTPCIPNEISA

SEQ ID NO: 127811 - protein, 357 aa, unidentified
MLALGDSAPRKGADAMTFVGCDLHTRMQQVAVLDTQTGEVSERQLPHDGMAVERFYAALPRPVTVGIESTGYAVWFHTLMQRLGHTLLVGDAAKMRAMVVRKTKTDRRDALHSLDLLRHDRFPAIWVPDPATRDLRALLTHRMRLVRIRTMVKNGLHAIALNSRLACGSKLLRQAGLAQLQALALPPHTARRRDQSLELLAGLTTQIRELDDAITTAALGHPDAPRLITHPGVGALTALTTIVVLGPVSRFHDSKHVVSYVGLAPALHASADKYHLGRITKQGSPLLRFVLGQAAAHAARMDPDLKRTYGALVHRRGRPKAKVAVARKLLVRLFIMLRDQIDYDEFCRRGRTAPAAA

SEQ ID NO: 127812 - protein, 421 aa, unidentified
MPNIEIGVDSMVKENFIYVGIDLHKETHTAVMIDCYNQKLGEITFPNRPAAFPKLVTKVKKCNTDGKEVVYGLENAYGYGRALAVWLIDKGYLVKDVNTAISHRQAKHRGAMYRKSDSDDAKAIALATLNMLDKLPDACPNDAYWSLGQLVHRRDNIMKQRTRLVNQLHEQLCIAYPSYKQFFNDISRPTALYFWEHYPSRKYLKGKSVEDLRAELVPVSHNKCSTKTCEKILDAVASDKVKNNAYQDARDMVTLSIVSDLQHYDSQLTEVDKMLEQMYKMLGCTLTTIPGVNVITAVKILAEIGDIKRFSNANKLAQFAGIAPLHLSSSGKGKDVATKQGNRRLQATIYFLAIQMVQVSSKGTPRNSVVRAYYEKRKAEGKTSQQALICISRRLISIIYGMLKHGTEYRMPVVESAGEKL

SEQ ID NO: 127813 - protein, 346 aa, unidentified
MYQDNLFCLDLAKKSIQGCLLDKNHQVRFNRTFSRNKLIEWLSRQQPMAVAMEACSTAHYWSRVIERLGHRPLMVPTRTANRYREGHKTNATDALAVGVAARQPTTRFVAPKTIEQQEMQSVERIREHISDDLTATSNLIRALLAEFGLQIPKGKAAFKRHLVELLEDAENDIPMALRTELINEWMRYRQLQLRLKEAERARDLLCKQHESCQRLNQLGGVGPVNAIGLYLALGDRGSSFKNGREAATCIGTTPKQYSTGDEVTMLGISKKCANKRLRSNLIQGARSVIQALKRREPNNAQEAWLKAVIERRGEGRAAVAWASKTIRVAWAMLHHGDDFKSHLNLA

SEQ ID NO: 127814 - protein, 350 aa, unidentified
MLIIGCDYHPSFQQIAYVDTDTGELGERRLAHPEEAAQFYGELKQRNVAVRVGMEASGHARWFERLLRQLEFEVWIGDAAEIRTKRVRKQKTDRQDAQLLLQLMMEDRFPRIWVADAENRDLRQLLWHRHRLVQMRTRVMNQLHVVALNEGLQRKKALWRPAGRNELESLVLAPWASRRRQDLLALLDQLATKIAELTLALEREVEKRPVTRRLMTHPGVGPLTALAFELVIGTPERFRCGKQIASYVGLIPEEKSSGNRRRLGHITKQGNALLRFLLVEAAQVTVRSQPQWRSRFFHLAMRRGRKIAKVAMARKLAVHLYWMWRQGLDYGQWQKLGSHAGEPGNRYGGQ

SEQ ID NO: 127815 - protein, 441 aa, unidentified
MEAVYRRCAGLDVHKDVIEVCVLPPAGQSGSPQRRRFATFTSDLIRLRMWLVSLKATEVAMESTGLYWVPVWRQLEGHIGKRLLCNPQQVKALAGRKSDRRDGQRIAEFLQDGRLDPSFVPPKEIQQLRELLRMRVSLVQEHNRLSNRVEKLLQSYGVKLSSVASDILGKTGQRILTALADGQTDPDRLSWKAVGSLREKEAQLRRALRADFDEHSCWMLGVLLGQLKENEQWREQLEQRITEGMKPYEPIVIRLMTIPGVDRLTAWSMVAELGTDMSVFPDQRHCASWAGVCPGTNESAGKQHSTRTRRGNRYLRRILTQSAWATSRCKRGYLRAAFHRIAQRRGHKKAVVAIAHKILVAAYFIIRDKTTYLELGEDYFDLLHPERTARRLARRLERIGYQVTLTKAAATAPRSSEGQQPKKRGRPCKCAERGIDCKHKR

SEQ ID NO: 127816 - protein, 345 aa, unidentified
MQLTTVSVDLAKNVFQLHAIDQQGKTALRKQLKREQVVPFFANLEPCLVGMEACGGAHYWARKLQALGHTVKLMAPQFVKPYVKSNKNDVADAEAICEAVTRPNMRFVPIKTVEQQAILAVHCARQGFVKARTAQANSIRGLLGEFGVVLPQGIRHIVERLPDILEDHENALPGSLRQLMQRLMEHFKELDRQVVELEREIQQWHRNNEDSCRLAEMPGVGPLTATALVASVGDAKNFSNGRQMAAWLGLVPRQHSSGGKPTLLGISKRGDGYLRTLLIHGARSMVRVVESKTDPSADWLKGLLARRHTNVAVVAQANKTARIAWALLAHGTKFRPDYTPDVTVA

SEQ ID NO: 127817 - protein, 382 aa, unidentified
MDKLIRIGLDTSKSVFQLHGVDTAEKPVLRKKLRRKQVLEFFAKLEPTKIGLEACGGAHYWAREMAVLGHEVVLLPPQYVKPYVKRNKNDAADAEAICEAMSRPTMRFVPVKTADQQAALMLVGTRDALVRRRTQLTNMIRGYAAEFGLTAAKGLAKIEPLLARIEEDANLPDLAKKLFAVHAKEYARLKVEIEKLEAELMAWHKHNELSRRLVEIPGIGPIGAILTVMKIPNPQAFSCGRDFSAWLGLTPKDHSTAGKFRLGVITRAGDKALRSVLVAGATAVIKHVRHGKGRPSPWLLALVRRKPPKLAAIALANKNARVAWKLMVSGERYNSVRYNPVCSQAGAVSEGRVAPLRDGSAPRPSPTSRSTSQGQATAMTNA

SEQ ID NO: 127818 - protein, 320 aa, unidentified
MESKAAVVYAGIDVAKACLQLHLQNRQSEFANSPAGLGQLLKQLQTMSGVHVICEATGGYEQAMVKALHAANIPVSIINPARVRAAARARGQRAKSDPIDAQGLSDYGQRYQPAPTSPTSATQDQLVALTQWLKQLVQGQAMAKTQAEHHRHPFVRRQHAKLLAHLNAQIEAVEKQIEALLEQDAALQQRVNCLDNIEGVGPRTAWLVLAHMPELGQLNRRQVAALAGLAPWNRDSGTMKGMRCIGGGRPEVRVALYMAALSATRSNPVLRALYQRLRAKGKLAKVALTAVMRRLLIYMNHQLKDLLSKTKSQNIVQAAA

SEQ ID NO: 127819 - protein, 426 aa, unidentified
MSERDYSKQVAKRQRIGSRTLVVGVDIGCASNAVGFMSKEGKVLGSYPNMLNSREGFEQFVKMTEGLKAKHGLSDVLIGLEPTGHYWRKFAYFAKAKGCEVRFVRTTALKHHREIDESASAKSDPRDALTITNITREGKYIDTVIEDGRMRPLRTLVKVREKIQKRNVSAKNSLHAVLDDYFPELKEVFWSMHSRGLWALLERCPFPADVLPFKVSVLKEIIGRASRRRAEASRKAVAVYQAAKKSIGLKQIGSADRYRLKMCLEEVKRTQFMIKDMEREIKRMLKEIPQAEYLLSIPGIGPLSAAVFLGELGNPSYFQGARQIVKYAGYDPQESDSGYRVSRKFISKKGRWLLRKHLFLMSMRVVVLSRYFQQYYQRKLQTKNRFGQLPRKKEILCAVAIKLIKVIFALLRDQRNFEDTVTFSVQ

SEQ ID NO: 127820 - protein, 368 aa, unidentified
MTKSSLIYVGMDVHKDSIDIAIADAKARGEVRHYGTVGGGLGDVDRALRKIVASGGEPHVVYEAGPCGYALYRHLTAKGIDCTVVSPSRIPKRAGDRVKTDRRDAEMLARLHRAGELEAVYVPCADDEAMRDLTRAREDAKAAQTRARHQLKAFLLRNGISYAGKTAWTPGHVRWLASVKLPEPVQQQVFQEYVAAVTAAGERVERLEAALRDTVVGWRLYPVVQALQTLRGVQLVIAATLVAEIGDIGRFDNPRQLMAYLGLTPSEYSSGQSTHRGGITKCGNSHARRMLTEAAWSYRLPARVTPIIAKRQDGQSREVRDIAWKAQVRLCGRHRLLRARGKEPNKVIIAVARELAGFVWAIARAVRA

SEQ ID NO: 127821 - protein, 370 aa, unidentified
MAQSTPLFVGLDVHKDSIAVAHAVGGGTELPVYVGAIGTRQADLDRLIHRLQSKASRLLFAYEAGPCGYGLYRYLTGKGLACQVVAPSLIPKKPGDKVKTDRRDAVELARLLRSGDLTAVYVPSIEDEAVRDLCRARDAARVTGKDAKLRLKAFLLRLGLHYVGRATWNDAHRRYLAKVVCPTPTQQLVFQESVRAVDEQVDRRLRLDAELLERAPAWRLAPVVEALQAFRGVQFLVAITVVAELGDLTRFDNPRQLAAFVGLIPSEYSSGGSRRQGGITKAGNGRARRALIEAAWAYRHPAKVSLHIQQRIDQLPKPLQELGWKAQVRLCKRFRRLVARGKHPNIAVTAVARELIAFMWAIAKAVPLPA

SEQ ID NO: 127822 - protein, 268 aa, unidentified
MTTPGRFLGIDVSKRQLDIAERPSGERWSAANDVAGIAGAVERLRASGPLALIVLEATGGYEIPLVAALSAAALPVVVVNARQIRDFARAVGKLAKTDALDAAILAHFAEAVRPELRTLPDELTQTLQGWLARRRQLLEMLLAEEQRLALAVRGVRPQIEQHVEWLRSQLRNVDTELKTLIRESPVWREHENLLRTVPGVGPVLATTLLADLPELGRLNRKQIAALVGVAPLNRDSGLQRGARHVWVVGPQSGQLSTWPRSAPCAAMS

SEQ ID NO: 127823 - protein, 406 aa, unidentified
MDEIIIDKGCGLDVHKETVVACVMGSGIKKDIRTFSTMTNDLLRLKTWLSRLGITHVAMESTGPYWKPVFNVLEDGFTLILANARHIKNVPGRKTDVKDSEWICRLLRSGLLSASFVPSQRIRELRDLTRYRRKLTQALSAEKNRIQKVLEDANVKISSVLSDTFGVSGNQMIEAIMEGKLREEEIADLAKGRLKSKKEEIREALVGYFHDHHRFMIKASLEHIKYLEKLISDLDRATKEKLEQYQKEYELLQTIPGVKEQGAAAIIAEIGADMDVFPSEGHLSTWAGMSPGNNESAGKKKSGKTTHGNKNLRAALTQCAWAASKTKNTYLSAKYHSLVGRRGKKRSLIAVGHKILVMAYHIIKNGVPYKELGKNYLLHRREDKIVKNHIKRLRDLGYEVELKKAA

SEQ ID NO: 127824 - protein, 336 aa, unidentified
MTKYIGLDAHSSTCTFNVTDERGREIDNTTLETNGRLLVKYLRGIGGVKKLTFEECELSNWLYEILSKEVDELVVCNPVANKDYKKIKTDKMDARKLAKLLRGGFLIPVYHNGSSRERFRSVMSAYQDLVEESVRLKNRYKSLFRKEGKKAKGESLYHDESFLEGLERGDFQFIGRHIYELLEKMEQGRKEYIKEIIKYSKGFKEIKYLKSIPGIGPIQAARIASQVIDPKRFADKYKYYSYCGLVRHKRISDGKEYGSCRIWGNRILKSVYKTAGLSVLQGSSGLRKYYDCLRSKGISHDNAYNAVCRKIAAISLSVWRKSESYNDELITGNLTK

SEQ ID NO: 127825 - protein, 316 aa, unidentified
MSESTSFVGIDVSKNVLDVHVLSGGEHWQVSNDQAGCASLVERIKPLGETVLVVMEATNVFWRMAAAALAGAGLACAVVNPRQVRDFAKSMGILAKTDAIDAQVLAQFAQRIKPPVRALPDAQCQVAAELLARRAQLMGMRVAEKNRLGTASAKKVRKDIEATIAFLEKRLAGLDEQIDQWLKSTPIDQSRADLLQSFTGIGQNTARSLLITLPELGRLSGKQISALAGLAPFAKDSGAKRGQRHIAGGRSIVRGALYMPALSAITYNPVIRAIYQRLVQAGKHHYVAITACMRKMLVILNAMLRSGKPWKAPQHA

SEQ ID NO: 127826 - protein, 336 aa, unidentified
MTKVIRIGLDTSKHVFQVHGVDASEQRVVRKKLRRGEVERFFAALPPTLVGLEACGGSHHWARVLMRLGHTVRLLPPQYVKPYVKRGKNDAADAEAICEAMSRPSMRFVAARTAENQAALMLHKARDLLIKQRTMLVNAIRGHAAEFGVTGAKGVGRIAALIESLAVDETVPELARELFAELAAQLEALEHQVRRLEARLKAWHRTNELSQRLAAIPGIGPIGATALAMKIPDPGNFRSARHFAAWLGLTPKDHSTAGRQRLGGITRAGDETLRRVLVSGAMAVIQRARPRHSSPWLLALLARKPRKLAAVALANKMARIAWALIARNQTYRSAAA

SEQ ID NO: 127827 - protein, 347 aa, unidentified
MVIVGIDAHKRSHTAVAVDEAGRKLGQHTTGTTSEDHLALLAWAEQFGTERLWAVEDCRHLSRRLERDLLGAGEPIVRVPTKLMARERNSARSYGKSDPIDALAVARAAVREPDLPKAQLDGPARTVRLLIDHREHLVAERTRVINRLRWHLHELDPGNEPPARTLWRPKHLTAVSAQLDQLDGVVARLARALVERCRQLTEQIHVVDDELEPLVKHLAPALLDLCGCSTLTAAKILGETADVRRFRSRHAFARHNGTAPLPVWSSNHARHRLSRTGNRQLNTAIHRIAITQARHHEPARQLLQRRRNGGKNKAESIRILKRRLSDVVYQALRADARPSPPSRLKAA

SEQ ID NO: 127828 - protein, 313 aa, unidentified
MKKTICGVDVSKAKLDACIEPGHRFASFDNDTAGIAKLAAFCREHTVALVVMEASGGYERQVFVGLWEKGISCALTNPRNVRRYAEAMGILEKTDRIDASVIARFALAKNLVPTPLPSQAQQRLKALVTRLRQITDDLTVQKQRRASTFDNVEMRSSIDEVIALLKRQSRKLEGEIASMIDDDPLWAKLAESWREVKGIAGRTVARLHAELPEIGILSNKAAAKLVGLAPIANDSGKRKGKRPTRGGRAGVRSILFLVAAIAARYDKSLGEFRDRLLKAGKEKMVIRIALARKLLVRLNAKARDARAAYANAT

SEQ ID NO: 127829 - protein, 350 aa, unidentified
MKTILAIDLGKRNSVFCRLESSSLKPEYFKAKTGPKKFHDIFAELNGDNSIVLFEVGSQAGWLCDMLRAMRIEFKVANVNHSAWKWSNNPNKSDKTDAHRLAMMYHHGFFPEVYVPEKPVRQKRSLIYYRQKIVNRLTQVKNGIRALLTTEAIDLPAGRVCWTKKHRRQLEQLACPFETIDDPAQLWRGQLHMDLQQIDALQDCLNKTTAKLDELNKEKKSVELLETIPGVGPRTAEAIVAVIDDPRRFKSCRQICNYVGFTPRRFQSGRMDRTGRISKRGNPLLRALLVQASWTALRYDWAKHIYKRVSRGSVKRRKIAIIAVARHLLMRCWAMLRDNKPWQYKKQMRA

SEQ ID NO: 127830 - protein, 359 aa, unidentified
MKIVGCDFHPSWQQVAVFDPETGEVEERKLLHGDGEAERFYRELEAPALVGIEACGNSQWFIELADGLGHVVWVGDAAQIRASYVRRQKTDRRDAGHILKLLMENRFPRLWTPTSEQRDMRQLLIHRHKLVEIRTGVKNGLQHLALNKGLQKKNALWGVRGRAELEKLPLAGWTARRREDLFGLLKELNRTLDELDQAVERTAQDHPQARLLMTQPGVGPITSLAFVLTIGDVSRFRHSKQVSSYLGLIPREHSSGGKQRLGSISKQGNSFMRHLLVEAAQTANRLDEGFRRQYQARCHHKPKGVAKVATARKLAVRLYWMLRQNVGYPEIARIESSPRVALIGASQVVTLNERSRIQQ

SEQ ID NO: 127831 - protein, 398 aa, unidentified
MRDDRIQAAVGIDVSKDKFDACCFCRDNKELFRLTAPMDISGFESLVKAIETHAPDRGSMVIGMESTGCYHMNLFAYLTNKNYLTLIINPLLIKNFMKIDLRKTKTDRKDAAGIARFLLEHQDAVHQLIMSEEISDLRDLARQREGLNGQVRAIKNDFKRLLSVTFPELEKITNVFSRSVLQMLSRYPSARAIRSASVKEIDKSLREGASGRTPSLTGEQCKEAAKRSVGTSSKGKEFIVTQKAAMLLYMEEKLQEMTETLTEMCESLLVEDMEIMTSLRGVGKTTAAEFLGEIGGDISKFSSAKKLIAFAGLDPEVRESGQYKGQSKLSKRGITYLRAVIWQMAVKVIRYNELFQDYFQRRRQEGLPFKKAVLATAHKLIRVVFSMLKHRAPFSSPL

SEQ ID NO: 127832 - protein, 355 aa, unidentified
MKKQAVQYLAMDVHQATVVASVRNEQGAITMRATVATEAKAILSLIRAVGTRVMVAFEEGTQAQWLHDLILPHAEGVVVCNVRGKSELTNKSDRIDADGLSELLRLGALKAVYHGAPTMLTLKELVRNYNAVVEDATRAMLRIKALFRARAIATRGTSIYRVIDRAGWLDQLTNQGARVRAESLFKQLDLLRELRPKAKRAMIAEARKQSGWKPLRSIPFLGEVRTAQLMAILATPHRFRTKRNIWPYAGLAVVTRSSADQEFAGGKLRRRNRPPQTRGLNRNHNPMLKSIFKGAATAAAAKPGPLKDIYDACVARGTKPDMARVTLARKIASIALRLWKKGELWDPTKLTMQTT

SEQ ID NO: 127833 - protein, 417 aa, unidentified
MTVFAALLGIDWSDKKHDICLVDSATGKREASILRHSPQAIDEWAAALRTRYGGCQVAVCLEQSRGPLIYALMKYDFITLFPVNPRTLSKFREAFSPSRHKDDPPDAGYLAELLIHHRERLRAWSPDDEQTRTLRLLVEHRRRLVADRTRTSNRMTALLKCYFPQVLEWFPDIRTDLVCDFLLRWSSLDALKRVRRETLLKFFREHNSVRLDTLEKRVASIKVAAPLATDGAVINSSVLMIKALASQMKATLSAIREFDQQIEEICSVHQDYELFKSLPGAGHVYASRLTAAMGSDRDRWQSADEVACLAGVAPVMERSGQSCWVRWRYFCPKFLRQTFHEYAGESIKHSFWAKAYYEQQRSRGKSHHAAVRSLAFKWVRIIFRCWQTRTAYDEVKYLESLRRKGSTLLAYAANNPT

SEQ ID NO: 127834 - protein, 387 aa, unidentified
MQPAHIQDFTLDDQTLTASLELASKNWKMALQDGMHRSPSEHKAEQEGAAARLEEAIGLIETTRREWGLPPSCRVVIVYEAGQDGFWISRALQKRGYEVVIVDPASIPVERQARRAKTDRLDAIRLLCCLRGWLRGERDRLHAVRVPEVEAEEMRHLMRDRGLLQKEVGQHRDRIRKLLRTVGCWVRVGPAFAGQLERGEVVCHDGAALPPCLRQRLMRECERLDLVTRQLKELEAALPEQLPEATAQSVATLQRLRGVGQIGAHRLVLELFWRRFDNARQVGSCVGLVPQPYDSGQSRVDQGISKQGNRRVRALLIEMAWMWLRYQPDSALTHWFARRTTTGAGDPSAGKRGKRVAIVAVARKLVIALWRYLKDGVIPDGAELKYG

SEQ ID NO: 127835 - protein, 344 aa, unidentified
MEYYAGLDVSLRSCAVCVVDGKGTVLYERDLPCEIEEIAGYLTALPVTIERIGFESGTLSQHLFYGLKAEGFDVVCMEARQVSAALSAMRNKTDRNDARGIAQILRTGWFSPVHMKSREAHGVRALLSTRKALLSKTIDLANEVRGLLKIFGIRLPKTVKHGSFDGVVRPMIEIDEVLAHAMLPLLDARLVLYQHFLELDWRVKRAASQDEVCMRMMTVPGVGPIAALTFKAAVDDPARFKRSRTVAAHFGLTPRRYQSGEHDNPGRISKAGDRDVRATLYAAANALLMRTMAGSQIKSWGMRLMRTKGRRRAVVAVARKLAVLLHRMWADGTEFRSEKVEGTA

SEQ ID NO: 127836 - protein, 297 aa, unidentified
MKVTTVGIDLAKQVFQIHGVDDHGKAVIKRQLKRAQVTEFFVNLSPCLVGMEACGSAHHWARKLQGMGHTVRLMAPQYVKPYVKTNKNDAADAEAICEAVTRPNMRFVPIKNIEQQSILAVHRVRQGFVQARTAQANQIRGLLGEFGLVLPQGIHHIYRKTPELLEDASNELTGSFRLLILRLLDHLKELDKQVQEMEREIVQWHRQHEDSKRLEQIPGIGPITASALVASLGDAKSFQNGRQLAAWLGLVPRQHSSGGKQNLLGISKRGDTYLRTLLIHGEKEGRDKKKKKWKEKR

SEQ ID NO: 127837 - protein, 341 aa, unidentified
MQNVTLVGIDLGKHSFHVHGQDKAGKAVFRRKLSRKQLVEFFATFHACTVVMEACAGAHWMARKLSQFGHTVKLISPQFVRPFVKSNKNDFVDAEAICEAAARPSMRFVTPKTESQQTLAALHRVRQALVRDRVCTINQMHGFLLEFGISLPVGHAVVKRLSVVLAEHQLPPRLVAILERLHAHFKYLTQQIVDIEKELDRQLAEDPVGQRLLTIPGVGPITASLLASELGDGKQYRCGRDFAAAVGLVPKQYSTGGRANLLGISKRGDKNIRHLLVQCARALMLRLDKQSGRVVDWVRAMLTRRHSSVVACALASKLARIAWAVASSNTVFDRQASVPAL

SEQ ID NO: 127838 - protein, 456 aa, unidentified
MNNYYLGVDVSKGYADFVMLDDKKQPIEENFQLDDTFDGHCRLYEILCTFCEDHAECTIYAAVESTGGYEDNWFNALVKFQGTLNLRTARLNPLGVNANSKADLKRNITDKISAQNVAEYMIAHPEKVSYQQQDHLASLRKQWGFINMLTKQSTQLFNQLEPLLYSANPELLVYCKDGVPGWVLKLLLRYPTASDLSKAKVVSVSRIPYISSARAQDLIIIAKRSVASATDKITAQLIMETVKQILHLKKIIASQIDLMAKHCSVPEVDLLKSFIGIKDYSAIGLILEIQTVERFLSVKKLASFFGLHPVYKVSGDGVGRFRMSKKGRKEPRKILFMVTLTAIRSNPLIRSIYLEHIQKGMEKMAAIGLCMHKTLRIIYGMLKHNMAFDPEIDRKNREKSYQFKRKVLQDKNRRYQDFDAKAPISRRQNSKREEQKQSHSDNNTNNGIIASAPLSP

SEQ ID NO: 127839 - protein, 433 aa, unidentified
MPTTHPYDLVIGLDRSDRKADLHLIDTRTGTVQKQTVATSPEALHDWLAQLRQDHPQARVALCLEQPAANLIVFLETYAWISLYPINPITLQKFREAFVTSRAKDDGKDAQYLAALLLSHHDKLKPWQPDDSQTRQLQQLVLHRRAVVDQRTGLTNRLIALLKQYFPQALDLCGEDLWRPLATAFLLKWPTLQSLKKARKESLKQFYYLQGSRSQTLIEQRLERIDKAVPLTDEIALLQSYTLRVQLLCKELQLLLKTLQEFDQQIANVFQQHTDRPIFEALPGAGPVLAPRLLASMGSERERFAQPENLQCFSGVAPVTKQSGGNCYIHRRYCCPKFLRQSFHEYAKESILHSRWAAAYYGQQRNKGSGHHTAVRALAYKWQRIIWKCWQTRTVYKEAIYEAALKKNKSPLVGLLDQIELGKSPVKSRAKKS

SEQ ID NO: 127840 - protein, 425 aa, unidentified
MDKSITLHVGLDVHKDSIDIATAELGRDGEVRHVGSIGGDLVALDKALRKLISKGHRLHVDYEAGPCGFVIWRHLNTLGTACDVVAPSSIPKRSGERVKTDRRDAMNLARLDRSGDLTVVRVPGAADEAVRDLVRAREDSVRECRSARHRLKALLLRSGIAYAGKSSWTQAHLRWLATLKLEHAAQQIAFQEYLHSITEATTRIQRLEQSMRDTLPEWTLKPLVQALQALRGVQLIAAMTLVAELQDFLRFESPRKLMAYVGLVPGEHSSGPKRRQGSITKAGNSAARRMLVEVAWHYQHSPRVSPIIATRQDQLPKAVTDIAWATQLRLHGKFKRLVARRVMRTKAVVAVARELAGFVWAIGREVQTSGWQGVSDDAQPPAKAVESVRGTTHPPALPASGKGAPTTSSWGGASRRTASSAKVKI

SEQ ID NO: 127841 - protein, 345 aa, unidentified
MPIVGGLDIHRKQITFDYLDTETGEVKRGQIAPADCPHLRAWLARFAGRNDVAFALEGCTGWRYVAEELAVAGVAAHVAEPADAAFARGRKRHATTDKTDCRHLRELLAEGRLPECWIPPSLILEYRALLETYHDLRAEHTAWVQRIHAVFFHQGAPAPGEAALRTGRDLQALRVAAACRLSPAGQLQVDTALGMLAALEARLDVLRHELLLAARSLTGAKVLASRLYGVGPVTALAMTCWLGGADRFSSSRKAVRFAGLDITVWSSDRKRPPGRLSRQGPEVLRWAVYEAGKTHARASAPDHRYYAAVKDRKDGKRAAISEARKILRQACHILAELGDDALTAA

SEQ ID NO: 127842 - protein, 333 aa, unidentified
MNENAVGIDVSKHKLDVCVVRGEKFKSKAVKNTPHGHQVLLGWLAERSLPQDTPVVLEATGPYSEAVAIVLADAGWRVSIVNPARVKGFAQSELVRNKTDVADAKLLARFAQRSDLAVWTPPSVAERELRALVERLRALVQMRQQERNRLEALTQPADGTIRARVEAHIQWLEREIADLERDIDDHIQGHPQLKRDAELIRSIPGCGAKFAAQFLAYIGDARRFTSAKALAAFIGVTPRQRQSGTSVRGRTMLSRTGHAEARRALYMPGLVAKRHNPVIVAMAKRLEQKGLAPKAIVGASMRKLVHIIYGVLKSNRRFDARILMQALAIQDGI

SEQ ID NO: 127843 - protein, 461 aa, unidentified
MAMTLGIDLACRAAHVASLAGPDGRLVWRGRKFFSRTADLERLWGDIDCDPAELTVVMEPTRNAWIPVAAWFRRRGVKVVMVPTTQSADLREYFSKHTKNDRLDSVVLARMPLLHPEGLREHVGDGPADPLRRVVKQRSSIAKRRTAVFNRLDAQLELLGPGWYDALGTDYGKATLAFLARYADPTVVIRLGQARLARFLRRYSRGHWREGKAAELIAAAQESLRLWDGDGIDFAELAADIAVEAEQAIALTEQIADLDERIANLYAEADPAAIIRSAPGVGPVLAGIIAGRLGDPHRFTSLAAVRSYSGLVPKVSQSGTSERTGGLTKAGDPLLREAVWMAAEQARKLDPQLAAKYARLMAADHRHHDSAVCHLATILLTRIATCWRTGQPYQIRDVDGTPLTQAEGKRIVAEKYQVPSKASKKRYYRATNHKADRGSQESLSAPTPRPAHAQNKPSQVA

SEQ ID NO: 127844 - protein, 326 aa, unidentified
MQGKESSEQKTKGKSNAGIDVCKNWLDAHLVPQGCSLRVRNDAQGHQQLKRWLMKHDVTLIAIEATGKWHRQVHRSLHASAFRVAIVNPLRARLFAEAIGLLAKTDRLDARMLALLAESLSPQAKAPASEAVEALQELVTGRDSAVAEQTALQNQLAAANSSFLRRQLKARIVRIAKDIASLQAEIERSIGNDEALARRHAILLSIPGVGPVTAATLIATMAELGSCTAKQIAMLAGLAPVADQSGAREGQRVIRAGRAAARRVLYLCALSAKRCNPAMMALYDRLTAAGRPHKVALGAVARKLVVLANTLITQNRLWQPEAPSYA

SEQ ID NO: 127845 - protein, 380 aa, unidentified
MKFYSKAHKHYCGVDLHTRSMYLCVQDYAGKKLLHHNYPADPQRFLQAIRPFREDLVVGCECMFSWYWLADLCLQEQIHFVLGHALYMKAIHGGKSKSDKIDSDKITTLLRGGTFPVAYVYPRGMRETRDLLRRRMHLVHIRAGTLAHIQNTNSQYNLPPFSKRICHARNRADVAERFTDQSVRKNIELDLDLIDHYDQLITQLELYLVEHAKVDDAFSFHLLRSVPGIGKVLALVLLYEIHTIDRFASAGDFLSYARLISTRGESAGKLQGVMGRKIGNAHLKWAFAEAACLMIRELDQAKRFVQRLEAKHGKPHALAVLRARIGRAVYYILKRKEPFDLKRFFGETQSSKAATAASPSITGSSPLVAGDAAEALALGR

SEQ ID NO: 127846 - protein, 329 aa, unidentified
MKKWKFSIGVDVSKLTLDICCSECGQHVQISNDAKGFKAFEKWCKAIGIQLTESIVVMEHTGGYEYKFIQFCESKSISYCRVPGLEIKKSLGITRGKNDKVDSMRIAEYAEEKQKKLTPSAPLNKNILQLRQLLSFRKRLVRESAGLTSTRSERKHMYGNKKDIILIAIDEKIEANKGYLKQIEKEIEALINNDVEMKRNYDIITSIKGIAMVNGSMTIAYTENFTSFVDPRKYAVYVGVAPFEHSSGTSIKGKKRTSNIANKELKQELNQAARSAIAYDPEIRAYAIRKMESKVYGIVLNNVKFKLILRMFALVKRGEMFVENYKKAA

SEQ ID NO: 127847 - protein, 369 aa, unidentified
MADRITYVGLDVHKESIVVAVAAGGLRGEVREYGRIANTPAALDRLLRKLGGDGMTLRFCYEAGPCGYDIHRRLSARGHECIVVAPSLIPKRAGDRVKTDRRDAASLAKLHRAGELTAVWVPDVGHEARRDLVRARLDAVHSLRRARQQLSGFLLRQGCHYGRPAWTKLHRRWLAGLNFGQAVHHIVLEDYIAAVEVAEARRDRLTGQIEAMLADWALAPVVAALQTMRGMALVNAATLTAELGDLSRFANPRQLMAYLGLVPSEHSSGASVKRGGITKAGNAAARRLLIEAAWSYRFPARLSRALLLRQESQPQLIRDIAWKGQLRLCARYRRLARTGKPANIVTTAIARELSGFVWAIARQVTVTTG

SEQ ID NO: 127848 - protein, 358 aa, unidentified
MQRNKISFKGQKIFIGIDVHKKNWDVAIAPKIGKVKRHSQKASAKELFVFLMKHYPDGDYLAVYESGFSGYSTYYALKEFGIECMVIHAADVPTTQYEEVMKTDSVDSVKLVRCLKAGLLRGIYIREKENIDDRSVVRIRKTIQKQLSGYKARVKHMLHCNGVSLPELFEKPGSHWSKAFIKWLKEDVKLLSSTRNSLDLLIRQVETIRMTLLEATKMMRNLSQTERYKRKFDLLMTVPGIGVAVSMCILTEVYDVKRFQNENKFAAYLGLIPTSHSSGDKIAHGEMTFRGNKQLGPMIIEAAWITICKDAGLGSLYLRYKERMKPQEAIVRIARKLSNIIFAILKNEKEYVPYHMGK

SEQ ID NO: 127849 - protein, 322 aa, unidentified
MRYIGIDVSKATFVVAYSSDKGGGIRTFNNTTAGIRQFIGTLPKDGSIHCVMEATGNYSALLLYMLNVAGITVSMENPLKVKNFAKAMLSTIKTDKSDARLITLYGEKMNPRPFKVQGEAILRLRQKRTVIRQLTKQITAMSNLRGSLVCLPVPDKGATHTVDETIKFLEKRRDRLQSELTELVEVEFSRQLALLTTIKGIGITLATALIITTGGFTYFQNAKQVSRYLGICPTYEQSGTSVNIRGHINRNGDAYTRGLIYVAAWNASRFNAKCGETYTRLRQNGKPGKLAMIAVANKLVRQAFAVVAHDKEYVDGFVSNRH

SEQ ID NO: 127850 - protein, 433 aa, unidentified
MNPNRLQVGIDFSQKRADFCLLFGNGQPLIAHQAFANSRLGYQQARQVLLESLHAFPFDGLDVSGEATSYYWFPFFWQMAHDAELGAWDLSLFLLNPRQVHWFKKSLPPNDKTDSTDPFYIAERTRTRRPKATWEPQDEWLPLRFYTRLRFHLARALTSEKNYYLVHLFLLHNTYRRNQPFSDPFGVTSQKVLGSEQSLVELVNLPVEELAERLDAWSGGKLDDPLETAHKLQQVAQDSFPLDEPLLTPVQNILDLTQEHIRFLEKQIAQAEGWIAAEVQCHHPEVLFLATVPGVGLVLAAGIAAEIGNLGRFFQTPKWDKKRKRYRTKTLREVEDAVAKLAGLWWPRSESGDFVAEDRHLAKTGNRYLRYYFVQAANGMRRYIPAYTQFYNLKFREATQHKHKRALVLSARKSIGLFVGLLHRKEAYRPQEA

SEQ ID NO: 127851 - protein, 336 aa, unidentified
MNEIACAVGIDVAKRKIDIALHINNKTKSKVFNNTPSGHQAFVSWLMNRGVLPEQTHLCMEATGPYSETLATHLVAAGWSVSAVNPALIKVFAQSELARNRTDRTDAALQARFCIAMRPSLLIPPPVEWRELRGWVDRQQALKDMHQQESNRMEAHQASGQTHLVQDVQIHLDWLDKQIKGLERNIKDHIDNHPCLRHDANLLGSIPSIGHTTVAKVLAYAGDVRRFSNAKSSAAFIGVTPRQRLSGTSVKGRTMLSRTGRSELRRALYMPGLVARRHNPTLKVFGDRLSGTGLAPKAVVGAVMRKLAHLIYGVINSGKPFDANFSHSGLAFQDGI

SEQ ID NO: 127852 - protein, 398 aa, unidentified
MKPCIAIDISKGKSYYQAFVALNEPYARAVPIGHDRDGYERLTASGAELKRRYGDVVYVFEATGIYHKSLQNHLENENERYVILNPLEAAKVRKSKLRSTKTDMKDCQSIALAYYTRGCPDHDRKAFLYETLMTMNRHYGHLIKVLRVEKVRFRNLLDVVFPKWDEMYPDPYTETSLELLKQYPHPEKLRSRKEETIAKYLEKTTIHRHEACVNEARKAKRYAEQAVSGCSETACEVSILCESIERVEKTTQMIETRLNEMTILVQNDPFYAQLRSVPGIGETLSARLIAELGDLNRFTSKRQLAACAGIDPIVYQSGKRTGEHLSITKKGNKTLRTLLYLAVTANIRIGKENPILDFYNKKRQQTTPMVHRAAVIACANKLLRTLYSMHRSGKRFET

SEQ ID NO: 127853 - protein, 341 aa, unidentified
MGQAHTIGLDIAKRVFQAHGADASGRVVFRKRLVRAKVLAFFAAQPPCTVAMEACAGAHHWARELGKLGHTVRLIPPAYVKPYVKRHKNDRADAEAICEAAQRPSMRFVPVKTEEQQANGVVFRARDLLVRQRTQCINALRGHLSEYGYVFPQGITHAEAVIAHVEDPDSAVPESARAVLKVLVGTFQALEAQIQTLDAEITQRAKADPVARRLMTIPGIGPIAATAITALVPAPEGFRAGRDFAAWLGLTPLQKSTGGKQKLGAVSKMGERTIRRLLILGASAVVRWASQRSTPAGSWLARMLARKPKMLVTVALANKTARIVWALLVKGGGYRAPAPAA

SEQ ID NO: 127854 - protein, 395 aa, unidentified
MFIVGIDIAKRSHEAIIIAEDGQVVRKAFSFRNNCTGYNLLLEQVRRLTLVKSQIVFAMESTAHYWLALYARLLKDGYAVMVLNPIQSHSLRELYIRKAKTDARDSLIIADLVRFGRCKASNVPQDKILALRELCRSRAYLVDMAADLKRKLIALLDRIFPEYESLFDFVFSKASIAVLSKYSTPQKVKNANLRKLTDILMESSNGHFGEWKAHQLKEAACSSFGIDDSGGVYSTLLGMFLEQILSLTAQADSLEKQISVFFQEFNNPLTSIPGVGTVLAATILSEIGDITRFSSADKLLAYAGLDPSVKQSGEFKSNQNRMSKRGSPYLRRAIWLASTVAVHRDPMFQTYYEKKISEGLHYMNVIGHVSRKMTAVIFAVLRDGQPYQPILQSAS

SEQ ID NO: 127855 - protein, 320 aa, unidentified
MSASSVVVGIDVAKAHVDVSVLGAKLDAQRFDNQAEGHSALTAALKPLDVALVVMEATGGYETELACALQAAGLSVAVVNPRQARDFAKSMGRLAKTDTVDARMLAQFAAVLLRRDDLARFLRPLADPQQQWLAALVTRRRQLLAMMLSERQRLQITPKGLHPSIEAMVAAIKAQLDDIEGQMVGHVREHFAELDRLLQSASGIGPVASATLIAELPELGRLNRREIAALVGIAPMANESGSSKGRRRIQGGRFDVRRVLYMAALTACRRNPVIKAFYERLIAAGKLPKVALVACMRKLLTTLNAMVRNNQPWDNSLHGA

SEQ ID NO: 127856 - protein, 343 aa, unidentified
MIIGCDFHPSWQMISWLDTETGETGERKLVHANGEAEHFYRGLGGSVRVGLESTGNSHWFVDMLIEMGHEVWVGDAAKIRAKQVRKQKTDRRDAAHILDLMVKNDFPKIWTPSKQERDQRQLLIHRYKLVTLRARVKNELQHLALNKGIQKGRSLWSKEGQKLLLELPLDLWAGARRENLLELLKSMDQKITVLDQAVKKAAEENEKSRLLMTQPGVGPITSLAYVLTMGDVTRFQRGKKVTSYLGLIPREYSSAGKQRLGAITKQGNRFMRMLLVEAAQVVVRYDPGFRSEYLHLCHHKPKAVAKVAAARKLAIRLFWMLRTNTPYPEVVRIESSSRVPLDE

SEQ ID NO: 127857 - protein, 340 aa, unidentified
MEIDRVVSQCVGIDVSKEKLVATVCMFSQAEQAVYSKATEFNNGKTGFNQLVKWSRKEAVKELPLRYVMEATGVYHEHLANHLVRIGCTAVVMMPTKAREFAYWEGMISKNDAIDSRVLALVGCVKRTMRPWKPTNPLYRELRTMTRFSQDAKKLRTELKNHLEALEHSHEAERSVIKHYESLVASLDKRIEKNLEKMRKKIASDEELNKKVENIITAPSVGFLSAVTVIAETNGFALIQSRKQLTSYAGLDVRDNQSGTVNGVSRISKRGNSRIRAILYMPAVQCRLHNKHLKKAYDRIVAKHPDKKMIAVTAMERRLLLLIYALWKGDRPYSEDYDKE

SEQ ID NO: 127858 - protein, 411 aa, unidentified
MEQIHDRVAGLDVHRDQVTACVRMSGPRGGVQTDKARFSTTTGGLAALAEWLAGHSVTLAAMEATGVYWKPVYYALEDRFLVWLCNAHHVKNVPGRKTDMSDAEWLADVAAHGMVRPSFVPPPPIRELRELTRYRKTQVDARAAEIARLEKVLQDAGIKLTSVASKVLTQSGRAMIEALIAGERDPAALAGLAKGKLRPKIPELTAALHGHFGAHHAIAAARILAHLDFLDQTIAMLDAQVAARVAERYPSAARLLADVPGLERRSIEVIIAETGADMSCFPSPAHLASWAGLCPGNHESAGKRRRVATTPGNPWLRRTMIESARAAARTRDTYFGAQYRQIARRRGPNKAAVAVAHSLLDVIWHMLTTGEVFADLGADYFTARHDTEHQARRLVSQLEKLGYTVQLATPA

SEQ ID NO: 127859 - protein, 328 aa, unidentified
MRGTEVVSYHHVDNEASAIERQLQELMDSYLIDKSDLMVCAEHTGHYIYPLAVACQNKQVDLWLESGYNIKCEARKERGKSDKEDSRRIAEYGYKNCQDARYYSIPEHDMAVLESLLSERADYVVERAKLEGQLNDQKGYTDTEVYKAKAKRQKKLIRQYDRLIEETEKELERLMRENKTMGHQAALLETIPGVGRQTAMRMIAATRGFTLFENGRQFCCYAGTAPFEYTSGTSIRSKRRVSQRANKSLKSMLHLCALAVARRCKQNHFSDYYQRKVEEGKNPMVVLNAIRSKLVLTMFAVIRTDHPYSPQIVHNYVEKFSIKPIDIS

SEQ ID NO: 127860 - protein, 317 aa, unidentified
MEVSLIFVGIDVSKAQLDVAIRPSGEEESFANDKAGIKALVKRLAKIEPTLIVLEATGGYERQVTRALVSADLPVVVVNPRQVRDFAKATGQLAKTDSIDAAVLAHFAEVIRPELRPLPDVVTLELRALTARRRQILEMIAAENNRLAMTSKAVRKHIDAHVHWLEQGLERVEKDLDRSIKQSPIWKENEELLRSAPGIGPVTSHTLLAELPELGTLNRKQISALVGVAPFNRDSGSLKGRRSIWGGRAPVRCALYMATLVATRRNPVIRDFYKRLKAKGKPFKVALVACMRRLLTILNSMIKHKTYWSETFSLQTT

SEQ ID NO: 127861 - protein, 366 aa, unidentified
MKKISTMQAFSNEILKEQKLTIGLDLGDRWSFYCVLDEAGKIILEQKVATTPEAIKQTFGKMPQSLIAIETGTHSPWVSRLLTELGHEVIVAHAQKVELITKSNRKDDRHDARTLARLARIDPELLGPVRHRSAKAQIHLTVIRARAELVSARTALVNAARGLAKSFGERLPKCGTQQVSGKLAEGLSAELREVLEPLLREVESLNQRIQEYDQRMEKIAKEVYPEVSLLKQVKGVGTQIALTYVLTIEDPYRFPKSRAVGCFLGLRPGRRNSGESEPQKKISKEGDRYLRTMMVQGAHYILGPFGEDSDLRRWGLKLAERGGKNAKKRAVVAVARKLAVLLHRLWVSGEVYEPLRNSQKAMRAVA

SEQ ID NO: 127862 - protein, 355 aa, unidentified
MSSEKYIGLDVHQATISVAVMDSQGKIVMESILETKASTILEFFAGLRGTLSVTFEEGTSAAWLYDLLKPHVAKLLVCNPRRNALLKQGNKSDKIDACKLADRLRLNDLKPVYHGETGVRMLRELARSYLTIVKDLTRVMSRVKALYRSWAIPCTGRDVYYTRHRSQWLDKIQEPGVRCRAEQLYQQLDMLQHLRQQARRALLAESRKHTITAKLRQIPALGPIRSALAVALIQTPNRFRSKRQLWTYSGLGLETRDSGEYYYVRGEVRRRKKQVTIRGLNKDYNHDLKGLFKAAAIRASVLPGPFQDFYQRSLAKGIKPTMVRLTLARKIAAITLTLWKKGENFDVEKLKSQAA

SEQ ID NO: 127863 - protein, 323 aa, unidentified
MNASESTFVGIDVSKDTLEIALDDQSKTQCIANADADIAALVKELVPRSEEIGAIVLEATGGFERQVAAALCAAGLPVMMVNPRQARDFAKSMGYLSKTDAIDARVLSHFARTLHQSAQRERLLMKLPDANQEALEALLVRHNQLIGMRVAEGNRLALSHGSQHKSIKAVLKILDRQIVAVDKSMAGMLKEHFAEKLALFKGFKGVGPCTQASLMGALPELGQLTHAQIGKLVGVAPLNADSGRHKGKRITWGGRATVRTALYMAALSAIRYNPVIKTFYERLLANGKLKKVALVACMHKMLTIMNAIVKSGIPWNPEHAKCA

SEQ ID NO: 127864 - protein, 357 aa, unidentified
MGKSIENLRTVTRVGVDLAKNILQVHAVDAKGEVVAARALRRSAVLGFFGKLPPCVVAMEACPSAHHWGRALIELGHEVKLIPAAHVKPYVRRNKNDAADAAAICEASMRPGQRFVAVRSIDNQAELMRHRARELLASQRTALINALRGHMSEIGIVAAQGAQNAYGLKRMLSDGADEHGEIVVPESVRGALRPLGEQIEALDEQLGAIDAEIAAQVKADEKARRLMTIPGIGPITASAIVATVRDMSGFSSGREFAAFLGLTPRQHSSGGKERLGRITKMGDRYLRKLLVVGACAVLSHREGQYDALRTWAKALIGRKTVKYNFKLTAVALANKLARIAFAVLTRGEVYDDRPVAA

SEQ ID NO: 127865 - protein, 380 aa, unidentified
MKTKKEKSKKRRAGEETRLNMPRTAAVGLDLGEEFSVVTMYSPLGEIAERFNFSMDDEGYSLFSCKIPKDARIGYEASTMAYPVDRRLRAMGYRDITVAHPKELALIVRSKKKNDKADSEKIARLLFMNMLPESHLLTKEEQIVRDLLVQRVKLGVEIRKTKNSIISYLKREDVYRSLPKTEDNFSVTRREAIEALRFDDDRDLVLRTMMEKIRFYEGRSTPIEERIMALVKQNEDVRLLMTIPGVDYYLASLLSSYIRDVNRFPSFDHLASFFGIIPESGDSANVKRRGRMSKDGPSIARWALGIMTDTVMERNAHLHAYYLHEKERTKSGKYAHVLTMKKLLRMIYHILKTREHWKWEDEGLTRRKLTYLERGGVGLA

SEQ ID NO: 127866 - protein, 346 aa, unidentified
MKYYAGLDVAMKETFICILSEAGEKVYESHTYTDPKHIYDELNKSGYDLEKVGLESGSLSSYLTKGLQALECKAICIDARKMSAILSVTVNKTDKNDARGIADAMRCNHYKEVNLRDSHDDAIGILLKSRSTLVNSRVILKNTIRRHLKNYGIRLGTVSQKQFPISVRSYYPKLLQAAVQGIEGLLMSYETFSKEIRKMEDSLKEIAKQDEEVQRLMTVPGVGMIVALSYKADIGDPNRFKKSESVGAYYGMAPRQYSSGDTVRQGSISRCGSKEVRTLLMESGITLLTRSKKWSSLKVWGIKLMKKYGLKKAAMAVGRKLAVILHRMLVTGEPFKYGKVESKVAA

SEQ ID NO: 127867 - protein, 335 aa, unidentified
MQIKHFIGIDVSKDTLDLSMVVNGNVLTHYCIANNSKEIKSTVNKIMKPLGGSFDDTIFCMEHTGLYNRPIVKWLHNNQGKMWLESGVHIRKTLGLVRGKNDKIDSGRIAMFAYTNQHKIKLWTLPRQVIEKIAALLSQRARLVKVRKQLTTANNEQKKFLEKDIMHSLNIYTDRTICVIDKQIAAIESEIIGLIKEDENLNRMYKIITSINGIGFVTASYILVTTNEFININDPKKFACYSGVVPFEHTSGTSIRGKNRVSHIANKTIKALLHLSALSTLNTPGEIQDYYKRKIAEGKNKMSIINAIRNKLILRIFACIKQNREYEKNYCYKFA

SEQ ID NO: 127868 - protein, 322 aa, unidentified
MEAIYVGIDVSKEWLDVGVWPGAQSWRVRNHASAVAELVERLRAANPRAVVLEASGGLETLAASELHAAGLAVAVVNPRQVREFARSLGRMGKTDRLDAVVLAQFAQSSHSNGRLAPMRLADEAEAELKALVVRRRQLIGMLVAESNRRERAPKVVRKSIVQSIKGLKRALAEVEEQIKAALSSAPAQNAKARLLEAVPGVGPQLTVTLIAELPELGQLGRRQIASLVGVAPHPHESGKYKGRRMIWGGRAQVRTMLYMAALSAVRHNPPLREHYQALLARGKAKKLALVACMRKLLVILNAIARDASPFNPLHNLDFQHSR

SEQ ID NO: 127869 - protein, 386 aa, unidentified
MPKQCEPVNAAAAYDHTSTLVVALELSGKSWQVGAVIPGVERRPHRRLEPRDLPGLLKTIESWGAEAARSGQIVQRVVLTYEAGRDGFWIARYLLARGIEVQVMHPASIPVPRRGRRAKTDRIDLDMMLRTLLAWLRGEPRVCSIVRIADEAEEDARRPGRERERLVGERLRLENRIENLLCLHGIAGFKPRLKKASARLEGLRTYADTPLPPNAMAELRRLMARHRLVSDQLREIEAERDRVLTVAQPERAERMIQLLTELVGLGVETATVLVREMLACRSFRDRRAVASYVGLTGTPFQSGGMDREQGIGKHGNARVRRVLMQLAWRWLRFQPQSALSRWFVQRTGGAKGRLRKIMVVALARKLLVALWRYTESGELPADARTA

SEQ ID NO: 127870 - protein, 413 aa, unidentified
MGYKVAGIDIHKQVLMVVVMLVYAGGLVEKFERRRFGTTTPELAQLAAWLQALGVQEAVMESTAQYWKPVWYELEGKIPTLHLAQAFSNRARRGRKDDFRDAERLLRRLVAGELVLSLVPAPEQRNLRTMTRMQVHLTQDRGRLHNQVECLLEEMRIKLSSVLSDLFGVTGRRILGAIVKGETDPQKLAALAGNRLKCTSEQLVAALTGKLLAMHRRLLGLYLERLQLIDEQIDELKRMSAEALAAHQEAVQRVAEVPGFGADSAQQFIAEVGPEAATFPSAGEMSSWVGTCPGKNESAAQNHSSRSAKGNRYARRLLTEAANAAVKTKGSHWQVVFRRLLPRLGYQQAVWAVAHRLCRVVWKVLHDKVRYVEQGVNRDPKARANRARTLSRALRQLGYNVELTPLTPAPAQT

SEQ ID NO: 127871 - protein, 313 aa, unidentified
MEIFVGIDVSKATLDIHVLPSGEAWSAETTDTAITSVVSRLKALRPTLIVLEATGGLERRLVAALVAAQLPTVVANPRQVRDFAKAMGKLAKTDAIDASVLALFAERIRPELRPFKDEEAQELEALMVRRRQVVDMITAENSRLRAAPPSKVVTRAIRKTIEYLEKQLQNIDNDIDQAVRGSSVWREQDDLLQSVPGVGKVLSRTLLAHLPELGTLSRKQIAALVGVAPLNRDSGTLRGRRCIWGGRSQIRQVLYMCASVAARFNPALRAFFDRLIRAGKLRQVALVAVMRKLLTILNAMARSKSRWRYEATP

SEQ ID NO: 127872 - protein, 350 aa, unidentified
MDTTISPLASIGIDIGKEVFHIVGFSTDGTIAFRRKIKRLALIETFKRLPASIVGMEACLSAHFVSRALRQLGHEPRIIPAIYVKPFVKGQKNDYNDAEAIAEASLRPNLRTVREKTQDQLDLQACHRVRSRLVSRRTATINQIRAFLIEQGIAVRTGSRALRNSLLAILKNRQDEISPRMGGLIAGLYEDWICLDERIETIASEIEKISEKEANCQRLMSVPGIGPLISTAVVAAIGAGEAFERGRDFGAWLGLVPRQYSTGGRSILGRISKRGSKYLRTLFIQAANVILMRPHNWERFSFGTWLLNAAPRLHRNKLATALANKLARIAWSILRNEKTFDINRHEAMAI

SEQ ID NO: 127873 - protein, 343 aa, unidentified
MKLIRVGVDLAKNVFQLHGVGRDERVVWRRRLARERWLETLLEKLEPGCEIGMEACTGAHHWARQLQARGFTVRLIAPQFVKPYVKSNKNDATDAEAICEAMARPSMRFVAVKTLEQQDIQAVHRIRSALIVQRTAKANQIRGLVAEYGLVAPRELGQLRIALPRWLENAENGLSSCFRRLLNGLWDDLKVLDDRVFVLDREIAAIARNDPAAKRLQRLRGVGPIIASALVAAVGDARHFANGRQMAASLGLTPKQHSSGGKERLLGISKRGDRYLRSVLIHGARAVIRTAKGKSDRLSLWVTSLAARRHPNVAAVALANKTARIAWAMLRNGTDYQPDLVRG

SEQ ID NO: 127874 - protein, 316 aa, unidentified
MARIICGVDVSSTSLEARIGAEGVSGTFSNSVEGIAELAALCRQHEVELVAMEATGGYERQAYAQMSEQGLGVAIVNPRAVRQFAQSMGRTEKTDRIDAGMIAWYAKVKKSKALCLAPERQQHLRALVTRLRQLTDIRTAQRNQQRLVTDAVVQKSFARLLTLVEREIDGLAESISTLIDQDPLWKELNQSFRAIKGVADRTVSRLMAEMPEMGTLSNKTISKLAGVAPLARDSGKFQGRRAVRGGRSSVRDLLFIVASVVGRHEPDFIAFQQRLAARGKPRKVIRIALAHKLLVRLNAKAREVRCRMQTPVTQLT

SEQ ID NO: 127875 - protein, 359 aa, unidentified
MQAKVKTISFEGQNIYIGIDVHLKNWTVTVMTENSLIKTLSQDPDAGILYTYLQRNFPGGNYFSAYEAGFCGFSVHRKLQKYGVQNIVVNPADIPTTDKERKQKEDQRDSRKIARSLKNGELSGIYVPSLETEEFRSLVRYRKTLVKEISRNKNRIKSHLYCFGIDIPVTLARASLHWSGRFTQWLEAVQLSTCYGDMVLQSTLQTVKYLRSELLKINRQLRGLEKDSKYSFKIKLLRSIPGVGLIVAVTLLSELETIVRFKNLDKLCSFAGLVPTTNSSGDDERTGRITRRSNKSLRSLIIESAWIASRNDPALAQCYIELCKKMKPNKAIVKIAKKLLNRIRYVMKNEKEYVHSVVQ

SEQ ID NO: 127876 - protein, 369 aa, unidentified
MADYREAFVAFDVAKIKHAVAVADSGRAGEVRFLGEIENRPVTIERTIRKLAKRYDRLHVCFEAGPTGYGLYRQVRDLGHDCMVVAPALIPKRSGERIKTNRRDAVTLARLHRAGELSAVWVPDIVHEAVRDLVRARQAGAEDLRRKRQQLLSFLLRHGRIYDAGGHWTLAHRRWLARQAFEHQAAQIVFQETSDAIEDAAQRLHRLDEQLAAIVETWSMKPVVEAYQAMRGASFLVAVIFAAEIGDVRRFETPPQLMAFLGLVPGERSTGDTVRRSGLTLAGNRRARRALVEAAWTYRYPARVSEPLRARLEGLPKAVRDIAWKAQVRLCARYRRLAAAGKKPPVIAAAIAREMAAFLWAIGREVAPS

SEQ ID NO: 127877 - protein, 360 aa, unidentified
MKGDQSLMITLGIDAHKRTHTVVAVDDVGRQLGTKTTTATTSADHLDIIRWADQIGPDRQWAVEDCRHLSRRLEVDMLAAGERIVRVPPKLMAHARDAARTYGKSDPIDALAVAQAALRNPDLPVAQLDGPARELRLLVDHREDLVAERTRCLNRLRWHLHELDASWDPPARSLIAIKNLDAITARLESFAGPVARIAAEIVTHVRDLTVRERALEREITDIVNELAPTLMALVGVGALTAAKIVAETADVRRFKHKDAYARHNGTAPLPVWSGNRERHRLSRTGNRQLNAAIHRIAITQMRCHDDAIAYLERRTTQDHKTKTEAIRGLKRRLSDVVYRALLADAQPAQAAPADLLAAAA

SEQ ID NO: 127878 - protein, 315 aa, unidentified
MDHTHFIGIDISKDHFDAALHGAAAKPLRFANSGEGFAAFKAAFSESLKGALVVLEATGGYEAALLAFLLKSGIAVHRADPLTAKHFIRSLKRQGKTDKLDAIALARYGAERHASLAQFSMKEETQEQLGALLSRRQDLVLMRSAESARLAHPRYRSLKASLNAVIKTLNGQIKAIEDEIKNIIKQSKQLGAKVAIMTAITGIGQTTAAVLAGFMPELGTLTRRKAASLAGCAPHPRDSGASRGYRATTGGRASVKRALFMAALSTRKSNPELRAFYERLVQNGKKSMVAITAIMRKLIVIINARLRDAMPQTTW

SEQ ID NO: 127879 - protein, 375 aa, unidentified
MNNNNTLYVGLDVHKESITVAYAINSEPVELMGKIGTSPTDIQNLCKRLRSKSSQVSIVYEAGPCGYGLYRRLVKSGFDCMVCAPSLIPKKPGERVKTDRRDAIRLVRSLRAGDLSAVYVPGIEDEAFRDLARAWASARDDLRHARQRLKSFLLVHGVHYVGRADWGPAHRRWLSKYSFESPWRQLAFDEHRRTIEDRQAQCERLESALKEAVTEWRLYPVVEALQAMRGIQFITAVGLISELGDLTRFEHPRQLMSWFGITPSEYSSGGSRHQGSITKAGNSYARKLLVEAAWSYRHPARISPAIQKRQENLPRPVIDRAWDAQLRLCKRYRKLQAKGKNVNITIVAVARELAGFIWDMGRIAMSVAQQPQCHK

SEQ ID NO: 127880 - protein, 466 aa, unidentified
MGKSRLERRGKLFFNLYGENFSPHEIAIAAIDIGKTHSVAGVFGYFGEVLHESFILTPDRRGVEILCQVAEETAARCGRKHIVFSFEHTGHYHEPVVALLRERNCTVLPLNSVTTKKERESNLDRSKTDELDIHYIAAAVSAGKVVTDRPLRPEDEELRFLSRQRRTLVQRRANAFVELHVLIDHYWPAFQGIPEVADGKAHVERIFAKTWPERALRFLKHVSTPAEALALGEAGLSGLSRRERLALGIRRIRLILRAAGLAPKVPQSLIEQYVERLRAILESIEGLSTRIDALEDRCQEFLTGSRGVLLLTIPQVGAVTAADYMAEIGFLVPSLHSASAVIKLAGTNPVPDQSGNRRWMRKISKQGVAHYRTLTYQLGNNLFYGKGNPYFQAFGRRLVHLKPKQIRIAVGNKAHRVIFAMLKNSEVFAPKTWPGPPLTMNPLPKLKPCYQQRAREQLLRLGITGY

SEQ ID NO: 127881 - protein, 412 aa, unidentified
MTAIDQFAAHVGLDWADRKHDVCVQFKNGERTFHVIKHTPEALDTWLNELHQKVRGRIAIALELKKGPVVYALQKYPFVTVFPVHALSLARYRQTFWPSGAKDDPQDAELALDLMLRYPQKIKAIEPDNADIRLLLQLVEQRRLLVEDKRRFVNRLINTLKQYYPQPLEWFSHRGSLLLCELIIRWPSLQKLKRARRDTVRHFLNAKGGRATALTEQRVASINNAIPLTADPSVIEANALMATAPATQIKVVSEIIKTYDERIETLFDPLPDAELFKSLPGMGPCMGPRMLAALGDNRDRFNSAEEIQNYVGIAPVTERSGQKSWVHWRWQCAKFVRQTFIEWAAKTVNSSYWAKLYYQGMREKGKSHQSAIRALAFKWIRIIYRCWKTRTRYDEAKYLLALEARKSPLLMP

SEQ ID NO: 127882 - protein, 317 aa, unidentified
MTYTSRFVGIDISKSSFDVCVLPEERFANFANDAAGIARFVTFLAQWEGVERLVLEPTGGYERGVVEGLLAVGLPVAKVNAKQIRQFARACGRLSKTDRIDAFVLADYARRMDTKVLEPSSPAHAMLIDLVSRCRQLSHMIVQEKNRREKLVNQDNARTRAWIEQTLAFLQQQRQAVVDAMAACLTSDEHLALKAEVLMSLKGIGLRTACFLLAGLPELGQMNKGQIAKLVGVAPINRDSGQMRGKRMISGGRKPIRDALYIAALPAIRFDPNMKAVFQRLKAKGKPGKVALVAVMRKMIVILNARMRDHRATTLDC

SEQ ID NO: 127883 - protein, 454 aa, unidentified
MIAAVVERCAGIDVGKRFLKVCVMVGPLNEEPRFEIRKVDCTCTALEGLRRWLKSEGVTQVVMESTGPYWVPVFNVLEADVKVVLANPVEVKNRKGHKTDAQDSWWLAHLLRHGMIRASFIPEKATRDLRELTRRRKKLVGQVAQERNRVQKQLEYGNVKLGNELSDVFGLSGQLMLKALVDEQRTAEQIAELAQGSLKKKKPAIAEAVRGQRLSETQKEMIRSSMRHMTFVELEIEQLDGLVAGLIRESGQQKPYELLQTIPGIKEEAAGNLLAETGSGMKQFPDAGHLSSWGGVCPGNNESAGKHKSRHTTHGNPWFRATLTECAWSASRTQGSAFEAKYKSLKPKIGHQQALVAVAHLLSHAIYYVLSRGEAYRDTRPKELNQIQRQRIIRHHTRRLRRLGCWLPAERLTPLQQWYATHCIPNMDPPQPKRRGRKKGQVSTAAMESGTVNP

SEQ ID NO: 127884 - protein, 342 aa, unidentified
MNYYAGIDVSLECSSVAAVEASGKIVREGKVASEPAALIEWFAGVELRMERIGLEAGPQSQWLYGELREAGLAVELIETRHVRNAFKTMAVKTDRKDARGIAELMRVGWFRPVHCKSIAAQEVRVMLTARSLVQSKLQDVEASLRGMLRGFGLKVRRTTPNRFAERIRQLVCGHPNLEVIAQSLLAVHEVLLREFKGLEKRVRGAARSDARARLLTTIPSVGAIVSLTYACAIDDPGRFKSSKRVGAHFGITPRRYQSGEIDYSGRISKTGDKSVRTALYQAAHIMLTKPVKASALKSWAMRLARRVGMQKAKVALARKLAVVMHRMLVDGKPFDFAAGAAA

SEQ ID NO: 127885 - protein, 394 aa, unidentified
MILVGIDIGKNQHTFSLIDKETGEILSRPSAFNNNQEGFLLLIKKLSSYTKAELLIGMEDTGHYHFALLKYLLDNLYTVALINPTTTDLTRKLQGGITKNDTLDSLTICDVIGSNQRKKPYRITKVNRFDLYEQKQLTRHHHNLKEELNIYKNRLQKCIDIVFPEFNSLFRSKYGTVYMNVLKTFASAEKIANSDIQTIQKCFEYKRRGKRIPLSAEQLKVAAQTSIGIPSVAEEIQIRHLVCQIEMIEEQLSEIDKKIEEFSLQNNSPILSIPGISHFSGTSILAELGDICNYTKASQIIKFAGVAPYHYESSQFTAQHTAITKKGSRYLRKTLYQIILPVINYNKVFTAYYNKKLAEGKGHRCAQGHCVRKLLRIIYHLLSTGQVFDPALLI

SEQ ID NO: 127886 - protein, 474 aa, unidentified
MKKHKQAEAKTKSEALKPLGEQEPDSAGIDLGANEIWVAVPADRDRNPVRQFGAFTRDLMAIVQWLVQLGVRSVAMESTGVYWIPLYQLLEEAGLKVCLVNARHVKNVPGRKSDVRDCQWLQYLHSVGLLLGSFRPAQVICASRSIYRYRQNLLSMAAQHVQHMQAALDQMNIKLHHVIDDLSGVTGQAIIAAILSGQRDPVQLAQLRDKRLKAPEATIAKALEGDWRKEHLFVLAKAWVQYQEVQKQIQDCDQELWNYTRELEACTQVIKPAKVMRLKPELMGVEPLSNPPTQKRLRRKTSKNQPEGPWQQELERFFGVDLTAIPGISVLTGLTLMTELGNDLGAFKTEHHFASWLCLCPDNETSAGKVLRRRTRRSQNRVRQALRMAASSLHHDKSYFGDKYRRLRARLGAPKAITAMAHQLARILWTLITRQLPFDPSVFAYHEKAHQQRRLKHLAASARQMGYHLTPLAA

SEQ ID NO: 127887 - protein, 379 aa, unidentified
MTTSPTAASSEQTLHAALELSKNSWLLAIQVPGRDNPSLHPIKGGDTAVLMAKLNAARDRLTKISGQEPKVILCYEAGYDGFWLARFLEQRGIECLVMEPASLQVNRKARRVKTDRIDVEKLLHTLIAWCRGERHVCSMVLIPSVEEEDLRRSHRERERLICERTAHINRIKGLLSTQGIRGINVKRHYKTLKPADLVTGDGRSLPERLGREIAREIERLALLQVQLREIERERDLAPTPCLATERKRHQLLRLNGIGAVSASILTREVYCRQFGNRRQVASYFGMTPSAYDSGESRRSQGISKAGNRLARRVMIQTAWLWLRHQPESELSKWFNRRAEGQSRRIRCVMIVALARKLAVALWRYLETGLIPEGAVLATK

SEQ ID NO: 127888 - protein, 356 aa, unidentified
MQLHDALTIPKIFIGLDIHKKSWTVSIQTDLFFHKTYSMPSESEDLYQYVERTFPGHEVHLVYEAGCCGFSVARHFLNLGWHVLVVNPAYVKTGDKERYQKTDALDSKNLSNQLKQGVLKGIYIPTEEHEQFMTLARHRTQITKKLRQTKSHIKSMLLFHGIKIPAQFDNSNWSQDFVTWLEQLKFSTACGDLALRGKIRLYKFIKSEYLEIANQMRRHCRKNTKKDYYLLKSIPGIGGYLASVIIAECGDLRRFNNERQFSSYIGLVPGIYNSGDSEKCLGITPRSRSQLRSYLIEAAWVAIRKDTEMQHYYRKHHGKNVKSIIVKVAHKMARRILSVIKTETPYQINKNLVLEK

SEQ ID NO: 127889 - protein, 415 aa, unidentified
MALKIVYKICCGIDVHKTFVVACIASTNDKGVTSYESHRFSTYTSGLKTLLQWLLDRNCKDVCMESTGKYWIPVYNILEKDCSIVLAHPKYVKAIRGKKTDKKDAKWIADLFKHDLVAGSFMPPAGIRQLRDLMRYRFKLTCFKSSEKNRLQNCLTVSNIQLGNVVSDTFGKSAQAILDKILENPADTSFDLEPLVFKSLKKKLPELRDAIDGYITPEQAGKLKVIKSHYENLEARKAELEELILALATPYQQELAILQTAPGISSDFTAIGIISEIGTNMEAFPSAKHLCSWAGLTPTNNESAGKKKSVRVSKAGCYIKPLLVQCANAVVKSNKHPEIRNRYLRIKKRRGHKKAIIAIARMLLTSLYNMLKNKEPYNAELYRKSEILPVNREITIEQAILMAQFQGYKIKSAAE

SEQ ID NO: 127890 - protein, 375 aa, unidentified
MNTKIHIGLDVHKNSIVVAYALADGSPPQHHGKWGGTNPSAERGLLKLLKKLGVGKGEVRVCYEAGPTGFVLARRLLHLGYDCIVVAPSAVPKASGERVKTDRRDARKLARHLRSGDLEGINIPDGKDEAVRDVCRARTDASQALSTAKQQLSMFLLRVGRRYTGKSNWTHPHMNYLRAMTLPDEAHQIVLEEYIMAVDAGVERVRRLAAHMVSVLETWERKPHVDALVALRGFQTVAAMTVVSELGDLSRFKSPRQLMGYLGMVPSEATTGTRRRQGSITKTGNGHARWMLIECASHYRLEPKVSEALSARQQGQSRDVRELSWRAQNRLNYRFKRLCARGLNRNKVVVAVARELCAFVWELDALVRKGAKTKS

SEQ ID NO: 127891 - protein, 326 aa, unidentified
MKRIYGIDLSKDKFDVNYLDPEGISKHLIVGNTFNGICKFLGSIPKEVVLVAEHTGVYGNLLVFLANQLGIKICLSSGYTIKHSLGLTRGKSDKYDAFRIREYGERFYDKLQEVRTDSEHMVELNELYALRNQLVKERKMLLTHQSSKSQGVMNSVAVHRTATRMICNFNESIDELEQQMMDIICSDDELKRTYALTTSVKSVGTVTACELIIKTGNFKRINTARKASSYAGVCPFPNESGNMVHKSKLSPMSDKRLKTLLFMCARTAVKYNKDFKHYYEKKQNQGKHHYLIMNNIANKLLRTIFSVIESGKPWDPNYICLDPRNV

SEQ ID NO: 127892 - protein, 341 aa, unidentified
MNAIPIYGLDIAKRVFQLYWVEVETGEIINRRFGRDELIEFLAQRPAGRIALEACGSSHWWARKLTSLGHEVVLLHAKFIRPFVQNNKTDASDARAIWTAVQQPGIRTVAAKTEEQQAMLGLHRMRQLLVKFRTMQVNQVRGLLYEFGATFKTGRQAGLAEIRERMAELEQITPGMLLTPIQDQLKRIDGINDEIEALEQRIGQWQKQEVACQVLTQIPGIGRLTATALVATMGNPKTFMSGREFASFLGLVPRQKGTGGKVWLLGISKRGDCYLRTLLIHGARAVLFKAREKGPWIEALRQRRPTNVTAVALANKMARTAWALLAHDRVYKRGYVSIKPA

SEQ ID NO: 127893 - protein, 398 aa, unidentified
MIESSDYGSVQVFIGVDVGKDTHHAVAINRSGRRLFDKALPNDENKLRSLISDLKQHGQILLVVDQPATIGALPVAVARSEGVLVGYLPGLAMRRIADLHAGEAKTDARDAAIIAEAARTLPHALRTLKLADEQIAELSMLCGFDDDLAAQTTQASNRIRGLLTQIHPALERVLGPRLDHPAVLDLLQRYPSPEKLASLGEKKLAAQLCKLAPRLGKRLAADIAQALAEQTVVVPGTNAAAVVLPRLALQLITLRKQRDEVALEVEQRVLAHPLYPVLTSMPGVGVRTAARLLTEVACRAFASAAHLAAYAGLAPVTRRSGSSIRGEHPSRRGNKALKRALFLSAFAALRDPISRAYYTRKMSQGKRHNQALIALARRRCDVLFAMMRDGTFYTPQAS

SEQ ID NO: 127894 - protein, 351 aa, unidentified
MENIALIGIDLGKNSFHIHCQDRRGKAVYRKKFTRPKLIEFLATCPATTIAMEACGGSHFMARKLEELGHSPKLISPQFVRPFVKSNKNDFVDAEAICEAASRPSMRFVQPRTESQQAMRALHRVRESLVQDKVKTTNQMHAFLLEFGISVPRGAAVISRLSTILEDNSLPLYLSQLLLKLQQHYHYLVEQIKDLESQLKRKLDEDEVGQRLLSIPCVGTLTASTISTEIGDGKQYASSRDFAAATGLVPRQYSTGGRTTLLGISKRGNKKIRTLLVQCARVFIQKLEHQSGKLADWVRDLLCRKSNFVVTCALANKLARIAGPNGTTANLCSITAEIHRFKELLIWFCEY

SEQ ID NO: 127895 - protein, 352 aa, unidentified
MAKNDFDELMSVGVDIGKDVFHLVGFDKDGQLVLRKKIKRMALVATFEELPRCIVGMEACMSAHFVSRTLRKMGFEPRIIPAIYVQPFNKGQKNDYNDAEAIAEAALRPNLKTVSEKTQEQLDLQALHRVRSRLVSRRTATMNQIRAFLIEQGITVRRSVAALRTSLQAILDNRDDEMSLRMRKLILGLQQDWIWIEKRIEMTTSEIEAVSKSEASCQRLMTIPGIGPIISTAVVAAVGNGEAYDRGRDFAAWLGLVPRQHSTGGRTILGRITKRGSRYLRMLFVQAAQVIMMRPKNWHKFSFGPWLETAATRMQHNKLGVALANKLARIAWSILNSGKDFDWKEKEFATAI

SEQ ID NO: 127896 - protein, 386 aa, unidentified
MNVGADKPLTAIRTDLGAIFVSLELSRSSWLITSLSPGGGEKMSKHSVHGGDFAGLMERLAQLQEKARLRTGQSFRIIVVQEAGLDGFWIHRALQNEGIESHVVDAASIATSRRRRRAKTDKIDGETLVRALLAYKRGEPRVCAMVKAPTPGEEDRRHLCRERKALTAERVRHVNRIKGFLYSQGISGYQPLRRDRRQRLEELQTGDGRAFPQHLKALVNRELDRLELLLRQIKTVEAARDALLAVGQTAKPAPAAMLLDIRGIGPEFAAVLWSEGLFRHFENRRQIAAYAGLAPTPWQSGAVDREQGVSKAGNPRLRTTLIQLAWLWLRNQPRSALSVWFHERVSRHGGRLRKTTIVALARKLLIALWKYVTAGVVIEGVTMKVA

SEQ ID NO: 127897 - protein, 321 aa, unidentified
MTSQTPSPRFGIDVSKRWLDIAEYGCAPVLRIDNTAQAIRGWLRTLPPGACHIACESTGTYHRALVELLIGAGHQVYLIDGYSLSRYRDTLGQRAKTDRHDAGLIARYLAHEGARLRPFSLPPRAVTELRALLRRRATLVRGLGRMRQSMEALPGFAREVRAVTERIQALIKRLEQRIAALIGASGWSDPYRRILKVEGIGALTAAGLCATFHRAPFGRADAFIAFLGLDVTVRQSGTQRGRGVLSKKGDSEMRRLLYNAAMAASRSSTWQPFYQRMLQRGFSRTQALVALARKLARIAFSLMKNASDYVPQQHENACART

SEQ ID NO: 127898 - protein, 343 aa, unidentified
MQSISTVGLDIAKSVFQVHGVDAAGQVVIRRQLRRQHVLAFFQKLPPCLVGIEACASSHHWSRELQALGHTVRLMPPAYVKPYVKRQKNDSTDAEAICEAVTRPNMRFVPTKTVEQQSCLMLHRARHLFIRQQTAVINSIRAYLAELGIVAPVGRRGVEQLLEVVADTADYRLSEVARACLAALGSQLRALKAQILEFDRRIIAWHRSSATSKRLDAIPGVGPALATALVASIADPKAFRSGRDFSAWVGLVPKQNSSGGKDKLGSISKQGDRYLRSLFTAGALAVIRYAKIHGTGHRPWLTALLARRPTKVAAIALANKLARMAWAMMARNERYKEPAALAA

SEQ ID NO: 127899 - protein, 401 aa, unidentified
MQGIMSRPGRPATIRTDLGAVFVSLELSRSTWLITSLSPGSGEKMSKHVVRGGDIAGLLRRLLELKERARRRMRRDFSIIVIQEAGLDGFWIHRVLEQEGIESHIVDPASIMTSRRRRRAKTDGIDGEALVRALLAHQRGEPRVCAMVRVPTPEEEDRRRVSRELKALTAERVRHVNRIKGLLFSQGISGYEPLHRDRRTRLEQHRTGDGRLLPDHLRRQINRELDRLELLLEQIKTVAAERDALLASAAEDTVPTPAKVLLTLKGIGPDFASVLWQEGLFRHFDNRRQVAAYAGLAPTPWQSGSVDREQGVSKSGNPRLRTTMLQLAWLWLRHQPDSALSRWFHQRVGHEWSHPQGDDHRFGPKAPRCLLEIRYCRRRHRRSDDENRMTCAPSTISSTGI

SEQ ID NO: 127900 - protein, 285 aa, unidentified
MERQNLVGVDVSAKTFTFIIDQGGVRTGACDLPNDPKGHNKLIRLIRRRGFQARVVLEATDNYSLDIDLALHRAPQVEVMVANPRAVSQFAGAYLRRSKTDALDALVLVEFARRMPFEAWKPPSASRFDFRAIPRRIEALTKTATQEKNRLHAALSFEEMSEIVRNDIEVNVRALERRIALLREQARELIAKHPDLERAFQHLISVKGIATAAGIQLLAELAVLPSDMDVRQWVAHAGIDPRQIQSGMSVNRPARISRRGNDHLRRALFLPALVAAQHEPHVSAF

SEQ ID NO: 127901 - protein, 368 aa, unidentified
MAKRNTFVGLDVHKESIAVAIAEGGRFGEVREYGTVGGELEALDKVLRALRAPGRTLHVVYEAGPCGFTIFRHLTRLSEDCAVVSPSMTPKRAGDRVKTDRRDAMTLARLHRAGELRPIYVPNESDEALRDLVRAREDGVEVTREAKQRLKAFVLRHGLRYRGRAGWTIPYRRWLAGLTMPEPAPQIALQEYLATVEEAEQRVTRLTEQLRQLVPTWRWAPVVDALQALRGVSFITATGLVAEIGDIRRFARAPELMAYLGLVPSERSSGPLTRRGRITKAGNPHARRLLAEAAWAYRSIPRIGRVMQQRQEHLPASVRALAWKAQLRLCGRFRRLNARGKPRVVIATAIARDLTGFVWAVAREVPAP

SEQ ID NO: 127902 - protein, 335 aa, unidentified
MKEITTVGIDLAKSVFTVHGVDAAGRTVLRKTVRREKLMELMVALPPCLIGMEACGGAHDWARKFEAHGHRVGIMMARFVAPYRKSSKNDGNDAEAICEAVARPNMRFVPVKSAEQQAILSLHRVRQGFIEQRTATINRIRGLLAEFGMVLPQRAEQVRRAAVVVAEELPILVREAIADLRAHLSYLDQRIAQYERQLIELARQREAAVRVQRLPGVGPLTASAITASISDGHEFANGRQFAAWLGLVPRQYSTGGKARMGRITKRGDAYLRTLLMLGARAVLQSAAHKTDRLSRWAMALRARRGYHRAIIAVAAKNARIIWALLANNREFAPPA

SEQ ID NO: 127903 - protein, 350 aa, unidentified
MIIIGVDFHPGSQQIASVDTDTGEFEEKRLAHREEAEKFYRDLGSRGAQIRVGMEASGYARWFERLLAELQIELWIGDASEIERKRARKQKTDREDAQHILQLMLQDDFPKIWVASWENRDLRQLLWHRHRLVHARTRIMNQLQAVALNEGLPCKKRLWRASGRQQLESFRLGPWASRRRRDLLELLDRLSPTIAELSQAIEQEAEKCPEAQRLMTHPGVGPLTALAFVLIIGQAERFQCGKQVASYLGLVPLEKSSGKRRRLGHITKQGSSIVRFLLVEAAQAAVRGDAQWRSKYLRLLMRRGRKTAKVAMARRLAIRLYWMWRERQDYQQSRSFGSHAGQPGNRDGVH

SEQ ID NO: 127904 - protein, 457 aa, unidentified
MQQYYLGGDVSKGYSDFVILDSQKRRVEENFQLDDTIVGHSFLYDRLLIFFEEHPDAELCAAVESTGGYENNWYNTLRKFQSSLNIKTARLNPAGVCKNNEAGLKRVITDKISAQGVAEYLIAHPEKVMYQQQDYWASLRKQWSFIKMLTKQSTQLLNQLESLLYSANPEILKYCQDGVPAWVFKLLKKYPTAAKLGKARATSVARIPYISISRAEELVANAKTSVASATDTITGQLISAIVGQILQLKKIIKTQTKIMAAECTLQEVELLKTFTGIGDYSAIGLMLEIQAVARFSTAKKLAAFFGLHPVYKISGDGASGFRMSKKGRKEPRRILFMVAMSAINSNSLIRDLYQKHVENGMEKMTAIGLCMHKILRIVYGMLKNNTPFNPEIDLKNRERTSEQPQKERKDKSRRYQDFDATAPISGRQRKKRAERKLSQNAVSVECGICAPAPQLSS

SEQ ID NO: 127905 - protein, 347 aa, unidentified
MNKITTLGIDLAKRVFQVAAQDAQGVEQPLDKSRFTSREAFAEYLRSLAPPLQVGLETGPGAQAWARLLQSGGIEVRVLPAQRVAEHRSGAKNDANDARAILRALRDTSIHPVPVKSVEQLVMQALHRARQGWTRRKTALSNQMRGLLLEHGVTAAKGDAALVLALTRVSGNELVPARLKVLIQTLWDDWQSQVARIAASDAELKALARQDPLARRLHAIPGIGPISATALSCKGLDPERFRNARMFAAYFGVVPDQHSSGATLRLGRMSKRGDGYIRQLLINGAHAVVRVVRPDATDSLSRRVRRWRDRHGRKGAAVRLANHNLRVIWAMLEKDRDYRRSEPMADH

SEQ ID NO: 127906 - protein, 472 aa, unidentified
MHSLGRLAWQIRSRESHVEKTKGSKKTGAPVLHSLNPNAAGVDIGATEIHIAVPADRDPQPVRHFSTFTEDLHAAADWLKSCNIETVAMESTGVYWIPFFQILEARGLQVFLVNAHHVKNVPGRKSDVSDCQWLQYLHSVGLLRGSFRPEQAVCTVRSILRHRDGLVRMASSHVQHLQKALDQMNLQLHYVISDITGVTGLAIIEAILAGERNPQTLAKLRDGRIKATESTIAKSLVGDYRREHLFTLGQSLAAYRHYQELISACDREIEQYLETFESKTDPPEGPQSKSQEGQKTRGGRLGFDLQSHLYRIFGVDLTQVPGVHTLTAQTLLGEIGPDFSRFANAAAFTSWLGLCPDNRVSGGKILSVKTRKVKNRAATALRMAAQSLYRSQSYLGHYFRRMRAKLGAPKAITAAAHKLARIIHHMVTTRQAYNETICVQNEVQNRQRLEARLRKQARDLGLEIIPAKTGAL

SEQ ID NO: 127907 - protein, 356 aa, unidentified
MSQQSNCEIAVIGIDIGKNSFHVVGHDHRGAIVLRQKWSRGQVEARLANLPPCLIGMEACVGAHHLSRKLQLLGHNARLMPAKYVRPYNKGQKNDFRDAEAIAEAVQRPTMKFVATKTADQLDLQALHRVRERLVSQRTGIINQIRAFLLERGVAVRQGLRFLRAELPGILATQTDVLSPRMLRILEDLSADWRRLDARIEGLSDEIETLAHQDQHCERLMTVPGIGPIISSAMVAAIGTGEVFSKGRDFGAWLGLVPKQISTGDRTILGSISKRGNRYLRALFVQAAWVVLVKLGPKHWERYGLKPWIEAAKKRLHYNVLAIALANELARIAWAVLNRARAFTCVKTDAMASRPA

SEQ ID NO: 127908 - protein, 517 aa, unidentified
MQRGQHEGFSLLRAICSLNCPAKKNAPAGYELEPLIREIFRAVVRADRARFDSSRRILWLVSDHLNDSTIRISDDQSNAASSLWPKNSLTTMDSIPPELGTQNPTYAFSVGIDWADQYHAVYQRRWADGQAQQFQISADPASVQAWLAALKAQLGPQERVLMGFEQSRGALFEILRTHSEWIDLYPLNPLTVSRYREALFTSGAKDDPLDGQLIEELVYHHRDRLRPDVPLEPALRKLQLLCQQRRKAVDAATACKNELTSTLKVYYPLVLHLHEELDCTLTLHFLKRWPTFAQLKKAKPATLRRFYYLHHSRSQNLIEQRLASIAAAKAVTDDPALIEPMVLTVQRLVGQLLQLQGSVAAFDKAIQELFLHHPAHAIFESLPGAGPQLAPRLLVAFGCQPQADCSQMHKKSGICPVLDRSGQRHQVRRRRCRNKFLCQTFFEFAGCSIPHSAWAKAFYGQLRARGKSHNVAVRALAFKWIRIIAALWRDQTPYDEARYLKALQTRQSPLRKIIPFA

SEQ ID NO: 127909 - protein, 311 aa, unidentified
MNDTIGIDVSKDTLDTYWLSKRKHKQFTNNKAGLRKLICWVRQAEASLVVFEATGVYHRLLEVSLAAHDFAFARVNPRQARRFAEGTGTLAKTDRVDAAMLARMGSLLELQADKPKSETLHNLKGMTTARQALIKDRTAARARLNTATHPLLIKQATLRLRQVELDIAQVDAAIETTVSGDKTLSEKADILVSIPGIAKITAFAMLIEMPELGSLSGKQAASLAGLAPISRQSGKWHGKERIQGGRACLRRAIYLPAVVAARFNPDMKAKYHELIAKGKCKKLAITAIMRKLVVMANALLRDSRKWTEMRA

SEQ ID NO: 127910 - protein, 398 aa, unidentified
MTESSDYESVQVFIGVDVGKDTHHAVAINRSGKRLFDKALPNDENKLRSLISDLKQHGQILLVVDQPATIGALPVAVARLEGVLVGYLPGLAMRRIADLHAGEAKTDARDAAIIAEAARTLPHALRTLKLADEQIAELSMLCGFDDDLAAQTTQASNRIRGLLTQIHPAPERVLGPRLEHPAVLDLLQRYPSPEKLASLGEKKLAAQLCKLAPRLGKRLAADIAQALAEQTVVVPGTNAAAVVLPRLALQLITLRKQRDEVALEVEQRVLAHPLYPVLTSMPGVGVRTAARLLTEVACRAFASAAHLAAYAGLAPVTRRSGSSIRGEHPSRRGNKALKRALFLSAFAALRNPLSRAYYTRKMSQGKRHNQVLIALARRRCDVLFAMMRDGTFYTPQGS

SEQ ID NO: 127911 - protein, 324 aa, unidentified
MQGKEASEQETKVQSNVGIDISKCWLDAHVLPGDDRLHVANTCAGIRQLKRWLSHYRIALVAIEATGKWHRHLHRSLVASAIPVAIVDPYRVRMFAKAQGILAKTDQLDARVLALFAAMMAPPVRPVAPQAMAELAELVVARGSAVEAQTALKNQFAAAESTFLKRQLDRRISRAGKDIAALDREILKRIKADASLARRYAVLTSIPSFGFAVAATLIACLAEIGSATAKQIGMLAGLAPIADQSGDRDGVRVIWGGRPAVRRVLYLAALSAARFNADMKAFYERLIDNGKPSKVALIAVARKLVVLANTLVSEDRTWQPSAPI

SEQ ID NO: 127912 - protein, 448 aa, unidentified
MSNEKAETAAVPEPEWAAFVALDWADQKHHWRLAVAGSQKQKQEQGELENRPEAVAAWAADLNVRFGGRPIAVCLEQTRGALVYMLLKFPQLVLFPVNPKTAACFREAFYPSGSKGDPGDTDVLLDILLHHRDRLRRLKPDTVETRLLQRLVEQRRRMVNEKTRQSNRLTACLKLYFPQMLKWFDDVTSPLVGALLERWPNLEQLQRAHDGTLRDFFHKQNCRSKERNQERIEAIRQAVPATTDVAVLEGEAMVAHCLVKLIATLRDNITELDERIAKAFAAHPEKVLFDCLPGAAAVLAPRLLVAFGTDRERFASAHEMECYSGIAPVTEASGQSEWVHFRWACPKFLRQTFHEFAGHSIAKSEWARAFYDLQIGKGKEHHAAVRALAFKWIRVLFACWKNRTPYDEQIYLQSLRKRNSPLKALLPPGGALGWKDVAGFQKLSEDPS

SEQ ID NO: 127913 - protein, 353 aa, unidentified
MKILALDMGKFKTVSLIYFTGDPDANRFGIINTRPCELHDLLVKHRPDRVALESGPAAGWVCDMTAALGIPTQVANTNDESWQWKKRKKKRDRDDTLKLAEMSEMGKLPTVHVPEPKVRQWRELIAYRHTLVDRRTAIKNSIRAIFERRGERLPSGRKAWTAAGIKQISEQARALNECDALELWRGQLNEELQQHESLEKNIATVEAKLEELAAADERTKRLQTAPSVGPRVAELVVAMIDKPKRFKTGKQVGAYVGLTPRQWQSGTILREGHISRMGNPLLREVLVEASWTGVRSNPWMRQVYEGARRGSDKRKKIAIVAVARRLFVRLWAMLRDGTSWKEPLPPEAAVVPG

SEQ ID NO: 127914 - protein, 451 aa, unidentified
MNNEPEIVLDDEHELVIERVAAIDVAKASGKVCMRMPHPSRPDRRMSKVRDVDATTRAVTELADDLLGEGIERVTVESTSDYWRIWFYLLEAAGLRVQLVNARDVKNVPGRPKTDKLDAVWLAELTEKGLLRPSFVPPAPIRQLRDYTRFRVDLTRERARYWQRMEKLLEDALIKVSAVVSRMDSMSVRDMLEALIAGERDPRRLAGLARGKMRPKYNALVEALSGRFDEHHAELARMLLDQIDALGAQISTLTTRIDELLAALIDTPGPAADGSVRDRDGEVELMVTGLDAAERLAEITGIGPVSAQVIIAEIGLDMARFPTAAHLVSWAKLSPRTIQSGAIQRSGKAGKGNPYLKGALGEAAAVAARTDTFLGERYRRIVKRRGKLKALVAVARSILVIVWNLLSDPTARFHDLGPDYYTRRIDTERRARNHLAQLAALGYRVTVEPAA

SEQ ID NO: 127915 - protein, 387 aa, unidentified
MIYLGIDVAKNSHVAAAMSSEGEVLLMPFPFANSADGFTLLREKLNSLPKLPLLVGLESTAHYGENLIYFLCGNGYHVAMINPLQTAAIRKSAIRKTKTDKVDAFVIAKALMMEGYTELQQADIQILKLKGLCKTRQNLILMRTRCKIQLGSFVDQLFPELNQFFRSGLHINVSYTLLKAHPRPAEVGALHLTYLSNLLRKASRGKYKKEDAIRLRELARNSIGTDSPALALQIRQAVSQIELFSAQLKQVESEISTIMDSLGSPIMTVPGIGYLNGAMILSCIGNIQRFSSPAKLLAYAGLDPAVVQSGNFSAKSTRMSKRGNSMLRYALINASHNVVRNNETFAQYYNSKIAQGKSHYCALGHTAHKLIRVIFTLLTNNIAFDLA

SEQ ID NO: 127916 - protein, 339 aa, unidentified
MELYAGLDLHSRNTYIGILDQEDKRIFQKRLANDSGIILTALSRFRSDLKGVVIESTFNWYWLVDALMDEGYRVHLANPSAIKKYEGLKHSDDHDDAFWLAHLLRLGILPEGYIYPEAERPIRDLPRKRSHLVRLRTSLMLSLQNIIVRNCGLKLNANMLRKTTEDEATPLLASNEDLELSGKVSKESIDFLTGQIGKIERSVHHKIKIKDQYKHLPTIPGIGKILSMTIMLETGPIGRFPHVGNYASYCRKVPSKWKSNGKDKGKGNRKNGNKYLSRAYSEAAEMARRFNVQARTFYNRKTAKKNSIVARSALAHKLARAAYYVMRDNVPFDYQKAFA

SEQ ID NO: 127917 - protein, 342 aa, unidentified
MDHFAGLDVSVKETSICIVDDTGRIVREVKVASEPEALLKVLGNPIYRFQRIGLEAGPLSQWLFSALAEAELPVVCVETRHMQAVLKAQINKTDRNDARGIAQMMRVGLYRPVHVKTLRSQKLRMLLTHRKLLQSKAIAIENDLRGTLRNFGLKVGMVGTVKFEARIKELVENFSDLAVLVEPLLIVRRALREQIVILHRRLLAIVRDDEVCRRLMTTPGVGPVVALTYRATVDVPARFRKSKAVGAVFGLTCSKYQSGEIDWSGRISRCGDEMMRVMLYEAAQSMLRSKKWSWLKAWAMQIARRRGMKKAIVALARRLAVIMHRIWVDGTEFRWTRETVAA

SEQ ID NO: 127918 - protein, 353 aa, unidentified
MAPLPSPTGPQKCVVGIDIAKDSFVACFGQSSFSQQLHFDKEKTFDNTASGFAALLSWVTKQHVSGSPLWFVVEATGVYYEELAYFLTDNNQLLSVLLPNKVKHFARSTELKSKTDQLDARLLCRLGLERALPSWQPPTPALRQLRALARERQVLVRQAAQLKTRAHAYQHSYQPDSRTLARLAAQQQLLVNQLKALNQDLADLLKAEPELARKLDQLTSIPGIGLTTAIVVVAETNGFVLVENERQLTSYAGLDVVQRQSGLSAHATRISRRGNVRLRTALYLPAVSSLRYNPQQIAFYARLRARQPSGKPGVIAVMRKLLVLCYSLWKNDCVYDPHYHPAHLAEKEVAPTT

SEQ ID NO: 127919 - protein, 407 aa, unidentified
MRRYYLGIDWADTEHAVWGGTEAGERVVALTVPHTPAGLGEFGRWLDERRAEGIALWAAIEKPEGRVIDFLLDHGVSVYPINPKALDRARDRFRMSGAKSDPFDARVLAEFLRTDHPHLTPLVPSSPPAQELKLLTRDYQRLVRQQTRVVNQLTVTLKEYYPRPLDCFEELTTALAREFLRAYPTPEAVAALTPKAWQRWARTQRLSEARAAALWELLQQPQLPVPAHVVRAKARLVGVLVDELTAVVRAVAEYRKAVDDCFAALPGAELARRLPAGQSGTTVPTLWAELGDAAGRWQSFQHLQAHAGAVPVTARSGKHRVVRFRFACNSHLRHAVHLLAFLSLRQSEWARAYYTQQRARGHSHHQAVRALGAKWLKIIFVLWRRQVPYDETSHLAMIARQQLRQVA

SEQ ID NO: 127920 - protein, 359 aa, unidentified
MRIIGCDLHARQQTLAMLDTVSGEMVNRTLMHEGKEVREFYSQLAHPVLVGIEAIGPMQWFLDLLQELGIECQVGDATKIRAAEPRKQKHDRRDAELILKLLVEKRFPAIWMPSKELLDLRGLLLHRHQWVRLRTQIQNALQAIALANGLRRGPGLWSYDGQAKIAFLPLPPHTSYRRSALQAEYRDMEEEIENLTAQVAEQAEHRSGAQLLLTHPGVGPVTALATDVFLGDPRRFADGKALASYVGLIPQERSSGRRRRLGKITKQGNPLLRFLWNEAGAHAARRDPELKRFYRRKLVQKGLGKARVAVARKLGIRLWIMLRDQIDYEEFCRRGQKQSGAACAGMLGTRLVHNHRPVD

SEQ ID NO: 127921 - protein, 350 aa, unidentified
MAALSIADVPANATVGVDTHKHSHIARAKDGLGRHLGQLEIETNPRGYAGLLDWAQGFGPVVTFGIEGTSSYGAGLTRFLRGNGQTVIEVLRPARRDRRFGGKSDPIDADAAAGAVLSGKATAVPKAGDDGVEMVRALKIAKQTAIKARTQAVNAVKGLIVMAPDPIHEQLRHLKTPALVRTCSAYRVGAASDPTAAIKLSLRSMCRRYVVLDQEVRSLEKELDALTLRLVPQLRQLFGVGQDVAATLVLAAGNNGDRLRSEAAFSMLCGASPIPASSGMVQRHRLNRGGDRQANAALHQIVVVRLRFDDTTKAYFAKRKAEGKSKKEIFRCLKRYVARQVGLTPESGAM

SEQ ID NO: 127922 - protein, 410 aa, unidentified
MEVIHRNCAGLDVHKKVVVAAILLEGSPKEIRSFGTMTADLLELSDWLMSSGVTHVAMESTGEYWKPIFNILENNFEVMLVNAQHISKVPGRKTDVSDAEWIADLLRHGLLTASFIPPVGQRELRELTRFRSTFVKERATLVNRVQKVLESANIKLASVASDVVGVSGRAMLEAIVAGTATPQQMAELSKGKLRSKREELSRALEGRVKPHHRFVLTELLSQIDGLEETIARFDQEIIEYCRPFEEAVVLLDTIPGVARETAENIVAEIGTDMSRFPTANHLASWAGVAPGNNESAGKKRSGRVKKGNKPLGVILNQAAHAAARTKDTYLSAQYHRLAGRRGKKRALVAVAHSILVIAYHMIKRRETYCELGSDYFDKRRPETTAKRLVYRLEHLGYQVSLQQLSVPASI

SEQ ID NO: 127923 - protein, 408 aa, unidentified
MRLFVGDDWAEDHHDVELMDAAGRVLARRRLPEGVAGMARLHELIGQHLGADDEDAEVVIGTETDRGLWVTALVAAGYTVYGVNPLQASRYRERLGVSGAKSDTGDSRMLGDMVRTDSHQLRAIAGDSAEAVAVKVVARAHKTMIWERTRQVQRLRHQLRDYFPAALAAFEDLDAADALELLAKAPDPARAAKLTRAQVSAALKRARRRDIPAKATAILAALRSAQLGQPPAITAAYAAAVRSLIAVIITLNEQVKALQSEVEAVFGRHPDAEIYLSQPGLGSVLGARVLGELGDDPHRYASGKARKNYAGTSPITRASGKKKTVIARFIRNDRLIDALMAQAMSALTSSPGARALYDAERAREVEHNPALRKVANRLVGIQHGCLKTRTLYDEVTAWPQQQKIELAA

SEQ ID NO: 127924 - protein, 382 aa, unidentified
MKQIRDRVAGLDIHRDTVVACCRIGSPAGIEVIKESFPTTRAGLAKLASFLSEAGVTTVAMEATGVYWKPVYYALEGLVSELWLCNAQHVKNVPGRKTDLSDAEWLADVASHGMVRPSMVPPPEIRQLRDLTRYRKSQVDTRSKEIQRLEKVLQDADIKITSVASAVWTTREIIEALIAGERDPAVLAQMAKSRMRSKISQLEEALAGTFDDHHALLCRQIIAHIDFCDQTIAELTQEIIEGLGDFGPANAILCSIPGVSDTTAQAIIAETGGDMSRFPTSGHLCAFAGVAPASYESAGKRRPAGTRHGAPWLRRTLIEAARAAARSRGTYYSAQYARIAKRRGPNRAAVVSRTLHARYDMASPHQWHLVRGPRSRLLRSPT

SEQ ID NO: 127925 - protein, 420 aa, unidentified
MSFKIFRFNCCGLDVHKTWIYACIGITDSNGRTDYKQARFSSFSKELKELCDWLAKYNCSEVCMESTGKYWIPVFNVLEKANNSVILAHPKYTKPQKGNKTDRKDAKWICDLFMCEMIKPSFIPPADIRHLRDLVRYRFKLTCMITGEKNRAQNCLTVSNLKLDDVFSDVFGKSSRSITEYMLAHPGEIFDVAPFVDSRCKTPMEEIQAAVDGAISPEQAIKLRQCLNHIDELEKHLEEIEREILRLSDKYQAALDLIRTVPGFDKNPMTAIQILSEIGGDMSVFPSAKHLVSWAGCCPRNDQSNKRIKSTRISRAGNYIKPILVQVANGLLRSKKHPEITGRYKRIKSHRGHKKAIIAICRMLLTAIWHILSDLKPYTAEGFLESRPANKAKVLTTSQALNLLKQRGYTIKDDIVPAMN

SEQ ID NO: 127926 - protein, 453 aa, unidentified
MMKREAPIFDETRRNVAGLDIAGHADHYVCGPRRDDGGYDVAHFGTSTPELHRMLTWLKDRRVESVAMESTSVYWIPVADLLESEGVEAILVDTREVKMVPGRKSDVKDCQWLQRLHSCGLLRGGFRPPEAVAAVRTLLREKESLVTMRAQCVLQMQKSCDQMNVRIHHAVSDIDGKTGMDIVGAIVGGQRDPAALAKLRDKRCKQTEAQIAAHLTGAWREEHLFTLGQAYRTLEFIDGRIAEYDDKIASMYKRLADACGNPPPPPPPADVKPSAKDRRHVEEKRDLQRIAGFDMTAIPGIGYDTAAIVVSELGADFSRFPSESHFASYIGLAPSLGKSAGKNVRQRKRIRNTSRAGRALRMAASTLYKSRTEMGAFFRSVARRTDRKTAVKATARRMAHMIYRGVRYGAAYLDKGAEAFEARAREKAVRAVKNLIKTHGINELELKSAHAAA

SEQ ID NO: 127927 - protein, 380 aa, unidentified
MQPTQGNDITANEVTLCVAFELSRASWKLAFHDGKRDTPAIVTVRAETPQARLDEARAAIEAIGRKWGLCMDTPVAMVYEAGQDGFWIGRALCKQGMDVKVIDPASLPVQRHARRAKTDRLDAIRLVNSLRAWLRGERDVMHVVRVPDEQAEAQRHLVRERGELQKEITQHQDRMRKLLRTVGCWDAIGTDFALRLAQGQVRCHNGRALPAELAQRLQRECERLALAQQQLQALEETLVQQLPAPAQQKIAQLSRLKGVGQVGAMRLVLELFWRRFDNRRQVGACVGLVPQPYDSGESRVDQGISKQGNRRVRSLLIEMAWMWLRYQPGSALAAWFAQRTQGQNKRGKRVAIVAVARRLVIDLWKYLEHGLVPQGAAMKG

SEQ ID NO: 127928 - protein, 341 aa, unidentified
MSNANTYIGVDLHKKSCYVTVMNGEGKIKKQTEVLTDADKVSMFFKRYAGIPVAVESTMNWIPFYENLEGLGCKVVLSNPLATKAIASARIKNDKVDSKVLADLLRTNLLPTAYIQPRQIRDFKELVRQRMSYVEMRTQIKNKIHSVLFKSNVAQGFSNLYGVAGMKWLRNLELRDIYRQELDRYLGTLDLFNEQIDELSQTIMDTAKTDYDCKLLMTIPGISYFSALVIKSEIGDIARFPHANKLCSYAGLIPSTYASADKVRHGRITKRGSKWLRKSLIDAVTSGSRHPSRLCFFYRKLKKNKGTGKAKVATARKLCTIIFAILTDKQPFREFTPVKQR

SEQ ID NO: 127929 - protein, 354 aa, unidentified
MRYLGIDVHTATTSWCLLDGAGTQVEQGCVATTQADLTQLVKSLNLVEPILVGQEIGGLSYFVSDIITAAGVELKSFNAAHLRMIASSRKKTDRRDAYWIAKALQTGMTPHAVYIPTGVVREIRMLLSRRTALVADRKRWYLRARSHLRRAGLRPKPARRVAQLLERALATPTGMSEELHAAVEQCQRYEDLLLADLAAMQIKLATLGATIPEVVLLQTIPGIGLITALALYATIGDIGRFANPRHLASYVGLVPSVRQSGETQRLGGITKQGCRHLRSLLVQSAHAVMTRTKSSEAAPLRAIGERVKAHRGRFNIAIVAVARHLLRISYHVMRTKLPYDATRLLHNEELEAAA

SEQ ID NO: 127930 - protein, 314 aa, unidentified
MSQPVFVGIDVAKDTVEVACSDASSHSFTNNEAGYAKLLRWLARKPIALVVLEATGGYEQACAVALAAAGLPVSVLNPRQARDFARAMGKLAKTDRIDAGVLAEFAAVLHARGHQPRALASLEQRELAALVARRRQIVAMLVAERQRLGVAHTRAKPSIEAVIELLLRQLSDIDDDLQRTLKEHHADLSALLQSVKGVGPTTASTLIAELPELGLLTRKQITSLVGLAPLNRDSGTFRGQRHIFGGRASVRRVLYVAALVATRFNPAIKDCYTRLVAAGKPKKVALVACMRKLLITLNAIARTKTPWRNDFASH

SEQ ID NO: 127931 - protein, 400 aa, unidentified
MLSIGIDVSKGKSTVCGMKPGGEIVYAPFEVQHTREGMSELVLLLHNSGEEVRAVLESTGSYHCPVVAALLENGIFVSVVNSLRMKRFCSQSIRKVKTDRIDAMQIALYGLAYWQELQPTKLPEDTYRELQLLARQYYQMTSLLIKAKVDFNAICDQVLPGMQELMNDHAGRHKLSDFVLRYRHTTHILEMGETRFRKDYCKWAEKKGYRNHERMAALIFATAQNGIPVLPDAPSTQIVITEAIRVLHTVEASRDAILTQMQALAKTLPEYSLVREMPCIGDTLAPRLIAEIGDVRRFHSKRALIAYAGIDAPPYQSGKFCANNRHISKRGNRYLRKTGYEVMQSYVMHKPANDPIFTFIEKKRGEGKSGKLAMVAGLNKFFRVYYGKVTELYRSLPAIE

SEQ ID NO: 127932 - protein, 321 aa, unidentified
MAYFRDAVGIDVSKENLDLYVLSGQQRRTVANTAAGYGDLVSWLKSLGVRMAVMEASGGYERDVAKALRQAGFDVRIVDPKRVRHFAKAAGRLAKNDRIDAEMIAEFGAVFAAAQRCEIPLDAKREHLAGLVAARQALVDHQTSLQNQISACPKGPARQALAAALKPIPASIKQLDRLIAEAIAAHPQFAALAARLDTVPGVGPVTIAALISWLPELGRLDRRALAALVGVAPFDDDSGKRTGQRYIKGGRGKLRNIVYMAVMGAATKHNPVLKAYYDSLLNRGKLKKVALIACLRKLLTILNTMVAKQQDWNPASMAIAA

SEQ ID NO: 127933 - protein, 382 aa, unidentified
MSRQLAAPAAKLSARMKQTLITDKSLDQEKVEEKCNRVLKLGLDVHYRQVTVAMQEEAGAIKAVGRMGHDAFWNWVERKRKAGWDIYSCYEAGASGYWLHRDLEQLGIKNLVVAPKAMGQDKGQKTDRRDSVELVDQLDRYLRGNRKALSAVAIPTIEQEEKRALIRYHRQIMADRTRYEARGKGLLCAQGIEVQGRWWQPQQWKELKIHGRLQAWMQTQLQGWRRKLLSAEQEQQKLRKQIEALAPAMLPKGVGAYSAVALEYELKGLARFKTARALSGYTGLCPGIHSSDGRGKEGSINRCGNAAVRWNLVEMVWRLLKWQPDYQVVRQLGAGLVRSKRARKRLVVKAARQLAIDLWRLETGRVTAQELGLVMQPSLKAK

SEQ ID NO: 127934 - protein, 326 aa, unidentified
MHVAAALDPVGGLLGTEGFTADPAGYKAMLSWLEGFGEVAKVGMEGTGSYGAGLARFLRHQGIEVVEVDRQSRQARVRHGRSDPIDAVEAARATLAGRAGQPKSMDGAVEAIRVLVVAKRSARQARSKALTQMRHLSYTAPDQLRCQLKGLTIPALVAEAASLRPTRSPDPVTAGTKASISSLAHRVRFLDVEIAGLDELIGPLLFATAPELLALKGVGPDTAASLLITAGDNPERLRSEAAWAHLCGVSPIQASSGKVTRHRLNRGGDRQANSALWRIVMVRIAHDPDTKAYIERRVKEGRTKREVIRILKRYVAREVYRHLPRG

SEQ ID NO: 127935 - protein, 381 aa, unidentified
MSIVMGIDQHRAQITAEWIELETGEIGRARVRPGDRTGVRRFLAQFSGQALEVATEATTGWRFLVEELQAAGAEVHLAEPAETAALRGNKKHAKSDRADARHLRELLLAGRLPESWIPPDHILDLRARVRLRHTLIKAHSEFQQRIQAVLYHHGCPRRQQLMVGDGRDWLASQPLPHTAREQITVSLAMIDALEVQIAPLDRELRAYARAQTGCKALIDAYYGIGELCAVTIVSELGDCQRFANSRDAVRYGGMDITVYQSDRHRAPGHLSHQGPPALRWALYEAAQVARHPRSPDRAYYEQAAERLGGNRACLALARKLLKRCYHTLRELGDDALAPPVQQTQARARRPEKPATSKRTANPRTSACGGRSRRPSTALTGN

SEQ ID NO: 127936 - protein, 409 aa, unidentified
MERVVERGCGLDVHKKSIAACVRIPDERGQRRQQVRTFGTVAAELLALRDWLEAHGVTHVAMESTGVYWKPIFYVLEEAFTCVLVNPVHMAQVPGRKTDVQDCVWIAQLLEHGLLRGSFVPPAPIRELRDLTRYRKTITQERSRAINRLHKTLEDADIKLASVATDVLGVSGRAMLEALVRGNTDPDVLADLARGALRKKLPALRQALSGRFHRHHAFLVSQILAHVDYVEEAIEAVSQQIDVVIAPFTSALERLSTIPGVKKRTAEVILAEIGPDMSTFPSAAHLASWAGLCPGNNESAGKHRSGRTRKGTPWLRTALTEAALGAIRHGRGALATRYRRIMRHRGHKKAVIAVAHAILVVVYHLLTRQTTYHELGDDYYDRRHAERSKRRALETLERQGYRVVLEPTA

SEQ ID NO: 127937 - protein, 381 aa, unidentified
MTVNSAATSNEHSIFAALELSKNSWLLAIQVPGRDNPSLHPLPGGDADGLMTKLDAARDRVAKDTGQMPAVTLCYEAGYDGFWLARYLEQRGVTCQVMEPASLQVNRRARRVKTDRIDVENILHALVAWCRGERHVCSMVVVPSVEEEDLRRCHRERDRLVRERTAHINRIKGLLFGQGIRGINVKSHYKTLKPAELVTADGRPLPDRLGREITREIERLAQVQAQIVAVERERDHPATSCEATEAKRHDLLRLKGLGPSLSSTLTREVYYRQFANRRQVASYIGITPSAYDSGDGHRSQGISKAGNRLARVAMVEAAWLWLRHQPDSALSQWFHDRTQGQKGRIRRIMIVALARKLAIALWRYLETGLIPEGAVLKSGVR

SEQ ID NO: 127938 - protein, 353 aa, unidentified
MTIVANTTAYVIGVDTHARTHTLAVLDGGTGARGPSATFPTTPAGLSRSVTWIGRSTGGDADVLVVIEGVGSYGAGLARRCQEANYRTVELFPTPRALRRGRGKSDDLDAELIARSVLHVDAAEPREPRGDSGPRAALRVLVAARDLINTERTRMINALTALLRTVDLGIDARRSLQRRQITTVAGWRRRDEDLSTAVARKEAIRLARRILGCDVELAENVAELAAMVAASDGSALLTEPGIGPVNAAVLLTAWSHPGRVRSEAAFAALAGVSPVPASSGNTQRHRLNRGGDRRLNRALASIALTRMSHHPATRDYVARRRAEGRTTKEIRRCLKRYIARQVYRRLATIPVGA

SEQ ID NO: 127939 - protein, 413 aa, unidentified
MDVLHPRCCGLDVHKSSISACILVQVEGRVQKHQRRFGAMTQDLQELANWLRQFEVTQVAMESSGVYWKPVWNILEGQFTIVLVNAQHIKNVPGRKTDQKDAEWIAQLLQHGLLRPSYVPCEIIRDLRDLTRMRVSLSQEASRISSRVQKVLEDANVKLASVATNTLGKSGRAMLEEIIAGQDDPEYLASLALGHLRAKTAQLRLALEGKIRPHHRFLLRRLLDQLRFVEHEIVLLEERLEDIGRERPELSQAVARWDTIPGIDRVAGWTLLAEVGHTMAQFPTAEQLASWASLCPGNHESAGKRLGGTTRKGSPWLRRMACQCAWAAARTKNTYLSAQFRRVAARRGSKRAIIAVAHSLVIIGYYLQKNQRNYEDLGGDYFDRIDSDGLKRYFVRRLEKLGHKVTLVPIKAA

SEQ ID NO: 127940 - protein, 409 aa, unidentified
MNKLYVGIDVGSLDNAVYIMLPDGAKHSSFAVKNNPDGARTISARVIAALTELNIPAAIIGMEATSVYGNNLLYFLREDAALSRFDRKFHVLNPKQVKKFKDAHADLPKTDAIDAFIIADDLRFGRITKAVFEDDYRYTALQTLTRSRYFAVQNLVREKQRFMNLLFMKCSGLAQGDAFSDNFGVAAMELYDNFETPDALANMDVSRLSAFLAEKGKNRFPDPDKVAKAVIQAAKNSYCLPDPVNASVSQALSISTSSIRAMQSQIKALDAEIERQFENIPNVLVSIRGIGHVYSAGIIAEIGDINRFGGQASLAKFAGLAWGKHQSGKFEGEETHLIKSGNRYLKYYLCEAAFSLVRCDTEYKRFYHLKYKEVNKYQHKRALALTARKLVRLVFRLLKDNRIYKPATV

SEQ ID NO: 127941 - protein, 348 aa, unidentified
MALSIVETHAITGGVDTHADVHVAAALDPIGGLLGVREFPASPAGYARLLSWLGGFGTVCLVGIEGTGSYGAGLARHVTTAGVRVVEVDRSDRQDRRRQGKSDPLDAVSAARAAQSGRARGAPKGRDGAVEAIRALMVAKRSAAGERTQTINQARALIMTGPEDLRARFTGHTVTALVTEMASLRPRPGSTVGYATRIALRELGRRAEFFDAQLERLDELIVPLVRAHAPGLLALYGIGPNTAALLLIAAGDHPERLRSEAAWAHLCAAAPIPASSGKTIRHRLNPGGDRQANHALWRIVFTRMGSHPATRAYVERRTAEGKSKKEIIRCLKRYVAREVYPHLRASAG

SEQ ID NO: 127942 - protein, 311 aa, unidentified
MKEKVVIGIDVSKASFDVAVYPTGEYWKASNDKADIAALSQRLQELAPGLIVLESTGGLELPLVSELAALSLPVVVVNPRQVRDFAKAVGKLAKTDNIDAHMLARFGQAVKPEVRPLKDEQAQELTALLTRRRQVVDMLTAEKNRLQGVSSKRVRSDIVAHIKWLEKRLNDVDGGLRKFIEASPVWHVKDKILQSTPGVGPVLSLTLISNLPELGSLNRKQIAALVGVAPLNRDSGFFRGSRSVWGGRAHVRAVLYMSTLAAVRCNPAMKAFHQRLIAAGKKPKVALTACMRKLLTILNAMVRDQALWAHK

SEQ ID NO: 127943 - protein, 354 aa, unidentified
MSKGITMGSGLTIGLDLGDRFTEGRVLDATGEVMESFRVRTAEPALSARLAGFPPSRVVLEVGTHSPWVSRAVVRQGHEAVVANPRRVRLIAENDSKSDGVDAELLARLGRVDPSLLKPIVHRGEQAQRDRILIQARAGFVRARTQLVNQVRGFAKALGTRVPASSTEAFPKRVRATTPLDLFPGLATLLDTIEQLTATIRQMDREVERLCRERYPETELLRQVPGVGAITALYYVLTIEDPSRFAKSRSVGAYVGLRPRQRDSGEQSPQLRITKAGDRLLRSLLVSCAHYILGPFGPDTDLRRAGLRMAERGGQAAKKRAIVAVARRLAVLLHRLWVTGEVYEPLRSEASKAA

SEQ ID NO: 127944 - protein, 401 aa, unidentified
MKRLSGGIDIGCESHHILILDEEDNVLYNQKVAHKLNEFAETIKLFKQIERKEGGKISFALEGKNGYSAPLDWILLTQGFTLYNVDNLKLKRFRQAFAGEWRDDQRDALMLSKMLKLKDHINSQREKVFIKIEKSSPVTESLKLLSRHQQTLINEKVRLTNRLRKKLLEVCPQILELGKVKNKKIIAVLAKYPDFSKYKRITLKSLLKIKGIGERRAPFLLKRLNNIEYMPGLTDIYKTIILSYAQRILQLHREIKDIDKSLDEIGEKNKEVNHLKTIPGIATKLASRFIGEIGDINRFPSGKQLAIYCGIACVNDDSGKVTKAKAVYKANKICKQTLITMAGCSIRSIHQCKAYYLKKRTEGKSHNHTLRCLARQMIKVIYKMLTEDRDYIVRKELKKVA

SEQ ID NO: 127945 - protein, 368 aa, unidentified
MKDFTKYVGLDVSKDKIAVAIAEEGREAPRYWGVIAHTPEAIRKLMKQLGDFHSLYVCYEAGATGYELYRLFLSLGIECMVVAPSLIPQRPGDRVKTDRRDALRLAQLLRAGELVSVYVPTEEDEALRDLVRAREDAKEDQLRARHRLTKFLLRHDLRPPVGVRKWTIRYREWLNRLTFSQNSLKTVFREYLHHLDEIEQRMKRIEEEIHVQATESVHAPMIQALQSLRGVAEITATSLVAEIGSFSRFPHPRQLMSYAGLVPSESSSGDIRRQGAITKAGNAHLRRVLVEAAWSYRYQPALKGDLRKRQENQSKEVQAIAWKAQNRLHKKYCRLLAKGKPGGKVVTAVARELLGFIWAITQQMEQAV

SEQ ID NO: 127946 - protein, 336 aa, unidentified
MEKKLYCGIDVSKDKLDISLALNDKEIITYAVFENSTAGCQKLFQWSKARAKKLKIKQLHFCLEATGIYHEELADYLQEQENVIVSIVNPSQTKAFSECIMLRTKNDKVDSKMIAFYAALKQPEQSAKPLEEIKKLRKLVRHLNYLVESRAHEKTRLTSLKDKELIQLTKETISFYDEQIKKMEEMIKEHVDKYPGLKQDIKLLKTIPGISDKTASEIISEIYCMDISVKSQIAHAGLAPRERKSGSSIRGKSTICKKGNKKLRKSLYMPSLCAIRKNPLIKLFYERLVSKGKPKKVALIASMRKLLSIAVSMLKNRQPFDITWAIKKQKELSLAI

SEQ ID NO: 127947 - protein, 475 aa, unidentified
MNLKGKKTKNQVVTANIFEQQELLKKAEVIREKLTASTWHELETNGKFDKNAKLSFISDDMLILGCDVGSETHYLRAIDTRGRELSKSAYSFRNNCEGFQSAKEWAVELAAKNEKKQIVLGLEPTGHYWFCLATWMIANGISVVQVNPYAVKQTKEVEDNSQLKDDTKDPKLIANLVKDGNFGMPYLPEKVYAELRRLSMFRDQLNEDRIRAINRMHREMKIYFPEYKEALERVEGAFSLELLKQTPFPEEIQTLGEDGIRQIWHDAKLRGRGYSRAREIIGYAKTSVGMKDGAEASAMAVKWFVKEIRELDEKLAEIEKLMREKYQEIPYAKNILEISGIGENTLSGILAEMGDISRFDDVKEIQKLSGLGLVACSSGKHKGETKISHRGRKRLRYWLFQAAKSAVAHAEEVKELHVYYTTRPDNPLKKMQSLIVIACKLLRIVYTILKKGTVYDPKKMLMDIRRPEKKEAIAA

SEQ ID NO: 127948 - protein, 365 aa, unidentified
MQKLNDLNQSLAALEPDGTLIAVIEMSLSSWLVAGIVPGVERQPLKKLVVDESALLKLLHRWREEAEKAGRRIERIAVAFEAGRDGFWLARWLKARGIEAYVIHASSVAVSREHRRAKTDRLDTELLKRSFLGWLRGERDHCKMVEIPTMKDEDAKRPNREHDSLIGERSRIVNRMKAALVRLGIRGFNPKLKRATTRLDNLRTPEGEPIPPNALAELRRDMERRRLVNNQIRQIEEERLERIEKTPCDGPHVMVRLLARVMGVGIETADMLVHEVLSRNLRDRRAIARYAGLTGSPDESGRKRREKGLARSGNVRVRRGMIQLAWRFLLHQKTSALTKWFRSRTENARGTRKPMIVALARKLLS

SEQ ID NO: 127949 - protein, 340 aa, unidentified
MTITTVGIDLAKNVFAVHCIDQNGKAVLVKPKVSRAALSELIAGLPPCVIGMEACSGAHYWARLFRQYGHDVRLMAPKFVSPYRMAGKTGKNDAADAIAICEAVQRPHMRFVPVKDESQQAMQCLHRTRQGFIQERTATYNRLRGLISEFGVIAPQSTDALRHVVSDQKETLPVQVRLCIDDLLTHVTNIEEKIAEYDRVLSRVAKTDHRSQQLMELKGVGPTTASALVASIGNAHDFKNGRQLAAWLGLTPSQYSSGGKSKLGRITKAGDAYLRTLLVQGARSVMVGAENRTDPFSRWVCSLIGRRGYWRAVVAIAAKNARLCWASLHYGDDFRLYSIT

SEQ ID NO: 127950 - protein, 343 aa, unidentified
MQSITTIGLDIAKSVFQVHSIDVVGQVVMRRQLKRRYVLKFFEKLPPCLVGIEACASAHHWSRELQALGHTVRLMPPAYVKPYVKRHKNDVTDAEAICEAVTRPNMRFVATKTPEQQSCLTLHRTRHLFIRQQTAVINAIRAHLAEFGIVAPVGRNGVEQLLSIAADSNDKRLPEVARACVAALGAQLRMLKAQILQFDRMIRAWHRSSEASRRLDDIPGVGPALATALVASIADPKAFRSGRNFSAWIGLVPKQNSSGGKDRLGNISKRGDRYLRSLFTTGALAVIRYAKIHGTRHRPWLTALLARRPTKVAAIALANKIARMAWAIMAKGERYKEPAALAA

SEQ ID NO: 127951 - protein, 511 aa, unidentified
MHKRAEQPAPARGRELVNNCAAGENFVGGRPASARSQSQSPHPKRVIGRPLAEPEALAPTSNRKRPQEGRNISRMEGKAKRRKNLKQDKSSMSDPEQWWQQHRVFGAVDWASEKHSVIVVNQAGKIIEQFEIEHSALGWKKFREKLQAYGSIPFAIETSRGAAVEQLLEAGMIVYPLNPKSAQAYRERKAPSGAKDDWLDAWSFADALRVDGHGWKALRPEQALIKELRLLCRDEVSLIQQRTAFIEQLRHALAEYYPAALEAFEDWTSVSAWMFLERFPTPHELAKAGKRKWQNFLHSRRLWGSNEGTRRMEIFARAIEFAGSLPTVKAKSLLALSLVQMLFAIEKQLAIYRQRIEELFARHPDHELFGSLPGAGPKIAPRLLSEIGDDRQRFDDVQALQCLAGTAPVTKRSGKKRKYCHVHQRWACNKHLRHVLHLLADKSLSRCVWAETYYQFHRQKNQSPASALRRLANRWLKIIYKMWLDRTPYEPELHHHNQLKHGSWILQLKQP

SEQ ID NO: 127952 - protein, 376 aa, unidentified
MNESTVYVGLDVHKETIAVAVAHAGRGEPEYHGEVLHTAQGIAKLLKQLSPHGEVLDVCYEAGPCGYGLYRELVGRGHRCTVVAPALIPRKAGVRLKTDRRDALLLARLHRAGELTAVWVPDAEQEAIRDLSRAREDMKGIELKARQRLGAFLLRHGQVYREGASRWTKAHWRWLEAVRMPSPVQQLVLQEYVEAVKEAQRRVAGLEEQLRQALAGWSLRPVVEGLMALRGVSVIAAMTLLAELGDLSRFDSPRELMGYLGLIPSEHSSGGSRRQGGITHTGNGHARRVLVEAAWNYRFPARKTRDIERRAERTPVAVQAIAWAAQKRLCARYQALLQAGKQKPQVTTAVARELAGFLWAIACEVLGKAHGSKALA

SEQ ID NO: 127953 - protein, 305 aa, unidentified
MISWVGIDISKSNLVVWVQPQNQGFDVANTSQGFDELIECLSRYQVGRVLLEATGGYERKVMAALQSANFNVLRINPRRARAFAVAMGKNAKTDPIDAAVLADFAEVLNVPCDKTICAEREALRELVQLREHFVQQRDDNKRRLQQVQLPAAVATIKDHIRYLQTQIKLLEKSINQSMRDLDAEKADRLTSVKGIGTVATASLLVYLPELGELDRREIAALAGIAPYNEDSGNHSGKRQIRGGRARVRRALYMSCWVVIRHQADFKARYEALRERGKSAKVALIACMRILLIRLNAMLRDGTEWR

SEQ ID NO: 127954 - protein, 316 aa, unidentified
MSTAETFIGIDVSKQQLDIACRPTGMTFSESNTPDGIAALINQLQKQRPQLIVLEATGGLERALVLALVAVQLPVVVVNPRQIRDFARSTGQLAKTDRIDAQVIAHFGEAIKPEVRALPDELTQQLDALMTRRRQLIQMLSSERNHLFSTPSPIQKSVKEHIRHLEQLIKKIDQDLDEMITRSPIWKAKDELFQSVKGVGPVLSRTLLADLPELGRLSRQEISKLVGVAPLNKDSGKRKGKRQCWGGRAPVRAALYMAALSATQHNQVIKEFYQRLLAKGKLKKVAMVAAMHKLLTILNAIAKSNQPWDASIVGSV

SEQ ID NO: 127955 - protein, 430 aa, unidentified
MSRQATKPFFTQRGSSIILCFAFQLLVVFIENIRNPIKARNGGLPHSSLTKRGIFEYKDSVYLCILSEFGELIEKVFGVLTYQLEEMRDLMLHHHVVEVSMESTSVYWIPIWRVLSPHFKLNLANPYFIKQLPGRKSDVKDAQWIAECTMKELIRGSFVPPETIQQLRQYDRRIFDLNEEIVRKLSKLDAVLQRCNIRLSNYVSNVDSKSYKAVVRAISQGITAPEELVKLIHGRIINHHGMDVITASLKGVVSLAEIDMISQLRDELDMAEAHKEKCQARMLEICEREFPEELKRLQTIPGIKERAATSLIAEIGTDMNKFETANHLASWRGLKPRNDESNKKIKSRSITHGNVYLRKTIIECAWAASRTKDCFFSRFSFHHTQVRKKNKMKVLVAVARKMLIAVWHVLHDNTIYIDFTTDRKTSRTKG

SEQ ID NO: 127956 - protein, 349 aa, unidentified
MIIIGVDFHPGFQQIAFVDSESGEFQEKRLAHREEAESFYRGLASAGEKIRVGMKSSGYARWFERLLSELQIELWIGDATEIERKRARKQKTDREDAQHILQLILKDDFPKIWVASWENRDLRQQLWHRHRLVQMRTRIMNQLQAVALNEGLSYKKRLWRGSGRQQLEGFQLGLWATRRRRDLLELLDRLNPTIAELSQAAEQEAEKCPEANRLMTHPGVGALTALAFVLILGNAERFECGKQVASYLGLVPLEKSSGKRRRLGHITKQGNSILRFLLVEAAQATVRKNPEWRSKYFHLALRRGRSIAKVAMARRLAIRLYWMWREKKEYQQTRSFVSHAGQPGNLYRA

SEQ ID NO: 127957 - protein, 355 aa, unidentified
MSSEKYIGLDVHQATISVAVLEHTGKVVMECILETKAATILEFFAGLRGTLSVTFEEGTSAAWLYDLLRPHVARVVVCNPRKNALLKQGNKSDRIDARKLAELLRGNYLKSVYYGETGVRTLRELARSYLTTTRDLTRVMSRLKALYRSWAIPCGGRDVYYARHRAEWLGKIQHLGVRRRAEHLYQHLDLLKPLRQRTRRELLVESRRYPITRQLRQIPCIGPIRSALLVALIQTPHRFRSKRQLWAYSGLALETRVSAQYCYVQGQLRRSKKLISIRGLNKDHNHELKGIFKAAAITASARPGPLQDFYQTSLAKGIKPTMARLTLARKIAAITLTLWKKGENFDAEKLKLQAA

SEQ ID NO: 127958 - protein, 345 aa, unidentified
MEPMYYIGLDVHKRKISYCVKDSSGRIFAEGSLTATRLDLDVWMKTLPQPWSAAMEATMFTGWIYDHLKPHAAALKVAHPLMLRAIAAAKKKNDRIDASKICDCLRCDFLPECYMASTAIRERRRTLRYRNLLVRQMVQMKIKISALLMEAGVSYNKQRLHKAGYFRELLASNPDIDEGLGPLLRLCREMVVRLQKTESALVRSLERDSLLMDRVERLMTIPAVGPITALTWALEVGDVQRFSSIKKAVSYCGLCGAEKSSGSTVQRTPLSKQRNKHLQTTLIEAAKMAPRNSPELAMLYDKEKQKGNANRATLAVARKLVAYLVAVDRRQKEFLTVERENRTAA

SEQ ID NO: 127959 - protein, 417 aa, unidentified
MAMKIVRFNCCGMDVHKNLVVATIGITDRKTNVTEYFQRSFSTLNSDLYRLKDWLQSHHCSDVCMESTGKYWIPIFNILEDEINVHLTHPKYVKAIKGKKTDKKDSKWICDLFKHDLIKFSFIPPKEIRELREIARYRYKLVCMRSSERNRYQNCMTVSNIGLASVISDPFGKTASNIMKEVMKSNVIDDDKILKLIHRNCKNKDKILDSLHGYHIESDQRFKMKKSLDHMEYLNHLIDSCEVELIKRAYPLRSSFQHITQIKGISALSAILIISEIGIDMSQFESDKQLVSWAGLSPANNESAGKKKSVRISKAGQYLKPLLVQCALSAIKDKTSYFGRKYSNIKKRRGHKKAIIAIARMMLVSIYHMILTGEEFQPTDYESLMNPKSNTDQSLTVEKALNFLKRSGIDISSILVN

SEQ ID NO: 127960 - protein, 430 aa, unidentified
MKSNTQNAKIEAITEKTLVLGIDVGSETHYARAFDYRGIEYSKKPFKFSNTEVGFATFKEWILDLKEKHEKDKVVPGMEPTGHYWFNLGKYLQDNEMKPVLVNPHHVKKSKELDDNNPTKNDRKDPKVIAGLVREGRYMIPYLPDGVYADLRTASNIRFQLQSELTRIQNRISRWFNIYFPEYKTVYGKPDAKSGMLILKAAPLPEDILTLGIDGVNQIWRDAKLRAVGKARAKTLIEAAEHSIGSKEGTMSARMEIRMLLEDYESKNMRLQEVMVLIEELVKEIPMAEKLLEIKGVGIRTVSGFLAEVGDISRFNNPKELQKLAGLALVENSSGKHKGKTTISRRGRKRLRYLLFEVAMSLVAKNPEFRELHNYYTTRRLNPLKKMQSLMAIAAKLIRVFYAMLTKGVDYDPKKMISDIKRPTVYLQAA

SEQ ID NO: 127961 - protein, 356 aa, unidentified
MLNKFNNSVDFSGHNVYAGLDVHGKSWTTTIIVDDIEHRRFTQPPEPMTLYKYLSSNFPGANLFSAYEAGFCGYHHHRNLIELGIQNIVINAADLPITNKEKVNKNDHIDSRRLAQALQRNELKAIYVFGPVHEQFRSLFRMRWRAAKEHRRAKNRIRSFMYYYGINPPSDFNPEHWSLGFIYWLNQLTMPTQAGTLSLKFLLKAYHNTREQLLEVTRQLRHEVKFHYPDLYKLLMTIPGVGPIVAMCLIAEIGDITRFKSYRHLSSYVCFIPNSHQSGEKDPNGRLTYRSNKYLRSMLVEAAWVAMRHDPALLKYYRERITKQKPQYIIIKVAHKLLNRVRHVWLSNNPYQASIA

SEQ ID NO: 127962 - protein, 369 aa, unidentified
MFKVGAKSKSVSADEGRQPKLILAPEEPMSKSTHSQQRMVFCGIDVSAATLDVALIEPDRPLVQRQFINRSSGHKALIGWLAKYQSRVRVSLEATGIYSLDLALALDEAPEIEVSVLNPKIVNRFAQTLRRSKTDAADAMVLAEDSQRMPFVAWTPPSRSGLRLRAVGRHIAALAAQHARERNRLHAAESSQAVPSCVIQDLKRSLVSVQRRLVKMRREAMALVRNDAEVEQRFRLLTGIPGIAEVSALALLGELALLAPHLTARQWVAHSGLDPVHQESGTSVHRRSRISRQGNRYLRKALYMPALTATRFDPHLKAFYAELLARHKAKLQALTAVARKMLHAIYGIFKTGTSYDGAKLFPALDNATA

SEQ ID NO: 127963 - protein, 324 aa, unidentified
MYAALDLHERSIQCVLKDDAGKVVRESKMGKDEDEVLEFLDGTQASVVMESGYNHQHIYDLLKEKGYDVTVAHPLLVKAIAYAKVKSDKVDARMLADLLRAGMIPEAYVPGKDIREVRDLVRRRRYMVRLRTMLKNKVHAEIATRWIKYDDGDLFTEEGRAFLRSLSIAAVDDYLDTIEFLGRKIRELDERVRPMAESDRYAKLLMTIPGVGHYSALLISSEIADIDRFPDYEHLCLYAKLSPGVRQSGDTQHTTRAIGDSMLSWIMVQCTRIHVRRCDSAITRFYEQVSRRRGEKVAIVAAARKLMRTVYIMLKEEQAFRLDG

SEQ ID NO: 127964 - protein, 347 aa, unidentified
MEHIGIDVHKNQSQICILTLGGELIEKRISTERTRFEAILHGRSAARILIEASTESEWVARCLEGLGHEVIVADPNYAPMYAQRTRRVKTDRRDARGLAEACRLGAYRPAHRSSDESRHVRGRLAAREALVGTRTKFISLTRALLRREGLRIRSGSAGTFLKRLSELELPHPLQREIAPLLRLLTHLNAEIQKADEALRKYVRQTPAVERLCTAPGVGPVTATSFVATLDRVERFRGAHQVEAYLGLVPREASSGEHQHKGRITKTGNRRTRSLLVESAWAILRQVRRPEFMPLKAWAERLAARRGRRVAVVALARKLAGILYAMMRDATTFDAARWTQAQPSQGQP

SEQ ID NO: 127965 - protein, 393 aa, unidentified
MLFVGIDVAKSHHDVAVLDDNGLVVLRHLRILNSRQGFATLHQSLIQLSADTNDDIRIAMEATGHYHLNLLLFLQSNAYSAFAYNPFLIKEFARTLTLRKTKTDKADALTIAKKLATDLSSDRFKPDFNMQELKFLTHHRNRLTDSRSKLKTQYIRLLDILFPELAGFIGKTNLHYQYVYDLLTKYPSPAKLSRAHTNALVKLLHNHGNRLDMAQQLKVLAKQSIGLSSPANALELVQTISVIRLYDEQINAIDQEIAQIMNSLDEAAIVTSITGISNRLGSVILAEINHINNFQSPDQLLAFAGLEPSVYQSGQMNATGKIVKRGSTSLRWALCQAAEYASHWSPTLRQYRQKKLDEGKHYYVVMTHVAKKLVRIIYYLLKHHQYYDESKLI

SEQ ID NO: 127966 - protein, 355 aa, unidentified
MKKRSVTGRVTGIDQGDRFSHLCVLDARGEVVERTRVRTTPAAYQKRFGGRSARGRVILEVGPHSPWSSRLLESLGHEVIVANARRVKLIAKADRKTDRVDAETLARLGRVDPNLLAPIEHGGEAAQRDRALLRVREGLVRSRTRLIQQARGLAKALGERLPSATTAAFPQRVRNAGLESLFPGLDVLLEMVEVLSARIRKLDHEIERACRERHPVTAQLRQVPGVGSITALAYVLKVEDPTRFAKSREVGPFLALVPRERSSGESQRQLGIPPRGDAMLRRLLVQASHYILGPFGPDTDLRRFGLALAERGGKRAKKRAVIAVARKLAVLLHRLWVSSETYQPLRVSGSEALAA

SEQ ID NO: 127967 - protein, 466 aa, unidentified
MTPRKGTKVRRCEASADLTVTHRHAAGIDVHAAVHFVAVPSEDVPARFINPDAQLPAGVRKFAATTGALEALAAWLKDCGVRTVAMESTGVYWIALYELLASRGFDVILVDPRQTKHAPGRPKSDVLDCQWIRRLHSYGLLTASFRPADEIVVWRGFQRQREMLIGYAAQHVQHMQKALEEMNVKLTEVVSDIVGQTGMKIIKDIVGGKRDPLKLAKHRHERCRATEAEIARALYGNWRKEHLFALKQGLQMYEFYQRQLQECDREIETCLRGFGDKSGGAVLPPKPRQQKPRRHEPKFGARALLFRMAGVDLTLIEGISDTTALVILSEIGTDLSRFATEKNFVSWLGLCPQHRGSAGKIFNRRVRRGANRAARALRMAAQGCHHAKNAVGAFYRRIQGRCGGAKAVVATARKIAERVYRMLKYGQEYVRQAEHAYEEAYRLRTLKAMARKAESLGYKLVPATAE

SEQ ID NO: 127968 - protein, 378 aa, unidentified
MRNIIYIHMGFINGMVAPYILCHSGTINRHYLSGAAIMSVKTIGIDLAKEVFQIHGTDEHGKRLFNKQLKRAKMLSFFANIPPCLIGMEACASAHFWAGKLISMGHNVKLMAPQFVKPYVKTNKHDAADAEAICEAVTRPNMRFVPVKTPEQQAVLALHRSRQSFIKQRTAQANQIRGLLAEFGIVVSRGIQQLQLQLPEILEDANNSLPSLFRVQLSLLQHHMTYLFDVIATLDKQIEQCYRQNALCQRISKIPGIGPVTATALIATIGNASNFENSRQLAAWLGLVPRQHSSGGKQVLLGISKRGDVYLRTLLIHGARAVLQSVKRKQDAVSGWASRLLARRNNNIASVALANKNARIVWALLSKDQEYCAAVINV

SEQ ID NO: 127969 - protein, 402 aa, unidentified
MAYDFVIGVDVGTYFHHACALDSQGRQVLSKRINQHESSLRKLFGQFLADNASVLVIVDQPNNIGRLTVAVAQDMGVDVRYLPGLAMRQLSRIHVGNSKTDVRDAYVIAHAGLNLPDSLRSVDRVGEVFIQLKVLNGIDEDLARAYTRLINQMRSALVGTYPAFEHVLRGQMIHRKWILHLLAKYGGPTKIRRIGKTRLKAFARKHRARNPEPVIDAMLAAIHEQTVSIAGAEYAELGVAMSATDALTKLEHRKEIEAQVLKLIQDIPQTEILLSMPGIGPRSAAQILMTVGDMSDFPDAAHLASYAGLSPRTNQSGTSIKSNSPNRAGNKKLKNALWQSSFASIRFHERSRQFYERKRKEGKRHNAAVVALARRRLNVLFAMMRSGELYRDIPTVQEAAAA

SEQ ID NO: 127970 - protein, 367 aa, unidentified
MDAPCSGVECAKMEVLLTPQQGTPMSEITVIGLDLAKHVFQVHGADPDGRPVLRKRLRRGQVLEFFASLSPCLIGMEACAGSHYWGRELQALGHEVRLIPPQYVKPYVKTNKNDAIDAEAISEALTRPTMRFTAVKSAEQQSVLMLHRTRELLVRQRTMLVNALRGHCGEFGIVAAQGLSRAGDLIKRIEDPADTALPDLARQALQCLTSQIRAIQEQIALIEKKLLAWHSSCEASRRLAEIPGVGLITATAVVASVGNATQFRSARQFAAWLGLVPQQHSSGGKERLGHISKRGDGYIRRLLVHGARAHLSWSRRKKQIRSAWLTGLLARRPTNVVLLAMANKTARIAWAMLSRGERYQEMIAAAA

SEQ ID NO: 127971 - protein, 365 aa, unidentified
MQKISTTQTSGKNIFKGKLTIGLDLGDRASAYCVLNDAGEIVLERKLATSPKAMTEIFGKMARCRIAMETGTHSPWVSRLLTALGHEVIVGHAQRVRLITKSRRKDDRQDARKLARLARIDPELLSPVKHRSVQAQLHLTEIRARAGLVSARTALVNGARGLVKSYGERLRKCDTRQFRREATGGLSTGLRDALEPLLREIESLNDRIQEYDRRIERMAKLTYPEASLLKQVKGVGDLIATTYVLTMEDPHRFRKSRDAGCFVGLQPGRRNSGDSEPQMHISKEGDEYLRTLLVQGAHYILGPFGEDSDLRRWGRKLSERGGKTAKKRAVVAVARKLAVLLHRLWVSGEVYEPLHNNQKAMTAAA

SEQ ID NO: 127972 - protein, 409 aa, unidentified
MQTEPIPKRFIGLDIHRKYFVAAGVDSKLNPVLGPHESPMRQIEKWAKKNLTPEDAVVVEMTTNTYTVYDALKPLVHSVTVVHPPPVALIVRAQVKTDKKAAFTLAQLHAAGLLPAVWIPPIEVREMRALVAHRHKMVKLSSIAKCRLHALLHRHDIEAPEGFELFTEDMQAWWKGMKVSPLEKQCMLSDMATLEFAHEQVKQIEAAMNVEIAKDARAPLLVQITGIGLLTAVTILSAIGDIRRFPTAKQLVGYTGLGARVHASGMTFSTGRITKSGRKDLRWALVQAARQAVSHHPHFKVEYERLSAKIGTKKAIVAVARKLLVVVWQVLTKETADKFANPTQAACGLFAFAHRARAKNLPNGQRALEFVREQMDRLGIGEDVAVIPWGTKTFKLPPSKIKAEGRMMK

SEQ ID NO: 127973 - protein, 402 aa, unidentified
MNAVGIDVSKGKSMVAIMRPFGEIVSAPFEIKHTASDIHSLVELINSVEGESRIVMEHTGRYYEVLAHQLSKANLFVSAINPKLIKDFDNDSLRKVKSDKADSVKIARYALDKWQNLKQYNVMDELRNQLKTMNRQFGFYMKHKTAMKNNLIGILDQTYPGVNTYFDSPARSDGSQKWVDFASTYWHVDCVRKMSLNSFIDHYQNWCKRKKYNFSQSKAEEIYGKAKELVPVLSKDAITKLIIKQAVDQLNSASTTVESLRTLMNETASKLPEYPVVMAMKGVGTSLGPQLIAEIGDVSRFTHKSAITAFAGVDPGVNESGSYEQKSVPTSKRGSSDLRKTLFQVMDVLIKTHPQDDPVYQFLDKKRAQGKPYYVYMTAGANKFLRIYYGRVKEYLSSLPES

SEQ ID NO: 127974 - protein, 446 aa, unidentified
MSTWNLGIDLGVINDHAAILATSEGKFVWNKAWGFATRDEHFEQLDRKVRREAPPGTTFRAVMEPTGMSWFPVAIALKKRGWETHRVKSQKVHDLRKYYKKHAKSDRIDAQTLAKMPIVDEESLYPLYLPNATTLACQRLCKQREHFLELCTASQNRLQATDSFAFPGLEQVLSNPVSPAARAFRRELYDPKQVQTLGLEKLTAFFARFATKEDDPDQSEKLAYRVLDVALNAIAIYQEDKSLAIDYAILGQEVRRELAFLVYCEEQMAVIEHEIRPLYRKLHPSGQVETIYGVGKHGAPVFVSFIGDPHRFASLRQWRAFVGLIPDSSQSTDTEGKGLKITQAGQDILKKYAYLGADTARHYDPQIADIYYDQMVNKGNPHTQAVCACATHLLDRILVTLKEDRSYELRDVDGRAVTPEEARKIIAEKYTVPKEVRDRLRKKQKR

SEQ ID NO: 127975 - protein, 317 aa, unidentified
MARKGTIVGIDVAKGKIDAAIRFGAEASFANSAEGRRELLAWLKEHGVCKAVMEASGGYEKSWATLLRGAAVEVVITDPNRVRHFAKSAGQLAKNDPIDARMIAWFGEVFGHASGQPHDEERQELDQIVTARLGIVRLKEQIENWGEHEQPKAVQKAQQALLKAVAIQLAKLETIIAAKIDKTERFAQRAEIIQSVPGLAGTAAAGLIAFLPELGLVDRQAAAALLGVAPFDADSGQRRGERHIQGGRHKLRKLLFMPVLSAATQHNPVLKACYQRLIAKGKKAKVALIACMRKLIGILNTMLARGEKWNPARHAIA

SEQ ID NO: 127976 - protein, 335 aa, unidentified
MKKYSFYVGIDVSKLKLDVSLVKAQGGEFVTHFTVNNTSKGIQQMFTRLQKHHGDIASMLISYEDTGVYSLPLSCHLSEQAQDYWMIPAIEIKRSKGLTRGKTDKSDSKDIAFYALTHQHKLKLSSIPTKGLLRLKLLQTEREKVMKAIRLLSSTQEGEGYIPKDVMSAVAKINNSTIKQLEKVVTKLDKEMTALVKSNELLQKQFELITSIPGVGPQTAYYIITTTKSFSTFDNARQLACYAGVAPFEYRSGTSIKGRTKVSHLADKKLKSLLNLCALNAKKHDKQLAHYYEKKLAEGKSKMLVINNIRAKLLTRIFAVINRGSPYVNTFQFAA

SEQ ID NO: 127977 - protein, 343 aa, unidentified
MHTITTIGLDIAKSVFQVHGTDAAGQVVIRRQLKRRAVLAFFQKLPPCLVGLEACASSHHWSRELQALGHAVRLMPPAYVKPYVKRQKNDMADAEAICEAVTRANMRFVPTKTPEQQGCLMLHRTRHLFIRQQTAVINSIRAHLAEFGIVAPVGRKGVMELLQVVADPSDKRVSEVARSCLAALGNQLLSLKEQILEFDRMIMAWHRSNEPSKRLRYIPGVGPMLATALVASVADPKTFRSGRNFSAWVGLVPKQHSSGGKDRLGSISKQGDRYLRSLFVAGALSVIRYAKIHGTKHRPWLTALLARKPTKVAAIALANKLARMAWAMMARGARYRNPVALAA

SEQ ID NO: 127978 - protein, 509 aa, unidentified
MWLQGFSDNIIGEVLRHYPVWEIAPYSTPCPQTYHFLTLTEKNDMNKDTKQRRYKSKKKGGKKGFPKHLEHINKMAAGIDIGSRSHFVAVPEGCAEVCVREFKSFTSDLVALADWLEECDIETVAMESTGVYWIPLYELLESRGFEVKLVDARHVKNVSGRKTDVLDCQWLQQLHTYGLLNGAFRPNEKVCALRAYTRQRSMLVQQASSHIQHMQKAMSQMNVQLHNVLSDITGDTGMRIIRAIVNGERCPRLLASYRDKRCKNSLETIEKSLTGCYRDEHIFSLTQAVELYETYQHKIAVCDKKIEEQLLTFEERKSVAKEELIERVTKRKGKGRSKNAPLFNLKAHLIRITGVDLTAIPGIEATSALKIISEIGLDLGRWKESKQFASWLGLCPGNRVSGGKRLGGKSKRTANYAASTLRMAASTLHRSDSALGAFFRRLKSRLGAPKATTAAAHKLGTIIFSMITKGKEYHEVGQDYYENQYRERIIKSLSFRAKALGFELVEIPC

SEQ ID NO: 127979 - protein, 359 aa, unidentified
MIYVGIDVAKDKHDCFITNSDGEVLFKAFTITNNLDGFNELHQKIASVMDDVTKVKVGLEATGHYSYNLLGYLIDKGLPTYVINPLHTNLYRKSLSLRQTKTDKVDARTIASMLMSDVNLKSYSDISYHNEELKSLTRYRFDKVKERAKLKTSVSRLVCILFPELEKLVPTLHITSVYALLSEFPGAKHIATAHLTRLTNLLSEASKGRYGKDTAITFRDAARASIGSNMPAKSLELKHTIKLIQELDSEIDEIENEIKIIMDEINSPILSIPGINYRMGAMIIAEIGDFNRFDSPDKILAYAGFSPSTYQSGQQDSAYAHMEKRGSRYLRYALYNATKYVCHWDPTFAAYLAKKRSGR

SEQ ID NO: 127980 - protein, 428 aa, unidentified
MSERDYNRQTAKRQRISKTTLIVGVDVGKAFNAVGFMNKDGNVLGSCSKLYNNREGFEQFVKMIEGLKARHRLRDVLIGMEPTGHYWRKLAYFAKEHGYEVRFVRTTALKHHRELDESSSAKSDQRDALTIANITREGKYIDTVIEDGTLRQLRTLSKARERLLRYSVSAKNSLHAALDDYFPELHEIFWSMGSRSLWVILDQCPFPEDVVSMKVSTLQELIARSSRKRAGSARKARALYEAAQKSIGVKQIGSADRYRLRMCLEEVKRTVLTLKDMDRQLKCMVKDIPSASYLMSIPGIGHLSAAVFLGELGDPAHFHNARQIVKYAGYDPQESDSGSWVGRKFISKKGRWLLRKYLFFMSMRVVVLSKYFQEYYHRKLETKNRVGQQPRKKEILCAVAIKLIKVIFALLRDKRSFEDIASAAVVRA

SEQ ID NO: 127981 - protein, 390 aa, unidentified
MQDVADQSVAPTTIGADLCAIFISLELSRSTWLATSLSPGRGEKMSKHSVSAGDIAALLARFSELRRKACTRTGKSFPIVVIQEAGLDGFWIHRVLLSEGIESHVVDAASIATSRRRRRAKTDRIDGETLLRALLAHKRGEPRVCSMVRAPTPEDEDRRRICRERKVLIMERVQHVNRIKGLLFSQGAFGYEPLRRDRRARLDALQTGDGRRLPQHLKAQVCRELDRLELLLEQIKAVEAERDALLDAEQAKASAPPPMLLGVHGVGPEFASVLWSEGLSRHFDNRRQVAAYAGLAPTPWQSGSVNREQGISQSGNRRLRTTMIQVAWLWLRHQPRSALTLWFKDRMERNGGRRRKTTIVALARKLLVALWKYVTAGVVIEGAMIRAARR

SEQ ID NO: 127982 - protein, 444 aa, unidentified
MLRFVGCDVHKRTAVFAILLEDGTLFASYTVPVTREALAAFAERQLSFADRLAMEATTNTWAVAGVLRPFVKEIVVSNPLKVRAIAEAKIKTDKVDARVLAELLRCSYLPVVWQPDAETQRLRRLTHRRAALVSDRTRLKNRLHSILHHTLVPLPDGDLFSKRGIAWLRELPLAEEEAQARDSDLRLLEQTELEIAELEQRLVREAWQDEKVRLVMSIPGIDYTVAQTCLAAIGDVARFPNAKKLAAYLGLNPSTRQSGPHCYHGPITKQGNAHARWLLVQAAQHLGQYRGPLGQTMRRIIQRKNRSVAVVACARKLAVLLWHVLTSGEPFRYALPKSLEAKYSRLRVRATGRRRRGGVAKGTPRPAQYGQGRTRAVPSLPQVLAKNELPQISPLARGEKIMLERKRLEGFYRELQTPSRIEANTRTAQVQESEEDAKSQLTQS

SEQ ID NO: 127983 - protein, 390 aa, unidentified
MFYLGIDIGKSFHVASLIDNKKNVIFKGFQFKNTTGDANLLLEKIAPYPEIEIGMEATGHYWLALYSFLVKNNFVVHVVNPIQTDSWRNSTKIRPHKTDKIDSLIIADFIRYGEFSETSLASEEILEIRNLSRFRISLVDSIGDLKRKTICVLDQIFPEYESVFSDIFGKTSKEILNFFNSPADFENISAENLNRLLEKVTMKKFTETKIKQLSNLAKNSFGISFGLQSLKFQLQLLIKQMSFIEEQVADVDQKISELLDKLNSPITTIPGIGKVIGATILGEVGDIKRFSSPAKLVAYAGLDSRVEQSGTSENFSGKMTKRGSPYLRTALFRAALVASNIDPVFKAFYQKKRAEGKHHLTCIGAVARKLCYTIHAILSKNCVYEIQSTS

SEQ ID NO: 127984 - protein, 421 aa, unidentified
MKSTIPTILAGVDTHSTTHTLALLDEHGRVTDTETFNADPKGYERLIAMIGGPALCLGVGVEGTNSYGAALSRRLAAAGYTVHEVLRPKRSVRRSDGKSDPIDAIAAARSVLAGDGISTPKASDGWCEALRHLIAAREQLVTSMTAISNCLAGLLTTAPEGIRERYRSLPSKRRIGKLAACRPSGGIVERNVLSSLKTLASSWRELHDRADVLECRMRQIPEENARPLLDVYCMGTMSAAQLAVIGGDNPERIRSEAAFSKLCGACPLPASSGKTNRHRLNRSGNRQGNRALYNVALVRMSHHQPTKDYVVRKTKEGKGKLEIMRCLKRYIAREVYRALIAIRNGEAGREPAVERGARLREVRVSLGKTQQQVGDALGVPSSRVSEIERGVRDLPELERQIIEWMDSILGQSQHSNTFDNV

SEQ ID NO: 127985 - protein, 360 aa, unidentified
MFVERTAVGLDVHARSIVAHAIDGETGEVFTSRLVPDAGSVIGWLGRLPGPVAVAYEAGPTGFGLARAVRAAGVRCEVAAPSKLQRPAGQRVKTDARDAEHLCRLLRLGEFTAVVVPDEDTEAARDLVRAREDCRSDLMRARHRVSKLLLRHGIVWSGGDAWTGSHLAWLARQRFDHAAIQAAFDEQLDQVLATVARRDRLGARIEALAADSRWTPVVRRLGCLRGISTLTGFALAVEIGDWSRFDGNSIGAYVGLVPSEHSSGSSRALGPITKTGNGHVRRLLVEAAWHHQPRYRVGKTLRDRWGLASPAARARGDAGNRRLHARWVNFQARKKGHNVATVAVARELAGWCWSLATIDD

SEQ ID NO: 127986 - protein, 345 aa, unidentified
MSDKLNSAIAVIGIDIGKNSFHVVGHDKRGAIMLRQKWSRGQVEARLANLPPCLIGMEACVGAHHLSRKLRTLGHDARLMPAKYVRPYSKGQKNDFRDAEAVQRPTMKFVATKTAEQLDLQALHRVRERLVSQRTGIINQIRAFLLERGVTVRQGLRFLRAELPRVLATPCDALSPRMLRVIEDLAGDWRRLDERIEGLSSEIEVLARRDAGCERLMSVPGIGPIISSAMVAAIGGGDAFSKGRDFAAWLGLVPKQISTGDRTILGKISKRGNRYLRVLFVQAAWAVLIKPRSWDRHGLKPWLEAAKKRLHHNVLAIALANKLARIAWSVLAHGRTFEASKIRAA

SEQ ID NO: 127987 - protein, 392 aa, unidentified
MSKTIMIGCDLHDRSMLVRYAIDAGEPQQKSFRNDFEGRQKMIQRFSELAAKHQIERIVFAYEASGQGYGLSDLLEENGIECYVLSPTLLPKTPKSAKLKTDAKDAQMLLEQLRGFVLAGNRLPVVWTPPQRLRDDRELIRNRIDIADESTRIKLQILSMLKRRGIEKPSFYGTWSKRFVKWLRDVANQLDPVVGPVLESLVCRFELFRDEMTKLEKRIRELSRAPRYADAHDALRKLPGVGLLTAMTFLSEMGDLTRFHNRREVGAYLGLCPASFESGETSNRKGHITRQGPSRLRRMLCQAVWVSLSRDAQISAAYDRIKGGKPQRNKKAIVALMRQLGIKMWHRAIACGVSTELAGRGGPHDPRTLARAQQRGTVPYVSPSPQPLASTG

SEQ ID NO: 127988 - protein, 377 aa, unidentified
MTTRSITQHQQQRSEPVETWEKSSIPRALIKLGIDIHTQWLVVVAQHDHASPRPPRRFLREEFIAWVEELVRQGHCVHAVYEACGFGFGLCRKLGSLGAHCVVVSPQKLDESNTRIKTDGRDARTLCLRLDRYLLGNPHALAVIRIPREEEEQLRNQSRQRDALVRHRSRLQAQGRSLLVSSELPAPSNWWKPQTWGRLQRHLPPWIIPQLELTRPVLLTLDTQIASLTEELEECAPEKIPSGVGKLTSVSIGREICDWKRFQNRRQVASYTGLCPGEYSSGNKRVQGSVTKHGNPRLRCALVELAWRMVRFQPEYPPVGKRLHILGKGARATSALRKKAIVAVARQLAVDFWRLQTGQTTAEKLGLTFNAHDALIS

SEQ ID NO: 127989 - protein, 436 aa, unidentified
MDEVKDEPLFCERVAGIDIGKAMIMVTIRVPSDRRTGRRQQETREFTAVRKDLLALADWLRCWGVTRAGMEATGDYWKPVYFLLEREGFDCVLYHASQVKALPGRPKTDKLDSVWLAKITEQGSLPGSFVPPEDIRRLRTHTRYRRHLVQAQTAEKARCEKLLEDAHLKLSSVISDIHGVSGRAMLTAIIAGQRDPKVLAQMARTRMRGKIPQLEQALDCSFFTGQHAFILKMMLGNIDYLQAQIQELNTKIAELCEPYARQIAQLDAIPGFGIITAQDIIAETGTDMSVFPTAGHLCSWARRCPQVTSSAGRRKGSNATGRGNPYLGAALGEAAVNAGRTGTFLGTKYRRLVRHMPKKKAQGAISRSQLVICYELLSDPDAEYTDLGTDYYERRANIRREVRSHARAIERRGYRVILEPIEPGLDPDILPVTKAS

SEQ ID NO: 127990 - protein, 321 aa, unidentified
MKNSTNPVAVGIDVAKASLEVSIGTDGSTLQFANDIEGHDRLLAHVRDFAISLIVLEATGGYEAAIAGALQAAGMPVAVVNPRQARDFAKAMGILAKTDSIDARVLARFAQTLFQRDDLQRFIKPLADEALKALQAQLLRRRQLCSMLIAERQRLSTSHHSTRADIEASIDFLKGRLNKADAELAHLIERDHAELNSLLRGVKGIGPNTLATLIAELPELGRLTRREIGALVGVVPLNRDSGQFRGRQSTWGGRATVRRALYMAALVASRHNPAIRRFYAHLIEQGKAPKLALTACMRKLLTILNAIARDQIPFNPALHQC

SEQ ID NO: 127991 - protein, 376 aa, unidentified
MPTTIHPEREDQPLQYEWLVGIDWGSQQHQVSVLDRDRRRVGERVVDHDGASLARLADWLWTLSAGQPQRVAVAIEGPRGAMVEGLLERGFHLFALHPKQRDRFRDRHRGAGAKDDRREAFVLADAVRTDPPSFRRLHLEEPQLLVLRELSRAEETLLEDFRRSANRWRDQLHRLYPQRLQLCSAADAPWLWDLIDLVPPPAHAALLSEEHVQRVLKAHRIRRVTGKEVLTCLQMQALPVAPGAAEAAQAHCQLFLPCLRVLAEQLQTCRQQVSALLSPVAEEPGEGESPSDVAIVLSLPGVGRKMTAWLFAEAAQPLAQRDSQMLRTPSGVAPVTKHSGKRRLVVMRRGCNPRLHHALYHMARVAMQRDAHFNNV

SEQ ID NO: 127992 - protein, 412 aa, unidentified
MNIVYERCAGIDVHKRNVVVCAITPDQWGQRHKEQCTFSTMMPDLLRMRQWFQNLGVTHVAMESTGSFWKPIFHVLEGYMEVLVVNAQHLKAVPGRKTDLKDAEWIADLLQHGLLRPSFVPPAFQRELRELTRYRTSVIEERSRTINRLQKILEDTNIKLAAVATDLMGQSARQMLAALLAGETNPTVVAELARGKMRAKRDLLVQALQGQFKPHHRVLISEQLAHIDSLDEEIERLSAEIAQRLRPYEAQIKRLETIPGIKRRLAEVILAEVGPDMQRFPSARHLASWAGMCPGNRESAGKRLSGKTRKGSPWLRTALVEAAHAATHCKDSYLAAQYHRLVLRRGGKKATIALGHTLLVIVYHVLAEEKDYQELGGNFFDDHDRQAVQKRLVHRLEKLGYEVTLVPSPPAA

SEQ ID NO: 127993 - protein, 334 aa, unidentified
MEIIKQVIGIDISKDSFVCREGTIKTDQQTKISSYREFNNTKASIRKFYKYAQDQKIKGVTQYFLMEATGVYYEALAYFLKSKGAHVIVVLPNKAKFFARTLSIKSKTDPIDAGILTQMGLEKVLNEWEPPSKLMKALKQLTREHLSLQERKTDAKNRIHAKTHSFQPGKDTIRRIKLEIKFYQRLIEEIEINIRTLLKSDIQMWSKIQNIQGVKGLGLMTIAKVLAETDAFALIQNGKQLTSYAGYDVVLKESGKYRGKTKISKKGNRHLRMSVYMPAISAIRSNPKMKTYYNRMLEKGKPKKVGIVAVARKLLLLIYYLWINETEYDPAYAD

SEQ ID NO: 127994 - protein, 311 aa, unidentified
MQDTIGIDVSKEGLDAYRLSDRCHARFANNRAGLKALIRWIGGKSPALVVFEATGAYHRQLETTLGAQCIAYAKVNPRQARRFAEATGRLAKTDRIDAAMLARMGAVLELDAQPPRTESLNCLKDLMTARRALIKDRTAVLARQKVLASRLLKRQATARLRQIEGHIQEIDAAIADAVARDPTPSRRLAILISIPGIAEATAFAMLIEMPELGSLEGKQAASLAGLAPISRQSGKWQGHERIQGGRTFLRRAIYMPALAAVRFNRDLKAKFDQLIAAGKPAKVALVAIMRKLIVLANALLRDGRPWSEIRP

SEQ ID NO: 127995 - protein, 317 aa, unidentified
MALHRAFVGIDVSKEWLDLWLAPLKRFERAGNDGAGWAAVIGLLKSLGIEAGVVVAFEATGGYEQGLRRALLEAGFDVRRLNPLRVRLYAKSLGRNAKNDRIDARVIARYAEAADTTPDILDPARERLAELVSHRRRLVDERVAVGNQTSTLHCVLLQAQNRKRLALIERQIDETDALILEAVGQVPSLVAKVGLLKTLKGVKDVTAIALVALLPELGRITRRAIAALVGLAPFDHDSGKFKGTRSIAGGRAAVRTALYMAARAAARSKSPLGDFYQRLIAAGKSPKVATVALMRKMLVTLNAMIRDNEAWKHAKPC

SEQ ID NO: 127996 - protein, 348 aa, unidentified
MDSMTYVGLDLHKRSVAYCVKAASGRIVDEGTVLSSRAALTEWAQSLQTPWEGGMEATLFTGWVYDLLLPYAEHLRVGHPLMLKAICCSKKKSDKIDARKLADLLRSNLFPECTMLPKELRHLRRVLRFRNRIVRQAIRMKNTVCGLLMESGQAYSKRKLHGKRYFAELVDSLEDVPESVIELLRLSHGTVEFFTSMQKELIAGLRGQPLLRERVDRLMTIPGVGEITALTWALEVGDPDRFGSVREAVSYCGLCSAYSESGGKERRGPISKQRNKYLQTILIEASKIAPQWNAELRALRDRERMRGHHNRATLVVGRKLVAYLLAVDKRGTAFEDRASRAGGEGLAA

SEQ ID NO: 127997 - protein, 351 aa, unidentified
MLIIGCDFHTRYQQIAMANDETGELFLERRLDHESGEARAFYRSLPEPVRVGIEATGPIHWFERLLAELGHELWIGDSAKIRASEVRKQKTDERDAALILDLLLAKRFPRIWVPTPAERDLRQLLWHRHKLVSMRTMLGNQLHALAMSQGLCRKKKLFTRKGRVELVSLGLGPWASRRRAELLKLLDQLDPPIAELDCAVLEEAKRREDAVRLMTHPGIGPVTALAFVLAIGPVTRFHRSKKIASYLGLNPSEESSGGRRRLGAISKQGNTMVRWLLIETVHHAVRQDPELRQDYQRLKFRRGHAVAKVAIARKLAVRMYWMLRSGADYAQLVRRQGSPGGTLMNASSSLA

SEQ ID NO: 127998 - protein, 369 aa, unidentified
MIIIGVDFHPEFQQIAWVDTDSGELEERQLRHREEAEAFYRGLVTEGKKVRVGMEASGHARWFERLLGELKFELWIGDAAEIRTKRVRKQKTDRQDAQLILKLLLEDRFPRIWVPSWENRDLRQLLWHRHRMVQARTRIMNQLQAVALNEGLRCKKRLWGERGRQQLESFRLAPWASRRRRDLLELLDRLNPTIAELSQAIEQEVERCPEAQRLMTHPGVGPLTALAFVLIIGKAERFQCGKQITSYLGLVPLEESSGNRRRLGHITKQGSSILRFLLVEAAQVTVRSLPEWRSKYFHLMMRRGRKIAKVAMARRLAVRLYWMMRQGWDYQQWVKFGSHAGQPGYCFGVPLNTEITIGHPAPLLRGSSN

SEQ ID NO: 127999 - protein, 321 aa, unidentified
MSHFYLGIDVAKAKLDCALRLHSGKFRAKVIPNSLDGFATLLTWLAAQKAESPHVCMEATGIYWEDVAQHLATAGFTVSVVNPAQIKAYGASRLTRSKTDTVDAKLIADFCAERQPPTWQPRSEAEVTLRALVLRLDALQTMRTQENNRLLVAREAVREDIQQHLNWLDTAIQQLIDAINDHIDRHPDLKQQRELLDSIPGIGERTSAIILAFYADTSRFANSRQAAAFAGLDPRQYESGSSLKGKPRLSKIGHAFLRKALYMPAMVTLYKTAWGKQFRGRLAGAGKPNKLIIGAMMRKLIHVAFGVLKSAKPFDSAIHLA

SEQ ID NO: 128000 - protein, 346 aa, unidentified
MRKSIINLSSVTTVGLDLAKHVFQVHCVDASGRVVVAKPIRRNKLLEFFASLPPCLVGLEASGSAHHWARELIKLGHDARMMPPAYVKPYIRRQKNDAADAAAICEAVTRPSMRFVGVRSLMNQAALMRHKAREMLVSQRTQLLNGLRGHLTEVGVIAAQGPRHARELAELIEACDETVPFEVCEALAPLVVQLRNLDEAIARLDRTIVKMAQKDETARRLMSIPGFGPITALAMAATVQDTSGFAGPREFAAFLGLTPKQNSSGGKPKLGRISKMGNRNLRKLLVVGAHAVLFHRKPHTDPLRMWAKKLLEKKPFKLVAVALANKMARIAFAILRGKTVYREIPA

SEQ ID NO: 128001 - protein, 395 aa, unidentified
MVRFAGVDIASENHVVAVVDASSGVLVKPKSFGEDAAGYEALFKLLGEPEGLLVAMEATGHYWKNLFAALAAKGYLVALINPVRTNRFAAEDMQRTKTDAIDALGIACFAAQKKPEPTRLPDTATEELRELVRLRDRLVQDFGDRVRQLHRLVDLGFPEFTRYVRSLDSELASSILKDYPTAEAFVGVRPRALSNLKYDGVHFVGLELANQLLAAAKTSVGRHHGYAYRVQVQYFCEDLDILRRRIKELDRNIDSKLELHEVGKLLTTIDGIGNNTAARLIAVLGDPAHFRDARALASYVGAVPALKHSGKKTPSRAGLTHLGNAQLRTALYMPTLSAVRRNPWLRAFYEGLRARGKLPKVALLAAMRKLLTAIYSVAKHRRPFTPKLLAAEASP

SEQ ID NO: 128002 - protein, 355 aa, unidentified
MNDEKYIGLDVHQATIVVAVMDSTGKLVMESILETKASTILQFFAGLRGILSVTFEEGTWAAWLYDLLKPGVDKLVVCNPRKNALLKDGNKSDRIDACKLAELLRGNQLKPVYHGETGVRMLRELSRSYLTIVKDLSRVVNRLKAVYRSWAIPCAGRDVYYPRNRAQWLGEIREAGVRRRAERLYEQLDMLRHLRQQARRELLAESRKHAITAKLRQIPYLGPIRSALAVALIQTPHRFRSKRQLWAYSGLALETHISAEYRLVEGQVRRSKKLLSIRGLNKDHNHDLKGLFKGAATMASVRPGPFQDFYQAALAKGIKPTMARLTLARKIAAITLTLWKKGENFDAEKLKSQAA

SEQ ID NO: 128003 - protein, 348 aa, unidentified
MLIIGCDYHPSWQQICWMDTETGETEEKKLEHASGDAERFYRQLSGPAVIGMESTGNCQWFVEMATTAGHDVWIGDAAKIRASEVRQQKTDRRDAALLLRLLLEGRFPRIWMPSGEQKDLRQLLIHRHKLVRIRVQVKNELQHLAMNQGVTRKGKLWSNAGEKVLRELPMKPWASRRREDLLKVREMLNGQIVLLDQAVMEAAEKNEKARLLMTQPGVGPITSLAFVLTMGDVSRFPRGKQVASYLGLIPREYSSGGKQRLGSISKQGNGFMRMLLVEAAQIAVRCDPQMRQEYLHRCHRKAKGVAKVAAARKLAIRLYWMLRTNTGYPGVVHVESSPRVPLVSASLP

SEQ ID NO: 128004 - protein, 424 aa, unidentified
MKVTFQTCCGVDVHKAFLVATIIKTTGGIEPSYQKRRFSTFNNSILEFKRWLLENECLDVCMESTGKYWIPVFHLLEDEINVTIANPKWVKAVKDNKDDTKDSKWIGDLFRLGLVRGSYIPCKKIRILREFTRYRYKLVSCRSSEKNRYQNALTVCNVALDSVVSDIFGKSSTSIIDYLLEQSGTSIDHEVIASKLLKRLKAKEDAVIESIEGYQMTDSQKYRMHLVRTHMDHITAAINDVDSEIESLITSDPDYQNAIELLCTIPGVKHDSAVTIISEIGIDMSQFCTSKRLCCWAGLTPGSNESGGKKKAVRITRAGVYLKPALVQCAHAAVKSDKSPYYKKKYESLVKRRGKKRAIIAIARMILTAVFQMLTTGEAWNPCDLYKIDMPEILLEKQKQKAIKQAQKLLIREGLLPPIETVAS

SEQ ID NO: 128005 - protein, 450 aa, unidentified
MHMVCVPAASAPPETGDGGFPANVRRFGANSCDLHAIAEWLQACGVTSVAIESTGVYWVPLFELSEARGFEVWLVEPGQLSRCGARPKTDALDAQWIQRLHSYGLLQPSFRPADSVLALRGYHRQRQMLIRYAAGHTLHMQKALERMNVKLAEVVSDITGATGQRIISGILKGERDPRVLALLRDPKCKNDAAKIAKALEGTWRPEHLFALKQAHELYRFLRQQIASCDALIRAELDRLPDRAGGRTATTKPRRCGRKPNDLSFDACGPLLRALGVGLTEVEGIDVGTALVILAEIGVDVSRFPTEKHFASWLGVCPRQHRSNGTTKKRGPRKGKNRVAIALRMAAQAVGRTQSPLGLFYRRIKGRIGGQGAVTATAHKLARLVYRMLKYGAEYVKRSPADYEAKLRAQVERQLRARAARLGFELERFPSWCSGRGGGQLPWWSDQEGRP

SEQ ID NO: 128006 - protein, 430 aa, unidentified
MKSNTQNAKIEAITEKTLVLGIDVGSETHYARAFDYRGIEYSKKPFKFSNTEAGFATFKEWVLDLKERHEKDKVVPGMEPTGHYWFNLGKFLQDNEMKPVLVNPHHVKKSKELDDNNPTKNDRKDPKVIAGLVREGRYMIPYLPDGVYADLRTASNIRFQLQAELTRIQNRISRWFNIYFPEYKTVYGKPDAKSGMLILKAAPLPEDILTLGIDGVNQIWRDAKLRAVGKARAKTLIEAAEHSVGSKEGAVSARMEIRMLLEDYESRNTRLQEVMVLIEELVRKIPMAEKLLEIKGVGIRTVSGFLAEVGDISRFNNPKELQKLAGLALVENSSGKHKGETTISRRGRKRLRYLLFEVAMSLVSKNQEFRELHNYYTTRRLNPLKKMQSLMAIAAKLIRVFYAMLTKGVDYDPKKMVSDIKRPAVYLQAA

SEQ ID NO: 128007 - protein, 364 aa, unidentified
MQCVIQNTELSSLEETRFEFNRSKALIKLGIDVHQDFYVVVMQEGWSNPKPPQRFGKEAFLHWAAKLQSQGAEVHAVYEACGFGFGLQRELSALGIHCQVVCPQKLDEHNKRVKTDGLDAKALCLKLDRFVQGNRSALALVRVPSEKEEQLRAIHRQREQLVKVRKQLEAQGRSLMVNHGIEPLKNWWKRRNFAALPVPAWMKELLKNSQPILCALQQKIAALTTQLQTAAAPNQPRGLGAMSSVIIDREIGDWIRFSNRRQIASYTGLCPGEYSSGNTRLQRCVTKHGNPRLRAALVELAWRLVRFQPNYKPILKWRATLGKGALATGAARKKAIVAVARQLAIDLWRIRTGRLSAETLGLIH

SEQ ID NO: 128008 - protein, 354 aa, unidentified
MKVQGRLYQNTNQRKRGIKNMKYQQVVGMDIAKDSVQASCFDGTTFFDFSFPNQEKLFLKEVQKRISKSDPSHTLFVMEATGVYHLKLATALDKKGYSVAVVNPFIIKKYAEMLLKRAKTDRNDARLIAQFGFDQEVALFAPKESVAEEITQVLKGLDQLKKERTNLKNYQEALIHHNEINPVVRDLYQKQLKEVEKAIKTLEEEAKRLVCQYAPKEYQLLLSIKGIGKYSAIALLGFLQKMDHFSRGKEVASFLGLAPQISQSGKDKGKAWLSKKGNGYLRRLLYLAALSASRSNAQCRELYQRLLAKGKPKKVALIAVANKLLRQAFAVLKSGCPYDPQYLSQKSNLEVVLT

SEQ ID NO: 128009 - protein, 477 aa, unidentified
MVINRVEEILDEPYEQVVQRVCAIDVAKDSGKVCVRTPAESGSGRRVSKVWDVPARTNAIIELGDHLACQSIEKVTLESTSDYWRIWFYLLEARGLDVQLVNARDVKNVPGRPKTDKLDSVWLAKLTEKGMLRPSFVPPKQIRVLRDYTRLRVDLTAERVRHWQRLEKLLEDALIKITSVASRIDLISVREMIDALVAGQRNPKVLAGMARGRMRLKHADLVEALTGQFDDHHAELARMLLDQIDALTVQIDTLTQRIDAVLADMPIPPPPPEPDPDGDGPAPTRRAEILAARRRPTGDAPGSSGPEPATRVITALDLIDILDEIPGIGRHNAQEIIAEIGLDMTRFPTAEHLVSWAKLCPRTIQSGNKSSAGKAGKGNRYLRAVLGDAAAGAAKTQTFLGDRYRRLIKRRGKIKTLVAVARSILVIIWNLLAQPGMRYYDLGVDFHTQRIDTARRTRNHVRQLEALGYTVTLTAAA

SEQ ID NO: 128010 - protein, 429 aa, unidentified
MAKRKYRSVPVNSIDRERLLERLDQRPVVVGVDVAKVKQFAVVMAPDGSVVQTVRWEQPQEQDDFVGFVLWLSKESPSLTVGMEPSGVYGDTMRHALLEQGVDVVRVSPKRTHDMAEVYDGVPSRHDAKAAAIVAKLHLDGASEAWPQRSDHERRLHAKLRTLSVYTKEYKRNRDRLESLLSRYWPEVTEELSLGSATMLELLKAFGGPQQVAERPNEARQLMRATGGPFLDPEKVERVVDLARRTVGVPMIDEELELVGVVATECRRHEKLATAVERAIATLVEEDSVTDSMRHMVGRTTAAVLVAAVGPPAKYTSAAAYQKSFGLNLRVVHDSGTKKSGLHLSKRGPGIARLFLYMAALRLIQKDDVVKAWYAAKVQRLGGRAKTPAVVAVMRKLALALWHVGQGSRFDATRLFDAQRLGFVGGDPM

SEQ ID NO: 128011 - protein, 336 aa, unidentified
MKNFVGIDISKPFFDVALIKANKPDLIAHRQFKQTLQGFADMYEWLKKQEVLLDEETLFCMEFTGIYNTALVNYLTSKSALLWLEMAVKIKKSEGFERGSNDKSDAVKIAKYAFRYQDKKQLWGPTDKSLEKLKHLIAQRDRIVDSISKLVVPINELKEVGCIVEARLMEKLQKTAIRNLEKAQKNIEAQIVKIVKEDKEFSHKVERVKSIKGIGQVTAIAFLVYTKGYTSFENGKQLSCYSGVVPFIRKKSGISIESKPRVSPFANKKLKWLLHLCASSAIQHDKELKAYYERKILAGKNKMSVINAVRNKLVLRMFAVLRDDRDYVENYERKCA

SEQ ID NO: 128012 - protein, 409 aa, unidentified
MRYYVGVDWADQTHAVWVVDASGPKITARTVPHTAAGFSEWGRELDEWRAQGIERWAAIERPDGRVVDFLLDHGVVVYPVNPKALDRARDRFRLSGAKSDPFDARVLADFLRTDYLHLQALQPSSDVAQELKLLTEDCQRHIRQQTRLVNQLTTTLKAYYPRALEVAELTTALAREFLQAYPTPDALTALTTRQWQRWAHGRRLSEARIGALWAVLQQPQLPVPAHVVRAKARLMLSLVEQVTPVVAAVAQYRKAIDDFFASMPAAQWARTLPIGKHGITAPTLWARLGDAPGRWESFRHLQAQAGTVPVTKRSGKQRSVHFRFACDKSLRHVVDQVAFLSLLSSAWARAYYDQQRARGHAHHQALRAVGAKWLKIIFVMWHRQVPYDEPYHLATMARQQLRQRQQQIA

SEQ ID NO: 128013 - protein, 337 aa, unidentified
MEYFAGLDVSMAETRVCVMDRDGAVVFEAKVPSAPADIAAALAQAPACGRIVFETGRMAPVLYHGLSQLRLPIVCIESRQAYQALKSLATHKTDRNDARGLAHLARIGFFKPVHVKSLPAHAIRSLIIVRKKLVGQRVTLENQIRGLAVVFGVRLPRALSSAFIRRALQASDGIPGLSAAMRGLAAARSAVLAAVVAIDADIRRMVRASDACRRLMSIPGVGQLTALAFTAAIDDPERFRRSRDIGAYLGLVPRRYQSGEVDYTGGISKCGDRRVRTLLYEAANVMLTRYKGSLKLKDWAFAIAQRSTMRKARIALARRLAIIMHAMLRRGTEFQPA

SEQ ID NO: 128014 - protein, 483 aa, unidentified
MKSKPEEQNKRATNHPTQHQWHEMNRKQRREITRQIQSEDLSLEVIHPDAGGIDIGNESHYVAVPPGRDNQSVRRFGCTTAQLKAMAAWLKQCRIRTVAMQSTGVYWVAVYDILEQAGLEVYLVNARDTKNLPGRKSDVQESQWLMKLHTYGLLRNSFRPSQEIREMRTYWRQRNDLVQSAGRHILRMQKALTQMNIQLANVLTDISGTTGQAIIKAILAGERNPHKLAEFRDPRVKASEEQIAQSLEGNWQEDLLFVLKQEHKGYEFCQKQMAECDRQLKQYLQQREDRSHGAPLPEEKRKGRLKNKKGNAPQFDLREGLFRMTGTDLTRIDGIDVMTATTIISEAGWDMSKWKTEDHFVSWLRLCPDNRISGNKVIGKGRLPTNNPITIALKMAATTLRLSKTYLGAQFRRLRTRLEAPIAIKAMAAKLARLVYRMLRYGMKYVDQGAAVYELRHRELQIKRLKAKAEKLGYRVTPIPAAA

SEQ ID NO: 128015 - protein, 376 aa, unidentified
MSTIRFIGLDVHADIIAAAVAEPDGEVRPLGMIPNRLEAIRKLVAKLGPAKELKVCYEAGPTGYVLYWQLTALGVACEVIAPSLVPVKAGDRVKTDRRDAVKLARSYRAGDLTPVWVPDTAHEALRDLVRAREDARQDQHRARHRLSKFLLRHDRRPPQDVKKSWTLKYMTWIQQVHFDQPALEATLLDYVHEVDHMAERIQRLEKAITEAIQKAPPALRAVVEALQALRGVAQITAVTVVAELGALSRFDSPRQLMGYSGLVSSEYSSGQHIQRGAITKTGNAHLRRVIIESAWSYQYRPWIGGFLLQRQKGLDQEVQDIAWKAQWRLHTRYKKLAAAGKKKPQIVTAVGRELLGFIWAIAVKTEAKFKTEPKAA

SEQ ID NO: 128016 - protein, 347 aa, unidentified
MLHAGLDLSRRKIDVCLLSEQGGHLDQFAVPPDVESLRTLARRIDEVHAEPVCAVVESMTGARLLHDTLEQEGWDVEIADAQRVKGLAPLACKTDKTDSLVLATLSQRDLVPAIWLPDPRVRDLRELARFRMHLVQHKSALKCRIHSTLINFGKPCPVTDLFGAEGRRLLARLEVPEPWRSNVSASIELIDHLEGEIDQINRRLRAGHADHPYIPLLMSVPGIRWVLAFTIAAEIGDIARFASPRKLTGYTGLCPRVVQSGDSDRRGPLTKHGPTYLRWALLEATMHALRHPAYSERYQRTKKRLGKQRGAKVAQVDVARRLAHAIWHMLTRNEEFAPRGAAFRLAA

SEQ ID NO: 128017 - protein, 350 aa, unidentified
MLIIGCDYHPGLQQIAFVDTETGECGERRLAHREEAEQFYRKLSERSLRVRVGMEASGHARWFERLLRELQFELWMGDAAEIRTKRVRKQKTDRQDAQLLLRLMIEDRFPRIWVADAENRDLRQLLWHRHRLVQMRTRVMNQLHVVALNEGLRRKKALWRPAGRSELESLVLAPWASRRRQDLLDVLDQLTPKIQELTRALEEEVEKRPVTRRLMTHPGVGRLTALAFELVIGTPERFHCGKQMASYVGLVPSEESSGDRRRLGHISKQGNSLLRFLLVEAAQVTVRSQPQWRSKFFHLALRRGRKIAKVAMARKLAVHLYWMWRQGWDYGQFEKLGSDAGAPGNRHGAQ

SEQ ID NO: 128018 - protein, 403 aa, unidentified
MNNVAGIDVSKGKSMVSVLRPFGEVVAKPFSVGHTGSELKELADYLKSLDGETRVVMEHTGRYYEPVARFLHDEGVFVSAVNPKLIKDYGNNTLRKVKTDKADSRKIARYGIDNWAELRQHTPMDTIRMQLKTLNRQQSLYTKTKTMMKNNLIALLDQTYPGVNALFDSPVREDGSQKWVDFATTFWHVDCVRNMSLTAFAERYRKWCKRHGYNFSQSKAVEVHAGAQDLIAMLPRDALTKTMVRQAIDALNAISASMERLKAEMQALAAQLPEYPVVMAMHGVGDSLGPQLVAELGDVTRFTHRNAITAFAGVDPGADQSGTHEAKSTRVSKSGAPELRRALFLVMDCLLKTQPQDDPVYRFMDKKRAEGKPYLVYMTAGANKFLRIYYGRVKEYLASLEGN

SEQ ID NO: 128019 - protein, 375 aa, unidentified
MSDHSEAFIGLDTSKLRNAVALAEGVRGGEVRFLGEIENSAAATAKLVKKVAAKYRQLTFCYEAGPTGYGLYRQIKHLGAECIVVAPSLIPKKPGDRVKTNRRDALSLAKLLRAGELTAVWVPDRGHEAMRDLTRARETAMMDLRSKRQQVSAFLLRQGLHYSERKKTWTKAHLNWLASQTLEYAEQRLVFEEMMLAVRQAQERLERLEQAIRVAVPDWSLAEMVTALMAMRGIDLISAATFLAEIGDLSRFQHPSELMGYLGLVPSEGSTGDKIKRGSITKTGNRRARRMLVECAWSYQHPPRVGQEKQEKVAAAPRAVREIAWKAQCRLYGRYRALVRRGKLKTVAITAVARELAGFIWAVSRAITTARAMAK

SEQ ID NO: 128020 - protein, 344 aa, unidentified
MNHFGGLDVSVKETSICIVDDTGRIVREVKVRSEPEALLEVLGNLAYRFKRIGLEAGPLSQWLFSTLAEAGLPVVCVETRHMRAVLKAQINKTDRNDARGIAQMMRVGLYRPVHVKTLRSQKLRMLLTHRKLLQSKAIAIDNDLRGTLRNFGLKVGMVGTARFEARIRELVENLPDLVALIEPLLIVRRTLREQIVILHRRLLAIVRDDEVCRRLMTIPGVGPVVSLTYRATVDVPARFRKSKSVGAVFGLTSARYQSGEVDWSGEISRCGDEMMRTMLYEAAQSMMHSKKWSWLKAWAIQIARRRGMKKAIVALARRLAVIMHRIWVDGTEFRWTREQAAAAA

SEQ ID NO: 128021 - protein, 415 aa, unidentified
MSPSYILGVDIAKRNIRFHLADAQGTRRASGSAPTTAAGLTALLAHLTPLGAPATVLIVMETTGLFHVPWAEALAARGYPVYAVNALLAHRIQPVSNALRENKTDKLDAAGLTELARHYAPQLERFRYHSDPSRFGLQRLQALRQQVRTQLTNLRKAYVSLLDVIFPELGALLNKKLHHHRVRALLAQAPTPAALQRRDMAELRRAFGSQTDAVLAAAGDSLAPATLASASATALQGMLSALTELETQLARLDLQLQAHAVTVVSATQLHRLRSVPGIGEKTAMTLIAHLPARFWQPEYWQQQPSRRRAVRQLLAYMGAEPRVRESGQWRGQARMSKRGCEPLRTALFQASFCGQKRDPELATIYARQKARGKKHKVCISHLMRRQTERLIWVLQTNQEWPPASPPEVPAHASAA

SEQ ID NO: 128022 - protein, 330 aa, unidentified
MTSMGQEKMINDIARSADQITIGIDISKDRLDVYAHPERAVAQFNNDRKGHAKLIIWINLRRPTRIIFEATGAYHRALEMALGKAALPAVKVNPLQARRFAEATGKRVKTDPVDAAMLARFGYTMQPDIPAARDETIDKLGELLAARRALVKDRTAALNRAKTLTLALLKRQSQQHLTQIQTQIEAIDRERATILAANDRLSARSDILVSIPGFGAATAVALLIDMPELGSMDGKQAGSLAGLAPVTRQSGNWKGKSFIQGGRATLRQAIYMPALVAIRFNPPLKAKYMALRAAGKPAKVAIVAIMRKLIIMANALLRDNRMWTAEPVHA

SEQ ID NO: 128023 - protein, 354 aa, unidentified
MNTTQNSTKSKIVKVIGVDLAKDHCDVIGYDENGKICLRLDGCSYAKLREILSNLPQAVVLMEACKGSMFHARSIADLGHEVRLVKGADVKALRNVNHKNDLRDAAYIAKLYFVPGTTYVYIKSQQQQSLQFLQNEYKSLQELRIQAGNQIHAGLEEFGCPVRKSSKFIKTRMVAHLEKHAELIPEDVMASFKCRREIWLNLLQQEEEAKRRLEQVAATDANAKRIMTVPCVGPQTAVGLLVHVGVDFGRFKNSRQFAASLGLVPKQNSTGGNNTLNHITKCGPKRLRSNLVQCAQLVLMYAEKWKGNFGDWVRKMRDSGKKHGVIVCAIAAKLARIIYRLMKDKVDYTSVLSC

SEQ ID NO: 128024 - protein, 367 aa, unidentified
MKKHTTKSNSLSSADVSACSTVAIDLAKNVFQVAGEDALGQIIYEARIKSREAFLVLLQKLPAGVTVLMETGPGAQAWARLLQAQGKLARILPAQRVAEHRSGAKNDRNDVLAILRAGRDQNIAAVPIKSTAQLAMQALHRARQGYVRRHTAMGNQMRGLLLEHGIAMAQGATTLGRNVLRILEDATQPLPELLRELIAEMLGEWSHLGERIEVLTGRLETAAREDETAKRLMTVRGIGPIIATALLAKQTEPERFANARMFAAYFGTVPEQHSSGQTVRLGTMCKRGDAYLRSLAIQGAHAVLRQVRPDSEHPDDHRLRRWLSRHGQKGAAVRLANRNLRIVWVLLQNDQTYRRQPAGCQEATMNH

SEQ ID NO: 128025 - protein, 401 aa, unidentified
MKRLSGGIDIGCESHHILILDEEDNVLYNQKVAHKLNEFAETIKLFKQIERKEGGKISFALEGKNGYSAPLDRILLTQGFTLYNVDNLKLKRFRQAFAGEWRDDQRDALMLSKMLKLKDHINSQREKVFIKIEKSFPVTESLKLLSRHQQTLINEKVRLTNRLRKKLLEVCPQILELGKVKNKKIIAVLAKYPHFSKYKRITLKSLLKIKGIGERRAPFLLKRLNNIEYMPGLTDIYKTIILSYAQRILQLHREIKDIDKSLDEIGEKNKEVNHLKTIPGIATKLASRFIGEIGDINRFPSGKQLAIYCGIACVNDDSGKVTKAKAVYKANKICKQTLITMAGCSIRSIHQCKAYYLKKRTEGKSHNHTLRCLARQMIKVIYKMLTEDRDYIVRKELKKVA

SEQ ID NO: 128026 - protein, 421 aa, unidentified
MKQADTGKVKAVKDDALIVAVDIGMEMNRGYCTTPDGRSTKTFKFENTREGLDTLWEMIMASKSRFNCNEVIVGYESTGPYGEPMLHYLMKKPVRIVQVNPMHTKRVKEINDNSPLKTDEKDPRVIADIIRWGHALSIVIPEGDAAYLRRLNNSRERHVRERTALVNQLQQLVFLWFPEFMTVMKDIKCKTPLYLLKRYPTPETISVLDKQLLGEEMRKRSMGKFREHHADMLINLAKNTIGIREGVSGLSMDIRHILVQLEMLKNLITEIESEMEIALGKIPYSSKLLSIKGLGVVSVAGIIGEIGDFKKFKTRSEIMKLAGLDLFEISSGKKKGQRRISKRGRSLLRKILYYAAIQTIRKNGILHDYYTRLTDRGMKRMMALVAVSRKLLGILYAIVRDDSEYSANFESMKRQVIKKAA

SEQ ID NO: 128027 - protein, 347 aa, unidentified
MPFAGVDAHKRYSRVVVKDETGSLLCRASLQNDVASFREFFNAIDGPTKAVLEAGRDWGVIYDLLEGIGVEPVLANPVKTRAIAEARIKTDTVDATILADLLRADLIPVVHVPSREVRTQKNLLRQRLWLVELQTRIKNRIHNIIDRNHVKPPPVADLFGRAGRRFLDQLRLPVPDDRLLKAHLELLDLVQSQISRSEEWIDEALSQRPEVAIMRTLPGVGKILSAVLALEIDDVHRFSHAGKLCAYAGLVPTTYASGGKVRHGRLLPNCNRWLRWAFVEAAWAAQRRSAYCHAYFERIKRRKGPHCAISALARRLCEITWHCLTDSRAHEERAMMPIKGRTGPAAF

SEQ ID NO: 128028 - protein, 290 aa, unidentified
MDYYAGLDVSLEETSVCVVDGDGAVVHEAKVATEVEAIAETLRRFAGSLARVGLEAGPLSPWLHGGLHGVGFAVICIETRHLKASLWAMRNKTDRNDARGIAQMMCLGWVRMVHVKSPESHALRLLLTNRKTLQRKALDIQNEIRGTLKAFGLKVGKVSRRSFEKKVCELIGDQPWLGEMVRPMLTARAVLLDQFTRLHRMMLDAVRRDEVCRRFMTIQGVGPVTALTYKTGVDVPQRFAKSKNVGAHFGLTPRRFSSGEIDYQGRISKCGDAMVRTALYEAANVVLTRT

SEQ ID NO: 128029 - protein, 355 aa, unidentified
MSQEKYIGMDVHQATISAAVMDVEGKLLMECVLETKASTIVGFIEGLRGSLYLTFEEGTSAAWLHDLLQPHVSRLVVCDPRKAALLKDGNKSDRIDARKLAELLRTNQLKAVYHGEHGMRSLKELGRSYLTITQDTTRVMNRIKALYRSWAIPCSGTTVYAARHRQAWLAKIVEPGVRVRAQHLYQQLDSLQPLRLEARRQLLRESHKHAAVKLLRQIPSIGPIRAALLVALLQTPHRFRTKRQLWAYSGFAVETHDSGEYRYVRGKLQRNRERITVRGLNNNHNKDLKSLFKSAAISASTRPGPLRDFYTARVESGMRPTMARLTLARKIASITLTLWKKGASFDPEQLQRQAA

SEQ ID NO: 128030 - protein, 453 aa, unidentified
MSKTIPSNTQNLRRMNPRAAAIDIGATMHMAAVNPDADDMPIRAFGTFTHDLNNLAHWFKSCGVTSVAMESTGVYWIPAYEILEQHGFEVILVNARYAKNVPGRKTDVSDAAWLRQLHSYGLLRGSFRPNAQIATLRAYLRQRERLVEYAAAHIQHMQKALMEMNLQLHHVVSDITGVTGMRIIRAIVAGERDPDVLASLRDIRCHSSVETIRASLVGNDRDEHIFALSQSLDLYDFYQQKMLECDHKLEQAIATMTRNVEKPQSPLPKIRIRTKQPNTPSFDVRAALYGLVGTDLTQIHGFGASLALKLIGECGTDLRAWPTAKHFTSWLCLAPGNKISGGRLLSSRTRRSSSRAAALLRLAATTIGRSDTALGAFYRRLAGRIGKQKAVTATARKIAVLFFNALRFGMAYRDPGAEAYDERHRGRVLASLQRRARALGYQLDPIPDAESVS

SEQ ID NO: 128031 - protein, 366 aa, unidentified
MSLPRPVRVNGNMIFKGHKLTIGMDLGDRSSNYCVLDEAGEILLEQKLATTPEAMKQTFEKIPRSLIAMETGTHSPWVSRLLKELGHEVLVAHAQKVNLITKSTRKDDRHDARTLARLARIDPELLGPVRHRSAKAQIHLTVIRARAELVRARTALVNAARGLVKSYGERLPKCGTEQVSRELAAELSAELREVLEPLLKEIESLNERIKEYDARMEKIARESYPQVALLKQVKGVGTQIALTYVLTLDDAHRFAKSREVGCFLGLKPGRRDSGQSQPQMHISKEGDRYLRTMMVQGAHYILGPFGEDSDLRRWGLRLAERGGKNGKKRAVVAVARKLAVLLHRLWVSGEVYEPLRNSHKAMRAAA

SEQ ID NO: 128032 - protein, 345 aa, unidentified
MVQQATNTDYQLFVGIDVAATSATGAWMTATGQPTRASTITQTPAGAADLQRRLRATGHAPATILVVMEATGTYWMALATPLAHAGFAVAVINPAQAHAFAKALLKRSKTAAIDAQTLAELAARLQPARWSPPPAVFTELQQRLVHREALLDARTQFRNQRHARIQQPVVVALVRERLYFLNATLTTEIAAVEQEIADALQQDETWAAAAQRLQSIKGIGMLTAAWLLTTTVKFTLCATPEAAANYAGLALQLRQSGTSVRGRPAIGHGGNARLRRALYLAVLSGVRYNPILKAFYQRLITKGKPPKVALCAAARKLVRIAWAVVIKDQDFDPAYAERPQAQQRG

SEQ ID NO: 128033 - protein, 460 aa, unidentified
MRWSTTNTQWQTALSRSHYKPFARASQRVFLKSMPHQNITELDTEYAAFIAIDWADEKHAFALQCSAAAKKETGTLEQKPELIGAWVAQLRERFGGRLIAVGVEQSRGALIHALLAYDFLVIYPIHPTTVSKFREAFKFSGAKSDPLDTQQILEILTKHLALLKPLKPDTQETRLLGRLVEDRRKTVDLRTGHIQALLASLKEYFPQAIAVLNDNVSSRLAADFLKKWPTFEQFQQAKPITIKRFFYGHNVRSPEAIQHALAVAEQSKPLTTDEAIVESGSRLSLMHAQAIQTFNGFIAQYEQRIEKVFQDHPEAKLFTGIPGAGPAMAPRLLAFWGTDRSRYEEARNAQQLTGIAPVTKRSGKMCVVLFRQACPHFLRQTFHEFARLSVIKSQWARNYVDYYTEKGKSYHAIIRALAFKWIRILFRCWQNRTPYDEAIYMRALLKRGSIFATFHLKEKP

SEQ ID NO: 128034 - protein, 341 aa, unidentified
MWIIGCDYHPSMQQIAWVDTETGECGERQLAHCAEAEQFYRELKQKGVSVRVGMEATGHSRWFERLLAELNFELWGGDPAQIRAKQVRKQKNDRRDAAHILKLMLEDNFPHVWVPTAENRDLRQLVWHRHRLVGMRTRVMNQLQAIAMNEGVRRKRGLWSQQGRAQLESLSLPAWTSRRRQELLELLDQFDPSIDQLSEAIEQEAERWPEGQRLMTHPGVGPITALAYVLVLGSPDRFRCGKQVGSYLGLIPCEDSSAERWRMGHISKQGNALLRYLLGQAAQSVARCDELWRHQYAHLALRRNRAIAKVAMARKLAVRLFWMWRRGWDYQQLKKFGSHVG

SEQ ID NO: 128035 - protein, 353 aa, unidentified
MDSTKYIGMDVHKETISVAVLNSPGKLVMECVLETKASTVVQSVQGLRGDLHVTLEEGTWAAWLYDLLRPQVTKVLVCDPRKNALLKAGNKNDHIDARKLAELLRSNLLRPVYHGEHGVRNLKELSRSYLTISGDVARVMTRLKAVYRSWAIPCAGKQVYAPRYRAEWLGKITEAGVRRRAEFYYQQLDALRSLRQQVRRELLTESGKHNASKLLRQIPSIGPIRAALLIAILQTPHRFRTKRQLWTYSGFGIQTHSSADHRYVDGQLQRSKKEISLRGLNHNHNLKNIFKGAATIAAAKAGPFQEFYAALVAKGMRPEMARLTLARKIAAITLLVWKKGVCFDAKHLKPQTA

SEQ ID NO: 128036 - protein, 345 aa, unidentified
MPIVGGLDIHRKQITFDYLDTATGEVRRGQIAPADRAHLRAWLARFAGRDDVAFALEGCTGWRYVAEELAAAGVTAHVAEPADTAFARGRKRHAKTDKTDSRHLRVLLEQGRLPECWIPPAQILECRALLEAYHDLRREHTAWIERIHAVFFHQGAPRLGEGALRTEHGLAALRQAAAIHLSPAGQLQVATALDMLAAVEARMDTLRQQLLHAARHLAGARALQARLYGVGPLAGLAMTCWLGGAGRFSSSRKAVRFAGLDVTVYSSDGRRSPGHLSRQGPEILRWVAYEAGKTHGRAAAPGHDYYAAVKDRTDGKIAALAQARKLIRQACHILAELGDDALTAA

SEQ ID NO: 128037 - protein, 401 aa, unidentified
MKYVLAIDVAKNKSMASLIDECGVVCIEPYEFNHTLSDFKNLNERIGEFAIFEADLTVFMESTSTYHYPVKRFFMEQTFYDVRVINPLHSAMHKRNLRKTKTDKQDCFNLADLFFSGKVKNYNDHEQYYLNLNVLARQYDFLMQGMVRLKNRFRMLVNLCFPEYEVIFKGPLIFSETALSFIEKYPHPDIISSTRIDALANFMANLNGRHENYYLKKANLIKDNAKVSFPSVAKDDDVVTNLISTTRILKYQINEIEDLKGRLINQAKESYLFIKINSIFGLGEFTTALIIAELKDVTRFKNIKELTAYCGLDPSIRQSGSSVNGKGHISKTGNSYIRRILFNAICNIIMLATRSDKDNDILLYYRKKRSEGKHHYVAVISCTTKLLRKIFAICKEINQNM

SEQ ID NO: 128038 - protein, 392 aa, unidentified
MAWVRHMVNGSVRREVRSFKTTTKELLALSDWLAGEGCTHVAMEATGVYWKPVWHVLSDGDFTLVLANAAHVKNVPGRKTDVNDATWLADLLAHGLIRSSFVPDEQTQEMRTLLRTRKQLVRECSRHVQRLQKTLEDANIKLDSVISDIVGLSGRRMIEALIAGETEPGVLAAMAHRRIKATPDELEAALRGRVTRHHRFLLQLHLQQIDAVNAAIDQIDQEVDAYVEPFRATVRLLTTIPGIDELSACVILAEIGRDMSRFPTAGHLISWAGLCPKNDESAGKRRSTRMRKGAPWLKTTLLQCAAAAARKKASYLQAQFHRLRARRGAKKALGALAASILTSVYHMLISGELYRDLGPHHFDQRAKAVNTRRLVTRLQNLGYAVQITPLAA

SEQ ID NO: 128039 - protein, 341 aa, unidentified
MDKELYFGVDVSKKTLDLAYYDGETIDWKNAHIQVSNDDAGFKKIGSWVAKVGKDFDTFLFCMEYTGLYNQNFRLWLESKEYIYGMVEPRKMHHFEPDLDDDQRSLDRIKTDELDAFRIAIYCEQNHKKIFRNPSKLPSPVYFKLKRLLAERKQNTKQSTLYKQQLHDICAYDTDLSVERKKLLLKNMQENQKAIDKEIDSYMNEDASISKNYDLLTSIPGIGRIIALETIVLTENFTAISNPRKYACYIGIAPFKKESGTSVRKRTTVSKKGFSEAKADLSIAVLSAIRNNPSIRDYWIRKRKEKCGGIVLNAVKFKLVLRMFAVIKRGTPYVETDAYKN

SEQ ID NO: 128040 - protein, 378 aa, unidentified
MDRATNSTAPADRLFCALELSKNSWLLGIQFPDHQKASVYPIKGGDSEGLMAKLVAARDRWAKVSGKKPSIILCYEAGYDAFWLARFLKGHGIDCLVVDSASMQVNRRSRRAKTDRIDLGKLLRALIAWCGGERHVWSVVRIPSVDEEDLRRSHRERSRLITERTAHINRIKGLLFAQGIRGINVKARYKTLQIDKLVTGEGRPLPPRLAQEITREIERLGLVQQQIAAIEHERDESPTTCKQTEKKRAQLLLLKGIGPTGSAVMAREVYYRQFSNRRQVAGFLGLATSPYDSGQTERSQGISRAGSGPVRATMIQMAWLWIKHQPKSAIAQWFVQRTEGQNGRIKRIMIVAVARKLAIALWRYLEQGLVPQGATLTR

SEQ ID NO: 128041 - protein, 371 aa, unidentified
MKGFCISLDVSKGSSFYQWFKGFDEPITKSKKIEHNLEGFKELLKLKETIRKEYNEDYVVVFESTGIYHRSLQTYLDEHNFKYTIINQLLSTKVRKSDIRGTKTDAKDCAFIAKGFFLKELRIYSKIDEIYDDLKEKSRYYDFLMDEMKRWKIEFRRLLDIIYPGFDRVYDDLYGDFIQTFLLEYSHPEIIRKRRLDTIAKFLEKHTCHKEAYCIRQVQTLKEYVENCASGCSSKSYLVRQFDTVIHNLNAQIKHLEIVLEEIVELAKTLPNYDSIRSIPGIGNNLAGRILAEIGEVNRFNNASQLVAYAGIDPQIYQSGQISGLHLKISKKGNKKLRCLLYLAVTCMIKTSRNTVIVDFYKKEKGRWISV

SEQ ID NO: 128042 - protein, 344 aa, unidentified
MSIVGVIGGVDTHADVHVAAAVDHNGGLLGVESFPADQAGYESLVGWVAGFGPISRIGVEGTGSWGVGLARFLGDQDIEVIEVDRPNRQTRRKEGKSDPIDAVSAARAALSGEASVTPKGRNGPVEQIRVLMVARRSARQQRIQSLNQLRHLVFTAPEEIRVRFKDRYKTGLVSEAANMRPRKGSDPVTYTTNLVIRNLARRVKRLNHEMGEIDRMLTDLIAQTAPSLLELYGVGTDTAASLLVAAGDNPDRLRSEGSWARLCGVAPLPANSGKVTARYRLNRGGDRQANAALYRIVLTRMSSHQETRSYVARRRNEGLNTAEIMRCLKRYVARQTFKHLPQTA

SEQ ID NO: 128043 - protein, 408 aa, unidentified
MSEQPQPAVFVGLDVGKSDHHAVAVTSAGKTIYDKALPNDETRLRAILEELAATHGPVLMIVDQPATIGALPVAVAEATNGVQVAYLPGLAMRRIADLHPGTAKTDARDALIIAEAARTMPHTLRDIRVDEAQIAELAVLAGFDDDLAAQITATSNRLRGMLTQIHPALERVLGPRVTHPAVADLLSRYPTPAKLAAAGRGHVRARLKKHAPRLAESLAEEVFDALGQQSVVVAGTEAATTVVPILAGQLAALSHQRATVAAQVEALVEAHPLCPVLTSMPGIGVRTAARILTEVVGKDFADAGHLASYAGIAPVTRRSGTSIRGEHAPRGGNKRLKRALFLSAFASLNHAPSRAYYDRKRAQGKRHNQAIIALARRRTDVLFAMLRDGTLYQDPTEPQTPSPVALAA

SEQ ID NO: 128044 - protein, 844 aa, unidentified
MNIIGIDVSQGESHATLITEEAEKITFKFKHNKSGFQILSSYIKFNTIIIFETTGVYSAQLTTYLKRKKVKFYELNPLEAKLRIASLRRNKTDKNDSFKLALLGKTQLAEIKNHCNKQSSSPYESLRILSLRYKQLIKCRTRILNFLRSSLELAFPELNQIFKNAYAVLALQIFRMYCHPDFLVGLTLKEMTDRVYKSVSRRIHKNAIQNYCAQVWLAAKDSYPAVPADSLEIEIISEYCDEIESYNKKIACIQSKLIKTAVSLNNFKVISSIPGAGQLNSALLLGFTGDLARFDNYKQLNAFLGLDLNRYQSGKYIKGDTINRRGSSQGRAVETDMIRSMLRNQGKIKNHLIDYYYKLKKPPFNDMNPEIRTRISRFLFMSKLSKQDKIDIYNNWKNYNISANQAAKEYGANRANLFYLITLIERHGIEILDTGYTNYSVEFKEKAIRRVLFNHEAANQVSLELGLSSRGMIYNWIRKYKEDGYNVINHKKGRPAHEGQRQTDSRASKANKGPQTEELKTYCRERICKKIERLSLTKNQRPTAQEIVSVVTQLRQELHVTVSFVLDTINSNPDLPHLSRSSYCYTLGKDDKDLKNEKIMKRIKEIFEEHKHRYGYRRIAAQLRREGTIVNHKRVKRLMVKMHLYAITIRRRFKYSSYKGTIGKIKSNLIKRHFAAIIPDRHWYSDITEFHLNGEKLYLSPVMDGCSQEIVAYTLSRHPVLKQAMDMLDQACQKHPALNGLIFHTDQGWQYQHAAFQAWLKNHGVSQSMSRKGNSLDDGLMEGFFGILKREMFYGFEKTFKTMNELEQAIKEYIHYCNHDRIKTVLKNHTPIEYRNMVLNKAVQ

SEQ ID NO: 128045 - protein, 379 aa, unidentified
MTCKECGQVVKLTRTMNKCHSNTELSSHEETRCQFNGGTGAIKLGIDVHQDFYVVVEQAGGSNPKPPQRFPKAAFLHWAAKLKSQATEVYAVYEACGFGFSLQRKLSALSIKCYVVCPQKLDEQNRRVKTDGLDAKALCLKLDRFVQGNRDALAIVRVPSEEEEQARAIHRQREQLVKARKQLEAQGRSLMVNHGLEPVPNWWKPRTFTALPAPQWMKELLANSQPILVGLQQKIAALTVQLQSAASPEQPRGLGKMTSVVIDREIGDWNRFSNRRQIASYTGLCPGEYSSGNTRLQSCVTKHGNPRLRAALVELAWRLVRFQPNYHPLRKWRQILAKGALATGAARKKAIVAVARQLAVDLWRIKTGQLRSEELGLIN

SEQ ID NO: 128046 - protein, 413 aa, unidentified
MEGLSPLYRRVAGIDVHKMLHVVTAAIEHPDGTIEQQSREFGGFKRDCRALTTWLLELNVELVVMESTGIYWKSIYAHLERAGIQAWVVNAHFVKHVPGRKTDMNDSQWLAVLARFGLVRGSFIPPQDLRELRLVSRYRRKLTAMRASEINRLHKILDDGGIKLGGVVSDINGLSARAMVAGLIEGKSITALLDMARGRLKLRRDDLQAALDGDLTARHRFVLEHIHEHIEILEHSLAELDAYILAAMAPYQWAHRLLQTIPGIDQIASALILIEIGDDMARFGSADRIAAWAALCPGNNESAGKRKSARIGKGSSVIRYIMCECANSAWKTKSSLAAKYKSLMVRKTHKTAIIALAHKMIRLIFLLLTRKVAYHDPQIDYEAISAKKNAPRWIKQLKVIGQWPNNTSTSGTT

SEQ ID NO: 128047 - protein, 366 aa, unidentified
MGKGITVVGLDAHKVAINVCVLLPGGAAPVMLECPNEKTAVRRMVRKLERQAPGELRMCYEAGPCGYALQRWIKDAGAGCVVVAPSLIPRKPGDRIKTDWRDARKLAELYRAGLLAEVHPPTEQDEAIRDLCRAREDAHEDMVRARHRVSKFVLRRGWTWHGGKRAWSQGHRLWLRSLRFEHREDQVVLDDYLLALEQVEARLRALDDQIEQVSREERFAPVVGRLRAFRGIDTLTAMTLIAELHDFMRFDSARGLMAFLGLVPSEHSSGGKEQRGQITKAGNGHVRRLLIEAAWHYRHRPSVASLKKRREGVPAEVVALADKAMTRLHRRFNRFLERGKARPKVVVAIARELTGFVWAAMRSGAA

SEQ ID NO: 128048 - protein, 350 aa, unidentified
MKKFIIGIDFSKETVDASIVQKEQPETLMAYKKFRNNLKGVDGLIAWAKSKVAQDGEIIFCGENTGTYSTLFSDELTDRGFIIWIEHSMNIVRGMGDVRGKDDKTDSLRIASYAARFYDKMKPYVRPKDETRVLKTLLAKRDRLKSFLKAEITNTKENPLMLQDSNIASSINEFFKRLEESLRKELKELERMILDVVMSSSEYAKNFNILTSMKGIGLINAVALIVYTDNFTKFNFNHRKIATYWGVVPFKNESGTSVRRGTHVSPKCNSWLKALLTEATLCAIRYNSRIKAYHDRLMARGKAIGIVLNNCKNKMLKILVAMVRDSKIYSDMDVSKDPHTTTTTSSIVVC

SEQ ID NO: 128049 - protein, 404 aa, unidentified
MELTAIYRCVAALDVHQSKLTVCILYENESGEIITELKEFGGFKRDRRAMADWVASFQPELVVMESTGIYWKSPYAALEKQGLTIWVVNARHVKQVPGRKTDFADAQWLAILARNGLLRGGFVPPAVFRELRLIARQMQKLTGILSGEKNRLHKILSDGGIRLGVVVSDIHGKSAKAMIKGLLAGESPEQVLKYASNRLKASEEELLDALAGDLSPSHQFVLTELMAHIDELEARIETFRQALLQGLAPYQAILRSLQTIPGLDEAGAALLLVEIGDDMSAFGTPERLASWAGVCPGNNESAGKKKTGKTRKGNPYVRRILCEASNAASRTQCRLQDMFKGLLIRRGRKRAIFALAHKILKIVFLLIERGDYYRDATVDYEKLSVQRNAPRWIKTLKKYGYIAA

SEQ ID NO: 128050 - protein, 426 aa, unidentified
MNYTQNERIAQVGDNTLVVGIDIGSDKHYARAFTERGMEISRKAFVFENTESGFGLLDAWMEKLAGENGKAKIMVGFEPTGHYWFPLGRHLEERGTAFVVVAPQHVKHSKELDDNTQRKDDRKDPRVIAKLVMEGRYSIAYMPEGKFAELRIMYNRRCELVEQQTRVMNRITRWFDIYFPEYRTVYGKVGAISGMMVMKRAPLPKDILELGAEGVNAIWRDAKLKGAGMKRAQTLVAAAEHSIGLDGGYASRLDLWQLLEEYELVASQLAKVMEAIEELLAEIPEAGRIMEIKGVGVVITAGLLAEIGDIKRFNSPKQIQKLAGLAIVENSSGKHKGRSGISRRGRKRLRKVLFLAAMALVGHNDEFRQLHQYYTTRKDNPLKKMQSLMALAAKLIRVVFGIIRTGKSYDPTKMLNDIRRVEHAAA

SEQ ID NO: 128051 - protein, 350 aa, unidentified
MRKYYIGLDVHCAFIEAAVVSAQGKLVERRRCETTIAALWNILNDVGGELHVALEEGPLADWLWRNLHERVKRMVVCEPRRNHLIAKESDKDDAIDAEKLANLLRGDFVKAVHHPESLERTLLKQQLMLYHDRVRGRVREANRLMALFRRHGVFIKEKDLGVTKRKGLLASLPASLREAVSGLWDGYELIGAQEHALRGQLHRTAKHDELLRRWLKVPGIGPVRAVTLLAFLDTPHRFRSKEALWRYLGIGLERWHSGNGPMRVRVGQRCNRMLRETILGAAKSAMMAEKNPFFEQYRRWSQAGISFKNARRNVARSQASVLWGMWKNGSDYDPSRVGVPAAERKQPVSV

SEQ ID NO: 128052 - protein, 348 aa, unidentified
MGKFVGIDISKAKCRAAIMDAGGIILEEFMFSNNHEGIEGLAARLTMHDRVVMESTGSVWTNLYNHLDERHIPVALANPLKTKAIASARIKSDKVDARILAHLLRSNLIAESYVPPKHLREIRALVRHRAGIVKIRTMVKNEIHALIDKHGFKHEFSDLFGKGGLEWLRSLELPSLDRLILDNHLTHLQSLNQQTERVDKEIHDKAVEDEDVRLLLSMTGIDVYSALLIRSEIGSIERFPHYKKLVSWAGIAPSLHQSGSVEYHGSITKQGSRTLRWIIVEAARVAVNHDERMRVYYERVKHRRGDQKAIIAVANKMLKIIWFMLTRREPYESRNEKRYRQKLNSIAS

SEQ ID NO: 128053 - protein, 363 aa, unidentified
MTSVSDVVYVGLDVHKDTISVAVLGDGDQVPRVDRISSDEAAVRQLFGRFDDPTRLRACYEAGPTGYELFRLLESLRVRCQVIAPSLIPTAPGDKVKTDKRDCARLARLHRAGELTAIRVPTVAEEGVRDLCRARADMVIDGTRAKHRLGKFLLRHGRVWRDGANWTQKHRDWIAGQHFDDAATQITFTHYRATLAAREAAISSIEADLTRYFTAAPFADAVARLAAYRGVTELGGLTLACEVCDWRRFPSAGSFMAFCGLVPSEYSSGQRTLRGHITHAGNLHLRTQLVESAWAYKSRPAAGVLIRRRQQGLSPDVVARAWTAQQRLCGRFRRLDARKSSRHVVVTAIARELSGFVWAEMTH

SEQ ID NO: 128054 - protein, 461 aa, unidentified
MKSIYRRCCGIDVHKKSLSICVLPPEGQQGTVKRETFRTFLRDLKRLRAWLKSCKVTDVAMESTGQYWRPVWNVLEGHVEHLVLLNPAHVKGLAGRKTDRRDAEWLARLHEREHLRGSFIPPAELREMRELTRTRVHLLEDCNRMKNRIAQVCEAANIKISSVASDLFGTSGRRMLAALIEGRHSAGYIADYARTALRRKRSQLELALEDTLSQHQRELLKRLIRQLNGQEAEVADLTRQIELRAGQWKEAIERMVQIPGIECVSAWTILAEIGTDMSVFPDARHLASWAAVCPGSRESGGKRMSGKTRKGNVYLRRILCQAAWAATRKKGSYLGAFYRRIRARRGHQKAIMALAHHMLTVIYHMLRDGQPYSEPGASYYEQKRKPEITKRMVRRLEGLGYHVTLELRLTPEEIRELEPATPPQPVISSFQRRRGRPCKCDERGIPCAHRGARPPSAGINS

SEQ ID NO: 128055 - protein, 340 aa, unidentified
MKLYAGIDLHASNNFIAVIDADGKRMFKKKLPNEAELILSTLGSFREELAGVVVESTFNWYWLVDVLGEAGYRMHLANPSAIQKYSGLKHSDDKHDAFWLAEMLRLAILPEGYIYPKEERPIRDLLRKRGHLVRLRTSLILSLQNIVARNCCIRLSANDAKRLRKDVVNPLLESNEDLAMAGMVSKESIDFFTREIRKVETMVEQRVKLKDQYRYLLTVPGIGKILALTIMLETGPISRFPKVGDYVSYCRKVSSKWTSNDKTKGKGNKKNGNKHLAWAFSEAAEFARRNDTQCRGYYNRKMQKTNFMVAHQALAHKLARAAYCIIKEEVPFMPEKVFAY

SEQ ID NO: 128056 - protein, 327 aa, unidentified
MQYVGFDAHKKYTFFTQMDDNGVIQRQGKLANDRDALSTFFAELEEPARVVIEATMNWYHLYDLLESLEIPVTLAHPLRTRAIAEAKVKTDKVDSTILAHLLRTDLVPAAYIPPREIRDLRELLRYRAALVKLQTMVKNRVHAILLKHGYHCPYTDAFGIQGRVWLGTLALRPVYQQALQGLLVVLDTLHAQIQDASRTVDQQAKTTPLAQKLCTLPGVGHYTALLVLAEIGDVQRFPDPKHLVSYAGLAPRVHQSGGRVYTGHISKQGSSWLRWILIEAAMHAGHQSGRYQQLYERIARRKGKKLARVVVARELLTRIYWTLRHVH

SEQ ID NO: 128057 - protein, 392 aa, unidentified
MYYIGIDIAKNSHEVCFLDAEGNILDGNSFNIRNNGSGFARLEQMLSRYHLSGDNALVGMEATGHYWLVLYSWFLEKGFEVKVINPLVTDGYRHMQVRKAKTDRIDAEIVAKVLRLGEYQETSVLDEDILGIRQLCRYRLWLVSSCSDLKRKIIALLDQVFPEYSHLFSNVFGMASKELLKVYATPEEMLSVSTRKLSKLLEKTSRGHFGKPKAMEIKTLASQSVGIHLAQDAFAFQIRQMLEQLDFVETQIQDLEQEIQVYMDKLDSPVTSVPGVGPVYGAVILSEIGDIHRFPSGKQLVSYSGIDASVHESGEFQAGQTHISKRGSPYLRRAIWGAAFIASHSDPELTAYYQRLRARGKHHSVAVGAVARKLCYILYSVLSENRPFEVRA

SEQ ID NO: 128058 - protein, 407 aa, unidentified
MEVIIERACGMDVHKDSITACIITPKGKEIETFSTKTVFLLQLIDWIKEHGCTHVAMESTGVFWKPIVNLLEAESIEFLVVNAQHMKAVPGRKTDVKDAEWIAKLLRHGLLKASFIPDRNQRELRELVRYRRSIIEERARQHNRIQKVLEGANIKLGSVVSDIMGVSSLDMLRAIADGENDPEKLASFARRSMKKKKSELELALRGYINPHQRLMLKTILVHIEFLTEQIELLNEEVATRLSSHQEDIERLDSIPGIATRMAEQILAEVGTDVEKQFPSSAHLCSWAGLVPGHNESAGKRKSTNMKKGNKYLKSALIEAAHSVRGSKTYLGALYRRTASRKGKKRAGISVAHAILRISYYLLTRKEMYVDLGEDYFDKQKEQSIVRYSVRRLENLGYNVTITEPNAS

SEQ ID NO: 128059 - protein, 385 aa, unidentified
MRNNAFVPSDYDVLSGLDVDKRSISVTFVNQQGHIRSLRMPYSVEHLVNHVRKHFPDQKVAFAYEAGPTGYGLYDGLVAQDYPCLIASPSMILKAPGQRVKTNRLDSVRLAENLRGGLLKSIHVPSPVYRELRHFTQLRDTFVSAMVGMKQRIKSLLLLEGLEFPPAPAGSQWSFLVKNKLRKLPCSSTVRFKLDQLLDSLEFNEKQVVKTTQQMRRFCQNDPELSRCMEYMMSVSGIGRIVASQLLARIGDWRELKNIRQLGGFLGLVPTEHSTGDRTDRGSITQTGDGRLRSKLIQASWSAIRKDPELREFFRSVRQTHARHLASRVAIVAVARKLSVRISVVLMKQRPYVVREKVHSAPLTQEETSPQGTTRREPEPGEPNS

SEQ ID NO: 128060 - protein, 347 aa, unidentified
MLYAGLDLSRQRVDVYLMNEAGEPVQVTAAPPDVDGLRGLARQVAGLGQPVIAAIESMNGARFVHDQLELAGWEVQIADAQKVKGLAPLACKTDRIDAWVLAELCRRELVPAVWLPTPGVRAEWERARFRLHLVRHRTALKNRVHATLLAFGRPCPTADLFGLGGRQLLNRLGLPEPWAGTTIAAVGLIDDLDVQIDACERELRRLGADHPYVPLLLTAPGIAWVLGYTIAAEIGDIGRFASPKKLAGYTGLCPWVYQSGSRDHRGPLAKNGPRYLRWALLEAATHAARHPCYRDHYQATKTRLGRQRGSKVARVEVARKLTEAIWHMLTTQAPFCPARPHAHPLAA

SEQ ID NO: 128061 - protein, 391 aa, unidentified
MIYIGIDVAKDKHDCFITNSDSKVLFKAFTIFNNLDGFNDLYQKIESVMDDVTKVKVGLEATGHYSYNLLGYLIDKGLPTYVINPLHTNLYRKSLSLRQTKTDKVDARTIASMLMSDVNLKSYSDTSYHNEELKSLTRYRFDKVKERAKLKTSVSRLVCILFPELEKLVPTLHMASVYALLSEFPSAKHVATAHLTRLTNLLSESSKGRYGKDTAITFRDSARASIGSNMPAKSLELKHTIKLIQELDSEIDEIENEIKIIMDEINSPILSIPGINYRMGAMIIAEIGDFNRFDSPDKILAYAGFSPSTYQSGQLDGAYAHMEKRGSRYLRYALYNATKYVCHWDPTFAAYLAKKRAEGKHYNVAISHAEKKLVRVIYHLEKTKQQYIKAA

SEQ ID NO: 128062 - protein, 352 aa, unidentified
MVYVAVDIGKRRCVTCIMDQDGSILDTSSYPNTTFDASRYARQVVEKYGECKAVVESTGSVWMKTYEAFESNGVEVKLANPVKTRAIAEARVKTDKLDSKILAHLLRADLIAECYVPSRDVRLSRALLTHRVNITREQTRIKNRIHSLLDKYDLECEYDDIFGVHGMRWLHTLQLNGHDHEILQSLLRQLEFLQDEEQTANSTIAKDALHSQYVPIIMSMTGFDYYGASVLAAYIADISRFPSPSHLVSWVGLCPSVYQTGESLYMGRMKGGSRKVKWIMIQAANTAIRSDHRMRAYYERKLRRHHHNVAVTHVANKMLRIIWHMLRENRLYNERKERLYESKLKRMTHTAQ

SEQ ID NO: 128063 - protein, 437 aa, unidentified
MIQAEIERCAGIDVGKKWLAVGVLVGPLDREPRAETRRYGTNVADLEQLRDWLQQQGITHVVMESTGSYWKPVFNILEETLTVYLANPQQVKPRKGHQTDNRDGHWLAHLLRHAMIQPSCIPPRPIRELRDLTRRRKKLIAAGSSEKNRIQKVLEDANVKLGNVLSDVFGVSGQRMREALLEGHAGPEEIARLAQRRARQKIPALVAALQKHRLSEHHRRMIRFRVEHMELLERQILRLDEEIATQIRQIGLARQWELLQSIPGVREDSAATILAETGADMQAFGDAAHISSWAGVCSGNNRSAGKNKSSPTNKGNPWLRGTLTECAQGAAKTKNCFLKEKFWRITAKHGGKRAAAVMAVAHNLLRLVFQVLSTGQPYQERSAGPLEPRQRERMIRHHIRRLGRLGIAVRGPEPAPRRPRRCTTITTKGIARLPASS

SEQ ID NO: 128064 - protein, 378 aa, unidentified
MRPTSSSFQARLSPASVVVGVDVHKYSHSAVALDAWGQEKGRFEFSNDNLVAYVNWLRSLGSQSDIVIGLEDANCYGVHIAATLGKEGFLMRSVPAILTERERKTSTKRAKSDFIDAKRVGKVILTKYEETLPAKESIAAEDELRTARELDLLLMERRDLVKQKTILKNQLHALLHQYYGDHYADGFTKPFDRKAVSFYMHDLKAPAKAEQGLRRILALGIMRRIRHLLLIEEQIAALSKEVSAVGTRSPAVSALEQELHGCGLMTASAMVAELITIKRFSSEDKLAMYAGVAPREHSSGRHDRLYTNPFGNRILNRALHTVALSQIAVKGDARGKEYYQKKLKEGKTKLWALRCLKRQIVKQVFRVLKQQTAAQAAA

SEQ ID NO: 128065 - protein, 379 aa, unidentified
MGKSIRFVGLDVHGETIAGAVAEEDGSELDFGVIGNRPEVVRRLIKRLGSVEKLRVCYEAGPCGYVLYWQLTGLGVDCQVVAPGLVPQKPGDRVKTDRRDAKKLARMYRAGLLTAVWVPEADDEALRDLVRAREAAKKDELRARHRLGKFLLRRGCRAPQAVKAWTKRHWQWLQGLRLERPAQEVVFIDYLHEVDHAGERLVRLERAIDEAVERVPASKRAVIEGLQALRGVSKVTAVTVYSEVGELSRFARPKLMMGYTGMVSSEHSSASRIRRGAITKTGNAHLRRVLVQAAWAYCRRPNLSTALKKRQAGLSEEIKQISWKAQHRLYGRYRRLVSKGKMPQQAITAVARELVGFIWAIGVHVEGQIRQESQGHAAA

SEQ ID NO: 128066 - protein, 431 aa, unidentified
MSKYLNSLVVGIDVASEFSFVSVLAPNGSQFRKPFKVFHTAVGFNYLIEQIKKAEEEFSTKPVFFMESTGVYHLTLFHFLKDMKFETFVINPLVTNCNKNKNIRKVKNDRNDALSIAQLGKFEDIKVSSDSDIKIFTLKLLVRDYYKLIDTRSGFKKKLSSSLCISFSGYQKVFSNTCGLVSIKILKEYPTPQAVISAPKQDIIDILLNSRKGLKWAEKKYSNLVEASENAQFVSLSSPWLSVPITTSIAIYEAVDTEIATLLTKIKCFIDSDEMSLAFRKNILLLMSIPGIGYNTAITILAEIGGIDKFITPKQLVAFFGVNPAVNESGKFKGDKVKMSKRGTRFGRRALYAAALASIRMKRNGEATNSVLLKYYQENLKGKKAKVALVAVMHKLIKYLFAVLRNQQEYQVRDPKLHQKMFLENQNTQAA

SEQ ID NO: 128067 - protein, 459 aa, unidentified
MARPKHKPRSKTKLPVVHRHAAGIDIGSTFHVVAIPNHCDPQPVRSFKSFTSDLHRLAEWLQNSGITTVAMESTGVYWIPAYEILEQHGFEVLLVNARFVKNVPGRKTDVNDAQWIQRLHEHGLLRGSFRPQEQVVALRSFLRQRERLTQSRARHIQHMQKALMQMNLQLHHVLQDITGVTGMAIIHAILDGEREPESLARFRDCRCKATVETFQSALTGNYRAEHIFALQQAIELYEVFSEKIAACDQEIEVVLSQLNVDQPPPTEELPPRRHKTRSRNEPAFDVRGLLFGLLGVDLTQIHGVGPFLALQLIAECGVDMSRWPSAKHFTSWLTLAPGNKISGGKVLSSKTRRSKNRAAHLFRLAARSVSRTNTALGAFYRRLGVRVGKAKAITATARKLAVLFFHGLRDGVAYLDPGADYYEQNHKSRVLANLKRRAQEMGYQLIEEVVPEPAVVGVS

SEQ ID NO: 128068 - protein, 410 aa, unidentified
MTAVYSVGIDVALRSHRVAVLGGDGEAVGKSFTIESTAGGFATLVETLHARGAVAAQSVIGLEATGHLWENLEAHLTRVGYRVVVLNPVQTRRYRDVLRRKAKTDDIDAYVIAGLLRSGAAAASYVPAETIQSLRELARLRARLMRDRQNYLRQLGAQLSVVFPEHADALGDLLTARARGILRACPTAYHLAAATPRTIHHAAHSAGARGFTREDATRVRDLGRASIYSGKAATARGNVVRTLVTQLERLTAAIEDLDTAMAEELPPPAGGGPPSDAELLHTLPGVGTHTVATLLGELGTLSRFTSSKALVAYVGFYPQLAQSGERAAAPHLVRLGSRLVRRTAYLMAVNAIRGSAEFRTLYLRKKAQGKKPKQALIVVAVKLLHTMYAMVRDRHAYTAGRVLVAPPAGA

SEQ ID NO: 128069 - protein, 371 aa, unidentified
MTQRIRYVGLDVSKETIAIAVAEPDGSVVEYGDIANNPGAVRRLVETLSRDAVVKTAYEAGPTGYPLHRQLTALGVENLVVAPSLIPRRPGDRVKTDQRDAIQLARLLRSGDLTRVWVPDEAHEALRDLVRARDDARTDGLRAKHHLSKFLLRQGVTAPPRVGRAWSAKYHAWLNTVTFRDRAAQITFDDYLACVRAATERIRRLDAALLECSAANPHVELLRALQAVRGIGFLTAVTIVAEAGDLHRFHNAAAFMAYVGLVPSEHSSGGSRRRGHITKTGNRLLRHVLGESAHHARLQPAVSEALRQRQQGVSPDVLEISWRCQQRLHHKYRHLGGRIGRQRTITAVARELAGFVWAIGQAVPPVEVAAA

SEQ ID NO: 128070 - protein, 343 aa, unidentified
MQIARIGLDLAKYVFQVHGVDQYGKVVVRKTLRREAVSSFFANIPPCLVGMEASNGAHYWAKVLSEFGHDVRLISPQFVTPYVKSNKNDQNDAEAICEAVGRPSMRFVPVKSAEQLAVQALHRIRSRLVADRTRLTNQIRGLLGEHGIVIAKNIAKLRQAVAGIIGDSNDNLPHLVRALIGEMHQELDELDCRIAGYDRRIRELFRNSELCQRLGKIEGIGPMTATALLAAVGDGQCFKNGRQFAAWLGLVPKQRSSGGRARLFGISKRGDRYLRTLLIHGARAALGRVRGKQDPRSLWLGKMRERRHPNIVAVALANKNARIVWSLLSSDTAYDPRLSVGRT

SEQ ID NO: 128071 - protein, 418 aa, unidentified
MLTLLHRIKEDSLIRYHVGIDVGKNKHHACVYDIVEDRYTKVFPFTVDRPDFERFLLFLQRQGPIEEVMVGVEASGPYALTIGHFLLEHSYTVVELNPFQASQFRKAQGKKAKTDRVDARSLAAFLAVGSYKPLTLGDPLYENLRELTRFRVDLVKDRTCQVNRLKETLAIAFPELGAYMASLESPTVLTLLTNYPGPQALAEAGAQAVSACIIEASHGRLGSAQAQAIVSAAGTTIGLLQRQQSLAIKLEVLASGIISVNMQLQRVEAAIEDLFRHLRYNKSDFPVGGIQSLACILAEIEDVNRFPTLKQFLSHFGWCPQTFQTGGFRQEHPRMSHAGNRYVRRVLWMLAIMAVNTVPAYHDYLQRRTAAGKKKMHTIVAVGRKILSVIYAVLKTGRPYTSEGGASHADPCPVLTSL

SEQ ID NO: 128072 - protein, 343 aa, unidentified
MTVYVAVDFHARQQTLSYCDLADGEIQHRELRHQHDDVRGFYKQFTGEVIVALEASGYSAWFEQMLADLGHTVWLGNAAEIRRRASRRQKNDRRDADLMLDLMLKGDFPQLHRFSEESRLVLRQLRYRHKLVKLRTIAKNSLHAIGINAGLPLKRRLLTQKGIRQLQALQLSPVLAAQRDEWLQLVAWLNERIATVETALQELADNDNAVGLLQTHPGIGLLSGLALRYTLMPVSRFPTTRKVTAYVGLDCMEDQSAERRRLGSISKAGSRLLRFLLNEAGQVACRKDPDLKRFYQRLVQRRNRPKAKVAVARKLLVRSFIMLRDQIDYAEFVRRGVAARAAR

SEQ ID NO: 128073 - protein, 351 aa, unidentified
MNNSLVAFDPCGIEVSHLTLVVALRRGDHDEPAREFPNTPEGHQALLGCLARSGRRVRVAMESTGLYGLDLALCLHRAGVAVMVANPRAVRHFGQALLQRSKNDQLDAVVLREFAARRRFQPWRPPSAAALQLVSVARRLEALTDMLAAEKNRAHAASLSEALPPVIRLDIRRSMQTQQRAIERLTLVAQEFILDDPRLKRRYELLLSIPGVGATSALHILAELTLLPADMDVRQWVAYAGLDPREYSSGTSVHKKVRISKAGNSHLRRALYMPALVAVVHQPHLRAFYEHLLARGKTKMQALVATMRKLLHAIFGMFKHDQLFDGEKVYTLTSAALAPALANLEVACAQI

SEQ ID NO: 128074 - protein, 346 aa, unidentified
MSQIIRIGMDTSKHIFQLHGVDAAERPVLRRRLRRHEMLAFFVKLPPTIIGMEACAASHYWARQLGELGHEVKLIAPQHVKAYVKRNKNDGRDAEALCEAMSRPTMQFVPVKTEEQQAALMLMGVREQLIKRNTQLGNAIRGYAAEFGLITAKGTDKIEPLLARIAQDGSLPELAREMFAIQGRDYARLQVELKAIEARLRVWHRANADSRRLAKIPGVGPICAVTLVLKAPDPHAFSSGRHFAAWMGLTPKDHSTAGKTRIGKITRAGDERLRSVLVSGATSVIQQAKKGRGHPAPWLVALLARKPPKLAAVALANKTARIAWKLLTTGESYDGGRMSGASAIAA

SEQ ID NO: 128075 - protein, 446 aa, unidentified
MESTFKCIESDAAGIDVGSFSHFVAVPQGRDKETVREFGGFTADLRSMAHWLKSCKIKTVAMEATGVYWIPLYEVLTEEGFEVCLVNARHYKNVSGRKSDVLDCQWLQQLHSYGLLKSSFQPGEEEVKLRQLVRHRANLIKWGATHIQQIQKALAQMNVQLTNVVSDILGETGMRIIRAICSGERDPKKLATLRNERCKNSEETIEKSLHGHYREEVLFTLKQALASYDHYQQQIEECHRAIEAMTKQFGDKSGGQTIVTPKREAKKNNIGFDAQNRLLQMVGVNLTEIPGINALTALTVISEIGTTIDKWHSGKAFASWLGLCPGTKISGGKRLGGKTKPSKNRAAEALRMAASALHRSQTGLGAFLRRMKARLGPAKAITATAHKLAVIIYTMIKEKKGYQEMGAGYYDQLHRERSVQNLERFARRLGFEISPKKPGTSQLQHA

SEQ ID NO: 128076 - protein, 360 aa, unidentified
MQTKVNENLFDGHSIFVGIDCHKKNWTVTILTEEFEHKTMSQNPDPDILAAYLRRTFPGADYHAVYEAGFNGFYSCRKLRELGINCEVVHAADVPTGYKEKIQKLDPVDSRKLARSLRSKEFKPIHVPDSSLESDRALVRQRFRVMKDVTRTKSRIKSLLFQFNINIPDRFTNAQTRGWSNVYINWLKELQVGHESLRQTLDNYIRIGELQRKELLLVNRQVRILSQTDIYKGNYNLLISLPGIGFLTAMTFLAQIGDIRRFKQLDNLCDYIGLVPMMKGSGPKLYTGKLINRGRKELKIMIIEAAWDAVRMDPALMAKFNELIMRMNKNKAIIRIARKLVSRMRHVLLYQESYKLGITE

SEQ ID NO: 128077 - protein, 433 aa, unidentified
MIPAILERCAGIDVGKSMVAVCLMTGEAAAEPHVEYGTYGTFTADLERMKEWLLAAGCTHVLMESTGSYWKPIFNVLEDRLKVYVANAEDVKGRKGHKTDKQDSWWLAHLFRHGMVRTSFIPPRAIRELRDLTRRRRKVLGMATSEKNRIAKVLEDANVKLGSVLSNLFGVSGQLMLEALLEGKATPEQMAQFAQRRAREKIPQIAASLEGHRMSEHHRLLIRMSLEVLRCLESQVMALDEEILRSIERHGYVRQLELIESVPGIQREAGVVVLAETGGDMSVFPTEQHLSSWAGVCPGNKRSAGKDFRGHITRGNRWLRSTLTQCAWAVAHSRGGPLREKFWKLAANGAKKKAVLATAHAQLRLVYRVLSTGQPHSQLPAAPPDEAHRQRMIRHHVRCLGRLGISAGPMLTQVRRPHHTKTRLEVSHQHRKQ

SEQ ID NO: 128078 - protein, 314 aa, unidentified
MAMHATRPVIGIDTAKEELVIQHDDEKRHLAVDNNPAAIRQWLAGLPKGCDIAIEATSTYHMEITERAHAKGHHVYVVDGYRLKNYREGVGGRAKTDLTDAQLLARYLRKEKDELRRWMPPPKAYRTLQSLLRRRAALVKARTALRQSLSAEPLLKTALATLLKQIDRIDHLIQKRLREAVHAAGLRDQVQRCKAIDGIGELTATALVMAFLRGDFQNSDAFVAFLGLDVRVRDSGKLKGKRRLTKQGDTEVRRLLHCSAMSGARHPTWKAFYQRYRDRGLKTTQALVILARKLARVAFALMKHQENYCAPRLS

SEQ ID NO: 128079 - protein, 474 aa, unidentified
MIYSVGIDFHKDQHRARCLDERAQPCDSFSFQTTPEGLAKLEERVFRDGANPIIVFEPAGLAWLVVAVYLRSRHPDCRLVKAKMQKIAALRRYLRGSAKSDRIDALTLAKMPFIDPEQLYEIYLPPAEVHALQRLTRQRKRLEGDITGRKIRIGATVDGYLPDVRQAFTNSWSPQARAFLRSRLNPFAVVRDGEKVLHTFLSKATPRVKGSRAESHLVFLACQSVVALYELSRSVETISEEFFTELQEEVARELRLMEAEEAESESLARHIAELYRKIHPSDNLRTIPGVGEHTAPVFLATVGDPARFRNQSAFANWEGVVPGARQSSNAEAKGLRMTKSGPSIMRMGLYQAGDIGRRLDPQLAGVYYREMVYHGKNHKQAMGAVMTHLGARVLAVLKDDRPYQLMDDEGKLIGKIEARELILSKYQVPEDIRQERRRRKPAKAAKKNREMTTYRTHEAAKAPQPVEVMTISRK

SEQ ID NO: 128080 - protein, 320 aa, unidentified
MSDSSVVIGIDVASEHVDVAAIGAVTPTARYSNDPEGHSALADTLAGLDAALVLMEATGGYEAALACALQAAGLKVAVINPRQARDFARSMGRMAKTDRVDAQALAELAAVLARRPDVERFLRPLSDAVQQDLAALVTRRRQLTTMLLAERQRLRLAVAVVRPSVEAVIAMIRQQLDDIEAQMVGHVRQHYAGLDALLQSAGGIGSVASASLIADLPELGRLNRRQIAALVGVAPYAKDSGQHRGRRRIAGGRFELRRTLYMATLSATRHNPAIRAFYERLLAAGKFKKVALIACMRKLLGILNAMAKTHTNFDPDHSHA

SEQ ID NO: 128081 - protein, 450 aa, unidentified
MPKNTSVAAVAEAPACCALPVVTRGTRRKEEIRRRKLARVSGKTLIVGLDLAREHQAVSFAYRRRVLGRKRFDAAPQNLAAELGPVIAALLAHHKLQRVVIGMEPAGHYWELAAESFERAGLDYVLVHTVSVRHEREASRYTPESTDPIDAEAICELVWRGHFTEATLWLSAERLRLNGLAREYMLARKLAASETARLTNYWDRLLPELFTVLRTLKGKTAAAVSRAVLPFSEMVVLTPAAWLERVKLHARKERVLRKAPLKILELVRAAHADPHRRSGDAVPLRIRGAAERKDLAETQKQRAEADLLQRYHSCEEAAYLDSIPGSDPVCSALVLALVGDFSLFDTGRTLAKLGGSEVNHFSSGDWRGTSRISHRGRARLRAAAYQQARSLARKNDFYNRRFLHLISRTSGTRLSKQQAYIAIGNSYLRTAHALVTGRELWREPRKREEG

SEQ ID NO: 128082 - protein, 343 aa, unidentified
MQTITTIGLDIAKSVFQVHGVDNDGKVVIRRQLKRCYVLAFFEKLQPCLVGIEACASSHHWSRELQALGHTVRLMPPAYVKPYVKRQKNDAADAEAICEAVTRTNMRFVPIKTPEQQSGLMLHRTRHLFIRQQTSVINAIRAHLAEFGVTAAVGRKGIEELLRVIADPSDKRVPDVVRTCLAGLGSQLLSLKKQILDFDRMIMAWHRSNQTSKRLNCIPGVGPLLATALVASVADPKTFRSGRNFSAWIGLVPKQHSSGGRDRLGSISKQGDRYLRSLFVAGALAVIRYAKIHGTKYRPWVAALLTRRPTKVAAIALANKLARMAWAMMARGERYNYPASLRV

SEQ ID NO: 128083 - protein, 343 aa, unidentified
MAIVNRIALDLAKDFIQVLALDENEQEVFNKKLRSNKVLAKLATLKRTDDCEVAVESCGMSHYWRRECEKLGYKTVALPPRFVKAYLQGEKNDANDARAIAEAASRPNRQTVRLKSIEQQDLALMVNQREGFVQTRTQFSNRLRGQLAEYGIILPKRVSTILQKVPEILEEDSNALTLQSRDLINRLYQMLRAVDEEVKALDKRLAAQADNNEDSRRLMTIPGIGPITATSLLALIGDVNEFKRGRNLSEYLGLVPRQNSSGGKDRLGGITKKGNTKLRTLLVHGARSALRVAQQRDDRLSLWAQDVAKRRGNNVAAVALANKHARIIWAMLKNKEDYRMAAA

SEQ ID NO: 128084 - protein, 352 aa, unidentified
MQHFIGCDVHTRNQVVAWIEGETGEIKKRRLEHEGEEVRKFYAQFPRGTVVGIEATFPAYWFERLLGELGHELWVGDAARIRASEVRYQKTDWRDAEDILDLLRTGRFPRIWVPSPAERDLRQLLLHRMKQVRARTQVKNQLHALAISQGVCRGRKLWSAKGRAELESLALLPWAARRRKELLEGLDRLDAQVRELDGAVEEAGRARPEVALLRTHPGVGMVVALAFVLSVGPIARFPNRRKLVSYWGLNPREDSTAGRQRLGAISKQGNTMMRWLLIEAAQTAARLDPQLRRTYQRLKHQRNSGVAKVAVARRLVVRLFWMLRTRHNYAQLVHMSGSPSSAVVPPQGGPRL

SEQ ID NO: 128085 - protein, 366 aa, unidentified
MSEHTKPLYVGIDAHQETLSIAVLEDHALECEPIVTLPNRAPSIRKWFRRLAERGFVVATYEAGCLGFVLYRLLSSLGVQCVVAAPSHLPKIPGDHRKTDRIDARRLASFLRAGQIVSVSPPTPEIEALRGLTRARQAVREDLIRSRHRVSKFLLLRGQVYRDGQNWTAKHLRWLRDLALPLDEDRKTLDFLLDELEQRQTSVGLLDQRIERRAELPDIEEAVRSLRAFRGVDTLTAVSVVAELGDTRRFRSARQVAAYCGIVPSEHSSGMKVKRGAITRAGNARLRRLLVEAVQHYARPFPANSAVLARRARAPERAQSIAATAERRLRARYRSLAARKHTNVAKTAVARELVGFLWTALLPAEA

SEQ ID NO: 128086 - protein, 350 aa, unidentified
MCVQPLTEGASDMEISAVGIDLAKSVFQIHGVDKRGKVLVRKQLKRSQVLNFFANQSPCVIGMEACSSAHHWARKLQALGHTVRLIAPQFVKPYVKSNKNDVADAEAICEALLRPTMRFVAVKTVDQQALLSLHRARQGFVKARTAQANQIRGLLSEYGLVIPQGIGHIAKRVPELIEDAGNELPGVFRVLIDRLLEHFKGLERQVAELEAQIRAWHRESEASRKLERIPGIGPLSASAFVATVGDAKSFANGRQVAAWLGLVPRQRSSGGKATLLGISKRGDSYLRTLLIHGARAVIRAAHRKRMNRGWLHEVLKRRNPNVAAVALANKNARIAWALLAHDRHYTTMAV

SEQ ID NO: 128087 - protein, 413 aa, unidentified
MEVFYPRCAGLDVHQASVVACMRIAENAQASHEVRTFETTTKDLLALADWLRESGCTHVAMESTGVYWKPVWHVLEGEFELVLANASHIRNVPGRKTDVNDAMWIADLLAHGLIRGSFVPPVAIQELRDLTRTRKQLVREMARHVQRIQKTLEDANIKIAGVISDILGASGRAFLDALIAGETDPEKLADLARGRLRASRAQIVEALRGRVREHHRFMLKLHLEQVRSLQYAITDLEARVGERLEPFREDVKLLVTMPGISQTAAQVMASEMGMDMQRFPSADSLVSWAGMCPRSDESAGKRRSTRIRKGAPWLKTTLIQAAWAGVRTKNSYLRTLFHRLKARRGAMKAIVAVAASMLRSAYYMLSRRLPYQDLGPAHFDSRNRTRTASRLLKRLKELGIEVLQTRISEPVSF

SEQ ID NO: 128088 - protein, 358 aa, unidentified
MQTQNYKLNFAGQNIYAGFDSHKKDWTVTIMHENIVCKTFTQPPIPKLLASYLKKNYPGANYFSAYEASFCGFWIHKELIGLGINNIVVNPADIPTSDKERTQKEDRRDSRKIAKELSNGNLQGIYVPSNENLEDRSLVRAREKLIKDLTRNKNRVKSMLYFYGIEYPQEFIKNSHWSNKFIEWVDSIRFESESGNNTKDALLRQVIHLRKEVLLLTKEIKMLSKTEKYKKNVDLLISIPGISTLSAMILLTEIDRIDRFPNFDNFCSFVGLIPSTASTGEKEITRGITPRRSRMLRSIIVENSWVAIRHEPVLSLYYTKTAKRMKPNRAIIRVSRKFLSRIYCVLRKEQKYEYGILK

SEQ ID NO: 128089 - protein, 427 aa, unidentified
MPYRIAGIDVHKKMLAVVVSDVEVYGEYQFERRMFGSYPEALHSLATWLVEQEVEEVVMESTAQYWKPVWGALERYWKPIGQKREGAHPKSGTLHLAQAQSNRGRRGRKKDFPDAERLVKRLVANELVLSFVPDTEQRLWRTVTRRRYQLTRNRVRLQNRLEALLEEAHIKLSSFVTDLLGVSARRMLKALAEGETNPATLATFADRRLRATPEQLRDALGASTELDPVYRRLLKMMLDELQLIEDQISQLDQEMAGLLRLHQDAVQRLAEVPGLGVDSAQQIIAEVGPAAANFPSGKGLSSWVGACPGDQESAGVNYSHRSPKGNRHMRRLLNQCANAAVKMKGSVFEIAYHRLVPRLGHNQAIGAIAHRLCRLIWLILHQEVRYEERGPAVSKRSKQKRTARMIRELRALGYRIEALNVQTVASM

SEQ ID NO: 128090 - protein, 321 aa, unidentified
MAMSVQPLLVGVDVSKAELVLCQDLEQSVVVLDNTAEAIGHWLDSLPGGPVCLAVEATNTYHLELVEQAHQRGHTVYIVDGLRLNRYRQSIGGRAKTDASDARLLRRYLEREREDLRPWQPPSKGYRAVQQLLHRRAVLVRAKVALEQSLRELPELRQQAKALSDQFAKLDAALQQRLRELVRACGWQEDVARCQAVEGIGPLTAIAMTMAFQRGHFRSSDAFVAFLGLDVRVRDSGMSRGRRKLTKQGDPELRRLLHLAAMQASRSPAWSAFYQRYLERGLAKTQALVILARKLVRVVFALLKNQSTYQPKVVAGSCHET

SEQ ID NO: 128091 - protein, 416 aa, unidentified
MGRSKSSKAKCVNGQEMIVGIDVAKHQHVARILFPDGSESQPFGFSNHRKGFETFLAWLSFNQKRAKCDSIIVGLESTGHYWEPLAFFLEEIPGIRVVQVSPKHVKKTKEVYDNSPGKTDRKDAGVIAMLIQMGRFQKLVLPKGPFAELRGYARLRERKIVELGVQRNLLHSLVDWVFPEYGSLFPKLEGKTSLTILKHYTTPEQILRAGPKSLSAAIHQASHGRLSAAFSQRLMEAASATIGLQEGIEAATFAIRNIAASVERIQEEIATIEKELTKVLAQIPYVPQLLSIPGVGKISSAVILGEVGDLRRYHKAEELIKLAGLNLFEISSGSHQGRRHISKRGRPLLRKCLFFAALRTVKTGGAFRAVYVRLTQVNRMQKTKALVAISRKLLLLVFALVRDDVAYQPRGELRAA

SEQ ID NO: 128092 - protein, 346 aa, unidentified
MLHAGLDLSRKRLDFCLLDESGDRVEVGAAPPDGDGLRSLARRLALHGQPLRAAIESMNGARFVHDQLELAGWQVEIADALKVKGLAPLACKTDRIDAWVLAELSRRDLVPAIWLPDPEVRAERERARFRLHLVRHRTSLKQRVHAVLLAHGKPCPVSDLFGVAGRALLQRLALPEPWAGTVTASLQLIDELDQQISGCESELRQLGADHRYIPLLLTVPGIGWVLAYTIAAEIGDIDRFAAPRQLAGYTGLCPRVYQSGNSDRRGPLAKNGPRYLRWALIEATAHACKHPLYRDHYQRTKARLGKQRGAKVAQVDLARKLAEAIWHMLTRNQPFAPASATNPLAA

SEQ ID NO: 128093 - protein, 400 aa, unidentified
MMTPDDIDVWVGLDVGKSAHHAHALDRDGDTLYDKPVRQDEKAIRSMLGKLSKHGRVLLVVDQPNTIGSLPLTVARDMGIAVAYLPGTAMRRTAQLLPGDAKTDRRDAHVIAWAALKLPETLRDAGSDDETLAALRMLAGHDEDLAHESTRHINRLRSLLLQTHPAFERVLKGERATRDATLALLERYGGPAGMKRAGIEDVKDWARSNGLRAGRIIDDMFKAIGEQTVTVPGTLMAETIIPSIARDIKAIKDRRREVGRQVEKLLGDHPLLTVPASMPGIGVRTASNIPLGIGGDIANFKSAAHLAAYAGIAPAAGQSGTSIKGERPSRRGNKRLRNALWQTAFVASTKHPPSIAYYKRKREQGKHHNAAVICLARRRCDVIYSMPKNGALYQEPALVA

SEQ ID NO: 128094 - protein, 300 aa, unidentified
MKLYGGIDLHSNNSVISIKDEKGEVKARKKLPNDLGTIILFLAAFKTNLVGLVVESTYNWYWLVDGLMEAGFRVHLANTTAIQQYSGLKYADDNSDADWLAEMLRLGILPEGYIYPKEERTIRDLMRKRMQLVQQSTKNLLSIQGIYTRHLNYRISNNKIKQLTEKQIEKDFPFSNVILAAQSNLLVMNCLKIQIKNIERSLIQQVKLRPEFKKLLSIDGFGNILSLTIMLETGNMSRFDKVGNYASYCRCVSGARYSNGKKKGKTNKKNGNKYLAWAFVEAANFAIRYNKTVKSYYQKN

SEQ ID NO: 128095 - protein, 315 aa, unidentified
MSGVNAAIEVGKQQLVVRLGSDGEQFSEPNEVRAIKRIARRLLQAGCARVLIEGGSYQSALIAGLRAAELPVVVVNPRRVREFAKSIGQLAKTDEIDARVLALYGERTQPPLRELPDEQSQALRALWVRREQLIEMLGMEQNRLEHAPEKAKAVRHNLGAHIDYLRKQIKQADNDLDREVRNSALWDKYEMLSSVPGVGPVLSVALLSDLPELGRLSRGEIAALAGVAPFNCDSGTLRGQRRIEGGRPRLRRVLYVATLAAVRCNPVLKPFYLRLRTAGKPAKVALVAAARKLLTILNLMLKTKTVWRPPCQAAT

SEQ ID NO: 128096 - protein, 319 aa, unidentified
MNMSCVGIDIAKKTFVVAVEVSDKVKIKSFNNSILGFNEFIDWLNEFRLSKLYFCMESTGKYGDELALYLYEQNYSISVVNPARIKYFAKSQLTRNKTDSIDAKVIMQYCKFFKPSLWKPAPIEIKNLETLVKRVDSLNEMITQETNRLEKCDIAIKSSIEKHIQYLKKEVDEMERQIAQHIDNHPQLKKDAELLDTIPGIGKRRANKLLTILGGNQKFNSAKEVAAYVGLNPEHSQSGTSLNSVHLSKTGSSEMRKMLYMPALTAIKYKPILRKFYEKLISKGKPKKLAICAVMRKFWHIIYGVLKNQSAFNEKILDV

SEQ ID NO: 128097 - protein, 353 aa, unidentified
MFPIVSETYNFIVGIDTHSRKHVSTIINNLGVVIARREFRVTSNDINKFADWSLKVAGVENEKILFAIEGTSSYGETLTQALLKRKLRVTEVKPPKTKSRGGDGKTDQIDSELAALNILRLPVNKLIKPRLGEKRKTLRVILGSRRMLITQQTMNKNALIALLRSECIGIDARKPLTPGDYWTIARWKLKDTDSHYVIKQEAKRMAKAIVALTEELVDNKQRLYGIVSVMAPDLLKETGVGPVTLAQVLCAYSHKGRVRSAEAFASLAGTTPIPAASGNTNHFRLNHYGDRQLNHALNVIALIRMRIDTTTKEYVKKRLEQGLSQRDIRRSLKRYIARSLYRKLEACNISATI

SEQ ID NO: 128098 - protein, 343 aa, unidentified
MDHFAGLDVSVKDTSVCIVDDTGRITREVKVASEPDALLAVLTNPAYHFKRIGLEAGPLSQWLFSALAEADLPVICVETRHMRAVLKAQINKTDRNDARGIAQMMRVGLYRPVHVKTLRSQKLRMLLTHRKLLQSKAIAIENDLRGTLRNFGLKVGIAGRSKFEARIKELVENFPDLVALVEPLLVVRRVLREQINILHRRLLTVVRDDEVCRRLMTVPGVGPVVALTYRATVDVPARFRKSKSVGAVFGLTCAKYQSGEIDRSGRISRCGDEMMRVMLYEAAQSMLRSKKWSWLKAWAMQVARRCGMKKAIVALARRLAVIMHRIWIDGTEFRWTREAAVAA

SEQ ID NO: 128099 - protein, 385 aa, unidentified
MVTGITAYKRRSQMNNTTVYVGMDVHKESFTLCAYTLEEEKGSYSRRTPADYKEVLKYLEFLRTVYGNDTIFVCGYEAGCLGYTLYHQLTDRHVDCVILAPTTMLEQRGKKRIKTDKRDAEIIGRCLAQHNYSPVHVPTASDEEVKEFLRMRDDHKLALKKVKQQILAFCLRHNYRFDGNSHWTAAHINWLKSLTPEALYKEILDEYLLTYTTLSDKLERLDKRIEELAAKDEYKEAVRKLCCFIGVKTHTALSVIVEVGDFRRFASAEKFASYIGLVPGEESSGDDQTRLGITKAGNRHVRMLLTEASQCYSRGQIGYKSKALKARQDGNTPQVIAYADKANERLRRRYYKMVLSKCKKHNVAKTAIARELACFMWGMMTDNIA

SEQ ID NO: 128100 - protein, 343 aa, unidentified
MDHFAGLDVSVKETSICIVDDAGKIVREVKVASEPEALLAVLKNLAYHFKRIGLEAGPLSQWLFSALAEAGLPAICVETRHMQAVLKAQINKTDRNDARGIAQMMRVGLYRPVHVKTLRSQKLRMLLTHRKLLQSKAIAIENDLRATLRNFGLKVGMIGTVKFETRIRELVESLPDLAVMVEPLLIVRRVVREQLGVLHRRLLAVVRDDDVCRRLMTTPGVGPVVALTYRVTVDVPARFRNSKAVGAVFGLTPAKYQSGENDRTGAISRCGDEMMRMMLYEAAQIMLVRSAKWSWLKAWAMKIARHRGMKKAIVALARRLAVIMHRIWVDGTEFRWTREVAAT

SEQ ID NO: 128101 - protein, 402 aa, unidentified
MNESTSWTPAACLGLDVHKATTTATYLGPDGKPKRVWTFPTTRSALHALAQAIDPGTPIVLEASTSGKAVATLLKEAGRELHMASPRDVGLIAKSSVKTDVRDSAKLAHLYQAGFLPECYLPPPEIDRMRFVVRQRQDLGHKVTVVKNQIHALVTRNLLDDQMAEFSDIFGVRGLQRLTRLPLPSEERAALARYLLQLTQLAEHEEELQGTLAQLAVGREDVRLLMSIPGVDYYSAVALVAEIGDIRRFRTKGELASYAGLVPRADNSGATVSSHRHVKPGDMVLKRFLCGAVMGMLLARQDTAVKRFYQKKAKQIGQPKAQVAAARKLSAVVWWVLTHQEAYREQDEGLTERKVARLDRASEHPPTEVLPEDLETIGTRLAEKSQILDRLARENYASRMGE

SEQ ID NO: 128102 - protein, 337 aa, unidentified
MEHQTQYVGIDLHRRRSVIVRRSETGETLDKVRIDNDPVALAAEVTKAGPHPDVVLEATYGWYWAADVLKECGATVHLAHPLGNNWGHRRVKNDERDATDLVDLLRMGRLAEAWIAPPPLRELRELIRYRAKLVQLRGNLKSQVHSVLAKEGVTVPMSDLFGVGGRRLLFETALAHAYRVRVESLLDLLEICDREVDMLEKEVGPYFAGDLGYQAIVAIPGVGPVLAAVFVSEIGDVSRFKSARHLCSWAGLTPTHHESDEKVRRGHITKQGSRLVRWAAVEAVAHQRGATAVGRHHHRVAERRGNKIGRVAAARKLLTLVYYGLRDGEIRCLAETG

SEQ ID NO: 128103 - protein, 405 aa, unidentified
MNMNAVGIDISKRKSMVSILRPGGEVVAKPFEISHLSGDVQSLIDRIHSLDGESRIVMECTGRYHEPIARELVAAGLFVSAINPQLIHDYQDGDSSLRKVKSDKADSLKIARYTLDRWEKLKQYGLMDEIRNQLKTMNRQFDFYMKHKTAMKNNLIALLDQSYPGANTYFDSPAREDGSQKWVDFTATYWHVDCVRKMSLNAFVEHYQKWCRRKKYNFSRAKAEEIHGTAKELVPVLPKDDFTKQILKRATKQLYAVSKTVEQLRTLMNETAATLPEYSVVMAMKGVGPSLGPQLMAEIGDVARFTHRNAITAFAGVDPGVNESGDYSQKSVHASKHGSPVLRKTLFQIMDVLIKTKPQDDPVYLFMDKKRAQGKPYYVYMTAGANKFLRIYYGRVKEYLASLPQ

SEQ ID NO: 128104 - protein, 397 aa, unidentified
MDYDVVIGLDVGKAAHHACALDRGGKRLVDREITNTESSLRAIFTSMAAKGRVLVVVDQLHSIGALPVTVAQAMGVDVAYLPGLSMRRLADLHPGNAKTDARDAYVIAHAALTMPHTLRTLDVPSEAQADLAMLLGYDDDLAAQVTAAINRLRGLLVQIHPSLEKALGDNVAHAGVLHLLIKAGGPDGLRRMGKTRIDTTLRKHAPRIHERLATEIWDGLAAQTVTVPGTSAAAKVLPGLAAQILQLRDQRKEIAKDVEKVLDAHPLAKILTSMPGVGVKIAARLLAEIGGDVTAFPTAAHLAAYAGLAPVTKRSGTSIRGEHPNRGGNKRLKNAMFMAAFTSLRADPASRTYYDRKRAQGKKHNAALICLARRKTDVLFAMIRDHQPYTPSQPSAA

SEQ ID NO: 128105 - protein, 413 aa, unidentified
MNHPKMRYTYVGIDNHKDVHTAVFLDCFFEKLGELQLQNLPSTFDSFLQQAQTFLMPGTTFMFGFEDTSSYGRALTVYLKNHGISVKHVNSLLVARERRNQNVVQKNDSIDAECAARVLLSKFSELPNADTQDLYWVLRALVARRDALVKQRVMIKNQLHSFITPHYPGYRKFFVNIDSKTALAFFMQYPSPALLNTTTVEELTAFLQNIGGVSNYSSDFAKDLLAALQDTIVQHQEVRDTVIISVIRQLRYIMDELVQLEEAMVNFLPEFNCTLTSMTGIDTVTAARMLAYIGDIKKFTSSDKLARYAGIAPVSYSSGKKDTQHANECGNRQLNSLFYNLAVRLCFATGPSHKVMNSFFHDYYGRKISEGKTKAQALKCAQRRLVNIIWTMLTYSEDYINPPIFDLPQNLEV

SEQ ID NO: 128106 - protein, 449 aa, unidentified
MGSYAGVDWAAEKHDVLVADETGRELLAGTFAHDEKGLRALCRALVRLKVVLVAIERPDGLLVERLLDAGLRVLALHPNQVAAARARFRVSGGKSDRFDAFVLCELARTDSHRFRVLEPDSDETKALRALTRAREDLVHARVAFCNQLRAELERFWPGPIGLFTKLDSPISLAFLERYPSPADARGLGEGRLAAFLARQHYSGRQKPAELLAKLRRAPEGRVGEAELAARRALVLALVAAIKPLVAQIRQLDRQIATALREHPDGEIFLSLFKDPDSVICAAELLSEIGDCRARYPTRDALAGDAGQGAVAIESGKRKAASFRWGCNKRLRAAFCTLADSTRHWHPWAQDRYAAARARGHDHPRALRTVGRAWCRIVWQCWQERTPYDPDRHRALQQHIAVTIPIPSGPRPDLAATQRMAGDAVTEMAARRAEREVLDGKPTSAIALGG

SEQ ID NO: 128107 - protein, 375 aa, unidentified
MKEKLRFLGMDVHAETIAAALAEPDGEVQSLGTIPNRIESIRKLIKKLGPVEKLRVCYEAGPTGYVLYWQLAELGVECEVIAPSLVPVKAGDRVKTDRRDAEKLARSYRSGDLTAVWVPDESSEALRDLVRAREAAKQDQLRARHRLGKFLLRSGQRPPSGVRAWTHLHLIWVSQIRFAQVAQESTRLDYLHEVEHMRERVLRLEQAMAEAVKLASPALQEVITDLQALRGIAHISAVTIAVELGQVSRFPGARELMGYCGAVPSENSSGKRTRRGGITKTGNAHLRRIVVEAAWSYHRPPAIWAGLRKRQQSASEEAKEIAWKAQHRLHKRYARLAAKGKDKRKIVTAVGRELLGFIWAIGTKAEATVSQRIAA

SEQ ID NO: 128108 - protein, 424 aa, unidentified
MENTAAGKRKQVPEGYLIIGVDPHKKRHAAVAITQDFTTRDKFKFDNTREGLETMLCRARMEMVKSGCRGVMFAIETGGHYWRNVSYFLDEQSIPFRFINQFTLKRRREGKDLNRRKNDYRDSEVAAQLLCTGEFTESKLPQGVYAELRAAHNAYRRLVKERTRITNLVKGLLDALFPEFTQVFKDPCALTALSVLYICPIPRVITGMTEDEFVATIEAQHKGRRLMRRKLRALHYSARTSIGIDAGARSVSSEIAFLVDKLELIRQHICIIEGTLVSLVDETEEGKYLLSIRGLNYIAVAGLLAELGCFKAYRSAKQMIKMAGSNPTESESAGKKRSRTPMSKQGRPVLRYCAWTSVIPMLRFNSDFRAWAKQRRERPVHANPLGGREVVGAALNRLLRLAFAMVKNQTYYQITKSELTLVAV

SEQ ID NO: 128109 - protein, 337 aa, unidentified
MKHSVISIDLAKTVFQICALNADNTIVSNKKHSRKQLLHAMRQFEPTEVIMEACYSSHHWGREIQALGHTVKLIPAYQVKPFVVGNKNDHNDAIAIAEASRRPKASFVAVKTLEQQDIQSLQRIRERLVKQRTATANQLRGLMAEYGVIVPVGLNKLRSSVPDILEDAQQPLTMTARGFVHRLYRELTAHDQHVKALEAELKSLLANNEDYQRLQTIPGIGPISAATLMASIGDAKFFKNGRQMAAWMGLTPKQRGSGEKSRITGISKRGDRTLRKLLIHGARTVLNWCEKKNDELNLWLKTLKKRMHPCKVVVALANKLARIVWAVLAKKRPYAIA

SEQ ID NO: 128110 - protein, 411 aa, unidentified
MYYVGIDIAKSFHVVSVIDDNETKVINKAFKINNDSKGFEKLLTILEGVTLDKDDFTIGVEATGIYGENLLEFLKSKGYIVKLLNPFQTSRYREQITMKKVKNDNIDSLVIALFLKDGKYSSGYVTDDEYQSLRTLYRNRASIQSDMKEVKKRILTQITVTFPEFESFTNPFTISGLALLDKYPTAHHYKHSSVDRIMKIFAHIQGNNFNKDKALKLLELSKESIYSGKAKDARAIAIRSTIRLLKMYLSEIDIIEAEILSLLDKKGINSATLDESPQSNTLIDNLKTIPGVSDKTVAAVISECGDLTRFPSIPKFVGYLGLFPTENSSGNSKSIGHLSKRGSSLVKHALYLSAVSCLIHNKQMKQLYDTKRSQGKSKKEALVAVSRKLATIIYSIFKYNTPYNPNRVFTN

SEQ ID NO: 128111 - protein, 317 aa, unidentified
MRASAAFFVGIDVSKQQLDIAVRPSGESWTVAHEEASLSALVARLRDLAPTLIVLEATGGWEVTVTGALAAAALPVAVVNPRQVRDFARSTGRLAKTDRLDAQLLAQFAEVLRPAPRPLPDAQAQELTALLQRRRQLVEMLTAEKNRLPLAARRIRPQLQAHIAWLHQQIAQFDEDLRQLIRSSPLWREKDDLLRSTPGVGPVLATTLVAALPELGTLSRRQIAALVGVAPLNRDSGTLRGRRTVWGGRAQVRAVLYMSTVVAVRHNPVLIAFYQRLRAAGKAPKLALTACMRKLLTILNAMLKHHRRWAPVRAQHA

SEQ ID NO: 128112 - protein, 416 aa, unidentified
MKLFVGIDVSSEKLDTCYLTDEMVVLLNHTYGNDTQGAWELKEQVLAFYETYSFDQIVIGMESTSMYSYHPAVNFHQDEQLQAIHAITTIENPHRIKQYIKMFDEDKTDPIDAFMIADYLRIQRYTNSPIKEEKYMALQRLTRTRYQFVRQLVEVKQHFIENLSYKCNTLKKELREAEGSTTVFSAAIMELFTQDLSLDDLANLPLKDFAEWLQTKGRGRFKDPEGLAKTIQRAIRSSYRLDQVVSESVDMILGILVREIRSLEKAIKDCDQGIEDLVQTVPEYQCLTSIPGVGPVYAAGLLAEIGQIQRFPDQASLAKYAGLTWPRHQSGRHEAEDTPLTKKGNRYFRYYLIEAANSVRRHLPEYQAFYRKKYQETPKHQHKRAIVLTARKFVRLVDTLLRNHQLYTPPRSVIEK

SEQ ID NO: 128113 - protein, 420 aa, unidentified
MTTSKERTIVAIVNPICCGLDVHKESITACILYNDGKGKEHSILQEFSTFTDDLIHLRDWLLTHDCPVVAMESTGVYWHPVHNILEGYVDVVLVNARDIKNVPGRKTDIKDSEWLAGLLRHGLLRASFIPPKEVRAWRDLTRMRRKYVNTLSDFKKRVQKLFESANIKIDSVVSDLFGVTGRNLMLLLASGHTDITMTDIEQCVRGRLKGKTQELNRSIKGFFTEHHRFLLQTLLSTIASLEDTIESLDQRINRLMGNHQELIERMKEVPGISDISARDIIAEIGTTLDAFPNDVALASWCGLCPGNNESAGKRKSGKNHTWKNQVKPVMVEVAWAAARTNNTYYHDKYHRLKTRRGPNKAIVAIAHRIMKCLYHIIKNGVRYKELGMDYLDKKTKTAKLARLQKQAQSLGFSLIPVAGA

SEQ ID NO: 128114 - protein, 334 aa, unidentified
MPYQYVVGIDVAKSFLQVSVFDGKTHQDFTVPNEAKALMEEVKERIPQEKLSQTLFLMEATGIYHLKLATDLFEAGFKVSVLNPLLLRRYADTCFKRVKTDQVDAQLLARLGFLVEVSLFAPRDPEAEELRQVLQALDSYQRELQRVQNRLEALKHAPRINPRPKQCYEEDLKRIRKRIKELEEEAERLASHYAPQDYQNLQSIPGIGKLCAASLLGFFNRMERFSKAKEVVQFAGLSPQIEQSGKSRNRTWLSKRGNPYLRKLLFLCALTASRYNSQCRALYERLLARGKPRKVALAALASKLLRQANASLKRGVPYDPHYLGEKRNIGLQRT

SEQ ID NO: 128115 - protein, 338 aa, unidentified
MQYCGLDLGKKSSRFCVVDAKRAVVREGNVRNRVAELHKVFARFPAMRIAIEASTKAFWVADRLRELGHEPVVVDPGRTKAIGAALIKHDKLDARVLATLCAADVLAAVDQPSEKQRMARMPVVVRDGLVRCRVRLAMMVRSILDSEGIDLPRCALDRFADRVEKEECGMPEEIRLAIEPALASIRDLSERIGECSRKLEESMATDDDAQLLMTTPGVGPIVAACFLLAIRDPARFESGRQVGAYLGLVPSLYQSGQTNRRGRITKHGNRQARWALTIAANSLLRSRAPSALRDWGRELAARIGRKKALIAIARKLAAVLWAMWRNKCAFEPRLAAAA

SEQ ID NO: 128116 - protein, 350 aa, unidentified
MSMLAEQVEVVIGVDTHKDTHTAAVVDARTGAVLARTTVPADPDGYATLTSVVAEHSGLRAWALESTGSYGAGLARHLAQAGEWVIELDRPKRPARRAGAKSDPIDAERAARDALARAHLTQPKTGPQRAALQMRLTARRAAIEAATDAQRQLHALVITAPEEVRARFRGQRTRAMIATALRLRPTTTSGDIEQITALTVLRDLARRIQFLEAEAAEHQTAIGIVVRSWRPNLLTLTGVGPIVAATVLTAWSHPGRCRNDAAFAMLAGAAPIPASSGKTTRYRLNRAGDRQLNRALHTIALVRLQRDERTRAYAQRRRAEGKTDREIKRCLKRYIARELYRHLQTQPSAT

SEQ ID NO: 128117 - protein, 345 aa, unidentified
MKKIVKQVVGIDVAQKELVVSLGRMYEDLALDLYARKTTPNTPKGFMTLLSWVSKLTDPAIEVRYVMEATGVYHESLAYYLEERGQAVSIVLPNKISNYFRTLDVKTITDKTAAETIARFGLERKLDNWKRPNAIFKKLRQLTRERDQLIQARTVAKNQLHAELSEAEPNKNSVARIKKQIVLFKNLEQEIRTELSELLNQDQEIKKSVTTICSLSGVQVLTAVTVLAEVNGFELIRNKRQLTSYAGLDVKEKQSGTSIKGKPRISKKGNKHLRKAMHLPALAAIRCDERFKAIFTRLVSKHGIKMKAAVAVQRKLLEMIFIIYKTNKPYDKNYFKKLESSIAAP

SEQ ID NO: 128118 - protein, 356 aa, unidentified
MLESDQLQPRELPIVTTSTRIKCHLYIRLHDLPTIAQEELFTVDAILERCAGLDVHQDNIVACFLSGPLDQRPSKEIESFGTTTKELLRLQDWLQDRECTHVAMESTGVYWKPVWNILENTCELTLANPTRIKNVPGKKTDYSDAEWIARLHRSGLIEKSFVPNEEIRDLRDLTRYRRKLLQNVTQEKNRVHKILQDANLKLTTYMSDVFGVSGRALLESIVNGEVLDAEQVRDMVKSTLKRKVPELIEALNGRLRLHHRKMIRRHLEHIAFLEREIQELEAEIEQLLAPYQREKELLETIPGIKQDAAASILAESGPDMSHFPSDAHLASWAGVCPANHESNGKKKKTKKEPTWK

SEQ ID NO: 128119 - protein, 352 aa, unidentified
MNQIKYIGMDVHVATTVIAVMNSKGKVVTEAIIETQASTIKDFFRGQRGTLHVTFEEGCQADWLYDLIRPYVAKVLVCNPRKITRSDRRSDRIDAKRLAELLRTNAITPTYHGEHSTQNLKELVRSYIAIMHDSTRVKNRLKAVFRGRGIDCKGTSVYSQEDREDWRLKIDNAARLSRANRLWKELDHLTELAEEAEKDILKEAPKHAAIKILQSVPGIGPLRASIILGIAVTPHRFPTIRQFWNYCGLAVRSKITGEYEMVRGRIRRTKKQPLIRGLNRNYSRALKDVFKGAAATAANGPWKNHYGAKLKEGTKSSLVLLTLARKISAITLSIWKKGEKYDDKKLKFTHAG

SEQ ID NO: 128120 - protein, 482 aa, unidentified
MTFLSKDARQLEGARYFGIDLAKRETQLAVLDADGVQISQKRFATKRDEFLSLAGELREGDTVALEVTTNSTSIARLIRDNSNGARIIVSNPIKTKVIAQAKIKTDKIDARVLAELARVGYLPEVWLPDEDTEALRQFITDRTSLVRRRTECKNCVHSILHRNLVSQTKTDLFGTGGRHWLETIIAGTSPDGQLIPELDRLRLGSLLNEIDRIDALVADLESVIASYVAVRPHLKEQMDRLLSITGVNLVVAAGLIATIGDITRFPDKKKLAAYLGVVPSTYQSGDSSRNGRITKQGRAEARWLLIEAAEHLRRSPGPARALFTRVAKKRGHNVAVVAVARKLIELVHHLLTHNEDYIYRLPRLTQEKRARVRFLARKKLGVEIKSAAAKSAGRTALYGTGIGIQGRKLKGDIAKQAASHAERLYQAIVEQRKAKLSDPNAPLIPATDLVFDPTRPNETDWEKILSAATAKLLEKHKNKTRT

SEQ ID NO: 128121 - protein, 347 aa, unidentified
MIVIGSDPHKSSHTFAAVDAATGVLCATLTVAATAAGAEKALRWARGLDGERCWAIEDCRHVSGRLERGLVGRGERTVRVAPKLMAGARKSARERGKSDPIDATAVARAALREGIDRLPGAHLDVRAVEIRLLLDHHDDLVAHRTDEQQRLRWHLHDLFEALEVPAGALDRDVWLTRLQRRLAAQPASARVRIARQLIGSIREHTRRIRALESEIAALVAGYAPQLLDEVGCGPLTAAKLIGELAGAQRFASDAQLARTAGVAPIPVSSGRRDRHRLDRGGNRQLNLALHRLAVNKGRLCPQTADYLARRVWQLLRAGAPTPDGDINTHMIKNNNNANTPEPALALT

SEQ ID NO: 128122 - protein, 359 aa, unidentified
MKIIGCDLHARQQTLAMLDTETGEIVNLTLTHEGDHVREFYSKFPRPVRVGIEATGSMQWFLNLMEELGIECQVGHPANIRAAEPRKQKHDRRDADLILKLLVENRFPSIWLPSKELLDLRGLLLHRHQWVRMRTRVQNALQAIALANGLRRGPSLWSHAGQDKLASLSLAPHTAHRRSELQALYAKFEMEIEKLNQRVEKQAWERPTALRLMTHPGVGPITALATDVFLGDPTRFVDGKALASYVGIIPREYSSGGRQRLGGLTKQGNPLLRFLWCEAAIHAVRKDPELQRFYLRKLFQKGLGKARVAAARKLGIRLWILLRDQIDYNEFCRRGQMRQKNGGTCAGMPARVIAQTVAD

SEQ ID NO: 128123 - protein, 339 aa, unidentified
MQVTTVGVDLAKNVFQVHGITKDGKVVFNRAIRRAQLLAFFEDLPACLVGMEACGSSHYWARQLSALGHEVRLIPANYVKPYVKRGKSDAADAEAICEAVTRPTMRFVAIKSEEQQGVLFLHRARDLIVRQRTQLGNMLRGLLAEFGIVIAQGVGSAVKFAKGVLEGDLPSIPEVAVDVLTNLSNQLVALHLRIRWYEMRMRLQSKQDPRVMLLRTIPGVGPVTASAIVATVGDARQFKSGRQFAAWLGLTPLNRSSGGKEKLGRISKMGDRYIRRLLVIGMTARLRQTKTHPERVGPWTLDLLARKPARLATVAMANKTARIIWAVLTRNEHYRPHHA

SEQ ID NO: 128124 - protein, 414 aa, unidentified
MEDWPEATPVFLIIPREVFVMNCFVGIDVSKEKFDACGIGEQEEKIFSMTCSMNRVGFEKFIVQLPTDKTSFLLGMESTASYHIALFSYLAAKGYRVVIINPLLISNFAKRSLRKTKTDKKDALTIAQFLLREKEAFSVKISSPLVAELKDLARRRERLADHVTSLKADMKRLLSVIFPELERITGVFTKATLRPLMKYPSAHALQRADLSDVADVFKSEIQGNRPRTNVKALMETAVSSVGVASPAKELALKQETSLLIHVQDQMEEVTKLLMSLLNERMKQDMDILCSIKGVGENTAINFLIEMGTEVEMYENDKKLIAASGLDPSTYQSGKYEGKSRISKRGNRHLRRVIWLMATRVIISNNIFRTYFYKRRKEGLPYKKAVLATAHKLIRVMFVMLSRKSFFVEGGIKYS

SEQ ID NO: 128125 - protein, 418 aa, unidentified
MRMPSSSPASRRNAKNALKLKEQARQRASAAASPAEMAKLEPIHRRAAGIDIGSAENYVAVSPEAIVPGASSVRVFGVFSEQQDALVEWLRSCQISTVAMEATGIYWLTLYDKLEAAGIEVYLVDPHGVKAVPGRKSDWMDCQWLQKLHTYGLLQRAFRPDAPIRRLRTLTRQRAELVCAAASQQQHMEKALVCLNVQLGLVISDLAGETGMRIIRAILAGERDPEVLVEHRSARCTKASIHEVKQALRGTYNDEDLFVLQQSVDTWDFVQRQLQECDGKIELALAAIPTACVVKRKAPPLPVPAAAEQPEKKTKGTAGKNAPDKDFTPVLRRICGVDLTRIMGLNLLSVLMLLGEIGTDMSRWRNAQAFCSWLGLCPGAKISGGKVLSRRTRKVNNRAATLLRMAAVVVGRTDTWVG

SEQ ID NO: 128126 - protein, 596 aa, unidentified
MLSQPVPVPQSPRRIGVGIDTSRYGHYAVFLREDLQPAADELAFAESAAGYALLQQRLQGIVVRYGPLSFAVRLDVAGPYADNLLHFLHQLATPHADAVNAAQPFPLSISCGDPQRNKNYRVAFFGSQKSDPVEARAAARFALSEKPRSDKPLSLELRILQRVAGRLQAVVRQRTRLINQFHHLLAVTFPELARLTKDVAAGWVLELIHRYPSAARLAQAKPTTLAAIPYLPDAQLTPLLEQAHASIASLTGEAIDELVRDHVRQLRAIAARQKRLENLLVSAYRALPQANHLDSIPGIGAVTAAVLTAFIEDIDRFATPGKLVAYFGVLPIEASSGVDRDGQPRSPRRWVMSRRGNDLVRRYLWMAALSAIRCNPAVRALYARVVARHPQHKAIAVGHAMRKLLHLVFTIWKSGRPFDRHHYPWQTPVHVELSDNGLSAEASSNDNDMSVNSQAAGHKPEAEPAESVVTAACADSVAEAAAVGESRAVDFAHVKGQLSLTQVLDQLGLLTRLRGRGPQRRGPCPLHRGDGRGRSFSVNLEANVFQCFDKQCGHKGDVIDLWAALHGLSLREAALDLVRTFGLEPSSGPATEKRNG

SEQ ID NO: 128127 - protein, 347 aa, unidentified
MYPFYLGIDLHLKRTNLVLMDHEGEVIDKRRLKNTEMASYITKNIPKETYAVMEATRNWPFFYDLLEKHVDRVELAHAKGVRMIAAAAVKTDQIDASVLAHLARLNFLPIAYAAPKEIRDLRQHLRYREWLIDERRRAKNRIHAVLAGYNLASPVTDLFGRSGREWLQEAAEKELRPTSRKVVLETLTMIDQLDTQIKELAKDIPLPEELKPKAELLMSMPGIGKLLSAVILAEIGDISRFNSPKAVCNWAGLTPRVHKSDEVVRHGRISKQGSRYLRSAMVCAAMTACRISPRWYGVYEHLARKIGRRAAKVAVGRRLLTVVYYMLKRNQPYDENYEQRRMDEQGA

SEQ ID NO: 128128 - protein, 334 aa, unidentified
MIGLLNQDGERLAHRKLECNLKAVVEFLRPYKPRLQSMAVESTFNWYWLVDGLRQLDYPIDLANPARIEQYHGIKHVDDKDDAYHLAELQRLKILPKAYVYDPTLRPVRDLLRRRTMLVHQRTALLLSFKSLYVRTTGQALDVGDVKRMDPEQAPQLYEHPANQLIARVQAEHMQSLQKSIAQIEKAVLACAHELPIYERLLTVPGIGRILGMTITMEVGDIQRFKSDGDFASYCRTVDARRLSNGKIKAENNQKCGNTYLAWAFVEAANFARRFDENCRRWYDRKAARTSKIIATKALACKLAKAAWHVMARPCPYDPKRMFPELAVKTMNQR

SEQ ID NO: 128129 - protein, 493 aa, unidentified
MGACELESGDVALAAIPIRKMTIGIAQTLLLIIDWRIAMPKRTTGDRPELKPVNVGAAAIDIGSKMHMAAVNPACTDVPVRSFGTFTQDLHDLADWFKACGVTSVAMESTGVYWIPVYEILEQRGFDVILVNARYAKNVPGRKTDVSDAAWLRELHSFGLLRGSFRPDAEIATLRAYLRQRERLVEYAAAHIQHMQKALMEMNLQLHHVVSDITGATGMRIIRAIVAGERNPDVLATYRDVRCHSSIETIRAALVGNDRHEHVFALTQSLELYDVYQAKMLDCDRKLEVLIAALNNKGATPVGKLSKPRIKTKQVNAPAFDVRTALYGLLGVDLTEIHGLGPSLALKLVGECGTDLRAWPSAKHFTSWLCLAPGNKISGGKVLSSRTRRSSSRAAALLRLAATTVGRSDTALGAFYHRLSSRAGKSKAVTATARKIAVLFYNTLRYGMSYRDPGADHYEQQYRSRVLANLQRRAKSLGFVLQAIPGDANPAVS

SEQ ID NO: 128130 - protein, 366 aa, unidentified
MLRPARKAPAQKAHSKNPMNALHYIGFDVHKKTISFCVKTAAGEIVEEGSMPAQRGALREWAAARSQPWRGAMEATLFSGWIYDTLKPYGEQLEMAHPAKMKAISAGKKKSDILDARTIADLVRCNLLPACYVAPPRIRELRRLLRYRSLVVSEAVRMKNKMAGLLMETGALYVKEKLHRKKYFASLLEELEEVPESVIDLLRLSRGALEMFESTQKRLVRELLAHPELAQRVERLMTIPAVGEITALTWALEVGDPQRFRSSSDAMSYCGLTAALKSSAGKQQRGPISKQRNRWLQTTLIEAAKLAPRWNPQLAALHARELEHGHRNRATLAVARKLVAYLLAVDKSGQPFQVRAPSEVPTQKAA

SEQ ID NO: 128131 - protein, 333 aa, unidentified
MNYIGLDIHKKNTQACVKNDMEKVLMNVRFPSDSKDINEFLDKIEPLGAASIVMEATGFCMYIYDIIEARGHDVKVAHPFKVKALTAGRAKTDKNDAEMLAELLRLNAIPESYIPPKELRELRELTRFRQSLVRSSASIKNQVHAILAMRGIKTPPPLRSHFSKKHVKWLRSLEIVQLDDFLDIMALIDTKTAKADEDIGRICHDDEDVQRLKTIPGIGDVTATSFVAEIGDIHRFDSPEKLASYAGLIPIVRQSGEKMWAGPISKRGNATLRYLLIEAAYSHVNSSKESKLTRFFERKSQAKGRKKAIVATSRKMLDVIYYMLKRGEAYHAH

SEQ ID NO: 128132 - protein, 350 aa, unidentified
MFQLGIDVSKKTPDLCLLREGVKGRVKTRKLQNDINAVSAVIAWLSKQHCKPEDVHIIMEATGVYHESLAYDLHKAGGRISLANPHRAREFARGMGILTKNDRVDAYMLACYGALKAPEPWRPPPEEVRHLSALLRRRDALVADSTREKNRLKKYLATDTPPVIAESVEAMIGQLNAEIKRLDSLIRSHLNQHPELKKDFDPLTSIKSVGYQLGLNMLVILRSHDFTTAEQVAAFLGVVPVEKYSGTSVRGCPKLSKIGPPGVRAKLYLASLCGLRFNPLMKAMYERLCLRGKAKMCAIGAMSTPRFLTLFAIFMPAKILSLLMLSAFHHFIITDWRCVFGQHSSFTFLF

SEQ ID NO: 128133 - protein, 410 aa, unidentified
MEVMFDRVAGLDVGKDSVTVCVRTPGPRGGRRSVTRTFKTMFGSLRVMRDWLVETGVTIAAMESTSTYWKPPFYCLEEVMEVWLLNAAHMKAVPGRKSDVRDAEWIAQLLEHGLLAPSFVPPPEIRRLRMLTRYRVQLMGDRRRDIVRLELMLEDASIKWSSVASSLKTVSARAILTAMINGESDPLRLADMAKGKLRRKIPDLAQALTGHFDANHARLARSMLRRLDLVEQALAELDAVIVDACRPWQRQIELLQTIPGVGPKVAQVIIAETGGDMSRFPTAAHLAAWAGLAPAMHESAGRQTPTGKRHGNKWLAAMLVEAAGSVGRMHGKNYLAAQHARLLKRRGMGRAQVAVAHSILIAAYWMLKRDEPYHDLGADWHRRRNDDAHTRRLVAQLEHLGHTVTLSPAA

SEQ ID NO: 128134 - protein, 376 aa, unidentified
MKQFNDIYVGLDVHKDTIAVAVARGLRTKPVYFGEIPNTPAAIVKLLHQLSPDGEVLNFCYEAGPCGYEVYHQLTKLGQSCAVVAPSLIPRMPGVRIKTDRRDAMSLAKLHADGSLTAVWVPDKEQEGIRDLSRAREDFKQTETKARQRLGAFLLRNGKIFTGKSKWTVAHWRWMETLTFETPMQHIVMQEYVEALKEASRRLLGMEKQILLAVRGWSLEPVLNSLMAMRGVNTITAVTLLAELGDITRFDNPKQLMSYLGLVPSEHSSGGKRQQGSITKTGNGHVRRVLVEAAWNYRFPALKSRTIEMRAEKTSDRVQAIAWEGQKRLCGRYKKLLSLGKLKQKVCTAVAREMVGFVWAIACEASGRVHESRATA

SEQ ID NO: 128135 - protein, 373 aa, unidentified
MLVIEEHVVLHRLNSAATLIQRTTTEAPRGHMYYIGLDVHKKTISYCVKDVSGRIQQEGKVGSTRRELDCWMKTLPQPWTVAMEATIFSGWIYDHLLPHATQIKVAHPLMLRAIAAAKKKNDQIDASKLADCLRCDFLPECHMMPRAIRDRRRTLRYRHLLVRQMVQMKNRVSGLLMETGVEYNKQRLHKVSYFRELLSANGEVPPSIRPLLKLSRETIERCQKTEYTLVSSLRRDPMLADRIKRLRTVPGVGPITALTWALEIGDVSRFRSIKQAISYCGLCGDERSSADKAMRMPLSKQRNKHIQRALVEAAKLAPRQSHEMAVIYDQERQKGNSNRATLAVARKMVAYLLAVDRQQRDFVPAEERRTSAA

SEQ ID NO: 128136 - protein, 424 aa, unidentified
MIKDKCGRPPITAKGKETVFIMISIGIDVSKLKSTFCILNEYGEVLQTAREISHTETDLNELIRQVKSFGGKDDVRVIMEATGAYSKPVLYSLIEEGIFVAEINPLAMKKYRSNINFRGVKNDPIDALAIASYGIDKWHRLKEYQKADKEYAAMKALSRQYLSYMKPHVSLTQNLDHLIDQVMPGIKDEFDGYDPATGKDRLTDFLEEFVHYDCIRSLGPKRFDERFKRWAKKKGYRPRQGKSGKIYSLAKEGIPTLAYDPISRLLVKQAAQALRSMNHVLNEILSQLRSLAKQRPEYPVIRAMSGVGDVLAPLLIAEVGDPRRYHSGSALIACVGIDVPPYESGQFKASERGITRKGSKQLRKLGYLMVKNLRKIKPVKDTSVYDYYLKKKSESKKDKQAIVAAMNKFFRIYYARAMEAYKTE

SEQ ID NO: 128137 - protein, 448 aa, unidentified
MEPQEIDDEEHEQVLERVAAVDVAKASGMVCTRVPHQSRPGKRRTRVWPVDATTNAVLELADHLVAEGVEKVTLESTSHYWRIWFYLLESAELDVQLVRAQDVKQAPGRPKSDKLDAVWLAKLTERGMLRPSFVPPAEIRRLRDYTRLRADLTCERTRHYSRLEKLLEDALIKVSAVASSLAAKSVRDMLEALIGGERDPKILASLARGRMRAKHDRLVQALAGRFDGHHGELARLLLDQIDTLSAQIGRLTTRIEELIAAIPPAQGIDADGTTGPAAGHGKNAPVLPAVDRLDEVTGIGRGGAQAIIAEIGLHMSVFPTAAHLVSWAKISPQTIQSGTRSRAGHTGKGNPYLRGLLGEAAAAAGKTDTFLGERYRRLVKRRGKLKALVAIARSILVIVWHLLDDPAARYHDLGAGYYASRVDKNRKMRHHVRQLEALGYTVTLTQAA

SEQ ID NO: 128138 - protein, 329 aa, unidentified
MTTNPPQIVFNHIVAFEVSKEKLVVHTLPDDEQWTIDNKPQAVRRLIKAEIKRNRKKQLGQMLVICEATGGYERHVLDGALEMGLSIHRAHGTRVRHFGHYRGLLAKTDPIDAHLIAQYGLKTENIRLYSPPPPDTAALRALHARRTEIQQMLIAETSRLDHAQHKSVLKSLKAHIASLKAALAAIEADIAQLVEGSEMLRKKVALMQTVIGIGPISAMVVLAYLPDIGQLTKGQAARLAGLAPINNDSGKKRGTRHVEAGRTAIRRALYMAASVAMRANPILKAFSDRLRSKGYPFKYVVTAVMRKLIVILNAVLRDGQSWKGAQMAA

SEQ ID NO: 128139 - protein, 377 aa, unidentified
MHSENIAAYIGLDVHKETLAVAIAAPERLGEVRYYGTINNEAQAVRRLFQKLQGLYGNILSCYEAGPCGFGLYHQLTAMNIKCQVIAPSRIPKSPTDRIKNDHRDAISLARLLRAGELTPVWIPDLTHDAMRDLIRARAAAKRDSRVARQRILSMLLRTDKRYAGKHWTGKHRTWLANQSFSQPSQQIAFQHYCQSLEQIEDRILQLDQEISRLLPEWSLCNLVCQLQALKGVGQLTAITLVAELGDFSRFSSPKQLMAFLGLVPGEYSSGNSIRPRGITKVGNSELRRLLYEAAWSYRTLAKVGAWLIYYRPDSVTQYSKDIAWKAQQRLCSRYRSLTAKGKKSQVAITAVARELTGFMWDIALAAQSSFSQQKQN

SEQ ID NO: 128140 - protein, 319 aa, unidentified
MAQKDRVVVGIDVAKEKVDVCVRAFASRQTFPSTAPGRRKLVGWLRKHNVNKAVMEASGGYERDWNKALRQAGIEVRIVDPKRVRSFALSAGRLAKNDAIDAEMIAWFAETFSEAPSQTHDPAHEELLALVKARIALVELKTRLQNQNEHAASGPVQKAHARILKSLAAEIAKLEAAISAKVKATQDFTERAEIIESVPGFAETTSATLLAGMPELGQVSDEIAAALIGVAPFDDDSGKRHGERHIKGGRRWVRNAIYMPCLGAATQNNPVLKAFYQRLIAKGKEPKVALTACMRKLIVILNTMIARRQKWNPTRYAVA

SEQ ID NO: 128141 - protein, 362 aa, unidentified
MLAELLDAVVGVDTHRDTHQVEIALPNGAPIASTTISNDATGYAELLAWIVDNAPGPRLAISIEGTRSYGVGLARAAAAAGLVVLECEQPHRKTRRGRGKSDPIDAHLAVLTALRLDADRLPTPRADGDREALRILLGARQELTTTSTAQTNRLRALLLGGDDTDRTLARGALTEIRLAGLARRRAPREASREQAVRHAEIRRLALALREAARALKANRAQLQTIVNDLVPGFTDRPGLGPVSAAQTIVSFSHPGRCRNDAAFATLGGASPLEASSGRTVRHRLNRGGDRALNRALNRALNRALHTIATTRMRSCPTTRAYVARRTAEGKNPREIRRCLKRYIARQLYRTLATAMTPATEAS

SEQ ID NO: 128142 - protein, 345 aa, unidentified
MNHVAIDLGSKESQVCIRQADGTIVSERKHPTRKLGEWMQQWEPSRVILETSSEAFKVADAALAAGHQVKVVPATLAKQLGVGERGIKTDQRDARKLSEVSCRIELPSVHIPSTTARELRSLVRSRELLVETRTKTVNHVRGWIRTQLAKLRRGTTATFPERVRARAIEEQQPIPVHIEQVLVVIDALNLQILAADRQVKQLARDNPACRWLMTIPGVGPVTALTYVAAIDDVSRFAHAHRIQSYLGLTPGENSSSERERRTHITKAGSTSVRRTLIQAAWVALLRYPNEPMVRWAAQIAERRGKFIAVVALARKMAGIMFALWRDKTSYRPSKAAAVTTEVLSQ

SEQ ID NO: 128143 - protein, 274 aa, unidentified
MSIVMGLDQHRAQITADWLDTETGEVKRGRVAPADRAGVRRFLERFDGQELEVGLEATTGWRFVVEELRRVGAIVHLAEPAETAGLRGPKKRARGDRADARHLRELLMLERVPESWIPPDHILDLRARVRLRHMLGEQRSEWQQRIQATLYHHGCPERRQLMVGDGRDWLAAQPLSAVARERVTVALAMIDALDLQMRPIEKELRAYARRQAGCRALMAHYGIGELSAVTILAELGDCTRFSSSRQAVRYAGMDTVASNCTSCSGDFGLCGDVG

SEQ ID NO: 128144 - protein, 380 aa, unidentified
MDNSTGTVRKNDQETNFIGMDLHLDNVVVVVAQNEIKDNTVRSKTVLSKKFKTVGQPNIDEHFKVLETYCQDKPHMAVVESTYNWYWLADEFEKRNWNLRLADPSTVSKAGFKYSDDYTDASYLAECVRNGSIRSTAIMPKDDRAVRDLARYRMTLVEDRGRLKTILVNMTTNHLSIKLNADKLLKEIDEAVEKAASASDEGAADEVLSDYYDNRQVRTKMRSLLRRIRFLTNEVEALDEELTELIKPNVYATSLQSIKGCGYVTSMLIGLEIGDIGRFRTHKDFVSYCRLAPTSKLSNGKSKGLGNAKNGNAYLSWALTELATFVVRYNPEAKRVYDRYFNRSRLRVKAIRSVAAKIARGIFMMLKNGEVFDMKRCFGG

SEQ ID NO: 128145 - protein, 388 aa, unidentified
MEARLVDTTSTARNDAPARCLIAIELSKASWVVGVQTPLSNKTSQYRLTAGDWKSLLKLIERIRRQVGGELGRPVEMISCYEAGYDGFWLHRLLEAHGVRNHVLDPASLLVNRRARRAKTDRIDVERMLRALGRYLRGEPDACSVVRVPSVEQEDARRLHRERHRLIQERVQHVNRIKGLCATQGIYDYEPLRSDRKAQLEGLRTGDGRALPARLKAEIIRELHRLELVLKMVAEIEGERDAIVTEAAPRHLNAGKIKALANLRSIGPEFATTLVGEVFYRSFDNRRQVGSYPGLAPSPFSSGSTDRDQGISKAGNPKARSTMIELAWMWLRYQPDSTLSIWFRQRVGDRKGRVRRIAIVALARKLLVALWRYLETGLVPAGAVFKTR

SEQ ID NO: 128146 - protein, 347 aa, unidentified
MQVITTGIDLAKNVFQVHGVDANDKVVFNKPLRRSQVLPFFAKLPPCLIGMEACASAHYWARELKKLGHDVRLMPAKDVKAYVKRNKNDAVDAAACCEAVRRPTVRTVPVKTPEQQAQLMQHRVRDLLVRQRTQAINALRSHLAELGIVAAQGYDGLRQLLAIIADAGDARLPENARASLSPLVAQIASCQAEIGAIEKRLLAQHRKNADSKRLETIPGIGILGASAIVATVPDASIFKTGRNFAAWIGIVSREDSTGGKQRLGPISKQGDRYLRRILIVGAFAVIKQARAHPEKYPWLTQLLARKPAKVAAVALANKMARIAWAVLTKKEIYRVRPITARPASLGG

SEQ ID NO: 128147 - protein, 450 aa, unidentified
MGEWMMARKRNKQRLRVVHTHCAGVDVGSREHWVAVDPDHCQQPVRCFTTFTDDLEALADWLDSLHIKLVAMEATGVYWIPLFELLDARGFQVHLVNARATRQVTGRKSDVLDCQWIWQLMSYGLLRGAFRPPEAVCTLRSLVRQHANKVQEQSRCICHMQKALTQMNIQLDNVVSDLMGKTGSAILRAIVAGERDPQQLAQHRHGRLRADEQTLARSLQGNWREEHLFALTQALAHYDFLAQQMQACHQAIEAALARLPTLCAHPGEPNKVLRSTHRSLPAQRQLHQALNQVMGVDLTAIPTIGVDTALVLAAEIGPDLSRFPTSAHFCSWLALAPPTRISGGKPLPGGGARKVINRAGQALRQAASNARRSESFIGACHRARLARMDAAKAIKATAHQLARLIYALLTKGQAYVEQGIEAFEVRRQDRQLRALEYKARKFGLTLVEAA

SEQ ID NO: 128148 - protein, 464 aa, unidentified
MARSRASGSLAVTRAAASRSIAGRLEGSSHAGQRSVQKVTDPPPAEDTPGTLACSEAQDANRQRAQGRSVMRNIGLDLGVRHIAFCEVRDGKVVDRVAVRSLSQLASRLGPGCAPADVGFEACREGWHVHDVLAKWGHRPRMLDTTRVRQLGVGQHRRKNDAIDAETIAVAIESGRVAEAHVLSPERRALRAKLSVRGALVETRSQYVTTIRGLGRAAGILLPTCATDNFLAKVAEGKVPNELFTLIAPMVRTLELLGREIAEVDAELAGMAERDHTIQLCATTPGVGLIVAATFVSVIDQAQRFKNAHSVAAYLGLVPGEKTTGGPSKRRLGSITKQGNTHARAMLIQSAWSILRLRHSQDPLRRWADHIAKTRGKKIAVVALARKLAGVLWAMLRDGTPYDGAFEAEQGAMGVRKHATLTAKRAKSLELAAKKLRRSVPATGAKAVRPPAKVGRPERRRKTA

SEQ ID NO: 128149 - protein, 319 aa, unidentified
MDKTSVGIDVAKLKFDVAVWVERKKYKTKAFPNTPSGFSQLLKWLIPYGDCHICLEATGSYSVPLAMFLVDNGIDVSLENPSRIHAFGESELSRNKTDQGDAKMIVRYCALHTPVLWTPPPLSERQLTALVRHLKSLEEMRQMQENRQSVADDVVQSSLLEIISALKQQIQATKEKIKNHIDNDPDLKKNKALLESIPGIGEILSASLLAYVGNVSKFTNSKAVVAYAGLNPKLCESGLFKGRSRLSKRGHTELRKALYMPALAALSCNPIVKAQWQRLVSRHKGGKMGVCAAMRKLLQLAYGVLKSGIPFDTKIALAS

SEQ ID NO: 128150 - protein, 408 aa, unidentified
MKTLHKRCAGLDVHKAEVVACLRVITNRKVGREIRRFPTTTQGLLALAEWLENAGCTHVAMEATGVYWKPVWHILEGHFVLILANAAHVKNVPGRKSDVNDATWLGDLLAHGLIRSSFVPPPEIQELRDLTRTRRQLTREIVQHVQRIQAVLEEANIKLCSVITDIMGASGRRMLKAMIAGETDAEKLAALGHERLGCTRAELVEVLTGCVREHHRFLLGQHLRTIEQLEDSIAAFDARIEGALSPFHDIVERLKEVPGLAATATETVIAEIGTNMSPFPTAGHLLSWAGFVPRLDESAGKRRSTRIRKGAPWLKPVLVQAAWGAARKKNSYFQAQFLRLKARHGAKKAAIAVAASILTTVYHMLRDGTCYQDLGPEYFTRRNPAKAAARLANRIRNLGYHVEIRAAA

SEQ ID NO: 128151 - protein, 425 aa, unidentified
MAIIDGIKGIGRAIKYQIIKEGRRLKTLPGGIDIGSESHHVIIMDDNGKILCDRKVAHKFREFREAIEEFKEIEKQHQGEITFAIEGKNGYGAPFDRMLIESGFKLYNVDNLKLRRFRDVFGAEWRNDRRDAKMLAKMLKLRDYVDTEEETAFIAVQKTPAVHEKLRILSRHQQSLIDEKVRIQNRLRKRLLEVCPDILEYGDTDSKKLLQLLKKYPDFNRYKKITLAALLKIETIGKKTAVSILEGLRNIQYVEELAVIYKAIIASYCRRILELKEEITLLDRELEETGEKSSEVMQLKSIPGVGTKLSSRLAGEIGDIRRFNRESQLAVYCGVACIDDDSGKSKKTKAVYKANRICKATMIEIAGCTIRYVQESKAYYEKKRAEGKEHNHALRCLARQLIKVIFKMLTENRGYICKEELKKAA

SEQ ID NO: 128152 - protein, 294 aa, unidentified
MDKDSRFVGLDVHAETIAVGVAEPGGEVRSLGTIPNTPEAVRRLVKKLGPPETLRVCYEAGPTGYVLYRQLSALGVPCAVIAPTLVPVKAGDRVKTDRRDAEKLARSYRSGDLTPVWVPDPGHEALRDLVRAREAAKKDQLRARHRLGKFLLRQGRRAPTGIKAWGVKHRAWLQTIRFAHAAQDATLLDYLTEIDHAADRIVRLERAIATAADVAPAPVRAVIAGLQALRGIAKLSAVSVVTEVGALSRFAKPRQLMGYSGAVASEHSSGPHRRRGGITKTGNAHLRRIVIEAA

SEQ ID NO: 128153 - protein, 413 aa, unidentified
MTTNPQPQSINSVVCLHMSIELAATSWKLGFADQLGRNPRVRSIEAGDLLKLRVEIAAAKKVFGLDPEAPVISCYEAGRDGFSVHRCLVTMGIESHIVDPASIQVTRKKRRAKTDRIDAQKIVNALMRFKAGDQFACRMIRIPDAQAEDARNINREMRTIKTERTAHTNRIKGLLVTQGIPKVVIDGSFPRRLKRMQTAEGKPLGENLRAQLLREFDRLALATAQIRTLQMQQAKMMREAAKEVNKSDAERTLPKCAVTAEFLARLSGIGPVTAWTLSSEVFSWRDIKNRRQLAALAGLTPTPNSSGDEEKEQGISKSGRGELRVLLIEVAWGWLMHQPQSELAKWYHKRFDDGTKRNRKIGIVALARKLLVALGKFIRFGEIPAGAKLKSELTFNYMRLLKIPGTELDCLAA

SEQ ID NO: 128154 - protein, 348 aa, unidentified
MKQQSSATTETGIKGSNRVDFRGRTIFVGIDIHQKDWQVAKVIDGICLGNHRMKASYKALIDHLQSRYPGAVFKCVYESCAWGFTLQRQLQQAGIDCIVVHAADVSTTDKEKRRKSDKVDALKLARDHESKQLKAIHIPDENTQKDRNLIRLRKKLTGDLNRSRNRLKSLLKYQGIDIPDQFGKACWSYNFMSWVEQQAAKDMLMKDTLLLMLEEVKLLRQLLLKTERKIRELMKHKYQQQATLLISTPGIGQTTAMLFLLEVGDPKRFGSFDKLNDFVGFCPDTDSSGLLEAAWRAIRIDPALLEAYQQLAKRMKVHQAIIRIARKLLRRMRAVLLSRVPYQKGMVA

SEQ ID NO: 128155 - protein, 367 aa, unidentified
MENHSIVWVGMDTDAKKNQIAVYRNGDTEPTVEFEAGMDAKGIAKLIERMKREVGEVRCVYEAGPCGYQLYRKLRKAQIHCDVIAPSMTPQRPGDRVKTNRRDARNLGRLYRAGELTVIGVPDETQEALRDLTRAREDVREDLTRRQHRLNQFLARQGYHYQDGDKWTQKHWAWIRKIHFQDPNASTVLEESIRAVEQSQEQLKTYDAKIEENAQKPEYARKVKRYQTLRGVQTVTAMTIVAEVWDMRRYGKAPQFMGATGLVSSEHSTGERERRGKITKTGNAHLRRVLVEAAWHYRHRASAGPTIQKRRKGQPEAVISIAERADQRLNRKFRRMVDRYNKKPVIAAVAVARELAGFIWAIGQIQD

SEQ ID NO: 128156 - protein, 344 aa, unidentified
MDLGKKESQIAIITEAGELVEKRMRTERGRLTQYFKDRPPSRILMEASTISEWVARLLEELGHEVVVADPNYAPMYAQRSRRVKTDKRDALALAEACRLGAYRPAHRTSEEQRHVRALLTVRDSLVRSRARLVTLTQAVLSRDGFRVSTGSSGCFGDRVKTLELSEPLRVEIASLLAALPPLNEQIQVLDEKLGEVASRDERVRRLMTMPEIGPVTAVAFVATLDEAKRFRGAHQVEAYLGLVPREWSSSEVQRRGHITKAGNSRMRWLLVEAAWRLATHRKRPETEALREWAERIARRRGQRVAVVALARKLAGILYAMWRDGSAYEPAKLAHVQRRKAQQVA

SEQ ID NO: 128157 - protein, 350 aa, unidentified
MNVIQYIGFDVHKKTISYCVKAADGRILEEGKLRSTREALREWAGKRTEPWHGAMEATLFSGWIFDILKPFAAKLQMGHPAMMRAIGASKKKSDQLDARKIADLVRCNLLPACYVAPTEMRELRRMLRYRNLVVSQAVQMKTKMSGILMEVGAEYNKQQLHGKQYFEELVDNLREVPESVKDLLKLSRGALELFQTTQQQLLDRLQKHPRLAERVTLLRSIRGVGEVTALTWALEVCDPQRFPSIGDAVSYCGLTSALDSSADKAKRGPISKQRNAHLQTVLVEAAKLAPRWNAQLAAVHEKELQRGHRNRATLEVARKLVAYLLAVDKSGKPFEARQLATQGKETEKVA

SEQ ID NO: 128158 - protein, 424 aa, unidentified
MKVTYPTCCGVDVHKSFLVATIIKTTSGIEPSYQKKRFSTFNNSILDFKSWLLENECHDVCMESTGKYWVPVFNLLEDQINVTIANPKWVKAVKGNKDDTKDSKWIGDLFRLGLVKGSYIPCKSIRILREYTRYRYKLVSCRSSEKNRYQNALTVCNVALDSVVSDIFGKSSSSIIDYLLEQSGTTINHEEIASKLLKRLKSKEDAVIESIEGYQMTDSQKYRMRLVRAHIDYITAEINDVDKQIESLISSVPDYVKAIRFLTTIPGVKHDSAITIISEIGIDMSQFCNSKRLCCWAGLTPGNNESAGKKKSVRITRAGIYLKPALVQCAHAAVKSDKSPYYKKKYESLVKRRGKKRAIIAIARMILTAIYQMLSTGEVWNPSDLYKIDMPAPLVERQKAKAIKQAKKLLQKEGLLPPDEPLAS

SEQ ID NO: 128159 - protein, 319 aa, unidentified
MDILGIDVGKHEMHAVLLQLDRSTSKSVTNSAAGFKQLQTWLRNRKAERVHACFEATGGWSEDLALALCDAGHVVSLVNPMRIKAFAKSEMLRTKTDRIDAALIARFCRTHAPDPWTPPAPEIRALQGLIRRYQSLVQMRTEEQNRLQAPMVSPVVKASIEATLSHLDHEIERVEREIHQLFDRYPPLRRQRELLTSIPGIGETTAARILGEMPNIAEFRSVKAVAAYAGLSPRHYESGSIRRPSRIAKTGNGNLRTALYFPAISAMRFNPLLRRFADRLRERRKSNMVIITAVMRKLLTLAYAVLKSGKLFDPTYASP

SEQ ID NO: 128160 - protein, 334 aa, unidentified
MENIALIGIDLGKNSFHIHCQDRRGKAVYRKKFTRPKLIEFLATCPATTIAMEACGGSHFMARKLEELGHFPKLISPQFVRPFVKSNKNDFVDAEAICEAASRPSMRFVQPRTESQQAMRALHRVRESLVQDKVKTTNQMHAFLLEFGISVPRGAAVISRLSTLLEDNSLPLYLSQLLLKLQQHYHYLVEQIKDLESQLKRKLDEDEIGQRLLSIPCVGTLTASTISTEIGDGKQYASSRDFAAATGLVPRQYSTGGRTTLLGISKRGNKKIRTLLVQCARVFIQKLEHQSGKLADWVRDLLCRKSNFVVTCALANKLARIARALTARQQTYVA

SEQ ID NO: 128161 - protein, 317 aa, unidentified
MGTSAALFVGIDVSKQQLDVAVRPSGEQWTVPHDEGGIRDLVTRLQALAPTLIVLEATGGLEVALASALATAPLPVAVVNPRQVRDFARATGLLAKTDRLDAQCLAQFADAVRPTPRPLPDAQAQELSALLQRRRQLVEMHTAEKNRLATAAPRIRPQIQRHLMWLQKQIGECDDELRALIRSSPLWREKDNLLRSAPGVGPVLATTLVAALPELGTLSRQQIAALVGVAPLNRDSGLMRGRRTVWGGRAQVRHVLYMSTLVGVRHNPVLMDFYQRLRAAGKVPKVALVACMHKLLTILNAMVKHRTRWVSVGAHHA

SEQ ID NO: 128162 - protein, 338 aa, unidentified
MYYTGIDLHKFTSYLTTVDSYGNIIKEADIKNVSHNFVQYFSDLGNENITTVESTMTWYWLGDLLSSLNIPMVLAHAKYVKAIAYAKVKTDKVDSHTLAQLLRMDYISVAHKISNDNRLLRDALRARLKIVQRHTSVTNSMHLLLAKYNFDSPEQLETIPRFQFDQLTEVEALLKEQILDLEKQLYPFLIPNDDTQRLLWIPGIGKMNAFTILLEVDNINRFEDVKHFFSYCRLTPAARNSGGKSKQRSSKDGNKYLKVAFSDAAVHACQYYPIIRNYHNSLLRKKNKHVAKTIIAKEIAEIVYHVLKYKFDFNNKFKGKDLIERKSFQWPRVVNPYA

SEQ ID NO: 128163 - protein, 403 aa, unidentified
MEPSTTPDIIIGLDVGKTDHHASALTTTGERIYDKPLPQDEAAQREILASMQAHGGVLMVVDQPNTIGALPIAVARDCGCTVGDLPDLAMRKAADLYPGRSKTDRRDAFIIADTARTMPHTLRAVDRDDETLVALKMLAGFHDDIAKDATRTKNSLRSVLTQIHPALERVFAGEILSRTLVLDSLIHYEGPTKLAAAGRGRVLKWIRNRAKKDPDTLAIFAALAEQTVTVPGMAAAELVIPQLAANIEALQAQRDTIAGHGSEMLESFPLAQVLMSMPGVGIKTASNILLSIGDCSDFADAAHLAAYAGIAPTTRQSGTSVRGEFPTRAGNKQLKNAMFRSAWIASNCHPASRDYYLRKRTEGQRHNAAVMWLARSRCNVIYALLTRCEFFREIPARTIATAA

SEQ ID NO: 128164 - protein, 334 aa, unidentified
MKKFEFFLGIDISKNTLDYCLLDDQCKVLEKGKVNNEPVSLSKFFLKFENEYCCKTTLLIVFENTGIYSKPVARFLNENKWCYSEVSALEIKRSKGVSRGKSDRVDAHQIAQYGFRNLDKIMLCTEPELIHQQLKILNTEREKMLSAIGSFSRTGEAEEFLGKEVFKVVKTHNRQTLSALRKQLKQLDDKISALLRSNEDLKKKQELLKTIPGIAEVGSLYLLLATKGFTRFKNWRKFACYCGIAPFEYSSGSSIRGRNRVNPLADKKMKSLLHLLALTSIRHDPELKLYYERKKEEGKHSLLALNNVKCKLVSRIFAVIKRETPYVKTHQFAN

SEQ ID NO: 128165 - protein, 346 aa, unidentified
MEIIKQVVGIDVSKDTLSLSYGTLSINQEKQITKPITVDNNQKGFKELMSFAKKNKGTSNAYLYFVMEATGVYYENLAYFLTEKHQKVIVVLPNKTKNYSKTLDIKSKTDKLDAQMITQFALERQMQLWQLPSPVMKALKSLTREYQSIKSMAAQLKNQLHAKEYSYQPLKQSIQRSQKTLSVFQKQLKEIEQQIKELVEKDSELNDRINKIDKIEGVGFMTAVSVIAETNGFALIESTKQLASYAGLDIVYNESGLKKHKTSISKKGNRFLRQAVYMPAISACKYNPRLKQLYIRLVIKKNIKKVAIVAVARKLLILIYTIFRKNIDYIPNYNSAYTEKHTMSFY

SEQ ID NO: 128166 - protein, 355 aa, unidentified
MNSIKYIGMDLHSATISAAVVNDAGKLNMEATLATEASAVVDFIAGVQGTLHVAFEEGIHAPWLYDLLLPHVAQVLVCNPRQLPRHRGENKNDKIDAQQLAQWLRLGVLKPVYHNPTGLRTLKELVRSYLSLVRDTARVMNRLKALYRARAIPAPGTRVYSPRFREAWLQPLREAGVHYRAQLLYRQLDLLLPLRQEAKRAMIAESRQHGAQKILLSIPTLGPVRVAVLMAVMQTPHRFRRNRKLWTYAGLGLVSRSSANYRIVEGQLTRAGKPALILGLNLNHNHVLKALFKDAAATAVSRPGPLREFYARQLAAGREAEIARVTVARKLATIVLTLWKKGERFNAEHLKPQAA

SEQ ID NO: 128167 - protein, 426 aa, unidentified
MFAASVDEDQVIARVAALDIGKAELVCCVRLPASGGSKRRVQEVTTHSTMTRSLAELANRLVDLRVERVVMEATSDYWKPVFYLLEAHGLDPWLVNARDVRHLPGRPKTDVLDAVWLCKVAERQMLRPSFVPPRPIRVLRDLTRYRIDLVAARTAEKSRVEKLLEDAGIKLSVVASDIFGVSGRAMLAALIAGQRDPAVLADLARARMRAKISLLEEAFAGLPTGAFAEHHRFLLQRMLGRIDAIDADIAILDAEIEAHLAPFDQAVQRLDEIPGIGPVAAAIIIAEVGVDMTRFPTAGDLCSWAKFSPGIKSSAGKSKGSGSTGHGDRYLARVLGEAVVMAGRSDTFLGDRYRRIARRRGKKKAIVAVGRSMLVIIWHLLSEPDIPFHDLGADHYARTINTDARKRNHIRQLEALGYRVTLEPAA

SEQ ID NO: 128168 - protein, 344 aa, unidentified
MDHFGGLDVSVKETSICIVDDAGRIVKEVKVASEPAALLKVLGNSTYRFKRIGLEAGPLSQWLFSALAEAELPVICVETRHMQAVLKAQINKTDRNDARGIAQMMRAGLYRPVHVKTLRSQKLRMLLTHRKLLQSKAIAIENDLRGTLRNFGLKVGMVGKVRFEARIQELVKNQPDLAVLVEPLLIVRRALREQIVILHRRLLAIVRDDEVCRRLMTTPGVGPVVALTYRATVDVPARFRKSKSVGAVFGLTSSRYQSGEIDWNGKISRCGDEMMRVMLYEAAQSMMHSRKWSWLKAWAMQIARRRGMKKAIVALARRLAVIMHRIWVDGTEFRWTRVQAAAAA

SEQ ID NO: 128169 - protein, 407 aa, unidentified
MVVAEVEVEEEYQFERRWYGSNREQLQRLSEWLIEQQVEEVVMESTAQYWQAVWGALERYWRPICQKREGAGAMSGKLHLAQALSNRGRRGRKRDFPDAERLVKRLVAQELVLSFVPDPEQRLWRTITRRKLQMTRLHVRMQNQLESLLEEAHIKLSGFVTDLLGVSARRMLQALADGETDPAALAALADKRLRATPAQLCDALGACTELNPVYRRLIKMALEELQFLEQQMGQLDQEIANQLRPHEDAVKRLAEVPGLGVDSAQQIIAEVGPTVASFSSDKQLCSWVAVCPGDNETGGVNYSHRSPKGNRQMRRILNQAANAAARTKGSIFEIVYRRQVMRMGHNQAIGVIAHRLCRLIWILLHRKVRYEERGPAVTERSKRVRTLRMIRTLRNLGYRVEPLGNPA

SEQ ID NO: 128170 - protein, 348 aa, unidentified
MDTTVKMIGLDIAKNVFVAVGQNDHGKVVMKYKLAREAVLPTFANIPATTIGIEACAGSHYWARKLISLGHKVKLIAAQHTRAYVTGNKNDTNDAAAIAEACSRAATKTVPINTEAQQDLQMLHRTRQALMQERTATICRMRAFANEYGQVFPLGVAKFLSGFTKWLNDDKNGLSGSAMSTFRELKTQLDDKDTRIEVYDARLNQAAKEDARAAKIMEIPGVGKVVATAVLAAVADAHHFGNGRDFSANLGLVPREHSSGGKQRLYGITKRGDAYLRALLIHGARSALRWAGEKPDKMLRWATKLKERRGHNVAVTALANKMARIIWALLAYDREYVPVWSKSMIRPA

SEQ ID NO: 128171 - protein, 364 aa, unidentified
MDVHLRSTTVCALDAETGEAVTRRFRGNPWGEVAEWMSGSPGPSLAAYESGYLGFAPQRELSGLGVDCVVAAVSRVPRSAADLSSKNDRNDAARMAKAILSHDVTPVWVPSPEIEGLRDLAGAHDAATARLAAAKQRLLAFLARRGYAYGGTTPAGNPRRYWTYDFLRWLDKVRPADDGGIRALAALRNEVEAAAETRDDLLAEYRAAVAAGPLSAEVEALQSIKGCGFALAAAFASEVGDFSRFRSGRQVTAYFGLAPKQRSSADSVRLGGISGAGNALVRRLAVEGSWSYVQASHQPKLMPKGSGVPLEVRMHGRKGSERLLRRREEMLARGMPQAKANAATAAELVRWLWALGAMCREATE

SEQ ID NO: 128172 - protein, 339 aa, unidentified
MYGKTTADLKAFEAVLRRIMKKYELAKEDMALCYEAGPTGFVLARRLIKLGFECIVVAPSKIPTQSGDRVKTDRRDARKLARLYRAGELEGIHIPSVEDEVIRDVCRGRTDAVNSMARTKKQLLSFLLRNGYRYKGKAHWGEPHMRYLRELVLADPAQKVVLEEYLQRIDFAVKQVERIDGQMEALLQTWSRKPLVEALMGFKGFKRTAAMVIVSEIGHFGRFEHPKQLMAYLGLVPSEDSSGGRRRQGSITKCGNSHARWMLVESAEHYRKPPKIAKGLSVRQEGLSREVKIISWHAQNRLNKRWNKLIFRGMHPNKIRVAVARELSSYIWDLAKIVG

SEQ ID NO: 128173 - protein, 428 aa, unidentified
MNEVDAIRIEQFRQFKKEIRGSREYEVVGIDVAKEKHHAFFGTAAGKTLLRNLVVGNDLDGFCKLIEHAEALRVQEGLSKVVYGLEPTGDYHKPLGEHLIKCAKLVVLVSGVAVRRNRELLDGRWDKNDVKDAANVADLISQGKCMFYEYPNANVRDLRVLLSVKMRLRKQEHGLRVRIRNHVVAQYFPELDRVWGQSETENLAIVRWCLDPSVIAGLQLDEFIRQVSTRDRGVRQKARLRGIWEMAVDSVGCQMPEAACSECKVLVEGLKRLRAEMKEVSDEIHQVCLRFAEYPFLLSIPGFGPEVSAQVLGALGDPHRFRSAGEVLKMAGLDLSASRSGNTAETAVPVISKRGKAHLRYMLYQAAMIASIRNRPFINYYTEKLRGRQQERGIKTKMRVKLAAKLLVIAWTLMKKKEPFDPKHLTMQ

SEQ ID NO: 128174 - protein, 441 aa, unidentified
MSDTVITTPEPAWAAFIGLDWGSQKHAWILQPAGGGKPQQGVVDNTPEAIAVWAADLHRRFAGQPVAVALEQKRGSVVNLLLPYAHLVLFPVPASMSASYRKTFVPSGAKDDPSDASWILDLLLRHRDRLRRLEPDEPNTRLLLMLVEDRRQLVDDKTRLALRLQDCLKQYFPQLVQWFDVDTPLVADMLQRWPDLQHLQRCHDGTLRTFFRQHHYGEERIVQRIDAIRAAVAATHDPAVLEACAMKARNLSALLTTLRDQIKQLERRRDELVANHPDAPLFASFPGAGLATVPRLIAAFGTRRERYQSAFEVECDSGIAPVHIRSGKIDRVSFRHACQDFTRQTFHEFAGQTIPQCEWAKAFYRAHCQKPEQHHAAVRALAFKWIRILFRCWKDRKPYDEQLYLTSLRRRSGLLGSGLASVTSIGWANVAGFSKLSEKKA

SEQ ID NO: 128175 - protein, 348 aa, unidentified
MVVIGCDFHPSWQQVSWLDRETGEAGDEKLVHTPGAAEKFYQRFPAGSRIGMEATGNCQWFVELLTRLGHEVLVGDAAKIRASDSRQQKHDKRDARLLLQLLVEERFPRIWVPSREQKDLRQLLIHRYKLVRIRAQVKNGLQHLAMNQGVLRKQKLWSKAGQKVLCELPLAPWANRRRTDLLKMMSELDAKIDLLDQAVVQAAEKEERARLLMTQPGVGPITAMAFVLTLGDVSRFPRGKQVASYLGLIPREYSSGGHQRLGAISKQGNSFLRMLLVEAAQIAVRCDPEFRKEYLHRCHSKAKGVAKVATARKLAIRLYWMLRTMTKYPEIVRIESSSRVPLVVRHGG

SEQ ID NO: 128176 - protein, 327 aa, unidentified
MAHIGIDVSKNKLDCMWVRDLEAGKVKPKVFPNRRDQYPELLHWLERNTGESPEALHVYLEATGIYHEPLAYWLHEQGVRVYVLNPAQVRFHAQGMGVRNKTDRKDSMMLARYGIERAPAPWQPEPPEVRELKRLLGRLEALEQDIRREENRLEKAQFSEDALAQESIGNVLEALREEHRRLQQQIDDHFDVHDHLKRDRALLESIPGIGRVLSASMTATLRSRAFKSARQAAAFHGLVPVQQESGISVQRRPRLAKAGSSRLRRKLYMAAVTAAHHNADVRAQYQRLLRRGKAKMAAIGAAMRKLLHIAFGVLKSQQPYQPRCSTG

SEQ ID NO: 128177 - protein, 399 aa, unidentified
MDVHKETVVVCVLTPGPGADPHKEIRQFGTTTGELRKLAEWLKQEGVTHAAMESTGVYWKPVFNILESSCELILVNARHIRQVPGRKTDKADSAWLANLLRHGLLEASFVPPLEVRELRDLCRMRTTLVRECVQVGNRIRKVLEDANVKLDSVVSDTLGVSGRLMIQALMEGEQDPAVLAELARGRLRSKLAELTAALEGQVRPHHRFLLRQWTGLLSSLEQHIVEVEQEIERHMPPFEWAAALLVQMPGLDRTAACALIGEIGVDMSRFASARHLASWAGLCPGNNTSAGQSRSGKSHRGNPWIKGLMTEIAWAASRTKESYPAALYKRIAVHRGKKRALVAVANSSLQVVWHLLAHHQPYRDLGPDHFDRNNRQHLTQSLVRRLQKLGHTVTLTPAA

SEQ ID NO: 128178 - protein, 346 aa, unidentified
MEHYVGLDVSLKLTAVCIVDRTGKIEREGVVHSDPEAIAAFIKSNAPHVARIGLETGATSTWLWTELNRLGLPVICIDARHAKAVLKMQINKSDRNDAVGIARIMQCGWYKEVRVKDLDSHAVKALLVSRALLVKIKRDLENQVRGLLKNLGLVIGRAKMNAFAWRAAELIEDQPELAAAVTPLLNARVAIERQIADLDRKVLKLARNNARVQQFMTAPGIGPITALCFLATIDDPKRFRRSRSVGAYVGLTTRRYASGEIDWTGRISKCGDKMLRSYLFEAANVLLTRVAKWSALKAWGIRLAKRSGLRKAKVAVARKLAVILHRMWIEGSEFKWSSKEAANQPA

SEQ ID NO: 128179 - protein, 421 aa, unidentified
MQVLYERCAAVDIGKDVIAVAVRLPADGPDGRATHKRTFKTFYGVLREAARWLNSLGVTHVAMEATGIYSMPVYHALIEHGKFEQVLVCNAGHVKNVPGRKTDLADAEWLVHLLECGLLRGSFIPPAEIKGARDVIRYRTKVVQSRTSEVQRLGNVLQDAGIKIDSVASSIASKSGRAMIEALIDGERRPRVLADLAKGKMRVKIPDLTLALEGRFGEHHALMCRLHLDHIGHLDAMIARLDTQTETMMAPFRTERDLLTTIPGIGMLAAAAVLSEIGANVTEYFPDAAHLASWAGLCPGNHESAGRRHSGKRRHGNQHLQHILVEATWAAVRHDGYLKALYHRHIMKWGGYRSPTAKKKAIIVAAHAILVIIWHVLAAGKPYDELGTDFFTRRLDPERETRRLIAKLEALGHQVSLQPAA

SEQ ID NO: 128180 - protein, 343 aa, unidentified
MKIAILGIDLGKNSCSLVGLDHAGTVVKRRRMRPESIPAFTRTMPACTVAMEACCGAHHFGRLLRSQGHTVRLMSPEYVRPYVKAQKNDDRDAEAIAEAATRPTMRFVELKSEEQLDMQTLHRVRDRLVGERTALINQLRAILLERGCAVPQGRRKLEQHLAAMPDPDNDTSLSPRVCRLIDDMRAEWLELDRRIATFDNEFAARARNDADARRLTTIPGIGVLNATALVAAIGNGETFARGRDLAAWLGLVPRQVTTGGKPRLVGITKRGNKYLRKLIIHGARSALPVLASGPTPLGEWLRALMKRVHKNVAVVALANKLARITWAVLRRGEEFAATARAAT

SEQ ID NO: 128181 - protein, 427 aa, unidentified
MVRSIGMDVHRDFCEVAIAEAGAVRAAGRILTTPAALELFARSLAPTDEVAIEATANALAIARIIEPHVARVVLANPKAVREKSPRAKTDKVDAKTLARLLAVGFLDEVWTPDEAARARRRLISRRCALVRQRTREKNQVHAALQRNLIERPPMSDLFGVKGRAWLSVRLGRLPLDERLSVEACLRQIDVVAGELAALDKIIAADALSDVDALRLMTLPGVSAVTAIALRGAIGDISRFRTPRHLVAYLGLDPRVRQSGNEPAKHGKISKQGPGEVRGLLVEAAWHAARTAGPLRAFHQRLAGRRGANIATVAVARKLVIIAWHLLSRGEKYAFMRPALYRQKIRRLGLMTGATRQQGKRLAEPSYLRASDPRRHAEDELVEAHEAAYRRLVADWQASRPSRKAGAGATPGRASQRPSKGKAARQAV

SEQ ID NO: 128182 - protein, 344 aa, unidentified
MPPMKYIGLDAHSGSSFYVVKNRRGRIESQGSVATTEGALLQLIRSIRRPRKLIFEEGVVSHWLYLLLRNEVDDLIVCKPPERRGAKCDRVDATQLADDLRQERYVQVFHSDHGFMSLRDLVSAHVDVTQQLTRTKNRYRALYRQSAIATPDAQSFYADEALVEQLPEYKRMIALSLLRQMKVLIEEKNGFEDQFSGNVRANAVMRRLTTIPGIGATRANQLVAIIVTTERFADKYHLFSYAMLVKHEQTSNGRSYGSKRPLGQSLLKSVFFNAAVSALRSNNAFRRKYEIMSAMGIHPRAARQAVVRAIAATVFGVWKSGKKYNDDIREGLKKKTCQPAVQNL

SEQ ID NO: 128183 - protein, 398 aa, unidentified
MTESSDYESVQVFIGVDVGKDTHHAVAVNRSGKRLFDKALPNDENKLRSLISDLKQHGQILLVVDQPATIGALPVAVARSEGVLVGYLPGLAMRRIANLHAGEAKADARDAAIITEAARTLPHALRTLKLADEQIAELSMLCGFDDDLAAQTTQVSNRIRGLLTQIHPALERALGPRLDHPAVLDLLQRYPSPDKLASRGEKKLATQLCKLAPRLGKRLAADITRALTEQTVVVPGTNAAVVVLPRLALQLITLRKQRDEVALEVEQRVLAHPLYPVLTSMPGVGVRTAARLLTEVACRAFASAAHLAAYAGLAPVTRRSGSSIRGEHPSRRGNKTLKRALFLSAFAALRDPISRAYYTRKMSQGKRHNQALIALARRRCDVLFAMMRDGTFYTPAAS

SEQ ID NO: 128184 - protein, 372 aa, unidentified
MGHHSEAFIGIDTSKSRNAVAIAEGGRGGEVRFLGEFPTTEAATRKLVAKLAAKYSRLTFCYEAGPTGYGLYRLIKRLGHECIVAAPSLIPKKPGDRVKTNRRDAVSLSKLLRAGELTAVWVPDERHEAMRDLSRARLAANKDLQGKRQQISSLMLRLGRCYPGRTTWGPAYMKWLMSQKLEHREQRMALEELLEGVRQEGERVVRMEQAIREAVPEWSLAEVVTALQAMRGIDLIAAVGVLAEIGDLSRFQNPRELMGYLGLVASESSTGDRVKRGGITKAGNGRARRILVEAAWAYRHPARVGREKQAKVAAAPRRVREIAWKAQTRLCGRFRSLLRKGKLPTVAATAVARELSAFIWAINREVMQTRRP

SEQ ID NO: 128185 - protein, 254 aa, unidentified
MYNYIGIDVSKQTLKVFDETKEYEVPNEKGLKTFKKLLKKDYGKEWIETKLIYEPTGPYSNYLREFASTNKLKVYEVNPKKSANFAKVLGNRSKTDAVDAKMLYRFHLLLKESELFIPEIDKITEQLGSFIHSYEIIQKTRTMLSNHLHSMEYKSGADTKIKESIKKEIKHLCEMEENLEKETEAFVENNPETREDLNNLLSIKGIDVISAINLLYLFRKYSDTNRNEITALAGLDPVQRQSGSSLNGGRKITC

SEQ ID NO: 128186 - protein, 423 aa, unidentified
MFDYHQTLFVGIDVSKDSNQVCLINFERKKLLNKSFKNNLEGATEMKTTIISYLSKHDFNSLIIVLESTGIYSIHIANFLSFEAESICPRTEVYLLNPIISHNFSKSNLGSVKNDPIDAFALADFAASGKVNCLSPFKANQHFAIQSLARQRKHYIDLMCKEKTRILNYIFIKFSDYNNAKHHNKAFSNIFGNTSIEVLLSFKTPEEIANTSIEELTDFIKEKSKNRFDDCEEVAKILQKASRDSYRLDASLYDSVNTNIAICYSTIKFYENIISTIEKEIQSLIKGSSFEKDILILKSIPGISDVFAISIISELGDASSFKSDDAIAKYSGIYWNENSSGNFISEDNRLKKTGNPYLRYYLIEATASVIRNNQVFYDFYNKKLDEVKTHKESRALVLTSRKFIRLIFKLLKDKKLYKFPSQL

SEQ ID NO: 128187 - protein, 402 aa, unidentified
MNCVGIDVSKGKSMIAVMRPFGEVVVSPFEVRHTANELSELAGLLKSLDGETRVVMESTGNYHAPVAWLLHDAGLYVSVVNAMLVHDYGNNSLRRAKTDKKDAVKLANYGLDHWLTLPRYVPEEDARLMLKTCYRQYQQYSKVQTMLKNNLISLLDTAFPDANRLFTSPPRADGSEKWVDFVAAFWHCECVCGLSKKAFTTKYQKWCRKHSYNFSEDKALDIYVSACGRFGVMPKTKTAKLLVEQAISQLQATSAALAALKQEMQSLAASLPEYPVVMGMFGVGPTLGPQLLAEIGDVRRFHSKKALVAFAGIDAPPYQSGQIDVRSRSISKRGSASLRRTLFLVMGVLLQCAPMDEPVYQFMNKKRSEGKPYRVYMMASANKFLRIYYASVKAYLESLEHD

SEQ ID NO: 128188 - protein, 329 aa, unidentified
MIVGVDVSKDYLDVALETAKRKRYERKVNNDAGGFQRLLSWACERTGAAPQQLTVVMEATGVYHEAAAQALHDAGCRVIVANPKRVRDYASGVGLLNKTDRVDARALLRYGKEQADELVPWEPPPPEIRTLRALYARLAAVEADLRRELNRKQQADLSGQPAPVRRSMEQSIEHLREDCKRLKRAIEEHFDNHPDLRQQRELLQSTPGIGPVCAGRMLCLLLRHRFSDARQAAAFAGLVPRHHQSGTSVRKRPRLTKSGDASLKAVLYMAAVAASRYNHELRQQYQALLKAGKSKMSALGALMRRLLHIAFGILKHRAPYNLSLIASRG

SEQ ID NO: 128189 - protein, 356 aa, unidentified
MIKSNRLDFTGQPIFAGLDVHKKSWEVNISTPSGEYKSFSQPPQVDALVHYLRHHFPGGVYYAVYEAGYCGYWIHDQLVKEGIHCLVVNPADVPTKNKERRRKGDRVDCRKLSRGLRHGELEGIYVPPRGTLEDRSLIRTRLSMGRKQTRCKNQIKSMLLFYGVQIPEEREIGHWSRRFIQWIEGIRLERASGNMSLQFHLEELAHLRQIMARLNRAILALSRTDEYLTWVRLLRTIPGISTLTAMILLTELGQIMRFRSIDRLCSYVGLIPDTQSSGEKEWGGGVTQRRHSHLRWLLIESSWMAVRKDPALLMAFNGYCKRMGKSKAIIKIARKLLNRVRYVLKNQAEYVPCVIE

SEQ ID NO: 128190 - protein, 425 aa, unidentified
MKRDLSVENEFSVYVGLDWGTEFHRACVLNSRGEILRECRIDHSGQAISDFVRGLNEMGNGKPDHVAVAIEVPRGPVVEALLEGGLVVFSINPKQLDRFRDRYTVAGAKDDSRDAYVAADSLRTDQHCFRRIVADHPDVVRLRELSRTEESLGEDFRRVVNQLYQLLLRSYPQLLQLNSTPDEPWIWALLELAPIPQRGARLTVARLKALLSKHRIRRWTAEALREAIATPPLPLAAGSADAISEHTLLLLPQLRLLYSQRKEVRDRIEALLNRMTLLGSERSECREHRDVGLLLSLPGLGYLIAASLFTEACDPLAQRDYYALRAHSGIAPVTKQSGKSRQVVMRHGCSERLRNAMYHWARCSVQHDPLSKLHYARLRKVGHKHGRALRGVADRLSSILIAMLKTGQPYDAKRRQNAAASADTA

SEQ ID NO: 128191 - protein, 370 aa, unidentified
MGKNITSFVGLDVHQDSTAIGVAEAGRESPRFLGTVGPDLAQLLKALKSLGKPDTVLVVYEAGPCGYGLARQLRGRGFACEVIVPGKIARRPSERIKTDRRDALTLARLARSGDLISVVVPDERDEAIRDLARTREDAVAARLKARQQLKAMLLRHGHRYTGKSSWTLAHERYLADVSFAHPAQNIAFSEYRQTVKDAHERVERLTQALRAQSESWRMKPVVQALTSLRGIDFVAAVTLVAEIGDFSRFAHPRELMGFLGLVPSEFSTGKTRRQGEITKTGNKHARRILVEAAWNYRFPARISRPLQIRQEGQPKLVREIAWRAQLRLAQRYRHLSARKLHQNKICVAIARELAGFVWNIARQVKVSAVI

SEQ ID NO: 128192 - protein, 486 aa, unidentified
MVLFGELSFPLGRFVPSYDDQAPRAWGIKLNRIAPMKTLSVIDPHAAAIDVGSERMCLSIAGDEPVGFGTVTNEIYRLRDYLKERGASTVAMEATGVYWLYAYAVLEEGGLKPIVVNGRYVRNLPGRKSDLTDAQWLATLHAHGLLRGGFVPPAAIRRLQDYQRLRADHIIGAGSQIQKMQQAMERMNIKFHDVISDLTGVSGLKVIRAILAGQREPEQLLALCDVQIRKKKRDEVLESLRGTWAPEHLFALGQALEVWEFYQKLLARCDQQIEAVLKEMAGPEPPPEEGADKSADTAKPSGKNAPQIQDLHKLLVRLCGGRDVTAIPGIGDYLLLQLIAETGIDLQAWKTEKQFTSWLGLAPASRQSGKRKGNVRRQRNRAGRLFCTGARSLAKSVDKALGGYYRRMAARKGGEIAMKALARKLAELYFRVLRYGLDYAEKGLRAYELKYEESRGRVLAKLAAQQGLMLVPILRATQPTQTGTPM

SEQ ID NO: 128193 - protein, 478 aa, unidentified
MDDRRLVGIDLGITSAHTVRVLAGDGSLVCRRKAIPTVDSLEQVEQAALARTPAGTLLEVVVEPTGPAWLPIAVFFVARGHTVYRVSSAKAHDLRRVLSRHAKSNGIDADTLARLPLVDPAGLHPLELPDAARAALDRRVRACDRLTRQAANHKRRIKDLVHQLLPASPLVGELGQADLAVLERWADPHALVAVGRARLQRLLATASAGQQGAHRATQWLAAAHAALQLYGDHPAIAFTELAAEVTSEVRLLRATQAELAAHAREQEACYRRVDPAALARSLPGLATIGGPALVATMGTASRFATAAKFRCFTGLAPKASETGQSDRKGQPISKAGNKLLRTTLVRAADHARRQDPQLARTYWIQMVQRGKDHLGAVCVVAAHLAERAWTVMDRGTPYVVCDADGTPVTPAQAKAIIAEHWTVPEHVRRRRRSRKGKAPQQVLTGHPHGARSATRRPSPSSATLGHQPSRVKPTQPQP

SEQ ID NO: 128194 - protein, 377 aa, unidentified
MHSENIAAYIGLDVHKETLAVAIAAPERLGEVRYYGTINNEAQAVRRLFQKLQGLYGNILSCYEAGPCGFGLYHQLTAMNIKCQVIAPSRIPKSPTDRIKNDHRDAISLARLLRAGELTPVWIPDLTHEAMRDLIRARAAAKRDSRVARQRILSMLLRTDKRYAGKHWTGKHRTWLANQSFSQPSQQIAFQHYCQSLEQIEDRILQLDQEISRLLPEWSLCNLVCQLQALKGVGQLTAITLVAELGNFSRFSSPKQLMAFLGLVPGEYSSGNSIRPRGITKVGNSELRRLLYEAAWSYRTPAKVGAWLIYYRPDSVTQYSKDIAWKAQQRLCSRYRSLTAKGKKSQVAITAVARELTGFMWDIALAAQSSFSQQKQN

SEQ ID NO: 128195 - protein, 444 aa, unidentified
MSKKAYRATRVNDVDWDRLARAKEGLGITLGIDVGKHTLWPVCRWADGRFERPWRVKNPEEIPALLALIRRMSAGRKLVAAMESSGTYGDALRQALADAKIDLVRVSNKASHDYAEVFDGVPSQHDGKDAAVIAELAALGKAQAWAYQPASPWEQELTYWVEWMVAHRQILTTWQGRLEGLLARHWPEATEVLKLSSGTLLRVMKHYGDPQALAADPEAAQRLARWGRALLSPEKIEHLLAGARSSVGVRVGDWQRRQIQDYAQHALAARREAELAQRHLRSLAEGHAVLQAQGRVVGVPTACVLWASTGDPRKYHAAGAYRKAMGLNLVERSSGQYQGRLRISKRGSARARQWLYFAALRLVQNCGVRPWYEAKKARDEDDARRVIVAVMRKLVMALYHVGVRNEEFRPRRLFGRICGRRGSSAELGSGVRNQRGAAEVSARG

SEQ ID NO: 128196 - protein, 403 aa, unidentified
MERYAGIDLASEEHRLCLVDGEGRQLEQRRIGHDEQGLTALCRRLSELGVERVALERPDGIVVERLLDAGLVVVAVHPNQLAANRDRYRSSGGKSDGFDAYVLAELARTDMHRLRTLKADSDETKALRALTRTRDDLVGARVALCNQLRAQLEAFWPGAGRIFSDLDSPIALAFLERYPSPADTHGLGAKRLAGFLARHGYSGRRSATELLQRLRQAPQGRAAELETEARRAAVLALVAALKPLVEQIKLVTSQIAGAVRVHPDGPIFLSLFRDPKSVITAAELLAEIGDRRERYPTRDALAADAGMAPVAVESGKRKVACFRYACDKRLRDAVACLADATRHHHPWAHTVYRNARARGHDHPHAIRILGRAWLRVIWRIWQDGNTYDPSLHGNLKRLTTTEG

SEQ ID NO: 128197 - protein, 341 aa, unidentified
MKQLLRKNYLGIDVSKPWFDVSLMVVIDHVKKPIVTERFDNNSAGLKLFKAWLKAASVTLDEKSLLVIENTGVYHRQLWSFCSKHNLPIHIGNAAHIKWSLGITRGKSDVIDSVRLCQYCCKQSDELKATPALNPVFMRLKDLMTSRTRLVTQLHSTRNYIKELQCGNDKLLMATLAKAHKAALEGIKKSILQIEELIDQIIQEDSVIYKNYLLIKSVPGIGHLTAIYIICCTNNFAAKVTGKQLASYAGVVPFEHSSGISIKGRNRVHKMANKDIKKMLYLCALTAIKYYPEFRQYFDRKKAEGKNGMLVLNAIRNKQVLRVVSVVNKQQPYVDNMKTAV

SEQ ID NO: 128198 - protein, 447 aa, unidentified
MSTSVRLQASPTLPGPTSGPQRVRAEDRKGWTVEVIHQRCAGMDLSKRDAKVCLRLPGRRAGSYAKTTATFGSVTADIMGLRQYLIEARVTLVVMEASGDYWKPFYYLLEDGPFELMLVNPAHARNLPGRKTDVSDAQWLAELGAHGLVRGSFVPPQPIRELRDLTRLRTTLIRDRVREINRLERVLQDAGMKLSSVATDILGVSGRAILDALLAGQTDPKALASLARMSLRNKTAQLVAALDGRFTDHHAFLVRLHLQVIDQLAANIAQLDTRIDQAVAPFRAILTLLRTIPGVSDRVAVTTLAEIGADMSRFPTSAHLASWAGVCPGHHESAGRVRNIGTRAGNNHLKAALGNAAIGAARTKNSYLQARYRRLAARTSGLKALVAIEHAIITAIWHMLATGTTYRTLGADYYQRRDPAKTMRRIIKQANEIGLTVRFDPIAQAAT

SEQ ID NO: 128199 - protein, 469 aa, unidentified
MFTALASSLQVRLSSLTNTQGLPYKRLTYIAFAEFKACMSLLLNLPLWRAVMQTELSQFTAIIGIDWADKKHDVCIQAAASGQRQIYQVPHKVDKLDEWARSLYRQYGGPIAVALELSKGPIVSALQKYDFFVIFPIDPTTLANHRKTFTLSGAKDDPTDAEYALDLLLKHTEHFKALSPQSIEMRTLMTLVEHRRRLMNDRIRITNRLRSTLKQYYPQALEWFDRIDTQLFCDFIKRWPSLAQARCARKATLEKFFREHNMNRKALLERRLTAIKSALPLTEDEAIITPYQLQAVTLVAQLAVALASIRRYDDEIAALAPQHPDYTLFEGLPGAGPTLAPRLLVAFGEQRERYSKAAELQKYAGIAPVTERSGQSTWIHWRWQCPTFLRQTFVEWAAQTINKSYWAGLYYYQQRAKGCSHQAAVRALAFKWIRILYRCWVTRTPYDEAKYLKILQQRGSPLLKMAEAA

SEQ ID NO: 128200 - protein, 313 aa, unidentified
MAYRTFIGVDVAKQKLDVAVLPGERQQSVTNDETGIKQLVRWLRRLAAPLLVVEATGGYEYALVVALSEVGLHCAVANPRQVRDFARGLGLLEKTDKLDAGVLARFAEVVQPQPRPLACRALREVEALVQRRRQLVNMLTAEQNRLQTAAIAMRSDIQKHIAWLKQDLKKLNQALQREIKANPSWANTERILRGVKGVGPVTSSTLVTDLPELGHLSSRKISKLVGAAPLAHDSGQFKGKRAIRGGRKTVRGALYMAALVATRYNPVLRSCYQRLLAAGKLKKVALVACMRKLLVILNAMVRDGTAWRTAPAA

SEQ ID NO: 128201 - protein, 408 aa, unidentified
MEKFLKLCVGVDVSKDTLDVCLSGLRDDLSVKVIEEKSFGNNADGISKLMKWAKQKTEGNPYQIVMEATGVYHEKLAFTLSKKGVEAVVVLPKLMSNYFRSHNIRQYNDEICAEHIAMFGLSRKLDIWKEPEPVYMALRALCRHRFQLDKLKTLCSNQIHAQKHSETSLQEMIDMSEDMVKLAQEQIKEIDKKLQSILNESDWLKEKVAKVCTVIGLGWITVVKIIAETSGFNLIRNSRQLVAYAGYDVLSKESGTSVHTKSKMSKKGNKYIRAAMYMPALSAIRSDPQMAAFYSRLFHRHFIPKKSNVAVQKKLLVLIYTLWKNDCPFDPDYRHPASQSHNQENSTGNDQQCEQENEQPSEIAEKTVNKNREAIRRSLHRLDQVRLQGFDETKIKKNPQNEHSQRIE

SEQ ID NO: 128202 - protein, 424 aa, unidentified
MKVTYPTCCGVDVHKSFLVATIIKTTGGIEPSYQKKRFSTFNNSILDFKSWLLENECHDVCMESTGKYWVPVFNLLEDQINVTIANPKWVKAVKGNKDDTKDSKWIGDLFRLGLVKGSYIPCKSIRILREYTRYRYKLVSCRSSEKNRYQNALTVCNVALDSVVSDIFGKSSSSIIDYLLEQSGTTINHEEIASKLLKRLKSKEDVVIESIEGYQMTDSQKYRMRLVRAHIDYITAEINDVDKQIESLISSVPDYVKAIRFLTTIPGVKHDSAITIISEIGIDMSQFCNSKRLCCWAGLTPGNNESAGKKKSVRITRAGVYLKPALVQCAHAAVKSDKSPYYKKKYESLVKRRGKKRAIIAIARMILTAIYQMLSTGEVWNPSDLYKIDMPAPLVERQKAKAIKQAKKLLQNEGLLPPDKPLAS

SEQ ID NO: 128203 - protein, 322 aa, unidentified
MSFSNVLGIDVAKNSVVIFDQNNQRSINVLNTESALLTAISQNLWHPKDCLVALESTGDYSFLPMQIFVKAGFIVKLLNPIVTKKLIKSTIRAKKTDKSDAEAIALMADYGEGRLVTENDLKIAKKTLIRLEGKITSLTSSLKRIKQSLDLKSENGIALDEAVKQIDHLIETAQETAKNIWKLSKNEQVERQEEIISSHIGCGEKLSAIISAEAGDIKRFPSSKQFKAYAGIDPRIYQSGEKDVHGRMTKRGNGQLRRAIYLAAFVASMHDEDLKEYYQKKRGEGKAHTLAVCAVSRKLCERIYATVTQDRLYEPRCPQEEN

SEQ ID NO: 128204 - protein, 406 aa, unidentified
MRAIHERCCGLDVHKKTVVACVLTPEGRWTRTFGTMTAELLQLLAWLQQEGVTHAAMESTGVYWKPVYNLLEGQGIELLVVNARHVKAVPGRKTDVKDAEWLAELLQHGLLKASFIPERGHRELRELVRYRRSLVEQRATVVQRVQKLLEGANIKLSDVTSDVMGVSGRSMLKSLAAGKTDAAELAELAKTALRNKIPQLERALTGSLGHHQRFMLQSQFRLLESLEAEIATLDQEVAERMRPFQAALSRLDEIPGIGPRAAQQILAETGTDMSRFPSAAHFASWARICPDNNESAGKRKHAGIGAGNRWLRDALMEASWSVTHCRRSNFFTARYYRIAARRGKKRAAVAVAHSLLVAIYHLLKDGTVFQDLGAQHWEVRHREAIARRSLRRLEQLGYRITIEQTA

SEQ ID NO: 128205 - protein, 361 aa, unidentified
MQSTPVIAFDQHAATTVAAVLLPGQRTPALQTLASDTPAIVRFVERVRRQGAVRCCYEAGPCGFEVQRALTSRGIPCDVIAPALIPRRIGDRVKTDRRDASQLAILYRADALTAIHIPTEQEEAARDLLRCREDIRADLLRARHRLSKFLLRHGRRFTGTKKAWTKRHAAWLQAQHWPLTALAQTHRAYVRTVDEAVARLQAVDAELRDLLTLEPLKARVERLRCFRGIDDLTALTIASELGDPRRFPSAPSLMGFIGLVPSEHSSGPKRARGAITKTGNAHLRRVLVESAWHYRHHPFAGRSLRLRQRAAPAAVTQHAWTAQHRLHRRYRRLAARGKPKQVIVTAVARELTGFLWAVLTQ

SEQ ID NO: 128206 - protein, 335 aa, unidentified
MKEITTVGVDLAKSVFSVHGVDAAGRTVLRKTVRREKLLELVAGLPPCLIGMEACGGAHEWARKFQGHGHRVGIMMARFVAPYRKSSKNDGNDAEAICEAVARSNMRFVPVKSAEQQAILSLHRVRQGFIEQRTATINRLRGLLAEFGVVLPQRAEQVRRAAIVVAEELPVLAREAIADLRAHLTYLDERITRYERQLVELARQREAAVRIQNVPGVGPLTASAITASISDGHEFANGRQFAAWLGLVPRQYSTGGKPRLGRITKRGDAYLRTLLMLGARAVLQRAPHKTDRLSRWALALRARRGYHRAIIAVANKNARIIWALLAKHREFVLPA

SEQ ID NO: 128207 - protein, 368 aa, unidentified
MDQHSTVVGMDVHKRNLTVAILPPGKARPIEVLTIENRGKAIARMATRLTTGRAVFVYEAGPCGYEVQRQLHRLGCRAVVIAPALTPIRPGDRVKTNRRDAEKLARLYRAGELTEIRVPTREEEAARDLVRAREDAVADRLRARHRLSKFLLRQGRLYHDSKAWSKGHRVWVRQQRFDLAAAQQTFDAYLRALEEAEARLESLNSQVLELAQTPAYAGLVRALSCLKGIDTVSAVTIVVETQDFRRFPDARGYMKFTGLVCSEDSSGDKTRRGGITKAGNAHLRRVLVEAAWSYSHQNTTGPTIRRRRHGRSTGVVQIARRAQDRLHRRFWRLVHRNKLRQVAIVAVARELAGFVWAIAREYSTMQVA

SEQ ID NO: 128208 - protein, 463 aa, unidentified
MAARKPKRMGAQTVEDEDYQLRYERVAGIDVAKGSAMVCLRLPPGPGKVRRTSRTWEVMARVPDIEALAAELKASRVERVSMESTSDYWRIWFVVLEGAGLDVQLVNSSQARNLPGRPKTDKADAQWIARLTEMGLLRGSFVPPPEIRALRQYTRQLVHLSQDRTRYWQRLEKLLESALCKLTSVVSGLAGSASCLAMLEAMIAGERDPQVLAGYARGPMRSKHAALVKAFTGMQFGPEHVFSASSDLRMIKMLDAEITGLEQQVRDHLAAIPAAWGTDADGVTGPGAGTGPDAAVLPAVDRLTEIPGVGPAIAAGLIAEIGLDMSRFPTPHALVSWVGMAPVPNQSGPRKGRGRKGHGSSYARRLAGQAGNGAARTDTFLGQRHRRIRSRPAGGGWKKANVAVGRSIIIIVWHLLKDPAARFTDLGPDHYAKHTDTNRKARNHKRQLEALGYDVILTPREAA

SEQ ID NO: 128209 - protein, 338 aa, unidentified
MSYYAGIDLHSNNSVVGVIDSDQRKLFGKKCANDLDRISSLLEPYKESLEGVVVESTYNWYWLVDGLQEKGFRVHLANPAAIQQYEGIKYTDDQSDAFWLARMLLMGILPTGYIYPKDQRPVRDLLRRRLMFVKHRTSWIHNFQGVFCAETGRKISVNKIKGGERSYIFDLFGYDAQKLYAQEVISVIDFLTEKIKKIEKFVVGQVKLKPEFEPLQTVSGIGKILGITIMLEVGDISRFASAGNYSSYCRCVKTEKRSNDKKKGQGNRKNGNRYLAWAYVEAANFAKRFYPEIQRYYQKKAAKTKEVVAIKAISNKLARASYFVMKNQVPYDINKQFG

SEQ ID NO: 128210 - protein, 352 aa, unidentified
MTDYIGCDLHTRYQVVAWIEEGTGEICTRRLEHENGEARAFYGRVPRGAVVGIEATLPALWFERLLAECGHELWVGHATQIRAQAVRRQKYDARDAELLLELLRTQRFPRLWTPSLAERDLRQLLVHRMKLVRTRTAVKNQLHALAMSQGVCRRHKLWTAKGRAELEGLTLLPWARRRRQELLRLLDQLDAAIQPLDEAVAHEAQSREDAVRLMTHPGVGPVVGLAFVLTVGPVSRFPNSRKVVSYLGLNPREHSSGGRQHLGAISKQGNSMLRWLLVEGAHRAVVHDPELRRAYQRLKFRRVSGVAKVAMARRLAVRLYWMLRAPMNYAQLVRMSGSPSSAVVPRPAGSTL

SEQ ID NO: 128211 - protein, 399 aa, unidentified
MRKPKQPHQRHPQHQRKPNDLSHCLAALDGDHTLVAVVELSLSNWLVAGVVPGVERQPLKKLKPEPGALLELLHRWRLEAERSGRKIARIAVAYEAGRDGFWLARWLMAHGVEAYVIHPASIAVSREHRRAKTDRLDTDLLKRAFVGWLRGERDHCKMVAIPTLDEEDAKRPNRERECLVAEQSRLINRMKATLVRLGVRSFNPRLKGAADRLEALRTPEGGTIPPNTMAELRRHIERRSFVREQIRKIEAERIERLTRAPNTGPNVMVRLLTRVIGIGIETADLLVHEVLLRAMRDRRAVGRYAGLTGSPQRSGSMSREKGLARSGNARVRRTMVQLAWRFLRFQNDSALAQWYHQRTDEVPRVRKTMIVALARKLLIALWRLVREGVVPEGVAMRPA

SEQ ID NO: 128212 - protein, 481 aa, unidentified
MRLVPMTNTQKSSGSRLHYKTFGGARTARSASIFGGINRCQTQDRNNRPNRTGPRLRPSTGPNQKHFWKLLPAGSQQPEQGELENTPEAVEVWAAGLYQRFGGQPIAICLEQARGGLVYMLSKYSHLVLFPVHPTTAARYRETFSPSGAKADPSDTAYLLDLLLRHRDKLRQLQPDTVETRLLQILTEQRRRMVNEKTRQGLRLTDCLKTYFPQVLTWFGKVSSPLVGALLEQWPTLGELQRQHPGTLRQFFHAQNCRSEERIRERLEAIYQATPATRDPAVLEGFGLIAQGLVALLHTLRSHIKVLDRRIAELALAHPDRALFASLPGAGPVLVPRLIVAFGTRRDRYTDAYQMQCYSGIAPVTEASGKRQWVHFRFACPKFLRQTFHEFANCSIRYSEWARAYYESQRAQGKEHHAALRSLAYKWIRIIYRCWKDGKPYDEQLYLQALQRRNSPLRADPATGFGWKAVAGFAKFSNETS

SEQ ID NO: 128213 - protein, 341 aa, unidentified
MPIVTIGIDLAKNVFAVHGVDETGKAMLIKPRVPRDQLVNLISQLPACLIGMEACSGAHHWARVFQQHGHMVKLMAPNLVAPYRMSGKRGKNDAADAAAICEAVTRPSMRFVPLKDEHQQATLCLHRTRQGFVEERTATYNRLRGLLSEFGVVLPQSPEKLRRYITEHLDALPGWAKRSISDLLEHAGRIEDRLLEYDRAIVEIAREDARSKRLMQLRGIGPTTASALLASIGAGHDFRSGRQVAAWIGLTPGQYSSGGKARLGSITKAGDAYLRGLLVNGARAVIASLGEKQDRFSRWVRTLVERRGYWRAAIAIAAKNARLAWASLKYGDDFRLDPVKD

SEQ ID NO: 128214 - protein, 403 aa, unidentified
MYQNTCITIDVSQNISHIQGFIGPNKPLCKARTMRHSNQGFQFFLTLKDIIESKSNETPLIIFEFTGIYHKSLEKFLISQNLKYHIVAPLRAAKARNSEIREQKTDARDCLTLSKLFYTHSLGIFYSENQTYSSLRKLNRYYDTCMKHLIKIKVNFRETLAVIYPNYNKLFTSVYSDESLTFLKLFPHPSLYTSKSEDEILTILNEKWNHLESWSSSKVKKITPLVDETVSGCSITEPETLILLSYITQIEYYLNQIKTTIIKMNQLASKLPLYNLVHSLPGIQDILTCKFIAELGDISRFTNYKQIVAYAGIDPMIRQSGDKDGLHLKMSKKGNKRLRTILHLMVSSLIKANRQPNAIKTKYQKKTHQLNPLKPKVASMACANQLVRIIFYMHKTSSTYQYK

SEQ ID NO: 128215 - protein, 363 aa, unidentified
MKTTNQQNNAQADGALVVSKPYRCIKLGLDVHADSIRVVRMIDGATPQPAQKMTPDEFPKWAAKQLTLADRVCSCYEAGPLGYGLHRKLLALGVENIVIRPLVLDEYRVRVKTDKTDALALTKRLDTYIRGNRKAFAAIRVPTEQEEQDRTLSRQREQLVREVRRLGAQGRSLMLFHGFHIHGVWWRVQWKTLKEKLPGWLVERLEVFRALLHVLDAQLRKLTQAVEAQAPVARPRGLGALSFEVIRREIGDWQRFNNRRQVGSYTGLCAGVASSGGSRKTLSINKCGNPRLRSSLVTLAWRLVQYQPRCRLIQKWKRVLLKPQMSSGARKKAIVAVARQLAVDLWRWQTGRVQAEQLGWRMT

SEQ ID NO: 128216 - protein, 394 aa, unidentified
MSYRSYPYIRVTKIVLLPFDVEHTADGLKKLITKLRQLDGEIRIVMEHTGMYWRPIAMTLKEAGFYVSVVNAILIHNFSDNSIRKIKTGRADAMKIANYGLTFWIDLQEYAGEDENRQLLKIQSRLYERTATTAGMLRNGLISLLDQTFPGANKLFRDDSRNSKGHVKWIDFVLRFWHKECVASLSLASFTDTFQKWCKRTGYKFSASDAERIHAIARNAVATLPKNDSTKLLITQATNSLNAIYDSLQAIRTEMDRLASMLPEYELVMGMEGIGKVTGPQLMAEVGDVRRFSHKGALVAYAGVDASPYQSGSFDSKSRHVSKRGSPHLRRVLFVIMSMTLIRANTANPVFCFMDKKRAEGKHFYVYTVAGSAKFLRIYYAKVKEYLNALEDTA

SEQ ID NO: 128217 - protein, 302 aa, unidentified
MRYLGVDVAKDTLEVADASGKQRRSFPNTGEGIEALLHRLVQDFCSEELHLVLEPTSTYHHPLVVALAAQQVPYTLINPAHTAAFARVQGKRAKTDRVDARLLASLGESQQPEPTQPPQEDQEELRATRRHLEWLEQELQRAHNRLEAARFSTWTPQAVLQSLERTIQQLEEEVWQVHEALETQQQARPDWTVQMKLLTSIPGVGKKTALLVLSELPPVTSCASAKSWVAFCGLNPEPRDSGKAHHSRLSRMGTARVRAGLHLPAVSALRCNPLVKALGDRLKARGKIGRVRVVAAMHKLLR

SEQ ID NO: 128218 - protein, 348 aa, unidentified
MTTMVEDTRVITGGVDTHADLHVAAALDSVGGLLGVQEFPATAAGYAELLGWLRSLGNLALAGVEGTGSYGAGLARYLAAAGVRVVEVDRPDRQDRHRQGKSDPLDAVSAARAAQSGRASGAPRGRDGAVEAIRALMVAKRSARQERTQAVNQARALIVTGPEELRARFARRSPAQLIEAIAALRPRPGDVPGYATRVALRELGRRARFLDGQLDRLDELIGPLVTERAPGLLALHGVGPDTAALLLVAAGDHPERLRSESSWAHLCGVAPIPASSGKTAGRYRLNRGGDRQANSALWRIVIVRMSSHPATRAYAARRSEEGLSKKEIIRCLKRYVAREVYRQLRDGA

SEQ ID NO: 128219 - protein, 400 aa, unidentified
MNNNIHLYIGIDVSKDKHDICIKNNAGNVLKRFQIRNNKRDLNKLYTTVTKFKLDIGDNIGVFFGMEATGIYSFPLYSALKRDGHLVKLYNPIQTNGYRKMEIRKTKTDSIDSAIIADMLRYHEPPVVTAIDNLELYQLRELCRVRQRNVEKRTKCKIQLVRDIDTVWPGYQSVMRSVYGKTSIALLKEYSVPSNVAAKSFEEVYEIITQFSRSQITRARAEEIYNHAENTLAVPEIDSIVTIEIKTLVSEIELYDKQILKIEKMMMQTMEKIDSKITTIPGIATITGATILGEVGDIGKFSSAKKLVAFAGLDPITNQSGKFENKTGHISKRGSPQLRSALFMAANVTRQNDENFMDYYNDKIERGKHHYSALNATAAKLLRIVYWVLKNDKEYKVKSV

SEQ ID NO: 128220 - protein, 371 aa, unidentified
MKEFSKYVGLDVHKEKIAVSVAEANGGELRYLGEIANTPEALDKLVKQQRKGGANLSFCYEAGPCGYGIHRQLTDLGWDCQVVAPSLIPKKAGDRIKTDRRDSLMLARLHRAGELTAVWVPDGAQEALRDLTRAREDMKHLQRQAKQRLLAFLLRHGKRYDGKSNWTLAHYRWMEEVKFAHPVQQIVFQEYIDTVKAMDKRVGALDKQIESAAAESIFWPVIEGLMALRGVNLLTATTIVVEIGDLRRFASAPQLMAYLGLVPSEHSSGGTKSRGGITKTGNGHVRRVLVEAAWTYRHPARKTATLQRRAERTSEAVQEIAWKAQTRLCGRYRLFEAKGKLKVLACTAIARELVGFIWAIGQALPQPAANA

SEQ ID NO: 128221 - protein, 450 aa, unidentified
MGNGNGVSRGDRNRNARLDRLRTLVSMSNAIVGIDLADRKQMVVVTDHDSKVLARKTFRCRAWDLGRALDWAAGRAAAKGFAGVTVSCEPTGHRWRVLGQLAADRSMPFVCVQPMVTSWARRAEDLTHDKTDEKDAVLIARLTAQLRCYEPEPVDETWARLRHLGARREQLITETSSQVQQMRDLLECVWPAALGTAQQPFRSRTWIAALMVIVDRDSGEFDRTRRLGAARFEHAVRREIVKHGGQKPCRRITRNLFAALADPAGVIAHRAGALERVQLLLEDWRNAHDRLADAETRMTGVLDQLELTGLATSITEISAVGAAAILAQTGAPRRFATARALVKHAGLAPREKLSGAFTGKTRLTGQGRPGLRLAAWRAVWGAQRANPVYGARYRHLTTREHNKLKPTQAQTVIAAAILRHLHAVITTGQAWNPAIATHGTRPRLRPAAAA

SEQ ID NO: 128222 - protein, 383 aa, unidentified
MDTHKKQHTVAVHFPSSPELVVLTVKNNTRDIARMVKKITKQAPDDVKFSYEAGVCGFTLKRRIEVLGCKCAVIAPSLTPKRPGVRIKTDRRDACKLAAMFEAGLLTEVYPPSPQQEAARDLTRCRQAALQNVKRLRHQLTKFLTRHGYVYALGNPWTIKHFNWMRNLEFDQPLLRDVFDSYFTELQHCIQRLDSLNKQVEQLAQSRPYREIVGLLRCFHGIDTLTAITAITEIFQFGRFATPGELASYLGLTPSESSSGEKQNKGPITKAGNKRARVLLIETAWHYRHPHRITASLKKRRKGQPQWAIDIADNAGRRLRRRYWRLVNQGKMPCKATVAVARELAGFIWAVFREYHIRKEGLAFGEANSNFITQPPKPDTAGR

SEQ ID NO: 128223 - protein, 323 aa, unidentified
MQGKDMPVSDAMSAVYVGVDVCKDWLDVHVHPQGLRLRVGNDRLGLRRLKKTLAGLSVARVVMEATGKYHRAAQRSLHAAGLAVAVVDPRRARLLAQAIGQHAKTDAIDARFLATMGAMVDPPAREPPPRLIEHLAELVAARRAATADRAALSNRLTATTIAFLRTELRRMRASTERHIRRLDAAIAQLVESDPDLARRHAILCSIPGIGTVTAATFLAGLSELGQASAKQLAMLVGVAPIANDSGDRTGQRKVRGGRRTVRDAAYMAALSASRYNPALASFAARLKAAGKPTKLVLVAVMRKLVVLANTLIAGNRLWTPNPP

SEQ ID NO: 128224 - protein, 400 aa, unidentified
MKTTDRTAEAIGLDVHRRFSTVTARNAEGKIAWRQRLEHEDRDDLRKRLATWPRGIPVILESSFGWEWMCEELEQSGLAPQLASSRKVAAWRDARGMAKSNRTDADLLSELGRQTDRWWQVWLAPAEVRDRREWMRYRMSLVRLQTGLKNRVHAILHRHGILHDFADLFAAPGRRMLTQLVYDAENPRLRESGRATLKGYLQLLDQLRRQIAAVTRTIYRQLRATPQAKRLQGLPGVGPILAHTILAEVGDFARFRSAKHLASYSLLAPRAFDSGEETDEAPKGRHVGHMGRRTLKWAWIEAAHSAVRPGGRFREVFERYTDGGKRNRNRGYILVGHELCRTAYAISKKETEYRDDPPARPGSSKKGAVSRQRDRRRRARSQNSRPGTGQPDVTMVVVAM

SEQ ID NO: 128225 - protein, 338 aa, unidentified
MQVVYSRCCGLDVHKDSVTACVLVFDDQGRRQVRKKEFPTYWQQLQRLKLWLYANKVQHVAMESTGVYWKPVWNILQGHFPLLLANPYHMKNIPGRKTDQNDAEWIADLLAHGLLRASFVPPREIAELRDWTRYRVKLVQEYNRIHNRIHKVLEDANLKLSSVASDILGATGRAIIQAIVRGQEHPDWLADKAMSSLRNKRDQLRLVLKGRITDHHRHLLRELMGDVERVEEKICRVQTEIAERMQPYQELMDRLTTIPGVDILTAWTLIAELGPDMSVFPDADHAASWAGLVPGSFESAGKRKSSRTRHGNRWLRRALCQSAWAVAHKKDCYLTAHF

SEQ ID NO: 128226 - protein, 347 aa, unidentified
MLPFYLGIDLHLRRTFMVLMNAKGEVIDKQRISNQEIKKYLEEKVPRDTYAVLEATRNWAFMYDWLHAHVQQVDLVHAKGVQAIAAATVKTDQIDASTLAQLARLNYVPKAYAAPQEVRDLRQLLRHREGMVDQRSKAKNRIHAVLAGYNLVSPVTDLFGVAGRKYLAEVLEKELRLAARRVVEDLLALINHLDESIRSFEKDIALSEGQTQVMTLLMSMPGVGKLNALTIMAEIGDIGRFHSPKSLCSWAGLTPKVHSSDAVVHHGHITKEGSRYLRTAMVRTATVACRVSPKWYREHERLARRCGRRSARVAMARRLLSVIYYMWKRDQPYQEHYGQKLPDALGA

SEQ ID NO: 128227 - protein, 409 aa, unidentified
MKAKTIELTPIFKSAVGLDVHQAKITACAIVEQEDGTHEVIFKEFGGFKKDRKLLAQWLSSLHPEVVVMESTGIYWKSPFAALEKVGIVALVVNARHVKQVPGRKTDINDAQWLAMLARSGLLNGSFIPPSTLRTARLISRQRQKLVGILSAEKNRLHKVLTDGGIRLSVVLSDINGKSGRAIIEGLLEGKTTAELLQFVDRRVKASNEEIGDALQGELTPSHLFVLNELMEHIKALEIKIRRFDNQLLKELFDYKPAIELLQTMPGIDQIGAAMLIVEMGSDMDAFKSANHLASWTGLCPGNNESAGKRKSGKIRKGNPWIRRILCECAHAAKRTECMFKQKYQALVIRRGTKRALVAIAHKLLKTIFALLKSGECYRDSTINYEELSVKRNAPRWISKLKEFGYMPA

SEQ ID NO: 128228 - protein, 337 aa, unidentified
MSVYVGIDVHRKRSQVAVVTGDGTVELNKNVVNGSEPMLRLIGDLPPGTPVAFEAAFGWGWLAALLEDYGFEAHLVHPLRCKAIASARLKNDKVDAATLAQLLRADLLPEAWIAPPAIRQLRALLRHRAGLVRLGTQQRNRIHAVVADFGYDRSGSYLSGPGRGWLAGLDLPPVSREVVADCLAVIDGLAPVIDRIDGELRQHAKADPRVKTLTTLPGVGQFTALVMLAEIGDISRFPSARKLASWAGLTPTVRGSDLTVRHGHISKQGSAWLRWVLNQAAQTAKRSPEFAASYAAIAKRRGKKIATIAIARKLLTRAWHLLADMQAASTNEPPRRP

SEQ ID NO: 128229 - protein, 361 aa, unidentified
MAIGLDLGDEHSQVCVLDVDGEVLEEGRVRTTSEDLKRWFGRVERTRVALEVGTHSPWVSRLLDECGHEVIVANARMVRLISESGKKTDKVDAETLARLARFDPKLLHPIRHRTAEAQRCLGALRARDALVRTRTLLVNHVRGAVKSYGGRLKGSSAGSFHKKAVEDMPEHLRHILLPVVECIGEVTKRIREYDKAIEGPLCEKLPETGALRQVKGVGPLTAAAFVLVIQDPQRFERSRDVGPFLGLTPRSDKSAQYAPELRITKAGDGFLRRLLVGSAHYILGPFGEDSDLRRHGIAIAQQGRKNAKKRAVVAVARKLAVLLHRLWVTGEVYEPLRNTKRKEKGERRRGGTTVGSTPKES

SEQ ID NO: 128230 - protein, 428 aa, unidentified
MQYALIQVLPDVPPGGVCAGIDWASTDHVACVVDMAGRVVDRFTAAHDRAGIAGMIARLRRAGAGEVAIERCDGPLVAALLAAGLTVVVITSRQVKNLRSRFSAAGGKDDRFDSYVLADTLRTDRARLRPLVPDTPATAALRAAVRARKDLVAHRVAAANQLRAHLAVAFPAAIGLFSELDGPLSLAFLARFGSQDAAAGLDEDAMAGWLSTLPARGNPAPPAVLCARLRSAPPGATGGDGGAQAGVTAALAASVASLATQIKALEIQIAGQLAGHASAHIFTSLPRAGTLRAARLLAEIGDCRSRFPDPWPLAALAGVAPVTRRSGSHTAHTFRWAVSHQLRDAVCDFAADSRHASPWAASICHDARDRGKDHPHAVRILGRAWIYVIWRCWQDRTAYDPAKHTALQRLLDQQRAAQAARPAPQEDR

SEQ ID NO: 128231 - protein, 410 aa, unidentified
MSNSLLVGIDVSLNDNKVRILHPDGTSISKFVVPNSVPGAKTLSQKVSGIMEKNNFDSLIIGLESTSVYGDPLVYFLKQDASVNRFDTKIHVLNPTQVNKFKMFYPDLPKTDDIDAWIIAEHLRFGRINKEVYMDDRYKALQKLTRARFHTAQNLAREKNWFLNNLFLKFSSLTQEKIFSNRFGAASSSLIEEFFSVDEIAYMPVEELVEFITKKGKGRFQNPDEIAAAVQKAARSSYRLPKTVTESVNQVLAVSFAAMKAYKEQLKILDKAIEEQFKLIPNTLTSIKGIGPVYAAGIVAEIGDIHRFKDHAALAKFAGIAWTKHQSGNFTAANTHLIKFGNRYLRYYIMEATNKVRMHDYELKRFYDLKYSQTLKTPHKRALALTARKFVRLVYALLHSNRLYTPPTDK

SEQ ID NO: 128232 - protein, 352 aa, unidentified
MFYVGLDIHDKRIAICVLGETGQIIRRAQVRTINEMMRILEALPDRFEVCYEASCGYGHYHDLLSPIAARVTVAHPGRLRLIFRSKDKNDRKDAERLAKLLYLGEAPAVHVPSADVRTWRELITCRGRVIAKRTRAKNSIRTLLRCAGVVPPGRPALWTKKGLEWLRRLELPTTSQQLRRDLLLEEIEALTNQVRRIEHELNHQAGRSPAVARLRSIPGVGARTAEAVAAFIDDPHRFVDAKAVGRYFGLVPSQDQSGDRNRLGHITREGPAVVRQLVAEATWQALRRSPTVRAYFERVRRGDPQRKKIALVATAHYLVRVMLALLKTGTTWEEAVGPADEPQRAVPAAAAI

SEQ ID NO: 128233 - protein, 325 aa, unidentified
MQGKEASEQETRNCTAGIDVSKNRLDAHILPSSDSLSVANTSSGIRQLKRWLLKQKVDLIAVEATGKWHRELCRSLRASGLAVAVIDPYRVRNYAKAERILAKTDRLDAKVLAMFAATMKPDCQAPTPEVIEDMQELVTARANAVEEETSLQNQLGSAKTHFLKRQLARRVAQLKAHIKDIEQACLKQIKSDDVLARRFAILTSIPGFGTVVAITLIAFLNELGSLTNKQIGALAGVVPIADDSGERKGIRVVWGGRGIIRRMLYLAALSASRHNRDMKLFRQHLSAEGKAPKVCLIAIARKLVVLANTLITENRQWQPAAPQNA

SEQ ID NO: 128234 - protein, 347 aa, unidentified
MGHYAGIDVSLECSSVCVVDASGKIVREGKVASEPVTLITWLGSLGVNLERIGLEAGPLSQWLYGALRETGLAVELLETRHVKTALSTMPVKTDRNDARGIAQLMRLGWFRPVHCKSMAAQEVRALLTARKLVQSKLYDIEMSLRGILRGFGLKVGPTTSQSFAARINHLVDGQTSLEAVAAALLSLHAVALREFKSLEKSVRQISRADARVRLLMSTPGVGPLVALTYVAAIDDPARFTSSKSVGAYFGLTPKKYQSAETDVSGRISKMGDGSVRTALYEAAHVILTRPIKGGALKSWAMKLARRAGMMKAKVALARKLAVVMHRMWIDAIKFDTDKASGCVRVAA

SEQ ID NO: 128235 - protein, 360 aa, unidentified
MKVQRTSVGLDVHARSVVACGLDGETGELFERRLTPDHGEILAWLGDLPGPVAATYEAGPTGFVLARSINASGIRCSVAAPSKLQRPVGDRVKTDKRDARHLARLLHLGEIVEVEIPSVEQESARDLFRAREACRKDLMAARHRLSKLLLRLRIVYYTGTAWSRNHERWLQSQRFDDPALAIAYDTAFDTVLTTTARRGRLDAAITAMAADSTFTPVVTRLGCLRGVSTLTAFGLATEIGDWHRLSGRSIGAYLGLVPCEYSSGDNRVQGGLTRTGNGHARRLLIEAAWHHRPSYRPGEVMRRRWDAAPPAARARGQAANRRLHARWLRFNERRKRPVVANAAIARELAGWCWSLAVMDD

SEQ ID NO: 128236 - protein, 346 aa, unidentified
MMIIGCDFHPSWQQVSWLDTETGETGEQKLVQASGDAERFYRQVAAPALIGMEATGNCHWLVDLLSELGHELWVGDAAQIRASYVRQQKTDKRDAAHILKLLVEGRFPRIWMPSSEVRDLRQLLLHRYKLVIMRARVKNELQHLCLNKGVQRKHKLWSAAGQQILRELPLQPWAGRRRDDLLKLMAMLDQQIEPLDQAVKAEAQRDKMALLLQTQPGVGPITALAYVLTMGDVSRFPRGKQVASYLGLIPREHSSGGRQKLGAITKQGNRMLRMLLVEAAQIAVRYDPEFRREYLHRCHQKPKAVAKVAAARKLAVRLYWMLRTQRPYPEIVRIESSPRVPLVGAS

SEQ ID NO: 128237 - protein, 401 aa, unidentified
MKIAGIDVHKKVLMVVIVDGSAPEEKPTRRRFATMPSQLHQLLIWLQGQGVEEAVMESTAQYWRSVWLELEPHMRLHLAQAFSNRAPRGRKHDFKDAERLVRRQIANELILSFVPNGEQRIWRSMTRMKLQLTRDRVRLQNQMECLLEEMRIKLSIVVSNLLGASGLRILQALAQGETDPKKLAELGDERLQCTEEQLVDALTGRVQPMHREMLSLQLQRLQLIDQQMAQLNGMIAQAMKAHQDAVIRLAEVPGLGADSAQQIIAEVGAQASTFPSAAELTSWVGTCPGKEESAEQNRSSRSAKGNKYLRRVLNQAAHAAVMKKGSYFQGVCSGVCCRDWAISPPSGPLPIVFAAWFGRSCMRACDSSNETAKLIPGPKSNVRKCSYAHFASSDTRSPSHP

SEQ ID NO: 128238 - protein, 400 aa, unidentified
MTHPQSCPVVTPTRIGVGCRGRPLTQKRKDTATVTIVAHTHPFVIGVDTHARNHALSILGMPHGEVIDDGEFSTTSAGIARAIEWVGRRTGGDLGVLWVIECSATYGAQLARSVTAAGYQVVEAARMSAADNRGVGKSDPMDARRIAASVLALRADQLRYLRKDDGPRAGLRVLLAARDHMTSERTATINALIALLRILDLGIDARRPLTGKQVIEVSRWRSRAEAVEVGIARAEAVRLARRVVDLDDELAQNIRTTTVLLRKSAARVLLDKPGIGPVTAAVALAAWSHDGRLHSEAAFASLAGVSPIPASSGNTVRHRLNRGGDRRLNKALHMAVIVRMTHDAETRAYVDRRLAEGLTKREIRRILKRYLARQIHRALTAASRADHLPINSTPATSFPT

SEQ ID NO: 128239 - protein, 343 aa, unidentified
MSHKTAATVAHTIGIDTGKNTLHLIGLDDKGAIVLREKIARGRITARLANVPRCLIGIEAGMATHYVARELSALGHDVKQVPPAYAKPFRQGHKNDFRDAHAIAEAVQRPSTRCVPVKTDDQLDLQALHRVRSRLVGQRTAVINQIRGFLLEHGIAVRQGLRFLRQQLPDILAKRSDVLSPRMIRIMEDLSGDWRRLDERIEHVTKEIEVLAHGSKSCHQLMTVPGIGPLIASAMVAAIGNGAAFAKGRDFAAWLGLVPKQMSTGDRTILGRISKRGNRYLRTLLMQGARVILLRPANWAKHSFGPWLTATANRLHHNVLATAVRAENLNSDIVVMKSTQDGK

SEQ ID NO: 128240 - protein, 381 aa, unidentified
MTTTATHTEPGHTAAGTLFMSFELSDKTWKLGFTTGPGQKPRERNVTARDQERVLDEIASAKRRLGLPETAPVVSCYEAGREGFWLHRFLLAHGITNHVVDSSAIEVSRRQRRAKSDGLDVRKLLSMLIRYEQGERQVWQVVNVPSAEAEDQRHLHRDLETLKRERGSTTTRIKGLLTSQGIQVTSLTHLPEQLDALRLWDGSPIPPGLRQRVLRVYAHHQFLSEQIAEVEAERRALLQTSSDASIDKIRQLMMLKGIGINGSWLLVMEFFGWREFKNRREVGGLAGFTPTPYQSGESSREQGITKSGNRHVRWMTTELAWSWLRFQPDSALSVWFRERFGSGGKRLRRIGIVAVARKLLIALWRFLKTGVLPEGAVLKEG

SEQ ID NO: 128241 - protein, 420 aa, unidentified
MGTLNKTNYVAFVGIDWADRKHDVCLQGTDCEQREFSMIPHQVERIDEWAQSLYQRFGGPIAVAVELSKGPIVYALQKYDFFVIYPVNPTTLAKYREAFTPSRAKDDPTDAELAVDLILRHSERFTPLQPQSVEMRTLSLFVEQRRTLVNDKIRLTNRLRYALKQYYPQVLEWFEDIDTVLFCDFIARWPTLIQAKRARANTLKRFFCEHNMRFAHVLERRVIAIKQAIPLTRDEGVIIPHRLQSLVLIEQLRITLEAIKQFDEKIEELASKHVDYRLFRPLPGAGPTLAPRLMVAFGEDRERYQNAAEVQKCAAVAPVTERSGKKCWVHWRWQCSRFLRQTFVEWSEQTINKSFWAGAYYRQQRAKGSTHQAAVRALAFKWIRILYRCWQTRTPYDETKYLQALERRDSPLLKQLGEII

SEQ ID NO: 128242 - protein, 343 aa, unidentified
MQNDTVIAVDVAKAVFEVAVSDRPGHVCRRERPTRAQFLAFFLAYPGATVVMEACGSAHYWGRELQKRGQRVVLLPPHQVRPYVRRNKTDRTDTKGILEAYRNAEIRPVPIKSLAQQSLTTLHRLRGGWMAERTARLNALRGLLREMGVFIPVGAREVVPAVWLQIQDADSEIPDVLRPVLAEACQEIRDIESRVKMVERDLEALAAQLPAAAHLMTIPGIGLLTATALVAFIGDIRRFPSGRHLASYLGLTPREFSSGLKRHLGRISKRGDGYLRTLLIHGARSVLVHARKQQPDRLRAWAHDLAQTHVHNKVAVAVANKLARIVWAVWTRDVPYQLIPKAA

SEQ ID NO: 128243 - protein, 356 aa, unidentified
MSEITRVGVDLAKSVIQVHAVDAAGKLLTNRQLSRDKFLTWCAQLPVGCVVAMEGCGGAHHWARKLIALGLNAKIIAAHLVAPYRLQGKGGKNDANDAAAVCEAASRPNMNFVPVKTTVQQGLLCVHRLREGLKEERTACVNRIRGMLTEFGLVVSKSPEKLREKLTDMLEDASNDLSGVARLVIEEAYSHWKEIEERIKWCDQRISAHVKDDAQAKAAKELMGVGPVTASAVVATVGDFNQFKNGAQFGAWLGLTPRQNSSGGKSNLGGITKRGDMYLRMLLIQGAKSAVMTAHKRDDPISKWLHQLREKSGWQKAAVAMANKNARILWAMMTKGCRFDAQHVSVKPAGLAPAMA

SEQ ID NO: 128244 - protein, 328 aa, unidentified
MKLQHIIGADLSKESIDFLFHDRNTHLKTENGNVGFQQLLKWFSEQKINCSDAMIVMEHTGLYSYHLEAFLHKHHIAFAKVPALAIKKSLGLVRGKNDKVDAKRIARYGFEKKDVLVAEPPPDKLLLRLKLLHSSRQRLVRLRTSLKSAVTALRGIVGASDLIITSHRRLIKDFTDQIKRIEAEIKEVRSQHTSISFNTRLLQSVKCVGEVVSTATIIRTHNFTRFANGRKFSCYCGTAPFEHSSGKSIRRKTKVSHLADKEMKTLLDRCACSAIQYDKELKAFYERRLALGKSRQSTINIVRNKIIYRMFAVIKRQTPFVDKYLKTA

SEQ ID NO: 128245 - protein, 353 aa, unidentified
MMEWVSNHQRKEEKTVSKITTIGLDLAKHVFHVVCCDGRGKLVSKRMLKRRQVLTFFAALPPCRIGMEACAGAHYWARQLQARGHEVILIPAQYVKAYVRGNKNDYNDALAISEAVSCPQMRCVGVKTPEQQDLQALHRLRERCVQMRTGLCNQIRGLVGEYGLVCPKGVAVLRRQIPVWLEDGENGLSELFRRLLSQSYAQLQSLDAHIAFYTEELERQGRQNTVCQRLQTIPGFGPIAASVFYSQVGNDQAYRRGRDAAAAIGLVPRQHSSGAKQTLLGISKRGDRYLRSVLVHGARAVVARAGTKPDRLSQWINRIRAERGFNKAAVALANKMARIGWAVVANNTVYRAA

SEQ ID NO: 128246 - protein, 417 aa, unidentified
MSNPLIVGIDVHSRTNRTCLLDREGEPLGQRFSTANNRPGTETLIARLEEALQQGQFDSLRVAVEATNWYWFPLYQALSQAPELALWPQTFYTFNPRVTARYKDSFSDKDKSDDVDAYVVADRLRTYSRQELPAPFVPDLRYLGLRFLTRYRYHLVKDLVREKNYCLSLLYLKANEYREAHPFADVFGATSRAVIAECASLEEVAAMPLAELAVWLDAKGKGRFPDPAKVARELQRVAQDSYPLDPQLQEPINYVLTWSFQHVNCLERQVQRVNTAVADTMRDIPHTLDTIPGFGPVYSGGIIAEIGHAERFDQDEAKVAQYAGLHWRQHQSADFKAEDTRLTKRGNAYLRYYFCEAANAVRMRDAEYAAYYQRKHDEVRTHQHKRAVALTARKLVRLVVRLLTTNQPYQPRRQPSG

SEQ ID NO: 128247 - protein, 353 aa, unidentified
MDRIYIGVDFHARQQTICYLKTETGELVICELKHQDKQKVRAFYQQFPGPVIVGLEASGYSPWFERLLEELGCEVWLGHATEIRRRARWRQKNDRRDAELILDLMLHNEFPRLHRPAPESREVLRMLRYRQKLIKLRTMSKNSLQAIALQSGLAKGRALFTKAGQQALSTAEMSPVMQWQREHWLQLLKPLNEQLLETMVWFKEQSKGDVNITRLRTHPGIGLLTSLCILHTLQPVSRFRNTRKVAAYAGFDPIERSSAERKCFLGISKAGSRILRYLLVEAAQTAVRKDEDLKRFYKRLAERRGRPKAKVAAARKLLIRAYIMLRDEIDYAEFRHRAVAARLARRGHRPESA

SEQ ID NO: 128248 - protein, 408 aa, unidentified
MDLTPMHKRVIALDVHQAKITACAVIEHDDGRVEVTKRDFGAFKRDRRALAQWALEMAPEVVVMESTGVYWKSPFAALEAVGLIAWVVNARHVKAVPGRKTDMADAQWLATLARAGLLRASFIPPVQMRQLRLVARQRQKLVGMCSAEKNRLHKVLVDAGIRINVLVADIHGASARAMVKALIAGQPMHEVLDHKGRLRASRQELCEALSTEQFSAVHRFVAQEIMQHIEQIEQRIARMDQYLLEGLRPWQAQLRLLQTLPGIDEQGAAMLLVEIGADMGVFGSAERLASWVGICPGNNESAGKRKTGRIRKGNAWVRRLLCEFAQAAARTRCALKAKFDALTIRKGHKKSVVALAHKMLRTIYAMLSNGSHYQDKEVDYEALNVQRNAPRWIKMLRKHGFIATPAAA

SEQ ID NO: 128249 - protein, 357 aa, unidentified
MPTDRVCAPSVKETQIPMVVIGIDAHKRSHTAVIIDGNGRKLATKTCKTTSQDHLSLLRWAAGHGPDRVWAIEDCRSMTRRLEHDLLAAGERIVRVPPKLMAHARDAARTYGKSDPIDALAVARAALREDHLPTAHLDGPDRDLRLLVDHREDLIAERTRAINRLRWHLHELDPSWDPPARSLDRVSNLDRILSRLAQLPGVVAHLATAITERCRSLTQEINLVEAEIRDLAEKLVPTLIALPGCGALTAAKILGETAGITRFHSAAAYARHNGTAPLPVWSSNRARHRLSRTGNRQLNAALHRIAMTQARCHEPAKDLIARRKAGGDGGLEALRVLKRRLSDVVYQALHVDCALTG

SEQ ID NO: 128250 - protein, 387 aa, unidentified
MYFVGIDISKFKHDCAVIDEIGDTIQPSWSFGNDREGFSLLKERLDSLPGDKKIGLEATGHYGQNLKLFLEANGFAFMEFNPLLVSRFVHGKSLRNTKTDPIDAGNVAQYLMTVEYKPYPPSFYHLDQLKSLTRFRSSLVRQRSRQLVELTNVLDKIFPEFKPFFKGKFSATALYILDHYQSPERIAGMNTRSYEPLRKISRGHFSLNDFVKLKALAKNTVGCTTGFLLQEMSILLELYTQLDAKVEELDDQIEECVRDIDPPMLSIPGVGASSTAVILSEYGDFSKFKNPSKMLAFAGLEPGYFQSGQSESTGHMVKHGSPHLRCALLNCCLPLISNEPIFAEFYAKKRAEGKTHQVAMTHVAKKLLRVIYTLQTKNIPYDPTLIR

SEQ ID NO: 128251 - protein, 493 aa, unidentified
MDWFGFGWRVSEVGHRGKRKLAPVDKSAPEVIPDAEHELVLERVAAVDVAKAAGKVCVRLPANSGRRISRVWDVPARTGAIIELGEQLTELGVQKVTVESTSDYWRIWYYLLEAAGLDAQLVNARDVKNVPGRPKTDKLDAVWLAKLTEKGLLRPSFVPPAEIRRLRDYTRLREDLTHERTRYWQRLEKLLEDALIKVSAVASRLDTMSTRDMIEALIAGERDPRRLAELARGKMRTKRSELITALDGRFDDHHGELARMLLAQIDALSAQINTLTGRIADLIAELPEAAAADHGIGEDTDTDAPGAGDRSDAGPQPTRRVDSATEAECAQLSAIERLDEITGLGEHNAQVIIAEIGLDMTRFPTPAHLVAWAKLCPRTIQSGPVTRGGRTGKGNPYLKGALGQAAAAAARTDTFLGQRYRRIVKRRGKLKALVAVARSILVIVWHLLADPLARFHDLGPDYHITRINIERRMRNHIAQLTALGFRVTLEPAA

SEQ ID NO: 128252 - protein, 405 aa, unidentified
MYYVGVDIAKEKHYVCILDDTKELVCKPFWIYSDILGLRELLKRLAELSLDMDDFIIGIESTGAFSENFYSYITDADYKVILLNSYQTSKYRDFSTLKKIKNDSIDAYVIAELLASGKYKASYISNEDYHNLKVLNRLKKSLDDKIKTIKREISTVVATVNPEIEKVFPNIFTKSALAIIKSYPTAMDISKATPEKLTKIFRHIKGNNFSEDKAEYLISLAKTSIYTGRANESRALMIKTNIKILELYIQERDEVEEQIQILIDNQLDDDSSNIENLKSIPGVADKTVTAILGECGDLRRFESAKAFIGFLGLYPTLYQSGKSLSTGTLAKRGIPIAKHALYMAAVSAVRHNNELHKLFRDKVSSGKSKKEALIIIAKKLASIIYSLFKYNQAYNPYRVLIQHKK

SEQ ID NO: 128253 - protein, 369 aa, unidentified
MSDVITYVGIDAHKKDLFIAMLVGQQAKPVAWTVANEPNAVRRLAKKLEREAPGPVQAFYEAGPCGYALQRQLTTPRVQCDVVAPGLIPQKPGERVKTNRRDARKLVELGRAGLLTTVRPPTPAEEAVRDLCRARDDAREDLQRCRHRLGKLLLRRGLQYRVGRHWTKAHRRWIDSLTWPHDAERVVVEDYLLAIDQHETRLKELDQQLAAVAETEPYREPVAWLRCFRGIDTLSAMLILAELHDFRRFPSPRALMAYVGLVPGENSSGEKHCRGRITRAGNALVRRLLVEAAWHYQHRPGVGVALARRRKGQPGRIIAIADKAQQRLCRRFQYLAVMNKPRPTIVVAIARELVGFLWAALQPALVVAN

SEQ ID NO: 128254 - protein, 369 aa, unidentified
MSDCITMHVGLDVHKDSIEIATADVRGGEIRHVGRIGGDLPALDAALARLRCPVAGMQVVYEAGPCGYAIYRHLVARGIACAVVAPSLTPRRPGERIKTDRRDALKLARLSRAGELRAIRVPDTEDEAIRDLLRAREDTVRVQRNARHRLKALLLRQDVRYTGKTAWTPAHERWLARVRLPTPAQQIVFQEYVDSVHQATLRIARFDTVTGDLLPHWTRYPLVRELQALRGVRQLHAAMLVAEVGPFERFDSPRQLMGFLGLTPSESSSGSRRRQGAITKTGNAFARRALVEAAWQYRFPARVGITIARRQGECSETARAIAWKAQVRLCARFRTLQARRMLSTKAVVAIARELSGFVWAIACAEAASH

SEQ ID NO: 128255 - protein, 337 aa, unidentified
MRQIKFFIGTDVSKEWLDMCILLEGEVIHRQQIKNKETAIRKWLKQTQKQYGYSMQDSLFTMEFTGIYNHHLLELLHQAGANIWLIPGLEINASRGLQRSKNDKDDARLIAEYAIKNLKKVRLWKKPRTVLKQLAALLMMREKLMTSKHQYQTTLKEYKSFSTKDEYLIIKDYSSAILKTICRDLKTIEHQIKDIIEGDEQLKELNEYITSVDGVGIITSANTLVETNEFLDISEAKKFSNHSGVVPHKDESGKKIKKPKVSHKANKKMKKLLHLAAMSVIRKKGELRDYYERKIAEGKNKMSVLNAIRNKLVLRIFACVNNKRKYEKNYVYSLVNP

SEQ ID NO: 128256 - protein, 413 aa, unidentified
MVKREKIELVKRQRIFVGIDIAGSKHRARFIDNMGEEQIKPLSFFNDREGLEKLERRVNEIPGIGDDIIFGLEPTGDYWKPVAQYLREKGYPVVLINPYHLKRTKEIIDNSQDKTDDKDSYLIADLTKQSKYFFPVIPEGVYAELREVSINWKRTSQQLARLKCHLSNFLAKYFPEYKGIFSDILGKTSLYILKHFPLPEDIERLGINKLYRVMKKVSKGSIKEGKIQLLYEKARTSIGLKGGSQTAKVLLKEVLSDIEILKKRKEKLTKMMDELLYQSGYRKNLLSIPGVGIVTGSLFLGEIGDPDNYERASQIEKMAGLNLVENSSGSMKGEKKISKRGRSTLRYVGHLVTTVAIGKSPEIKALYRYKVEECKKEKMKALTGLSAKMLRIMFAVCKNKTFYKHEEITRYFR

SEQ ID NO: 128257 - protein, 344 aa, unidentified
MGEVNTIGMDIAKSVFQVHGVDAAGSITIRKRIGRAKVLEYFGELPPCLVGIEACPSAHYWGREFQSLGHTVRLIPPSYVKAYLKRSKNDANDAAAICEAVTRPSMRFVPIKTREQQSALMLHRTRQLLVRQRTMLSNALRGHLAELGIVSAKGRNGTAELLRIIADDRDSRVSAAVRGILNVLARQYGAIGAEIASIDKSIMALHRGCEASRRLAEIPGIGPVGATALVAEIGDWNTFSSGRSLAAWIGLVPKQHSTGGKERLGSITKQGNRYLRWLLVVGAMAVIRYARKHGTARRPWLGRLIERRPTKVAAVALANKMARMAWAIMVRGERYKEPRLSLAA

SEQ ID NO: 128258 - protein, 387 aa, unidentified
MQATDPTSTRSNCSDPATIFVSLELSRAVWLVTALLPGGNQKMSRHQVPGGDLAGLLSRFAELQRKAHARTGQLAPIVVIQEAGLDGFWIHRVLESEGIESHVVDPASIAVSRRHRRAKTDRIDGEALVRTLLAYKRGEPRVCAMVRVPTPDEEDQRRLCRELKTLVGERVRHVNRLRGLFFSQGIADYDPRRPDRCARLDELRTGDGRPLPPHLKAVALRELEIIERLDRQIGAVKAERDALLAAAQTTEVPSKAVQMLLGLKGIGSGFAGALWSEGLFRHFDNRRQVAAYAGLAPTPWKSGKIDHEQGVSKAGNPRLRAILVEMAWLWLRHQPGSALARWYHDRVRLGGRLKKVTIVALARKLLVAIWKYVTHGVVIEGAALKVA

SEQ ID NO: 128259 - protein, 327 aa, unidentified
MSLFVGLDLHKVYSEFAVIDIFGNVLRQGRIENTLDKMREFSESLPSSSSVVIESSSTWYWAHRLLSERHDVTLSNPIKNKAIASAKVKTDKIDSTTLANLLRGGWAAECYVPSKEMMEFRELVRFRANLVRQRTRMKNQVHAYLLMNNISIDAGPFTKGFVEKVRGIDDVRVQSYLRLIDGLNREIREASMTIRQKAGSNEDANLLMTIPGISYYSALLIVSEIGEIGRFEGSSSLVGYSGLDPSTHSSGGKTYHGPIMKTGSRYLRWIMGQCTRAHMRVEPEGTVANFYARIARRKGDQKAIVAASAKLLKIVFWVLKEKRAYHS

SEQ ID NO: 128260 - protein, 349 aa, unidentified
MAEQRISSTGERIDVGIDVHKETYTVTCLCQRQMVKTATVPADPVRLAASLPRWFPGARIFSAYEAGFSGFVLHRVLTTAGITNIVVNPASVAVAANDKVKTDRRDAKKLARDLTDGRLRGIYVPTTAEELARLLPRTRAQLVAHRATITRQIKAKLHQFGLIPPGSRRLMSRRYLREIAAWALPPELHVSLTLLADQWRFATRQLLEIRRLLREQAKAQAALETVYRSVPGIGEVVARTLATELGDMTRFANERALLSYTGLTPSEDSSGASMRRGHISRQGVSRLRHVLVETAWRALPGDPLLHAMFERIAATRGKQRAIVAIARRLIGRIRACFRHGTTYAVGTAG

SEQ ID NO: 128261 - protein, 364 aa, unidentified
MLIIGCDYHPGFQQIAGVDTDTGELSERRLGHREQAEQFYRELKQRNQAVRVGIESSGHSRWFERLLQELGFELWIGDPAEIRTKRVRKQKTDRQDAQLLLHLLVENRFPRIWVPDAENRDLRQLLWHRHRLVQMRTRVMNQLHVVPLNEGVRRKKALWRPAGRKELESIALAPWANRRRQDLLDLLDQLTPKIQELTHALEEEVEKRPVTRLLMTHPGVGPLTALAYELVIGTPQRFHCGKQIASYLGLVPEEKSSGDRRRLGHISKQGNVLLRFLLVEAAQVTVRSHQQWRNKFFHLAMRRGRKIAKVAMARKLAVHLYWMWRQGCDYGQCRKLGSHAGEPGHPDGVQFITDVMIGHPAPSK

SEQ ID NO: 128262 - protein, 346 aa, unidentified
MMIIGCDYHPSWQQISWVDTVTGETQEKKLEHASGEAEKFYRGLPAPALIGMESTGNCQWFVEMVTTAGHDVWIGDAAKIRVCDVRAQKHDRRDAALILTLLLEGRFPRIWMPSGEEKDVRQLLIHRYKLVRIRAQVKNELQHLAMNQGITKKRRLWSKAGEKVLRELPLKPWASRRREDLFKVREMLSGQIDLLDQAVVEAAEKNEKARLLMTQPGVGPVTSMAFVLTMGDVRRFQRGKQVASYLGLIPREYSSGEHRRYGSISKQGNRFMRMLLVEAAQCAVRYDPQMRSEYLHRCHRKAKGVAKVAAARKLAIRLYWMLRTNTGYPGVVRVESSSRVPLVSAS

SEQ ID NO: 128263 - protein, 359 aa, unidentified
MIVIGIDPHMKTHTAVALDAASGRSLGAKTVNCDEAGRDALVTWARRLCAERRFAIEDCRHVSGRLERHLLARGERVVREPPKLMARSRSSARSYGKSDPIDATAVARAALREPGLPAASLAGPEQDLRLLVDYRDDLLGERARLQRRLRWSVHDLEVGLKLPPRVLDRFCWLDRLERCLLALPVSTRSRIALDQLRHCRELTGEIHALERELSALTRTLAPDLLAFPGCSFVGAAHLLGETAGASRFSGEGAFAMHVGTAPLPVSSGKTQRHRLNRSGNRRLNATIHMIALTQARMHPPAIAFMERKQSEGMSHREALRCLKRHISRALFKTMLRAERAQLAQVVEADFRAGAVAIAV

SEQ ID NO: 128264 - protein, 351 aa, unidentified
MDYRVYCGVDFHARQQTISYLTTEDGVVSTHELKHQNKAELKAFYAQFRGPVLVALEASGYSPWFEQMLEELGHEVWLGDASEIRRRARRRQKNDRRDAELILDLLLHDEFPRIHRPAVKSREILRMLRYRHKLVQMRTIIKNSLQALSIQSGLSLRARLFTGVGLDQLRSLTMSPVMQYQRDQWLVALESLNQHIDAATNWLGEQATGDARVQRLRTHPGIGLLTGLAVVHTLEPVIRFRNQRKVAAYVGFDPQERSSGEKKRYLGISKAGSRVLRYLLVEATHTAIKSDPDLKRFYLRLLHRHGKAKAKVAAARKLLIRSYILLRDHIDYAEFGRRAVAARLARLASKA

SEQ ID NO: 128265 - protein, 337 aa, unidentified
MEWSVAIGVDTHKDAHTAVACDRLGRQLDSLQVTACLAGYRALLAWAKELGRPAFSIEGSGSYGAGLARFVVAAGVPVFECERPQRRDPRRGKSDLIDAALAARKLVAEDGLSQLRGDGVRDDLRLLLLERRSAANARAAALNQLHAVLLTAPERLRRRLRHHSGAALGRACARLQPRDESQHAAVLARLGRRVLSLRRELATIDSELAERIRTLVPELLDECGVGALCAAQLVVSSGNPTRMRSEAAFAALAGTSPVDASSGKQQRHRLNRGGDRQLNRALHVIALSRVRHHPPTASYYQRLLDAGKTPREARRCVKRALARHFYRRLQETQPLTP

SEQ ID NO: 128266 - protein, 339 aa, unidentified
MENFVGVDLHKKVSQLATLREPKPASQVRFPNHTVTVEKVLKKLPQGSKIALEATGSWWWFVDLAQRTGHEVVMWHPKQTKAIASARLKSDKVDALMLAKLLKADLLPTVWIPPAAQRYVRELLTHRARLVRQRTSVINELHALYAKRNIDAGMIFHRVRPPAFRAEDLSGYGPRIVEEDVALLGFLNRQVQGLDKELKAIAEKDPESKRLMTIPGVGPVNAVAGSCWIGTIERFSNSKKLSSYFGLAPRVRQSGERERHGHITKEGNRMVRSLLIQAALWHIRRGPMSSRRHYLGVCKRRGKPIARVAAANKLLGIIFQMMKEKIDYEEFLKRGGNAQ

SEQ ID NO: 128267 - protein, 339 aa, unidentified
MSKLFKNFVGIDISKTWFDAVLIKADDSSVVIHEQFAQKPEGFKKMQTWLHTHNVSLDEQTLFCMEYTGIYNTGLVHYLVNVKAALWVEMPLRIKKAGGFERGTDDKAAAVKIAWYALRYKDQVKLWQPIDSNIESIKNLIAQRDRIVNAIILLTVPVNELKACGCAADAKTLEKLQKAPVAALQKAKLSIEALIAKTIQQDEQLNIKVKRVASIKGIGQVTSVALMVYTKGFTAFENGKQLACYCGVVPFTKSSGTSVRYKSTVSPFANMKLKKLLHLCAMSAIQNDPEMKAYFERKVAEGKNKMSVINAVRNKLIHRVFAVIRDERNYEDNYVRKCA

SEQ ID NO: 128268 - protein, 422 aa, unidentified
MLAESQDEEQIIARVAAIDIGKAELVCCVRIPGPGNTRRRLQEVSTHPTMTRSLSDLANHLVGLGIERVVMEATSDYWKPVFYLLEAHGLQPWLVNARDVKHLPGRPKTDVLDAVWLCKVAERQMLRPSFVPPYPIRRLRDLTRYRIDLVGTRTAEKNRVEKLLEDACIKLSVVASDIFGVSGRAMMAALIAGERNPSVLAQMARSSMRRKISELEEAFTGHFDDHHAFLLARMLARIDGIDTDIAALDEQIEAQLAPFAAAAERLHEIPGIGRVAAAVILAETGVDMTRFPTAGHLCSWAKFSPGITSSAGKNKGSGSTGHGNPYLARVLGEAAVNAGRTKTFLGERYRRLARRRGKKRAIVAIGRSILVIIWHLLQDPEARFHDLGPEHFSHRTNPDASKLNHVRQLEALGYAVSLTPAA

SEQ ID NO: 128269 - protein, 339 aa, unidentified
MKLYAGIDLHSSSSYLAIIDDKGARKYKKKLPNNLVGILQQMKLYKKGIAGVVVESTYNWYWLVDGLETEGYAVHLANPSAIQKYTGLKHADDKHDAFWLAEMLRLGILPEGYIYPKEERPLRDLLRKRGHLVRLRTSLIISLQNIISRNCGIRLNGDEAKRLKEDRVTPLLGQNEDLRLAGAVSKESIDFLTRQIKSIEKVIEPKIELKESYRHLLSMPGIGKVLALTIMLETGPICRFEKVGNYVSYCRKVGSQWTSNGKAKGKGNKKNGNKYLAWAFSEAAEIARRYDAQVRAYYNRKLQKSNLMVAHSALAHKLARAAYYIIRDEVPFMPEKLFS

SEQ ID NO: 128270 - protein, 316 aa, unidentified
MSAPQLFVGIDVAKAELEVALRPTGERWTVPNTDASIAALVARLQAVAPTLIVLEATGGYQRAVVAALATAGLPVVVANPRQTRDFAKATGQLAKTDALDARALAHFAEAVRPTPRPVPDAQTEALRALLTRRRQLVAMRTAESNRLSTAPAAVQADITAHLAWLDQRLATLDDDLDTTLRASPVWRERELLYRSVPGIGPVSARTLLLDLPELGTLSRQRIAALAGVAPFNCDSGTLRGRRTIWGGRAPLRATLYMATLVAVRHNPVLKAFYDRLLAAGKAKKVALTACIRKLLTILNAMVKHQTPWQPREVTIA

SEQ ID NO: 128271 - protein, 319 aa, unidentified
MGTVMNNTASSLFVGIDVSGAFLDVAIHPTGETFRVANDADAIDQLVVRLSALTPALIVMEATGKLELAVLKALCQARLPAVAVNPRQVRDFARATGQRAKTDRIDALVIAHFGQAVGPLVRPLDDEQTEQLQARVMRRLQLIDMLTAEKNRLKRAHQVARESLRDHIKWLEQQLDLAERDIDGFLRASPAWRQKEDLLRSVPGIGPTAAATLIGFMPELGSLSRREIAALAGVAPFNADSGSHTGKRHIQGGRAIVRRALYMACVPALRFNPVVRAFYDRLKKAGKPSKVALTACMRKLLIMLNAMVRNLTPWDSSIA

SEQ ID NO: 128272 - protein, 343 aa, unidentified
MQAVTTIGLDIAKSVFQVHGIDAEGKVLIRRQLKRRYVLAFFQKLSPCLVGIEACATSHHWSRELKALGHNVRLMPPAYVKPYVKRQKNDATDAEAICEAVTRANMRFVETKTPEQQSCLMLHRTRQLFIRQQTSVINAIRAHLAEFGIVAPVGRKGVEHLLAIGTDGSDQRVPEVTQACLAALGAQLRMLKAQILEFDRRILAWHRSNETSRRLDAIPGIGPALATALVASVADPNAFRSGRNFSAWIGLVPKQHSSGGKDKLGSISKQGDRYLRSLFTAGALAVIRYAKIHGTQHRPWLTALLARKPTKVAAIALANKIARMAWALMAKGERYNEPVALGA

SEQ ID NO: 128273 - protein, 427 aa, unidentified
MKYKQNFKIMQVTDKTLVIGVDIAKKKHYARAFDWRGMELDKTISFKANSSGFADFMGWAKDVAKKNKKNKILVGIEPTGHYWFTFAQAVIVKEVMLVQVNPYHVKNTKELDDNTPSKSDRKDPKTIAMLVKDGRYQIPYMPKGKYAELRKANNIREEWLKKIWSIKNKVQRWLDTYFPELLEVFSSWEGKAAVKTLEEMATPAKIMKNSAKEIVSVWREEVKRAVGIKKAQKLLEAAAGSVGMKEGLEMAEYEMQLLMKEYKDIRQILDGIEEKLESIVNTIPGAENFLEIKGIGVKTVAGFFAEVGDIRRFTHPKQIIKLAGLNVRENSSGEYKGQTTISKRGRSRLRALLFRAILPLTAKNAEFNALHKYNIKEKENPLKKMQSLIALCGKLIRIVYTLVTKDVKYDPERLLKDIHRDEVPKAA

SEQ ID NO: 128274 - protein, 419 aa, unidentified
MNNDNPLFFVGVDWGSQSHCVCVIDRDNRVVGERSFKHSGEGLLNMGEWIIKVAGSAAGEVAAGIEVTRGPVVESLMACGFSVHSINPKQLDRFRDRFSLAGAKDDRRDAMVLASALRTDRRHFRSLEPQCDDTRTLRTLSRRREELVTERTRHINRMGEQLWVYYPQFRELVGNDTIRPWIIELWQLAPTPDAARRIRVSSVQKILERHKIRRVSAEEALGILRSKKINISPSAASDCVWRIQSIVEHFDLVSRQIRETEVLIKEMLDAIISRQRAENAGTARPSDLEILLSMPGVGPVTAATLVGECYDLIRRCDYRALRCVTGTAPVTKQSGKSKYVMRRRTSSCRLQAAICHWARVAVLHDSVSKAQYRSLRARGLRHSRSLRSVGDRLLRIACVLLKKGELFDKNFKELQKEAA

SEQ ID NO: 128275 - protein, 412 aa, unidentified
MQDILTCAMGLDIHRDVIVACLAKGELGTDPEIEIRSFSTLIPEMRKLRDWVLEAGCHYVAMESTGIYWQPIYEMLEPCFDGQISILVVNARHMKNVPGRKTDMRDAQWIATLLRAGLLKGSFIPDKTFRELRHLTRYRKSIVRDITAQKNRIDKFLQSSGFRFTAFLSDAFGASGRNIIRHLMEYGNISREALDRCLKTQTRKRIDEILIALNGSLSEHQRGFLRMIFGHLEALEQHRHTVEDAITKEITKHEEALSLLCSIPGIDVTAAAAIIAEIGTDMSAFPDSQHICSWAGLSPGNNESAGKRKSAHINKGNPYLKSMLCEVGWVISGKRSLYLSGWYWRIKQRKGAKRATIALARKLLALIYTMLKTGSPYNEDCFEIRRKQSERKRASRMVNELQKLGYFVVAPG

SEQ ID NO: 128276 - protein, 430 aa, unidentified
MNPMNNDMNPEAPDQYAAFVAVDWADEKHAFSLQVAGQKKKESGTLEQTPEQIGVWVAALRERFGGRPVAVALEQSRGALIHALLSYDFLVLYPLHPTTVANFREAFKFSGVKSDPLDTDQILEILTKHLDLLRPLRPDTEATRLLARLVQDRRKAVDLRASHIQALKASLKEYFPQALEVLSQNVTSRLASDFLKKWPTFVDFQHAKPANLKRFFYGHNVRSPEVIEQVQQVARKSQALTTDPAIVESGVRLSQVHAQVIQTLNPLIAQYDQQIETVFHNHPEAKVFSGVPGAGPAMAPRLLVAFGTDRARFEAAENLISLAGVGPVTKSSGKTRVVYARCACPKFLRQTFHEFARLSVAQCQWAQNYVQYYTGKGKKYHTVIRALALKWIRILFRCWKDSAPYDEAKYMQSLEKRGSIFAKLHLQKTV

SEQ ID NO: 128277 - protein, 386 aa, unidentified
MQKANDLGRSSTVLEQDSTLIAVIEMSLSSWLVAGIVPGLDRHPLKKLGADEDALILLLHRWREEATKCGHAITRIAVAFEAGRDGFWLARWLRARGVEAFVIHATSVAVPREHRRAKTDRLDTEHLKRALLGWLRGEPNHCQMAAIPSLDEEDARRPNRERENLVSQQTSIVNRMKACLARLGIRKFKPTLRHASKQLETLRTPEGVLLPPNTVAEMRRDMVRLRLVREQIREIEAARLQRLQVSESGANAMVKLLARIIGVGVETADMLVHEILSRQLRDRRAVARYAGLTGAPDESGKRRREKGLARAGNARVRRGMIQLAWRFLLFQKDSALAQWFRTRAADARGGTRKTMIVALARKLLIAFWRLTTTGEIPVGIKLRPVA

SEQ ID NO: 128278 - protein, 406 aa, unidentified
MVVVASVAEEVADATGAAMEFECRRFGAGASERNHLVSWLQQRQVREVVMESTAQYWKPVWLDLEPHFEKLHLAQAQSNRAPKGRKNDFRDGKRLARRLLAGELMLSFVPEPEQRTWRLMTRGRLQLVRERVRLQSQVECLLEEARIKLSSVISDLLGVSGRRILEALSQGQTDAVQLAELGDERLKCTKEQLADALRGAPEAGHLELLKLHLERLKLLDEQIDKLGQLHATALKRHQDTVVRLAKVPGFGAESAQQMIAEVGVDAEAFDSAGQFASWAGACPGSDVSAEENHSSRCPKGNRYVRRILTEAAHAAVKKKGSHFQNVFRRFLPKLGYKGAIWVVAHRIARLIWKILHQGVSYIEQGEETNPLAKKRRAQKLAKALRKLGYSVTLTEIHPQPVAEASA

SEQ ID NO: 128279 - protein, 337 aa, unidentified
MNKITIGLDIAKNIFHLVWLSNSGKVLKKKKLKRTNMEEYFCNLEPAIVVMEACGTSNYWAQSIQNYGHEVKVIAPQYVVPYRKGNKNDFNDAEAIAEASQRVNMRFVPIKSVEQQDIQLLHRIRERRIKCRTALVNQTRGLLAEYGISLSQGVNQVRKSIPDILEDASNMLTPLSRRYIASLYDELIEVDKLITNLDSEIKALSHQIEQCQKLETMTGIGPIIATALYSAIGDGKTFKSGRHMAAWLGLVAKQHTTGDNPKLKGISKRGNTYLRTQLINGARAALVKSASKADKVSLWANNLRERLPFNKAVVALANKMARMAWAMTVKKETYKFV

SEQ ID NO: 128280 - protein, 341 aa, unidentified
MDYYAGIDVSLEASSVCVVDASGKIVKEAKVLSEPAELIAWFKALAFAPARIGLEAGPLSQWLYAGLKQAGLAVELLETRHVCAAFKTMPVKTDRNDARGIAQLMRLGWFRPVHCKSVAAQETRALLTARKLIKAKLIDVQMSLRGILRGFGLKVGRTTHRGFAGRIEELVEHHPVLKEVANALLAVHAVLLGELAGFDKKVRELARSDGRVRLLMTAPGVGPIVGLSYAAAIDDPGRFASSKTVGAHFGLTPKRYQSGERDVTGRISRIGDKGVRTALYEAAHVILTRVVRGGALKSWAMKLAKRAGFKKAAVALARKLAVILHRMLADGTPFDAKRAAA

SEQ ID NO: 128281 - protein, 407 aa, unidentified
MEIVHAKCAGLDVHQKTVVACARIAAKGRVTHEVRTFGTTTRDLLALAEWLTAHGCTHVAMESTGIYWTPVWHVLEASFTLVLANPRHIRNVPGRKTDVNDATWIADLLAHGLIRGSFVPPEPIQDLRDLTRTRKQLMREIARHSLRIQKTLDRANVKLNTVLTDILGASGRAILHALIAGERDPERLAALASGRLKASCVDLVTALHGRVTPHHCFMLQLHLTQIEALEAAVRDLEARLGDALAPFRAAVDRLITIHGIAQTAARVLIAEIGADMSRFPSSAHLLSWAGLCPRLHESAGKRLSTRTLPGNPWLKTTLVQAAWAAVHKKDTYLHAQFLRLKSRRGPKKAIVAVAASILTAAYHILKHGVDYHDLGGDFFDRRDKAKLAKRLIARLHDLGLTVEVRAA

SEQ ID NO: 128282 - protein, 342 aa, unidentified
MGSVKRGGRSCHFMSALVCGLDVHKDSTYATILNSEGKIVNQTRMSNERVLPYLSHFDVGKVGMESSNQIAPLFRQLTAKGYDVVVSHPKKTRYIAEAKIKSDRVDSKAIAELVRLDALPLAYFPEGEIAKLREKVRRRAFLVRSRVKLRVKVKSVLTYEGLKWPTDHGLFTQKGVAWLHGLNLDSVECYLRVLKPLDEEIKLLSKELVGIAEDDEEVKLLMTIPGIGYYSAVLMKSEIGNIDRFPFGERLCSYAGLVPSTHASGKTVWHGGITKEGSRWLRWVMVEAAQTHVHKYDTSITRAYNRIAEKRGKKIAVVAAARRLLMCSYSVLKNRKPYYDQT

SEQ ID NO: 128283 - protein, 335 aa, unidentified
MKEITTVGVDLAKSVFTVHGVDAMGRVVLRKTVRREQLVELIAGLPPCLIGMEACGGAHEWGRKFQIYGHRVGIMMARFVAPYRKSSKNDSNDAEAICEAVARPNMRFVPVKSAEQQAILSLHRVRQGFIEERTATINRIRGLLSEFGVVLPQRAEQVRRAAVVVAEGLPVLAREAVADLRAHLTYLDERITRYERQLVSLARQREAAVRIQRLPGVGPLTASAITASISDGHEFANGRQFAAWLGLVPRQYSTGGKARLGRITKRGDPYLRTLLMLGARAVLQSAGPKTDRLSRWALALRARRGYHRAIIAVAAKNARIIWSLLANNREFVLPV

SEQ ID NO: 128284 - protein, 473 aa, unidentified
MSRVGEESEDGLLMSLTGSSPNDIEEDVVSKGSGLSRGDKRRNAKLAELRRLVAGDHAILGIDLADEKQVVVVCDHDSRVLARQTVRVKAWNLGSVLEWAARIAHRHGFAGVTVGCEPTGHRWMVLNQLATQRDMTLVCVNPMLVGRAREAEDYTRDKSDDKDAMLIARLVGELHCYVPERADETWARLRQLGARRERLITEATACVHQLRDLLECAWPGVLAAAAKPFESANWCAALAVVLDRCNGHPERVARGDLARFEAAVRRELPRWGGSRRRRNIIAAVFVVLVDPTGVMAQRPGALERARWVLADWRSATTRLAEVESRMVEVLDELELTERVTSIPGVSAVGAAAMLAETGDPTRFDSPRALVKHAGLCPRDNASGTFSGRARISRRGRPRLRLAAWRAVWGALPHNPVMAARYRYLTTRQRNRLTGGQARAAIAAALLRWMHVVVTRRVAWDAATAGAAVMPAAA

SEQ ID NO: 128285 - protein, 315 aa, unidentified
MFPTIGLDVSKTTLDVCVLKGKDDREFYKFDNSDQGHQQLLDLLANLKVALVVCEPTGGYEASICAVLHRHNYAIHRVNTLSFHNFAKSLSLAKNDRIDAYKLAYYGVSMDIKANYHQSEYQQQLKDLVARREYLVSQLSSEKKNLKHKEYSNIQTSIVKHITYLEGAIKDLDKQIDDFASTETEQAKKVELACSVPGIGKTLSYKLLAFLPELGDNTFDLNELAAITGLAPYCRDSGNKSGKRFIRGGRKIPRDALYMAVLSGCHKIPLLKNLRARLLSKGKPKKVAIVACMRKLLGILHSIFKRREAFVEQIA

SEQ ID NO: 128286 - protein, 343 aa, unidentified
MEHFAGLDVSVKETSVCIVDDMGKIVREVKVASEPEALLPVLTNPTYRFKRIGLEAGPLSQWLFSGLAEADLPVICVETRHMRAVLKAQINKTDRNDARGIAQMMRVGLYRPVHVKTLRSQKLRMLLTHRKLLQSKAIAIDNDLRATLRNFGLKVGAVGTVKFEARIKELVENLPDLAILVDPLLIVRRVLREQIGILHRRLLAVVRDDDVCRRLMTVPGVGPVVALTFRVTIDVPARFKNSKAVGAVFGLTPSRHQSGESDRPGAISRCGDEMMRMMLYEAAQVMLVRSAKWSWLKAWAMKIARHRGMKKAIVALARRLAVIMHRIWVDGTEFRWTRDVAAA

SEQ ID NO: 128287 - protein, 379 aa, unidentified
MKDIRYLGLDVDSEKIAVAVADPGGEVRSLGSIPNREDSVRRLVKKLGPASRLRVCYEAGPHGYSLYWHLSKLGVHCDVVAPTLVPVKSGDRVKTNRRDAEKLARCYRSGDLTAVWVPDAAHEALRDLVRAREVAKKDQLRARHRLGKFLLRRGLRAAAGVKSWTTKHLLWVKTLRFEHAAQEATFLDYVHEVEHAAARVTRLEQAIDQAIEEAPPEMRALIAGLQALRGIRRVSAATIVAEVGPLSRFARPKQLMGYSGMVSSENSTGSSVRRGAITKTGNAHLRRIVGEAAWAYQYRPAMSPVLKKRQEGLSEEVKEIAWKAQHRLCSRYRRLLAKGKLRQKVATAIARELLGFIWAIGMQVEREQQSYTKGGHRAA

SEQ ID NO: 128288 - protein, 367 aa, unidentified
MSTAKFIGLDVHKETIAVAVANDGRSGEIRFHGTIPNTPDAIRRLVARLAAPDVTLHFCYEAGGCGYGIYRQLTDLGVECSVIAPSVIPRKSADRVKTDRRDAQMLARLLRSGELTAIWVPDEAHEAIRDLIRGRRQAKQDLVASRQTVLSFLLRHGRKFTGRSNWTKAHWRWLSEQAFDAPHQQFVFGEGIRRIEEAQHRCDRLDSMLVEALPQWSLAPLVQALQALRGVGLVVAATLVAEIGDLSRFDTPKQLMSWLGLVPSEASSGARTRRGAITKTGNREARAMLVEAAWSYRLPAREERRYQMRVEGLPEDIRAIAWKAQVRLCQRYRLLASTGKALPKVITAIARELVGFIWDIGRRIQPI

SEQ ID NO: 128289 - protein, 426 aa, unidentified
MNTQNSDTLPIAKFAAYVGLDWGDQKHAFAWCLGTDKTPAHTGDLINSPEVLHTWLQELAQRFGGRPVALAVETSRGPLIHLFGAYPWLTVYPIHPATSARYRTAFKPSGAKDDLPDALLLLELVRDLRHKLRPLQMPDTATRQLAALVELRRDLVDRRTQVLLQLMALLKSYFPQALELVGQDLTSRLALAFLRRWPDLLALKAARPGTLKSFYYQHSIRAEDLVTQRLALVQQARALTTDEAVLMPARLHLAALLEQMRTLAKHIELVEQQSQALFKEHGEAYLFRELPGAGKALQPRLLVAFGEDRSLYPDPTSLQKYGGLAPVIVKSGRQSWVHWRWHAPRFLRQTFVEWAGQTVVYSAWAKAYYQHRKAKGVSHHVILRALAFKWIRILWKCWQTRTAYDEARYLKQLLARKSPHAIKINA

SEQ ID NO: 128290 - protein, 347 aa, unidentified
MNFYTQQHKQYCGIDLHAKAMYVCILDQTGTILIHKNLPTTPEAFLRVIAPYREDVVVGVECIFTWYWLADLCQQEGIAFVLGHALYMKAIHGGKAKNDKIDAHKIAVLLRGGMLPQAYVYPAEMRATRDLLRRRCHLVRKRAELLAHIHNTNSQYNLPEIGKKLAYKANREGVEVHFPDPSVRKTIEVDVSLIDHYDKLLGEVELYITRSAKTHDVQTFARLQSVPGIGQILALVILYEIQDIARFPRVQDFVSYCRLVKCAKESGGKRLGTSGKKIGNVHLRWAIAEAAVLFLRHNQPGKEYFAKLEHKHGKAKALAVLAHKLGRAMYYMLTREQAFDLQRFVTT

SEQ ID NO: 128291 - protein, 357 aa, unidentified
MVTGPKHQKEKRSMDHFAGLDVSVKETSICIVDDTGRIVREVKVASEPEALLAVLADPAFHFKRIGLEAGPLSQWLYSAFAEAGLPVICVETRHMRAVLKAQINKTDRNDARGIAQMMRAGLYRPVHVKTLRSQKLRTLLTHRKLLQSKAIAIENDLRGTLRNFGLKVGMVGTVKFEARIKELVENLPDLAVLVEPLLIVRRVLREQMAVLHRRLLVLVRDDEVCRRLMTVPGVGPVVALTFRATVDVPARFKNSKAVGAVLGLTPAKYQSGESERTGGISRCGDEMMRVMLYEAAQILLVRSTKWSWLKAWAMQIARRRGMKKAIVALARRLAVIMHRIWVDGTEFCWTRKEVTAA

SEQ ID NO: 128292 - protein, 489 aa, unidentified
MIKSVGIDLSRTGRHQVRILDEQARPCDSLSFENTLEGLETMEKHIFPDGANPTIVFEPTGLAWLPMAIYLRARHPGCHLVKARLQKVAALRRYLRSYAKSDRIDGVTLAKMPFIDSEQLDEVYLPPVEFHALQRLTRQRERLLKSITARKNRIGSIIDGYLPGLRRVFSDQWSRHARAFYHRRLNPFTVVHDGQDALNSFLGNVEAKGALSESYRVYQACQDLAEFYERSRPAGMVNEQFFDDLQEEIACELRLMEAEEAEADRVSRRIEELYHRLHPNDHLRTIPGVGERTAPIFLATVGDPHRFRSQSAFANWTGVVPGAKQSSEVEGKGLRMTKAGPVMIKRALYQAGDIARQYDPQLAYLYYREMVHHGKTHLQAVGAVMSHLGARILTVLRENRPYELRDAQGKPTSKEKARKLILSEYKVPEGIRQQRRRRNPKKRTLSKRVKGEGRFGIPRTTEAATAPQSGCAPTFPNMSVYVTGAEKSR

SEQ ID NO: 128293 - protein, 349 aa, unidentified
MVGVDTHKDVHAAAVVDVGGALLATASFGADREGYRALIEWAAQFGTVLRFGIEGTGSYGRGLASAVRRHGHEVIEVARPNRQDRHRRGKSDLFDAENAARAVLAGQAEAIPKTADGAVEMIRHLKVAKDAAVKARTAAMQSLKAVLITAPAELRETLQPLPDTALLRRCAALRPGQLTSVTAAAKYSLRAIAQRWHNLHAEITAHEQLLGRLVDQLAPRLTATIGIGPDNASQLLLALGDNPARLHSEAAFAKLCGVCPIPASSGKTVRYRLNRAGHRQANAALHRIVIVRMKYHHPTRAYVARRTTEGKTKPEIMRCLKRHIAREVWTHTKHLRQQPHAHPPTTCHL

SEQ ID NO: 128294 - protein, 368 aa, unidentified
MHLVGRDSIIVGIDVHKYSHQAVAMSCFGEELSKLEFSNDEAQKCINWLSALGKQKDIIVGLEDVNGLGIHLTRYLQTAGFNLRYIPAVYTERARKHSSSQDKNDYLDAKRVGKVILQQAEETLPASDIIPQEIVRNLDLLLQEREALVKEQTALKNQLHGLLHQYYGNGYKQSFKNIFSEIAIEWYLSDLKKCEGTIPIKQSTQAYVTGSSIRRYLRLGLIVKQIKEITKLIETTGMLIKPVTILSKSMPGCGLVTACKVIVEIGNIQRFTNESKLAKYSGIAPRQSQSGKSNRYYTNPFGNRKLNKAIHIIALSQIGNRGSKEGKAYFQKKITEGKSKLWALRCLKRFIIRRIYILLAQSVTSTKN

SEQ ID NO: 128295 - protein, 406 aa, unidentified
MELVTLYKRVVGLDVHQAKITACAIIEDETGDVMVELAEFGGFKRDRQALAEWVATRGPEVVVMESTGIYWKSPYAALEKVGIVSTVVNARHVKTVPGRKTDWADAQWLATLARSGLLRASFVPPAKLRELRHVARQRQQLVGILSGEKNRVHKVLSVGGIRLSVVVSDIHGVAGRAMVKALIEGQSPAEVLMLAGNRLKADRGELLDALDGDLTAEQRFVLRELMAHVQELEQRIDRFDRHLLNELEPYRTTLALMQTIPGIDTIGAALLLVEIGNDMDAFGSVDRLASWVGICPGNNESAGKRKSGRIRKGNPWVRRLLCQFAHAASRTQCAFKSKFEALRLRRGHKRAIVAIAHKILKTVFLLIRRQTHYRDSAVDFEAMSVTRNAPRWLRMLKKHGFIPAAA

SEQ ID NO: 128296 - protein, 353 aa, unidentified
MKYIAIDIGKKNCVVCIMDSDGTIIDETTYPNTLADAESFAKQMIQQYGHCTAVCESTGNLWIKTCQAFERNGIPVQLANPVKTRAIAEAKIKTDTVDARTLAHLLRSNLVARCYIASADIRDSRTLLRHRTNLVHDRTQVMNRIHSLLDKYDLSFERCKNIFGVYGMKWLNQQHLASNNDDVMLYQCIRHIEFLNQEIKYIESKIAQDAINNEHVTILMSMTGINYFGAMMISSEIGDVSRFSTPKKMISWAGLCPSIHQSGNSLYHGKMKEGNRKIKWMMIQAAISAARTDDRLRSVYSRVAKRHGHHIAITHVANKMMTIIWHMLTNNVLYNQRNHNLYDAKLKRMHKIA

SEQ ID NO: 128297 - protein, 359 aa, unidentified
MINVGIDVHKKRCQTCLKDEKGRLIEEFSVPNSIEGAVQLTKVLEGYGEAKVVLESTGNLWIRIYDTLSQQPRIKVVLANPNKTRIIAEAKIKNDRMDARVLADLVRADFVAESYVPNKEIREQRALLRQRRSLVEDTVAIKNRIHNLLDKYNLQPKYSDLFGKQGREWLRNLQLSSIERTILDVNLKQLESLEESIATLTTKIAQEAIHRPDVKLLMGFTGIDYYSAMLLINEIGPVTRFPSAKKLVSYAGLAPGIRQSAEHTVHGRITRDGNKYIRWILIEAAQHASRYDPKLKGFYQRVAARRGYQKAITAVARKMLVSIYYVLKRQEEYHGQRNELLEKKLKRLQRTVDSSLQTQ

SEQ ID NO: 128298 - protein, 350 aa, unidentified
MRHFIGCDAHKKYSLFVAVDEAGDTKPPVRVNHDRESYRTFLRGLTPRSSIAVETVGNWYWIVDEMQQAGHHPRLAHARKAKLMMGQLDKTDKLDARGLATMLRNGTLPEVWIPSREIRDQRELLRLRMTLVGMETRLKNRVHAILGKYAIRLDVQDVFSQKGRRLVLEHLENLPEETRQVVRQHLELLESTERQKKVTEQRLQTIVQQRDDVDLLKTLPGVGWILGTVIALEIGDIERFNQAPELASYAGTVPRVHSSGGKTRYGRVHPDVNRYLKWALIEAGNLIVMQQQRLGDIHAVRLYRRLRKRKGHAKAVTAVARHLAEAAFWVLKRQEPYKEPQGCRVSSTHR

SEQ ID NO: 128299 - protein, 317 aa, unidentified
MNSSQIQTSVNIGVDVGKANLDIALHPSGQFYSIPNSEAHIRRFVKILKNYDIERIVVEATGRHEHALVQASNQAGLPIIVVNPISVRRYAQAIGVLAKTDRIDAQVIAKYAATLKPEFRPIPDKTSQKIRDLLARRAQLMEMSTMEKNRLQIMPKPLHRSIKSLLRMLQNQIEAVTRQIEQEVAKVGHWRTKMEVMTSMPGVGKVLAYTLLSELPELGSLNRKEIAALVGVAPINRDSGKLNGKRRIRGGRHRVRTVMFMAMLSSIQCNPVFKRFYERLKAQGKIPKVALIACMRKMIVVLNTMVKNQESWRSEMA

SEQ ID NO: 128300 - protein, 409 aa, unidentified
MTSVTQNSTMHTTAQHTTSKHAASKQTTASTRPRAAYYVGLDVHKDSITIAAAPAFSGPDPEARVIELGRIPHDYASLERKLARLQRPDQDGAATLCVCYEAGPTGYELHRWLEARGHHCLVIAPSLTPTRSGDRVKTDRRDAAGLAVALRADTLTAVHVPDVPTEAVRDLERARDAAKRAERVARQQLDKFLLRHGDRYEGGRKWTQAHLQWIHTLRFEQDGHRRLMADAIKTVEDATERVERLTVDLAEVIAQTDLSPLATALGALRGVAELSAAVIAAEVGDLRRFRMAKQFMSYVGLTPSENSSGERTRRGSITCAGNGRLRWILVEAAWHYRHRPAVGKALRARQQAVAEPVRQIAWKAQKRLHRKFRHLTEHRGRSSQIAVIAVARELAGFVWAIGQQDPLTR

SEQ ID NO: 128301 - protein, 359 aa, unidentified
MPDSQTGRRITVGVDTHADVHVAVALDQLGARLGQLEVHTTLAGYEQLVRWANEFGPVGTFGVEGTGSYGADLTRYLRQSQHQALEVNRPDRSTRRRRGKSDPIDAEAAARAVLSGQATTIPKTGDGPAEMVRVLKLARDSAVKARTQTINQIRAILVNAPAALRANLLGLSTAKLLQRCLTFPAQMPTPPTASMAVQYVLHTLAGRYRHLDLQARELKAHLQQITVSAAPALTSLLGVGPDTAAALLSAAGDNPDRLHSEAAFAALCGASPVPASSGKTTRHRLNRGGNRQANAALHRIAVVRLRWDPTTQQYMARRRVEGKTTKEVLRCLKRAIAREIYRALCPPPTEDPPTTTGHL

SEQ ID NO: 128302 - protein, 326 aa, unidentified
MTLSQSTDNIFVGIDVGGAGLDVAWHRGDSAHYANRPDAIATLVERLRTGPEVTRIVLEPTGGYEKPLVKALRQAQLAVEIIHTTRFNAYRALVGVKAKSDTSDARLLASYAAAPDEVRGRKAGYVELPEDAVRDELSELASRRDQLKHMIHAETCRLGTVRKHELRQMITTHLETLRAEDKQVHRMMLELVRQRDDLRRDQRLLKTIKGIGVKSALVLLASVPELGRIDNKAAAALIGVAPFVRKSGTMNAPARIHGGRAPVRSILYMAAVTASRHNPLLSPFYDRLIAKGKPPKVALIAVLRRLVVFANAVLKSGQPWKGATAT

SEQ ID NO: 128303 - protein, 370 aa, unidentified
MAQPTPLFVGLDVHKDSIAVAHAQGQSADPPVFVGEIGPRQADLDKLIRRLQGKTPELVFAYEAGPCGYGLHRYLTGQGFTCQVVAPSLIPKKPGDKVKTDRRDAIELARLLRSGDLTGVYVPTVADEALRDLCRARDAARLTLKNAKLRLKAFLLRLGLHYVGRADWTKAHRRYLAKVVCPTATQQIVFQESVRAVDEQVDRVERLDAELLERAPAWRLYPVVQALQALRGVQFLVAITVVAELGDLTRFDSPRQLGAFVGLIPSEDSSGPRRRLGAITKTGNGRARRALIEGAWAYRHPAKVSEHIQRRIDALPKPIQDIGWKAQVRLCKRFRRLVARGKHPNVAVTAIARELIAFMWAIAKEVPITT

SEQ ID NO: 128304 - protein, 402 aa, unidentified
MDTPLLVAVDVGSRFHQVAVGDGTGHVLDEFRIDHEPSGFTAFFERVERHRRSPDQRVQVAMEGYNGWARPLDSQTLARGWALYNVNNLKLARYKEIFPAPAKTDAIDSRRMLELFALDQQPGVARNALQRVTLIPKAHRHLKYLTRRRRVLVQERAGRLTRLNCDLQALCPGLLSITGSIDNRWFLRFLTCRDRLTALPRVRASTLLRIRGIGRAYLAKIQAWQPTAQFGPDIAFGDMDVVTDARSILTLSERITELDTELERLACESQPARLLRSIPGFGPTGVAELVGEIGTLDRFTKESGLAVYVGMAPLANSSGVRDRGKRPRSVNTRCQNALMTCVARHMAHVPESRAYYDRKRAQGKTHNQAVRALGRHLIRMIWTMLRQGREYHRLPTFETPKP

SEQ ID NO: 128305 - protein, 320 aa, unidentified
MTKDPLYIGIDVSKAQLDVAVRPGKQCWQVSCTEEGTGKLISQLTDLRPTLLVLEASGGLEIPLVASLAAASLPVVVVNPRQVRDFARATGTLAKTDAIDAQVLAHFAEAVHPAQRPLPGAEAKALSALVSRRRQLMSILVAEKNRLGTALPSVRPRIQAHIAWLEQDLKELDDDLDHTLRQSPVWREKEDLLRSVPGVGRNLAFTLLAYLPELGTLDRRQIAALVGVAPFNRDSGTLRGKRTVWGGRSCIRAALYMSALVASRHNPAIQAFYARLLAAGKPKKVALTACMRKLLVILNAMLKHHVPWHPPVPQLIGPCS

SEQ ID NO: 128306 - protein, 410 aa, unidentified
MQALYERCGGLDVHKDSVVACVLVGSRPPEVRSFGTTTAGLLALGDWLAERGVTHVAMESTGVYWKPIWNLLEDRFELLLANAQHIKNVPGRKTDVADCQWIAQLLRHGLLRASFVPDRGQRQLRELTRQRAQLVADRARVANRIQKVLEDANLKIGSVISDVLGKSGRDMLRTLIEQPHATPEAVAELARGMLRRKIPRLRDALTHGGGLNDHHRFMLSQLLDQVEHLERQVEAFERRIDEAMRTTPFDQAAAKLDAVPGINRRAAQAILAEIGHDMSRFPTAAHLASWAGLCPGNHESAGRRKSGRTRDGNRWLCQMLVQCAWAAARTKRSYFHALYHRLKARRGHKRALIAVAHSILVTLWHLLSKSQPYADLGPDHFRQLSRPDRAAELVRRLQHMGYTVHLNPAA

SEQ ID NO: 128307 - protein, 355 aa, unidentified
MESTKYIGMDVHKDSISIAVLNSSGKLVMESIIETKAITILEFVHGLRGSLHLTFEEGTWAAWLYDLLKPHVTKLVVCDPRRNGYLKQGSKSDRIDARKLAELLYSNMLRPVYHGEHGVRSLKELARSYLTITKDQARVMTRVKAVYRSWAIPCAGKQVYGQRHRLEWLGKIQEAGVRRRAEFYYVQLDALRSLRLVVRRELLLESRKHGASKLLSQIPSIGPIREALLIALLQTPDRFRTKRQLWAYSGLAIETHDSAENQYVNGQLQRSKKQSSIRGLNSNHNPDLKNLFKSASAVAAVKTGPFQKFYAALIGKGIKPEMARLTLARKIAAITLIVWKREVSFDARYLNPQTA

SEQ ID NO: 128308 - protein, 334 aa, unidentified
MEKITTAGIDLAKRVFALHGVDGAGRVGLRKTVRREQLMQTVAALPPCLIGMEACSGAHEWAWRFQELGHTVRLMAPVFVAPYRKSGKNDGNDAEAICEAVSRPNMRFVPVKSAEQQAILALHRVRQGWIAERTATINRIRALLTEFGVVLPSRAQHVRRGAMAAAEALPALARRALEDLRSHLGTLDERIGAYDRELEAQARASEAAQRLMQIRGIGPITAVAIVATVGNARDFESGRQFAAWLGLTPRQHSSGGKQRLGHISRRGDAYLRCLLVQGARSVLYTAVRHHDRLSRWVCTLRARRGDHKTLVAIAAKNARIAWALLAKNQTLQTV

SEQ ID NO: 128309 - protein, 349 aa, unidentified
MYDYTNKIIYLGIDVHRNSYSVTAICDGVIIKRDKILADPQTLLKYFNNFKGAHIKSAYEAGFSGFHLHRILITHGIDNIVVHPASIEVGSRDFVKTDKRDSLKIATQLAAGRLSCVYIPSEIQEDKRHLTRLREQFVRKKAATACQIKSLLYLHGLLEPFVRIRLSNTWLDNIIKEEMGKNTKFTLEKLAQAWKYFHIQINLINKQIAKEATTDNELELIYCSIPGIGPTSARKLINELGDMSHFSNQEKLFSYAGLTPREYSSGQHVRQGHISRQGKPIIRWVLVEAAWTAIKKDSSLKIIFEKLAYRAGKKRAIVAIARILLGRLKTCIKEKRLYEYSKQEIVKVA

SEQ ID NO: 128310 - protein, 405 aa, unidentified
MGMVFVGHDWAEEHHDVHIEDEQGRRLATARLPEGIAGVARFHELVASFAEDPAEVVVGTETDRGLFIGALVAAGYTVIAVNPMSTSRYRERHSSSGAKSDPGDARVLAEMVRTDRHNHRPVAGDSELAQAVKVLARAHQSLIWTRQRHVNQLRSTLREFYPAALEAFEDLDSGDALAVLAVAPTPTLGRMLSQSKIAAALRRGGRQRRLQERAAEIQQILRSDHLAAPHLVAEAMGASARALVAVLVELNTQVSRLEDELADRFKQHPDAEIIRSLPGLGMILGARVLGEFGDDPNRYADAKSRKNYAGTSPITKTSGKSRAVLARYARNRRLADACYLWAFGALTTSPGARAFYDQRRAAKDTHHQALRALGNRLVGVLHGCLRQGTPYDEHTAWGHRHQEAA

SEQ ID NO: 128311 - protein, 397 aa, unidentified
MSLLFVGIDVSKDYCSSQGLDQEGKKIFYLEFPMNGEGFSRFLNTVKSHCQNPSEVTVAMESTGCYHINLFAFLCSEGIACVVINPLLIANFARLSLRKTKTDKKDALTIAQFLLANRSKLSQVSYCQNSQDLKDLARERESLAVMIAGLKNDVRRLLQMSFPELEHRCKLFTETMLRFLMKFPSARAITVAKPKEIAKALIHDEGKRKRVWIGAEEIMALAKSSVAPESVAKEWILSEKIETLLYLEEKKKRMTEVLIEVCRLMQVDELDIITSVDGISAITGATFLAELGDIHAFSSSKHIIAFAGLDPSIHQSGQYEGISRISKRGNRHLRRIVFLMTLCVIRSQNVFREYFLRRKEEGLPPKKAILATAHKLLRVLFAMLSQRTYFRKGVVKV

SEQ ID NO: 128312 - protein, 366 aa, unidentified
MGTIGLVDKDGQRWQRTVAKPPAGTPVFIAIDVSRSKWAFNVRWEGQERRHFTSPYGIKHIEALVNQYEGCDLTLAYEACGFGYEIAWWCQGRSIPVVVVPPSTVERAPGSQVKTDRLDARMLCRKLEKGELKSAYIPSRREHEQRQLSRSYTQVLKDRKRQQARVRSLMQEQGRIGPLPAQGWRVYARWLLTQQMPEPVAFSMSQLLELREAAELRTTRLERALLELAEQPEHKGVVQALSAQKGVGPFTAIRLVLEIGDIHRFASADSFVRYLGLTPSEYSSGEEVKRGHVLKCGPGIVRAWLIECAWASIRGNKPDPKFYACFERVAVRAGRKRAIVAVARRLARRLRAMWIKALESQEAVAA

SEQ ID NO: 128313 - protein, 335 aa, unidentified
MIKYIGMDAHSSTCSFCVMDEKGCELDSTTLETNGRLIINYLKSFGGKKKLTFEECELSNWLFEITCSCVDEVIVCNPIYNLEYKRKKTDNLDAKKLAKLLRGNFLTPVYHQVSDRAELKSLMSGYQDLVEDAVRLKNRYKSLFRKEGRKITGRSLYSDESFLKEIKSRDFKFVGLHAYHLLQEMEKIRLKYGSKIRSRCRKFPEIKNLKTIPGIGDIWATQIVAQVIDPRRFKNKYKYWSYCALVRHKRESGGKSYGSVKGWGNKALKNTYKMAGHAALRGNSGIRKYYDNLLSKGVSDKNAYNAVCRKIAAISLAVWRKKEKYDDKILAKLMI

SEQ ID NO: 128314 - protein, 356 aa, unidentified
MQTQVTKKINFNGKELFIGLDVHKKSWSVTIVVDGMEHRTFTQPPDPLTLNNYLQRMFPGGYYNSAYEAGFCGYGIHRELNSLGIKNIVINAADIPTSQKDKLQKRDPIDSRKIARALEKSSLRGIHIFDREQEELRSLNRTRFYLMRDLRRSKNRIKSFLQYYGESIPPEYDNNQWSLKYISWLKQIQMQTMSGQDAFTNLIRSYEYHREQLLRLSRQIRQRMREYDNELYTLLKTISGIGPLTSSALITELGDINRFPHIDHLSSFVGLIPRVRDSGETTHTGGITFRCNSFLRTMLIEASWQAIRMDPALMQYYQHHVVNSKGHKVIIKIARKLLNRIRYVMKNRQPYVTGVA

SEQ ID NO: 128315 - protein, 367 aa, unidentified
MSHIIYCGVDFHARQQTICCLKTETGELTSHELKHEPKEALRKFYAELGGPVIVGLEASGYTPWFEELLEELGHQVWLGDATEIRRRARRRQKNDRRDAELILELLCHDEFPRLHRPSPESREILRMLRYRHKLVKVRTLIKNSLQSLSIQAGLSLQARLFTRQGTQQLEALALSPVMGQQRQQWLELLQELNHHITETEGWLKQQALSDPRISRLRTHPGLGLLSALGIVHTLIPVSRFSTTRKVAAYGGFDPMERSSADKKRYLGISKAGSRLLRFLLIEATQTAVKTDPELKRFYHRLAQRRGKPKAKVAVARKLLIRSFIMLRDEINYAEFQQRAIAARLAREFARPNVPVSLIGQPASPAKG

SEQ ID NO: 128316 - protein, 341 aa, unidentified
MDKELYFGVDVSKKTLDLAYYDGETIDWKNAHIQVSNDDAGFKKIGSWVAKVGKDFDTFLFCMEYTGLYNQNFRLWLESKEYIYGMVEPRKMHRFEPDLDDDQRSLDRIKTDELDAFRIAIYCEQNHKKILRNPSKLPSPVYFKLKRLLAERKQNTKQSTLYKQQLHDICAYDTDLSVERKKLLLKNMKENQKAIDKEIDSYMNEDASISKNYDLLTSIPGIGRIIALETIVLTENFTAISNPRKYACYIGIAPFKKESGTSVRKRTSVSKKGFSEAKADLSIAVLSAIKNNPSIRDYWIRKRKEKCGGIVLNAVKFKLVLRMFAVIKRGTPYVETDAYKN

SEQ ID NO: 128317 - protein, 378 aa, unidentified
MGQINAYPSLITPLNANSILCQPASLSTNSYKNAMTLFYPILSLHLTGDNAMVFIGIDISKLTFDAAYKLNSRYEHKQFANTLKGFDALHHWANKSKKEIFICLEATGVYSFSLAQYLSQQKSNVMVVNPIITHAFFKMELNRNKTDKADAQLIARYCEYAVLNGDFKKKLYQPKGKDYEAIQRLVTRCDRLEKSKTQEKNRLEASTNKQASCSISRLKKAIENEIRLIKKTISDRVNNNPELQQQVDLLVSIKGIGERTAWSILAYVGDINFFSNSNQVSSYAGLTPKIIQSGTSINKSSLSKLGHKRLRKSLYMPALVAIRYNPALKAVYQRLVSNGKPKKVAIVAVMRKLLILSYGVLKSEQPYDVNYQSYNKNR

SEQ ID NO: 128318 - protein, 337 aa, unidentified
MSPHVTRLGPYGKKEREMKEGNYVGIDISKETLDVLVCPTGEIAKFANDNAGIGHAINWLKKVSPELIVMEATGGLEMPIYITLAEAQYRVAVINPRQIRDFAKSTGQRAKTDKLDAAILARYAMSIKPEPRSCPEQILLQLKSRVVRRQQIVDMMATEKNRLGSSHDPVTREEIKVHIAWLKERIDSIDKDIKKKLDENTGWQEKAKLLMSVPGVGPVLAATLIAQLPELGKTNRCEAAALVGVAPMNHDSGGHKGQRSIIGGRGRIRGALFMGTLSAIRFNPVIKVFFERLTAKGKTTRVAMIACMRKMVCILNAMVKHNKPWDCHVLNTQIVTI

SEQ ID NO: 128319 - protein, 365 aa, unidentified
MKERKTLTRFVGIDLGKRTYEMAVVGKGGKVTKSNGKTYPFARRGLYNKLRPGDKVALEACSLAFIMAKEIEVAVGCKVYVLNPGRLSIIYKSMKKTDKEDALKLAHILEDFSEARLPIVAVPSDKEMMRRKILANYRRTDRDRTRNINLLHALFVSQGITTIKKKDLETAEVRKEAIQILAGIERDEAEYILKCLDLIEDRKEKLDRIINEEAANDEEMKRLQEVPGVGPKVAFAFVSHVGAARFENASQLSNYLGLVPMVYMSGDTVRYGPITKRGNSYVRAMLVQAAWAMVRTRKGGKLKEMFEYMTVEKSKSKKKAIVAVARRIAELLYLLMRDETRYMARSFVSPEKVNEVKEAELKLSA

SEQ ID NO: 128320 - protein, 351 aa, unidentified
MMIIGCDFHPRFQQISFLLEETGECGQRRLMHTAEAEQYYRSLCGARVRVGVEATGSYGWFRRLLSELGHELLVGDATQIRASNPRRQKTDKRDAEHILGLLVEDRFPAIWQPPAENEQLRQLLLHRSRLVRLRTRVTNQLEGMAKNEGLLLPGGWSNKRRKAIEALPLPGWYGERRKDLLALLDRLEERIAPLDKAVSQAAANNAEACLLMTHPGVGPIVSLAYVLTIGNWQRFPRGKQVGSYLGLIPSEESSGDKRRLGHISKQGNTLVRWLLVEAATTAQRYDASWHRQYLRLSMTKHHGVAKVAIAHKLAVRLYWMLRSGEDYQHVRERGSTARQSECPGGRSRAAD

SEQ ID NO: 128321 - protein, 315 aa, unidentified
MTEKIERSVGIDVSKQTLQVCVLPDSVQRCFENSASGHVELLQYLASVGPQLVVLEPTGGYEMEPLCALWQAGIPVAVVNPRQIRDFGRSLGKLAKTDILDAELIARYAQTVRPPVRPIPDEESQHLQALVVRRRQLVETRAAEQARKHLAKGRVRASIESLIAHLSSQIDELDDELQKLVESHPAWHKHDEILQSVEGVGDVTSATMIALLPELGTLNRKQISALVGVAPLNRDSGRKQGKRQIWGGRAAVRAGLYMATLAATRFNEQMSSYLQALRQRGKCFKVAMVACMRKLLCILNAMLRDGRPYDPQLQT

SEQ ID NO: 128322 - protein, 355 aa, unidentified
MRFYNKQHQFYAGIDLHARQMFICIIDSNGNTLFHKNMDADPSHLLRAIQPYKNDIIIGVECVFTWYWIADCCDNNSIPFILGHALYMKAIHGGKTKNDKIDSSKIAIMIRGGMFPMAYVYPRNMRSVRDLLRRRQYFVHHQSELLAHIQNTNTQYNLPAFEKKIAHQSNRTQLENRFKDDPFAQFSVDADSQLLDYYHRILLDIEQKIRKHAVHHDPFTYQLLRSVPGIGPILALVILYEIQDIQRFPAVGNFISYSRLVKCPHESAGKRVKGGHNKIGNSHLKWAFSEAAVLFLRNNEPGKKLQQRLVSRYGKAKALSLIAQKIGRTVFYMLKRKEPFSPESFFKDSVHAPVL

SEQ ID NO: 128323 - protein, 367 aa, unidentified
MKKVSTVVAQQSRNISQERLTIGLDLGDRNSWCCVLDEAGQIQSEQRVRTTANGLQEVFGAMPRSRIALETGTHSPWISRLLSELGHEVIVANARKVRLIGESRKKDDRLDAQTLARLARIDPELLYPVKHRSAQAQADLSMIRARAGLVRARTGLVNAARGVAKSYGERLRGCNVRNMNPEKAEGLSPELQSALQPLLNAIESLSGRITEYNQRIEALAERNYPQVALLKQIKGVGTLIALTFLLTLEDPHRFGKSRDVGCYLGLQPARRNSGQSEPQMHISKEGDPYLRTLLVQGAQHILGPFGVDCDLRRWGLKLAERGGRNAKKRAIVATARKLAVLLHHLWISGEVYEPLHNSSPRALLAAA

SEQ ID NO: 128324 - protein, 357 aa, unidentified
MTHLSVTSPKPLYFGLDVGDRTTHVCCVDPERVVVERLRFPTTPEGVLRVFGNRPPARVVLEVGSQSPWMSDLLRTLGHEVTVADARRVAELTRAGRKTDRRDAETLARLLQGMPELLGAVHHRGRAAQADLALIRARDLLVRTRTSLVLHVRGTLKMFGLRARMCSAQAFHKKARESVPEDLAPALHPLLDQLSELEQRIRHFDREIERIARERHPEAARLRQVCGVGALTSMAFVLTMDDPARFKKSRKVGSWIGLCPKVQASGDRDPQLSISKAGCSYLRRLLVQSAHYILGPFGKDGDLRRFGLRLCERGGKAAKRRAAVAVARKLAVLLHRLWTTAEPYEPLRNSLRATAAT

SEQ ID NO: 128325 - protein, 346 aa, unidentified
MGKSITDLSSVTTVGLDLAKHVFQVHGVDASGRVVVAKAIRRNKLLEFFASLAPCLVGLEASGSAHHWARELITLGHVARMMPPAYVKPYIRRQKNDASDASAICEAVTRPSMRFVGVRSLMNQAALMRHKAREMLVTQRTQLLNGLRGHLTEVGVIAPQGLRCARELAELIEACDETIPFEVCEALAPLVVQLRNLDEAIAQLDRIIAKLAQKDETARRLMSVPGFGPITASAMAATIQDTSSFAGPREFAAYLGLTPKQNSSGGKPKLGRISKMGNRYLRKLLVVGAHAVLFHRKPHTDPLRMWAKKLIEKKPFKLVAVALANKMARIAFAILRGKTVYREIPA

SEQ ID NO: 128326 - protein, 361 aa, unidentified
MVITHQGRGVIGGIDTHKDTHAVAAITATGQFLAAAQFNTNPTGYRNLLTWLRAYGVLLRVGIEGTGSYGAGLTRYLRSEGVDLVEVIRPKRAWRRRRGKSDPTDAEAAARAALSGEANGTPKHQDGPIEAIRLLRLARRSAVLARTQAGNQLQSVVETAPVELREQLRHLRHADLVARARRLRVAAVDTPAAAARLALRSLSVRWLALDAEVQALDAHIGRLVQEAAPQLCAVWGVGPDTAASLLVAAGDNPERLASEASFAALCGVSPVDASSGRHHRHRLNRGGNRDANRALWVVAMARMAKHPRTQAYVQRRTEQGLGKKEIIRCLKRYIARELYRVLVDGLAPSTARPVPSNLDRP

SEQ ID NO: 128327 - protein, 346 aa, unidentified
MEHYVGLDVSLKLTAICVVDQTGSVTREGVVDSDPETIADFVTSNAPSAVRIGLESGPTATWLWTELKQLGLPVICIDARHAKAVLKMQINKSDRNDAAGIARIMQTGWFKEVRVKDLDSHLVRALLASRALLVKIKRDLENQVRGLLKNLGLVIGRAKLNVFAVRAEELIKGRPELMAAVRPLLDARNAIEQQVDDLDRKVMRLARNNAQVRRFMTAPGVGPITALCFLATIDDPTRFKRSRSVGAYTGLTTRRYASGETDWTGRISKCGDKLLRSYLYEAANVLLTRVAKWSTLKAWGIRLAKRSGLRKAKVAVARKLAVILHRMWIEGTEFKWSSKEAANQPA

SEQ ID NO: 128328 - protein, 363 aa, unidentified
MSKLLYVGMDVDKEKIVAARLASAAKQSEECVIANTPQAVRRYFAALTREAEVVAAYEAGCFGFGLYHQLTDLGVSAVVAAPGLIPRKPSDRLKTDRRDARTLAFTLRAGQLTAVHVPTKQDESVRDYLRMCEDMRDDLRKCKQRILHLLLRRGIRYEQGGPWTVKHKDWLATLDLGSQLDRQTLDSYLARLQELESTCSQLIAEVESIAQGERYRESVSTLSAFKGIKTLIALSFIAEIGDFRRFSSAAQFMAFLGLVPSEHSSGSKHRQGSITKAGNSHLRRLLVEAAWHYRSYHPTSRVLVQRRQGVDPRIISYVNRAGRRLNRKYLHLLMRGKRSQVAVTAVCRELAGFIWGAMVGQVA

SEQ ID NO: 128329 - protein, 411 aa, unidentified
MCSPTRFIGLDIHKAYFVAVGVDAQKQVIFGPQTVPNHQLDAWAAKYLLLSDAVVVEMTVNTYLFHDVIAPRVHSFIAVHPPNVTLVTGVKVKTDKKAALTLAQLHAVGMLEGVWIPPEAVRSLRAAIAQREKMVRLSTQAKNRLSSLLHRRHLVFSGEGSQYAPEQKEWWLALPLPDLEKRIVESDLDTLEFARRQIESIEQELKREAAKDDRVPLLAQMPGVNVLTALTILAAIGTIERFEDAKHLVGYAGLGTRVHDSGQVHQNGRITKAGRKDLRRAMVNAANVAVQHHPFWKKEFARLEVRLGRSKAIVAIARKLLVAVWHILTFEAVDRHADERSVAASFINLAYKMGVKNLPNGISAKTFARQQMDRLEIGAGMTAVPWGSRRIVLPPSKLSTETKGERRPKHV

SEQ ID NO: 128330 - protein, 358 aa, unidentified
MDGSREHPHMTAGLDIGDRYSYLCLIDTDSGEIMEEGRLPTSPETFKRRFASERPMRIAIEAGTHSPWVSRVLEECGHEVLVANPRKLRLIYSNKRKTDEIDAENLARLARVDPRLLYPLKHRGEDSQAHLAIIRSRQALVDCRTQLVNHVRGAVKSFGARLPKCPARSFHKRASEHIPQALWPALGPILEQIASLTQRIRDYERELETISKQHYPETDLLRQVEGIGPLTALTFVLTLEDPYRFEKSRSVGAYLGLVPASDRSGDRDPQKRISKEGDQMLRKLLVGSAHYILGPFGSDSDLRRHGEKIACRGGNNAKKRAAVTVARKLSVLLHSLWMSAEIYEPLRNAHRSSGGQAA

SEQ ID NO: 128331 - protein, 354 aa, unidentified
MDIKYIGMDVHKETISIAVMNGDGKLVMESIIETKAITILQFIQGLRGDLHVTFEEGTWAAWLYNLLKPHVTKLVVCDPRKNALLKEGNKSDKIDARKLADRLRGGYLRSVYHGENGLRTLKELARSYLTISNDLTRVMNRVKALYRSWGILCGGQQVYAPRHRSEWLNKIGEAGVRRRAEFYYQQLDALRALRQAVRRDLLAESRKHGATKLLRQIPSIGPIRAALLIALIQTPHRFRTKRQLWTYSGLAIETRDSAQYRYVAGQLQRSKKPQQLRGLNQNHNHDMKAIFKSAATMASSREGPFQAFYQGLLMKGMEPAMARLTLARKIAAITLILWKKGAHFDAEQLKPQAA

SEQ ID NO: 128332 - protein, 345 aa, unidentified
MKNTIVGVDLAKHVIQICVVKKNKVISNKEIKANDFEVWLATSKKATVVFEACATSNYWKQTASKYGHDSRIISAKLVAKIRQHQKTDKNDALAVAQASQLVDIQFVQGKTFAQQELQSLMRMRELTVKQRRASKQQIMSLLLEFNIKSGPRLGSLKVIVDPVLEDAENGFCMPFREGLKLAWDNYATINLALKAYDNLLAETLKLHPDCFKLMALEGVSTINAINLYISLGTDKLGTFKSGRDAAACIGVTPIQHSSGGKTQLGSIGKNVKNSLLRSYLITGAMSIVSKVDKREPKTAKELWLKQLIDRRGKKCAAVALANKTVRTAFALLTQGTEYQAQPLPG

SEQ ID NO: 128333 - protein, 340 aa, unidentified
MVHVGVDLHKRVSQIAVLTEEGELRQHRFQNDATRLEQFFAQLPSQTPVAIEATGTWWWLVDLLERLGHQPVLSHPKATKAIAAARLKNDKVDAQRLALLLRGDLLPTVWIPPAALREARELVRHRINLVWLRSAVRNRLLSMLARRNLQPTRVKSWLTQGGQRELRALSLTPSPGTIRDDCLTLLPLLDAQIRRLDGELVQRWGDDPRVQRLTTIPGIGPFIAIVLVLELGDITRFPSAKHVASYIGLTPRVRASAERVRSGHITREGNRLLRWVLVLAATQASRRPGPLRTWFRMVSQRTGKKRARVALARRLAELVYQCWQTDLDYWTILRRGAVRG

SEQ ID NO: 128334 - protein, 339 aa, unidentified
MEYAGLDVSKKSIVAVWKDCNGKTLREGEFSNGPEGLEELAALLVGCKATVESSTTGQFVYQNLAKRSIDVVMANTSKIRMIPESDKKTDRNDAEILANLLRANLLPTCYVPDEKVRRQRDLVRERRSLVEMNVSFKNRIRAALAAEGLDCPYANILGKDAQGWLENATLKQHVKEHIMQLLRLSNSFLKEIHVLDALIEDEYNKMNQAYLLDTIPGVAKNSAVAILSEIGDIRRFDSPKKLCSYAGLVPRVQQSGDTFHAGHVKHGVKMLKATLIEDAQIAAFRDKTLHKFYLKIKRKRGHQKSIVAVARKLATIIWYMLQRNEPFEGAAICHTRRAA

SEQ ID NO: 128335 - protein, 411 aa, unidentified
MKDSRKRYIGLDVHKHYLIAIGVDDELNVVLPVRRVELSYLEAWMKKTLTRQDHVVLEMTTNTWQLYDELCVHAGSVLVVHPPHVALITRSQVMNDKIAASILARLLAKGLLVGVWVPPQDIRELRGLVAQRKKMTGLATQAKNRLHAVLQRHHWLPPEGNPFHALQKKWWLTLPMGVLEKVNVQSDLDTLQFAEKQLMQLTSMMAEITNQSDEVIRLLQLPGFGVVTAVTVWAAIGDIQRFVDAQHLVGYGGFGTRVHDSGMTTRTGRITKAGRRDLRMALIEAAQVAANSHPHWKAELTRLQPRLGRNKAIVAIARKLLVAVWYILAQHKTDRFAQPEAIAQKLLKFAYQLGKENRPKGQSAAQFVRQRLEALQLGQELTSIAWGSKKPIPLPPSTNKVSDVPNGAKAP

SEQ ID NO: 128336 - protein, 406 aa, unidentified
METVYEKACGIDVHKDLIVSCVIVKGRRQIRSFGTMTRDLLELTAWLKETGCQMTAMESTGSYWKPVYNLLEAEGIPAMVVNAQHIKNVPGRKTDVKDSEWIADLLRHGLLRASYIPARDQRELRELVRYRKSMIEERAREFNRVQKVLEGANIKLGSVVSNIEGKSATAMIDAIVSGNTDPDELSELAKGSLKEKKAELAKALQGVIGSHQRMILGAMRQHIRVLDSLIESLDAEIAGRLAAQSELLEAIETIPGVGERSAQVILAEIGWDMSVFPTAHHLASWAGVCPGNNESAGKKHSGRTRKSNKTLKTILVQCAKANARGKSTYLYAQYSRIASRRGANKATIAVAHSILIIVYHILKNGGTYRELGGGYFDEIRKEAVVRRAVKRIEALGYTVSAEPLAI

SEQ ID NO: 128337 - protein, 344 aa, unidentified
MKVSVLGIDLGKNICSIVGLDETGAVVLRRQVKRKTLIGLAAKLSPCIVAMEACCGAHYLGRLIADQGHDVRLMSPEYVRPYIKAQKNDDRDAEGIAEAATRPTMRFVELKTQEQLDMQTLHRSRDRLVAERTALINQLRAILLERGIIVPQGRRALEDELFMLINEQRDAGVSPRLLKLVEDMRTEWRELDRRITVFDKEFAAFAKENQDARRLVTIPGVGVTIASALIAAVGKAEAFERGRDLAAWLGLVPRQATTGGKPKLLGISKRGNIYLRKLLIHGARAALPHVAARDTALGRWVKALLARVHKNVAVVALANKLARIAWAILRRGEKFAAKGLLMTA

SEQ ID NO: 128338 - protein, 474 aa, unidentified
MEKELSKKQKEVIKLLEKQKIRDVKDLESYKLSVCHPFSAGIDLGSKELYVALSPEIAAEMNLPIVHCFATFTKDLLKCKDLLVSCGIKTVSMESTSVYWTTIFSILQESGIEVCLVNPKKFRMVPGRKTDIADCQWLQTLHLYGLLRGSFHPSGEIEVLRTYMRERDSIIKERSVFVQRMQKAMTKMNLLLYNVIDDITGKTGIQIIEAILKGERDPKTLASFRDPHIKKSEEEIAEALTGYYKDDQLYLLKINYQSYCFFDRQLYDIDKQITSALKRFPLKKEKKEKRPDNAKTATKGKNNIRTKENLEDILFHILGVDLSSLPGIRANAILQIISEVGTDMTKFPSAKHFASYLGFVPHNKITGGHIISARTDRIKNSAAQAFRKLIPSISQTKTALGAFYRRLAPRIGKAQAIIATCRKLAILVYNALAFGIKYAEQGELLYKQKQENWERKKLAALAKKYNCNIVSIAS

SEQ ID NO: 128339 - protein, 399 aa, unidentified
MNMNAVGIDVSKRKSTVAILRPGGEIVKKPFDVPHLSSDFRSLTRLIQDLDGETRIVMECTGHYYEPIARRLSQAGFFVSAVNPHIIRNFQGHDNPLRKVKTDKADSVKIARYTLDSWGNLKQYTLMDELRSQLKTMNRQFSFYTKHKTAMKNNLIGLIDQTYPGANTYFNSPVREDGCQKWVDFVDTYWHVDCVRKMSLTAFINHYQKWCHRRRYIFSKSKAEEIYGKAKELVPVLPKDNFTKRIIKQAIAQLNTTSKTVEELRNLMNETASKLPEYPGVMAMEGVGPSLGPQLMAEIGDVMRFTHKGAITAFAGVDPGVNASGEYSQKSVHASKHGSPVLRKTLFQIKPDDAVYLFMDKKRAQGKPYYVYMTAGANKFLRIYYGRVKEYLLNLSELN

SEQ ID NO: 128340 - protein, 343 aa, unidentified
MKEVSIIGVDLAKNVFQLHGATADGTVLFRKKLSRPQFQRFMAEHPRCLVAMEACGGAHYWAREMERAGHEVRLIAPRYVKPFIKRQKNDAADAEAIVEAALRPTMRYVEPKSGEQQARSILFRTREQFVKQRTEAINALRSHLYEFGYVAPEGIGYLPRLEVVVEDPGSALPPLAREICRELLDQIAHLTARINAMKKRIDAIARVGEASRRLQTMPGVGPIGALAVETFAPPMEQFKRGRDFAAWLGLVPRQASTGGKQRLGKTSKMGQRDIRRLLITGAMAVIRWALRHGAPQNPWLARLLERKPPMVAASALANKMARGIWAMLTRGEDYRGPAIGSAA

SEQ ID NO: 128341 - protein, 477 aa, unidentified
MVMTREPEEILDEPHEQIMERVCAIDVAKDSGKVCVRLPAESGSGRRVSKVWDVPARTKAVIELGDHLACQGIQKVTLESTSDYWRIWFYLLEARGLDVQLVNARDVKNVPGRPKTDKLDSVWLAKLTEKGLLRPSFVPPKQIRVLRDYTRLRVDLTAERTRYWQRLEKLLEDALIKITAVASRIDTLSVRDMVEALIAGQRNPRILAGLARGRLKLKHADLVEALTGQFDDHHAELARMILDQIDTLTARIDTLTARIDTELATMPGAADPGSDPDPDDPGPRPNGQAEPAPVTSVGHDTASTTVGQWTVPRSALDLVDILDEIPGVGRHNAQAIIAEIGLDMSRFPTAGHLVSWAKLCPRTIQSGAKSSAGKTGKGNRYLRAVLGDAAAGAAKTQTFLGDRYRRIIKRRGKLKALVAVARSILVIIWNLLAHPGLPYHDLGVDYHDKRIDTERRTHNHVRQLEALGYTVTLTAAA

SEQ ID NO: 128342 - protein, 368 aa, unidentified
MKQQTSVATETRNKVINKIDYSGKTIFVGIDTHEKDYQVAKVIRSICLGNHRMKASYKELVQHLRTHYPGASFRCVYESGAWGFTLQRRLQEAGIDCMVVHAADVSTTDKERRRKTDKVDALKLARDLESGLLEAIYVPDEEIQKDRNLIRFRKKLKGDLNRSKNRFKSLLKYQGIIIPPQFGKACWSLKFMKWAELEAKKDILLQETLLLMLEEVKQLRQLLLKTEKKLQELMKCKYQQKAQLLMSTPGIGRTLAMLFLLEVGDIRRFRGFDSLNDMIGFCPDTESSGDTERDRGITTRRHKQLRSGLLQAAWRAIRIDPALLEAYQLLTLRMIPHKAIIRIARKLLRRMRTVLLTGQPYQLGIIKG

SEQ ID NO: 128343 - protein, 318 aa, unidentified
MPHFTQKVEPRGAVLGLDIAKDTVAIHDSVTSTYRVVDNKPAALRKVFRACIGYDLALCESTGGYERPALDAAWELGLPIHRADPSKAKAFITSHGGNAKTDKADAQWLARMALERGESLARWSPPDPDIEVLACLVRHRDDLLRQRTQAKNRLSAPNRGPVAKLLRAEIKFLTNQIKTLEEQMAQCRAKPAIKPRSDVLLAIPGIGPVVANTLIGLLPEIGALTRRQVASLCGLAPHPRDSGQFTGKRRTYGGRCELKTALFMAALSVSRTCPTLSAYYDKLIDAGKPKMVALTAIARKIAVIANARVRDASLAEAN

SEQ ID NO: 128344 - protein, 448 aa, unidentified
MPTRKPPRPRKMKLPKHLQHINPHAAGIDIGGRSHFVAVPEGSCEQPVREFTSFTDDLHRMADWLLACGVSTVAMESTGIYWIPVFEILESRGFEVRLVNARHVKNVPGRKSDVLDCQWLQRLHSYGLLEGAFRPSEQVCTLRAYVRQRMNLVRYAASHIQHMQKALAQMNLQLANVVADITGGTGMRIIKAVLAGERDPLVLAQLRDARCKSSEATIARSLQGNFRPEHLFSLKQAVDLYEFYQGQIGECDRQILNQLSSFDGPDASGNGPAESLDEALQRMTGVDLTQIDGINSNSALKIISEIGTDMSRWKSAKHFASWLGLCPGTKISGGKRLSAKSKPVANRAAGTLRMAAFSLFNSKSALGAYLRRQRSRLGAPKAITATAHKLARLVYSMLKHGTAYVDVGQKRYEERYRTRVVQNLKRKAHDLGYALVEVSGKQPQPVAS

SEQ ID NO: 128345 - protein, 362 aa, unidentified
MRIIGCDLHARQQTLAVLDTATGEVMEKTLTHSGSNVQEFYAALPGPVRVGIEATGTMQWFLSLMEELGIDCQVGHPAKIRAAEPRKQKHDRRDADLILELLVENRFPSIWRPSRELVDLRALLLHRHQWVRMRTRIQNALHAIALANGLRRGPGLWSQAGQNTIASLPLAPHTAHRRSELQAMYAKFENDIEKLNQRVQEQAGERPGATLLMTHPGVGPITALATDVFLGDPKRFTDGKALASYVGIIPSEYSSGGRRRLGGLSKQGNPLLRFLWCEAAAHAVRRDPQLQRFYRRKLVQKGLGKARVAAARKLGIRLWIMLRDQIDYHEFCRRGQMQQKSGDACAGMPGTRYGANGHRPVD

SEQ ID NO: 128346 - protein, 383 aa, unidentified
MLRYWGLDLHAQYVHVCEWRPETQKEKHSRFPNTPDGWARFLQRLSPDDRVALEVTGNAFEVYDWLSPHVAQVLLANPVELRRLGSGRHTDRVDAARLAKMLAMGTLPTVWVPPQPVRELRRLLRYRERLLNVATRWRNQIRAVLRRYGEQPPRGVDLGAFLTPERLGAFASGDRAIVVSALRQLQCTQEECTAIEAEIAEHLARTPEAQVLLTMTGVGPITAAAIWAALGDPRRFRTPKQVARYAGLDPSVYQSGETYFHGKISKNGNPLLRTYLIEAAHILARFDNGPLGQFYHRKRRQLGHKRAVVALARKLLIVAWRMLLTGESYRYQRPKTVQNKMSQLRGLRRHQRNWEDVMVTVLAKPQERARQSRMKGYRTEVPA

SEQ ID NO: 128347 - protein, 411 aa, unidentified
MRENNRIKSEKKLTGKMNSRKQSNVGAVAGRVSREVQSLLFKLACCRNRPGGSGDTPETWTIGIDLGDKWSRYCFLDTEAAIVAEGSVATISAEIREYFSRLPKSRIALEAGTHSAWVSAQLESYGHEVYVANPRKMESIHKNRRKNDKVDARTLARLVRADPALLYPIQHRGLQARQDLVLLRARDNLVAVRTDLINCVRGLMKSVGERVPMCSADSFHKTARKAVPEGVRDALLPVIQQIESLTETIRGYDRVVSRMAEKKYPETGLLQQVTGVGDLTSLAFVLTLEKPERFQKSRDVGAYLGLVPRQDDSGESSPQLRITKTGDRMVRRLLVSSAHYILGPFGEDCDLRRFGQKMSARGGKNAKRRAVVAVARRLGILLHRLWVTAEVYDPLRNTRIVEQASPAAAIA

SEQ ID NO: 128348 - protein, 393 aa, unidentified
MVYVGIDVAKDKHDCFITNSDGEVLYDVFTIQNDMDGFEDLLFKIKTASKDLSKVKVGLEATGHYSCNILGFLKSKGLYTIVINPLYTSLSRKSVSLRKTKTDKVDARTIASIIMSDVSLKPYSDTVYHNEDLKSLSRYRFDKVSDRSKLKQSVSRLVNILFPELEKLVSTLHAKAVYALLSEFPGAHQVASANLKHLTALLSTASKGHFGREKANEIREAARRSISSYLPAKSLELRHTIKLIHELNAEIAEIETEIKKIMDSIDSPTLSVPGISYALGSVIVSEVGDFSRFDNPDKLLAFAGCSPSTYQSGQIYSTHAKMEKRGSKYLRWALLNAAKYVCKWEPTFAVYLSKKLAEGKHYNVAVSHAAKKLVRLLYHLETTGEKYIPQTLS

SEQ ID NO: 128349 - protein, 340 aa, unidentified
MLYIGLDVHKEFCQACVIDESGRALSNERFSSTSEELDRFLDRFQDAKFVLESTGIWEFIYEGIEKRGFEAVLAHPLRVRAIAEARVKTDKVDAETLAQLLRADLIPKSWIPPKDIRDLRQLVRQRAYLVRQASRFKNRIHAEILRRGVRRPENLKTPFAQRSIRWMRSLDIPTVTSCLNCLENIQAQVEEMNIQLLEEYNRRPDAQLISTVPGIGFYGALLILAEIDDVSRFRHPEKLCAYAGLVPTVSQSASCVRYGSISKDGSAYLRWILTESVHVHTRYEPGSQLSRFHARLAKRRGRRVATVATSRKLLRIIYWMLVRHEPFHSHGFNPVKRVHC

SEQ ID NO: 128350 - protein, 359 aa, unidentified
MLHLGIDQHRKQLTVNIRDEQGDVVLKRQVSTEWDRVRKFFEDLRQRAEPEGGFMAIVEICGFNDWLLEMLNDYGCRETVLIQPEKRSRKKTDRRDASVLSQLLWVNRQRVLGGKRIQGLKRIILPCQEEQENRQLTALRQRTTALRTKTINKVQHILLKHNLQQECPTKGMKTKKARQWLTELPLGEVDRLEMDQLLAQWTLWDVQIVTIDAKIEKRQQKHKTAPILATLPGASTYSSLALASRIGAIENFPRPGSLANYWGLTPSCRNSGDATDRLGSITKEGSAMARFILGQLVVHVLRRDASMKAWYARIKKRRGSKIARVAVMRRLATIIWHMVKNNEAYCMGGPPRQRQKKAA

SEQ ID NO: 128351 - protein, 467 aa, unidentified
MTETVRLGIDVACVAEHQASCADGAGEFSWSGWRFRTTPADLERLWAKVPAGAEVTVILEPTRNAWVPLAAWLRAKGATIVLVPPEQSADLRDYYNKHTKTDRLDSRVLARLPLLHPDGLIALDGLGPADPLKRAVRHRSSLVERRTKTMQRLDALVELLGPSLSEVIGTGGYTKTALAVLEGYGDPTALKKLGRKRLAALVARTSRGKWGETKADDLLAAADETILLWSGGGLDFAELAADVAAEARLVGRLDAEIAVLDGRIAALYDTVDPEGIVRSAAGVGPTLAPAILGRTGNMDRFANLAGVRSFTGLVPKVDQSGTADHHRGPTKAGDPGLRQALFLAADFARRVDPTLAARYYRLVVDEGRHHNSALCTIAAVLMGRIAACWRNRQLYVLRDVDGTVIEEVEGRRICAEKYAVTPELRKARRQSSKAKQQKQRTGRRSEESTGAAPATGPSPAKATGHAA

SEQ ID NO: 128352 - protein, 367 aa, unidentified
MDKSSKAFVGMDVHKESIDWAVAELDGEVRSVGRTGGDLAAVARTVRKLVASGKTLVFVYEAGPCGFVIHRWLKAHGHESWVVSPSLTPKKPGERIKTDTRDAMKLARLARAGELTAIYVPEAADEALRDLVRAREDAVAMQRQARHRLQALLLRNDIRYVGKTAWTPAHQRWIARLKLPHATQQIAFEEYVQAVQEATTRIARLTAAIQAAVSTWRWQPVVAALQAMRGMQLIHAVRIVAELGDLTRFGTPRAMMGFLGLVPTEHSSGSKRAQGAITKAGNSSARRAMVEAAWAYQHPARITPIIARRQGGVPKSVLDIAWKAQLRLCARFRKLAVRGVNRNKLVVAVARELAGFVWAIGQQVRPV

SEQ ID NO: 128353 - protein, 429 aa, unidentified
MKNNTARKISQVPHRYLIMGIDPHKKIHVAVAMTQDTIIHTKFKFANSRQGYEQVMMSARDQMAKTGSIGVIFAIETAGHYWRNLAYFLDEQGIPFRLINPFTLKRMREGKDINRRKTDFRDAEMAGELLRNGEFVETKLPKGIYAELRATYSAYRRLVKERSRAKNLLKGLLDGLFPEFNQVFKNICGMTSLDVLALCPAPKTITGMKLEEFVDAIRKGFKGRAPKVQKLHAIYSLAQASAGIETGADSVSIELSFLVQRLRLFTEQIERLEDTLVRLVKSIANACYLLSIVGISYISVAGILAELGPLGAYQNAGQLIKMAGTNPIEWESAGKRGSHTPMSKKGRTGLRWCIWTAAMCLLRHNSDFRSWAKERRERPAHLHPLKAREVFGAVANRLLRLAYALVKKQTFYQTPKPKVAPELELVAAI

SEQ ID NO: 128354 - protein, 430 aa, unidentified
MAAGAGIQVGLPGVAKETELADHDSPSNVGYTVFCGVDVGKSEHHACALDPGGNKIHDKALPNDQAALTGVLTALQSRGRVLVVVDQPASIGALVIAVARSMGIDVAYLPGLAMRRIADLHPGQGKTDARDAYVIADAARTMPHTLRRVGTDDQTLAELAVLAGYDDDLAAQSTRLTNRLRDALVHIHPALERLLGNNFDRGGVIDLLASAPTPTALRQLGVHSIGQLMRARSPRLAKTLPAKIIAALDAQTVTVPGTDAFGRVIAGVAAQLRAVRNDRDELASDLEDRLEAHPLARVLTSMPGVGFRTAIKILTIVGDGSAFPTAGHLAAYAGLAPVTHRSGTSIKGETRSQRGNHALKSALFLSAFASLKDPASRTYYDRKRAAGKRHNAALICLARRRVDVLFAMLGDHKHYQTPDTPTNNPHPAAA

SEQ ID NO: 128355 - protein, 309 aa, unidentified
MDIVVGIDVSKDRLDVAVAPSGLVFQVANTQAGIDDLVSRLEPIGAEVVALEATGGFETAAVAGLSAAGLAVVVVNPAQVRAYAHAIGRRAKTDPIDAAVIAAFVAATKPELRPLKDAETQALSALVARRRQIVQMIVAEENRAKMVLAKEAQKSIKRLLAALRRELESLDKDLDAHIRKSPVWRVRETLLTSVPGVGPATARTLLAEMPELGSLDRRQIASLAGLAPWTRQSGTWKGKSFIGGGRGKVRAVLFMAALVASRHNPVLKAFRDRLVAAGKPKIVAVVATMRKLLTILNAIIRDAKPWQNA

SEQ ID NO: 128356 - protein, 316 aa, unidentified
MAKAVCKITLGIDVSKDELLICAWHSEQITRLVNEVAAIEHYLDGLSGPVQIAIEPTSNYHLALLEHAHARGFAVYLINPRQLVHYRKAVNVRNKTDPADAWLLARYLAHESLALRAFNPPCAKAQRLWALLKRRGVAVRTRQTLKQSFREIRLPAKALFTEIQRVIARIDQQICALVRELGWWADYQRCQSIPGIGTVNAAALLAVYHRGAFASSDAYIAFIGLDVRVRESGKFKGQRKLTKCGEAEIRRLLFCAAQGARSCRSFDNYLQRQLDKGLSKIAAKVILARKLARIAFALISKQQTFKNQEIIYSQSP

SEQ ID NO: 128357 - protein, 428 aa, unidentified
MLKIVYPICCGLDVHKSFVVACIASTNERGVTSYNSKHFSTFTKGLKELSAWLSYYKCADVCMESTGKYWIPVYNVLEHSCKIVLAHPKYVKSIPGKKTDKKDAQWIADIFKHNLVIGSFIPPFDIRQLRDLIRYRSKLTSYSTGETNRARNCLTVSNLKLDDVFSNIFGKSASAIINHILEHPNEPFDVSEFVDGRCKAPIENIQAAVDGVMCGEQSQKLQIIQAHMHDLEKAKANLDSVILTLAEKFRPQINVVSTAPAIKSLSAITIIAEIGVLMNFAQFRPQTEQAEVHYMSVFISAKHLCSWAGLSPQNNSSAGKKKTTRISRSGAYIKPLLVQCANAAVKSDKYPEIRNRYLKLKKRRGHKKAIIAIARMLLVAIYNMLKNNEPYNPELYIKSDVQPKPNDFAIDHAVRMLLSQGYSVSPPG

SEQ ID NO: 128358 - protein, 403 aa, unidentified
METTAGIDLASEEHRLVVVEPDGRRLDERRYSHSEEGITALVRRLLELAVGRVAIERPNGLVVDRLLAAGIAVVAVHPNQLAASRDRYRAGGGKSDGFDAYVLAELARTDMHRFRLLEPDNDETRALRALTRAREDLVEQRVALANQLRAQLEAFWPGATRIFADLDSPICLAFLERYPSPDDARSLGAKRLAGFLARNGYSGRRKPTELLARLREAPTGKAAELETEARRAVVLALVAALKPLVEQIKLLTSQIAGALEAHTDGHIFRSLFRDPKAVVTAAELLAEIGDRRERHPTSSSLEAIAGQAPVAVESGKKKVACFRWACNKQLRSAVSVLADASRKHNAWANDIYQRARARGHDHPHALRILGRAWLRVIWRIWHDHNAYDPSQHGSLNRLLAPQG

SEQ ID NO: 128359 - protein, 344 aa, unidentified
MYFIGVDHHKQASVMTVVDKDGQELKSGRMPNLRANVERFLSGFRPFTAVVEAGRSSYVMADLLRELGGEVKMANPVEVKAIAHARIKTDKRDSRTLAHLLRVGLIPEIYQRDVWNRRAQRVMRMRAFWVRKETEVKNKIRALLAQQREDVRLEVEKWERSLFNLKGLEFMARLPLEGRDREVLDDLLEGYREIRAHIKKSDGLVRALYKELEEARRIDTIPGFAAMLSVVAAVEIADVRRFPRVEELHAYAGVIPSTYSSGERTYHGRITKQGNAWLRWAAIEAVYPAVKKDLALRVLYSRLAKRKGPNVAKVAVARRLLTIIYRVLSDKREYIPEMKQQSAA

SEQ ID NO: 128360 - protein, 412 aa, unidentified
MEVMYRRCAGLDVHKETVVACVRILEGSEVTRSVRTFSTTTASLTELGEWLEENGCTHIAMEATGVYWKPVWQVLADGEFELILANAAHVKNVPGRKTDVNDATWLAELLAHGLVRASFVPEPAIQDLRGLLRTRKQLAREKASHVQRLQKTLEEANIKLESVLSDVMGRSGRAMVQALIDGETDPAKLAALAHWKVRASATTLQEALRGRIKRHHRFLLKLHLQQIDALDASIAAIDREVDDGLACFRDAVKQLSTIPGISELSAQVIVSEIGTDMSRFASAAHLRSWAGLCPRNDESATKRRSTRLRKGAPWLKAMLVQCAWSATRSKATYLHAQFVRLRYRRGPKKAICAVAASILTAAYHMLKEGTFYDDLGAAHFERRRPDTQARRLVKRLAALGFSVELKPLAAVS

SEQ ID NO: 128361 - protein, 454 aa, unidentified
MEVINIGVDLGVTAKHHAEVINSEGTEICSSAKFTGTKQGFDMVSKHVLKHVDEEVKLRFICEPTSMSWFPLAVYAKRNGHEIMRVKAQKSHDLRKYYSRHTKSDKLDARALAMMPIVERESIEEVYLPDRVTNALNRRCRQREKISKEIVSIKTRIKSLYHWVMPGLTDCFEDPYGERAKAFYKKYTNPFKVKHLGIFRLHRVLEKTGRQQPSEGLAERLYKAAIRGCELYDRCDEYIDFDELQKEVECELQLLESHEQIQKKVDEAINRFYKQAHPTKNIETIPGIGETLGPVFLGIIGNPERFSSQSKARGYSGMIPRQKDSGESSKKGLNITKDGPSRYRRALYLASDTARQWDPQLAKVYYDQMVHKGHCHNQAVCAVSTHLIGRIIRVLKDKRPYELRDLERKPITKRKAKILIKKELAVPEETRKRTRSRRKTKGYKRNHIRGIAQK

SEQ ID NO: 128362 - protein, 360 aa, unidentified
MTNGSTKARTAAGLTVGIDVSDIFSHLCILDAEGNVIEESRVRTTTTALERQFRTLPGCRTVLEVGTHSPWLSRLLADLGHEVIVANPRQVRLIAESDRKRDRADAELLARLGRLDPDLLRPIRHRGPQAQQDLALLRARDTLVRTRTNLVNHVRGAVKALGGRLPACSTASFHKKVAAHVPEALRGALLPLITTVADLAARIQEYDRRVEQITEERYPEGRRLRQVPGVGPLTSLAFLLVIEDSTRFRKSRGVGPYLGLVPRQSQSGEREPQLSITKAGDPLLRRLLVQSAHYILGPFGPDSELRRWGLRLAGAGSGRSKKRAVVAVARKLAVLLHRLWVTGEVYQPIAAEQPAPVRAG

SEQ ID NO: 128363 - protein, 412 aa, unidentified
MNPVVGLDVSKGESQVQAFLDKGKPYRKSFSIKHTLEGLDSLLEFLRDIEKLADGKQPSVILESTGQYHIPVIQFLEEQQYVYIIVNPLVSHRARSTNLRKVKTDAIDAYHLCELYYKEELEPYKKRGIQLLNLRNLTRQQETVSSTAAQTKLQLQSILDQVFPEYRGVFGNLYSKISLQILSIFPTSKEVLSVSESDLTNKIAELCTTRSEKWAKEKAIKLREAALRNPFQNNLYQSHIFNLRMFINIVLQYQEHLSKLAAEIDALAKEIKEYEIIQSIPGVGEKIAATIISEIGEIERFNHPKKLVAFAGIDPSVYSSGRFTASINRITKRGSSRLRQALFMAVQCGIRDARKQKTSDEILPRNKKLREFYDKKREEGKPFRVAIIACANKLLHWIYALLKRKVTFQNED

SEQ ID NO: 128364 - protein, 340 aa, unidentified
MKIIGCDFHPSFQQIAMVDTETGEQTERRIAREEAGEFYRGLSGPVRVGMEASGNTLWLERLLAELGHELWLGDAGRIRAMEVRKQKTDRRDAELLLRLMIKDRFPRLWVPSQEQRDLRQLLVHRHKLVGMRRQVKNQLQHLALNQGVQQKHKLWTRAGRKLLEELPLEGWTARRREESLQLLDDLEGRIMPLDQAVKQAAEKDRVAGLLQTHPGVGAITALAYAVTLGKIERFRHSRQVVSYLGLNPSEHSSGGRQRLGSISKQGNTMVRSLLVEAGQSAARLDTELKRAYQRLKHRKHSAVAKVMVARKLAVRLYWMWKREQPYAATRMQGSPSHPVA

SEQ ID NO: 128365 - protein, 317 aa, unidentified
MQELQVFVGVDVAKAELVVARHGQTGSRTIPNQAQAISAWLRELPDGACLAMESTGRHHQMLASLAQAAGLQVFVLNARDVHFYAKALGARAKTDRLDAHVIARYAAEQHTRLHRWIAPCPALQQVRSLLGQRWAVVSKRTALRQSLQGCDGAITLEVQALEAGFAALLKAIDARIVALLGQDGGVRQRQRLLQSIVGVGPQSSALLASVLAQVQFASADALVAYSGLDPRACDSGSSRGRRRLSKRVPPALRHQMYMAAMSACHTSTFKSLYQALRARGLKTTEALVVLARKLLRIAFAVWRSGQPFDPTRFAAAA

SEQ ID NO: 128366 - protein, 395 aa, unidentified
MENPIIACDVSKGKSHIQGFIGLSNPVGNPFVVRHLKCELKQIKELAKSLEKQSKRKPVFVFEYTGIYHECIANYVRDIGLECYAISPLESAKVRKSSIRVTKTDSKDCLNVATVYYTRKIRRFNSDNSNIKALSRRKTELRNQLVQLKCAYRRYIDLIWPCFDEIFNLDSQSISIIISKYKHPYKLKKWNVKAIANTLLNYGRFSKTRALDIADKAKDYAMNCVSGVDEDSEYVSGLIDTYERIQSIKDEITKINVHLERILRNSVAYKLLKTIPGFGENILLQISAEIGDFTRFKTAKQFVAYCGLDPSILQSGKDSGEHYSITRKGNRIIRSSLYLAISQMLTRKIDNQITRFYFKKKSSGLSHKVAAVASCRKLACCVFGMLNNGTCFETI

SEQ ID NO: 128367 - protein, 388 aa, unidentified
MNRIIKIGMDVDSTNYTLCAMEPTIGAEDRIFGQVQVAPDYKEVICFIESLKMKLGFFDHYSIECGYEAGCLGYTLYHQLMGAGIKCVILAPTTMLTPQGQRIKTDKRDAHLIAQCLCYGGYHPVYIPTGEDDAVKEYLRMRDDHKLALKKLKQQINAFVLRHGNLYAGTKWTIKHVTWLKKLELDPMYRETLDEYMVSYEEQEAKIERYDQRIEEIAAEARYKKNAEKLGCFLGISTHTALSLIVETGDFKRFAKGNTYAAFLGLVPGERSSSKNVNRLGISKAGNTHLRCLLIEAAKGICKGVIGHKSKKLRSRQSAQPADVIAYADKANTRLRSKYYKMIRHGKKKNVAVAAVARELSCFIWGMMTGNISITSGTGTSVPAVSQG

SEQ ID NO: 128368 - protein, 463 aa, unidentified
MKNKKSKGRPTRRSRPLLERVNLNAAGIDCGSAMHYVAVPPDRDPEPVRSFKTFTDDLNRLADWLVACRITSVAMEATGVYWIPIYEILEARGLEVLLVNARHVKNVPGRKSDVTDCEWLRELHSVGLLRGSFRPTAEITALRSYLRHRETLIQGAATTINRMQKALVQMNLQLHVVISDIGGATGLRILRDIVDGQTDPRHLATHRDARCQASEAEIAAALTGHYRPEHLFVLRQNLELYDTFQRQIECCDTQIEAHLKALATSTTPPAALSSIPRARRKASSNEPHFDVRTSLHQLSGVDLSQLDGIGPYNALRLISEIGTDMSRWRTEHHFTSWLTLAPDNKVSGGRLLSSRTRPSANRAAAILRMAAMCLGRTQTALGAFYRRLAYRIGKPKAITATARKLAILVYRCLKRELVYQDPGAAEYDRKHRATVLRQLRQRAGALGFHLVNGQTGEILEGVS

SEQ ID NO: 128369 - protein, 342 aa, unidentified
MDHFAGLDVSVKETSVCIVDDTGKIVREVKVESEPEALLQVLANPAHHFKRIGLEAGPLSQWLFSALAEAGLPVICVETRHMRAVLKAQINKTDRNDARGMAQMMRAGIYRPVHVKTLRSQKLRMLLTHRKLLQSKAIAIENDLRGTLRNFGLKVGMVGTVKFEARIRELVENLPDLAVLVEPLLIVRRTLREQFCILHRRLLSIVRDDEVCRRLMTTPGVGPVVSLTYRATVDVPARFRKSKSVGAVFGLTCAKYQSGEVDWSGRISRCGDEMMRVMLYEAAQAMMRSKKWSWLKAWAMQIARRRGMKKAIVALARRLAVIMHRIWVDGTEFRWTREAAAA

SEQ ID NO: 128370 - protein, 482 aa, unidentified
MVVPNEEPKKPAKPRKPAKPKKPTEPSKSRERSRPVPVPASPAALNVINPDAAGIDVHSNMHMVCVPADRDANPVRQFGANTADLHEIVAWLKKCRIKTVALESTGVYWIPLFELLESEGFEVHLVEPGQLSRCGARPKTDVLDAQWVQRLHSYGLLRSSFRPPDSVLALRAYWRQRQMQVRYAAHHVQHMQKAMEQMNVKLTEVVSDITGLTGMLIIGAILEGERDPNELAQLRHPQCHHSEEQIALALQGTWRPEHLFELRQAHELYQFHHRQITECDQQIEAELAKFPNRAGEKTHTVKPRKSGRKSNDVRFEAAGPLFRALGVDLTLIEGIDVATALVILGEIGVDVSRFPTEKHFASWLRLCPPQNESNNTNRRRGHRKATSRVTIALRMAARSVGQSMSPLGVFYRRIRSRIGGLGAVKATAHKLACLIYRMLKYGQEYVTQSIEEYEAKVKGNLLKGLKRKAAALGYQLSPLPAP

SEQ ID NO: 128371 - protein, 319 aa, unidentified
MKTKVNVGIDISKSSFDVAIPFKEKEGYKHLKFKNNADGFDKFSKLLDPVSNCIMEASGVYYLQLAIYLNSKGMIVSVVNPLTIKRFSQMRLMRAKTDKKDAAMIAEYGKVENPIKWEPREEHMLQMQQLQALQENFIGQLTRLKNQQESFINSGVNNKIGTKIIEKEIEHVSNQIKLLDDELVKITKEFHQDLFERLQTIKGIGKRSAMMLILITDGFKRFENSKQLCAYVGLSPRIFESGTSVKGKVKICKMGMAKMRKLLYLCAMSARTSNKACKEMFERLTDRGKNGKLALIAVANKLLKQAFAIGTSQMIYQEF

SEQ ID NO: 128372 - protein, 358 aa, unidentified
MAGKVTETAVVGGVDTHKDLHVAAVVDQNNKVLGTQFFSTTRQGYRQMLAWMTSFGALKRIGVECTGTYGSGLLRYLQNAGLDVLEVTAPDRMERRKRGKSDTIDAECAAHAAFSGIRTVTSQTRNGMIESLRVLKTCRKTAISARRVALQIIHSNIISAPDELREQLRNMTRMQLIRTLGSWRPDASEYRNVTNVYRISLKSLARRYLELHDEIADLDVMIAAIVDELAPELIKRNAIGYESASQLLITAGDNPQRLRSESGFAALCGVSPVPVSSGKTNRYRLNRGGDRAANSALHIIAIGRLRTDDKTKEYVARRVAEGHTKMEAIRCLKRYISREVYTLLRNQNRQINSIPITA

SEQ ID NO: 128373 - protein, 365 aa, unidentified
MYIVGIDIGKNHHEASIVSPEGKQIGPSLRFATTHKGADSLMSFIFNNIGNSSCIFGMEATGHYWYPIYSFLKARGYTIYVINPIQSDSLRKMYIRQTKNDSIDSFLIAEVIRFGQFTTTSMADENILAMRQLCRYRDSVISSRTEIKLRISTIMEQIFPEYEKQFSSLWLSTSMGILEKYLTPENIENAPIDELFEIIKDKSHNKLTMKKAFSIREAAADTFGIKIAQDAFSFQLKQLIDRMNFLDKQIAAATILAEIGDINRFKSSSALVAFAGIDPTVRQSGEFSSTHNHMSKRGSPYLRHAIFLAATTCSFHNSPLNAYYKKKREQGKHHLTATGAVARKLTTVIYAVLRDGKPYEPKSFC

SEQ ID NO: 128374 - protein, 362 aa, unidentified
MFRPHTLYIRIQIVRKVHEPVFAMRDQDVSDVIKTKNRTAMQYIGIDVSKATFVVAYSSDKGGEIRTFNNTTAGIKQFIGTLPKDGSIHCVMEATGNYSALLLYMLNVAGITVSMENPLKVKNFARAMLSTVKTDKIDARLIALYGEKMNPQPFKVQGEAILRLRQKRTVIRQLTKQITAMSNLRGSLACLPVPDKGATHTVDETIKFLEKRRDRLQSELTDLVEVEFSRQLALLTTIKGIGITLATALIITTGGFTYFQNAKQVSRYLGICPTYEQSGTSVNIRGHINRNGDAYTRGLLYIAAWPASRFNAQCKETYTRLRQNGKPGKLAMIAVANKLVRQAFAVVAHDKEYIDGFVSNRP

SEQ ID NO: 128375 - protein, 398 aa, unidentified
MYKQFLGIDISKDSFDITLLENSGEIKLEKKLLMDRDGFDTLLEYLSLYDQETLLVAMEATGIYHLPLLSFLFENSFNCVVINPILIKSFIGSTTLRKTKNDKKDAASIALFSLKSYQSLHLTLPDGVESIRPLIRERESLSKGIAKLKTEIKANLVQLFPELLKNTNIFTKSVLNLLLQAPSRRAIRNLKEKKIQKILDSTSGNKVKITASEILSLAKISIAVSDRHLEKVLTSKIRRLIIFQEELSLLDKELENSLEDTDINNDIKILQSIPGIGSVTSKNFMIEVSSVDKFKSVKQLSAFIGIDPSIKQSGTSINFGDKISKRGNANLRRTIWQMATCVIRTCNKFRTYYDKKRSEGKKYKQAVIAVANKLLKTIFVLLKNKTKFDENLALSATI

SEQ ID NO: 128376 - protein, 345 aa, unidentified
MTIVGGLDIHRKQITFDYVDTVTGRVQRGRIAPADRAHLAGWLAQRFPGRTDVEFALEGCTGWRYVAEELAAAGLIAHVGEPADTAALRGGRRHAKTDKTDSRHLRELLADDRLPQCWIPPAQVLECRALLELYRDLRVEHTAWVQRIHAVLFHQGAGALTVPALRSQAGLVELSEQAADLSSAGKMQVVTALEMLAVLDAQLTQVRRQLLDAARHLRGARVLTARLYGVGPITALALCCWLAGAGRFSSARKAVRFAGLDVTVHSSDGKRSPGHLSRQGPSVLRWCLCEAGKTHARGSAPDHAYYAQVKDRIDGKRAALSEGRKIVRQACHLLSELGDDALTQV

SEQ ID NO: 128377 - protein, 386 aa, unidentified
MRGLGRLPLHPRKLTFYDGVDAPPTASMCQSGCVQHHLREASVSEVSIIGLDIAKHVFHVHGADGRGRAMFSKRISRGKLLDFFAAQPSCKVALEACGGAHHWARQLTQLGHEVRLIPPAYVKPFVKRQKNDAIDAEAICEAAQRPSMRFVAVKSEEQQAAGLLFRTRDLLVRQRTQLINAIRGHLTEYGWIAPKGPSHVARLAELIDEEEMASSLPEAALAMFRLMLDLLAGLNGKIADLDKEIVRGAREDEVSRRLMTIPGIGPISATAIAALAPPAETFAKGRDFAAWLGLTPLQRSTGGKQKLGATSKMGERTLRRLLIIGSSAVVQQASKRGAPKGSWLEQMLTRKPRMLVTIALANKMARIVWALLVKQENYRAPVPARA

SEQ ID NO: 128378 - protein, 342 aa, unidentified
MNRSIGVDLHKSAFTVCYYESDEKHEFKTYQVNMKSLEYFKKTLKKTDELAVESTGNTAFFVREIRNKVKRVRIVNPFQFKVISSSVKKTDEKDALTIARFLSKDMIPEVRQRTEEESQFASLIGTRDKFVKLRTSMKNKIHNILNAQGIVTRLEMLSSEKGLKRVLKLDVGASYRFEIELIVSQIRNLNDAIGKIAEELKTRSEKLPGHKNLTSIKGIGDAAATIFLNTIGNINDFKDEKALASYFGIVPRVWVSNQTVHHGRITKLGNKIARTALVQSTFVAIRYSPYLRAFYDKLKAKKGSGKAIIATSRKMLGIIYNTLKNNWVFEDFTRFKLAPCAG

SEQ ID NO: 128379 - protein, 412 aa, unidentified
MSVSCGIDWAEDHHDVGLVDADGRIVGKHRISDDVAGFALLLQLLTEAGDSAEDPIPVAIETSRGLLVACLRGTGRPVYAINPKAVDRYRDRHSVARKKSDAGDALVLAHILRTDRAAHRPLPADSELAQAIAVLARAQQDAVWERTCAHNKLRSLLREYYPAILAAFADKRGGILRPEARAVLAAASTPAAAAKLTTAQLRKLLTAAGRQRGIAPEAQRLQTVLRGEYLRHPPLVEDALGAQALALLRQLNTACTNADELAAKAVAHFDKHPDAEIITSLPGLGSLTGARVLAEIGDDRSRFADARSLKAYAGAAPVTRASGKSRTVMHRRVKNQRLAATGYHWAFAALASPGARAHYDRRRTTGDRHTAAQRNLFNRLLGCLHHCLDAHQIYDENTAFPPTTITTREVAA

SEQ ID NO: 128380 - protein, 356 aa, unidentified
MQVTFGIDVSKSTSTVCELIGESKNELTITNDRPGFIQLLHELAAFSKHPQIIFEATGVYSRRLQAFLEDYGYDYVILNPLKAKKEMNMGLRYNKTDKTDAYHLALIQRLYHHPINQLQSQTYKQLNALSRFYDQLTADLVMAKNRLHQALQSTFPEIENLFSSAKGKNYWQIVVRYPHCDLVRREDKKQIINWLMKLKGIAFNHAQRTTDKLIELAHLAYPVVSCSDIEVQQAQYYARRLLNLSNQRQRIITKMVKLAKTLPNHDLENLESIPGFAQTTAVRVLAELGDLRRFSNPNKINAFIGIDPGRYQSGEMDSNLSITKHGNAVARKLLYRAIGQIDNAAKTNPCHISRLL

SEQ ID NO: 128381 - protein, 430 aa, unidentified
MKKRNHSNKKLESVTFKTLVVGIDIAKHNQWARFVDCRGIEHGKALKFENNKNGFHTILTRIYEMCKEEGFNNVIVGMEPTGHYWKALANFLLKQAKITVVLVNPYHTKKSKELDDNSQTKSDKKDALVIAKLVKDGRYFETYLPHDVYAELRGLTTTRISLNKRKKSIKNTITAVLDEYFPELTKVFKHPFSGKASMQVLRVCPIPKRILELGEDGVLTEIKKAVKKTVGRKKAHQLVETAKESIGVDYGENAALFKIRQLMEELDLVIRQLDELEKEMESALRETGLSEYLLSIPGAGVVSMASCLGELGNPLRFEDARQMSRMAGYNLIEDSSGTNKSGTCISKRGRKNLRCVLYQMSLTMVATNREMKELYNYLKTRKDNPLKKVQALVVIGKKILTLIFTLSTKKECYNPEKVFGEVRKSQLKAA

SEQ ID NO: 128382 - protein, 384 aa, unidentified
MRHGGILMMTNGSEGEAMQKRTTKSPAAHPVDISLCTTVAIDLAKQVFQVAGEDAHGQLVYEQRIKSRDAFSALLGTIARGATVLMETGPGAQAWARQVQALGCLVRVLPAQRVADHRSGAKNDRNDALAILRAGRDQAIHAVPVKSVEALAMQAVHRVRQGYMRRRTALGNQMRGLLLEHGLAIPQGATALAERVNRILEDATLPLPELLRELLADLQAEWAFLGSRILQQTKRLEQSARKDETASRLMTVRGIGPIIATALVAKQVEPQRFPNARQFAAYIGLVPDQHSSGQKIRLGKMSKRGDGYLRSLMIEGSHAVLRMLKPDSEEADDRRLKRWMQRHGRKGAAIRLANRNLRIAWVLLQSNDVYRRDPQARQEAEMTE

SEQ ID NO: 128383 - protein, 397 aa, unidentified
MRVVFGIDVSKASSEVAILVNGEKVHDYTIPNDAIGFNRLLGVLKTVHQPEIVFEATGVYSRRLQAFFEDNSYAYTRLNPLESKKQLDSLRVRKTDKIDAEKLATSQFILNRKPSYIQESIYQELRDLSRFYQNITEDIVCAKNRLHKVLQVTFPELENILSAPTGEQYWNLVMTFPCNSFVLESDDAILTAIIRRSTVKRISEKRVTYLVDKLTKLANQSYCAVKKTSPVIEEVKYYAGELLRLSEYRQGILEEMVTLAQSLPEYEILLSIPGIAETTATSIIGELGDIRRFHSANQINAFIGIDLRHYESGNYLAKEHITKRGNPYARKILFNNIASASHTNPCHIADFYEKRKRQSQVTSTKPHTIASIHRLIRTMYYLITHNKLYDYTSTQNR

SEQ ID NO: 128384 - protein, 413 aa, unidentified
MDVLHSRCCGLDVHKSSISACILLREAGRVQKHQRRFGAMTQELQELAEWLRQFGVTQVAMESSGVYWKPVWNILEGQFTIVLANAQHIKNVPGRKTDQKDAEWIAQLLQYGLLRPSYVPCEIIRDLRDLTRMRASLSEEASRISSRIQKVLEDANVKLASVATNVLGKSGRAMLEDIISGEDDPEPLASLALGHLRVKIPQLRLALEGKIRSHHRFLLRRLLDQIQFVEHEIALLDERLEDIGRQRPELAQAVARWDTIPGIDRVAAWALLAEIGDNMAQFPTAEHLASWAALCPGNHESAGKRLRGTTRQGSPWLCRMACQCAWAAARTKNTYLSSQFRRLAARRGKKRAIIAVAHTIIVIGYHLQKNQSNYEDLGGNYFDRIHSDGLKRYLVKRLQQLGHKVTLEPMEAA

SEQ ID NO: 128385 - protein, 320 aa, unidentified
MEAILGIDIAKATFVVALLTPEGRLRRKSCANTPAGYAGLAGWLTRQHVTHVHATLEATGPYGEALATWLHEAGHVVSVVNPAVIHAYARTQLTRSKTDRIDAALIAQYTATQRPAAWTPPAPEIRQLQALVRRLDALHGMRTQELNRCGAGALVADVRASIEAVLAQLEAQIAHVQQLIRQHLDQHPGLRAQRDLLTTIPGIGETTAAVLLAELFDKPYSSARQAAAFAGLVPRLVESGTRRGRARLSKIGPGRLRKALYFPAVTALRCNPTIRAVRARLQAAGKPPMVIIGAAMRKLIHLAFGVLKSRRAFESRCAHP

SEQ ID NO: 128386 - protein, 316 aa, unidentified
MNQAEVFVGIDVAKSRLDVALHPSGATWTVPNSEAGIAGLVAQLQQLPVTHIVLEATGGLEIPLLGALGAAGLPAVAVNPRQVRDFAKALGRLAKTDRLDAQVLALFAERVRPALRPLPDQATQALSALVARRRQLVEMLTAEKNRRGQASPAIQADIATHIAWLEARLEQLDKELGQHLQQSPLWRAQDDLLQSVPGVGPVLSRTLLADLPELGTLDRKQIAALVGVAPLNRDSGTLRGARTCWGGRAAVRAVLYMATVAATRCNLVIQTFYRRLCAAGKAKKVALTACMRKLLTILNAMLKHRTPWHAERLQRA

SEQ ID NO: 128387 - protein, 385 aa, unidentified
MSELNDLSRSLTSLEQDKTIIAVIEMSQSSWLVAGIVPGIERHPLKKLEPSEEELIRLLMRWRAEATQDGRTIKRIAVAFEAGRDGFWLARWLWARDIETYVIHPTSVAVSREHRRAKTDRLDTGLLKRVFIGWLRGEPDHCHMAAIPTLAEEDAKRPNREREGLVRERTRIVNRMKSCLVRFGIRNFKPTLRKAPERLATLGTPEGVPLPPNTLLELRRDMARLRFVMDQIKEVEETRALRLEQAPQEKTHAMVRLIARVIGVGIETADMLVHEILSRQLRDRRAVARYAGLTGAPDESGNKRREKGLAKAGNARVRRGMIQLAWRFLVFQKDSALAQWYQTRTDSAGKKRKTMIVALARKLLIALWRLVTTGEVPAGVVLRAA

SEQ ID NO: 128388 - protein, 391 aa, unidentified
MIYIGIDVAKDKHDCFITNSDSEVLFKAFTIFNNLDGFNDLYQKIESVMDDVTKVKVGLEATGHYSYNLLGYLIDKGLPTYVINPLHTNLYRKSLSLRQTKTDKVDARTIASMLMSDVNLKSYSDTFYHNEELKSLTRYRFDKVKERAKLKTSVSRLVCILFPELEKLVPTLHMASVYALLSEFPSAKHVATAHLTRLTNLLSESSKGRYGKDTAITFRDAARASIGSNMPAKSLELKHTIKLIQELDSEIDEIENEIKIIMDEINSPILSIPGINYRMGAMIIAEIGDFNRFDSPDKILAYAGFSPSTYQSGQLDGAYAHMEKRGSRYLRYALYNATKYVCHWDPTFAAYLAKKRAEGKHYNVAISHAVKKLVRVIYHLEKTKQQYIKVA

SEQ ID NO: 128389 - protein, 429 aa, unidentified
MEIVFERCAGIDVHKRTVVVCRLTRDAQGARLAQTQTFGTTTGELLRLSDWLAEGGCTHVGLESTGEFWKPVFNLLEGTCEVWLLNAQHIKAVPGRKTDVKDAQWIAELLAHGLVRPSFIPPRPQRELRDLTRYRTTFVRARATLVNRVQKALEDANLKLASVATDIMGVSGRAILAALLAGEADPTVLAELAKGPLRKKRPQLEQALRGHLRPHQSFVLTELLAQIDSVEETIARFTAQIQTTCAEDGNEAEIVALLDSIPGLSEATAQVVVAEIGTDMRRFPSAAALAAWAGLAPGNDESAGRQRSGRTRKGNVWLRTILVQAAQAAAHTKHTALAARYRRIAARRGHKKAVVALAHALLVIIYHVIARRQPYHELGEDYFQRLNPAARAQRLVHQLTHLGFEVQLSAQQAAASRSNGAASTLAGGS

SEQ ID NO: 128390 - protein, 341 aa, unidentified
MSVIAPVFSFGLNGYAGSGLALQDKAEKRLMQITIGIDISKETLDAYRFPDNHHIQVANGRAGHKTLVRWIGKQNGSLVVFEATGAYYRNLEAALAANGTAFAKVNPRQARRFAEATGRLAKTDRVDAIMLAKMGAILGLKAHEPKTEALHILRELITARRALMKDKVAAKTRLQTTRQTLLKIQINARLKQIKIQIQQVDAAITEKVAQDEALSNKLDILTSIPGIAETTAFSMLIEMPELGTLEGKQAASLAGLAPMSRQSGKWQGKERIKGGRAFLRRAIYMPALVATRYNPGLKAKYDQLIRAGKSGKVALTAIMRKLVVMANALLRDGRTWSELRP

SEQ ID NO: 128391 - protein, 414 aa, unidentified
MSDPLVVGIDPHRKTNTVCMMDRHGDEVCDRFTVQNNRPGTDAFVHEVALRVLEGDFDAIHIASEATSWYWWHFFQTLDQDPLLNQWPVTLYPFNPRLTANYKKTFVDLDHDDPIDAFVVAERLRMGRDLPAPFHYEDHYFPVRMLTRYQYHLVHQLAREKSYCLAILYFKYSEYSRKDKKPFSNLFGATSRAVIQEFASIEEIAALPFEELVEFIDRKGKRRFSDPTDNARKLQRVVHDSYLLPQAMHQPINLILSLSLRHITMLEGLEKRLKTAIAEGMQPIHHSLDTIPGFGPVFSGGIVTEIGGVERFDFNQAKVAKYAGLKWRKTKSADFEAEETRLTRTGNRYLRYYLCEAANRVRQCAPEYTAYYDRKFHEVRKHQHKRAIVLTARKLVRLVVRLLTTNEPYRPRRC

SEQ ID NO: 128392 - protein, 316 aa, unidentified
MMQSNITTAGIDTSKLKLDVAIHQRPERWQVPNTLPGWRLLISHLCEASVTRVGIEATGGYEAGVVEHLRAAGFTVLVMQPIQVKAFGRVHLRRAKNDALDAALIAACAATLEPPKIAPDPRLTELAQEMTFLEQIEEDIARFKTRLEHIDEPRLKRMVNSDIARLEARRTAQIRMLAKHLRGHEDLAKRFDLVLSIPGIGERTALALVIRMPELGQISREEAAALAGLAPFDNDSGQYRGQRKIAGGRGRLRKSLFAAALPAAFKWNKALIELYGRLRAKGKEHNLALIACARKLLIFANTVVQRGTPWVENTAG

SEQ ID NO: 128393 - protein, 347 aa, unidentified
MKYYCGLDVSLNSTAACVVNQDGTIIREGEVPSEPAAIGQWLKTIGLPMERVGLEAGGLSSWLCHELLAVGWPVICIETRHAKAAMKAQQVKTDRNDARGLAHIMRTGWYREVHIKSHDSQELRMLLNNRRFLLDKRIATDNEIRGSLRTFGLKLGKVTPATYEPRIRELVGDNEKFQACIFPMLEVRRVLIEQCKKLEKLVLDYIKEDQVCQLFMTIPGVGPLTALVYKTFVDRPQRFKKSKAVGAALGLTPRKYASGEVDYDGHITKCGDAFVRMHLFEAAKVLLSRTGKPSQLKSWGLRLAKRSSKKKACVAVARRLAVIMHAMWRDGTMFQSTQVQAELAAAA

SEQ ID NO: 128394 - protein, 449 aa, unidentified
MVKNKKQKGHLQLAVIHPHTAAIDIGSMLMMVAYSDAQGNQCMLETDGFTESIDALAETLYTAGVTHVAMEATGVYWMSLYEVLEQKGLTVTLINPRHFKNVDAQKTDVKDCQWLQQLHAYGLLRASHIAPEIYRELKSYLHERNVLQKQKSDILNRIHRLLTQMNIKVQHLISDMEGVSGMKLLQGIAAGIKQPDELLSLIDPGRLKASEEELLKSLKGMYKQQYIIILQYSLKAYDFFKQQMKSYEALIEQVLIKMLPEDAHGNKAIIGKKKSHVRKNQYSINLKAYLNQITGIDLTQVDGLDEISILEIISVTGLDMGKWPTAEHFTSWLNLAPRPKKSGGKILGHQKRFTNNKATQAFRLAAQTMWKHKGALGHLYRRLATQKGSNKAIKAIARKLAVIFYNMVKNKQQYDQSRLQIDTEKQEAKRIARLKKEAFKYGYVLQAAG

SEQ ID NO: 128395 - protein, 343 aa, unidentified
MIHPPQLVLGIDTHKDVHVAVLLDRLGRYLAGASFGTTDAANTELVAWTHRYGQVATAGVEGTGSYGYRLARHLTDQGIDVVEVNRPDRARRRRKGKTDPVVAEAAARAVLAGDARAVPKDRNGAVGELRALVVARRSAIKARTQATNQLRALLVDGDDELRSQLRPLRKAHLARACAQLAPAAGLQLALGSLGRRWLALNDEITDLDAAITTTLKRTAPRLLERHSVGVQTAAQLLVTAGDNPGRLHSEAAFAAVCGASPVQASSGKRIRHRLNRGGDRAANSALWTIANNRLMHDPRSRAYAAKRTAMGNSRKEILRCIKRALARELYPLILDALALPRLP

SEQ ID NO: 128396 - protein, 414 aa, unidentified
MSDVIYERCAGIDVHKKMIVVALRIGIKVQIRQFGTLTHELKEMTSWLMENECQMAAMESSGSYWKPLYNIFELEGLPAMVVNAHHMKAVPGRKTDVKDAEWIAKLLSQGLLRASFISDREQREMRELTRFRKNQMEERARNLNRLQKMLEGANIKLSGFVSEIDGKSATKFLELIIGNPDFTAQDVKSRMHGSLKASAEELFLSLEGIITPLQRELFGHVMKIIREQTTQIEYTDSLIQSHTKEVYSEAAKALTSIPGIGMVSAQQIVAEIGYDMRRFPTAAHLCNWAGICPGNNESAGKRKNGKTNYANKTLKSTLTQCAQSAKKSKKSFFCAQYQRIVVRRGKNRATVAVAHSMLIAIYHVLKGAAFIDLGAEYYMKFNKEKKINSYVKQLAKLGVIIPDDDLRSYMQGVA

SEQ ID NO: 128397 - protein, 342 aa, unidentified
MKDMMIGVDLAKAVFQVHGAHRTGEVQFRKKLTRKQFPAFMAQQEPSMVIFEACGSAHYWAREMEALGHEVKLIAPQYVRPFVKRQKNDAADAEAIVIAARQPEMRFVARKTVEQQCRAAVFRGRERLVHQRTADVNALRALLYEHGHVFPAGIGHLDRMTALMEDEASDLPALIREECRDLLAQIAEKTARIIERTTKLKMLAAQSDRARRLQTMPGVGPLTAIAVEAFGPDMAEFKTGRAFAAWLGLVPKQHSSGGKERLGRMTKAGQADIRRLLIIGAMSRLNWLGQRTITEGSWLARMLARKPKMLVAIALANKMARQVWAMLMKNEDYKDPALAVAA

SEQ ID NO: 128398 - protein, 421 aa, unidentified
MKSTVARKLRQVPQGYLVIGVDPHKKKHAAVAITQDFTTHLKFKFDNSREGLEMMLQRARMEMVKSGCRGVIFAIETGGHYWRNLAYFLDERGIPFRFINQFTLKRRREGKDLNRRKNDYRDSEVAAQLLCTGEFTESKLPQGVYAELRAAHNAYRRLVKERTRITNLVKGLLDALFPEFTQVFKDPFGLTALSVLSTCPIPGVISGMTEEEFVATIRAGHQGRLMRRKLRALHHIARTSIGIEASAWPVSMEISFLVEKFSLIKQHIRTIEGTLVRLVDKTEEGKYLLSIRGLNYIAVAGLLAELGSFKQYRSAKQLIKMAGSNPTESESAGKRRNHTPMSKKGRPVLRYCAWTSVIPMLRLNSDFRAWAKKMRERPVHANPFNGREVVGAGLNRLLRLSFALVKKQTFYRVPEPARTTW

SEQ ID NO: 128399 - protein, 360 aa, unidentified
MNNPSSSNHQGIVGGVDTHKDLHFAAVVDAYDRVLANNSFPTTRYGYKSMLNWMQSFGEVKRIGVECTGTYGAGLLRYLQQFDIKILEVTSPDKTVRRKRGKDDTIDAENAAHAAFAGIRTVTPKTRDGMVESLRVLKLCRKTAIAARRIALQMIQMNIISAPEAIRELLRTMTRMQLIRTLAAWRPDLSGYRDISTAYKIALKSLARRYLELHDEIADLDAMISVIVDELAPELIAGKAIGYESAAQLLITVGDNPERLKSEASFAALCGVNPIPASSGKVNRHRLNRGGDRAANSALHIIAIGRLRTDARTKEYVEKRVTQGHTKLEALRCVKRYIAREVYYTLRKRNNVVNSTQITT

SEQ ID NO: 128400 - protein, 339 aa, unidentified
MIYVGLDVALNSVAVCAVDETGKLLREGTTLADAPSIVQYLEPWAGQVERVGLEAGPMSEWLIANLIELGLPAVSLEARHVKASLSAMPVKTDRNDARGIAQVVRTGWFKPVHVKSIGSQRARTLATARKHIIRSIAAAEQVIRGLLRPLGLKAGIVSRTLFAARVRELVSDDALLEAIMNPLLAGREALMREYARLHRLVLKAVRSDPACRLLMTMPGIGPVSALTFRSTVDDPRRFLHSQSVGAYLGLTPRRYQSGEVDRVGRITKVGDGETRTALFEAANVVLRPSTRWSPMKAWAVRVAHRQGSKRAKVALARKMAVVLHRMWVDGTEFRWTAVA

SEQ ID NO: 128401 - protein, 412 aa, unidentified
MKDLLEISCGLDVHKEKIVACILTGPLGKPTRSEIREFSTLIPDMIALRNWIVSKNCHHVAMESTGIYWMPIYEILEDAFSGDITLLVVNARHMKNVPGKKTDMRDSEWISTLLRAGLLNGSFIPEKRIREFRDLNRYRKSVIRDITSQKNRIEKFLQSSGFRLSSFISDIFGASGRNIILHLIEHGQIDKTALDSCLKTKTRNRIDEILMSVNGTLSEHQKAFLRILMTHYDSLKKHLAEIETSLEEDMAPFTLQVEQLNSIYGISTTASCAIIAEIGIDMKPFKTAEHICSWAGLCPGNNESAGKRKSTSVTKGNPYIKSMLCEVAWVIAGKRNTYLSAWYWRIKQKKGAKKAIVALARKLLVIIYTMLKQGTLFDESCFETRRKHCEQKQLSRYIRELEKHGYHVEAQS

SEQ ID NO: 128402 - protein, 403 aa, unidentified
MNAVGIDVSKGKSMVAVLQPGGKLLARPFEVLHTKSGIQKLISFVHSLGGDTRIVMEHTGRYYEPLLQWLAASDLFVTAVNPKLIKDFGNNTLRKVKTDKTDAKKIARYALDNWADLRQHTSMDTTRAQLKTLNRQFAFYMKQKTACKNNLIALIDQVYPGANTYFESPARADGSQKWVDYVCTFWHVDYVCAMRLSAFTERYRKWCHRHGYNFQPDKPRLLMEKAKDLIAMLPMDKTTKMLVQTSIAQLNVLSKTVEALRTQMIALAEQLPEYPVVIDMNGVGPTLASQLIAEIGDITRFPRRGSLTAFAGVDPGAKQSGTMQLKSNKTSKAGSPHLRRALFQIVSGLLMRSPDDAVYNFMDKKRSEGKPYYVYMTAGANKFLRIYYGRVNEYLAGLSQEQE

SEQ ID NO: 128403 - protein, 377 aa, unidentified
MSKILFVGLDVHADTIAVAVAEPGGEVRSLGTIPNRPESVRKMVGKLGPVAKLKCCYEAGPTGYVLYWQLTQLGVACEVIAPSLVPVKSGDRVKTDRRDAEKLARCYRAGELTAVWVPDAAHEALRDLVRAREAAKKDQLRHRHRLGKFLLRHGTRPTEAGEKWTQKYLNWIRIHARFDQPALNATVTHYLDEVEHVAERIIKLEKAIDEAVAKAAPEIRAVIEALQALRGVAQTTAATVVCELGSLSRFPSPSQLMGYSGLVPREYSSGNKTQRGAITKTGNAHLRRVLVESAWTYQHRPNVQGRVLRRQKALALSDEAKRIAWKAQQRLHKRFITMAARGKHGGTIVTALARELLGFMWAIAVQTEAQFKLTKPA

SEQ ID NO: 128404 - protein, 424 aa, unidentified
MAGVMIGIDPHKGSHTAFALDAREQRLGQLRVRASGRQADGLLGWAAGWPTRTWAVEGARGLGHLLAQQLIAAGEHVLDVPPKLAARVRLLDTGQINKNDPNDARSVAVAALRAHDLPRLTVEDHTTVMRVWARRYHDLGRLRTQLLCRLHAVLCELVPGGFGKELTAGQAIEVLDRIVAESPVTLAKLALARDLVADLQRLDAQRREARRRTARAVAASGTSITAIYGVGPIIAGTVLGYVRDIHRFRSRDHFASYNGTAPIEVSSGDRKIYRLSRRGNRQLNHAIHMAAVSQIRYRGTEGRVYYEKKISEGMTGKSALRALKRKISDALYVRMINDARRLAGKDPGGQSGNDSDSSAAGSHPETPALRTSHSRARANSRTATTERMLASRPAPARRRTSRSAAGVQVEPRPGPRSGHGQERR

SEQ ID NO: 128405 - protein, 342 aa, unidentified
MSFYCGIDLGAREAQLCVINSRVERVLEIKVGNKLEHIKQLLAPYQAELEIVVESTFNWYWLVDGLQAAGFKVVLAHTLGLHLIRGAKVKTDRRDAFALAKLLLAGLIPAAYIYPAETRPVRDLLRRRGWLVQVRAGEYGSLRRLLLREGILSRRQQEIKQASEADLEKWFKHEFVRLHASQELERIKLYSQQIAELEAKILAQAKKEWAFEWLQQLPGVGPIIALSIHYEIGELSRFASARDFSSYSRVVSGVAQSGATVRRGRGSKQGNPYLKWAFSQAAVHAVRNYPTVRRYYERQLQRHRGRGRQMVVYNIIAHKLAQAVYHLLKERSEYHEELLFGR

SEQ ID NO: 128406 - protein, 347 aa, unidentified
MDHIGIDVHKKESQICILAEGGELIEQRIRTELECFAAALGERPRARIVIEASTDSEWVARCLEGLGHEVIVADPNFAPMYATRTRKVKTDRRDARALADANLLGAYRPAHRLSDPQRHVRGRLTVRDAIVRTRTRYISLIRALLRQQGYRVPSGSAEGFLSRVRALTLPGRLVSTIAPLLAVMRHLNAQLAYSDETIARVTAHDERVQRLRTVPSVGPVTAAAFVATLDDAQRFRHAHQVEAYLGLVPRELSSGETQHRGHITKAGPTRMRWLLVQVAVSILRRRPPQAEALHAWALHIAARRGKHIASVALARRVAGILYALLRDGTTFDPRHCRPRAMATSLSA

SEQ ID NO: 128407 - protein, 365 aa, unidentified
MITVGADVHKARHTFVAVDTVGAKIAETVVPATTVGHRQALAWARALLPGAETDGLLWAVEDCRNMSNRLERDLLAAGQSVVRVSPHLMAAHRRTGRERGKSDPIDALAVARAAQREPDLPVASHDQISRDLKLLTDHRDHHVVQRTSSINRLRWHLHELDPEFLGDTADLTTVLAQQRIRAWLGERSGVLVEIAAEVLADVMDLTARIKKLDKRIDAVVTPVSSALREIDGCGVLTAAKILGEVANVDRFPGQDQLARYCGIAPVPVWSGRTEGTMRLTRSGNRQLNRAIHVIALTQARCDQTLGHAYLKRPGFRSVVTRSRARSSWCECRSLRRSPGCGSRELRGAGRCSTSGPSPSWRAQPR

SEQ ID NO: 128408 - protein, 407 aa, unidentified
MRLFVGDDWAEDHHDVELMDATGRVLARKRLPEGVAGMARLHELIGQQLGEDAEDAEVVIGIETDRSPWVAALVAAGYVVYAVNPLQASRYRERHGVSGAKSDTGDAHMLTDMVRTDSHQLRAVAGDSAGAEAVKVVARTHKTLIWERTRQVQRLRYQLREYFPAALAAFADLDAPDALELLARAPDPARAAKLTRAQVSAALKRARRRDISAKATAILAALRSAQLGQPPAVTAAYAVTVRSLIAVITVLNEQVKALQGQVEADFGRHPDAEIYLSQPGLGLVLGARVLGEFGDDPDRYASGKARKNYAATSPITRASGKRKVVAARFIRNDRLTDALMAQAFAAMNASPGARALYDAERARGAGHNPALRKLANRLVGILHGCLKTRTVYDEATAWSHHENKLAA

SEQ ID NO: 128409 - protein, 339 aa, unidentified
MNEISMIGLDLAKGAFQVHGVGGGGEVVVRRRLRRGQVLGFFAKLGPCVVGMEACASSHYWARELRRLGHEVRLIPPAYVKPYVKRGRKNDATDAAAICEAMTSKGMSLVPVKTPEQQAGLMLHRARRLLVRQRVMLANAVRSHLAEFGIVDAQGEAGLDRLIGVAVDADDPSLPAAAREALAMLAAQLRDAEAKVEALDREILARHRADDASRRLASIPGIGPVSASAIVATVGDARRFRTGRDFAAWLGLVPSQHSSGGKTVLGPITKMGDRYLRSLLVLGATAMLRRRDSGYGPWLAGLLARKPARQASVALANKMARIAWAILARGGVYRKPAAA

SEQ ID NO: 128410 - protein, 472 aa, unidentified
MRYIGLDLALTTAHKAVVLDEKGQAITNVISVKATATALEQLFQCARETAPEDEPLVVVMEPTGMAWFPAAVFCQRQGVQVYLVNSQQVADLRCYYRKHAKSDRIDARVFARLPMVSPEKLHALELISAIKLACQRGCKEQDRLIDLTTAIHNRLRAIDRFSWPGLEQVLPDNASTLTRWFRDHWYDPSRVIALGASGLQQAWQKSGLKSTEMPPSAEWAAELVQLAQEVLALYGSEAEFLDYAYLQAEVTREQALLAMLEEEHKRLQLNTVRRLYRQLYPRRNLESLYGVGQDGAAVYFSFIGNPERFPDHAAFRGWSGMVPRSSQRGSSEAKGLHISQAGPDLVKKFSFMGAETARQWDPQIAAIYYDQVVHHGKHHTQALCACATHLLDRIWTILKEDRPYELRDVDGTPVTARQARQIIDLRYTVPKEVRQRNNQRTRRTHREQQAEKKHKRESRPNEVRGKSQTSSA

SEQ ID NO: 128411 - protein, 393 aa, unidentified
MICVGIDVAKDKHDCFILSSDGEILADVFTITNNAEGFETLLKTIGRCSAPDDTLRVGLEATGHYSYNILSFLLNRGLPAYVINPLHTNLYRKSLSLRKTKTDRIDARTIAAMLMSDVDMQSYTKTSFCNDELKTLTRYRFDKVRERARLKTSVSRLVSILFPELEALVPTLHMASIYALLSEFPGAVQIADSHLTHLKNVLFDASKGRYGRDMAMEIREAARHSIASNMPAKSLELQHTIRMIRELDAEIDDIEDAIRKVMDTLHSPITSIPGIGLSMGAMILAEIGDFSRFDSPDKILAYAGMSPSTHQSGHLALTGIYSHMEKRGSKYLRFAIYNATKYVCLWDPVFSEYLAKKRAEGKHYNVAISHAAKKLVRVIYAMERSGETYKMQR

SEQ ID NO: 128412 - protein, 344 aa, unidentified
MKITTMGIDLAKNLFQVHGVDELGKTVIKRQLRRDQMAEFFVKLPACMIGMEACGSAHHWARKLQDFGHTVKLMAPQFVKPYVKSNKNDAADAEAICEAVSRPNMRFVPIKNVEQQAVLALHRVRQGFVKARTAQANQIRGLLGEFGLIIPQGIAYITTRVPELIDDACNELPGSFRVLVQRLLDHLKELDRQVGELEVQIQIWHRNSAVSCKLAQIPGIGPITASALVASIGDAKNFGSGRQVAAWLGLVPRQHSSGGKQNLLGMSKRGDSYLRTLLIHGARAVIYRAGQKLESCSWINGVVNRRNKNVAAVALANKNARIVWALLAHERQYDAGYTRTMPMA

SEQ ID NO: 128413 - protein, 388 aa, unidentified
MNKIIYIGMDVHSTNFTLCSFEPGYGFEADKIFGQTQIKEDIFNSTVKYINKLKSMRPDVDVVCGYEAGCLGYNLHRKLKAKEIESVILAPTTMAVSRNCSKKKNDYRDAITIAKCLASSAYKAVYIPDDKDEDVRDFIRMRDDHKTALKQIKQQLNAFCLRHGHHYDKTKWTGLHLNWLRKLELSKLQRETVEEYLATYETLTSKITALDIRIEDIASEERYAEKVNKLKCIKGIKTHTALSFVCEIGDFNRFKSADKFAGFIGLVPGECSSGNTERMLGITKAGNRHLRRLVVEISNTYRRGTVGRKSAALKERQKDMPKDVVAYADKATNRCQRKYQRMMFKGKNSNQAVAAVARELCCFIFGMMTGHHSRTAQAEASVYRSELD

SEQ ID NO: 128414 - protein, 336 aa, unidentified
MGTVPVYVGLDYSDQVVEVAVLDGQGKVLANRPLVNDGNKIDQFVRQFGSAIRAGIECGTGSANLADELLTKFGWSIDMAHPGFVNRMKQNPDKTDYQDAHLLGDLVRVGYLPRVWLVPESIRELRRLVRYREELVSQRRQAKQRLRAILRDARQKPPETVKAWTKAWWAWLANLAVLGAESRWVIERHREEIERKTADLRTVEKRLEEVTRDDAVVHKLLEQPCIGPVTAWTLRAEIGQFERFRNGKQLARYAGVSPCNASSGQTQADAGLIKAANRSLRTALIETAHRLGRLEPRWAQFKAKKKKEGDPGSVIAGAIANRWIRKLYYVMTGQAA

SEQ ID NO: 128415 - protein, 407 aa, unidentified
MNTLYVGIDVSSKSNVVYFMLPNGDKHSNFSVANSHEGSTQLVKRIYSALTTHSLDTVLIGLEATSVYGDNLVYFLREDATLAPFNRKIHVLNPKQVKKFHDAYNDLPKNDYVDSFVIADCLRFGRINKEVYIGDYHYKALQNLTRARYFAVQNLTREKQRFINVLFKKYSTMTQEKVFHDTFSTTALAVYDEFESAEALANMDLQELTDFIIEKGKKRFPDPDAVAKAIQKAARSSYRLPKTVNDSVNQVLSISITSMKALESQIKEFDKAIKAQMELLPNVLISIPGIGPVYSAGIMAEIGDINRFENQAQLAKYAGLAWKQYQSGGFESETTRLIPSGNRFLKYYLCEAALSLVRCDKEYSDFYHRKYKEVNRYQHKRALALTARKFVRLVFRLLKDKRLYRSA

SEQ ID NO: 128416 - protein, 424 aa, unidentified
MSRYCGIDWAEGDHDIAIVDHDGTLVSKKRIADDPAGFTALAQMLTDAGDTAEEPIPVAIEAPRGLMVAAIRATGRAVYAINPMAVARYRERHTMARSKSDHADAMTLANILRVDAHMHRPIPADSELAQAIAVLARAQQDAVWRRTKASNELRSLLREHHPIFLAAFASSSATNLAKPEVRAILAIAPTPAAAAKLSRTRVAAALRRAGRKRGIEALAEDIIAKLRRPGLRQPELVEQAMGRQALTLLATLDAACTGADDLEQAAADEFRKHPDHAIITSFPGLADLAGARVLAEIGDDRRRFADARALKAYAGSAPVTRASGRSVSITFRRIKNDRLAAAGWVWGFSAGSNPGPAREHYLRRRAHGDRHSAALRHPGEQDARPALLLPPEPARIRPRQGLRPTHHIHPGTRRGLTLRSIGGL

SEQ ID NO: 128417 - protein, 360 aa, unidentified
MAKVSTMASRAATTDFIGLDLSDKTGTYVVLAADGQIVRDGKLGLTRAGLNKVFATRPPASIAIEVGAHSPWVSRELAWLGYVVTVANPRQVKLISKGPKKNDWQDAENLARLLRFDREMLRPICHRGETAQAELAQLRSRDVLVGGRTRLINSVRSMVKAAGGRLPRCSAESFHHKVQDHLPQMLKPALQPMLEVIAGLSEQIKASTRQLEKLADERYPETHILRQVKGVGPITSLGYVLTLEEAQRFGKSRSVGAFVGLTARQYDSGESHPQLRITKAGDPFLRRLLVSSAQYILGPFGEDCDLRRWGFKLMRGSDNQILKKKAVVAVARKLAVLLHHLWLTGEVYQPLRQAALEEVA

SEQ ID NO: 128418 - protein, 351 aa, unidentified
MPHKLNSAIAVIGIDIGKNSFHVVGHDKRGAIMLRQKWSRGQVEARLANLPPCLIGMEACVGAHHLSRKLQMLGHDARLMPAKYVRPYSKGQKNDFRDAEAITEAVQRPTMKFVATKTAEQLDLQALHRVRERLVSQRTGIINQIRAFLLERGVAVRQGLRFLRAELPRILAAPCDALSPRMLRVIEDLAGDWRRLDERIEGLSSEIEALARQDKGCERLMTVPGIGPIISSAMVAAIGTGDAFSKGRDFGAWLGLVPKQISTGDRTILGSISKRGNRYLRALFVQAAWVVLVKVGPKHWARYGLKSWIEAAKKRLHHNVLAIALANKLARIAWSVLAHGRTFEASKIQAA

SEQ ID NO: 128419 - protein, 391 aa, unidentified
MICVGIDVAKDKHDCCILDSEGTTLADCFTIPNNLDGFKRLLQTIKDCTQKSDKIKVGLEATGHYSCNILGFLLDNDLPVYVMNPLHTNLYRKSLSLRKTKTDRVDAKTIATMLLSDVDLKSYTDTAYHNEELKSLTRYRFDKVQERAKLKQSVSRLVTILFPELEQLVSSIHGTSIYALLSEYPGAKQISEAHLTRLANILVKTSRGHYRKDKATHIRDAARTSIGSVMPAKSLELKHTIKLIQELTSEINEIEDAIRKIMDELKPPILSIPGMGFYSAAMILAEVGDFSNFNSPDKVLAYAGCSPSTYQSGKLTNCYAHMEKRGSRYLRYALYTATKYVCYWNPVFTEYLTKKQAEGKHYNVALSHATKKLVRLIYALQKSGKAYLAIT

SEQ ID NO: 128420 - protein, 361 aa, unidentified
MSESMALVGLDVHQAQTVAAVLDPSTGELSVQRLRGEPARVVPVFLEELDRPVAAVYEAGLTGFALIRVAQERGLDVRVVAPGSIPRAPGDRVKTDRRDASRLVRLFASGELSYAFVPSEVDERFRDLVRCIEDARKDLMRSRHRLSKFLLRRGHRFPSKAWTQPHERWLGKLSFEDAVSHATFVDYLCAVQTLVQRRRVLIDALEQAVPASSHAGTVARLRCFRGINTLTAAGLCAEVGDFTRFAKPALLSGFLGVVPSEYTSDEKRTQGQITKAGPPHARRLLVEAAHHYRHQPAVREGLAARQAGQDPRVVQIAWRCQRRLHERWKHLGGTRGKRTGTVAIACARELAAFCWEAATLD

SEQ ID NO: 128421 - protein, 343 aa, unidentified
MKHIGLDVHSTTTVVNVLNDRGRSILRRQVPTKEADLVDLMQSIPGPKRVALEESQMADFVSRSIGPHVTEVIRCQPQHNRLISESEDKCDQRDAEKIAELLFLNKLKSVHQPSWVYRQLREGIRSYWTSSRDLAVAKNRLKAFYLFNGIHCTGDKAYSKRQQEVYRTQLKNRSGNLDLLDLKYRWLESGREQKAAHVRQLRNVSAAVKDDVTRLMSIPGIGFIGACTLVAYLESGWRISNKRKLWQYCGLSIRRHESNNKGHRGASRKGNRYLKNVLATAVACIAGRRQAENALAKAWHAGLAQGIESARLRRNMARTIVVLAHHLLRFKETYRDDRVMTRH

SEQ ID NO: 128422 - protein, 340 aa, unidentified
MEVYAGIDLHANNNCLGVVDAHGKRIYRKKLPNDPELILGALGSLSSEVEGVVVESTFNWYWLVDLLMDAGYKVHLANPAAIQRYSGLKYSDDAHDAYWLAELLRLGILPTGYIYPKEYRAVRDLLRKRSHLVRLRTSLILSLQGIVARNRGKKIKAGDIKILSEDRVSIHFEGNEDLALAGQVSKEAIDDLTRKIVKIEAFTERKMALRADYRHLHTVPGVGRVLGLTIALETGEISRFAKVGNYSSYCRKVPSRWMSNDKYKGKGNTKNGNKYLSWAFSEAAELGRRFYPEVQTYYNRKLQKTNRMAAHTALAHKLARASYYIMRDEVPFDMDRLFGS

SEQ ID NO: 128423 - protein, 336 aa, unidentified
MDFDGLIDYYISTFQNKEDGDMEEVIIDKGCGLDVHKETVVGCVMGSGIKKEIRTFSTMTGDLFRLKAWLSEKGITHVAMESTGPYWKPVFNVLEDSFEVILANARHIKNVPGRKTDVKDSEWICKLLRSGLLAASFVPPKAIRELRDLTRYRRKLTQSISAEKNRVQKVLEDANVKLSSVVSDTFGVSGSRMIEALMAGNLSVDEISDLAIGKLKGKKEDLKKALVGNFQEHHRFMIQASLDHVRSLEKIIANLDQEIDRKLEDYHQEYELLQTIPGVKERGAASIIAEIGVDMERFPSEGHLSAWAGMSPGNNESAGKKKVERRPMAIRTCGQY

SEQ ID NO: 128424 - protein, 337 aa, unidentified
MQKSCLGIDVSKLTFDVSLIVVVTGQKQPIVISKFDNDAAGLKSFKVWLDDHQVTFDNNSLLVIENTGIYHRLIWDFCTTHLLPIFIGNAADLKWSFGIARGKNDKVDSMRLCDYAYKNYEDIKPTTGLNKVLITLKDLLSNRSKLIKLKNAIKQTLNELKGSNDKITQSLMEKLNKAALDGLKKSITQMDAELLKIVKQDEAILTNYKRMLSVPGIGKITATFIICCTNNFVIKVTGKQLANYAGVVPFEHTSGTSVRGKNRVHFMANKELKTLLTMGALSAVQTYPEFTDYYERKMKEGKKHLQVLNAIKNKMLLRIASVVNEQKNYVNNYKKAC

SEQ ID NO: 128425 - protein, 307 aa, unidentified
MFVGIDVAKDRLDVHVRPAGESFVISRDDEGIEELAKRLSAMVPTLVVLEATGGFETVVAAGLAAAGLPVAVVNPRQIRDFARATARLAKTDALDAAVIAHFAEAVNPPVRRLADPQQRLLGELMARRRQLIEMMVAEGNRRRLLTARRTLKTVDRVLATLKAQLEEIDHDIDIAVRGTPAWREAEDLLISVPGIGHKIARTLLAEMPELGRLDRRQIAALTGVAPFNRDSGTRRGRRAISGGRIVVRSALYMSVLVAIRRKLPLAQTYHRLRASGKPAKVAIVACMRKLVTILNAILRDKKPWATA

SEQ ID NO: 128426 - protein, 366 aa, unidentified
MTTVSNKQKWFNTIRFTHDDDLYVGIDTHKESFHVALWLNDAPAIDFVAPPDNIKLVDTLNKLRIALRLVVYEAGPTGYSLARMLQQADIPVSVVAPSKTPRQSAPDSKTDSLDARKLAEYAAKGLLRRIAIPTKHQEAQRQLTRLRQQLVEKQRRIKLQIKSFLLQHGINQPAGLSHWSRAAVEHLKNISLPTPLRYCLDTLLEELRFIADQIKLTEQKIKEAFSEKPICTTVKLLTTHPGVGQTIATQFAAEIFNPKRFSDKTQLAKYVGLAPSVHQSGQTFRDGPILKTGRPQLRCSLIQGAWIWIQKDHNAYKTFCRLIRNTGHKNKAITAMARKLAVHLWIMARDNKPYDAAARHDSPQAA

SEQ ID NO: 128427 - protein, 326 aa, unidentified
MHYVGIDVSKAKLDCCWLRDVEKSKVKTKTFQNTLQGHDALSAWLTDQTKASPAEIQIVIEATGIYHESLAYALFEAGFQVCVANPARTKEFSNSLGSVHKTDAKDSMMLAQYSLRMQPERWQPEAKEIRELKALIARLEALEADLQRETNRLEKAEFTRTSDLVIESLTLMISQLKAEKQRLEKEIDDHIDRHPQLKKDRELMASIPGVGAVISRVMLSLIHSRSFTQARQVSAFVGLVPRIQESGQWKGRSRLSKQGPSRIRAKLYMAAIVCAQWNPDIKAQYQRLLANGKSKMQALGAAMRKLVQICFGVVKHQSEYRPQVAV

SEQ ID NO: 128428 - protein, 375 aa, unidentified
MKEKLRFLGLDVHAETIAVAVAEPEAEVRSLGTIPNRAESIRKLIKKLGPAGKLRACYEAGPTGYIVYWQLAELGVECEVVAPTLVPVKAGDRVKTDRRDAEKLARCYRSGDLTAVWVPDEGSEALRDLVRAREAAKQDQTRARHRLSKFLLRSGQRAPTGVRPWTRPYLIWVAQLRFTQIAQESTRQDYLHEVEHMRERVARLEQAIMEAVKLASPALQQVINDLQALRGIADISAVTIASELGQVSRFGSARQLMGYCGVVPSEDSSGKRTRRGSITKTGNAHLRRIVVEAAWSYRRPPGIWYGLRRRQESISEEAKEIAWKAQHRLHKRYLKLGAAGKDQRKIVTAVARELLGFIWAIGTRAETISRQQVAA

SEQ ID NO: 128429 - protein, 316 aa, unidentified
MSEPVYVGIDVAKASFEVAVSGEAQTLSLGNDEAGHAELCQVLVPLAPRLILLEATGGHERLLALALAAAGLRVSVINPRQARDFARCTGKLAKTDRIDAQVLRGFAALLDAQGHEPRALLDEQQRELTALVTRRRQLVAMLVAERQRLALAHPKAKASILAIMDAIAAQLHDVDGQLREHVQAHHADLAKLLTSVKGVGPTTASTLLAQLPELGHLNRKQITSLVGLAPMNRDSGTLRGQRHIFGGRADVRRVLYVAALVGTRFNPVLKAFYAKLLAAGKPKKVALVACMHKLLIILNAIARTKSPWSHEIAGIA

SEQ ID NO: 128430 - protein, 391 aa, unidentified
MIFVGIDVAKDKHDCFILNSEGTVLADVFTIANNRIGFETLLSRIQSCSQGESKIKVGLEATGHYSYNLLGFLLDSGLATYVINPLHTNLYRKSLSLRRTKTDRIDARTIAMMHMSDVDLKSYSNTAYHNEELKSLTRYRFDKVKERAKLKSSVARLVNILFPELEKLVSSLHIAVVYALLSNYPGASYIANANTEELAETLCTASKGRYTKSKTAEIQVAAGVSIGSKMPAKSMELKHTIALIRELDKEISEVESAIDKITSQMDSPIFTIPGIGRHMGAMILAEVGDFSNFASADKLLAYAGLSPSTYQSGQLQNCYAHMEKRGSRYLRYALFNAAKYVCLWCPTFSAYLEKKRSEGKHYNVAISHAAKKLVRLIFAMQRSGKAFLADY

SEQ ID NO: 128431 - protein, 340 aa, unidentified
MDKLTTIAVDIAKRVFSVYWVNAETGEIGAKMLNRTRFEELMRTRAPSRVVLEAGGSAHYWGRWLAQQGHEVRVIAAQHVRPFVRTNKTDGADARAIWEAAQRPEVKWVAVKSEASQAVLALHRMREQLKDMRRMQGNQLKALLYEFGVVAPVRVTAVQLEAWVAEGRVPQLLAASLSEQIERIARLKKEERELTRGIERHNASDALAMQLLAVPGIGVLGASALSAELAASAKCYANGRQFAACKGIAPRLSGTGGKVRSGAISKRGDPYVRTLLIHGARSVITHQRRAKRLSPWLSGLLERRPLNVAVVALANKMARTAWALAAHGRSYQQNYGAQAA

SEQ ID NO: 128432 - protein, 315 aa, unidentified
MSENTMERFVGIDVSKDSLDVCLDPGGQCLRVAYDEAGITEVLGQLKAFGSALIVMEATGGLELRLASELAGQGLPLAIINPRQARDFAKATGQLAKTDAVDAAVLAAFARAIRPQARPLKEAFVRELDELLTRRRQLVDIRVQESLRLGSASKVQKKSLAAHIAWLDKRIADLDDDLRGRLRASAVWRAKDDLLRGIPGVGAVTSLTMLAKCPELGTLNRREIAKLVGVAPLANDSGKHRGKRFIFGGRADVRCVLYMSTVSAIRHNPVIKAFAERLVQASKPAKVVIVACMRKLLTIMNTMIRNNAPWNPKIA

SEQ ID NO: 128433 - protein, 419 aa, unidentified
MLKIVHHISCGIDVHKKFVVATIATTGGNNITTYKTNQFNTFTADLIKLRDWLSLNDCIQVCMESTGKYWIPVFNILEETCKITLANPKFIKNIPGKKTDKRDSLWIADLHKHGLVRGSFIPPKQIRELRDLMRYRSKLTNFRSSEKNRFQNSLTVSNLMIASFVSDTFGKSSKAIIKYALEHPDNIDMDFTNFLHKSMLHKAESINLSMQGNISKEQCSKMNVCLNHFDYINSCISQLDETISLISKDFIDSIKIIETVPGITNQSALGIISEIGVDMSVFPDAKHLCSWAGLTPQNNESAGKKRSVRISRAGVYLKPLLIQCANACIKDKSVPYFKYRYESIKKRRGHKRAIIAIARMLLTCVYNMISKNEAFDCSLYKEYLESSTKPLNKNIDKMILLLQSKGFCISHISENKSSP

SEQ ID NO: 128434 - protein, 343 aa, unidentified
MDHFAGLDVSVKETSICIVDDTGRIVREVKVASEPEALLQVLGNPIYRFKRIGLEAGPLSQWLFSALAEAGLPVICVETRHMRAVLQAQINKTDRNDARGMAQMMRAGLYRPVHVKTLRSQKLRMLLTHRKLLQSKAIAIDNDLRGTLRNFGLKVGVVGTVKFEARIKELVENLPDLAELVEPLLMVRRVLREQFSILHRRLLAIVRDDEVCRGLMTVPGVGAVAALTYRATVDVPARFRNSKAVGAVFGLTPSRYQSGEINRPGAISKCGDEMMRMMLYEAAQIMLVRTAKWSWLKAWAMKIARHRGMKKAIVALARRLAVIMHRIWVDGTEFRWTREVTAA

SEQ ID NO: 128435 - protein, 358 aa, unidentified
MAGKVTETVVVGGVDTHKDLHVAAVVDQNNKVLGTQFFSTIRQGYRQILACMTSFGALKRIGVECTGTYGSGLLRYLQNAGLEVLEVTAPDRMERRKRGKSDTIDAECAAHAAFSGIRTVTPKTRNGMIESLRVLKTCRKIAISARRVALQIIHSNIISAPDELRERLRNMTRMQRIRTLGSRRPDASEYRNVTNVYRISLKSLARRYLELHDETADLDVMIAAIVDELAPELIKRNAIGYESASQLLITAGDNPQRLRSESGFAALCGVSPVPVSSGKTNRYRLNRGGDRAENSALHIIAIGRLRTDDKTKEYVARRVAEGHTKMEAIRCLKRYISREVYTLLRNQNRQINSIPITA

SEQ ID NO: 128436 - protein, 360 aa, unidentified
MQHRTSIGLDVHARSISAAALDHETGEVRSARFGYDAPAVAEWASGLPQPARAVYESGPTGFDLARSLTSLGLECGVGAVSKMLRPSGDRVKTDKRDAVFLARMLAVGNVVEVRVPPAEEEAARDLCRARADASFELSRAKLSVSSYLLRKGVTWGGGTWTRAHRTWLRQIELPTEPERMVLDELLARLAECEARKERLTARLVALAGGDAYRGRVAALSCLRGINTVSAFSLLAEVGDFSRFDRAPALASFLGLVPSESSSGERVSRGGITKTGNSHARKLLVEAAWHHGRPYNPSAPTGSAAMSAVPPRVAEVAERANRRLHRRWHHLESRGKQRCVVTAAVARELACWVWAVEAEAR

SEQ ID NO: 128437 - protein, 344 aa, unidentified
MKIKLLGIDLAKNVFQLCALNQANKVLFNRTVRRVRFCSTIAKLVPTTIAMEACSSAHYWGRTFEAMGHKVLLVPAQHVTPFVRGGKSDARDALAICEAAQRPGLHPVPIKSIDQQDIQLLHRLRQRQVQHSTALANQIRSLGREYGVIFPAGIKSLIKRLPEALEDGSNELSPVARYALADQHRYLLEVRQAMATFLQQIEQLAAQHPAYINLLPLPGIGPMIASAYIAAIGNGRQFKCGRQVSAWLGLVPRQYGTGGKIQLKGMTKNGDRYLRTLMIHGARSTISHGLKNRPELAQWVQPIIDRQGFNKAVVALANKLARISWVIVTTGESFDVKQAFKPAA

SEQ ID NO: 128438 - protein, 466 aa, unidentified
MTTGNKLWRNRKERKDWARRLRSEDPGLEVVHPHAAGIDVGNSAHYVAVRPDRDPEPVRRFECFTADLYRLAEWLASCGVKTVALQSTGVYWIPLYEILEDRGFEVYLVNARHTKNLPGRKSDVQESQWLLKLHTYGLLNNSFQPPAEIRVLRTYWRQRAEHVSGAATCIQRMQKALTQMNLQLANVISDLSGLTGQAIVRAIIAGERNPRKLAELSHPRIEASREEIAKSLEGNWRPELLFVLRQEVEMYDTYQRRIAECDQQLQKHLTRFADTALPQSPEAEPRQKKAKPTKNAPRFDLGSELKRITGVDLTRIDGIDVMVAQTLLSEVGMDMSRWNTEAHFSSWLGLCPDNRISGDKLLGKGTRHVVNRAATALRLVARNLIRSRSYLGAQYRRLRTKLGAPKAITAMAHRLARLIYRMLKYGQRYVDKGTEYYENRYRQQQIHLLQKKAAKLGLQITVAVES

SEQ ID NO: 128439 - protein, 347 aa, unidentified
MKYYKTTTEFNCGIDLHTKQMYICVMDREGNKLVHKNIKGNDFAFFMKLVAPYMHSLTVVCECCYNWYWLADACMDADIEFVLAHALYLKHIHGGKNKNDKIDSEKLAHLLRTNLIPPSHVYPKERRPMRGLLRQRMSYVWERSTLLGHLQMNQQSEGHNPVPKGGHNRDVWEERILSQYTDPLHRLAVKCDMDLIRSYDHRIELIDQRLAELARRVHSRDFALIQTVPGIGRVLALTILLEIDTIDRFPTVKDFTSYCRLVKGSVASAGKVKGLCGGKMGNAYLRWAFGQAAVISKRNHPLLTPYAEMLVSKHGKFKGNAILANKLGRSVYFMLKKGTAFDAELVV

SEQ ID NO: 128440 - protein, 317 aa, unidentified
MSYYGLDISKDHLDLATVEGAIGRFPYTPDGIDHVLDHLTHGARTEASVALLVMEATGGLEHAVAAALAAAGLPIAVINPRQVRDFARATGRLAKTDEIDATVLALFAERVRPEERPLPDEEQRALSALVTRRRQLLQMLLAEKNRRRRADRVVLPDLEAHIAFLEGRLDQTDRALREAIETSPVWRTGDDLLQSVPGIGPTASATLLAEVPELGRISPKEIAALVGVAPFNCDSGKYRGTRRIWGGRASVRRALYMATLVAVRYNTVLRAHYEQLLARGKAKKVALVACMRKLLVWLNAIMREQEPWNPDYHGLTS

SEQ ID NO: 128441 - protein, 450 aa, unidentified
MGLQTINPHAAGIDVGSEQLYVAVVDGSVQVFEAFTESLHALRDHLLAAAVKTVAMEATGVYWIPVCDVLEAAGIEVCVVNGAHVKSLPGRKSDMEDCQWLAKLHSHGLLRGGFVPAPLIRRLRDYQRLRQDHVRMGSAHIQHMQKALDRMNVKIHDVLSNLTGMSGLAMVRALIEGVRDPLLRLDLGDVQVVKRKREPLLKALRGNWQRAHVFALQQALAGWEFYQQQIEQCDAETALVLQELAAAAPPPAPPASPGPAAAPPPPLAPAKRIHHNAPHIGDLKTLLVRITGGHDLSALPALTDYTVLQLLSEIGTDMSRWPTVKHFTAWLGLAPSSRRSGKRRRREKRFRGRAAQILCVGARSLARSKYLALGGFYRRLRAIRGPQVANIATARKLAVLVYNTLVHGLDYVEQGLERYEATYRAQCMKRLERNARDFGLTLVPLSHQNA

SEQ ID NO: 128442 - protein, 402 aa, unidentified
MNAVGIDVSKGKSMVAIMRPFGEIVSAPFEIKHTASGINSLVELINSVEGESRIVMEHTGRYYEILAHQLSEANLFVSAINPKLIKDFDNDSLRKVKSDKADAVKIARYTLDKWQNLKQYNVMDELRNQLKTMNRQFGFYIKHKTAMKNNLIGILDQTYPGVNTYFDSPARSDGSQKWVDFASTYWHVDCVRKMSLNSFIDHYQNWCKRKKYNFSQSKAEEIYGKAKELVPVLSKDAITKLIIKQAVDQLNSASTTVESLRTLMNETASKLPEYPVVMAMKGVGTSLGPQLIAEIGDVSRFTHKSAITAFAGVDPGVNESGSYEQKSVPTSKRGSSDLRKTLFQVMDVLIKTHPQDDPVYQFLDKKRAQGKPYYVYMTAGANKFLRIYYGRVKEYLSSLPES

SEQ ID NO: 128443 - protein, 314 aa, unidentified
MAATAVGVDVSKDKLDVHVLPQGESFSVSRDAKGIEELVGRIVPVEPAAIGIEATGGFERIVAAGLAAAELPVVVINPAQVRAFARSLGQRAKTDPIDAAVIARFVEAIKPPIRPLPDEETQLLSDLVTRRSQIIQMIVAEKQREKRAVNRHVRKSLARLIKALEKEINAIDEEIDSTLRGSPVWCEKEDLLSSVPGVGSITTRTLLAEVPELGKLDRRRIASLVGLAPFARQSGQWRGKSSIVGGRAAVRSVLFMAAMTARRHNPVLKLFFERLVVAGKPRMVALIAVARKLLTILNAILRDKKPWQPAGRPA

SEQ ID NO: 128444 - protein, 464 aa, unidentified
MRLDEAAELEPSRPLMTNADRHVDRTPPVTAVAGSGQSEGPKRNRRAGRRSCQKVADLSPTVFAVDTPARSEAQVELGAQERSAMRSVGLDLGSREVSLCEVVDGYVVARRTARSLEAFEDLLGVQTRPARVAIEACREAWHWNDELVARGHHVLLVDTTRGRRLGIGGHGRKTDRIDAEVLARAVEQGNIPLAHVLSPERRTLREALHVRRALVETRTQYITTIRGVARSSGEWIPGCDPDNFVAAVARANLRPETRAAITPLVTVLDVLQRQLSTVDIKLDALCKHEPIVLKLTTIPGIGLVTAAMFVAVVDNAKRFHHAHQLESYLGLVPSEHSTGGKRRLGAITKHGNSYLRALLVQSASSLLRMRADDPLKAWAQAIVKRRTRRVAVVALARRLAGVLWALWKRNVVYDAHHRARLFGGVAPPHDDNDALNCASRKIARRLREAERKLQPPRREEDANR

SEQ ID NO: 128445 - protein, 320 aa, unidentified
MSTSLSSAPPFVGIDVGKDRLQVHVRPQGLSFQEANDEPGIQALVARLAGLAPALIVLEATGGYQNSLVGALAVAGLPTAVVNPRQARRFAEATGRLAKTDALDAGVLAHFAEAVRPQPRPLPNAATQELAALLGRRQQLLQMRIAEQQRLATASGAVRQGIRKHLEFLERHLQKLEDDLDQTIRRSPVWRAKDDLLQSVPGIGPQVSRTLLAELPELGQLPCRRLAALVGLAPFSRESGRWRGQRRIYGGRAHVRAALYQAALVAARFNAPLARSYQGLLARGKAKKVALVALARRLLSILNALLRDRCPWDEKRVVPT

SEQ ID NO: 128446 - protein, 429 aa, unidentified
MRSIALDVHRAFCEVAIKQDGELRSGGRIKTGVAELELFAQSLAPDDQVALEASGPALAIARIIEPHVARVVVANTRKVRAIAEAKVKTDKVDAATLCELLDAGFLPAVFSPDEWTRSVRRRLQRRSKLVRARTRAKNELHAVLTRNLKGRPPMSDVFGKGGREWLAQLGLPPDERETVEGCLRQVDFLDQEVGLIERELAGQALSSQEIRRLMTVPGVSLISAATFVAMVGDVTRFATPKKLVSYVGLDPKVRQSGETPARHGQISKQGPGEARHMLCEAAWVVVRTPGPLRAFYERVRARRGAQIALVATARKLCVLFWHLLTREQGYAFERPSLTRRKLRALELKVDKGWRRGKHSGPRVNETRKDTEREREFAEQAEIAYRRLVKDWQPKPRKKGAGATPGRASSSHLLGEETATRQVSAPGPAL

SEQ ID NO: 128447 - protein, 354 aa, unidentified
MSQTPNTAIAVIGIDIGKNSFHVVGHDARGAIALRQKWSRGQVEARFANMPPCLIGMEACVGAHHLSRKLASLGHDARLMPAKYVRPYSKGQKNDFNDAEAIAEAVQRPTMKFVATKTAEQLDLQALHRVRERLVSQRTGIINQIRAFMLERGIAVRQGIGFLRTELPTILATRTDALSPRMLRVIEELAGDWRRLDQRIEGLTGEIAALAHQDQACSRLMTVPGIGPIISSAMVAAIGTGDVFSKGRDFGAWLGLVPKQISTGDRTILGKISKRGNRYLRVLFVQAAWVVLVKIKDWERYGLKSWIEAAKKRLHHNVLAIALANKLARIAWAVLAKGRAFELTRTDDASVRPA

SEQ ID NO: 128448 - protein, 338 aa, unidentified
MFYSGIDQHKTSSVITTLTADGQRVGQATVPNERRVLRQYFGQFPGPHQAVVESTGRWYWLRDLLVPAGVELELAHAKLLKAIAYAKVKTDAVDADTLAQLLRVGLIPHAHMIGDALRGPRDVLRARLELVTRRVRCEHSVGALLEKFNVPEVAQLPPLYQLQARLHTAQADLLAAQVKELEQAIQSELLEQAAVQRLLWIPGIGRLLALTLYLEIDDIQRFPTVKHFWSYCRLVPGADDSGGRHRHKTSRDGNRYLKMAFSHATIRAVQYFPEVRQWFQRWKRRKPVRVARALVAKELAQSVYIVLKEGVDFHHQFKGTPLTTRKQASWPRRASPPA

SEQ ID NO: 128449 - protein, 355 aa, unidentified
MDKTKYIGMDVHKETILIAVLDSSGKLVMESVIETKGSTIVQFIRGLRGELHVTLEEGTWAAWLYDLLKPYVHQVLVCDPRKNALLKAGNKSDQIDARKLAELLYLNKLTPVYHGEHGVRTLKELSRSYLAISGDVTRVMTRLKAVYRSWAIPCAGKQVYAPRYRAEWLGKIREAGVRRRAEFYYQQLDELRALRQQVRRELLAESAKHQASKLLCQIPSIGPIRAAQLIAILQTPNRFRTKRQLWAYGGLAIETHSSADHRYVNGQLRASKRPVSLRGLNRNHNHELKNIFKGAAIIAATKAGPFQEFYAALVAKGIRPEMARLTLARKIAAITLIVWKKGVSFDAQHLKPQTA

SEQ ID NO: 128450 - protein, 335 aa, unidentified
MKVVYLGVDVSKKKLDLCLRSNGKDILYDVIPNDLSSIKSWLTRTFEKFFLSEDSLVVCAEHTGQYTYPLVCATKSIGVYLCLEDAAKIKYCHGIPRGKNDKIDACRIAMYAERYNDCLQPYTASELIIQKLKNLSTERSMLVADRAKYQSQLKDQVDYMEHSIYIAKCNRVEGIINTFTDYIAQIDLEIKELINQAPVIAHQMDLLMSVDGVGERVALKMIMETDAFTSFTDPRKFCCHAGVVPFVYVSGSSQRSKNRVSNRADKSIKHLLHMAALSVSQVKNSPLKKYYDRKVEEGKNKMSVLNAVRAKLVTIMFAVIRADAFFSRNYQNSLA

SEQ ID NO: 128451 - protein, 358 aa, unidentified
MSNGSRVQLKMTAGLDLGDKYSHMCLIDTDTSEVIEEGRLRTTPEALRRRFDSEQPLKIAIEVGTHSPWVSRLLEECGHEVLVANARKLRLIYGSKRKTDKLDAENLARLARLDPKLLYPLKHRSEASQAHLAMIRSREALVGSRTQLINHVRGAVKSFGARLPRCSARSFHKKVAEDLPKELVSVLGPLLETIGELTERIREYERKLEEITSEHYPETELLRQVAGVGALTSLTFVLTLEDPHRFSKSRSVGAYLGLVPGEDQSGDSDPQQQISKEGDEMLRRLMVGSAHYILGPFAPDSDLRRHGLKIAERGGKNAKRRAVVAVARKLSVLLHHLWVTGELYEPLHNAQRSGDQAA

SEQ ID NO: 128452 - protein, 340 aa, unidentified
MSEVSIIGLDISKLVFQAHGADASGRAVFRRKIGRAKLLPFFASQPRCRVVLEACGGAHHWARELAALGHDVRLIAPAYVKPFVKRQKNDAADAEAICEAAQRPSMRFVPVKSEAQQAAAMVFRGRDLLVRQRTQISNALRSHMAEYGWIAPKGLAHLDRLADLLADPSSVPEGVRAVCMVLLDSLALLDRQIALLDKEIVRRSREDEVARRLMTIPGIGPITATAITALAPPPGTFARGRDFAAWVGLTPRQHSTGGKQKLGAISKMGERTLRRLLIIGSSAVVLQASKRGAPAGSWLEQMLVRKPRMLVTVALANKTARIVWALLTRHEDYRAPAAAA

SEQ ID NO: 128453 - protein, 478 aa, unidentified
MNPLFVGIDVSSRNNVAYLMKPDGSKHSSFSVQNNLGGAKLLAERIVSALRSMQLSDVVIGLEATSIYGDSLVYALRENGSLGQFQRKIHVLNPKQVRKFKDAYPDLPKNDFVDAFVIADHLRFGRIAREVYMDDYRYQALRTLTRARFDVIQNLTREKQRFANYLFLKCSGVAQAKDIQNTSATTIALMERFETVDDLANADLEELTSFITETGRGRFADPNATAKAVQAAAMASYRLPKTVNDTVNQAMAVSIASMRALEKQVKVLDKAIEQQFEIIPNTLTSIPGIGKVYSAGIIAEIGDVHRFDSQASVAKFAGLVWRKDQSGDFEAEHSRMIKSGNRYLRYYLLEAANSVRRCDSEFRRYYDLKYHEVNKYQHKRALALTARKLVRLVFRLLKDNRLYIPPEGCAHRLPSGVHALFQNFSEAGLWLVFPFCCLDSSSCAVSLKFLSHHLLDFIPLDFVLALSSISPFTPKYEL

SEQ ID NO: 128454 - protein, 364 aa, unidentified
MIRLLHLIKQGDGSMNEITILGIDLAKNTFQLIGVDKHHKVVMKRRCQRDKLVEIATNLPPCTILMESCGTSNYWGRRFQEIGHTPKLISPQHVTPYVANHKNDYKDTEAIIEVGTRPRTKFVQIKTIEQQDIQSIHRVRERLVNNRICLSNQIRGLLLEYGIVIPQGFSSLKSKMIELLSPECDSVNKEIQEILVDVYDEFKILSERITKYDKKIETISNQQESCKLLKTIPGIGPITATALYASMGNGSQFKNGREMAAQIGLVPKQHSSGDRQILLGITRKGNRDLKQLLIHGARAVVATAGKKEDKRSIWVNKLAAKKHFNVVATALANRTARMAWAVLRSSKPYNANFSYVKTNEGGAC

SEQ ID NO: 128455 - protein, 366 aa, unidentified
MNKISTVATNRNEIFKEPKLTIGLDLGDRASYYCILDEAGNVILEHSLPTTPKGIHQVFSRIPRSRIALETGTHSPWVSRQLTQLGHEVIVAHARNVRLIGESSRKDDQLDARTLARLARIDPELLGPVRHRSAKAQIHLTVIRARATLVSARTALVNAARGLTKSYGERLRKCGTGQMNREITKGLSQDLRDVLDPLLQEIESLNERIAEYDRRIEQIAKEVYPEVALLQQVKGVGTLIALTYVLTLDDPHRFRRSRDAGCFLGLRPGRRNSGMSEPQLHISKEGDRYLRTLMVQGAHYILGPFGQDSDLRRWGLKLAERGGKNAKKRAVVAVARKLAVLLHKLWVSGEVYEPLRNNHKVVSAVA

SEQ ID NO: 128456 - protein, 345 aa, unidentified
MTEAYDGRQVVGMDLHRRRSVLVRMTADGRKLETVRIENGPAALRAVLARCGKNPLVVLEATNGWYWAADVLEEAGAEVHLAHPLGVKAFSCRRVKNDERDAADLADLARAGLLPEAWIAPAEVRALREVVRFRHKLVGQRTSCKDQVHAVLAKCGIAVSHSDIFGRGGGLWLDGLPLPAPYAGKVASLRALIGVLDGQIALLGEQAAGMLAGDRGYAAVRELAGIGPVLGAVICAEIGEVRRFRKPGQLCSWAGLTPRHHESDLKVIRGHCSKQGSRMLRWALVEAIQHQPAGTRPHKAKEAITARRGPEARNIAKTAAARILLTEVFYALRDGRVRRAAGPAA

SEQ ID NO: 128457 - protein, 412 aa, unidentified
MSDGTVSWFAGIDWGSEKHQVCLLDAAGKVVGEREFRHGGAGLAALCDWLVSVAGEPGRVAVAIEVPHGPVVDALLDRGFAVHAINPKQLERLRDRVSLAGAKDDRRDARVAAGGLRTDVHLFRPVEAGDPAVIALREWSRLAEELQQERVRLGNRIRQQLWRYYPQLLEVSDDVTAEWVLDLWTLAPTPTKAARLREATLARLLQRHRIRRVDAERVLGLLRQPAITVAEGVTEAAVLHLRSLVIRLRLANREFHQAERKLDELCATLREKTAAADDTPPDAAILSSLPGIGTVILATLLTEAGGPISRRDYAALRTLSGVAPVTKRSGKSCLVTMRYAAQVRLRNAVFHWARVAVLNDPKCGRRYTALRARGHSYGRALRGVADRLLGVACVLLQRQVLFDPEHGTQAAL

SEQ ID NO: 128458 - protein, 338 aa, unidentified
MLHVGLDLHKRFSTVTVMDDNGTVLERDKLYHDDRARLTEFFRRLAGKAVVTVEATRNWYWLYELLEELGVTVKLANARKVRLIAEARLKSDKVDPGSLAQLERTGFLPEAYIPPRAIRDNREYLRYRLTLVRLRTGLKNKVHALLDKLGISHPFADLFCLAGRQFLSQLKLRPVYQEELTNYLALMDDMGCRIVTVTKEIQRQLKPDPRAKLLMTIPGIGHLTAYLLLNEIGDIKRFPTPGKLCAYGGIVPIVRQSADHRWQGHITQEGNRYIRWALIESACVAPSKDYALGSFHRRLKVRRGNLKARVAVARKLLVAVWHVLTYEESYKTTPFPTV

SEQ ID NO: 128459 - protein, 412 aa, unidentified
MDVVYTHCCGLDIHKKTVVACLITNTKGPEPVKTTRTFRTMTADLLALADWLQQAGCTHVAMESTGVYWRPVYNLLEGQFELLVVNAQHIKAGPGRKTDVKDAAWIAELLRHGLLRGSFIPSQPQRQLRELTRYRSTLVQEHARTLNRLQAVLEDANLKLASVVTDIYGVSARAMLEAILAGERDVATLADLARGRLRTKRDQLKEALEGRVTAHHSFLLTEHLSTLEYLDEAIARVSGEIDQRLTADHEAIALLDTIPGVGQRAAEILLAEIGSDMSRFPSAKHLASWAGMCPGNHESGGKRLSGKTRKGHRWLRQILVDMAHVASKTKNTYLAAQYRRIAARRGKKRALIAVGHTILIIVYMILTRRQPYQDLGAAYFDQREQHRVERRLVQRLERLGYKVSLQPQALAS

SEQ ID NO: 128460 - protein, 370 aa, unidentified
MPKSTTVFVGLDVHKESISVAYAAGGCRDAPAFLGPIGTRRADLEKMIRRMRSKAANLVFAYEAGPCGYGLYRFLTKKGFECRVVAPSLIPKRPGERVKTDRRDAMEIARLLRNGDLTSVYVPTVDDEAIRDLCRARDATRITLKAAKLRLKSFLLRLGLHYTGRVDWSDAHRRYLATVACPTPSQQIVFQEAVLAVDEQVDRLQRIEQELLDSASSWRLYPVVEALQAMRGVRWVVAITVVAELGDLTRFDNPRQLAAFVGLTPSEHSSGPKRRLGGITKAGNSRARRVLIEGAWSYRFPAKVSKEIQIRIEKLPKSIQGIGWKAQVRLCKRFRRLTSRGKNGNVVVTAIAREMLAFMWAIAHEVPIEA

SEQ ID NO: 128461 - protein, 402 aa, unidentified
MNCVGIDVSKGKSMIAVMRPFGEVVVSPFEVRHTANELSELAGLLKSLDGETRVVMESTGNYHAPVAWLLHGAGLYVSVVNAMLVHDYGNNSLRRGKTDKKDAVKLANYGLDHWLTLPRYVPEEDTRLMLKTCYRQYQQYSKVQTMLKNNLISLLDTAFPDANRLFTSPPRTDGSEKWVDFVATFWHCECVCGLSKKAFTAKYQKWCRKHGYNFSQDKALDIYASACGRFGVMPKTNTAKLLVEQAISQLQTTSAALAALKQEMQSLAASLPEYPVVMEMFGVGPTLGPQLIAEIGDVRRFHSKKALVAFAGIDAPPYQSGQIDVRSRSISKRGSASLRRTLFLVMGVLLQCAPMDEPVYQFMNKKRSEGKPYRVYMMASANKFLRIYYASVKAYLDSLEHD

SEQ ID NO: 128462 - protein, 343 aa, unidentified
MNEIITIGVDLAKSVFQVHGVDAEGTVIVRRQLRRGQVLRFFQKLRPCLVGMEACATSHHWAREIGALGHQVRLMPPRYVKPYVKRNKNDLADAEAICEAVTRPTMRFVEIKTPEQQSVLMLHRTRQMLVRQRTMLVNALRAHLAEFGIVAGIGRNGLEKLLKVIADGQDERVPPAARDCLLALRDQLVMVKQQILEADRRILACHRTSEVSRRLAEIPGVGPLIATALVASIPDPHAFRSGRDLSAWIGLVPKQHSTGGKERLGHISKAGNRYLRSLLVVGALSVIRRAKQTGSTKRTWLVALMARRSTKIAAIALANKIARIAWALMVRGTRYQEPRQQAA

SEQ ID NO: 128463 - protein, 422 aa, unidentified
MFGESRDDERIIERVAALDIGKAEVVCCVRLPSGGTGRRRVQEVTTHSTMTRSLTELANRLVDLGVQRVVMEATSDYWRPPFYLFEAHGLQPWLVNAKDVKHLPGRPKTDVADAVWLCKVAERQMLRPSFVPPHEIRRLRDLTRYRIDLIGARGAEKNRVEKLLEDACIKLSVVASDIFGVSGRSMMAAMIAGERDPKVLAEMARARMRTKIPALEEAFTGFFEDHHRFLLARMLGRIDAIDDDIAAVDAEIEVHLTPFGDAAARLDEIPGIGPVAAAIIIAEIGVDMTRFPTAGHLASWAKFAPGIKSSAGKNKGNGSTGHGNRYLARVLGEAAVAASRTDTFLGARYRRIARRRGKKKAIVAVGRSLLVAIWHVLSDPDATFQDLGPDHYDRHVDTATKKRNHVHQLEALGYRVTLQPAA

SEQ ID NO: 128464 - protein, 336 aa, unidentified
MSHYCGIDLHSNNHVVVVIDDEDKRVFEKRLNNDLSLTLKALSPYDETLHGIAVESTFNWYWLVDGLQEHGYDLRLVNTAAVKQYDGLKYSGDHHDAFHLAHLMRLGILPTGYIYPKEQRAIRDLLRRRLSLVRTASSQLISVQSQIWRSTGLRIKSGELRKLEFAPPLVDDYTLQAVQAGLAVYQVIQREIDGLEQTAYQVVKLTEAFKILQTITGIGKILGLTIMLETGTIDRFAGAGNFASYCRCVDSKRTSNGKKKGEGNAKAGNKYLSWAFSEAAHFAVRFEPLAQRFYERKKAKTNGIIAIRAVARKLARASWMMLKHQVPYDARRMFPG

SEQ ID NO: 128465 - protein, 336 aa, unidentified
MWHVGVDLHRKTVVIAAVHDSGEVRPPVRLQNSETERIKETFCAFGSFRAVVEATGTYRWFHKLVSPLGTVLLAHPGKLRIMVQRRCKTDTLDAQLLANLLRINQIPLAYIPPDEYQLLRDITRQRARLVRGQVSVKISLRALLARYNMEPIFKYPFGPRGLCWLSKQDFGFVDNVVRDELIARFRHYAAQIEGVNQRLAKLEAMYPQIESLTVLRGIGAYTAMVIIGELGDVRRFRRAKQVASYAGLTARVHQSGEHCYHGHISKQGSPWLRWLLIEAAMKLVHQDVPLANFYQRIRKRSSAKIARVAAARKLAEICWKRLVSWERQHHPEVAVA

SEQ ID NO: 128466 - protein, 400 aa, unidentified
MNHCLFVGIDISKYKHNIAIINKQKKVIDKPFKINDDYDGYQYFLQKLKLLIQQHQTRQFYIGLEATGDYWKNIYHYLNRQSIPVSISVINPIQTRALAKTELRRAKTDAVDAKDIALFMVEKRPKPFNNTTALFDSIKDIDKQIYQFKKLQTMAVNKLRIELTKVAPEIEKAFPKIQGKQIVALLAQFPTAELINNASEIQLKSIRYGEKNWQLPDSFIKTIKQLTKNSIAYKTGHGAGIVVVSLIRTIKLFHNEIDSLKKQLIELYKNINENDSILATIPGVSKELAIILEAYVNDITRFSHVKQFVAYFGMNPTVRCSGKYIGKSYLQKKGQSIVRHKLFLITLCMISQKVKPVYPFYTRLVENGKPKLVAIGAAMRKVLIIIFYMMKNNEPFKFYA

SEQ ID NO: 128467 - protein, 334 aa, unidentified
MNFKNFIGIDISKGTFDLALIKDNNLLVVASDDFPNSSSGIVQLEAFLKNQGLNMEETLFCMEHTGIYCRLLSHYLTECKYYVWLEMPVKIIRSLGLQRGKNDKIDAKRIAEYACRKKDKAVLWAPPREVVMKIHDLLTLRDRLIESRKSLKQPIKELIDTGFKDAANLIESRCKITLNAIDKEIKQIEKDLNDLINKDSNLKRLFGLATSVPGIGKITSMYMLYFTNEFTLYLNPKQLACYCGVAPFEHKSGTSIRGKTRVSHFANKKLKKLLHLVAMSTIGKNKDLTAYYVRKVGEGKGKKLVINAIRNKILHRLCAVIQRGTPYQAEYVLA

SEQ ID NO: 128468 - protein, 312 aa, unidentified
MTAPVYVGIDIAKRSVEVAVTGSRETRGFAQDETGRSALVAYVRDLGPALIVVEATGGYELDVVMALRLAKQRVAVLNPRQVREFARAIGRLAKTDPVDAHVLARFAENLRPEPRPFPDAAHQALEALVTRRRQLVDMLGAERNRLPLAQGRIRDGVQAHIHYLEQQLKATNDELRTLLSDHAQWRTTDAQLRSVPGIGPTTSAVLIAELPELGTLSDKAIAALVGVAPLNCDSGTRRGQRHVWGGRAAVRHTLYMAAVAAARWNPVLRPFYQRLREAGKPAKVALVATMRKLLVILNAMLRHHTVWAPPAA

SEQ ID NO: 128469 - protein, 294 aa, unidentified
MANSVTLFVGMDVHKESISVAYCREHESEPPHFVGKIGTRKADIEKMVRRLQSKASYLVFAYEAGPCGYVLYRHLTSKGLECRVIAPSLIPKRPGDKVKTDRRDSVEIARLLRSGDLTPVYVPLVEDEAIRDLCRARDAARMVLKSAKLRLKSFLLRLGLNYTGRANWTNAHRRYLSTVACPTPAQQIVFQESIRAVDEQVDRLQRLEQELIELGSQWRLAPVVQAVQALRGVQWVVALTVVAELGDITRFATPRQLAAFVGLIPSENSSGGKRRQGPITKTGNTCPSAPVWLA

SEQ ID NO: 128470 - protein, 352 aa, unidentified
MRRYKETEEKRKFLFVGIDLHQIHWHVTVRTEDVEVFSGTIPGTWEALRKLLDRYRGSRVQTVYEAGYFGFWLHDLLVEYGAECVVTPPSLLPIEYGNKVKTDRRDSRKLAQFLAKGILKRVWVPSAEERFHRQVIRRRRQLIGDRVRTQNRIKAELRFYGIQIPNTTGKWSKVYLENLHRLQFNNHWMQESFQRLLEEYDFLSALIKKQTAVLHELAETPLYKGRTKILRTVPGIGLIAAMELLLELQDVERFRRADQLAAYVGLTPSQYSSADKVRMGRITAIGKNQLRGTLVEVAWRLIGKDRVMRRKYERIKARSGSKRAIIAIARITLLRTRRMLLDNRPYVMGRAA

SEQ ID NO: 128471 - protein, 330 aa, unidentified
MTVIIGMDPHKRSATIEVLNERAQVLASGRYDTDNTGYGRMLRAGREFPDRVWAIEGCNGVGKHLAHRLVHDGETVLDVPAKLSAQVRVFAVGNGRKTDPVDAHSVALAALRTPNLVTVQVDPDLVVLGLLVDRRDELGQARTQTVNRLHRLLLELFPGGAKRFLSATQARALVATIKPRDIVGKTRRRLVVELIGELDSIDRKTKTLEKELAQLVTERGSTLLGLHGIGPSGAARLLADVANIQRFANRDRFASWNGTAPLDASSGQQQRHRLSRAGNRRINRTLHIMAVVQLRNPTEGRAYFDAKKAAGKTSMEAMRALKRRLSNIVY

SEQ ID NO: 128472 - protein, 352 aa, unidentified
MRDYIALDVHKHYTLAGREGVKSRKTRYSRLEHTKGIFKRYLAEVEPGTTVALEATGNWYWVVDEIEASGMKPVLVHPYKAKVMLGCINKTDKLDVAGMNRLQRTGTLPTVWIPPVETRDLRELPRTRMFLTQLRAKLKNRIQATLTKYALNVTEYSDPFCQEARQVMAKRIKQLPPQAMKATQQLLQVLNPLEEQIQDQEKRIQELTKITPEMELLMTIPYIGKILSIVIASEVGNISRFAKAENYTSYAGTAPRVKASGDKYRIGRLRSDVNRYLKWAYVEAANCACIHQKNFPDRHVTLLYRRIKQRKGHPKAIGAVARHLAEATYYVLSKKQAYRDPALNKRIATTGT

SEQ ID NO: 128473 - protein, 351 aa, unidentified
MEKYISFDSHKHYTLAEREDVETFEIKQERIRHERGAIRDYLRDCSRGTAVAVEASGSYYWIVDEIEEAGCNPMLVHPRKAKLMMGMINKTDKLDVHGLNRLQRNQTLPTVWIPPAELRDLRELTRTRIVLVQQRTRLKNRVSATLTKYGLLVKGCSDVFGVKGQEELKKLMKQLPHETQCVSQMLLEQTNYLTVQILVLEKRIEELVKMTPEMQRLMTLPGIGKILSSTIMLEIGTIERFSDAERLASYSGTTPRVISSGDKTRYGHLRKDVNQYLKWAYSEAANTMAANHLRCPDRHVSMLYKRVRHRKGHAVAVGAVARHLAEATYYVLSRKQTYRDPKLRQCSTREA

SEQ ID NO: 128474 - protein, 489 aa, unidentified
MKAKAVSVSRDRRGLPAVMRPALPHVVELASQTTQKRKTDTMKDYILRTHAAVEPQMTPTSQRIDQKPDLAASVEEPQLQANAQVDPKAPTSLADVSSRGSQPCALSAGPVLFIGMDVHNDSIAVSLAPSDSIEVRRYGIIGGSHDDVLKLAKKLQAAHPDRALHFCYEAGPRGYPLCRFLRAMGYSCILVAPSKIPRKPGERVKTDRRDADQLARLYRAGELSAIYVPDPHDEAVRDLIRARYQISRQQHRARQQLKMFLLRHNLRYPGKTAWSPAHLRYLARVKLPFAEQQFVFQEMLDVITEAGKRLERYEAQLPGVLAGWRWEPVVRALMSLRGVALLNAATLVAELGDLNRFPTANQLMSFLGLVPSEETTGNDRRQGGITKMGNGIARRAIIEAAWHYRLPARISPTLQVRQEGLPKTVTQAAWEAQTRLHRRFKHLTGVRHKKSQVAAAALGRELAGFVWAIARMVKPNALTDEKRTALPGA

SEQ ID NO: 128475 - protein, 414 aa, unidentified
MNEDLAAYVGVDWASATHYAYALDAQGAKLGHRSFQHSGDGLVELADWIQRTTGAEPGRIAIGIEVPHGPVVESLMDAGFLVHALNPKQLDRFRDRFTMAGAKDDRLDAFVLADALRTDRRFYRFLEPVHPTIIQLREWSRMTEDLSAERNRLANRFRHQLWRYFPQMLELAEDWSKQWILDLWDLIPTPARARTVRASTIERRLKESRVKRWTADTLLTHLRSTPISVAAGVTEACVAHCQLILGRLRLVMQQMKLAMKELERLCSAVAELPAATGIALQADPQILRSMPGIGTIVLAALLSEAHDAIVHRDAQALRGLSGVAPVTRRSGKQIVVVMRQSCPHRLRTAVYHWARVAVLHDVQTRNRYAALRKRGHSHARSLRSIGSRLIGVACAMLRTGELFDNSRTPQSAAA

SEQ ID NO: 128476 - protein, 336 aa, unidentified
MTIIRVGVDTSKHVFQIHGVDENEQAVLRRQIRRSEVVKFFAKLAPTRIGIEACGASHYWARVLRGLGHAVVLVPPQYIKPYVKRGKNDKIDAEAICEAMSRPTMRFVPVKTVEQQAALTMLGVRDLLVKQRTMLINAIRGHAAEFGVTVAKGPKQLTELLQRLASEEGVPPLAREMVSVLASQLDGLDVKLKTIEKQLMAWHRQDQTSQCLATIPGIGPIAGVSFALKVADPQAFRSSRHFASWIGITPRESSTAGRQKLGGISRAGDEDLRRLLVIGATAVIGAAKPGRSSPWLLALLARKSKKLAAVALANKMARIIRAMMVSGETYRQPAQA

SEQ ID NO: 128477 - protein, 361 aa, unidentified
MKKPAQRLIAEVPRRHAKVEMTIGIDLGDVWSHYCTLNPEGTIVDRGRFRTTPKAIEKWFTDLPPARIAMEAGTHSIWISEQLQELGHEVIVANVRELRAISHSDRKSDHADAEKLARFARLDPEILRPISHRTVQQQEALTLIRARAFMVRLRTASVNAVRGLTKACGHRMPASSTRCFAKRSLAAMPPGLSKALGPVLEQIAQMTLKIKQYDLQILELTQTEYPETQALLKVQGVGHITALTYVLTLGNKQRFKRSRDVGCYLGLRPRRSQSGDRDPQLGITKAGNVYLRSLLIECANHILRPRGKDSSLRRWGLHLADRGGKQAKNRAVVAVARKLAILLHHIWTTQEPYMPFYAEAA

SEQ ID NO: 128478 - protein, 347 aa, unidentified
MNFYTRQHNHYCGIDLHAHAMYVCILDQHGTKLVHKNLPTTPEAFLRIIAPYREDLVVAVECIFTWYWLADLCSKEGIAFVLGHALYMKAIHGGKAKNDKIDAYKIAVLLRGGMLPQSYVYPAEMRATRDLLRRRCHLVRKRAELLAHIHNTNSQYNLPEIGKQLAYKATRAGVEEHFPDPSVRKTIAVDVSLINPYDQLLGEVELYITRTAKAHDVQTFARLQSVPGIGKILALVLLYEIQDIARFPRVQDFGSYCRLGKCAKESGGKRLGTSGKKIGNVHLRWAFAEAAVLFLRHNQPGKAAFTRLEHQHGKAKALTVLAHKLARAVYYMLAREQAFDLNRFVTA

SEQ ID NO: 128479 - protein, 363 aa, unidentified
MNSVYHTELSSHEGTRRQFNGGKADIKLGIDVHQDFYVVVEQVDGSNPKPPQRFQKQAFLHWATKLKQSGAEVYAVYEACGFGFTLQRQLSELGIHCYVVCPQKLDEQNRRVKTDGLDAKALCLKLDRFVEGNRHALALVRVPSEEEEQARALHREREQLVNVRKVLEAQGRSLLVNHGMEPVQGWWKKRAFATLAAPEWIKELLGNSQPVVLLLQEKIDQLTRQLKNAANAEPPRGLGKMTSVIIDREIGDWDRFNNRRQIASYTGLCPGEYSSGNTRLQSCVTKHGNPRLRAALVELAWRLVRFQPNYKPVVKWRHILAKGAVATGPARKKAIVAVARQLAVDLWRVRTGRCKAQALGLVL

SEQ ID NO: 128480 - protein, 528 aa, unidentified
MLQFVKNKASYTTRQPLGAVESPYASLGLSLFAKNIIGNCLQGQFTMLLSLNIFTRDRACHVFVKRNKMGKVSKTKKKKEHGQGPKQMEQFGLLNLHSAGIDVGSMLMMVSYTDQHGVVHLREFDSFTESLYKLAGLLQEEGVEKVAMEATGSYWTSLYSIIEQQGMEIVLINPSHYKNVAAQKTDVKDAQWIHQLLAHGLLRNSHIAPELYRELRSYLSERDIYKQQKSDTLNRIQKTLTLMNIKFQHLISDIEGVAGMKLLRAICSGINEPEALLKLINTAILKADPEDLLRSLKGDYREHYLHILCGNLKQYDFLKEQMLCYEAYIEATLQKLIYSGEVQGKTTSIAKKKASVRKNQYSFNLKDYLLAIFGTDLTVVEGLDEINLLTILAVTGTNMKKWPTAEHFASWLNLSPRPKRSGGKIIGHEKRVTNNPATQAFRLAANSLWQSKGPLGQQYRKLAATKGSAKAIKAVARKIAVIFYNMVLKQEAYDPKKAQPNIEQQTAKKIARLQKEAAKLGLTIQKAA

SEQ ID NO: 128481 - protein, 341 aa, unidentified
MEQTITIGLDIAKPIFQAHGADAAGHALFRKRLTRAKLLGFLATQARCVVAMEACAGSHYWGREIGKLGHTVRLIPPAYVKPFVKRQKNDAADAEAICEAAQRPSMRFVPVKDEAQQANGIVFRARDLLVRQRTQCLNAWRGHLSEYGYVFRQGITHVATVIAHVEDPNSSLPENARVILRLLIDSFAALEAQVRELDAEINRRSKADPVARRLMTIPGVGPITATAITALVPAAGNFRSGRDFAAWLGLTPLQKSTGGKQKLGAVSKWGERTIRRLLILGASAVVRQACRRGAPTGSWLAQILPRKPKMLVTVALANKRARVVWALLVKGGVYRAPAATA

SEQ ID NO: 128482 - protein, 323 aa, unidentified
MIHSFHLGIDVAKAKLDCALRQPDGKIRHRVVDNTPAGFSALDVWLAKQGADAMHVCMEATGTYWEAVAEHLAARPDCRVSVINPAQIKAFGASQLIRTKTDKVDAKLIAQFCAERRPDPWVPATPAEQALRALVLRLDALQSMRIQESNRLEVARPTVRDGIVSHLKWLDEEIERVIKAIREHIDSDPSLRDKQRLLDSVPGLGERTIAVLLAFAAEPARFETARQLTAFAGLDPRQHESGSSVKGKPRLSKVGHAFLRKALYMPAMVALYRTDWGKLFRDRLAARGKPPKLVIGAMMRKLIHVAYGVLKSGKTFQPELHGA

SEQ ID NO: 128483 - protein, 318 aa, unidentified
MNVIGFDVSKDTIDATLITTKGSKDYIKIANNTEGFENLINWIKTKRIRKIAISMEATGIYYEQAAEYLSVLYTIFVINPLKIKEYAKSQFSHTKTDKADSKLIAEFANRHLDKLTPFRPSENPILYKLINLLQQLKEQQKETQNRLHTAKDIYIKSTHEAIIELLEEKIDQTSKRIEGMIKQKESLNIEYQNLQTIPAIGKETAVILLRHLTDKNFETANKFVAFAGLSPKIEQSGTSVNKKGRLSRYGHRQLKRALFMPALVAYRMNAFPQLVSNLESAKKPKMIIIVALMRKLAKIAFYIHKTKKPFDKARHQTV

SEQ ID NO: 128484 - protein, 359 aa, unidentified
MRIIGCDLHARQQTLAMLETTTGEVVNLTLMHEGNEVREFYAQLPRPVLVGIEATGSMHWFVNLMEELGIECRVGHPATIRAAEPRKQKHDRRDADLILRLLVENRFPAIWLPTKELLDLRALVLHRHQWVRIRTRIQNALQAIALANGLRRGPSLWSYDGQAKIAFLPLRPHASYRRSMLQEMYRKMDEEIENLTQRVAEQAGQRCGARLLMTHPGVGPVTALATEVFLGDPKRFADGKALGSYVGLIPREYSSGARQRLGGVTKQGSPLLRFLWCEAGAHAVRRDPELKRFYRRKLVQKGLGKARVAVARKLGIRLWIMLRDQIDYEEFCRRGQKQQSGAACAGMPEVGYGAKSPAD

SEQ ID NO: 128485 - protein, 348 aa, unidentified
MIVIGADIHKRNHMLVAVGAQTGELRSELQIAADEQGHQAALRWARELDEERVWALEDCRQVSRRLEQALLAAGERVVRVAPRLTGLSRRADRRAGKSDPIDALAVARVAVREGPDRLPAAFLDEEAMAIRLLADHREDLVAERTRAQNRLRWHLLDLCPELEARLPVRSLGSAARLRDVAECLEQLPSTRARIARELVERIGEVTEEVKRLQAEIKALVRAHRPALLAETGCGPLTAATLIGHAAGAERFAGEAQFARMAGVAPVPVSSGKSDRHRLHRGGDRQLNRALHVIAITRSRLDPETRAYLDKKRAEGKSNREALRCLKRHLARRFYQLLRDPSPSPSPSL

SEQ ID NO: 128486 - protein, 386 aa, unidentified
MQKLNDLSRSLTALEPNGTLIAVIEMSLSSWLVAGIVPGVERQPLKKLAVDESALLKLLHRWREEAEKAGRRIERIAVAFEAGRDGFWLARWLKARGIEAYVIHASSVAVSREHRRAKTDRLDTELLKRSFLGWLRGERDHCKMVEIPTMQDEDAKRPNREHDSLIGERSRIVNRMKAALVRLGIRGFNPKLKRATTRLDGLHTPEGEPIPPNALAELRRDMERRRLVNNQIRQIEEERLERIEQAPCDGAHVMVRLLARVMGVGIETADMLVHEVLSRNMRDRRAVARYAGLTGSPDESGRKRREKGLARSGNARVRRGMIQLAWRFLLHQKNSALTKWFRSRTENARGTRKPMIVALARRLLIALWRLMREGIVPDGVVLRPAQ

SEQ ID NO: 128487 - protein, 371 aa, unidentified
MSKKKIVFVGLDVDDTAFHGAGIVRETGEIFEFKCKPDHGVLRKKLTDLFGDTYEVHLCYEACYLGYSLCRFLQKAGTHCDVIAPSLIPVKTGTRVKTDRLDAAKLAEYYAKDLLTPIYIPDQTDEEVRDILRSRNFLVRQRKMLKTHLLSACIRYDIKFHDETGKKTNWTDLHISWLKTRAKTLGRPVCQIDIEMLLAQYTSLSESIEKLDAAISQVAENERYKKAKDALNTFRGIDTLSAMTIIAEIGDIRRFAHPRQLTSYVGLDVAEYSSGGRERKKGITKTGNKHVQTILTESCQTASRPPILSKRIKQSRAGHPQAVIDIADRCMNRLHKKATRMLYAGKHKNKIKTACAREMLGFIWEALRLAA

SEQ ID NO: 128488 - protein, 339 aa, unidentified
MKLYTSFDLHSNNSFLGIKDENGKPVFRKKLPNEPEKILSALKPYKNDIVGIVVESTYNWYWLVDLLMKEGYTVHLANTSAIKKYSGLKHADDQDDAFWLCDMLRLGILPEGYIYPPEDRPIRDLLRKRMHLVKVRTSLIVSLQNIICRNNGFRLKTSDVKALSEDRVTPYLSENEDLALAGSVSKKSIDFLTRQINEIEAVVLGKVKLKPPYTRLLSVFGIGKILAFTIMLETGPITRFAKVGNYVSYCRKVSSKWLSNDKVKGKGNKKSGNKYLAWAYSEAAHCAVRSYVQARTYYNRKMQKTNMMVAHNALAHKLARAAYYVMRDDVVFEPEKIFA

SEQ ID NO: 128489 - protein, 402 aa, unidentified
MLDARSAGVVAEGRFPATADGYDEAVMVVDGHGVDTERAWVIEGSAAYGRGLAVALGRRGEWVIEFDRPTRKTKDGAKSDALDAVRAAREMLGRKRLSEPRAHDGLREAIRVHAVTRAGAVRGRTAAINELKALIVTADDALRAELRGLRTSGQVTTCAKFRDRPSSAVHEQATRATMRSLAQRIQLLDAEVDLHDRVLRELIDDAAPQLIVERGIGYITAAQFYLSWSHPGRCHSEAAFARLGGVSPVPATSGQNQTRHRLNRGGDRQLNRALYLVAVTKQRCDPATRAYIARRVAEGKTEREAIRCIKRFLARRVWRLLEHSNMEHSNIKDWSALRPGLNGAGVKGGRRPAKRTLEAGPVDRVASTIRSAPAPAGASSLLSDGTEPSPLHQRPRRTEITA

SEQ ID NO: 128490 - protein, 366 aa, unidentified
MNYRVYCGVDFHARQQTISCLKTETGVITTHELKHSDKAALRAFYGELGAGTLVAIEASGYSPWFELLLEELGHEVWLGDAAEIRRCARRRQKNDRRDAELILDLLVHDEFPRIHRPTPSSREILRMLRYRHKLVRMRTSIKNSLQALAIQSGLSRRAQLFTNSGLQQLQTVSMSPVMQQQREQWLTLMAPLNLRIDEAEGWLKQQAKADARISRLRTHPGIGLLTALGLVHTLEPISRFPNQRKLTAYVGFDPREHSSAEKKRYLGISKAGSRMLRFLMVQAAQTTVKYDEDLQRFYRRLSQRHGKPKAKVAVARKLLVRSYILLRDQIDYAEFQRRAVAARLARALHRPNMPGVLIGQPASPKQ

SEQ ID NO: 128491 - protein, 419 aa, unidentified
MKEEKPMLFLGIDWSEDHHDLVVMAADGKVMSRARIADDLAGVGRLHALVADHLVEPEEPVVVGIETDRGLLVASLVAAGYELYAVNPMVASRYRDRHSIAGAKSDAGDAKMLADLVRTDRHMFRAIAGDSDGVEAIKVLARAHKRLIQDRQSQVNRLRSLLREYYPAVVSLFGSDLADRDALAVLAVAPTPEQGRRLSQAKAVSALRHGGRKRNLDRRASEIREGLSRPQLDGPAAVADASGTTTTALIAIIAVFNAQIAALEAELVDHFEKHPNAETYRSLPGLGDVLGARVLAEFGDDPNRYDDARSRKNYASTSPVTRASGKSTVVHARYARNARLADACRQWAFCSLTTSPGARAYYDVIRSRDKSHEHALRQLANRWVGILHGCLDSGTAFDETTAWAHWMNTTSDDKPQIAA

SEQ ID NO: 128492 - protein, 403 aa, unidentified
MNKLKRVCGLDVHKDIIFACVRKGKYQSEIKQFSTTTQGLSEMKHWMLGERAYKVAMESTGIYWMPVWRALEDSFELKLVNPYFIKQMPGRKSDVQDAQWIAALLDKQLLKGSVVPDKKIRVLRDYLRRYVQLQGQMTRCLQQIEKQLSRCNIKIASLSSTIGSKTVINIVDSICKECYEPNQLIELVHGRIKNKHGEKVKQALEGIIDEHDIFLLRQILEDHQHIERQCSELLAQAEKIADEHYHQQIELLQTIPGIKKLSAVIIFAELGGNISCFPSAKHLTGWCGLRPKNDESAGKIKSRSITKGNRYLRRIMVQTAWAASRTKTCYLKNKFEQLTVRKGNKKALVAIARKQLVIIWNVLSENISYREPQLLLSPEQISRKKKYYEKKLCQLLTQQEKVG

SEQ ID NO: 128493 - protein, 427 aa, unidentified
MQFNINRIEGFRQLRKEIRGSKEHLIVGIDVAKDRHNAFFGTATGRILYKRLIFDNDIEGFEKLLLQAEAVRVQHALETVVYGVEPTANYHKPLGEYLIRKGQTVVLVCTEAVKKNRTLLDGRWDKHDTKDAANVADLISQGKCQYYEYPSEELRDLRNLLSLQRKLKKLEQALRMRIRNHLVARYFPELDKCCNWGAHEGLAIVKSCLDPALISKLQYDELLRRIQTQGRNQAQQKRLSAVWQNADRSIGCEVIPSVEFEARMMVEQLGHIRMAITDTQQQINAVCQVFPEYEYLLSIPGFGPLISAKVMGAIGNPYRFNKGSQLLKLVGMDLSASRSGKTSDAVTPSISKKGKSDIRYALYQAAMIASNKNKHFIAYFTNKLRGRQRERGIKTKMRVKLAAKMLIIAWTLMKKKELFDPKYLNIE

SEQ ID NO: 128494 - protein, 346 aa, unidentified
MMIIGCDYHPSWQQICWVDTATGETGEQKLEHASGEAARFYRQLRAPALIGMESTGNCQWFVEMATETGHDVWIGDAAKIRASDSRQQKHDRRDAALILKLLLEGRFPRIWIPSGEEKDLRQLLIHRYKLVRIHAQVKNELQHLAMNQGVTKKRKLWSKTGEKVLRELPLKPWASQRRKDLFRIREMLNAQIDVLDQAVVEVAEKNEKARLLMTQPGVGPITSMAFVLTMGDVHRFQRGKQVASYLGLIPREYSSGGHQRFGSISKQGNRFMRMLLVEAAQCAVRCDPGMRSEYLHRCHRKAKGVAKVAAARKLAIRLYWMLRTNTGYPGVVRVESSSPVPLVSAS

SEQ ID NO: 128495 - protein, 329 aa, unidentified
MEYGAIDLHLRRSQIRILDEDEGVVLERRIDTTREAVTQLFGARGRMRILLESSTESEWVAQHLETLGHEVVVADPNYAPMYGGRSRKIKTDKRDAAALAIACRRGIYRAAHRASRAARTLRQQLRVRRHLVQVRTGLISLLRSTLRQEGLRLPSGSAERAVARLDRLAVPATVAAVVAPLRTALADLTATLATIDTAVEAHATGDAAAQRLMTAPGVGPILSLTFTAVLDDPARFGGDAGRASAFLGLVPSEDSSAERQHKGHITKTGPGDLRALLVQASWVIWRGRSATGSATPPFAEAGYRWAKEAFPGFDVGGFGLGISAHWYLR

SEQ ID NO: 128496 - protein, 396 aa, unidentified
MSKLFVGVDVSKDSFSATGLDVKGDVRFSLSLTMDKTGFSELMKAITSNCKDLSAVMAGMESTGCYHINLFSFLSSKEVNAVVINPLLISNFAKLSLRKTKTDKKDSLTIAKFILIHKESIEQFSISQDTKDFRDIARERESISHLIASTKNEIKRILQSIFPELESICNVFTATMLLFLKEFPSARFIRASKAKVVADALERYGKGRKVSISADEIIRTAKNSIASISLAKELILPRKISTLLHLMEQLDQITGILSELCASLAIEEMEIITSIDGIGDTTGAMFLAEVGDIQNFSSHKSLIAFAGMDPTVFQSGKFQGTSRISKRGNRHLRRIVYLMTIGVIRCNAFFKAYFLKRKQDGLPFRKAVMATAHKLIRVIFAMLSHKSHFHVKENSL

SEQ ID NO: 128497 - protein, 361 aa, unidentified
MAKSTTIVAFDQHAATTVAAVLLPGQRTPALHTLTSDSPTILRFVQRLRATSVECCYEAGPCGFELQRALTGHDIRCDVIAPALIPRRAGDRVKTDRRDASQLAVLYRAGALTAIHIPSEQEEAARDLLRCREDIRADLLRARHRLSKFLLRHGRRFTGTKKAWTTRHTAWLQAQRWPIPALEQTHLAYMRAVDDAVGRLHAVDTELRDLLTIEPLRARVERLRCFRGIDDLTALTIAVELGDARRFPSAPRVMAFTGLVPSEYSSGAKQARGRITKTGNAHLRRVLVESAWQYRHHPFLGRALRLRQRGAPTAIIEQAWHAQHRLHRRYRRLAARGKAKPHIVTAVARELSGFLWAALTH

SEQ ID NO: 128498 - protein, 344 aa, unidentified
MIYVGMDIHKKTTTFCAVDEAGQVIRRGTVSSGEAGWLGIMGHWSRGEAAVALETGSMTWWVVDVLREAGIEPVVVDARQFKMIADSKKKSDRHDARALADGLRGGLAERIAVNVPREKARRARSLMQTRQQILKQRNMTVNAAKAMLRSVGVEMKKAQWPKDAHWEKVLENPAVPIWMKPFLITHRSIWDHLEQQRQDLDALVNEELSHWLEAQLLLEMPGFGPIVTMGILSGIDDVKRFRRSNQLASYAGLIPSSRDSGAVQRRGGITHQGRSLMRYFAVQAAWSAMRSKSLTPSLRKWARRLIVKRGRKVAAVALARRLLVLAHKLLTTGEVYNPTYPVVA

SEQ ID NO: 128499 - protein, 369 aa, unidentified
MDYKIGCDAHKHYSQFAVLDQDGRLLAQHRVEHQPGAIQAFLENLPEGSPVALESVGNWYWIADEIEAAGCVPLLTHAAKAKLMMGNVNKTDKLDAKGLAKLLHLDSLPTVWLPPGEIRDERELHRTRMALSKLRTALKNRIHATLAKYGITTSEHSDIFVGAGRAWLETALSRLPPETGRCVAQELEALDALQHQIAQLEKRIRERVALTPSIQLLKSLPGIGDILAIVIEREIGSIDRFGTAGQLASYAGVVPTVHASGGKTHFGHMRKPSNQYLKWAFIEAANVVVRHRHHPAWRTKYVSRVYDQVCRRKGHAVAVGAVARHLAEASFWVLRRQQPYRPPAVRQVSPKQVQGRAQHVPTEVRELIA

SEQ ID NO: 128500 - protein, 342 aa, unidentified
MQISTIGLDIAKNVFQVHGIDATERVVVRKQLRRSQVLAFFKALQPCLVGMEACATAHYWARELTKLGHRVRLMPAKDVKAYVKRNKNDAADAEAICEAVRRPTMRFVQVKSVEQQGQLMLHRTRDLLMRQRTQVINALRAHMAELGITAAQGREGIKELLKIIAREQDARLPVDAHASLVVLAAELQAVQTMIGSIEKRIIVQHRSNEASKRLKTIPGIGILGATAIAATVADPKVFRSGRDFAAWIGIVPREDSTGGKQKLGPISKQGDRYLRRILVIGAHAVLKQVRQRPEKYPWLTELLARKPFKVVAVALANKMARIAWALLAKGGTYRAPALTVAA

SEQ ID NO: 128501 - protein, 351 aa, unidentified
MDKDNKLDFTGQHIYVGMDIHKKRWSASIHTEHFDHKTFTQPPEVKKLAYYLQRNFPGATYHSVYEAGFSGFWIHDQLTQEGIHSMVVNPADVPTKHKEKTGKADKVDCRKLARSLRSGDIKGIYIPSRVQAEDRHLIRTRQSMVRKQTRCKNQIKAILFFYGILIPEEGQWSRNFINRLDAVRMEKASGDITLKVHLEELKHLRQIIAGLNKAILALSRADAYRDKVLLLRSVPGISALTAMTLLTELYDISRFSSLDRLASYTGLIPDIKSSGETEYTTGITYRRNPVLRAVLIEASWVAVRKDPALIMAFHKFSLRMKKTVAIVSSHKIYFALSKNIQWRTIRRNSDS

SEQ ID NO: 128502 - protein, 375 aa, unidentified
MREKLRFLGMDVHAETIAAAIAEPDGEVRSLGTIPNRMESVRKLLKKLGPVEKLRVCYEAGPTGYVLYWQLAELGVQCEVIAPSLVPVKAGDRVKTDRRDAEKLARSYRSGDLTAVWVPDAGSEALRDLVRAREAAKQDELRARHRLGKFLLRSGHRPPPGVRAWTHLHLIWVSQIRFTQMAQESTRLDYLHEVEHMRERVLRLEQAIVEAVKLASPALQEVIQDLQALRGIAHISAVTIAAELGQISRFEGARQLMGYCGVVPSEDSSGKRTRRGSITKTGNAHLRRIVVEAAWSYHRPPAIWAGLRKRQQSVSEEAKEIAWKAQHRLHKRYARLAAQGKDKRKIVTAVGRELLGFIWAIGTRAEATARQRIAA

SEQ ID NO: 128503 - protein, 309 aa, unidentified
MEHFAGIDVAKDRLDVHLRPSGETFAVARDGEGLAQLVDRLQTLAPQLVVMEATGGYETIVASAVVAARLPLAVVNPRQIRDFARATGKLAKTDRIDAAAIAHFAEAVRPPARPIADAEARALGELVTRRRQVIEMMVAERNRRRRVTQSRVLRAIDRHLELLQTELSELEQDIDGAIRKSPAWQANADLLASVPGVGKATLRTLIAELPELGRLDRRKIAALVGVAPINRDSGTMRGRRSIAGGRPTVRTALFMAALVASRANPIIAPYYVKLRAAGKTGKQALTACMRKLIVILNAILRDRKPWQPA

SEQ ID NO: 128504 - protein, 379 aa, unidentified
MTTSSTTQTQSLFMALELSNKKWKLAFSNRQRIRQVTLAAAGSQALREALALAKQRLGLPSDAPVRSCYEAGRDGFWVHRLLQSLGVDNVVVDPASIEVPRRARRAKTDRLDAEKLVRMLMRYAGGESTLWRVVRVPTAQQEDQRRPHRELDRLTGERTAHRARVRSLLALHGVAVAWKPQGKLAVESLRDWEGQPLPEQLRAELERELARLELLQQQMAVLEKQQQQRLREPQTAAERQAAALVKLRAIGPVSGRLLSEEFFGWRQFKNRREVGSLSGLTGTPYASGEMAREQGISKAGNKRVRWLMIELAWSWLFYQSQSELSRWYRRRFGTGNARQRRIGIVALARKLLVALWKYLERGELPAGAQLKKGAVLAAA

SEQ ID NO: 128505 - protein, 340 aa, unidentified
MSTVADTYKYVIGVDTHAKTHTYAVIDTASFPTTDAGTARAIAWIERRSDGQQLAAVEGTGSYGATVTRALTTAGIRVCEVKPPKRQARDGHGKTDQIDAVAAARTALGTDATALILPRADGLRSALRVLLVARHSIDSQRTSDRDALNALLRIINLGLDVRAPLTNTQVDIIAAWRDRSSDDTAAAVARSEARRLASAIHQRTRELETNHAALSKHVDELAPGIQDIPGVGPFTAAIILTAYSHQGRVRSEAAFAALAGVSPIPASSGNTTRHRLNRHGDRQLNRALHIIARCRMITDPTTKSYVDRRTAEGKTRREIHRCLKRFIARSIYRSLATLTA

SEQ ID NO: 128506 - protein, 317 aa, unidentified
MTASDIFVGIDISKSRLDVAISPGNQTFNCPNNEAGIQQLVRRLQKFNPKIILLEATGGYEFLIVAALREAELPACFINPRLVRSFARGAGIAAKTDRLDAKVLALFASRMRPQPRPLPEASQQELKHLMTRRRQLLDMIQMEKNRLDPTPSPRIAQSIQQTIMSLEDQLAALNREIDDFFHQHPHWLELAKTLTSVLGIGHLSALMLIAFLPELGRLNRKEIAALVGVAPFNRDSGQWRGQRHIEGGRSRLRHALYMATLVATRFNPVIQAYYQRLVSTGKAKKVAIIACMRKLLTILNAMVRKQQPWCPNAPITP

SEQ ID NO: 128507 - protein, 422 aa, unidentified
MLEETHDRDQIIQRVAALDVGKAELTCCVRVPGQGSSGRRLQEITAYQTMTRWLLAMADRLAELGVTRVVMEATSDYWKGVYYLLEAAGFEVWLVNARDVKHLPGRPKTDTLDAVWLCKLAERQMLRPSFVPPPAIRQLRDVARYRADLVAARTAEKQRVEKLLEDAQIKLSVVASDIFGVSGRAMLAALLAGERDPKVLAQLARTRLRAKLGPLAEAFTGFFTDQHAFLLAKMLARVDALDADLADLDAKLAELIAPFADAVDRLDEIPGIGQLAAQLLVAELGLDMTRFPTAGHLVSWAKFAPGVSESAGKRKGSGSTGHGNPYLARVLGEAAVAASKTDTFLGERYRRIARRRGKRRAIVAVGRSILVIVWHLLADPTARFQDLGAGFYDTRINAERAKRNHIRQLEALGYKVTLQPAA

SEQ ID NO: 128508 - protein, 405 aa, unidentified
MFYAGIDIAKHQHEICVLDQQGNSVLQMHFKNTHKGLETLVKALDNLEVETDDIWFCLEATGHYWLALFSQLEQLGYQLHVINPIQSDALRNLYVRKTKTDAKDALLLADMMRLGYTTETKLAQEATLKLQTLSRSRLDFVRQVGSLKNQVIGVLDRIFPEYASCFSNVFIKTSKELLKKHPEPEELAGVDLTELSQFLNEHSRGRLGQERAEQIQTLAKGTFGIRLAMDAFTLQLRLLLEQIEFIEDQISIIEEAIDQVMEELRPQDAEYRHVLETIPGIGPTLAAAIIGEIGDINRFPNAKALVAYAGLDASVKSSGQFEGNKNRMSKRGSPVLRYSLWMAAVSAKRFNQELKEFYELKRSQGKHSNVATGAVARRLTHLIYSLWKNNRPFEPDHQWSPPGKT

SEQ ID NO: 128509 - protein, 473 aa, unidentified
MGTQKAFSNSTLFNGLPPQKVLFCIIDIGKNVHTFSFLTASGQTICPPTKTLTNLQGFNSFSSSLQKAIRQTSPDLVIFAYEASGIYHLPWQDALFARFLDHFNSQAHPTFQIRLLQPSQVKASRQARSPRKRKTDPIDIHAMSDLLAKNLGNPITPPSTTSLLLQQSVANLRYYTQQLASLSISILRTIDRLWPGALINIPRFQRAHPELSPPEPLVRSKPLQRQTLRLLIQHCPNPYHIRQLGPQGIRELFHSHNLRCGPKRANHIYQLAINSLLPPEPLAESLASFLQTQFRLYLEVEQAIALTEQTLAQIIPSSPAKHLLTMPGISTVLAARYLALVGFPLRFETPQQAWALAGMDQEVYITGDKVYLGPITRRGNPYHRDTLFKMGFQVALHCPAIGLTYVNALKRGKGEVGATIHTANRVHRIAFALLRKQEDFRPPPISPAKARYVKEQMRRRKAHRSQKVKARQG

SEQ ID NO: 128510 - protein, 431 aa, unidentified
MSERDYNKQVAKRQRIRSTTLVVGVDVGKAYNAVGFMNKEGKVLGSCAKVYNSREGFEQFMKMVEDLKARYGLKDVLIGMEPTGHYWRKLAYFAKGHGYEVRFVRTTALKHHRELNESASAKSDPRDALTIANITREGKYIDTVIEDGPLRQLRTLSKARERLLRYSVSAKNSLHAALDDYFPELHELFWSMGSRSLWAILDRCPFPEDVRLVEVSMLKGLMVKSSRKKAGAVQKAEALYQAATKSIGLRPIGSADRYRVQLCLEEVKRTVLTLKSMDQQMKNMLKEIPAAPYLLSIPGIGALSAAVFLGELGDPGHFHNARQIVKYAGYDPQESDSGSWVSRKFISKKGRWLMRKYLFFMSMRVVVLTHYFKTYYERKLETKNRVGQLPRRKEMLCAVAIKLIKVIFALLRDKRRFDDTRGTVMALSQAA

SEQ ID NO: 128511 - protein, 338 aa, unidentified
MNKYIGMDAHSSNCVFNVVDKDGTEVDQAEIATNGLLLKDYIRSIKGVKKLVFEECELSAWLFETLHGEVDELIVCNPTRNQQYKKAKTDKLDAKNLARLLRGGFLTPVYHDGSKTEHLRALMSGYQDIVDTGVSVKNRYKSLFRKAGLPARGAKLYDDSSLLEDLPRPDQRFVGRSFYRLLETLEKEREQYVAAIKGLSRSFPEIKLLKTIPGIGDIQASKIVSQVISAERFKDKHKFWSYCGLVRYRMESGGRLYGSSRGWGNRILKCVFKMAAKSVLTGENELRAYYDELRAKGTSDRSARNAVSRKLAAISLSVLKTKRPYDETRILQGAEQAR

SEQ ID NO: 128512 - protein, 391 aa, unidentified
MSLYFVGIDISKYKHDCCIISATNQKVISKFTIKNDKAGFEELITTFNSLSNPEDIRIGFESTAHYALNLELFLENANHSFMEVNPVLIKEYKKSTTLRRTKTDSVDCESIARWLMTVEYKPHSKGFYHAYSLKSLTRLRDRLVRQRSFYLVKITNVLDLTFPEFKPFFNGRLSKTALYLLENYGSAEKMARMNSVSYEKLRSISRGKFSIQQFLALKELAANTVGVNNSIFDVELNSLLTLYKTLVAEIDTLEKEINRLIEEVRPHYLSVPGIGSISAAIIYSEYGDISNFDNPGQMLAFAGIEPGINDSGTESHGGRMVKRGSSQLRYALINCCLPLIRFDMTFATYYAKKRAEGKPHRVAITHVAKKLIRVIYALERQDTDFCVQKLR

SEQ ID NO: 128513 - protein, 315 aa, unidentified
MSDVPCFVGIDVAKAQLDIAVRPSGERWVVSNDAGGVVTLVERLQALHPTLIVLEATGGLERAATVALATAGLPVVVVNPRQARDFARATGQLAKTDALDARALAHFADVIRPTPRPLPDAQTQELRALLGRRQQLVVMRTAEQNRLAGTSERLTKDIVAHITWLNAAIATLDNDLETILRASPLWRENDDLLQSAKGIGPVCARTLLLELPELGTLTRQQIAALVGVAPLNCDSGTLRGRRMIWGGRAHVRTVLYMGTLVATRFNPQIKVFYARLLAAGKVKKVALTACMHKLLTILNAMLKHRTPWQPQEVQS

SEQ ID NO: 128514 - protein, 359 aa, unidentified
MASIATFVGLDYHQDSVQVCVLNAQGNSLTNRSVENDAAVVARVTTEHGRPERVAIEACCGAADLAEELVTRYQLPVQLAHPGYVARLKRSPDKTDLGDAQLLADLVRVNYLPKVWLAPESIRELRRLVRHRTQLVRRRTDIKLRLRALLRENRLRCEDARSWTKAWLAWLARVAELSASDRWLVDDHLAELQSLSERIKQTEKRIEEMVAVDPVVLQLMTLPNVGLVTAVTLRAEIGRFERFDTGKQLARFCGVTPRNASSGARQADAGLIRAGNPAVRRVLIELAHRLIRVGDAHWGQFAADMLQRGKPRNVVVAAVANRWVRRLHHELRKPPSPELTSARARQKGSAPSVFTAAST

SEQ ID NO: 128515 - protein, 436 aa, unidentified
MEEVTDEPLYRDRAGGIDIGKAEMHATIRVPSDKDPARRASETRSFATTRRGVLALADWLRSWQVPAVVMEATSTYWMGPFFRLEAEGFECVLADARQVKNLPGRPKRDPSDSSWLAQCFERGAVRPCFVATKEFRVIRLHTRYRRDLINERSREKNRAEKLLETAAIKLSSVITDLHGVTGRDIMEHLIAGERDPKVLAQLARTRARAKITELQHALEGAEFFTGHHARLLKTMLERIGQIDAQISGLTAVIEELLAPYEEQLAQAESMPGWGRRSAEDAVAETGADMTRFATAGHLVSWAGRAPLDHQSGKRKGQARHKKGNTYLGGVLGETAVCAGRTQTREGARYRKLARSRGKNKACVAVGNTQLKVYHQLLSNPGMRYRDLGPDYYQRRAQNRRKIGYHVRELEALGLEVTLCRIPGPDPGPGQAATPAA

SEQ ID NO: 128516 - protein, 387 aa, unidentified
MAQVNDLSRSLTAFDPISTLVVVVEMSKASWLVSGVVPGIERQPLKKLEPDATALLRLIERWRNEAMRSGRPISRITLAYEAGRDGFWLARWLITRGIEAHVIHSASVAVSRERKRAKTDRLDAAMLMRVFLGWLRGERGHCGMVVIPTMEEEAGRRPSRERESLVNERSRITNRMKSALARLGIRGFKPHLRKAPERLAGLRTAEGTGLPANVIEEFRRDMARLALVREQISSIEKTRAERLERAPDTGPHAMVRLLARVIGIGIETADMLVREILSRRLRDRRAVARYAGLTGSPDESGLKRREKGLAKAGNARVRRGLIQLAWRFLMFQKDSALARWYRTRTEGPSGARKTTMIVALARKLLIALWRLVTTGEVPDGVELRPAA

SEQ ID NO: 128517 - protein, 320 aa, unidentified
MGQNKKIDFSNQDIYIGLDVHKKNWTTSIFTKEFEHKTFSQDPDPDILVNHLHRNFPGANYHAVYEAGYCGFWIHDELKARGIDCIVTNPADVPTKDKERKRKNNQVDAIKLARSLRSNELDAIYIPSREALEDRSLLRSRRNAVKEQTRYKNRIKAMLSIYGIRIPEQFKEGGWSGYFIKWLESICFNKHTGKKTFQFYIDELKHCRKKVAYLNKEIRLLALEDRYRDKVKYLKTIPGIGRLTAMILLTELVDFNRFKTLDHLASYIGLVPGEHSSGEDDDENFTSITARSNRYLRSILVECAWVAVRKDPALALCYKN

SEQ ID NO: 128518 - protein, 341 aa, unidentified
MQITTIGLDIAKNVFQVHGIDAAERVVVRKQLRRGQVIKFFEALAPCLIGMEACATAHHWARELTKLGHQVRLMPAKDVKAYVKRNKNDAADAEAICEAVRRPTMRFVVVKSPEQQGRLMQHRVRDLLMRQRTQLINALRAHLAELGIAAAQGREGVKELLAIVAQNGDSHLPVDAHASLIVLAAQLQAVQTMIGSIEKRVVRQHRSNEESKRLETIPGIGVIGATAIAATIPDPKVFRSGRDFAAWIGLVPREDSTGGKQKLGPISKQGDRYLRRILVVGACAVLKQARQQPEKYPWLTQLLARRPFKVVAVALANKMARVAWALLAKGGTYRAPRLKAA

SEQ ID NO: 128519 - protein, 343 aa, unidentified
MQVVRIGLDLAKYVFAVHGVDARGKVVLRKTLRRDSVSCFFANLPPCLVGMEASNGAHYWARVLTDLGHQVRLISPQFVTPYVKSNKNDRNDAEAICEAVGRPSMRFVPPKSAEQLAVQAIHRIRRRLVSDRVRLVNQVRGLLAEHGIVIPRDITQFRRGLAQIIASCAGGLSELVRSLMRELQEELVELDRRIASYDRRIREIFRNSEPCQRLGKIEGIGPITATALIAAVGDRTCFKNGRQFAAWLGLVPKQRSSGGRARLFGISKRGDRYIRTLMIHGARAVLGRARGKQDPRSLWLGKLRQRRHPNVAAVALANKNARIVWAMLSGDTAYEPALSVKAA

SEQ ID NO: 128520 - protein, 407 aa, unidentified
MGITCGIDWSESHHDVALIDEHGTVVARTRIDTGAIGFHILLALIAEHGGSVDDTPIALETDKNLLVVALAKAGFTVYPINPRAVARYRERYGQAGGKSDPGDAAVLAHILRTDRHLHRPLPAVSEEGRAVKALARQHQEAIWALHQTVSRLRSVLLEFYPQALQAFPNLKHKAALTVLADAPTPAAGQRLTRGRVVALLRRSGRGNHPALVEQILTDLHTPAIGQPPRVEEAYGHTVRGLVAIVIAMGQAVDDLETELAREFDQHPQAAILRSVPGLGPVLAARVLGEIGDDPARFDNPQGLRAYAGTAPVTIASGRLRYVKARKVRNKRFGDACHWWAYTMLTKSAGARAHYDRRRAAGDHHNAALRNLANKLLGRLWWCLVNNQPWDEHGAWPDHGHTENPTAA

SEQ ID NO: 128521 - protein, 349 aa, unidentified
MQHVAVDLGSRESQVCIRNPTGEILLERKVRTQKIPGFLANQPHSRVIIETSAEAFLIADAALEHGHEVRVVPATLVKTLGVGERRQKSDQRDARKLSEVSTRIDLPSVHIPSEGSRQRKALCNSRKNLLEARTKLTNYVRGQLRLQALIVPGRASSNAFPANVRQALLAHTDGMPVHLDRVLQSIEALNEQLDALDEELLAVAKQDSVCQRLMTVPGVGPVIAVRFVAVVDQPERFPSAHHLMSYLGLTPGENSSSLRVQHIGITKAGATDLRAVLIQGAWSILRHRRTTDPMGIWANALAERRNRFVAVTALARKLVGILWAIWTQGTTYQANQSAADNSERDVAPM

SEQ ID NO: 128522 - protein, 416 aa, unidentified
MRVHRNCCGLDVHKQTIAACLISENEDGTSSRQKRIFGTMTQQLRELAQWMAEAKVTAVAMEATGIYWVPVWNVLEPHGFELLLINPEHYKAVRGKKTDLKDGTRIAELLRDGRLAGSYVPPVAIRVLRDLTRYRTKLVQYQSSIANRIQRLLEQCNVKLASVASDVLGVSGQAMLRALAAGETNPQRMADLAKRQLRKKIPALQLALEGCLLPHHRFLLADMLEELDHIGSKIARMEQAIEEQMRPYQKAVDAWMTVPGVKQRLAWNLVAEVGPTVDAFPSAADLVSWAGICPGNNETAGKRKSGTTRNGNRWARKALCEAAWAASKTKATYLQAQFRRLAAIRGSNRAIIAVASTILTIGYHMLKEGTTYRELGGNYFDKRNLLRTTRRLVKRLQALGHTVILEPTQSPFQSSD

SEQ ID NO: 128523 - protein, 332 aa, unidentified
MENFYFIGVDVLKKKLDFCVMFEGKVVHEEETSNHQGAIMSLLHHLEEDYGIASGQMLVCAEHTGQYTFPLACACKAVECRLWLENAAEIKYSSGVQRGKSDKVDAKRIAIYASRFQDKVRYYERPTEDIERLKQLESERTLYVTDFAKYKGQMKDQKEYMPKSLYERKMKRLQALMDDLEEAIQSITDEMDEVIASCPVLFRQRELLMSIDGVGRVVATNMIIATEAFTRFDDPRKFNCYAGVAPFSYSSGSSQHSKARVSHRADKVMKRLLHLAAVAVTHRIGGELKKYYERKVAEGKNKMSVINALRAKIVARMFAVIKRNERYKPILS

SEQ ID NO: 128524 - protein, 353 aa, unidentified
MDNDKYVALDVHKASIVYAIRDASGKIISTGVIETKAQTVRDFVRGLSGTIHLTFEEGTQSAWLYDLLKPLVAECIVCDPRRNKLLESGSKSDDIDVAKLSELLYLKRLRAVYHGHEGTRALKELAHNYDALVKDSTRVKNRLKAIFRGRGISYEGDELYDCQEQQVWLAKLNECGSRERARQLYEQLVQLQAWVSAARQQMVRESRKHKSRKVLQQISTLGEISVAQLIATVDTPFRFRSKRQFWTYCGLAVVRHTSADYLFEQGELRRRVKPGPTRGLNHNYNRRLKKVFKTAAQTGSRKGPFKPFYDRLLARGLNPELAQVTLARKIAAVTLSLWKKGESFDRKKLGKPA

SEQ ID NO: 128525 - protein, 362 aa, unidentified
MRIIGCDLHARQQTLAMLDTATGEAVNVILTHEGNNVREGYSTLPGPVRVGIEATGSMKWFLHLMAELGINCEVGHPAMIRAAEPRRQKHDQRDAELLLKLLVENRFPSIWQPSQELLDLRGLLLHRHQWVRLRTRIQNALQAIALANGLRRGSSLWSESGQEAIASLPLATHTAHRRSELQAMYARFEAEIEQLNQQVLEQAGQRPTAGLLMTHPGVGPITALATDVFLGDPKRFSNGKALASYIGIIPREHSSGGRQRLGGLSKQCNPLLRFLWCEAAAHAVRRDPELQRFYRRKLVQKGLGKARVAAARKLGIRLWIMLRDQIDYQEFCRRGQMQQKSGDACAGMPGRRYGAKSHRLID

SEQ ID NO: 128526 - protein, 300 aa, unidentified
MSKGKLDVCAEGGGAFVVKNCASSIRQTLRRLAEEHGDIHVCFESTGVYGRALLEVCLERGVKAGQLNAKRVRKWAEGVGMNAKTDAIDARVICRHGRETDPRPATPAAPWRRELRELRDMRLVWVDGKVRLQGHLEQASSKLAAKELRREIARLEGKIAKLDARMAELFKASGPSVYARMASAKCVGAATACLVVAAMPEIGTLGAKRAAMLAGVAPHTRQSGEAEMPGRIGGGRMAARNALYMSAVSGIRHNPVFGAVYRGLVAKGKPPRVAITAVMRKLMELLERIAADPGFTPIQF

SEQ ID NO: 128527 - protein, 350 aa, unidentified
MIVLGADTHESSHTIAAVDTSTGQVLGYKTVAVGARGFAALVLWARGLDGERVWALEDCRHVSGALERFLICRGERVVRVSTRLMAGTRRSSRERGKSDQIDAVSVARAALAAGIETLPTAALAGPELDIRLLVDHRERLVRTRVALNNTLQWNLHDLWPELTLPGGALFSKKWTTKIARRLARAEQTMRVRIARDELRRMRELTQAIKALQAEITVLVTEIAPQLVAEPGCGPLTAAKLVGEIAGAERFTSDAKLARAAGIAPIPASSGRTDRHRLDRGGNRQINAAIHRMAVTRARCDPETQDYIARKKTEGKTQRDAIRCLKRHLARRIWHLLHPPPPTETSLNLLT

SEQ ID NO: 128528 - protein, 338 aa, unidentified
MKTYAGIDLHSSNNYIGVIDSQARRLYTKRHDNRLDCILRALNPFKKTLAGVVVESTYNWYWVVDGLQDNGYTVHLANPAAIQQYEGLKFTDDKWDALWLANMLRLNILPEGYIYPKEDRAVRDLLRRRMMFVGQRTAQILSLQSMITRNRGLNFSGAVVKNIMDFFVDKLFDSPHLRFTAKKNLAVIRFLDSAIKEIEAEVKSQAKLKKEFEMLLTMTGVGDILGMTIMMEVGDISRFEAVGNYSSYCRCVESKRLSNGKLKGKNNKKNGNKYLSWAYIEAANFSRRFCPMAKKFYQRKLAKSNKVLATKALANKLSKASYFIMRDQVPYDPEKLFK

SEQ ID NO: 128529 - protein, 318 aa, unidentified
MKITAIGIDIAKEHLDIAVRPTGETWRLAHTPDQFPALIERCQSLAPERIVLEATGGLEVLLATQLAAAGLPVVVINPRQARDFAKATGQLAKTDSVDAGVLAHFGEALQPPVRPLPDEQTRALEALLTRRRQLVEMLVAEKNRQVALARQPKVQKGVAEHIAWLKERITELDDELKDRLEQSPIFCRHDRLLQSVPSIGNVTSRTLLACLPELGRLTHKQIGALVGVVPFARQSGQWQGAAHIRGGRIEVRTALYMATLSAVRYNPTIKTFYQRLLAKGKKKKVALTACMHKLLTILNAIIRHQEEWKAPQKSAATP

SEQ ID NO: 128530 - protein, 336 aa, unidentified
MSESKQKLSLGIDVSKQTLDLYWQGQEFKITNDLNALTTFIEKELKKEEHHRILCVMESTGGYERLASKTFKTAGVPVYIAHPNRVNAFAKVCGHFAKTDKLDAKLLHRYAEFISPEEAGSLAMDPEQENILALRRLARTLEENLHAAQCRIKQMPTLCQSYLTEEITYYKKQLKALQEDIDTRINKDARLTLKKEQMLSLTGIGDKIASVFLTELPELGHCSRRQIAALVGVAPRTHESGQKTGKARIMGGRFYARKALYMVALVASRHDPKLKVIYQNMLAKGKAKKVALVALMRKIIVILNGMLKTGALFNPEKMQSTGSHGDENKIMLPQAA

SEQ ID NO: 128531 - protein, 350 aa, unidentified
MTMLADHADFVIGVDTHKSSHTAVVLSAAGARLSELSVAATGRGYKQLLTFAREHVGRRVWALEGSGSYGAGLATHLLRQGERVVEIDRPKRPAKRNGSKSDLLDAERAAREVFAREHLAQPRLRGDREAMSVLVSTRQGAVAARTSAINHLKDLVVKAPEELRQELRPLATMDLIRQCASMRTSSSRATECRATVMAMRSAARRILALGAEADELEAELEHIVARVAPQLLAEAGVGAVTAAQILCAWSHHGRVRSEAAFASLAGAAPIPASSGQTVRYRLNRGGDRQLNRALHTVALSRLACDPQTQAYAARRTEEGKTPREIKRCLKRHLARHFYKLLESGSADLAA

SEQ ID NO: 128532 - protein, 398 aa, unidentified
MINGHDEIAVFLGLDVGKSGHHAVAQDRSGKKLLDRALPNDEAKLRELYGRMKAHGPVLLVVDQQATIGALPVAVALDEGVTVAYLPGLAMRRIADLHPGSAKTDARDARVIADAARTMPHTLRALKVDDETIAELTVLSGFDDDLAGQITATSNRIRGLLTQIHPALERVLGPHMDHPAVLNLIETWPTPAALTTAGKTRVRTRLLKKAPRLGGRLTEEIFTALAAQTVVVTGTNAAGIVLPRLATQLAALRQQRAEVAEQVEELVAAHPLSKVLTTMPGVGVRTCARILTEVVGKDFPTAGHLASYAGLAPVTRRSGTSIRGEHPPRGGNKILKRALFLSAFAALSDPVSRTYYDRKRTQQKKHNAALIALARRRTDVLYAMLRDNKPYAQPAAAA

SEQ ID NO: 128533 - protein, 428 aa, unidentified
MNSIESIRLKQFRQLRKEIRGSKDHLIVGIDVAKDNHKGFFGTARGKTLLKRLVFENTIEGFERLLIQTDALKVQHGLKKTIFGLEPTANYHKPLGEFLIKGSYEVVLVSGVAVKRNRELLDGRWDKHDTKDSANVADLISQGKCLFYDYPSLQLRELRSLVSLKRRLKKQEHGIKTRIRNHLLAHYFPELDRYYGQSESDALSIVRWCVNPSVIAGMDYGQFTQLVAPRTRGIAQQKRLTAIWEKAVHSIGCEAGEALEFEATVLEKGLQRIRESIHATEQKIEEICLQFPEYRYLLTIPGFGPDVSSKLLSAIGNPFRFTTGAQVLKMAGFDLSANRSGKTTDSATPVLSKKGKAYLRYALYQAALIASIRNKHFIAYYTHTLQGREKEKGIKTKMRVKLAAKLLIIAWTLMKKKEPFNPEYLTTE

SEQ ID NO: 128534 - protein, 370 aa, unidentified
MQTVRSFVGMDVHKETISISVAEDGRNGPVRFLGVIPNAADDVAKMAKRLSKHGKLDFCYEASGCGYGIHRQLTALGHKCIVVAPSMIPRKPGERIKTDRRDSEKLAILHRSGDLTPVWVPDTTHEALRDLVRARVDASMHLMRARQQLLAFLLRHGRSYPTGKHWTQRHRSWLAGQTFQEYAHGIVFQDYLETVWTAQQRRDALIERISAMVGSWSLGPLVEALRGLRGIDMISAATFIASTGDLSRFESPRLLMGYLGLVPSEHSSGGTIRRGGITKTGNREARRMLIEAAWSYQYPARIAKEKAEILVRLPKNIRDISWKAQTRLCTRYRSMVARGKKPTVVVAAIARELAGFIWAIGQEMRTQMTT

SEQ ID NO: 128535 - protein, 325 aa, unidentified
MPLWVGLDVHKQSCHATVLDERGEVVLQKRVPNEPEVLEELFGELKPVGVAMEATYAWEPVYELLERMGLEVHLAHPTKTRVIADARLKTDVRDSEALARLLQLNWLPEAYVPPREVRELRRLVRLRAYLVRKRTSAANRLRAELVRLGLKAVGNPFSKEWREVLKGASRTAREALELYELLTLKIRRLEAEIEREASGNPQARLLMTIPGVGAYSALTILAEIGDISRFRSPEHLCAYAGLVPSLHQSGSTVRLGPITKEGSRRLRWILIQCAWMHLHHGESRLTEFFWRVARRKGRKRAIVAMARKLLVAVYWMLVRGEPFKG

SEQ ID NO: 128536 - protein, 416 aa, unidentified
MKIVRPICCGMDVHKNIIVATIGITNKKTRITEYIQETFSTLNHDLLNLKQWLINHKCFDACMESTGKYWIPIFNILEDEINIYLTHPKYVKAIKGKKTDKKDSKWICDLFKHDLIKFSFIPPKEIRALREISRYRYKLVGMRSSERNRYQNCMTVSNIGIGSVFSDPFGKSAQAIMKEVLESDIIEDEKILKCIHGSCKNKDKILDSIKHCNIETDQRFKMNESMTHMEELQVHIDNCEIEMMKRAAPMFDQFMHITQLPGISTLSAILIISEIGVDMKQFESDKQLTCWAGLAPANNESANKKKSVRISKAGQYLKPLLVQCALGAIKDKDGYFGIKYSRIKKRRGHKKAIIAIARMMLVSIYHMILTGETFNPSDYESFRNPNPPIKQQVLTEESAIEFLKKSGFDVSKLTKP

SEQ ID NO: 128537 - protein, 395 aa, unidentified
MKRPCIALDVSKGSSHYQGWINEDKKCGNPKKIEHNQEGFQEIITKAKELEGITNEKTIIVFEATGVYHRTLQCFLDENDMEYIIVSPLASAKVRKSNIRSTKTDKKDCKNIAKVYFEKDFKIHSKSDEIYDKMLDLNRYYQYLTTQLKKIKVQFRLILDIVFPNIDKLWSRLYSDVPMALLKKYSHPNQLKSKNPETLAKYLMKETCHHYNEAIKEANEIIEYCKTCCSECSETSANCKVLKDLIIQLNEKIQEQDNCLNQIIDLAKDLPNYELLLSIPGISNNLASRILAELGDINRFSRIRQITAYAGLDPHINQSGGNDGLHLKITKKGNKNLRCLLYLAIQNTLQQENKVSEFYHKKIAAGMNPKAAKIACMNKLLRIIYSMCNNGCAYQ

SEQ ID NO: 128538 - protein, 344 aa, unidentified
MKRYKYFIGIDVSKLTLDFAIMNVEQLIYHKKIANDDTAIASMLVELKEINGFKLSNSVFGMEHTGIYSNKILSILERKKANIVYENPTHIKNSLGNLRGKNDKLDSIRIATYLKKLKDDLRLWQGKRKIIQELASLVALRDRLARTKRALKTPLKEDHLFISTKFAAQNEKFSSRTIDALEADINLLDHTIKLLCFSDPKVKRMMDIITSIPCIGHFTALQMIITSNEFETISSPKQFAAYAGLAPYPKQSGTGLQSRSRVSNIANKKMKTLLHTCAMLSNRFVPEMQAYFKRKTEIEGKPKMLVFNAIRSKLVLRVFSCIKQNRLYTKDYDYNSEKLTQEIT

SEQ ID NO: 128539 - protein, 346 aa, unidentified
MMIIGCDFHPSWQQIAWLDTATGETEEQKLVHASGEAKKFYRQLAAPVLIGMEATGNSQWFVELAEDLGHEIWVGDAAQIRASYVRKQKTDKRDAAHILKLMVEGRFPRLWTPDREQRDLRQLVVHRHKLVEIRSRVKNELQHLSLNKGMQKQNKLWSAAGQKLLRELPLKPWAACRREDLLGLLAMLNQQIGKLDAAVQHAADGHPQAQLLMTQPGVGPNTALAYVLTIGDVTRFPRGKQVASYLGLIPREHSSGGHQMLGSISKQGNRLLRSLLVEAAQIAVRFDPGMKKEYLHRCHQKPKGVAKVAAARKLAVRLYWMLRTQVAYPEIVRIESSPRVALVGAS

SEQ ID NO: 128540 - protein, 329 aa, unidentified
MEVPQIIGADISKKTIDFAFSLTEKNLRISNDEDGFKALSNWITEQGMDRSQLRVVMEHTGTYSYRFEQFLHSQSLPFAKSSALAIKRSLGLVRGKTDKQDAKRIARYGMEKADQLMLAQPVAQGLQRLQILYSTRERFVRHRASMKTAVKEMQEAFGFKDTDPLIASQRKIIKSFDQEIEKLEAQIDDIVKADKSMDQNYRLVQSIKGVGKVLALATIVKTQNFTRFTDARKFACFCGTAPFENTSGTSIKGRTRVSHLADKGMKTLLDLAAKSAIRYDPELKQYYCRRTAAGKPKMSTINVVRNKLLYRIFAVVKRQTPFEPFPIAA

SEQ ID NO: 128541 - protein, 449 aa, unidentified
MEPQEIEDEEHEQILERVAAVDVAKASGMVCTRVPDPARPGRRRTRVWQVDATTNAVLELADHLVAERIEKITLESTSDYWRIWFYLFEAAGLDVQLVRASDLRAAPGRPKTDKLDCVWQAKCTERGLLRPSFVPPAEIRVLRDYTRMRTDLTRERTRYYSRLEKLLEDALIKVSAVASKITAVSVRHMVEALIAGERDPQVLAGLARGRMKAKHDKLTEALTGRFDAHHGELAKMLLDQIDGLTQQIDTLTTRIEELIAQMPAAWGVDPDGTTGPGGGLAPGSPVLPAVSRLDEITGIGREAAQVLIAEIGLDMTQFPTPGHLVSWAKISPRTLQSGARSRSGRTGKGNPYAKGILGEAAAAAARTDTFLGQRYRRLVRRIGKLKALVAIARSILVIVWHLLADRSARYHDLGSDFYDARIDKTRKTRSHIQQLEALGYTVTLTPVAA

SEQ ID NO: 128542 - protein, 430 aa, unidentified
MEIIYPRACGVDVHKSFIVAVICISESIKPTYIKKRFSTFNNQLIQFRDWLIENNCQNVCMESTGKYYIPVYNALEGHIPNVVVANPKWVKAIKGEKDDNKDAKWIADLFKFGIVKSSYIPDKDIRILREFTRYQYKLVNIRSSEKNRFQNALTVGNCKLDLVFTDVFGKSASSIVDTILSDEPYTSEDILSKVHGKCKSSTEDILSAVEGTDLNHFQKERIKIVQKHMKQLDSLLDEVQHHIDMMVLAYEDYIQLLMTIPGVSRKSAIIIISELGIDVSQWSSARKLAAWAGLAPGRNESAGKKKSVKISKAGIYLKPCLVQVAHAAVKDKSCSYYAEKFGRISKRRGKKRAIIAIARKILVAIYHILKTGEVFNPSDMADVETTKEDRIAYITNNFRNAFNQLSRTGLSEEEILSIIIKKSDNSPQTE

SEQ ID NO: 128543 - protein, 372 aa, unidentified
MKYVGVDLHKQVIVLCVVVVVAGQRRVAARRKLACRDVAALAEFFGNLGPYQLAVEATSAYEWLLELVDPTADRVVLVHPRKMRIIAESRRKTDRLDAQILAEFLAAGELPEAWRPTPRVRAHRTLMRQWDFLRRKSSGLKCRLRNTLARYNADIPGLFTVAGREHVRQVPLSAADRFVADQVLADWEQGQTYRRALQAELRRFAAQAAVAEQEARAVLESMPCVGQITVEVVLSELGDVRRFRSQQAVVQYAGLAPGIRESAGHRKNLGITKEGSPLLRWTMIQLAWRLVNKCRRWSFIYENLKRHCGSKKAIVAVARRVLVVLYSMLRQGARYNLALDGLPPAKSPSKSRGRNQRPQVPPPNPHLLPSSL

SEQ ID NO: 128544 - protein, 343 aa, unidentified
MQSISTIGLDIAKSVFQVHGVDAAGQVVIRRQLKRRHVLSFFQKLPPCLVGIEACASSHHWSRGLQALGHTVRLMPPAYVKPYVKRQKNDSTDAEAICEAVTRPNMRFVPTKTVEQQSCLMLHRARHLFIRQQTAVINSIRAYLAEFGIVAPVGRRGVEQLLEVVADKADHRLPEVARACLAALGGQLRALKAQILEFDRRIIAWHRSSATSKRLDAIPGVGPALATALVASIADPKAFRSGRDFSAWVGLVPKQNSSGGKDKLGSISKQGDRYLRSLFTAGALAVIRYAKIHGTDHRPWLTRLLARRPTKVAAIALANKLARMAWAMMARNERYKEPAALAA

SEQ ID NO: 128545 - protein, 436 aa, unidentified
MEEAGDEPLFCERAAGIDIGKLLVSVTIRVPSDTRKGGRQQETREFGTTRRQLLEMADWLRCWGVTRAGMEATSDYWKPVYFLLEQQGLDLLLYQASQVKALPGRPKSDKLDSVWLARVTERGSLAGSFVPPEDIRRLRTHTRYRRKLTQARTAEKQRAEKLLEDAHLKLSGVISDIHGVSGRAMLEAVIAGERNPKTLADLARGVMRRKLALLEEALDCSFFTPEHAFVLQMMLGNIDHYTAQIAVLDERIAVLCEPYERQITQLDGIPGFGVTTAQDLIAEIGVDMTAFPTAGHLCSWARVAPRTKESGGRRKGKSATGRGNPYVGAALGEASASAGRTQTFLGAKLRRLARHMPKKKAQGAVMRTQLAIAHGLLADPAAAYRELGPGYYEQKAGTRHARGHVRSLERLGYKVTIEPLDRADPEADEVITRAAS

SEQ ID NO: 128546 - protein, 343 aa, unidentified
MKVKRVGVDLAKTVFQVHGVDGNEQPVWQRRLSRGGWVEAVTAKLVPGGEIGMEACAGAHHWARTFRSRGYRVKLIAPQFVKPYVKSNKHDVADAEAICEAMSRPSMRFVSVKSVEQQDIQAVHRVRAELVGQRTAKANQIRGLASEYGVVAPRELSHLRRAIPRWLENGENGLSERFRRLLDGLWSDLRRLDERVSELTAEIEANATTHPDAKRLQQLRGVGPIIATALVATMGDGAQFRRGRDFAVSLGLTPRQHSTGGKERLLGISKRGEPYLRSLLVHGERSALYAARNKDDRLSLWVKGIAARRHPNVAAVAWANKTARLAWAVVAQGSDYVPQRATA

SEQ ID NO: 128547 - protein, 355 aa, unidentified
MNQEKYIGMDVHQATISVAVMDSSGKLIMECILETKAATILEFLDGLRGSLSVTFEEGTSAAWLHDLLKPHVSRVVVCDPRKNALLKDGSKSDRIDARKLAELLRGNQLHPVYHGEHGVRTLKELARSYLTLTQDVSRVMTRIKALYRSWAIPCSGTTVYAPRYRAEWLAKIPQPGVRLRAERFYQQLDLLQPVRQEARRDLLSESRKHPAVKLLRQIPAIGPIRAAMLVALLQTPHRFRTKRQLWAYSGFAIETHDSGEYRYVQGKLRRNRERITVRGLNGNHNHDLKNLFKGAALSASTRPGPLYDFYGALLEKGMRPTMARLTLARKIAAITLTIWKKGVSFDAKKLHRQAA

SEQ ID NO: 128548 - protein, 478 aa, unidentified
MVTARAAGLNRKQRKELARRLRVEDPGLEVMHPHAAGIDVGNSAHYVAVRPDRDPNSVRRFECFTADLHRLADWLQQCGVTTVAMQSTGVYWIPLYEILDARGLEVYLVNARHTKNLPGRKSDVQESQWLLKLHTYGLLRNSFHPPTEIRVMRTYWRQRGDHVHAVSTCIQRMQKALTQMNIQLANVISDLSGWTGQRIVRAILAGERDPDKLAALSHPGIHATRDTIAKSLEGTWQPDLLFVLQQEVAMYDAYQERIAECDQALEQHLKGVGDKAAERAADGEPSPTTPRKGLRSGPKRRRKAGSHAPQFDLGRELHRISGVDLTRIDGIDVGVAQTVISEVGVDMTRWKTEAHFASWLGLCPDNRITGGKVIRKGTRHVVNRAATALRLAATTLLRSQSYLGAQYRRLRARLGAPKAITAMAHKLARLVYRMLQWGHEYVDKGLQYYEQRHREQQVQLLKKRAAKLGLQIVEPDAA

SEQ ID NO: 128549 - protein, 361 aa, unidentified
MKTQPTAQPKLYIGMDIHKKSWSVHLRTDISDHKTLTIPSNCDVLYDYVEKHFHGHEVSLTYEAGCCGFSASRHFINLGWNVLVVNPADVPRMDKQNYQKTDKIDCRNLAKQLHGGQLKGIYIPDEAQDLLKSLLRQRAETSKQLRAIKSNIKGLLLYHGIEIPEEFDNPNWTKAFLEWLQQISWLHPTGKICIDSKLRMHEVIHKEYLQLANELRSYCRKHHNKDYYLLKSIPGVGGYLASAILAEIGDLRRFNNETQFASYIGIVPTMRNSGGTEKIQGVTPRCRGLLRSYIIESSWVALRMDPEMQAYYRKHIGRNPKSIIIKIARKLLNRMLAVIKTDKPYHTNYSLNNGKETKMNK

SEQ ID NO: 128550 - protein, 390 aa, unidentified
MRYFIGIDVAKFKHTACVIDADGIALVEPFDFTNDIIGFQSLLKNIKPFLKKKHLVGMEDTGHYGDNLRNFLLDKQYKVVMLNPIVTSHIRKASNKAKNDRIDCFVIANTMMNPNFYRDQHAQSIDYATVRQLTRMYHTHTEEINRYKCQLQKSIDIVFPEFNSLLNTKYSKTYLEILDTYHGAYTIANTDIRLLRNTLKNVGVGRSVSISAEQLKKAAKESIGQHNLAIEMDIPFLISLIRRLTSILGEIDKKIEEFSHQLNSPILDISGISHFSAMSIISELGDITYFSSEKKLIKFAGVNPCVYESGTYSMTHTRLEKKGSKYLRKTLYQIIDVVIRFNPVFQAFYQKKISQGKSYRCAQGHCIRKLLRVIYKILSTGERFDPEKLK

SEQ ID NO: 128551 - protein, 370 aa, unidentified
MLNTTTFVGLDVHARSIKAVALDAMTGEVRSATFAYDAAAVAEWVRSLDPAAKCVYESGVTGFDLQKRLAALGVDCVVGAVSKMIKPSADRKRKNDRNDAEFLARMLSVGNVVEVWVPDDECEAARDLVRALDDAREDLKRCKQRLSKFLMRHGYAFSETTPTGRRKGNWTAAHWTWIRSISFPEKADGDALAYYVDAVRQAMEDKARLEKLVEAEASKPRWKRRVDSVRCLKGIDVTSAADLVFEAGEFSRFKNARSFAAWLGLTPSEHSSGESVRQGGITKAGNKHLRRVLVESAWHYLGCSPHSKDLAKGQVPDPAARRHAAKGVRRLVERRRAMLERGVHKNKANVATARELACWCWAVGRMVEGA

SEQ ID NO: 128552 - protein, 409 aa, unidentified
MQVIHPKCAGLDVHQKQVVACVRVTGRKKVVQEVRTFETTTRDLLAMSDWLASHGCTHVAMESTGVYWKPIWHVLEGSFELVLANAMHIKNIPGRKSDVNDATWISDLLAHGLIRSSFVPPVQIQELRDLTRSRKQLVLESARHIQRLQKVLEDANIKLTEILSDVLGKSGRAIIEALISGETNPELLADLACGNRLKATRAEFVEALHGHVTSHHRFLLKIHLGQIDALDAAVRELEVRMGEALAPFRESVELLKTIPGVNDTVARVIIAEVGLDMGRFPTSGHLISWAGLCPGMNESAGKRLSSRIRPGAPWLKSTLVQAAWPAVRTKCSYLRAQFHRLKSRRGPKKAIVAVAASMLTAVYYILKNHVPYRDLGLDHYDRIDKTKAASRLVKKLKNLGFDVALSPAA

SEQ ID NO: 128553 - protein, 343 aa, unidentified
MEQVSTIGLDIAKSVFQVHGVDAAGEVIVSKQLRRRQVIPFFERLAACLIGMEACATSHHWARELGALGHEVRIMPAGYVKPYVKRNKNDAADAAAICEAVTRPTMRFVAVKSREQQSLLMLHRSRSLLVRQRTMLVNAIRAHLAELGIVAPVGLRGLKVLLAVICDPKDERLPSLARTCLESLAAALMTVEQEAASAERQILVWHRSNEASRRLESIPGIGPIIATALIASVADPSIFKSGREMAAWIGLVPKQNSTGGKQRLGRISKQGDHYLRWLLVAGAMAVIRHGRKTNFAARPWLADLVERKPPKVAAVALANRTARTAWVLMAKGGTFRQPGMATP

SEQ ID NO: 128554 - protein, 363 aa, unidentified
MNSVLNTDSIIVGVDVHKYGHTAVAVDCFGQGVGSLNFSNDLLSDFCSWMLTLSEKQNIVVALEDANGYGVFIVKKLTEEKFNFRYVPAILTERDRRRSTHHDKSDTKDAKRVAKVILTKYEETLPARESISTKLEIDTSTNFDLLLSERRDIVNWKSILKNQLHALLHQCFGDHYKDGYSKAFGKKSCLSFTKELKKKVKSNSNDFLAQSTLRRIDRLNLLTEQLKVIDKKIETISKDVIDVTLLTENIHGCGVSTAATIVSQIYTIKRFSSSAKFAKYAGIAPTEKSSGQRGRLYTSPFGNRILNKAIHRIALSQISGNGDPRGKLYYKKKLEEGKTKLWALRCLKRQLSNRVYQVLKNAN

SEQ ID NO: 128555 - protein, 451 aa, unidentified
MSDRSGLSRGDRNRNARLARLRQLLPFDHAIVGIDLADDKQAAVVTDHDSRVIARRRVSARAWELGDLLDWAVAKAFAAGFASVTVACEPTGHRWRVLDQLAAGRGLALVCVQPLLVYRSREGEDLTRDKSDPKDAVLIARLAGELRCYEPERADAVWARLRHLGARRRQLTTDATAQVNQIRDLLECAWPAVLGASGSPFRSTTWCAALAVVPDRCACDLSRVVRLGPARFEGAVRRELPRWGAVRPCLRIVRAACAALRDPAGVMVHRPGALERAHLALGDWRDTCARLAGAEARMVAVLDDLGLTALVTTIAGLTPVGAAAILAETGDPARFASPRSLVKHAGLCPRDNASGEHQGKTSISGRGRPGLRLAAWRAVWAAMPNNPVMAARFTHLTTRQDNRLARQQARTACAAALLRWIHVVVYPAGDLGSRHRSRRYIAAARRLKQAT

SEQ ID NO: 128556 - protein, 377 aa, unidentified
MKKELYLGLDVHKDCIMTAVAEEGRKGEVRDTGAMSNDLHAVEKWIGRLRKVHGREVILRACYEAGPCGFGLARRLRQLGVECEVVAPSMTPTRSGDRVKTDKRDARKLARLLRAGELTPVYIPESTDEAIRDLCRARTDAVDDRRRSRHRLKGFLLRHGYHYQGKTSWSAAHQRYLRELVLPHPAMKVILEEYLQAIAAAGERIARCEVGMRALLEKWRLAPAVEALMAFKGFQTVAAMIVVSELGEVDRFAHPRQVMAYLGLVPTENTSNDKRRQGRITKCGNAHARWLLVECAQHYAAPPKVSKELSRRQEGQPAQVRAISWRAQNRLHSRYTRLLGRRLQRNKAMVAIARELCGFIWELLRTQSCYHVQATSV

SEQ ID NO: 128557 - protein, 349 aa, unidentified
MSPKLNSGIAVIGIDIGKNSFHVVGLDRRGAIVLRQKWSRGQVETRFANLSPCLIGMEACVGAHHLSRKLTLLGHNARLMPAKYVRPYSRGQKNDFRDAEAIAEAVQRPTMKFVATKTAEQLDLQALHRVRERLVSQRTGIINQIRAFLLERGVAVRQGLRFLRAELPRILATPCDGLSPRMVRVLEELACDWRRLDERIEGLSSEIEVLARRDAGCERLMSVPGIGPIISSAMVAAIGTGDAFTKGRDFAAWLGLVPKQISTGDRTILGKISKRGNRYLRALFVQAAWVVLIKPKSWDRHGLKPWLEAAKKRLHHNVLAIALANKLARIAWSVLARGRAFEASKIQVA

SEQ ID NO: 128558 - protein, 343 aa, unidentified
MKLHVVGIDLGKTVFHLVGLDSTGRVVIRKKCSRKQLLAFTANLEVQLIGMESCSGSHFLGRALREQGHEVRLMPAQYVKPYVQTNKSDFLDAEAIAEAVQRPRMRFVPIKTEEQLDLQALHRVRERWVMRRTAVVNQIRSLLLERGLTLPKGRRYVDQQLPRILEDAELRLSGSFRVLLAQLKLELEQLGARIEEMDRVIQKTAKENEDCQRLTEIPGVGPVTATALIAAVGNASTFRKGRNLAAWMGIVPGEYTTGGKQKLLGISKRGNKYLRTLFIQGARSVLQQRDKQSPALSSWLAQLLVRAHQNVVIVALANKLVRMAWAVLCKNERYRAPVLAVAT

SEQ ID NO: 128559 - protein, 427 aa, unidentified
MGLDLVYLLKNRFFLLITESQEKEMPGRRINMIQPIIACDVSKNSSHVQGFIGLKNPLGNPFVVQHIRSDLVKLKTLAKELEKEAKIKPVFVFEFTGVYHESIVQYVRELKLDLFAISPLESAKVRKSKIRTTKTDSKDCLNIATVYYSRNIRPYVSDNNDIKAISRRLRSLKADLRVLKCRYRRYVDYIWPYFDEYFSKTDGKTPREIIANYKHPYVLKKRTSKQIAEVLTNNCRLSQKRALNIADKVKQYALEAVSGVPVNSEFLRALYDTIEDMNNLESKIEELTFRLMSLHRNNDAYRLLKTISGFGENISLIVASELGDYKRFKTSKQLIAYCGLDPSILQSGKDDGEHYSITRKGNPILRNQIYLGVNQMLGRKDTNQIKDFYLKKKSSGLSHKVAAVASCRKLLCIIFGMLKNGTCFETK

SEQ ID NO: 128560 - protein, 318 aa, unidentified
MSHGYDKYVGIDVAKESLDVSGLTAGSPSQFENTAEGRAKLLSLLPPAGACLLVAEATGGYEKDLVAEVVAAGHHIAVVNPRQVRDFAKAIGLLAKTDRIDAGVIGRFGEATRPTPQGFSEQQEQLRELIVRRRQLVDHRTAEKNRCEQAHSTLVRNSVRKSIEGIDKDLKRIDRAIIQLVESNDDWRGRYERLKSVPGVGAQTAATLMAELPELGRLNRQQVAALVGVAPFNRDSGQFRGRRTIWGGRATVRSGLYMAALSAKKHNPVIRAFAARLLAKGKPPKVVLTACMRKLLVILNAMLRSDEMWGPRQATLTP

SEQ ID NO: 128561 - protein, 309 aa, unidentified
MSSQFFCGVDLAKHHFSLHAVDDRGKVILHKSVSRAKLLTTLANMSTMRIGIEACSGAHYWAREFIKLGHDARIMAAKYVAPYRTKGKNDLNDAIAICEAVQRHATRFVPVKSPERQAILSIHRMREHWVQERTALINRIRALLAEFGIVIPTGRHAIQRDVPLILEAADNGLPDIARAVLGDCFEHLQVLNQRIDDTELCFDMVTKASPNAQRILKVRGIGPQTATAIIATIGKGEQFDSGRDFAAWLGLVPKQYSTGGKPRLGRISKRGDKYLRTLLVHGAERSSLTLGRNRTGSVSGGGTFLNEGE

SEQ ID NO: 128562 - protein, 429 aa, unidentified
MQNESTPGARGPVFCGVDTHADSHWLCVLDWRGRKVLSRQFPADAAGYEALAGAIAAAGEPACVAMEGTSSYGAGLTRHLASLGMPVREALSPARAQRRRPGQGKCDEADAERAARAAMSGSKLGTPKSQDGWVDGVRCMLVARSGAVKARTSAINTARSLLTTAPEGLRSRFRGMGGPRLMEELPSVRAEGALGAALGALADLWAAARDAALDMERAIEASLEENCPALLAMYGCGPVSAAKLAVAAGDNPGRLRSEASFAAICGACPIPASSGKTVRHRLNRGGDRQANSALHEIARQRVMRDPETAEYAERARARGKSDREVMRCLKRYVAREAYRALMRPHEIRRPEDASELVAARRAARVSQVRAASILGTSEKYISMLERGQRELKPIRRAYEAWVEAGLPLDWDRQAFEVERKMNSKKHLAK

SEQ ID NO: 128563 - protein, 420 aa, unidentified
MSVQEAAVSLLQRVLFYVGIDWAAETHAVCVLDATGRIRAQFTIGHTAAGFADLLRRLARLTGDPAEVAVGIERPDGRLVDVLLEAGYPVVPVSPNAIKTWRDGEVLSGAKSDAGDAAVIAEYLRLRAHRLQPATPYTAQTKALRTVVRTREDIVDMRVAAANQLSALLDAHWPGAKAIFADVESAIALAFLTRYPTYPSAQHLGEKRLRAFCVKHGYSGRRSAAELLTRLRAAPAGSTDEALTDAVRDAVLAQVAVLTALTAAEKNLGRSVVAHLGEHPDAAIFTSLPRSGQINAAQVLAEWGDSRAAYDSPDAVAALAGVTPVTKASGKYRAVHFRWACNKHLRKAITCFADNSRHASPWAADVYARAIARGHDHPHAVRVLARAWIRVIYRCWIDGVPYDPNKHGGAGKLREPATAA

SEQ ID NO: 128564 - protein, 384 aa, unidentified
MKKVNSNVACAGMDVHYKFSNVTFRDASGKVVSRQRLDHPDRKQLAERLSRWPTGIPVVMEASFGWGWLSDLLEQAGQDVHLSNCYKVEQMRKARGWVKTNKKDADLVSLLVFEQSDWWKVWRAPPDVRNRREQMRFRGDLVGSQTRVKSRVHAIFHRHGIFHEFSDLFGGKGRKFLVELCLYNSANLPPGALLALRGQIKLLDHLRRQLADVARILHKQLLKTPLTMRLKTVPGFGLILAHVLAAEIGKIERFKNQKSLASYSLLAPRADDTGQDDPSHSPKGRHLGLRGNRTLKWAFIEAAHGAVRSGGKWRAIFDRATDGGKKNRNRGYIKVARELVKVVYAVWAKGVDYQVIPPGRPGRKSNKKKSRSETGQLLHPMVHA

SEQ ID NO: 128565 - protein, 475 aa, unidentified
MAKRRLSTFERLQRGERLLRGERRELQRQLETSDPQLKIVHPDAAGIDVGNESHFVSVPAGRDENPVREFGSWTADLHRMAKWLKSCGIRTLALQSTGVYWIPLQEVLESEGLEVYVVNARGTKNLPGRKSDVQECQWLMKLHTYGLLRNSFRPPEQIRGVRTIWRQRGRLIEDAGRAVQQMQKALTTMNVQLANVISDISGVTGMAIVRAIVNGQRDPWALAKLRDKRIQASEQEIAHSLEGNWREEVLFELRQVVETYDFYRRQIAACDIELQIRLSALPNRQVSEDAEPDASKERPYKAARKNQPQFDLRTELRRIFGVDLTRIDGIDVMTAQVILSELGPDLSAFPSEGDFSSWLELPPRRDITGGKVIRQKPRKSKNRVANALRMAAESLSRSDSYLGARYRRLRARLGGQPAVKAMARYLACLVHRLLTRGQQYVDRGAAYFEKKRGDREIIALQRKATELGLKLVPAQ

SEQ ID NO: 128566 - protein, 366 aa, unidentified
MAITHVALDDSKRVIVAGILRADATQPELREIPNDPRQVRRLFERLLREAPVRACYEAGVSGYDLYRQLTALGVDCAVIAPALTPRKPGERVKTDRRDAAKLVRLFRAGELTAIHVPTEAEEGVRDLTRCRDDVRADIVRWRHRVLKLLARHGRVYQAAKNWSQAHWTWIRAQRFDDVPLARTLEASLEALEQALRRRADLDRAIDGLASEPRYRDAVGPLRCFRGINTLSAMILVAEIVAFERFRRPRALMAYLGLVPSEYSSGDRHRRGALTKAGNTHARRVLVEAAWHYRHRPALGPRLVRHTADQAPAVVAEAWRAQHRLHRRYRHLVGHGKRPTVAVAAVARELAGFLWAAMTQAPRVRAA

SEQ ID NO: 128567 - protein, 366 aa, unidentified
MKKGSTAAAKQSSNFSQQKLTIGLDLGDRSSWYCVLDERGELRLEEKLSTTAKAMREVFGRMPHSRIALETGVHSPWVSRLLSELGHEVIVAHARNVRLIGESRRKDDRLDAQTLARLARIDPQLLCPVKHRSAKAQADLTVIRARAGLVRARTALVNTARGLAKSYGERLRGCNVRNMNPEKAEGLSPELETALQPLLAAIESLNEQIREYNQRIEALAEQSYPEVALLRQVKGVGTLIALTFLLTLEDPHRFRKSRDVGCYLGLQPGRRNSGQREPQMHISKEGDPYLRTLLVQGAQHILGPFGPDCDLRRWGLKLAERGGKNGKKRAIIATARKLAVLLHRLWVSGEVYEPFHNSKLMMVTAA

SEQ ID NO: 128568 - protein, 410 aa, unidentified
MRRIHDRVAGLDVHRDSVVACVELFDGRSAEVDKQTFSTTATGVRQLGEWLAEREVQLVVMEATGVYWRPVFYGLEDRFAEMWLVNAHHVKNVPGRKTDMSDAEWLADVAAHGMVRPSFVPPPEIRGVRELTRYRKTQIRARGQEIQRLERLFQDAGIKLTSVASAVWSKSSRAMTEMLIAGEADPVMLAELARGRMRSKIPALTEAMENRWVTHHSALAGQILAHIDFLDATIDTLTSEIVERLVPFRAAVELLKTIPGVADLTAQTIIAEIGVDMSRFPTARHLAAWAGVAPASHESAGKRKPAGTRHGTRHLRATLIEAARAAAHTKGTFLSARYHRIARRRGPNKAAVAIAHSILVAAHHMLLTGEIYHDLGAEFYDERIDPARRIHRHVAELEAAGYTVTLTAVA

SEQ ID NO: 128569 - protein, 377 aa, unidentified
MKNVRFVGLDVHAETIAVAVAEGSGEVRSLGVIPNRVESVGRLIRKLGKPEQLRVCYEAGPTGYVLYWQLSELGVKCEVVAPTLVPVKAGDRVKTDRRDAEKLARSYRAGDLTAVWVPDAAHEALRDLVRARLAAKRDQLRARHRLGKFLLRHGRRAPQDTSAWADKYLQWIKSQVHFEHRAQEVTLSDYLHEVEHAAERIARLERSIDTAIETLPVKMRAVIEALQSLRGIAQTSAVSIMAEVGELSRFEHPRQLMGYSGIVSREHSSGPRIRRGAISKAGNAHLRRIVVEAAWAYRHRPAVGKTLAARQRRSSAAVTALAWKAQQRLHQRYVRLMARGKCKQQTITAVGRELLGFIWAIGVHVEREVKVPLRQAA

SEQ ID NO: 128570 - protein, 316 aa, unidentified
MYLGIDVSKLTIDCCLIADGQNHQKKFQNNKGGFEQLINWLQGHKVTDKLHCVCEATGTYYEALAEYLYLRYTITVENPRKIKGYAIAELQRSKTDIQDAKLIAQYCQDRKHKLKAWKPPAKEQKQLQEITRYLDYLKQQRATEKAKQHEAPDYIKSHIQITISNLTAQIQIVKKQLIQFYKDNPSYNNLRKRLKTITGIGEQATAVLLSTYKRHEFKNAKQFTAYLGLDPRKFQSGTSVNGKSRISKIGSSEIRKSLYMPALVAYRCNAFPEFVGRLKNKGKHIKLILIAIMRKLAVIAFTLLKNGQDFQVERYK

SEQ ID NO: 128571 - protein, 470 aa, unidentified
MIRHRSDSVLLGPLASVRKPVSQPVIAAVRFMQVELPLHVRLIPQEIESAMRNAGIHANSLLEVRRMYNAVGIDVSKGKSTVAVLQPGGTVIRKPFDVSHTSQNLIELAHYLGSLEGSTKIVMECTGRYHEPMLKALYEAGLFVSVVNPHLIKNFGNNSLRKVKSDPADARRIARYTLDNWAELRQYSGMDNTRTQLKTLNSQFSFFMKQKVAAKANLIALLDNTYPGVNKLFDSPPREDGSEKWVDYAYSFWHVDCVRRIGLKTFTERYKAFCKKHHYIFQQDKPEKLFNASKELVAVFPKEKTYKLLIQQSIRQLNLASEHVERLRQEMNALASTLPEYSTVMGIYGVGKTYGPQLIAEIGDVSRFTHREALTAFAGVDPGVDESGQHKSKSNRASKVGSARLRKTLFQIMTTLLQNAPEDDPVYRFLDKKRAQGKPYYVYMTAGANKFLRIYYGKVKECLRNLEQAE

SEQ ID NO: 128572 - protein, 355 aa, unidentified
MDTIYIGVDFHARQQTICYLTTEDGEVRTHELKHQDKTEVRAFYAQFSGRVVIGLEASGYSPWFEQLLEELGHEVWLGDATEIRRRARWRQKNDRRDAELILDLMVHHEFPRLHRPCPQSREILRMLRYRQKLIKIRTMGKNSLQALALQSGLAKRSQLFSKAGQQELRTAAMSPVMQWQRDQWWLLLEPLNQRLLETMLWLKQQTKDDERISRLRTHPGIGLLTSLCVVHTLWPVTRFRNQRKVAAYAGFDPMERSSAERKHFLGISKAGSRVLRYLLVEAAHTAVKKDDDLKRFYHRPAERRGRPKAKVAAARKLLIRSYIMLRDEIDYAEFRRRAVAARLARQSTRPLVPEA

SEQ ID NO: 128573 - protein, 353 aa, unidentified
MKKVSEFTLGVDLGDKQSAVCVIDGSGEIVQSLKISTTMKAFRKFFGNYSGDLIAIENGTHSPWVSRLLQGMDCRVLVGNARKLPSIWRNPIKTDFRDAEMLARIARFDPKLLYPIVHRDEQAQADLAIIKARDMLIQSRSELVNHVRGAVKSMGGRIPACNADSMHKKAVDHIPEILKPALLPVIEQLEKLTKAIKEYDHQIEDLSKEKYVETKVLRQVNGVGPITALAFILTLEDPARFRKSREVGPVLGLVPRKDQSGEIDKQLRITKCGNIYLRQLLVNCAHYILGPFGPDCELKRFGERLSQRGGKIAKKRAIIAVARKLAVLLHRLWVTGEVYEPFYNQRTPMKKTA

SEQ ID NO: 128574 - protein, 371 aa, unidentified
MSQRIRYVGLDVSKETIAVAVAEPDGSVVEYGEIANNPGAVRRLVETLSRDAVVKTAYEAGPTGYPLHRQLTALGVENMVVAPSLIPRRPGDRVKTDQRDAIQLARLLRSGDLTRVWVPDEAHEALRDLVRARDDARTDSLRAKHHLSKFLLRQGVTAPPRVGRAWSAKYQAWLNTVTFRDRAAQITFDDYLACVRAAIERVRRLDAALLDCSAATPHVEVLRALQAVRGIGFLTAVTIVAEAGDLRRFRSASAFMAYVGLVPSEHSSGGSCRRGHITKTGNRLLRHVLGESAHHARLQPAVSEALRQRQNGVPTEVLEISWRCQQRLHHKYRHLGGRIGRQRAISAVARELAGFVWAIGQAVPSVEVAAA

SEQ ID NO: 128575 - protein, 316 aa, unidentified
MAKTTRQITLGIDVAKDELVIYCRDSGQYSTLSNTADAIRSWLHRLHGPARLAVEPTSHYHFELVDQAHALGHDVYLVNPRQLVHYRESVNLRHKSDPDDAWLLARFLHKEANELRRFTPPSRQAQALWALLKRRAVVVQARQQLRQSLSQLKLPHQALMTQFQRLIARIDQRITTLIGKLDWQHDYARCLSVPGIGPVNAAALTCAFNRGSFAGVDAFIAYLGLDVRRRESGRFKGKRKLTKRGEPELRRLLYCAAKPARHHPPFAHYHQAQLDKGHSKIAANIILARKLARIAFTLMSHKQAFKYPLSDYGKKP

SEQ ID NO: 128576 - protein, 424 aa, unidentified
MNCTQNERINQVPEQTLVIGVDIASELNYARAFNWRGIEKGKVFKFFNNLEGFQAFNEWAHQVMSANKLTNLIVAAEPTGHYWFGLADYLKDEKLKLVLVNPFHVNRAKELDDNHPSKTDAKDPKTIAKLVIEGRYMEPYIPEGVYADLRIMYNCRQKVTKAMISLENQLKRWFRIYFPEYLSVFGNLSGQGSMAVLEKAVLPEDIISLGVDGINKLWRKRKLRAVGMKRAESLYEAAVKSIGRREGSVGGRAEFRMLWEDYCHKMEQMEKLNIELESLLHKVPQAEEVLKMKGIGVVSVAGFFAEVGDLRRFESPKQIQKLAGLAIRENSSGKHKGQTTISKRGRARLRAVLFNAAIALVGRNGAFKSIHEYYIGRKANPLKKKQSIVAVSCKLIRIIYAICRHKEAYDEAKMLRDIRREQLA

SEQ ID NO: 128577 - protein, 393 aa, unidentified
MHYVLAIDVAKEKSMGTLISSCGEVLIDPYEFNHSKQDFSSLLVRIKKLNIKDVSVIMESTGIYHRPVERFFLENHFKVYVINPLYSKNHKNSLRKTKTDKLDCLSLAELFFTHTFREVVKPSELYLNMNALSRQYFALSESTIDLKNRYKNLLYLCFPEYEKIFVGNMVYSDIALSFISQYPHSEIISKTRLCFLQTFFKRKKFRYWKSKTTKIKEIANTSYPSVNYNDEIVANLSQIAKIINNQQNNINIVKEKLINFAKCTPYFTPINSINGIGEFTTAIIIAELGDINRFNNIKELTAYCGLDPTIKQSGKTINTHGPISKSGNKYMRHILFLSALNIVRITTLSKKENDIEIYYRKKRNEGKHHYVATIATTTKLLRKIFAVCKQINK

SEQ ID NO: 128578 - protein, 365 aa, unidentified
MRWSPPHPARATLSQGVLFLEAIIMSESALIGIDLGKHNFHLLGQDKSGREVFRKKLSRAQMMRFFGNLPSCVVVTEACAGSHFIARQLAAMGHTTKLISPQFVRPFVKGNKNDFIDAEAICEAASRPSMRFVTPKTESQQTLSVLHRMRESLVHDRTKTANQMHGFLLEFGISLPKGSAIMKRLAAVLAEHELPVRLTVLLQRLHDHFVYLDEQIKELDKQLACQLADDDLGSRLLSMPCVGPITASLLAVEMGDGKQYRCSRDFAASVGLVPRQYSTGGKANLLGISKRGDKHLRQLLVQCSRVYMQRLDHQKGALADWVRALLRRRHSNVVACALANKLARIAWAIAAHHAQYEAGPDALNA

SEQ ID NO: 128579 - protein, 366 aa, unidentified
MSAISKTTDRVVIAIDPHKASWTAAVVDASSQPVATIRVPVSRDGYRALRRFADRWPDPTWAIEGASGLGAPLTARLRTDGIDVVDVPAKLAARVRMLSTGHGRKNDDADAVSVGIAARSAPRLNSAAVDDTVTALRAIVDHRDDLVKTRTQTVNRLHVVLTNLIPAGAQRDLTAERAAELLRGIRPRDAAGKTLRGLATDLTSEIRQLDRRIAKAAADIQTAVTDSGTALTELCGIGALTAGKILGRVGTITRFRSAAAFATYTGTAPIDVSSGDVVRHRLSRAGDRQLNLCLHVMALTQIRQDTPGRAYYLRKRTEGKSHKEAMRCLKRRLSDVVYRQLRRDANRLEAGPGGHSGAALSSSAAS

SEQ ID NO: 128580 - protein, 348 aa, unidentified
MVHFVGLDVSVKATSVCVVDDAGKVILEQKVATEPADIIAVLTSLGVTFSRIGIEAGPLSQWLVNALTAADLPMICVETRHMKALLTAQQISKTDRNDARGIAQMMRVGLFKPVHVKTLVAQEQRMLLTSRKLLQRKLLDVESDLRGTLRNFGLKVGVVGGSRYEARVRELVEGFPRLAAIVEPLLSVRRVMRQQFAVLHKMLLDMVRGDPVCRRLMTAPGVGAVVALTYRATVDQPQRFVHSRAVGAHVGLTPKRYQSGEIDYNGGVSKCGDALLRTMLYEAAHSLPTHSRRWSWLKAWGIRVAQRRGMRRAVVAVARRLAVVLHRMWVDDSEFRWRKDNAAVPAVS

SEQ ID NO: 128581 - protein, 345 aa, unidentified
MKILAMDLGKRNTVVCFYDSETAEARYRKITTLAQEIHDVIAEYEPGRVVFEVCSIAGWVYDIAHALVKEVEVADVNGQAWKWKNVKSKTDRKDALKLAQLSAMNQVHCVHIPKKQIREKRSLINYRHALVQRRTQIKNTIHSILDKQGFAQTLPKGKNGWTKRNMEKLIKMSRDIDQCPLGQSWRGELHLELKGLEDTEVQIAKVEAKLDELAGDDKNIQLLKKIVGVGPRLAEAVAAFVDEPQRFRNAKQVGCYVGLTPRQYQSGQMDRQGRISGQGNKLLRSLLVEVCWLGLRHNKWMRDTYERILRGSASRKKIAITAVARKLLVRCWAMMRDGTEWRQAA

SEQ ID NO: 128582 - protein, 390 aa, unidentified
MAKKRISDDSAGFTVLTEMLAAAGDSFDDAIPIAIETPRGLLVAALRATGRPVFAINPLAVARYRERHSVAGAKSDHADAMTLANILRVDSHLHRRMPADSELAQAIAVLARAQQDAVWRRSKASNELRSMLREYYPAFLDTFAGKSATNLAKPEARAVLAIAPTPAHAAKLIKTRVAAALRRAGRKRGIDGLAVNILEHLQAPQLRQPELVEKAMGRQALALLAMLDAACTGADELAQTAAEEFRKHPDYAVITSFPGLADLTGARVLAEIGDDRDRFADDRALKAYAGSAPITRASGKVTSITHRRIKNDRLAAVGWVWATYAYINPGPAQDHYRRRRDHGDRHAAALRHLFNKMLGQLHHCLQTRQNFDPIKAFGQPRTAPREPAAA

SEQ ID NO: 128583 - protein, 420 aa, unidentified
MKAKKKAKLDLVDDNTLVVGIDIGKRNHYCRFINVRGYEIGKGFSFSNNRDGMEKAISKIEEAKIQNNLVKAVIGMEPSGHYWKPAAHYLFGSGYKLALVNPYHIKRIKEIEDNSQTKTDPKDSLLIAKLVRDGDFFDPNLADGIYAELRRMYRLRLKVKKSFIREKTKLKALLDEYFPEYEGLFCDILGITSEYILKNYFLPEIVAREDIISLTGKIKMISKGKIGASKVLKLIKCARASIGINTGIDAAVLEKTYILESISNLKLKLAFLNKKLKYYLDKIECSKYLLSIPGVGVVTAAGFLGEVGDISKYRSAKEIIKLAGLNLVEISSGAKKGKKKISKRGNNRLRCLLYQCAIVAISKNSQLKRYYCYQAETKNKMKTVVAVQCKLVRIMFALLKYKKYYNPEEVLKSMVAQEVA

SEQ ID NO: 128584 - protein, 346 aa, unidentified
MGMDISVLGVDLGKNVCSVVGLDASGAVVLRRRAKRETLIALAAKLPPCVVAMEACCGAHHLGRVFAGHGHDVRLMSPEYVRPYVKAQKNDDRDAEGIAEAATRPTMRFVGLKSQEQLDMQTLHRSRDRLVGERTALINQLRAILLERGIVAPQGKRKLEQFLTVLMDEQRGAGLSPRMITLVADARAQWAELDRRIAAFDAEFIRWTKENEDARRLATIPGVGATIASALIAAIGKAETFEHARDLAAWLGLVPRQFTTGGRPKLLGISKRGNKYLRRLLIHGARAALPYVAERDTPLGRWAKALMSRAHPNVAVVAFANKLARIAWAVLRRGEAFAVKGSLMAA

SEQ ID NO: 128585 - protein, 313 aa, unidentified
MRDGVFVGIDVAKDTVVVAQHAQAGTVTYRNEPADIAALVHAVAALAPTRVVLEATGGYEVVVLSALAAAALPVVAVNPRQARDYAKATGRLAKTDAIDAHGLAAFAAQVQPTLRPVPDEAQRLLRDLVTRRRQLVEMRTAEAERLSQTRARAIRRDLEAHLAWLTKRIGQLDDDLHTQIRAHPAWQAQEDLLRTVPGVGPLTARTLLAYLPELGHLEGAAAAALVGVAPLNCDSGTRRGTRHIWGGRAGVRRVLYMATLSAIRANPVIKAFYTRLLDRHKAKKVALVAAMHKLLRILNAMVTRQEAWNPKTA

SEQ ID NO: 128586 - protein, 428 aa, unidentified
MRERDIKLRMIREQHTLIVGVDVAKRKHHARMMDSRTGWECGHPFTFQNNITGFSRLLGRISRTKEEISATNIIVAVEPSGHYWKPLAWYLSGVGITVVLVNPYHVKRSKELDDNTPTKNDRKDAWVIANLAAEGRFFRCYLPQGVWAELRSLGQARRRQRARLSAARVALVVLLDEYFPEFGDVFKNPLGKGALYILQRYPWPVDLRALPVERVTHELKQATSGRVGQKRAVQLLAVARDSVGVTEGLDAARLRLGQVLAEIRFWQGQLTQTEEAMARALQATRMGAYLLSIPGVGVVTAAVFLSEVGDMARYTDWRQLRRLAGYNLTENSSGQKKGQTQISKRGRPGLRSILYQAAVTLVARNKEFGALYRYLRTRRENPLAGPQALVVVACKLLRVIFALVKKREMYDPQKVLGSYRRQQIEAAA

SEQ ID NO: 128587 - protein, 347 aa, unidentified
MTKVSMIGLDLAKNVFQVHGIDATAKVVVRRQLRRQQLEKFFAKLPPGVVVGMEACSGAHHWGRVLQKLGHEARMMPAAYVKPYVKRNKNDGRDAEGICEAMGRPTMRFVPVKSLDCQAVMVLHRTRRLLVRQRTMSANALRSALAEFGIVAAQGLKGLHSLMQELEDPASAIPDKARMPLQVLARQWETLNTDICKLETEIVGAAKTDEVARRLMAIPGLGPIGATAILAAVPDASVFKTARDFAAWLGLTPRQFGTGGKQRSGGISKQGDRTLRTLLTVGATSYLRYERARGAKNPWLRDLLERRPFKVAAVAYAAKMARIIWAMLVTGEFYRAPNHSVSAQAAA

SEQ ID NO: 128588 - protein, 392 aa, unidentified
MYIVGIDIGKNHHEASIVSPEGKQIGRSLRFATTHKGADSLMSFIFKNIGNSPCVFGMEATGHYWYPIYSFLKAKGYTIYVINPIQSDSLRKMYIRQTKNDSIDSFLIAEVIRFGQFGTTSMADENILAMRQLCRYRDSVISSRTEIKLRIGTIMEQIFPEYEKQFSSLWLSTSMGILEKYLTPENIENAPIDELFEIIKDKSHNRLTKAKAISIKEAAADTFGIKIAQDAFSFQLKQLIDRMNFLDKQIEALDIEIMKYYEQFDCYLHTIPGIGMIATATILAEIGDIHRFKSSSALVAFAGIDPTVRQSGEFNSTHNHMSKRGSPYLRHAIFLAATTCSFHNSPLNAYYKKKRDQGKHHLTATGAVARKLTTVIYAVLRDSKPYEPKKFC

SEQ ID NO: 128589 - protein, 373 aa, unidentified
MYKDTTVYIGMDVHKESFTLSSYVLGEKEPGYVQTIPSDYILVAKYANRMRKIYGEESEIICGYEAGCLGFSLYHQLTGCGMTCVILAPTTMMEEKGRKRIKTDKRDAKKIAKCLAFHTYSPVHIPTDEDEQVKEYIRMRNDLKAELKRIKQQTLAFCQRHGLRYTLTKSPWTQAHLKWLRSLRLEGIYQETLDEYLLHLSQLTEKLERMDKRIEEMSNLETYRESVDHLTCFMGVKRPAALAVMVEVGDFRRFASAQHFASYLGLVPGEDSSGEGQTRLGITKAGNTHVRKILIEAAQSYGRGRVGYKSSALRARQLGNLPQIIAYADRANERLRRKYYSMLFRGKKANVAKTAVARELACFFWGMMNNKVI

SEQ ID NO: 128590 - protein, 354 aa, unidentified
MKKISKQATVVGIDLSDKKHQICALDKNGTIVSEKTFINTRRGLDKLSSEFPAALMAMEIGTHSPWISHHLEAKGHRVIVANARKLRAIYSNDRKSDRRDAQMIAKLARADEDLLYPIRHNSMGCIEDRQHLSVRDNLVKQRVSLINSVRFSLKSLGCQLRTTSSARFVSYVHEVAEISEHHLSLVAPLLRVIASISEEIKKLDSYITNELCDKYPIARRLMQIQGVGPITAVSFVLTIEDASRFENPRTVGAYLGLVPRRDQSGCVDKQLPISKAGNRGLRTLLVQCAQYIMRSNSIDSDLKRHGLRIANKGEKSAKRKAIVGVARKLSVVMLTLWQQERDYEPLKALKAKAC

SEQ ID NO: 128591 - protein, 342 aa, unidentified
MSGDYDGRQYVGIDLHRRRSVIVRTTAQGEQLGWVRIDNDPVALGLELAKAGPDPEVVLEATYGWYWAVDALQTAGAHVHLAHPLGVKGFAYRRVKNDVRDAADLADLLRMHRLPEAYIATPHERELRELVRHRAKLVALRSGLKAQVHATLAKQGQLPAASDVFGRAGTAWLRSAPLELVYRQRIDSLLELIDAYDGEIETFRTMIANRFPGHRGYRAIQQISGIGPTFAAVFVAEIGDINRFSRPEKLCCWAGLTPRHRESDTTVHRGPITKQGSKLVRWAAIEACQHTRAGTKLSADRSRIIAARGRNVGIVAAARRLLTLVFYGLRDGEIRALAARAG

SEQ ID NO: 128592 - protein, 311 aa, unidentified
MNTVRYIGVDLSKLELVADLAAEAKPRAFTNNAAGHAALIAALPTEAHVVCESTGGYQRPLVRALQQAGVRVSVVMPGRVRALAHARGLRAKTDPIDARLLSAFGQAMALGAPPPPPSPAQAELQELLRARRALIARLNEESSQVDHCELPFLQAQATERRELLERQVREIEKRLRRLIAADPVWQQRAARVQEVDGVGEVSAWTVLAEMPELGQLEKGQAAALLGVAPDPDDSGPRQGRRHISGGRSSARKVLYMAALTASQRNPVLAPFYQRLVHERHKPKLVALTAVMRKLVELLNRLLADPDFKLAG

SEQ ID NO: 128593 - protein, 386 aa, unidentified
MSEQYRWFVGIDWATQNHEVCIVDCDGGVVDRKTIEHTGAGIAQLVKRLEELTRAEPGLVAVGIEVPRGAIIECLIVHRFAVYSLNPKQMDRFRDRHTVAGSKDDRRDALVLADSLRTDRRLFHRVRLDDPLVMRIRELSRTEQDVQQQQTRLANQLRDLLWRYFPQLIKLSPSMDEGWLWDLLELAPTPEKARGLKRSRIEKILRAHRIRRWSGEEIEAALQVQALELAPGSAAATSEHVLLLLPVLRLLQSQHKEIARRTETVLEEMEQQEQESEHRDVTILRSMPGAGRVVAATMLAEASQALAERDYRALRSYTGVAPVTWQSGKRKVVGMRRSCNPRLRNAVYHWSMVSIQHDERSREHYAALRKKGHSHSGLCEVWPTDS

SEQ ID NO: 128594 - protein, 401 aa, unidentified
MKRLSGGIDVGSESHHVTILDEEDNVLYNKKISHKINEFAESINLFKKIEKKEGGKISFALEGKNGYSAPLDRILLDQGFTLYNVDNLKLKRFREAFAGEWRDDERDSLMLSKMLKLKDYINSEREKVFIKIEKPSPVTESLKLLSRHQQTLIDEKVRLTNRLSKKLLEVCPQILELGKVKNKKIIAILVKYPDFSKYKRITLKSLLKTKGIGKKQAPFLLKRLNNIEYMPGLTDIYKTIILSYAKRISELQKEIEDIDKSLDEIGEKNKGVNHLKTLPGVATKLASRFIGEIGSIHRFPSEKQLAIYCGIACVDNNSGKVTKTKAVYKANKICKQTLITMAGGSIRLSLQCKAYYLKKRAEGKSHNHTLRCLARQLIKVIYKMLTEDRDYITKKELKKVA

SEQ ID NO: 128595 - protein, 352 aa, unidentified
MRRPRHQVTTEEELFIGIDLHKHRWHVTIRTFDVELFSGSIPGNWEALHRILARYAGHQLQAVYEAGYFGFRLHDRLVAHGIPCIVTPPSLVPQEYGNRVKTDRRDSSKLAHLLAKGLLKRVWVPSEEELYHRQVIRRRRQLVRDRVRIQSRIKAELRFYGIHLEEPRGRWTEIYFETVRSVRFGNRWMQESFNRLLEQYEFLSAQISKQTQLLRELSETAMYRDRMAILQTLPGIGVISAMELLLELQDVSRFRRAEQLAAYVGLTPSQYSSADKVRMGRITGIGKNTLRSLLVEASWTLIRKDPAMRDKYDRIKIRSGGKRAVVAIARTLLLRMRRMLLDKQAYALQRAA

SEQ ID NO: 128596 - protein, 405 aa, unidentified
MRIVGMDIHRVAAEVVALEEGQFKKLGRVAMLRESLEAFATKQLTRADHVVIEATGNAAALVSVISPFVDRVIVANPKQVRLIAHAKIKTDAIDAAVLAKLYATGFLPEVWTPDQRTQALRRQVARRTQFVRQRVRLKNLIQSVLHAHLVPPCPHGNLVGISGRRWLTKQRLPEDERIAIDRHLNQIDQIEASLKLVDADIASYAMSDPLVRRLMTLPGVDVTVASGVAAAVGDIHRFADPGKLVAYLGLNPSVRQSGEGPAYHGRITKQGRGQARGLLVEAAWAAARSPGPLRAFFRKLSARRGKHIAAVATARKLATIVWHMLVKDTDYIWARPALLARKLRAMELRAGAPTSHARRGSAYEYNIASKRAEERARVEVAEAAYEQMTEKWRRRVRRPPIEKPA

SEQ ID NO: 128597 - protein, 364 aa, unidentified
MIVIGADTHKSTHTLAAVDASAGRIVATRTVRADADGMLGAWRWAHELGEQRVWALEDCRHVSGRLERCLVGQGERVVRVAPKLMGQTRRSQRRPGKSDEIDAVAVARAAIREGVDTLPVAFLDEQAFEIRLLHDHRQDLVGERTRHQNRLRWHLVELDPELETRLPARGLDRCCWLDRIARRLEKLPQSARVRVARDELRRIRELTRAERALERELTAAIAALRPDVLAEPGVGPITAAMLIGRTAGAQRFPTDGHFARQAGAAPIPASSGRRDRVRLNRGGDRQLNCALHRIAVTRARTCPRTRAYLDRKLAEGKTKPEAYRCLKRHLARRIWHLLSHTPDTRPTTPVTIHCNRPVGTLALT

SEQ ID NO: 128598 - protein, 361 aa, unidentified
MNTVIRVGIDLAKYLIQVHAVDASGKVVTNRALKRGKFLLWCADLPAGCVIAMEACSGAHHCSRKLIDRGFDARIIPGSSVAPYRIQGRTGKNDANDAAAVCEAASRPHMNFVPPKTLAQQGMLCVHRLREGLKEERTACINRIRGLLAEFGVVLPQSPEVLRRHLSDIVEDASNDIAGVARLVLQRAHEHWRELDAHIKWCDQRIADHQKFDEQVQRAAELMGVGSITASALVATVGEFRQFRNGAQFAAWLDLTPKQYSSGGKTSLGSITKRGSVYLRTLLIQGAKAIVLTRQYDKPIFLWAHKLRERIGWQRAVVALANKNARILWAVMTREKRYDAHHVSCIPLLAAVTAPALVSVA

SEQ ID NO: 128599 - protein, 354 aa, unidentified
MNKVNQLSFAGQTIYCGLDAHKTNWKINGRMDDMEIISFSQNPDPALLKKHMDKNYPGAKIKVVYEAGFCGFGIQRSLQELGVECIVVNAADIPTTDKERKRKDDKRDARKLSRELADGSLNTIYVPQQSMEHARSLVRQRARLAKDQTRCKNRIKHLLMFSGLAIKSAEERWSEKYIKELLELDCGTQELKSALYLAIEEYRQIRKVLKEATVLIKKLSGQEPFGEVQKYLQSIPGIGVINGMVIQTELMDIERFKTLDSLCDYVGLVPDISSSNDITKVKGITHRCNGFVREAIIESSWTMMRKDPAMLMKYREYRKRMKENKAIIRIGKHLLSRIRHVWNNKIKYEMGVVA

SEQ ID NO: 128600 - protein, 317 aa, unidentified
MSAAAIFCGIDVSKARLDVSLLPSGESWSTGNDAAGIELLLRRLQEQAPTLIVLEATGGYEATLAASLAHAGFAVVVANPRQVRHFAKATGQLAKTDRIDARVLALFAERVRPEPRALPDEKAQLLDALLTRRRQVLEMLTAEKNRHAMAPAPLKRSITQHIRWLERELEGVGRDIERMIKESPLWRTKDDLLQSVPGVGPVLSRTLIGQLPELGRLSRKEIAALVGVAPLARDSGTLRGRRTVWGGRAPVRSALYMGALVASRHNPVIRDFYLRLLAAGKPRKVAFTACMRKLLTILNAMARTQTPWNPALPEYSC

SEQ ID NO: 128601 - protein, 347 aa, unidentified
MHFYNHTHPYYCGIDLHARLLYVCILDHEGNTCLHKPIPASATELSKVLEPYIGNIVVGVECMHCWYWVSDFCDEIGVDFILGHALYMKAIHGGKAKNDRIDSYKIACLIKGGTFPLAYTYPKELRATRDLLRRRMKIIRHGAQLKAHVVNTTSQYNLPPNSGNLKYSQNRDAVKKLFSDSAVQKNINLDVALIECYTKEVDKLEWFIEKQAKQHNPEHFHILKSISGIGRILALTIIYEIGDIKRFNSVQKFASYSRLVKCKAESAGKSYGTSGNRIGNAHLKWAFSEAAVLYLRGNEKAQKYLTKLQKRMSKAKALSALAHKLGRCVYFMLKNEVVFDETKFLKS

SEQ ID NO: 128602 - protein, 316 aa, unidentified
MLEPRFVGIDVSKAVLDVASLPDGEVKQFTNDECGIEQLVSWVQEYVPELIVLEATGGLETAVSVALFEAGFALSITNPRKVRDFARATGHLAKTDKLDAVVLADFALKIRPEPTTLPDAHSRHLSALMSRRRQIVSMITAEKNRLGSAHPEVAPRLGIHIAWLEEELKAITKELHNGIRSDPISEAKGKLLGSVPGVGPVLTATLLVELPELGEVNHKQIAALVGVAPLNRDSGQHRGKRFCWGGRARVRTTLYMAALSASRTNPTIRPFYQRLIDAGKPPKVALTACMRKLLIILNAMMRDMAPWQPASDMLPA

SEQ ID NO: 128603 - protein, 371 aa, unidentified
MAESSRTIYVGLDVHKDSIAVAYAPEDRGAEVVSLGPIGTRQCDIDKLIRKLQSKGATLVFVYEAGPCGYWLYRYLMRQGLSCHVVAPSLIPRKPGDRVKTDRRDAITLARLMRSGDLSSIYVPQVEDEAIRDLSRGREDAMRDLKATKYRLKAFLLRQDIRYEGRANWNAAHLRWLSEVVCPTRAQQIVFQEYVRAVTEQHERLQRLERELHEEVKGWRLYPVVEAIQALRGVELTGAVILIAELGDLTRFDTPRQLMSYLGLTPSEYSSGERRRQGGITKAGNTHARRALVEGAWAYRYPAKVSRHLQLRLEKLPAEVQAIAWKAQVRLCKRYRQLSARGKHANQVVVAIAREMAAFAWAIARTVPLVP

SEQ ID NO: 128604 - protein, 411 aa, unidentified
MDVVHERAAGMDISKRDAKLAVRVPGKRPGTFTTSVTTWGATVPQILDLVEFLHAQQVTTVVMEATGDYWKPFYFLMEDTLPVMLVNARQARNIPGRKTDVSDAAWLAQLAAHGLLRASFVPPEPVRQLRDLTRARAVATRDRTRQVQRLEKFLESTGIKLSSVASALTGASARAMLDALVAGERDPQTLAQLSKGVLRNKIPQLVDALQGRFTEHHAFLVGEYLIQIDTQTGMIDRLTARVEDAMVPFRAARDVLITIPGVSVAVADVIIAETGADMTVFDTPGRLASWAGVCPGQNESAGRVKSTTTRPGNKYLKAALGTAALSVSRTKGTYLAARYRRIAARRGPLKAVVAIEHTTLVAVWHMLRNGEAYTDPGAAFYNQTDPDRTKNKAIRQLRNLGYDVTITPTAA

SEQ ID NO: 128605 - protein, 354 aa, unidentified
MNPIIGCDAHRRYSLFAVLDTTTLSVEQTRVNHQPGAIKEFLSDFPKGTPVALETVGNYYWIVDEIEQAGCVPQLAHAAKAKVIMGNINKTDKLDATGLATLIHLGSLPTVWLPPGEIRDERELHRTRMAFSKVRTALKNRIHATLAKYALNSAEHSDIFVGKGRAWLDRTHKRFPPETGRCVDQELELLDATMEQISALEERMLERIELTLDMQRLKTIPGVGNILAIVIEREIGTVDRFPAAGHLAAYAGVVPKVHSSGGKTRYGRMRKQANNYLKWAFIEAANVVVAHRHHPSWRQKKVTLVYERICRRKGHATAVGAVARHLAESAFWILTKGEDYQDPALRRQGSPKLA

SEQ ID NO: 128606 - protein, 413 aa, unidentified
MMSALVYRFHVGIDWATEKHRVVVLDAERRVVREREVCHEGAALESFADWLTHLAASAVETVAVAREVPRGAVVDVLLARGFHVFALNPKQLDRFRDRFTVAGAKDDRRDAQVLASALATDQPAFRRLEPEPPLLLELRELSRLEDDLQEELGRLTNRLREQLHRYYPQLLHLVPAADEPWLWTLLERAPTPSVAQHLPRATVRTILSRHRIRRVDTDAVLATLRAPALPVAPGTVQAAQRHLAVLLPRLRLIHQQRAECATQIEGLLERLGESQEHRDVPILRSVVGVGRVVAATMLAEASRLLAARDYHGLRAQTGVSPITRQSGRRTLVCMRYACNPRLRQAAYHWGQSAARHDPVSRAHYERLRARGHSHARAVRGVVDRLLHVLIAMLTAGTLYDPARRRLPVGEAVA

SEQ ID NO: 128607 - protein, 346 aa, unidentified
MMIIGCDFHPSWQQVAWVDTETGETGEEKLVHERGEAARFYQRLPGPALIGMESTGNCQWFVEMATAAGHDVWVGDAAKIRASDVRQQKHDRRDAALLLQLLLEGRFPRIWTPSSQEKDLRQLLIHRSRLVGLRARVKNELQHLALNRGVQKKRKLWSEAGQKVLREIPLRPWAGRRREDLLKLLAMLNEQVAQLDEAVTKAAEENENARLLMTQPGVGPVTSLAYVLTLGDISRFPRGKQVASYLGLIPREYSSGGHQRLGSISKQGNRFLRMLLVEAAQIAVRCDPQMRNEYLHRCRTKPKGVAKVAAARKLAIRLYWMLRTQKPYPEIVRIESSSRVPLVSAR

SEQ ID NO: 128608 - protein, 320 aa, unidentified
MNQKSSFIGIDVAKARLDVAIRPTGQQWQVAYTEKGIQELVEQITELHPTLVLLEASGGLELPMVAALAVANLPVVVVNPRQVRDFARATGKLAKTDALDAQVLAHFAEAIRPLPRSLPDTETQSLTALVARRNQVMSMLVAEKNRLRTSRPPVSQRIQLHIDWLEQELDEIDRDLKEMLRNSPVWREKENLLRTVPGVGPQLAVSILAYLPELGTLNRKRIAALVGVAPFNRDSGTLRGKRAVWGGRSRIRAALYMAALVASRHNPVISAFYQRLLAAGKAKKVALTACMRKLLVILNAMLKHHSSWQSLNPQLLGPCS

SEQ ID NO: 128609 - protein, 355 aa, unidentified
MDSRKYIGMDVHQASISIAVRDANGKLVMESVIETKAATILECIRGIRGNLWVGFEEGTSAAWLYDLLKPHVAQVIVCDPRKNALLKTGNKNDRVDARKLSDLLRAGLLTPVYHGESGVRTLRELARSYLTVTKDLTRVMNRLKALYRSWAIPCAGEKVYSPRHRSAWLEKLSEVGVRRRAEQLYQQLDMLLQIRREARRELLRESRKHPAQELLRQIPRLGPIRVALVIALVQTPHRFRTKRQLWAYCGLALQTRSSAEYRFTGGQRQHSQKLPALRGLNSNHNHDLKNLFKSVATNVSTSTGPLGDFYRSLLVKGMKPAMARLTLARKMAAIVLTIWKKGERFDPGELKRQAA

SEQ ID NO: 128610 - protein, 312 aa, unidentified
MIEQCFVGIDVSQDRLDVLLLPQATGFSVANNEAGWNALIARLRDVPVAAIGLEPSGGYERGVIRALLTASLSVRRINPNRLRQFARARGALAKNDRLDARLIAAYVATMPTHVVRHDPAAARIAEIVTVRRQLCDEHVAIENQAAQLEDAMLRRLAKRRLARIETDIRLLDKRLTQMIAAEADLARRYARLTSMPGVGPVLAFTLIALLPELGRMSRKRIAALVGLAPYDFDSGKLRGHRSIYGGRMPVRNVLSMAALSACRYNPALKTFHNRLAAAGKKPKVILVAVMRKMITTLNAMLRDGAGWQPQAA

SEQ ID NO: 128611 - protein, 403 aa, unidentified
MNNVVGIDVSKGKSMVSVLRPFGEVVAKPFSVGHTGSELKELADYLKSLDGETRVVMEHTGRYYEPVARFLHDEGVFVSAVNPKLIKDYGNNTLRKVKTDKADSRKIARYGIDNWAELRQHTPMDTIRMQLKTLNRQQSLYSKTKTMMKNNLIALLDQTYPGVNALFDSPVREDGSQKWVDFATTFWHVDCVRNMSLTAFAERYRKWCKRHGYNFSQSKAVEVHTGAQDLIAMLPKDALTKTMVRQAIDALNAISASLERLKAEMQALAAQLPEYPVVMTMHGVGDSLGPQLMAELGDVTRFTHRNAITAFAGVDPGADQSGTHEAKSTRVSKSGPPELRRALFLVMDCLLKTQPQDDPVYRFMDKKRAEGKPYLVYMTAGANKFLRIYYGRVKEYLAQLENS

SEQ ID NO: 128612 - protein, 412 aa, unidentified
MNAVGIDVSKGKSTVTIRQPGDVVLMPPRDIPHTQSDINALIEYIRGLDGETKVCMEHTGRYYEPVATWLSDAGVFFSAVNPMLIKDFGDDSLRSPKTDKADSKKIARYTLDRWAKLKQYGSMDKTRNQLKTMNRQFGFYMAQKTSMKNNLIALLDQTFPGANDFFDSPARSNGSQKWVDFVHTYWHVDCVRSKSPDAFTEHYRNWCKRKGYNFSPQKARDIYQSSSGLIAVFPKDANTKMLIRQAVAMLDTASQTVESLRLEMDNTASSLPEYPVVMAMNGVGPTLGPQLRAEIGDVARFTHRGALTAFAGVDPGKDDSGQRVRKSVPTTKKGSPYLRKTLFQIMDGLIKRSPADDPVYAFMDKKRAQGKPYYVYMTAGANKFLRVYYGRVKEYLATLAQASDGEAGNDGI

SEQ ID NO: 128613 - protein, 349 aa, unidentified
MVTLGTDAHKWSHTVVAADEQGRQVGQVRVTATPEGHLRALRWAGRWTQRRWAIEDCRHLSRRLERDLLAAGERVVRVPPKLMAGVRRSARTLGKSDPIDALAVARAALREPELPVACLDGVERQVRLLVDHREDLVAERTRAQQRLRWHLHELEPGWEIPAGGLDRAVWLDAVAARLGAHQGVVAEIAGELVGRCRELTGRVNQLERRLRRLVTPLAPKLLSLDGCGALTAAKLVGETAGVGRFRSRAAFAMHNGTAPVPVWSGNRQRHRLNRGGNRQLNAALHRIAITQLRLDGPGRHYLQRRITAGDTKTEAIRALRRRISDEVYRRLQADQRPPGRQPTCLLPAT

SEQ ID NO: 128614 - protein, 290 aa, unidentified
MRIIGCDLHTRQQTVAMLDTTTGAVERQTLRHDGSNTREFYSALPRPVLVGIEATGSMHWFLNLMEELGIECQVGHPGKIRAAEPRKQKHDRRDTELILTLLVENRFPSIWLPSKELLDLRALLLHRHQWVRMRTRVQNALQAIALANGLRRGPSLWSQTGQDMIASLPLAPHTAHRRSELQAIYGKFQAEVEKLNQRVEEQACKRPGARLLMTHPGVGPITALATDVFLGDPTRFADGKALASYVGIIPREYSSGGRQRLGGLSKQGNPLLRFLWCEAAAHAVRRDPEL

SEQ ID NO: 128615 - protein, 419 aa, unidentified
MARKTDSPIVSVVHPVCCGLDVHKDAISACLVMADYNGVERSEIREFGTVTEDLLGLRNWLLEHDCPIVAMESTGVYWWPVHNVLEHYIEVILVNARHIKNVPGRKTDIADSKWLAGLLRHGLLKGSFIPPQYVRDWRDLTRLRKKIQENINDYKRRIHKVFESANIKLGSMISDLFGVTGNQLMDLLVSHDKELTLEEIEKCLQGRLKSTPIEIFRSIQGSFRDHHRYLLKKLRQIIGVLEEERGALTQRLQELMEPCNPLMKRLKAVPGISDVSAAIILSEIGPTLDKFSSSAALASWSGLCPGNNESAGKRKSGRNPVRQHRLRTVMVEVAWGAIRKKGSYYKDKFHRLKARRGPKKALVAIAHRLLKAIYHIIKTGEEFRDLGENYLLLRHQTHRLRYLKQQAQVLGYELTPIVV

SEQ ID NO: 128616 - protein, 318 aa, unidentified
MAGFWGIDVAQAELVIAEAGTSTSRTQPNTVAGCQALAQQFATQSVQLIVLEATGGYERNMVAALGAVGLPVVVINPRQVRDFAKATGRLAKTDAIDAHVLAEFGARVQPELRPLPTTEQEELRAVLARADQVQQMLVAEKARLLQALGRRDRQPLRKKIKRHIAFLERELHELDADLDDQLRQSPLWREQDDLLQSVPGIGSKTARALLAFLPELGTVSAAEIAKLAGLAPLNRDSGMWRGKRRIAGGRARIRAALYMATLAAVRCNPMIRTVYARLVQSGKPKMVALVACMRKLLVVMNAMLKTKTRWRPIPVPTA

SEQ ID NO: 128617 - protein, 343 aa, unidentified
MKIKRIGVDLAKNVFQLHGVDRKEQAVLQRRLKRADWLKALLDKTEPDCEIGMEACTGAHHWGRLLQAKGYRVKLIAPQFVKPYVKSNKNDANDAEAICEAMSRPSMRFVEVKSVEQQDIQATHRVRSELISHRTAKGNQIRGLVSEYGLVAPQQMQALRMAIPQWLEDGDNGLTFRFRSLLNGLWEDLKTLDLRIGELDREIELIALNDPVAVRLQTLRGVGPMVATALVAAVGNGQQFANGRQMAASLGLTPRQCSSGDKQRLLGITKRGDSYLRSLLVHGARSAIYAARNKEDRLSQWVTGLATRRHANVAAVALANKTVRMAWAMLRNETEYDPDWAIA

SEQ ID NO: 128618 - protein, 397 aa, unidentified
MIAVGIDVSKSKSTVAILNSDGSQRIKPYDMKHNHPEMNALVNYLNELDEPIIILMEYTGHYHYPVLKKLTDEHFPVCLVNPYQMKKYGDTELRRSKTDKKDAIRIATYALEKSYQLVPYSVDDQKYVDLKMLSRQYSQRMSTLTINKVYLVNLLDQTMPGITSILPLRSRDPETSLSMMFIKKYKSFDYICKMGKSRFLDSYSRLVKKSRNRNASHLGLAIYELATSSITTNGENEYTVLAQTQCIDLVAEAQRSADCIIAQMQTIAETLPEYKILRNMPGVGERLGPLILAEIGNVRRFHSGKALNAYAGNDAPPYQSGNFESHNRHISKRGNAALRKYCFEVMQALKLIKPQDDPVYLFLLKKEQEGKHFNVAKMAAVNKFLRIYYARVMELEQ

SEQ ID NO: 128619 - protein, 341 aa, unidentified
MDYYAGIDVSLKSSSVCVVDASGRIVREGKVASEPEAVIGWFASLELSPARIGLEAGPLSQWLYAAMREAGLAVELIETRHARNAFKTMPVKTDRKDAQGIAELMRLGWFRPVHCKSMAAQETRANLTARKLIQSKLHDVEMSLRGILRGFGLKVGAPARRQFEARIRDLVSGHPTLEPIAESLLAVRAVLLREFNSFERRVRDIARCNPRARLLMSAPGVGAIVALTYASAIDDPQRFKSSKQVGAHFGLTPRRHQSGEKDVIGRISKIGDRLVRTALYEAAHVMLTRAIKGSTLKSWAARLARRSGMKKAKVALARKLAVILHRMLADATPFDAAAAAA

SEQ ID NO: 128620 - protein, 439 aa, unidentified
MIAAVIERCAGIDVGKKSISVCLMIGPADQEPRTEVRTYGTMNAELERLRQWLVTERCTHAVLESTGSYWKPIFNVREDSLTVVLANAEDVKGRKGHKTDPKDSWWLAHLLRPAMIRPSFIPPRPIRELRDLTRRRGQLLHDATSERNRVGKVLEDANIKLSSVLADLFGVSGQLMLEALLEGQATATEIAHLAQRQAKRKIPELTAAIEAHRMSDHHRRMIRGSLRHLAFLEQELFHLDEDILGHIEASGLQNALQLLKTLPGVQQDSAVSILAEVGPDMSPFPSAAHLSSWAGLCPGNRRSAGKDKGGRTTRGNRWLRAALTQCAWAAASKKGCSLKNKFWRWAAEGRKRALVAVAHALLVLVYQVLARGEPYQERGMPAVEERQRKRLIRHHVRCLGRLGINVGFSSQRATPNSSKTTSCCCPRPSLEIVKHPEHA

SEQ ID NO: 128621 - protein, 340 aa, unidentified
MQISTIGLDIAKNVFQVHGIDGGGRPVLRRKVRRDQVLALFGKLSPCLVGIEACATAHHWARQISALGHEVRLMPPAYVKAYVKRNKNDAADAEGICEAVTRPTMRFVPVKSADVQSMLMLHRARQLLVRQRTAQVSAIRAHLAEYGIVAPKGRAHVRDLLAVLESRRDLVPDLARQTLFLLAQTIASLSEQVRKIEIELMAWHRTNVVSRRLETIPGIGFITATALAATVGNPRAFRSGRQFAAWLGLVPRQNSSGGKERLGGISKMGDRYLRHLLVVGATAVVRYTKRKATTVSIWANRLLERKPARLVTVAVANKMARIAWAVMAREENYRPVPIAR

SEQ ID NO: 128622 - protein, 414 aa, unidentified
MALKIVYKICCGIDIHKTFVVACIASTNSIGVTSYKSYRFSTYTKGLKELLQWLLENNCKDVCMESTGKYWIPVYNILEKNCSIVLAHPKYVKAIRGKKTDKKDAKWITDLFKHDLVAGSFMPPADIRQLRDLMRYRYKLICFKSSEKNCLQNCLTVSNIQLGNVVSDTSGKSSQRILDKILENPTDTSFDIIPLIHGSMMKKLPELELAIDGYITPEQAGKLKVIKNHLKDLETRKTELEELILALALPYQQELDLILTAPSFKNVFSAITVISEIGVNMETFPSAKHLCSWSGLTPTNNESAGKKKSVRVSKAGCYIKPLLVQCANSVVMSEKHPEICNRYLRLRKRRGHKKAIIAIARMLLTALYNMLKNKQPYNAELYKKSDVLPVERVITVEQAILMAQFQGYRIKSAI

SEQ ID NO: 128623 - protein, 345 aa, unidentified
MKIKTIGIDLAKDVFQLHGVDEFGNMVLRKQVKRAQLAIFFSNLPVCLVGMEACSGAHYWARKLQNMGHTVRLMAPQFVKPYVKTNKSDAADAEAICEAVTRPNMRFVPVKNIEQQAVLALHTVRQGFIKARTAQANQIRGLLSEFGLIIPKGIGYIVSRVPDILEDATNELPGVFRNLMQRLFDHFKEISMQVRALDMEIQQWHQNNEASTRLAQIPGIGPISATALVASLSDAKNFDNGRQVAAWLGLVPRQHSTGGKTNLLGMSKRGDSYLRTLLIHGARSVVYRASLKKDNVNSWVNSLVSRRNKNIAAVALANKNIRIVWALLAHDREFRPDYVSINSCA

SEQ ID NO: 128624 - protein, 411 aa, unidentified
MRLFAGDDWAEDHHDIEVMDAAGKVLAKRRLPEGAAGMSQLHELIGRFLPEDADEVEVVIGIETDRGPWVAALVAAGYTVFPVNPLQASRYRERHGVSGAKSDQGDSHMLADMVRTDSHQLRPAAGDSPEAAGVKVVARTHKTLIWDRTRQVQRLRHQLREYFPAAIEAFEDLDAPDVLELLGKAPDPARAARLTRAQISAALKRARRRNIADKTDAILAALRGEHLTQPAALTVAYAATVRSLVAVITTLNEQAKLLEEQVKEHFGRHPDAEIYQSQPGIGAILGARVLGEFGDDPRRYVSAKSRKNYGGTSPITRASGKKKVVAARFIRNDRLIDALMSWAFASLNASPGARAFYDQQRAKGLEHNDALRRLANRLVGILHGCLKTRTLYDEATARGHRENLPQSSVAA

SEQ ID NO: 128625 - protein, 322 aa, unidentified
MSQPNPLCVGIDVSKATLDIAASSDVAQFTVSNDSDGFNAIITGLRRHSVALVLMEATGGLEVAVACSLQAEGFEVAVVNPRQARDFARAMGYLAKTDRIDARVLTQMAEVINRHPERKRFIRALPDAERQALAAMVVRRRQLIAMLVAERNRLHPSHPQNKKSINTIIKALEDELVRLEKEMDSHIRNHFKEIAERLSSIKGVGTMTVSAMLAEIPELGTLSRREISALIGVAPVNRDSGTMRGRRTIFGGRAGVRSALYMTALVATRFNPVIKTFYVRLLAAGKAKKVALVACMRKLLTILNAMLRKNEEWDESYHHVAP

SEQ ID NO: 128626 - protein, 339 aa, unidentified
MKRYIGVDLHRNSFMVCYINSETGEKEFRNYRLREIGKFIEGLNREDEVAVETTTNTRYFKKKIEEYVSRVVVINPFKFKVISESVKKTDKNDAETIAIFLSKGMLPEVRMKKEEIAKIESLANTRDKLVKLRSALKNKVHNILRMNGIETEREFLSSEIGLKKAMEYEVSDTEKIEIKVCIDEIRNLTKNIEEIEKTLIDKGKNLKGFDNITSIKGIGETSGTILLSVIGDIDNFKNRKQLDAYFGIVPRVSDSNESIRHGRITKQGSKIGRTTLVQCTLVAIKYSKYLRSYYTRMKVRKNSGKAIVATARKLLGIIFETLKNNWIFEDFSNFVIKTA

SEQ ID NO: 128627 - protein, 395 aa, unidentified
MIKDLDLNRCMYVGIDTHKDFHLALACNRFEERLALLRVPNNLQGIKKFVKQIEVLSRQKDSLTTIFGIENSRGTGELITQYLLNNDNIVYEVNPIRTHESRKKTVFRDKSDIKDAEKIVSELTRRLYELPLLTKKSENTIYTAINQLSLYRDELVKEQAVIKNQLHNLFHKINPDYKESFRTIFSQKAIRYWQSRVKRIENKSQDVLQLNRAVVMGLKLKRLKQLIQEIKVIEQKLKPLVVKTSQRLETILGINTVAAARIIGETRDISRFKGPDKYVRYAGIAPRESSSGKQIKFRKSKSGNRRLNQTIYLIALTQIRIDPKVKEYFIRKVSEGKSRKQAITCVMRRIAVIIYGILRTQGAYQGEKCQKQAFSENQLKNDLLGCSLTAVSSPR

SEQ ID NO: 128628 - protein, 410 aa, unidentified
MDVVYSRCAGLDIHKKTIMACVIVPGPKGKPQKTIQAFGTMTDDIVALGDWLAARQVTHVAMESTGVYWQPLWNLLEERFTLLLVNAHHIKQVPGRKTDVGDSEWIADLLRHGLLRASFVPDRAQRELRELTRYRTALLQERAAEVNRLQKTLEGANIKLAAVASDVLGKSGRQILQALVAGGSEAAQLAQLAKGRMRDKIPQLERALTGSFRPHQQFLVARHLALIDAIDETVAQVSAEIEERLRPVEADVELLDAITGIGRRTAEVWLAEVGTDLERFPTHSHLASWAGMCPGNNESAGKRKSGKTRKGNPNLRTALVEAAQAAARKRDSYLSAQYRRLAARRGKKKAIVALGHSLLIMAYHVLKRRVDFQDLGPTYFDERDRTNVERRLVRRLERLGYKVALEPAAA

SEQ ID NO: 128629 - protein, 342 aa, unidentified
MEINTIGLDLAKSIFQVHAIDAAGTAVVRKALRRAQVVPFFAKLPRCLIGMEACGTSHHWARELARLGHEVRLMPPAYVKPYVKRGKTDAADAEAICEAVTRPSMRFVPVKSAEQQAALALHRTRDLLVKQRTQLVNMVRGLLAEFGIETARGLHHALSLAARLSAGDAPEVPALAQRVVKGLADQIGALQVQLDLLEKDLLAWHRSNELSQRLATIPGVGVISATALAASVTEPERFRSGRQFAASLGLTPLQNCSGGKERMGRISRMGDRYLRRLLVLGMTSLVRRARATPDSVDPRFVAMLQRKPVRVVTVAAANRTARVAWAIMTHGGTYRTPPAAAA

SEQ ID NO: 128630 - protein, 423 aa, unidentified
MEVMHERCAGLDVHKAMIVACVRIMAGGKVGRECRTFETTTAGLLALLAWLRESGCRHVAMEATGVYWKPVWNILSDGAFELMVANAAHIKNVPGRKTDVNDAMWIADLVACGLIKASFVPEEPIQELRSLLRARKQLTREQTSHIQRIQKTLEEANIKLDSVISDILGLSGRRMIEAMIAGVRNPFKLAELADRRIKASPKALYDALHGRLTDHHRFLLRLYLGQYDTLDAAIVALDQQVDASVTRMDKEAKAGQATFRSLIILLCTIPGIGALAATTILAEIGRDMSRFPTAGHLVAWAGLCPGQNESAGKRKASRLRKGAPWLKTMLVQCAWAASRKKDSYYKAQFNRLRSKRGPKKAICAVAASLLTAIYHMLKDGTEHHDLGADHFDHRSTAVKANRLVAQLVKLGFQVELHPLAEAA

SEQ ID NO: 128631 - protein, 429 aa, unidentified
MTMVQSTPELFVWVAIDVAKDRHEVLIEAPGWRSRKRVRVQNAAEDFRSFAAFLHSLGFPVRIGFEPTSNYHRALAYFLHSQGFQLHLISSLALARTREAMHNSWDKNDPKDAQVILHLLKSGLTQHYHDPIVHGLNDLQELSKTHHQVSLEKTRTQHRLLTHYLPLYFPEIARYHGSARSEWLWVLLIEFPTPQSMTRLSKAEFVRKAWPLVGRKVSKERILTDIYLTAQTSIGLPAEEHSETVAMLRVVLRQLLTLCQLRATIEDRAEVLLANDTDYQRLRCIPGIGPITALTVLAEAGDLRRFSHHRQFLKFCGLDLATEQSGQFRGLTRLSKRGNARLRAVFWMAASVAVRMRENSFRAKFERYMRTDPGSADRKRKAYVAVAAKIARVAYALIRSGADYRCFPEVAVPSGRTRSARAVEAISTS

SEQ ID NO: 128632 - protein, 347 aa, unidentified
MRFYTISHPYYCGIDLHTKMMYVCILNNDGEICLHENIPTQPHRFLKLIAPYREDLVVGVECIFSWYWLADLCAEESIPFVLGHALYMKAIHGGKSKNDKIDSEKIAKLMRGGNFPLAHVYPQAMRATRDLLRRRNYFVHRRAEIQGHIKLTNYQYNLPSIQTKLSRHANRDDIAERFADSSVRKNVEADIHLMDCMEEEIKGLENYIIRHAKGYDPRTYYRLQTVPGIGAILALVILYEVEDIARFPSVQQFCSYARLVKCPKESAGKRYGFSGSRIGNAHLKWAFAEATVLFMRESERAKRYVARMARKHGKGKAISILSHKLGRAVYAILRKKDSFDEKYFFSN

SEQ ID NO: 128633 - protein, 326 aa, unidentified
MCKSVFYVGVDVGKDEVWASMDGYRPRSFKNTPGGAKALREWSRKVSPDQTIHFCMEATGVYGRSLAVRLLSFADTETSVVNPAQINSYAKAQLRRSKTDSVDSRVILSFAQTQKPHPWKPEPEAIRKLYQLVSQADVLEQQIQDWANRQHAHSHASDLPKEIRNCDKALQRTLKRQLEKIEKAIDQLLEEDSGLSERVDLLCSFKGIAKKSAVRIIGYSRDAMTERSAKALVAHAGLAPRHHQSGTSVHARSHIAKQGDKRLRKALYMPALVAMVHNPVIRNFYQRLLQNGKAKKLAITACMKKILVILRAMIKTNKPFNPNINA

SEQ ID NO: 128634 - protein, 425 aa, unidentified
MSEKIVVGIDVSKAFSDICILSPNNYIIKRLKISNDINGMKSLIYVLEKVEDEYEDRAVIIMEATAHYHQILANFFRKHNYEVIVINPIQSGALKNINIRKIKSDKTDAYNIALLYRIKNYNETITHSDTVNSIKKLCRQHKELTDEIVEHINRLIAFLDISFPDFKKVFTDLQGKTPLSLLEKYPTIQEVLSPENKQDIIQLIKENSHKSNSYAEVKYEKLLKAAEKSIEICIVSLSSAVLIQTTVRVIFSLQEALKAIDDEIKRLSLLDEKFHKEIVLLQSIPGVGEYTACVVLSELGDISNFSKPKELVAFFGLDPGVSQSGTYNRKNNKISKRGSPHVRSILHMLAKSNVYPNRNREYLNPVMRAYFEKKIAEKPYKVVMCAIMRKMVQIIFAVLRNQKSFELRTPEEHQKLIREKSKLVA

SEQ ID NO: 128635 - protein, 314 aa, unidentified
MRTQVFVGIDVSKAQLDVAFRPEGRFSAPNDEAGVTQVLERLRAVPPTLVVLEATGGLEILLTGVLVAAGVPVAVVNPRQVRDFAKATGRLAKTDTLDAQTLAHFAEVLRPELRPLPDEQTQALAAILARRRQLVEMLTAEKNRLGSAPKPVRKSLRTHIAWLERELTHTDSNLAHAIRESPVWREKDALLRSTPGVGPVMTTTLLANLPELGTLTGKQIAALAGVAPLNRDSGTWHGKRTVWGGRAQIRATLYMAALVAARFNPVIRAFYQRLCAAGKAKKVALTACMRKLLIILNAMLKHRTPWRTELIRCA

SEQ ID NO: 128636 - protein, 286 aa, unidentified
MTVAGIDVAHKTLVVVIRTEEKNAKAQDFANTPEGHAALLVALGAARVERVCLEATGSYHLDLALAIETRRIPLMVVNPKAAKRFAEALFTRTKTDAVDAMLAEFAQRMPFEPWVRPAASALALRAYARRLAALTDARTQAKNQLHALSQTASTPAMILEDVQLTITECDAHLERLRTAALAMIEAETTLQTPFELLTSVKGIAAASAIQILGEVLVLPPDLCAKQWVAMAGLDPRQSISGTSINKKPRISKAGNRHLRQALYMPALSAMMNTFGVTTVISLKTVD

SEQ ID NO: 128637 - protein, 335 aa, unidentified
MKIKAIGLDLAKDVFQVHGVDEQDRPVVRRQLKRSQLAEYFARLEPCLIGMEACATAHFWGRKLAALGHTVRLIAPKYVKPYVKTNKNDARDAEAICEALLRPSMRFVAIKSPEQQAVLSLHRLRQGLIDSRTALVNQLRGLLAEFGVVVAAGRQRFEQALPGLIQESSEVPQLLRESLEPMRLQLVGLNSAIAQLEARIGAWHRQNEASRRLAKVPGVGLLTASAAVATIGDAKVFDAGRGFAAWLGITPGQHSTGGKQRLLGITKRGESYLRTLFIHGARSVIRAHRPGSNPWLDALLERRPKNVATVALAHRNARIVWALLASGQDYAPKAA

SEQ ID NO: 128638 - protein, 457 aa, unidentified
MKSFFLGADVSKGYADFVILDEQKLPMIKNFQLDDTHKGHQRLFEIISGFLTKHPDASMCAAVESTGGYENNWYHALKSFQKTLKVSVTRLNPLGVMHNSKADLKRNTTDKISAQSIAEYLIAHPEKVDYQQHDQWTGLRKQWGFTKMLTKQRTQLLNQLEALLYVANPDMLKFCKDGVSAWVLKVLIKYPTAAHLARAKASVVAKIPYVSRQRAQELITAAKQSVASATDQITKQLVEDTAKQIVSLNDTIDLQQKRLIANCAIPEVDLLKTFPGISNASAIGIILEIQAVERFSSVKKLVAFFGIHPVIKSSGDGSSGFRMSKQGRKEMRRILFLVVITAIRCNPIIQELYKKHQSQGKANMEAIGVCMHKTLRIIYGMLKNQTAFDPQIDIRNRQRVENKASIPTVDKNRRFQDFDPKAPISRRQNKKRLERKEPQCVGNTVCGVIAPVPEPAV

SEQ ID NO: 128639 - protein, 346 aa, unidentified
MIIVGCDFHPAWQQIAVFDSETGEITEHKLIHGNGEAEQFYRRLPIASRIGIEACGNSQWFVDLLQRLGHEVWIGDAAQIRASYVRKQKTDRRDAAHILRLLIEGRFPRLWTPSAEERDLRQLLVHRHKLVAIRTRVKGGLQHLALNRGLQKKSKLWTAAGQKALRELPLDTWAACRREDLLGLLASLDKQISKLDAAVERAAEEHPQARLLVTQPGVGPITSLAFVLTLGDVSRFQRGKQVASYLGLIPRERSSGGKQRLGAINKQGNSLMRTLLVESAQSVTRLDPGFRKQYLHRCHRMAKGVAKVAAARRLAVRLFWMLRTNTEYPEIVRIESSPTLAVVSES

SEQ ID NO: 128640 - protein, 345 aa, unidentified
MKIIGCDLHTRYQQIAMLDSDTGEVEERRLEHQNGEARAFYAALTGPVRVGIEATGSTPWFERMLRELGHELWIGDAGRMRAMVVRKQKTDTRDAAHALDLLVTNRFPRIWMPSVEERDLRQLVWHRQKLVGMRSAVKNQLHALAMGQGVCRRKQLFTAKGRQELEGLALGPWASYRRQELLQLLDQLEQSLAKLDQAVEQQAKREPLAVRLMTHPGVGPVTSLAFVLTIGPADRFPGSRQVVSYLGLNPQEHTSGGRKRVGAISKQGNPMLRWLLVEAGHTAARFDPQLRRLYQRLKFRRGAAVAKVATARKLAVRMYWMLRNPTDYAQLVRMQGSPRGSLVGN

SEQ ID NO: 128641 - protein, 431 aa, unidentified
MLDTNCTHDLVIGLDRSDRKADLHFINTTTAETRSETLASSPENLRQWLLDLRQKHPKASVGICLEQPAGHLIPFLETYDWITLYPINPISLQKYREAFVTSRAKDDGKDAQFLADLLANHPHQLKAWRPQDSQTRLLQQLVAHRRAVIDERTALTNRLQALLKAYFPQALELCGDELWRPLGTAFLLKWTTLTAAQKTKPADLKQFYYLHGSRSQTLIDQRLKLLEQAVPVSDEPALNQSFSLRVQLICRQLQDVVCTVKEYEKQIAQCFAQHPDKEIFASLPGAGPVLAPRLLAAMGAERERFDSASNLQRYTGIAPVTKQSGKMRYVHRRYLCPKFDRQSFHEFAKQSVLWSRWAAAYYLSQRSKAKPHNTAVRALAFKWQRIIWRCWQSHTPYKEETYEAALRKNGSKLVSLFVQIEVGKNPVKTKP

SEQ ID NO: 128642 - protein, 414 aa, unidentified
MELVYERCCALDVHKRQVTACVHVPDRQGRCTELRAEFQTMTPDLLAMRDWLKGLGVSCVAMEATGVYWKPVYHLLEDDFELLLVNAQHVKNVPGRKTDVGDAQWLCQLLEHGLLRASFVPPKPIRELRDLTRYRKSLVWERAREANRLQKLLEDANIKLSDVASDVLGASGRAMLAALCEGNNDPAALAELARGKLRAKLPALETALQGRFSSHHALLLSHLLSHIDYLDHSIDSLSAEIEERLDPFAQQRELLCTIPGVAERTAEVILAELGPDMGRFPSHRHAASWAAICPGNEESAGKRKTGKTRKGDRWLRTALVEAANSAAGRTKDTYLRAQYLRVKRRQGHKKAIVAVAHSILVAAYYILRDQVPYQELGGDFFIRRQDQERLTQRLVRQLERLGQRVTLEPALQER

SEQ ID NO: 128643 - protein, 344 aa, unidentified
MPSIVGGMDIHRKQVTFDYLDLATGEVKCGQIAPADRAGLRAWLKRFAGAPGVAFAVEACTGWRYVAEELQRAGIEAHLAEPADTAAARGRKRRAKTDRADARLMRDLLAQGRLPGCWIPPAQVLEYRALLETYHALRREHTAWLQRVHAVLFHQGAPVFCDLSRADAPRELAALARAHLSPAGEQQIGLYLRMLEVTGGEADALRRQLVSAAGQLRGARVLAGQLYGVGPVTALALCCWLGGAGRFSSSRKAVRFTGLDITVWSSDRKGPPGRLSRQGPPVLRWCVYEAGKTHARAAAPDHDYYVAVKDRKGGKRAALSEARKIVRTACHILGELGDDAFATA

SEQ ID NO: 128644 - protein, 461 aa, unidentified
MKKKPISSSKKGSVQKKGFTKASQSQLTKMNPNAAGIDLGAKEHWVCVPSEATPDNIRAFGCTTPELAAMADWLISCGVTTVAMESTGVEWIPLFQILSERQLKVYLVNAKSVKTVPGRKSDIKDCQWLQQLHSYGLLAPSFVPEGEIAVLRSYLRQRENLVQSACCHVQRMQKALTQMNLQLHKVISDVTGVTGLNIIRGIISGERNPRVLARLADKRIRSSREEIVQALTGNYREEMVFILSQELSLYEFYAQQISAVESQINSCISQFSSVTEEPAPTPKKKNRRFSESEFNLHSHLYRITGVDFTAIDGLNVLTVQTIISEVGLDPSKFHSAKHFASWLGLSPGCNITGGKVKSSGTRKVINRATKAFRLAAQAVGKSHSALGAFYRRIRARLGAPKAITATAHKIARIFYTLWTTKQSYTDLGADYYEQKYRSRVINNLSKKAQSLGFALVEAEQA

SEQ ID NO: 128645 - protein, 351 aa, unidentified
MMIIGVDYHPSFQTIAFLMEETGEYGEQELNHSDGEAERFYRELKERGVSVRVGMEATGHAHWFERLLAELGFELWIGDPAEIKTKRVRKQKTDREDARLMLKLLRENNFPQIWVPDPENRDLRQLLWHRHRLVQMRTRIMNQLQAVAMNEGYRWKKKLFSEKGRALLEKLSLAPWASRRRKELLELLDQLDPKIAELTAAVEQEAKKRPEVLLLRSHPGVGPITGLAYVLIIGTPDRFPCGKKLGSYTGLIPCEDSSAGRQRLGHISKQGNSLLRFLLVEASQAAARCNPDWRRRYAHLMMRREKRIAKVAMARKLAVRLYWMWRNNWQYSQFVEFGSNAGKLGTVHGVK

SEQ ID NO: 128646 - protein, 344 aa, unidentified
MKYFAGLDVSLAETAICVVDEDGIVVTEGKAASEPDDLVRWLVATRLTITRVGLEAGPLSPWLHTELRAAGLPAICIETRRMKGATAAMAVKTDRNDARAIAHAMRVGWFTVVHVKTAESQELRLLLNNRRTLLEKRVAIDNEIRGTLKAFGLKLGAVTVAAFEVRVLELLAKRSRLLAMVRPMLAARAALRQQCDVLHRMVLKAVRASAVCRRMVSVPGVGPIVALTYATGVDDPARFIHSRDIGPHFGLTPRKYASGEIDRNGSITKAGDGAVREVLVQAALTLLTRVQRWSALKAWGMAVAKRRGLRRAIVAVARKLAIVMHRMWADSTMFNWKRETVALA

SEQ ID NO: 128647 - protein, 387 aa, unidentified
MIYVGIDIAKLKHFAAAMTADGEVLIQPFGFNNDSEGFSLLMSKLKTLNKENILIGLESTSHYGENLICYLYNMGYHIAVINPIQTATLRKSNIRKTKTDKVDTILIIKSMILNNHRIFTQADIESIRLKSLCRFREKTKKAKARLKIQLVSYVDIIFPELQYFFKSGIHINTSYELLKKHSNPNDIAALHLTYLGNLLKKASHGRFGKEEAIALKGLAKSSVGTGDVYLSIQITQTISQIELLEKQINELDESIKSIMLEMNSVILTIPGIGFLNGAMILGEIGDISRFTNPSKLLAYAGLDPTINQSGKFNAKTTRMSKRGSKLLRYALINAAWNVSLNNKTFNDYFMLKKSQGNNHYAALGHVAHKLVRVIFKILKDNVAFNLD

SEQ ID NO: 128648 - protein, 354 aa, unidentified
MSNKSNLTVATMGIDIGKNAFHIVGLDRRGAIVLRQRWSRGQVEARLANMPPCLIGMEACVGAHHLSRRLQAQGHHARLMPAKYVRPYSKGQKNDFRDAEAIAEAVQRPTMKFVTTKTADQLDLQALHRVRERLVSQRTGIINQIRAFLLERGVAVRQGLRFLRAELPIILATRSDVLSPRMLRVIEELAGDWRRLDERIDGLSQEIEALAWQDPACERLMTVPGIGPIISSAMVAAIGNGAVFMKGRDFGAWLGLVPKQISTGDRTILGAISRRGNRYLRALFVQAAWVVLVRIKDWDRYGLKAWIDAAKKRLHHNVLAIALANKLARIAWAVLSKERAFECVKTRATSSQPA

SEQ ID NO: 128649 - protein, 300 aa, unidentified
MDIAKSYLDAAIANEKRRLANDPVGHREFIKWIKQIEGEVQVICEPSGGYERLFIQGLVRAQIKVSLVQANRVRAFARAAGILAKTDRLDARVLCAFGEAMEPPMVTASKLEQEHLRELESQRRHLSRLLVMEQNRGARLADSSVRELNGSLIKQLQKQIEKIDLLIKEHIEGSQELSAKAQKLTAISGVGARTAALLLAQMPELGQLNRREVAALVGVAPFNRDSGKLRGKRTIFGGRRFVRHGLYMAALAAARHNPILRTFYQRLRAAGKPAKLALTATMRKLLIVLNSALKTDPITT

SEQ ID NO: 128650 - protein, 430 aa, unidentified
MTTKQITPSGAVLVALDIAKARNEVLIEFPDRQRRRKLSIHNTRDDHDRLIGLLAETGKTVVCGFEATGNYHRPIAWRLIQAGFDVRLVSSMAAARTREALHNSWDKNDPKDAQVILHMLRIGATQHYHDPLVVGINDVQELSKTHEAISRSKTEILHRIQTHYLPLYFPEVERFRQNSRSDWFFAFLEMFPTPASITVMDQTAFVKSAWEVVGRKVAKATLLADIYQTARASIALPIPLDAPAIAMFRMVLAEIRSLIRQRDMIEKMADAMLAQSSDYQQLRKIPGIGPINALSVIAEAGDIRRFGHHRQFLKFCGLDLSTHQSGTFRGRTKLSKYGNARLRRTLWLAAQVAIRQRENSFRDKFERYIARDRDDPDLRRKALTAITAKMARVVHAVVKSGSDYRPFFEGPVPGGRTPLRAAVRAQSATL

SEQ ID NO: 128651 - protein, 366 aa, unidentified
MIVIGTDTHKQTHTCAAARSGTGELQGQLTARAREPGFRELLAWGRGLDSERVWALEDCRHVSGSFERFLVESGERVVRVPPKLMGASRKAERARGKSDPIDAVAIACAALREGPESLPAAHLDQRALELKLLADHREDLVRARTEDQQRLRWHLHDLWPELEIPAGALDRIVWLERVARRLSRAEQTARVRIARELVRAIRDRSRRASALEREITTLVEGQAPELLALPGCGALSAAKIVAETAGVERFPSDAKLARLAGVAPIPASSGKRDRHRLDRGGNRQLNCALHRIAVTQGRVHPPAREFLARKQAEGKSRMEALRCLKRHLARAVWQALRASRDRESNNSLPLIDEVPKLRPVAGLALT

SEQ ID NO: 128652 - protein, 334 aa, unidentified
MKKHTANCEHHKDGPDSCTVGIDVSKQHLDACELPSGREARFSNTKEGVRAFGTWVCPRVARVVYESTGSYHLLLEDRLVDRLPLSRINPKRGKRFAEALGSEAKTDRADALVLAKMGRAMADDLMETPVRTRREKDLDELRAARDAVNKALTVLKGRREHARNRLVRREIEKDIARAKRQIGRLDQELERLVATDAELSRKVALLVTIPGIARPTAIGLLVEMPELGTLSTREAGSLFGLAPLSNDSGGRYGKRSIQGGRKRARTLLYMPTLAAIRWNPVLRERHLQFKQRGKPGKVAVTAAMRKMVLIANAVIRDGKPWQLDHVPVPAHNAA

SEQ ID NO: 128653 - protein, 322 aa, unidentified
MQNHVIGIDVSKKTLDVCAICDDRIRKKAFSNTESGFNKLIAWTSMLELVEPHFCLEATGYYSEPIADFLFNSGYKVSIVNPLPIKAFRTSKLIRQKTDRSDAEVIARFCLQNNPRLWKPKKQSSKELHEINSRLDSLKKELNRLINLLERRYTNEIVKRSINEELDFIKNQIKALENEADQLITQDKELQRNFEIITSIKGVGSKLAFAILADADFEKFQNSRQYAAFVGVTPSHFESGTSVKGRSRISRIGSSNLRKILYMNALVVKKCNENFADFVNRLQKKGKSAKVIIVAIMRKLMNIIYGMLKNNQKFDKFLAFGA

SEQ ID NO: 128654 - protein, 409 aa, unidentified
MNNLVCKGAHMKMNLSLELRVSVDVGCHSHSVAIGLSTGEILDEFSIAHEPEGFRQFFSRIEKQERKFGYPVSVAMEGFNGYARPLDTLVRARDYRLFNINNLKLARFKEIFPGAAKTDPIDARKGLELFQLRDHLPMAKDVLQEVRKTPRENEILKRLSRRRRRLVNERVRVLNNLQADLQAVCPGLLKITADAGNLWFLRFVTSTDDFRKLARVREVTIRKIPGIGAKYAGLILSWQKQAQFGHDVEWVGEMVQEDAARVLELHDKIQTIEFRMEEVAQGSEIARTLLTIPGFGDICTAELAGEIGTIERFGSEASLALYLGMTNLDNSSGKQKGSKPPRQVNVRAKAAMMIAVDRHRKKVPQSQKYYEKKRTQGKKHNQALRALGRHLCRIIFKMLKENRGYLLPS

SEQ ID NO: 128655 - protein, 338 aa, unidentified
MNATTIGLDIAKSVFQLHGEDAEGRLVVQKRLSRRGMAEFFAKLAPCVVALEACGTSHYWGRTLRAMGHEVRLIPAAYVKPFVRRNKTDARDAAAICVAARRPDMRPVAIKSEEQQASRARERSRELLIKQRTQLMNSLRAMLAEFGIVAAQGARGFAELRARLASGDGLPKTLVTALRLVAAQLDGLTPAIESMEDKIKTIARADPTMRRLSRIPGVGFITAHAVVAAIGDGRQFVSSRCFAAWGGMTPRETSSAGKRRTKGLSRQGESRLRKLFALGAATLMRNARSRDDRASAWQRGILARRPMKVAVMAQAAKTARIAWAVLTSGKDYAPPAAA

SEQ ID NO: 128656 - protein, 339 aa, unidentified
MRLYGAIDLHSNNNVAVITDEQDQIILEKRLHNNIETVLEHLNPYRSDLAAIAVESTYNWYWLVDGLMDAGYTVKLVNTSAVPVYSGLKYTNDEHDARHLAHLLRLKLLPEAYICPKPLRAVRDLLRKRSQLVRYRTMQILSIQNLWSRNTGGSLSSYRTKRLDDLEVAQTFGADSERSLAIESNLSVLKSLQEQILRLEKEVYARVKLNPEYEKLLTVEGVGKILALTIMLETGEIKRFAKVGQYASYCRCVSSSRWSNAKKKGEGNRKNGNKYLSWAYVEAAHFGARYNERIRRFYQRKKAQTNFIVAVKATAHKLARACYYVMRDQVPFNVERAFS

SEQ ID NO: 128657 - protein, 346 aa, unidentified
MRFYTNQHKYYCGIDLHARNLYVCIIDQPGHILVHRNIQAHPDYLMQVIKPYMDDLAIAVECMFTWYWVSDFCLQHGITFVLGHALYMKAIHGSKTKNDKIDSQKIAMLLRGGLIPMAYVYPQRMRAARDLLRRRMYFMHKRSELISHIQNTRSQYLVEAFDSPVARKRHRHSIVEKFHDQAVAKTIESDLKLLNDYDDVIRDVENYLQRSVKTHDYNTFYLLRSIYGVGKILALVMLYEIHDINRFEKVQYFTSYARLVRPQKESAGKIKGGANKKMGNAYLKWAFGEAVLLLIRESEEVKQLHMKLKNKHGKKTALAILSHKLGRTVYYMLTRQKVFDVDRYVN

SEQ ID NO: 128658 - protein, 381 aa, unidentified
MTTLATCHTQDTTTEGTLFVAFELSEKTWKLGFTTGHGQKPRERTVTARQQERVLDEIAQAKRRLGLPATAPVVSCYEAGREGFWLHRFLQGHGITTHVVDSSSIEVNRRRRRAKSDGLDVRKLLSMVMRYEQGERHVWQVVKVPSVEAEDQRHLHRDLATLKQERASTTTRIQGLLSSQGLRVTSLTKLPEQLEALRLWDGAPIPPGLRRRVLRVYAHHTFLSEQIAALEAERRAQLQASTDARIDKVRQLMQLKGIGINGAWLLVMEFFSWRAFKNRREVGGLAGFTPTPYQSGESAREQGITKAGNRHVRWMTTELAWSWLRLQPDSALSVWFRERFGSGGKRLRRLGIVAVARKLLIALWRFLETGVIPAGAVLKEV

SEQ ID NO: 128659 - protein, 363 aa, unidentified
MDTNIITNQKKSRVSFFGQTIYLGIDVHKKNWSVTVYLGGTFFQTFHQESKSLVLANYLHSHFPGAVYKACYEAGFCGFSVQRELSSLGIDCIVINPAEVPQTNKGSLSKTDASDSKRLAIALSKGMLNPIHIPDRVTEADRQLIRYRKKIQVQLQGRRKSLKSIFHIAGVIIPVEHDKPYWTGNFVKWLRSLALAETSLNKTIQLIVDDVEVFRKRLLETNKLIRELSVSDRYSEVFTVLSSAAGIGIITAMTMLTEIGNIERFDTFARFNSFIGPCPSEFSSGEDTRKGGMTPRNHSAIRPLIIEAAWIAIRTDPVLALKFNELIVTRTKKRAIVVIARKLLSRIYCIWTKKQEYEKGILK

SEQ ID NO: 128660 - protein, 343 aa, unidentified
MYFIGLDVHKKTISYCVKDAAGRVYQEGKIGSTRWELDEWIRTMPQPRRIAMEATIFTGWIYDHLLPHAEKVKVAHPLMLRAIAAAKKKNDRIDAGKIADCLRCDFLPECHMASTEIRDRRRTLRYRSLVIKQMVQMKNRVSGLLMETGVRYNKQRLHKVGYFAELMTANEDVHESIRPLLRLSREMISRSQKLDYALVSSLERDPLLKDRLRRLRTVPGVGPITALTWALEIGDFTRFSSIKQAISYCGLCGDEKSSADKVMRMPISKQRNKHIQRVLIEAAKLAPRESPELAVIRARELERGNPNRATLAVARKMVSYMLAVERRNQDFLPAEEFSRTAAA

SEQ ID NO: 128661 - protein, 314 aa, unidentified
MEAPVAGIDVSKDKLIMYFQGKLYEFPNDRQGFEEIRKILPKGCKVGIESTGVYHVNLAKYLNNEYDVRIINPFILKKFKGFRGKKSDKNDAKKLAELVVSMGSGFVTSDARELTSQWDFVTRSIARVKNRLRRDLVLLGYRDSLSKKNLEEVLRGGDSIVLAEVRFLLEELERLKTRKREIEKELENVVSKDSLIFTIPGIGKTLGCIILARVGDVRRFSDKKRFVAYCGLVVESSGKSVVSRGISKKGDAVLRRAFYLAALTAIKVNPVIKRFYEEHKGRLKGKKLITACARKLAVITWAVLYYNKPFDASE

SEQ ID NO: 128662 - protein, 351 aa, unidentified
MIIIGCDFHTRYQQIAMADDETGELLLERRLDHESGEAHAFYRNFSVAVRVGIEATGPIHWFERLLAELGHQLWIGDSAKIRASEVRKQKTDERDARLILDLMLAKRFPKIWVPTPAERDLRQLLWHRHKLVCLRTMLGNQLHFLAMSQGLCRKKRLFTKKGRADLAGLALGPWARRRREELLKLLDQVDAAIAELDRAVLEEARRRDDAVLLMTHPGIGPVTSLAFVLAIGPVSRFCCSRKLVSYLGLNPSEESSGQRRRLGAISKQGNTMVRWLLIEAVYPAVRKDLALRQDYQRLKFRRGHAVAKVAIARKLAVRMYWMLRSGAAYAQLVRRQGSPGATLVDASPSLG

SEQ ID NO: 128663 - protein, 274 aa, unidentified
MDARVSVVGLDIAKSVFQVHAADADGKVVLRRKLKREEVETFFRRLPSCLVALEACPGSHFWARLLRDIGHDVRLLPAQYVRPYVKTNKNDAADAEAICEAVTRPTMRFVPIKEEMQQEVLVLHRVREMLIRQRTQLINSIRGHLTEFGIVGPNRAHKIGLLTKLIEDDEYDELPAVARHALRYLVEQLREVKSKLFRIDRDLMKVVKASDACRRLMTIPGVGIVTATALVSSMREPTDFKSGRHFAAWLGLVPRQHSTGGKESFGAISKRGDG

SEQ ID NO: 128664 - protein, 408 aa, unidentified
MRRVIGMDIHRTFGEVVIWEEGRLRNAGRVDMTRTALEGFGKGLRSDDEVVIEATGNCMAVSRVLSPFVARVVIANPLQVKAIAHAHVKTDKIDAGTLASLYAAGYLPEIWTPDAATERMRRLAARRFQIVRHRTRIKNEVHSILHAHLIPRCPHADLFSTVGRAWLLRQPVPEDERGAIERHIRELDRLTDDLAALDKEIAGDALDDDAIARLLTITGVNLTVAAGIVAAIGDISRFSSPQKLVSYFGLNPRVRQSGLGAAHHGRISKVGRSHARAMLVEAAWAAAKTPGPLHAFFVRIRAKRGHQVAAVALARKLTVLCWHLLTKQTDYRWARPALVANKRRAMELKAGKPQKKGNKPGSAYAYNVKALRDQEMDIARHAEQAYEQFVAQWETRPKVRGRSKPAGL

SEQ ID NO: 128665 - protein, 477 aa, unidentified
MQQTQRSPFARTIPPRGGQLSRKERHKLARQIQSDNVTLEIVHGNTAGIDVGKDTHYVAVPPDRDAKPVQSFDSCTEGLQQMVAWLKKCGITSVALQSTGVYWIALYDVLQEADFEVYLVNARYTKSLPGRKSDVQESQWLMKLHTYGLLPNSFRPPQAIRWLRSYWRQRQNHVRSAATCLHRMDKVLIEMNVRLSSAVTDLSGTTGLAIVQAIVKGERDPEKLAAYRDPRVKAKQEEIARQLQGNWQEDLLFRLGQELEAYRFYQTLITQCDQELAKLLRAFPDRSAGVALPEETRKGRRKKKRGNAPQFDLRQLLYLMSGVDLARIDGIDVITAMTVVAEAGYDMSPWPTADHFVSWLRLAPDNRISGDKIIGKGRTPTQNRLSQSLKMAASSLKASKTYLGAQYRRFRARRGPAIAVKAMAAKLARLVYNMLRHGMEYVDRGTEFYEQQQRERRVYALTKNAAQLGFQLVPAAR

SEQ ID NO: 128666 - protein, 394 aa, unidentified
MRSVGLDLGVRHIAYCEVADGKVVDRTTVKSLSQLVSRIGPDCPAARVAFEACREGWHVHDKLVEWGHDPRMLDTTRVRQIGVGQHKRKNDAIDAEVIALAVDARRIPEAHVLSPDRRTLRAQLSVRGALVETRSQYVTTIRGLARAAGVLLPSCDPENFVAKLEKSALDDSTRTLVAPLVTILRTLETELDRVEQTLSGFAERDPILNLCATVPGVGLIVAATYVSVIDDAKRFKNAHAVGAYLGLVPSEATTGGPDKRRLGSITKHGNRMARAMLVQAAWTILRLRDRDDPLKRWAEQLVKTRGKRIAVVALALKLAGVLWAMWRDGTVYDRAMQAEQTAGGVRLSARQQQHRADVLERAAKKLQRKAGVTDPQRPARRVKRRAASSEMSLV

SEQ ID NO: 128667 - protein, 330 aa, unidentified
MKSWDFTLGVDVSKSTLDISCAELNEHIKIVNGSEGFTVFLKWCKSLKIDLDKSFLVMEYTGGYEYKLIQFCDSRKIKYARIPGLAIKNSLGITRGKNDKVDSFRIAQYGEEKHKSLIPQKSVSPVIIKLKELLSFRKRIVRENAGYQASIKEREHMYGENKKDIIAKTLKAKLKSNQKYIEAIEIELMNIVHQDEKINLNYSLITSIKGIGKINGLMTIAYTENFTSFSNPRSYAVYVGVVPFDHTSGTSIRGRKRVSHIANKELKQELNQAARSALEWDKEMKNYGDRMMKRKCYKIVLNNIKFKLILRMFAVVRNGEMYVDNYRNVA

SEQ ID NO: 128668 - protein, 368 aa, unidentified
MFIERTAIGLDVHARSVRAAAIDSSTGEVIEARLPADNAEIAAWIAGIADRHGPVHAAYEAGPTGFGLARKLGAAGFACTVASPSKLLRPAGDRVKTDARDAMLIVRLLRMDELVPVRVPTVAEESARDLVRARDDARVELMAARHRLSKLLLRRGIVYDGSVTWNRPHDAWLRRVRRDGLDQAGPGTLAAFDAGFDAVTLILARRDRLDEQIAVAAADSEFTAVTNRLCCLRGINTLTGFALAVEIGDWDRFTGRTIASYLGLVPSEHSSGGSRSLGAITKTGNTHARRLLIEAAWHHKPDYRPGKTMTDRWARASAQAAARGDAGNRRLHRRWGVLTGHKKKHTVACTAIARELAGWCWSLAIMDA

SEQ ID NO: 128669 - protein, 369 aa, unidentified
MSETNVAFQSFVGVDLHKCTVTLVAVDPDGNQIAKLTAPTKCIGKIAAWLRSLPDPVSMAVEACPFVEWFIDRFRWCVHRMDIADATELASRRGKRRKNDPNDALDIALRLARGECPLGFIADEELMQLRKLGRHWRQLSRLLSRTKHSMKSMLNAANIRGPKFDAAGAHRWFLAHGHLLKPAQQDAFADFIDILVLVERQRERLRRKIILANRSEEFVKITELLKTVPGIDEIWACIIAAEIGPFDRFPNADALQFWAGMTADMKESAGRTQSGHITKAGSRTLRWALCKAAVTLCRSDAKQEATRQRLIRQVGGIKAKANVAMGRRLLGILYAMVRDGKPYEIGEPTNHNRAANRARAARKQRKEAA

SEQ ID NO: 128670 - protein, 345 aa, unidentified
MKIVGCDLHTRYQQSAMLDRETGELVERRLEHENGEARAFYAALSGSVRVGIEATGHTRWFERMLAELGHELWIGDAAQIRASMVRKQKTDARDAAHLLDLLLSERFPRIWRPTLEERDLRQLVWHRQKLVWMRNAVGNQLHALAMGEGVCRKKTLFTKKGRVELESLKLGPWASHRRQELLTMTDQLDTSLQKLDQAVAEQAERNPTAVLLMTHPGVGPVTSLAFVLTIGPVGRFERSKQVVSYLGLNPREHSSGGRQRLGAISKQGNPMMRSLLVEAGHTAARLDPELRQDYQRLKLRRGSGVAKVAMARKLAVRMYWMLRSPANYAQLVRMQGSPRGTLVGQ

SEQ ID NO: 128671 - protein, 355 aa, unidentified
MTLNKDTSPSFKGQHFFIGLDVHKKNWAVTIRLQKITLKKFSMDPSPEQLYKYLTIHYPDGVYHSVYEAGFCGYWIHRRLVELGIDNIIVNAADIPTSHKEKDRRQDKIDSAKLARELENDSLKCIYIPTKRQQSLKSLSRLRYQHVVHQTRIKNRIKSFLHFHGIPIPGHFAQSYWSSAFIYWLKTIRFEYDGDNEYLNHYIQTLEYQRESLKHLLIKIREYCKSNTVIRYILSAPGIGIVSAFTFYAELVDMIRFNNFDHLVSYVGLVPSTDSTGEKDVEKGLTPRYSRYVRSLLVECAWRAVRTDPALTLAFAKLSKRMSKQKAIIRIAKKLLNRIRYVWLNQKMYVPAVMK

SEQ ID NO: 128672 - protein, 337 aa, unidentified
MKSPRCFVGIDIAADSFTVAIHQSNVKPVTLLNSGEGFEELLRWLKTNKVNSSNATVCMEATGVYTEQVCYFLHSKGFCVAVEAPQKVRRAFTNDIYKNDSVDSLRIAEYAYRFYDKLPTWTPSEDIVEQVKTLLATREQLTGHLVANKNALQAIERKYVKTPLAEKVYLSSMEHIKEQIKLIDKELKNLISNHPTIGQATALITSIPGVGTLLACNLVVVTQGFTRPLKARQLASHIGICPFERQSGTSVNGRPRSRHYGPERFRKLLYLAAMSLRTHNEAFKRYFLRKVQEGKSKLLVLNNIANRLLKIITAVLQSRTPFIKGFKSLNPTLLCNA

SEQ ID NO: 128673 - protein, 370 aa, unidentified
MRESNTSTTWVGLDVHQNSITAAILAPGAARPVIQQLPGDLNATRRLFRRLGGTGPVRACYEASGAGFVLQRVLTHDGFHCEVIAPSLMPRKPGDSRKTDRLDAIRLVELYRGGLLTPVAVPGEEQEALRQLVRSRLALIGHGTQLKHRIVRVLATHGHRFTGSKSNWTKTHRSWLAGLRTELSGPLQIVLCLHLDHLEYLESQIQALDAELERLARQSGLRSQVEALCCFRGIKTLTAMTILTEIGDIRRFANPRHLMAYCGLIPGERSSGDVQRRGPITKCGNAHLRRVLVESAWHYRHRTGAQLVLNRRRMGQPAAVVAAALKAQHRLSRRFWHLAQTKHVNKAVTAVARELCGFIWSALLAAESAC

SEQ ID NO: 128674 - protein, 348 aa, unidentified
MNTTHYIGLDVHKKSVSYCTKLADGTIVAEGKVASRREDLRKWAKQLPQPWEGAMEATLFSGWIYDTLKPYAAKLEMAHPRMLEAITAAKKKSDGIDAGKLSDLLRVNLLPSCYVATSQIRELRRMLRYRNLVVSEAVRMKNRISGLLMETGVEYNQQRLHGKGYFAELMKNLVEVPDSVRQLLRLSRAALEMFEVTQLGLLKALRTDAHLAERVERLASIPGVGEVTALTWALEIADPSRFPSIGEAQSYCGLTAALNSSADKQKRGPLSKQRNPHLQTVLIEAAKLAPRWNSALAAVHEKELARGNRNRATLEVARKLVAYLLAVDRSGRPFQMPTAATTASAAQG

SEQ ID NO: 128675 - protein, 361 aa, unidentified
MSTNALKTIGVDLHKASLTATVLDSAGTVLERKDLPTKCRKQIADYFASHGPAVQVAVESVGFYHWFWDTVRPKVQVLRLADPAGVRACAGRLTKTDRNDSLLLARLLREDRLPMAYVPEEPVRAVRELCRHRHRLARQLALARRHLRWIALKNNLPGPTNFVSDRAQKWLLSQQSKLSPAHRLTCRQFLDQIITLERQLSDVETALQEAVASHAQLAPTLALIQSVPGIGFITALTIVCECGDITRFDSIDQLSAYAGLCPRVSQSGQSAHHGHISKQGPPLLRWVLQQAAWVAIRCDPNARRIHARIARRAGSKKAATALGRKLLSYAWSVCRQGHPFVWPGTGHKPGPGSVPVWSYDI

SEQ ID NO: 128676 - protein, 403 aa, unidentified
MNYFAGVDWGSSSHAVCVVDQAGRIVVRTEVRHDATGLATLQRELHRLAPSGTIPIAIERPSGLLVDALIEAGHPVVPIHPNVVKACRPRYSAAGGKNDLGDAYLLADVLRTDGHRFRPLEPASDEIKALRALVRSRDHLVAQRLATANQLRALLDGFWPGAAQLFFQIDSPIALAFLQRYPTPSSTSHLGEKRMAEFLRSRGYSGRKSAAEMLMRLRAAAAGRTGPLEEQALGELVLALSRVLETLVEQIAGLTSRVEQQVEALADGILLMSLPRTGKLNAAQILAEIGDVRQRLTSADQLAAEAGVAPVTRQSGKSRSVVFRWACNHRLRRAITTWADNSRHASKWAAAVYAAARVRGRRHPHAIRILARAWVRVLWKVWTTRTLYNVEHHTSARLLLNAA

SEQ ID NO: 128677 - protein, 347 aa, unidentified
MAIVGGFDIHRRQVTFDYLDTVTGQVRRGRIEPACRETLRVWLARFAGRDDVSFAVEGCTGWRFVVEELQRAGITALLAEPAETAHQRGPKRRAKTDKADSRHLRTLVAEGRVPVSWIPPEQVRELRVLLQLYRDLREEQTAWAQRIHATLFHQGVPSLAGRLSDPQARAVLERGQDIGLSPAGAQAVAAALRRMDDLEAEMVPVHAQIAAFARRQAGCKALARELYGVGPLVAAIVWAFLGDTRRFSSSAQAVRHTGLDVTVYSSDDKRTPGHLSHQGPPILRWALFEAGHQGSRASSPDHRYYTDVAARIDANRAALSVARKLARRSHHILRRLGDQAYTPLPGW

SEQ ID NO: 128678 - protein, 323 aa, unidentified
MAKHITICAGIDTGKRKLDVALEGNREQLQVENTSDGHAVLLAWLRRHRVKRVGIEASGGYEQPVVAALRRKRFVVVVFQPAQVRAYAKFHLQRAKNDKIDAALIAVCTAAVRKIHAAPDPRLLPFAEQLTMIDQIGEDIARLKNRIESCRNVEINKLWHEDIVRLESREKAALKALVAAIRKHPDLARRLALINSVDGIGLPTAVAILVRLPEIGRITREQAVALAGLAPYDDDSGDQVGVRHIEGGRKRLRRALYTASLAASFRWNQQLIQLYQRLTAAGKEHKRALVACARKMLIFANTVVARGTPWQDCPPEKAALITG

SEQ ID NO: 128679 - protein, 437 aa, unidentified
MRVMHERVAGIDVHKDMIKVAIRSPGEKRWTRTTEIFEFRTFYGVLQAVARDLRARGVTHVVLEASGVYTEPVYYALCEQDFEEVAVVNPAHVKALKGHKTDAADCRRLAELFECGLLRGSYIPPAELKEVRDLTRYRMKTVQARTSEIQRLAKALESAGIKLGSVASEITGASATAMIEALIDGERRGPVLADLARGRMRTAGKIADLSMALAGRFTGHHALLCRLHRDRITLFDDAVAGLDGQIAGKAGRWQPELDLLKTIPGFGDVVAWAWLAEIGPAPHRHFASHEKLACWVSLCPGNNISARKRKHGRTGDAGTYIKPMLIQAAWNAIRTRGRLQARYSRLVRRFGGEKNPAAKKKAITAIAHTLLKIAYQVLRSGQPYQDLGADFCTRRESPAQQHAYLERRLRKLYPGCAITITISPPEAALAPAADHAP

SEQ ID NO: 128680 - protein, 394 aa, unidentified
MCQQYKIEASMIKHNILFIGLDTHKTSTEVAYIEDQRGAKPIHLGKILSNKASFKKLARQLQSKYPYATLHFVYEAGPCGYWIYRLLTSLAHCCYVIAPSLIPKKPGERIKTDKRDALKLAKLLKSEDLTPIYVPEPEDEAVRDLSRSRETAMKDLKDAKYQLKALLLRNNINSKVKDNWSLQHLRWLAELVLPHPCQQIVLQEAISTITERLKRLKRLDNELTHQVKNWRYYPVVKAVQAMRGVRLLVATGVIAELGDLTRFDHPRKLMSYLGLVPSEHSSGDKRRLGAITKCGNSRARRLLVEGAHSYKHNANISKEMQLRQEGLSKEIIDMAWQAQLRLCRRYNRLMHKGKHRNVVVTAIAREMIAYIWAISREVVLPVVDVKLRLARMPA

SEQ ID NO: 128681 - protein, 370 aa, unidentified
MGNRSMFVGLDVHKETIDVSIAEGDRVGEVRHYGEIKSDLEPLDKVVRALRAPNRRLHFVYEAGPCGFGIHRHLTSRGEDCVVVSPSMIPKRSGERVKTDRRDSQMLARLHRAGELRAIYVPDATDEAMRDLVRAREDAVVVGTQAKYRIKAFLLRQGRRYAGRAGWTLPYRRWLTDLSFPSAAQHIALQEYRDAIGETEQRIDRLTEQLRQLAPTWRWAPVVAAFQALRGVSFITAVSLVAELGDLTRFRHPRELMAYVGLVPSEHSSGLRVRRGAITKAGNPHVRHLLAETAWAYQGKPRIGRRHADRQAALPKTVCDIAWHAQLRLTTRFRRLVARGKAKPKVATAIARELTGFIWAIAQEVSPASR

SEQ ID NO: 128682 - protein, 360 aa, unidentified
MTSTTVAHTPPVVTVGVDTHSDLHVAVALDQLGRRLGELTIPTTPGGYRRLEQWALELGDLSALGIEGTGSWGAGLVQHLRAGGHRIVEVNRPDRSARRRQGKNDTLDAEAAARAVLAGTATSVPKAGEGHVEMIRSLQLVRRSAQKARSQTTNQLRALLVTAPAGLREELRSVTLTELLRLAARWRSGAEPGTHLAVCKHALRSLARRHQQLTEEITDLDHHLTRLVTEVAPNLIAVKGRGPLTSAALLVAVGDNPDRLRSESAFAHLCGVAPVPASSGKTSRYRLNRGGDRQANYALYILAVTRLAWDPRTRAYAAKRRSEGKTTKEIIRCLKRHIVREIYRLLVPLPTTPETATAPS

SEQ ID NO: 128683 - protein, 489 aa, unidentified
MGKVFVGHDWAEAHHDVFIEDETGARLGAGRLRDGLEGVRRFHELVAVHADEPADVTVATETERGLFVGAMVAVGYRVLAVNPMSTSRYRERLSTSGAKSDPGDARVLAEIARLDGHNHRPIAGDSDLAEAVKVLARAHQTMIWTRQRHTNQIRSTLREFYPGALDAFDDLSSGDAIAVLMIAPTPALGRGLSRSKIAAALRRGGRQRRVDERAAEIQTALRAEQLEAPAIIADAVGASVAALVAVTAELAAQITVLEQELANRFEQHPDAKIIRSLPGLGMILGARALGEFGDDPNRFEDAKSRKNYSGMSPITRASGKHHVVLARYARNKRLAGACFLWAFAALSASPGARAFHDKRRANGDTHNRALRALANRLVGILHGCLRHGAFYDELMPILGLRQWCFRSTDSTTQRSSSTARFHARGRQSRRLRLMRCFVTGRVRASHRQRRARPPAGRLRPRPCRGFGSLRRSACRCAPSRAATRRSRPS

SEQ ID NO: 128684 - protein, 340 aa, unidentified
MTTPLYCGIDLHSNNSVVSIQDRDGKQVYERRLPNELPVIIKALEPYKAVLQGCVVESTYNWYWLVDGLMEGGHQVHLANPAAIVQYNGIKYTNDFTDARFLAHLLSLGILPTGYIYPRETRGIRGVLRRRLLLVDQRARHRTSLQSLLARHTGKRLSEGRLKQLDAQGLQELLPIPCASLMATTLLSMIQSTTEAIAVLERAVSAHCVEQPTYQLLTGIGGVGKILGATITLETGSIQRFPDAGHYLSYARCVNTQKTSNGKSKGHANRKNGNRYLALAYMQAAHQAAIWAPQIKRFYQKKQAKSHIMVAKKAVAGKLARAVYHMLTKQEPFDVKRAFG

SEQ ID NO: 128685 - protein, 351 aa, unidentified
METTESIVMKQYVGLDVSLEQTAVCIVDEHGKALWRGKSASTPEAIAAVVKARAPHVERIGLESGPLSTWHWHELKKRGLPMICLDARHAKAALLLQVSKTDPNDALGLAQIVRTGWYREVTVKSLDSQVIRSFLNSRARLVEVRVDLINQIRGMLKPFGLVAGKGGRQPFIDRVRELVADGPLKDAVEALLAALQEVSRQIGILSRRLMALARQDQAGRRLMTAPGVGSLVALAYISVIDAPERFSRSSSVGAYLGLTPRRYQSGEVDRSGRISKCGDPLLRTYLFEAAGIILNRVSRWSSIKAWGTRLARKVGGKKAMMAVARKLSVILHRMWHDGTDFRWSNKEGLPA

SEQ ID NO: 128686 - protein, 425 aa, unidentified
MKRTQNEKILQIKNETLVVGIDIAKKFQFARAFDNRGLELGKLLRFENSAQGFANLDAWLQRIMQRNGMTEVIVGFEPTGHYWFNLGDHLVACGHKLAIVNPFHVKCARELDDNSPSKSDRKDPKTIAMLVKDGRYRDVYIPVGAYQELRELVCERERLQERLSALKNQIIRWMDIYFPEFTTVFKDWSKQAAWLALRHFSTPQNMVEAGPQEILSTWREEMKRPSLKRAERLCLVASQSVGRKEGTVAAISSLRFIMTEYELITMRLEQLKEEMAECLSQIPNAYRLLSIKGMGVVAVAIIISEIGDISRFTDPRQLIKYAGLNLRENSSGKHKGKTTISKRGRRRLRLGLFQAMIPILATNAEFRALHKRNTTRSQNPLTKMQSLIALCGKLLRVTFALLTKGIAYDPEKLALETTTDTVRAA

SEQ ID NO: 128687 - protein, 339 aa, unidentified
MELYAGLDLHSRNTYIGIMDNAFNRVFKKRVPNHLELILQTLDPFRDQIKGFVVESTYNWYWLVDGLMDAGYSSAHLANPSAIKQYEGLKHSDDQHDAFFLAQLLILGILPQGYIYPKKGRPVRDLARKRMFLVQHKTAHILSLQSLIARCCARKVRANDMRHLTVEELEMWLEEEHLVLSAQANLDSINFLKQKIKQLEKAIIQKVKLNKAFKYLLTVPGIGNILAMTIMLEVGDINRFPKVGNFTSYCRCVPSRRLSDGKSKGSGNRKNGNRYLSWAFTEAVHLGRRYNERFRRYYNRKVAQANTSLATKALGNKLARICYYIMRDQVPFREELLSR

SEQ ID NO: 128688 - protein, 343 aa, unidentified
MKITAIGLDLAKNVFQVHGVDERGHALVKKTLKRAQLAAFFASVPPCLVGMEACSGAHFWARKLQGFGHTVRLISPQFVRPYVKSNKTDAADAAAICEAVTRPDMRFVPIKSIESQGLLVLHRARQGFIRSRVAQTNQIRGFLAEFGIIIPQGAYHIQPRVAEILEDAENALPGTVRELLLQLVAHVRYAHEQEQLLEARIKRWHKDNEASSRLAQIPGIGPLTASALVASIGDVSAFRNGRQLAAWLGLVPRQHSTGGKAHLLGISRRGDSYLRTLLTHGARSVIICAKQKPGYEQSWLGRLLKRKHHNVVVCALANHDVRVVWALLKHDRQYRADFSPQAA

SEQ ID NO: 128689 - protein, 341 aa, unidentified
MEQFIGLDVSLKDTFISVRQGGQRIWRGKCPSDPEAIAQVIRRRAANAERVVFETGPLSVWFYHALTAEGLPAICIDARHAKAALDMARNKTDANDADGLAHLAEVGFYREVRVKSFDSMLVRTLVAARNQMLKMTTQLSNQIRGLMKTFGLVVPKGAGRVFEGHVRRLLASDAGLEKIILPVLEAWRGIRARAAELSKQLVASARMNEQCQLLSSIPGVGAVTASSFVAAIEDPENFRKSRSVGAWIGLTTRRYQSGEVDYDGHISRRGDNHLRGLLYEAATVILTRTTADSALRIWGLRLKEKIGFRRAAVAVARKLAVIMHTMLRTGELFDRSIAAEA

SEQ ID NO: 128690 - protein, 331 aa, unidentified
MEQGVVIGVDVSKHELVMAVHPTGDTWTSETTAIAIEAVIARLQTYQPRLIVMEATGGYELPLAAACAAVKLPIAIVNPRQVRAFAHAIGRTAKTDAIDASVLALFGARVEPTPRAVADADTQALAGLITRRRQLLEMVGAERRRLEPAPPTGPITRDLRNHIRWLERRVADVDEEIGTAIQQSAVWRVSDDLLRTVPGIGPTTARTLLAELPELGRLDRRAIAALVGVAPFNCDSGQFRGRRRIWGGRASVRASLYMAALVASRHNVVLAAFYRRLRDAGKPPKVALVAVMRKLLTILNAMMKHHCRWNPKAASTPASTSRPARGVAVLA

SEQ ID NO: 128691 - protein, 451 aa, unidentified
MCRDLEESARMAVSPFHMPRAQDISISEEGPLEDAREVVHGVACGLDVHAAVIVACLVCSGPNGGPRYEERSFGTGLAALKQLRDWLVASGCQMAGMEATGVYWMPVHGVLEGKVPLVVGNPQHMKGLRGHKTDHKDAKWIAMLVRHDLIRGSFVPPPEFRDARELTRHRRQLLQARTAIRNEVHRLLARQGITFGTVLSNVFGASGMAILEALAEGRSVVEELPKLVHRSVKVKVPMLSAALEAPLADIPRYLLMTHLQRLEAVEEDIQAIERKIAAHLEPYREKLDLLQTLPGVSLTSACIILAEIGVDMTCWPTAKHLSAWGGVAPGCRESGGKTHRAGTRKGNPYLCSVLVECAGAAVKKKVCHLGGKYRHLAAQTGSKKKALIAIARKLLVLVYKLLGQNCPYEEPKPQELTDEKRKKAVQRHLQELAKLGVQVDMLPINPKTQPA

SEQ ID NO: 128692 - protein, 323 aa, unidentified
MDKNTNFIGIDISKNTIDVWLPAKGHFTLLNSKKGFKELLKLIETDDWCVMEATGSYYQQLALFLYENKVRVSVMNPLVIKRFIQMKLQRNKTDKSDARMIALYASEQPLKLWHPEPEYIKECKQLNTTIDIYRKQSTALKNKLHSIQSSGILRGEVVKSLKRQIKQLKKEVHSLEQQIEELIKNHESQMLTNISSIPGIGKKTAMLLISTTNAFSEFENHKQISAYFGIAPVERTSGTSIRGRSRISKSGNPAIRINLFLCSFTACKTNRQCKALYKRLVNKGKSKKLALVAVSNKLLKQSFAIAKSGIPYDPEYRSSISVH

SEQ ID NO: 128693 - protein, 350 aa, unidentified
MMIIGCDLHTRYQQIAMLDTDTGELVERRLEHENGEARAFYSALLGPVRVGIEATGYTHWFEDLLAELGHELWMGDAAKIRASVIRKQKTDARDAAHLLDLLRQDRFPQIWRPSPAERDLRQLVWHRQKLVWMRGAVKNQLHALAMGEGVCRKKKLFTAKGRKELEGLALGPWASYRRQELLRMFDELAAATAQLDLAVEQAAKSQPLAVRLMTHPGVGPVTSLAFVLIIGPVERFERSKQVVSYLGLNPQEHSSGGKQRLGAISKQGNPMMRSLLVEAWHTAARFDPALKRMYQRLKFRRGASVAKVAVARKLAVRMYWMLRSTADYAQLVRMQGSPWATLVEDSPSLG

SEQ ID NO: 128694 - protein, 359 aa, unidentified
MDGDLLYHGEKNSQILFRRRPMELYGGIDLHSNNSYVGIVNEENRAMYKERHKNELPLILSALAPYKSELKAIAVESTFNWYWLVDGLKDAGYPVHLANPAAMKEYQGLKHKDDKKSALWLANLLRLKILPEGYIYPKEERPVRDLLRKRLHLVRHRTSHILSIKNILSRNLGATIKSDDVKTLTEKDVQRLIPDDCLRLAITASLSTVHHLTGQVEQIEKTIIGKVRLRDEFKGLLAVPGIGVTLGLTIMLEAGDIRRFAEVGNYASYCRCVKSIRTSNDKKIREGNRKNGNKYLSWAYVEAAHMAKRYYPAIKRYHDKKAACTNDIVAIKAVAHKLARASYYVLRDQAVFDEKKLFG

SEQ ID NO: 128695 - protein, 410 aa, unidentified
METIVERPAALDVHKAQVTACVRVPAADGKGREQHVAEFATTVRGLLTLRDWLAAHRVGQVTMEATGVYWKPVWAVLEDEFPLLLVNARHVKQVPGRKTDVSDASWLCQLAEAGLLRASFVPPKPIRALRNLTRYRKTQIQERAREANRLHKALEDTGIKLDCVATDILGVSGRRMLEALINGTTDPEVLADLARGRLRAKLPALREALEGRFDHLHSVWIGAILDHVDFLDAQIAGLTDTIGEQIAPFEPAVELLCTIPGVQRRTAEVIIAEVGVEMSVFPTAKHLASWAGLCPGNDQSAGKRRSGTSRHGSKWLDWALEEAALAAVRSNDTYLAAQYARLRPRRGHKKALGAVKHSIICACWHMLTTGELYHDLGGDYYQRRDPQKTTRRLVRQLEALGHTVTLQKAA

SEQ ID NO: 128696 - protein, 380 aa, unidentified
MRTVSGLDVHKDSIFMCILDEQGKKTEEKFGVTTREIKRMAVVMHSRFVSDVCMESTGIYWIPLWRLLETDFKLHLVNPQFLKQLPGRKSDVKDAQWIATALLKELVRDSFVPDGNIQRLRQYGRRINEINKDTVRCEQRIDMLLQRCNVRLSNYVSRTRSRSYRKVVDSLIRGETSVDELIRLIHGRTVNRHGKSAVHDALEGCIVESDRDLLGQYTQMLDMYQSQKQQCHEAMVQMCMNLYREAFLFLLGIPGVKELSAAIIISEIGDNMELFATAAALVSWAGLRPRNDESAGKIKSRQITHGNKYLRKALIECAWSAARTRGSVFYCRFWHLKGMKKHHNAIIVAVAREMLTVIWTLLSRHENFDETYHLKKKTAS

SEQ ID NO: 128697 - protein, 362 aa, unidentified
MTISVGVDLHKTQFTVFARVGDGIFGKYLTTEDGYQEFLSQVQVWRNKGQSVRVGVESTGNTRYFKNRMEREGIEVRVINTLKFKVVNESVKKTDRHDAATIAEFLEKDMLPESRLCSEATEQLRRLLKVRTTLVRTNVTVKNQIHGLLTGLGMQDSRASLQSKRGRQRILDALAGADNGLVVQPLFQTIDRLEENVKLVEQKLTLLAENDRVVELLQTIPGCGKVTAWTIRAFTDDIRRFESFKKYSAFAGLVPWVQCSNTTEYYGRITKRGPEELRTALVQLVLGMRRSKKTLSWRLMERYTAMKQEKGTGRTIVATARKLSKIIWCMLTADEPFDPSLMIDKRLKQKADSMRAALEVTA

SEQ ID NO: 128698 - protein, 399 aa, unidentified
MRKVAGIDVHKDFLEVAYRLPSGRIETKQVEYTLEGISRLIRLLRRHGITDVYMESTGDYYLPLYYALKGAGIRPHVMNAYKIHRPEPNKTDKKDAIWLLEIGESELFSDSYVPDEDIQALRFLIRKRMKLVDRISDIKREINSILWRLGLQAAHYAKKLRSKKKRMLLLALLEGRLRPDSISDSDVRHLYDILSRPEFRAYVFVLRSRLADLAHLESQLEEFDREIAALARKFEDAIRILMSVPGISFILAVGILAEIGDISRFPSPAHLASYAGLVPTARNSGGKRRSGRPSKKSNKYLRRYMFLAGMAAVRSNSRVVREFFMRLLGRGKHYKVAVVAVARKLLCVIWYLLRRGEFWCEDGYFKRPRRLPRGRRVRISVREAIAILVRAGYEVRRKV

SEQ ID NO: 128699 - protein, 345 aa, unidentified
MKTIMIGLDLAKSVFQVHGVDGVGQVFVRKRLKRGQVEKFFAKLAPAVVGMEACGGAHHWGRVLQAMGHEVRLMPAAYVKPYVKRNKTDGRDAEAICEAMQRPSMRLVAVKRPEQQAILAVHRTRALFVRQRTMTANALRAAFAEFGLVRPVGNKGLAELMALLPEPEGVPAAAHGAVMMLARKWQALDADIKVLERQIVQSVRSNEGARRIMAIPGVGPITASAVVAAVPDMKQFRSGRGFAAWLGLTPRQNNSAFTRRSGGISKQGQRDIRCLLILGASSHLRQEKARRRMKAPTNPWLTGLLARRPVKVAAVAQAAKTARIIWALLAKDQCYRAPAQLQHAA

SEQ ID NO: 128700 - protein, 342 aa, unidentified
MKLYGAIDLHSTNNVTVVIDEKDKIVYEKRLPNDLDLILKELSVYQSRLEGMVVESTYNWYWLVDGLMEQGYKMHLANTAAIQQYEGLKYTDDHSDARWLAHVLRLGVLPEGYIYPRAERPVRDLLRKRSQLVRQRTTNLLSIQNLMTRNTGSSLSAKRVKALDVQQIDELLPDADLALAVKANLSVLSSADDQVQLLEQTVTQRVKLRPQFRFLKTVPGIGEILALTIMLETGEIGRFASVGNYASYCRCVGSQKISNGKKKGQGNTKNGNKYLAWAFVEAAHFAIQFNSKIKSFYQRKKAKTKIAVAIKAVAHKLCRACYYIMRDRVPFNITKAFGPKKV

SEQ ID NO: 128701 - protein, 392 aa, unidentified
MYIVGIDIGKNHHEASIVSPEGKQIGRSLRFATTHKGADSLMSFIFKNIGNSPCVFGMEATGHYWYPIYSFLKAKGYTIYVINPIQSDSLRKMYIRQTKNDSIDSFLIAEVIRFGQFGTTSMADENILAMRQLCRYRDSVISSRTEIKLRIGTIMEQIFPEYEKQFSSLWVSTSIGILEKYLTPENIENAPIDELFEIIKDKSHNRLTKAKAISIKEAAADTFGIKIAQDAFSFQLKQLIDRMNFLDKQIEALDCQILEYYEKFDCYLHTIPGIGMIAAATILAEIGDINRFKSSSALVAFAGIDPTVRQSGEFSSTHNHMSKRGSPYLRHAIFLAATTCSFHNSPLNAYYKKKREQGKHHLTATGAVARKLTTVIYAVLRDGKPYEPKKFC

SEQ ID NO: 128702 - protein, 394 aa, unidentified
MSQSSTRFVGMDVHKETIAVAYAAQEPGAEVTDYGTIGTRQCDIDQLIRKMQSKAQHLLFIYEAGPCGSWLYRYLQKKGYDCWVVAPSLIPKKAGERVKTDRRDAVQLARLARSGDLTPVYVPTVDDEAIRDLTRAREDVISDLKDAKFRLKAFLLRQDIRYAGRANWGPAHLRWLAEVVCPTPAQQIVFQEYVRTVTEHTERLGRLEQALREQVKTWRLHPVVDALQALRGVQCTVAVTMVAEIGDLTRFEHPSELMKFLGLVPSEYSSGQRRHQGGITKTGNTHARRVLVEGAWAYRYPAKVSRQLQLRLAHQPKMMQDIRWKAQVRLCKRSQRLVAKGKHANVVTVAIARELVGFVWAIAKEVPVTLERPTDRWPDCSLVNDELRRLANVH

SEQ ID NO: 128703 - protein, 476 aa, unidentified
MPRKPSSRPDLVALPQLSHETLYVGVDVGKRAHVAGFLSSTLLTRHQRFEHCPALAFDNSREGFRSLLDRIQTYVPPTQVQALLEVTGHYHRALLQYLQEVDIPVYVIHVQKRQEGLLKTDKRDALGLANLLYNQLEKGIQVGDPLQAVRRLVSPTEAAAQLRGMVQHHYELVAESTQRKNKLTAICDELFPEFTRLLRDPNLPTALALRSHFPTPATLAAASFWELRQARGRTCSVSDAKLVELQRLAGQSIGTKDPARVRGLVFEQKQLITELKLIAEHLQQLETEMIQVVEHCREGKILTSLPGIGPQAAAALIATIGTIANFERAAQLKSYFGWVPKVAQSGSSLDWTRLSPRGVRQMKQTMYLIVWRAIQWDAEWKQMYERLISSKCRYDERTRRLIGREKVIGRLAGQMTSVIYALLKQDLELLAHLAPGAEPPEPQLYDPEIHRQHRMGQYHPRGAAGKPPQVLQLPSA

SEQ ID NO: 128704 - protein, 347 aa, unidentified
MKKIIIGIDISKEKIDASAIDVRNSQLGVLKLDYQAFENRPMGFRRMLVWARHLIKGITLEEVMFCCETTGGYDRSLCDYLYAKGLDIWRESSLQIKRSSGLRKGKDDKADSLTIAEYAMRHMDKAVYYISPSETVRELKALLLYRRKLEQEKTSKKVRVAELKATAAKSKSVSFILRDAQKSIRALEKSIKECEKQILALYDSDEELKRSYDHLTSIKGISIVNATAMIAYTNNFKNITTSRKLASYYGIAPFREMSGTSVNKKAEVKCYSSSMLRAYLTQAAQWTIKEHGIYREYYLRMSAKGKCYGVILNNVKNKLLHLSVSLIANDMDYEENHEFLRAQRMAQ

SEQ ID NO: 128705 - protein, 351 aa, unidentified
MQYYVGVDNHKKFSYFSIMNQRGVVVKEGKVVNTKEAVNRFLGKEYTKDTSAVLEAGRNWTVMHDWLEGTVDEVTLAHPMKVKAIAEAKIKTDKIDAKTLAHLLRCDLIPEAYVCDKETRITKNILRQRMFLVKLSTMVKNRIHLIIDRHPQIRGQIDPSDLFGKQGIEWLSLVKLPKEDRRILDEELELLMYLRQKISASDHWVVQLGKDNMQAKLLMTIPGIGKFFALLIATEIDDIARFRNKKKFASYAGLIPSVHSSADKRFYGKIIGHGNKYLRWALIEAVWPAIKKDLSLRELYESLKVRKGANKAKVAVARRLALIVYRVLSQRRPYVVNYSGCPHIILAEAVV

SEQ ID NO: 128706 - protein, 407 aa, unidentified
MSNQELIRRRQYCQIVKEITRSDQYLVVGIDVGKDKHHAFMGSATGKSLFRKLIFENDLDGFSRLLKTAEEIKSQNGLSKIIYGVEPTGNYHKPLASHLIRCDCNVVLVSGVAVKRNRELLDGRWDKHDTKCAANIADLVSRRRCLYYDSPSPGIIELRSLLSLRRRLKKEEHSLRMRSRNNLLAQYFPELDRFYSACESESLAIVKWCLDPDKIAGMDFESFFQMVTRTRRGTAQLLRLRKIHQQAIESIGCPMGSAAAFEAQLLVEKLKQVRRQLKETETAIKDVALEFAEYSYLLTIPGFWPYISARVLASIGDPFRFENRKQLIKLAGYDLCAKRSGKTSDKAIPVISKKGNGELRYALYQAAHVAAARVDLFRTYFTRLLRGRERERGLKQRCALSWLPKCW

SEQ ID NO: 128707 - protein, 340 aa, unidentified
MNQSMTIGIDLAKHVFFVAALDGSGKPARRKKLRRQEVLPFLANHPGAVVGMEACSGAHHWAREIRALGHSVQLLPAQHVKAYLRGQKNDYNDALAIAEAVQHGRIRCVEIKTVDQQLDQSLHRLRQALVTEQTGLINRTRALLAEHGVDLPEGKYRFRQTVIAQLEDAENGLPWRLRELLGRQYQLFIALEQELAWYEREIKTKAAENEACQRLMSVPGYGPIVSSAFYGWLGSGQQFRCGRDVAAALGLVPKQYSTGGKTVLGSISKREDRHLRALLVHGARAVARYAKERDDRLSRWVCSLIERRGYNKAVVALANKLARIGWAVVARGQAYQAVPA

SEQ ID NO: 128708 - protein, 400 aa, unidentified
MRKPKQRQTKLRQSKQRKPNDLSRSLAALDLDCTLIAVIEMGASSWLVAGLVPGVERQPLKKLKTDEHSLLALLERWRGEAVRSGYAITRIVVAYEAGRDGFWLARWLRAQGIEVHVIHAASVAVSREHRRAKTDRLDTELLKRAFLGWLRGERDHCKMVAIPTVAEEDARRPGRERESLVGDATRIINRIKSALARLGIRTFNPTLKKAPVLLNDLRTPEGDPIPSNTLDEIKRDMERRQLICEQIHSIEQERVKRLEQAPNTGPNAMVHLLARVTGIGIETADTLVREVLTRNLRDRRAVARYGGLTGAPNQSGSFNREKGLARSGNPRVRRCMIGLAWRFVRLQKDSPLVKWFELRTANARGSRKTMIVALARKLLIALWGLVHEGVVPEGIVMRPA

SEQ ID NO: 128709 - protein, 468 aa, unidentified
MHRLGRLAGTNPILREPMSRRGKSKKKKGVPMLSYLNLNAAGVDIGATEIYIAVPGDRNPQPVRCFSTFTEDLHAAADWLKACHIETVAMESTSVYWIPLFQILEARGFQVFLVNAHHVKNVPGRKSDVSDCQWLQYLHSVGLLRGSFRPEQAVCTVRSILRHRDGLVQMASSHVQHMQKALDQMNLQLHHVISDITGRTGITILEAILAGERNPHQLAKLRDRRVKATEETIAKSLVGDYRREHLFTLRQSLAAFRQYQNWIADCDHEIAQYLEQFESKLDPPPRPTSPSEDGSKPKANEQRFDLQTHLHRIFGVDLTQVPGIQVLTAQTLLAEIGPDLSRFEDGSALASWLGLCPDNRISGGKVLSVKTRKVKNRAATALRMAAHSLHHSQSFLGHFYRRMRAKLGAPKAITATAHKLVRIVYHMVTTGHAYDETICAQNELQNRQRLEARLRKQARELGLQVVAA

SEQ ID NO: 128710 - protein, 450 aa, unidentified
MEQSTRFVGMDVHKETIVVAVTASGEVGKATAYGTFPNTAAVLEKLVKRLRQAGDGPIKFCYEAGPCGYGVHRTLTKMGEDCMVVAPSMIPRKSGDRQKTDKRDAASLAVLHRGGLLTAVWVPDAAHEAMRDLIRARLAAVRAVRAARQQLSAFLLRHERVYPGNRTPWTKAHRGWLADQTFAQPAQRIVLEESIEAVRLGEQRRDRVDGYLRAQIPTWSLFPLVRNLCALRGLDMIASAGLAAAIGDPSRFASAPHFMAYLGMVPSEHTSGPKRRIGAITKAGDIHARTMLIEAAHSYRYPARIARHKLAAVDAVPEAVRAIAWKAQTRLCQRFRQMTAKGKPNQVVVTAIARELAGFVWSIACITSDPAGSDNAVTEAYDEVTALKDEVMMASEEAAQQVQQITPDRPPRRAASPAAGRHDAPRGPTRVNRRRICGREPDGMISHHTG

SEQ ID NO: 128711 - protein, 407 aa, unidentified
MEVVYRCCCGIDVHKKVIVACLVNGGEQELREFGTTTSEIKTLANWLTESGCEMIAMESTGVFWKPLYNLFELMDLDAMIVNAAHMKALPGRKTDVKDAEWIADLLRHGLLKASYIPNREQRELREITRYRKSLTEERCREVNRLQKILEGANIKLDSVVKDITGKSARKLLQRIIDDDIPDSDEVSKLVHGRMRPKLEQIVASIEGITTPLQRKLLAQIIDHIDDLNRRIGELDKLVQEYMAEYEAAIEAIDEIPGIARRSAEVILAEIGLDMGRFPSAAHLCSWAGVCPGNYQSAGRRKHGKTTKGNKALKTILTQCAKSAKTVKSSYFFAQYQRISARRGKNRATLAVAHSMLIAIYHILKNKTAFHDLGSDYYDSFNRDRKISSYLKRLKALGWEPDAIPSPA

SEQ ID NO: 128712 - protein, 343 aa, unidentified
MSIVPQTVFVGLDYHAESVQVCVLDRQGKQLANRSCRNEWRAVQQVVGRVCGKEVPVQAAIESCCGAANLADELISCAKWSVDLAHPGYVARMKQSPDKTDYSDARMLADLERVGYLPRVWLAPEEVRELRRLVRYRQTLVQEQRTLKLRIGAALREARQHPPRDLNAWTKAWVAWVRSATHLSPNARLVVERQLARLAALRQEIQEVEELLEEQTQHDPLVQKLRAQPGIGLITAATIRAEIGRFDRFRSGKQLARFCGLSPRNASSGQRQADAGLIKAGNRQLRTVLIEAAHRLMRYDERWLKLNHKLRFRGKPGSVVAAAVANRWVRGLFHQMQPANLAA

SEQ ID NO: 128713 - protein, 346 aa, unidentified
MDDITIIGIDLAKNVFQVHAIGASGQVVVSKAVRRAALLPLLSRIPPSLVGMEACASSHHWARELTKLGHEVRLIPPAYVKAYVRRQKNDAADAAAICEAVSRPSMRFVPVKSEEQQAVLMLHRTRALLVGQRTALICALRAHMAEFGVVVPRGPRNIDPLLVILADETDDRLPAVARLALECLGRQMAMLRAEVERLDRHLLQWHRSNDMSRRLATIPGVGVVTATALAASITAPAMFRSGRELAAFLGLVPRQSSSGGKERLGRISKMGDRYLRTLLVVGATAVLRHAKAKGSPSRIWAEALLTRKPFKLVAVALANKTARIAWAVMVRGEVFRDGLETGAMAV

SEQ ID NO: 128714 - protein, 410 aa, unidentified
MVKENFIYVGIDLHKETHTAVMIDCYNNKLGEITFPNRPADFPKLVTKVKKCNTDAKEVVYGLENAYGYGRALAVWLIDKGYFVKDVNTAISHRQAKHRGAMYRKSDSDDAEAIALATLNMLDKLPDACPNDAYWSLGQLVHRRDNIMKQRTRLVNQLHEQLCIAYPSYKSFFNDISRPTALYFWEHYPSKKYLKGKSVEDLRAELVPVSHNKCSTKTCEKILDAVASDKVKNNAYQDARDMVTLSIVSDLQHYGSQLTEVDKMLEQMYKMLGCTLTTIPGVNVITAVKILAEIGDIKRFANANKLAQFAGIAPLHLSSSGKGKDLATKQGNRRLQATIYFLAIQMVQVSSKGTPRNSVVRAYYEKRKAEGKTSQQALICISRRLISIIYGMLKHGTEYRMPVVESAGEK

SEQ ID NO: 128715 - protein, 358 aa, unidentified
MLSKGTTIDFNGQGVYAGIDIHLKSWKVTIMLGDREHKTFSQDPNAETLWNYLRKNFPGAVYHSAYEAGFCGFSAHRDLVGFGILNLVVNPADIPTTDKEKRQKEDKRDSRKIAKSLRNGELVGIYIPGKGMEELRGLVRYRKTLVKEISRHKCRIKSFIYFNGIKIPLEQDGISKHWSGRFTHWLREVKLSTAHGKMVLDDTLDTAELLRKKLLKVNRHLRQDVGNGEYLEKLRLLQSIPGIGLISAITLLTEMEDILRFRNLDQLCSFVGLVPSTNSSGEKENVGRITRRNNRFLRSIIVEAAWMASRKDPSLLYSYGLLCKRMEPTEAIIRIAKKLLNRIRYVMKNETEYVHSVI

SEQ ID NO: 128716 - protein, 355 aa, unidentified
MSGEKYIGLDVHQATISVAVRDSQGNIIMESILETKASTILDFFAGLRGRLSVTFEEGTSAAWLYDLLKPRVAEVLVCNPRKNAALKQGNKNDKMDARKLSERLRLKDLQSVYHGENGVRMLRELARSYLTIVKDLTRVMSRVKALYRSWAIPCAGRDVYYTRHRKEWLDKIQEPGVRCRAERLYQQLDMLQHLRQQARRELLAESRKHAITAKLREIPSLGPIRCALAVALIQTPHRFRSKRQLWTYSGLGLETRDSGEYHIVQGQPRKRKKQAFVRGLNKDYNHDLKGLFKGAATRASVQPGPFQEFYQRSLAKGIKPTMVRLTLARKIAAITLTLWKKGEDFDIHKLNTQAA

SEQ ID NO: 128717 - protein, 382 aa, unidentified
MDVFTASFDGHPGAEFSATMMIWTPLTLLVSSSTLVKTKQEESEMNTSVIGLDIAKNIFHLYTLNADNKVIKKKLKRAQVLTFFANYPVSTIGIEACGSSHYWARELTKLGHEVMLLNAKFVKSFLVGNKNDFNDAQAIFDAVGRPNKRVVAIKTEVQQDMQLLHNLRQDLVKRRTAVVNQIRGALLERGIAIHKGVDQVRKQLPDILEDAENGLTALCRELIAEQAERLRELDKAIKEQDKRLGRLSQADALSRRMLDVPGVGPITATIVASDIGDGKGYASSRDYAASLGLVPGQHSSGDKPRYLGISKRGNRYIRTNLIHGARAVVRNCAGKTDQLSRWLQALVERRGFNKAAVALANKNARILWAMTMKNEAYQGAPA

SEQ ID NO: 128718 - protein, 474 aa, unidentified
MVTRAPEVILDEAHEQIVERVCAIDVAKDSGKVCVRVPAESGSGRRVSKVWDVPARTKAVIELGDHLACQGIQKVTVESTSDYWRIWFYLLEARGLDVQLVNARDVKNVPGRPKTDKLDSIWLAKLTEKGLLRTSFVPPRQIRVLRDYTRLRVDLTAERTRHWQRLEKLLEDALIKITAVASRIDLVSVREMIEALIAGQRNPRILAGMARGRMRLKHADLVEALTGQFDDHHAELARMLLDQIDALTVQIDTLTERIDVVLADIPVPAPQPEPDPDDHGPGTSDDAEVTAVIRPSHGGAPRPRTAAPAVTALDLVDILDEIPGVGRHNAHEIIAEIGLEMTRFPTAGHLVSWAKLCPRTIQSGAKSSAGKTGKGNRYLRAVLGDAAAGAAKTQTFLGDRYRRLIKRRGKLKALVAVARSILVIIWNLLANPGMRYHDLGVDFHTKRMDTERRTRNHIRQLEALGYTVTLTAAA

SEQ ID NO: 128719 - protein, 410 aa, unidentified
MEVKYRRCCGLDVHKDTVVACARIVSDGEVVSEVRTFQTTTVSLIALSEWLAENGCTHVAMEATGVYWKPVWHILAGGDFQLVLANASHVKNVPGRKTDVNDATWLADLLAHGLIRASFVPDTQTQELRNLLRTRKQLVREKASHILRVQKTLEDANIKLDSVITDVMGMSGRAMIEALIGGESDPAKLARLANYRLKTSQEKLREALRGRVTNHHRFLLHLHLNQIDGLDASIASIDLQVEAGIAPFRVAVELVTSVPGVGVLGAQVIVSEIGTDMSRFPSDGHLISWAGICPRNDESAGKRRSNRLRKGAPWLKTTLVQCAWAAVRKKNSYLQAQFHRIKSRRGPKKAIMAVAASILTAIYHMLKDGTLYQDLGANHFQSRSKGQQTKRLVKRLADLGYDVALTPVTN

SEQ ID NO: 128720 - protein, 420 aa, unidentified
MKVVYQTCCGVDVHKSFLVATIIKTTSGVEPSYHKKRFSTFNNSILQFKEWLVENKCRDVCMESTGKYWIPVFNLLEDEINVTIANPKWVKAVKGNKDDTKDSKWIGDLFRLGLVPGSYIPCKPIRILREFTRYRYKLTSCRSSEKNRYQNALTVCNVALDSVVSDIFGKSATSVIDYLIKQSDNSISHEEIASRLLRSLKKKSDSVIESIEGYQMTDSQKYRMRLVRAHLDYITSTINDIDTMLDSLIASYENAVQLLCTIPGVDRNSAITVVSEIGTDMTPFSNSKRLCCWAGLTPGNNESAGKKKSVRITRAGVYLKPALVQVAHAAVKSDKSPYYKQKYERIMKRRGKKRAIIAIARMILTAIYQMLSTGEEWNPTDLYKVDMPEPLKEKQKDKAIKQAKKLLLREGIISESQLVS

SEQ ID NO: 128721 - protein, 355 aa, unidentified
MNDAKYIGLDVHQATISVAVLDSSGKLVMEAILETKAETILQFLRGLSGSLSVTFEEGTWAAWLHDLLQPHVTRVLVCDPRKNALLKAGNKSDRIDARKLAELLYLNKLNPVYHGEQGIRTLKELARSYLTITRDLTRVMSRLKAIYRSWAIPCAGQQVYAPRYRKEWLAKISEAGVRRRAELYYQQFDSLAALRQGARRELLAEGRKHLNTRLLQQIPSIGPIRAVLLLALMQTPNRFRTKRQLWAYCGLALRTYTSGEYRIVGGQLKRSKTVLAIRGLNRNHNHDLKNIFKGAATWAASNHGAFQTFYEACVAKGMKPHMARLTLARKIAAITLLVWKKGVRFDAEHLKQQAA

SEQ ID NO: 128722 - protein, 392 aa, unidentified
MIYVGIDVAKDKHDCFITNSDGEVLFKPFTISNNRNGFETLFQRIQSVSDDSNKIKVGLEATGHYSYNLLGFLLDKGLTTFVINPLHTNLYRKSLSLRKTKTDKVDSRTIATMMMSDMNLKSYSDTSYHNEELKSLTRYRFDKVKERAKLKSSVSRLVCILFPELEKLVPTLHMASIYALLSEFPSAEAVANAHLTRLSNLLSESSKGRYGKDTAVMFRDAARSSIGSHMPAKSLELKHTIKLIQELTAEIAEIEAAIKRIMDEEIQSPILTIPGISYRMGAMILAEIGDFSRFDSADKILAYAGMSPSTYQSGQLDNCYSHMEKRGSRYLRYALYNATKYVCHWDKSFGAYLEKKRSEGKHYNVALSHATKKLVRLIFAMEKSGKAYLPTT

SEQ ID NO: 128723 - protein, 335 aa, unidentified
MLYAAIDIHKRTFQAAVLDVETGETVERRFGATREELNDWALPLQGRVAAVAIEATNGWRWVWRELSARGFDVRLVDPAQAKALRGRIRRAKTDRLDARWLCVLLAKEMLPESWLPPAEIQTLRDQTRLRKALAEDRTRWAQRLHALLTHEGWPCQRARLLTVEGRRWVNALSLSPAARSQVERLLRLIEAVESELRSLETELRRFARSDRRCIALQTIYGVGPILACHLLAELGEASRFRRARQAVRAAGLDPVVDESGETRRRGRLAKHGAPALRWALVEAAQHAQRANSPDRGLYTQAATRVGSKRAVLTVARKIGRRAYHVLNELETQAAA

SEQ ID NO: 128724 - protein, 308 aa, unidentified
MTTIYTGLDIAKLNLQLHLTGRIHDLPNTAAGHRRLCKLLAAQPGGHVVCEATGGYERAVVAALQAAQIPVSILNPARVRHFARAQGQRAKTDDIDAAGLTAYGQALQPKPTAPRTEQEQQLTELVRRRVQVLEFLVAQRLQVERLTLPALRRQAQSLIRRLERDLKQIETQLAALRAQTAGLDARAQKLEAITGVGQLTALSVLAELPELGTLNRHQAAALAGLAPHPRDSGQWRGQRHIGGGRAPVRRALYMAALVAARSNHVLKGFYQRLRAAGKPAKVALTAVMRKLIVLMNHTLKNPNFVLQN

SEQ ID NO: 128725 - protein, 319 aa, unidentified
MAQKDLVVVGIDVAKDKVDSCIRAHALRQTFPSTVQGHRKLVGWLRKHQVGKAVMEASGGYERDWAKLLREAGIEVRIVDPKRVRSFALSAGRLAKNDAIDAEMIAWFAETFSAAPAQKHDAAREELQTLVKARLSLIDVRMRLVSQSEHAAPGLVQKAHAHILKSLASEIAKLEAAICAKIKSMPDFVERAEIIESVPGFAETSSANLVAGMPELGQVSDEIAAALIGVAPYDDDSGKRRGERHIKGGRRWVRNAIYMPCVGAATRNNPVLKAYYQRLIAKGKKPKVALIACMRKLIVILNTMIARRQKWDPSRYALS

SEQ ID NO: 128726 - protein, 386 aa, unidentified
MKDETFVPREYDVFAGLDVDKKSIAATFSSPQGFIRSLHMPYSVDYLLNHVRKHFGDQKVAFVYEAGPTGYGLYDGLVAQGYRCLVAAPSMIPRAPGQRVKTNRLDSRGLSESLRGGQLKSIHVPSPIYRELRHLTQLRDTVVREAAAHKQRIKALLLLEGIGFPPATGGRQWTLRVKAQLRKLRCSRTVRFKLDQLLDSLEFCEKQVVSSTKEIRRFCKEDVELFQSIEYLMSIPGIGWIVASQLLARMGDWREIDNVRQLGSFLGLVPTENSTGDSVDRGSITRAGDGRLRSKMIQAAWSAIRQDGELREFYRSVCQRNPRGKGARIAIVAVARKLSTRIYAVLKKQRPYIVRKQVHSAPLTQEETSPQGTTRRCAEPGETDNS

SEQ ID NO: 128727 - protein, 343 aa, unidentified
MQTITTIGLDIAKSVFQVHGVDASGQVVIRRQLKRRSVLTFFQKLPACLVGIEACASSHHWSRELQALGHTVRLMPPAYVKPYVKRQKNDMADAEAICEAVTRANMRFVPTKTPEQQSCLMLHRTRHLFIRQQTAVINSIRAHLAEFGIVAPVGRKGVTELLGIVADPIDKRVSEVARACLAALGTQLLALKEQIVEFDRMILAWHRSNQTSKRLHYIPGVGPMLATALVASVADPSTFRSARNFSAWIGLVPKQHSSGGKERLGSISKQGDRYLRSLFVAGALAVIRYAKIHGTGHRPWLTALLARKPTKVAAIALANKIARMAWAIMTKGERYKEPVALAR

SEQ ID NO: 128728 - protein, 408 aa, unidentified
MLWGRRRGCGTIVATTQPMERPVKRNDLSRSLIAFDQATTLVAVVELSLRDWLAAGLIPNLTRQPLKKLRSDPEALLGLVLRWRDQATKAGGRIKRIVVAFEAGRDGFWLARWLRARGVEAYVIHPASIPVSREHRRAKTDRLDVGLLMRAVLGWLRGEPKHCHMAAIPTVAEEDARRPTRERETLVREQTRAVNRIKSMLIRFGIRTFKVKLRQASKHLEALRGLEGEPLPPNTMAELRRDLARLQLIRGQIREIEKARLERLKRAPRQGTHPMMHMLARIMGIGIETADMLVHEVLCRKLRDRRAVARYGGLTGSPDESGSKRRERGLARAGNARVRRGMIQLAWRWLMFQNKSALAQWYRARTAGGTLGLRKAMVVALARKLLITLWRYVTIGEVPAGAVLRPAT

SEQ ID NO: 128729 - protein, 335 aa, unidentified
MQYALTQVLPDVPAGGVCAGIDWATADHAACVVDMAGRVTDRFSAAHDKAGITALITRLRRSKVTEVAIERGDGPLVDALLAAGLTVVVITSRQVKNLRSRFGAAGAKDDRFDAFVLADTLRTDRARLRPLVPDTPATISLRMAVRARRDLVRHRVAVCNQLRAHLAVAFPAGITLFHDLDSPISLAFLARFGSQDAAAGLDEQAIGAWLATIAVRGRPAPASVLHARLQAAPPGATGTDGAAQAGITAALTATLTALSAQIKALATQIAGQLAAHPDRHIFTSLPRPGTVRAARLLAEIGDCRSRFPDPESLAGLAGVAPVTRRSGTRTAHHFR

SEQ ID NO: 128730 - protein, 344 aa, unidentified
MKSSKIIGVDLAKTVFQLALADEHHHVAQSKRLNRTQFREFFVKHPPVHVIMETCGTAHYWARTLVAMGHNVTLLPAQYIRPYVRRNKTDANDALAIVEAARNQSIHTVPIKSEYQQALQSLHRLREQWKHTRTARINALRGVLREFGVLVPMGPKAAITTTRASLESLPVWLHVSVQDVLDELTDIQTHITSLEKQLKQMVKADPVIQQFMKINGIGLLSATAMRASVQSPAQFKNGRQLSAWLGITPREYSSGDKRYLGRITKKGDKYLRTLLIHGARSVMARNKIRLRENEKLTGLQQWAIQLEQRVGHNKATVALANKMVRILWATWMHQREFDGDYAVR

SEQ ID NO: 128731 - protein, 346 aa, unidentified
MTMVETTRPVTGGVDTHLDVHVAAAVDASGGVLGVQPFATTTAGFVELHGWLETFGSLERVGVEGTGAYGAGLARYLRSRDLEVIEVDRPNRQLRRRAGKSDTIDAIEAARAALSGRASGIAKTADGNVEAIRVLLIAKRSARDTRIKCMNQIRHLGFTGPDELRERLRGVPRGRLAGTAAGLRPTAGSDPVVYATKLALQTLGRRVVDLETTTQRLDATLDQLVCATAPNLVAVAGVGIDTAAILLVAAGDNPERIRSEAAFAHLCGVAPIEASSGKTVRHRLNRGGNRQANHALWRIVFTRMSADARTRAYVARRLEQGRSKPEIMRILKRYVAREIYKHLPRD

SEQ ID NO: 128732 - protein, 379 aa, unidentified
MKHFIMVGADLHDKTIRYRVAVDKERSKGRTVLHTPEGRREMVKALKALSERYQGAAIYLGFEAGPHGFGLYDELEAAGVRCAPLAPTEMEKSSDARVQKTDDKDAERILEVVRSWVLAGKDPPLVAVPDPQTRLDREPVRLRVRVGCRTGKIKTQVRSLLTRHSLRCDGSFDGEHLQALKRLSETMARSLGATLRSLLQELEWAEEQKHDLDEIIGELAETPRYRPAVAALRTLKGVGVLTAMSVILEFGDPGRFENRRQVGSFLGLVPTQADSGARVDRLGHITKKGPGLVRRLLCQAAWAVIREDKAVGVKYQKWCRKHPQEKMVFVVAQMRRLGIRAWHKLQDAYREKPMSVLPNTPPYWCMRFSVNNRNVRRRA

SEQ ID NO: 128733 - protein, 342 aa, unidentified
MRIVGCDLHASQQTIAMLDRDTGEISERVIKHEGTAVRDFYTGLTPPILVGIEATGSMGWFLRVMEEFGITCRVGDPARIRAVETRRQKHDRRDARLLLTLLTEERFPAIWMPSAELRDLRALLRHRDQWVRMRTRVKNALQGVALAHGIRRGAGLWSRDGQAMLAALPLPQHTGARRSELQALHDHLTTHIEALDQRVKTQADERPQTRRLMTHPGVGPVTALATEVFLGDPARFPDGKAVASYIGLIPSEYSSGDRQRRGRLTKQGNPMLRFLWCEAAIHAARRDPALARFYRRKLQQKGLGKARVAVARKLGIRLWVLLREQIDYAEFCRRTPVHAAAR

SEQ ID NO: 128734 - protein, 385 aa, unidentified
MQASTVDTPTAGHCGTVFVTIELSQKTWLVTLHSPDRDRISRHKVAGGDHAGLLALIESIRARAVLKLGAVPKVVSCYEAGYDGFWLHRLLLAAGISNLVFDPASIAVEQRSRRAKTDRIDGELLLRTLMAHLRGEPRVVRIVRVPSVEQEDARRTSRERDRLVKEQTGHTNRIKALLRLVGMAVGYPRRGNWLHWLAQQRDWQGQPLSPHLLAEVTREHARLMLVREQLAVLGQAQAAQAPAVPAAMAERRDLLQRLKTLGPAFSTTLTNEVLYKDFHNRRQVGAYCGLTSSPWQSGGIDREQGISKAGNPRARRAAIELAWLWLRHQPESELSRWFHIRTANASKRIKRVAIVALARKLIVALWRYLTTGLVPEGAMLKTAEV

SEQ ID NO: 128735 - protein, 328 aa, unidentified
MCTLGIDVSKNKIDLCLLTAGPGGKKKHKVLTNEPAVARKVVDWLNAQKCVPESVTVVLEATGIYHENLAYGLHEAGVSVCMANPCRVREFAHGMDILNKNDAVDAFVLACYGELKSPAVWVPPSPEVRKLRALLRQRDALREDVQRTVNRLEKANSTSTPQEVIRSLERTKSWLNEELARIEKLITDHTDNDPGLKADLDLLKSIKGVKEQVGREMLALLKDGMFKSASQVAAYLGLTPVEKTSGSSVRGRPHMSKTGPSGVRAKLYVAALTASRWNKQAKAIYERLVAKGKAKKAALGAVMRKLVHLCFGVLKTRLPWDENYVATA

SEQ ID NO: 128736 - protein, 392 aa, unidentified
MYIVGIDIGKNHHEASIVSPEGKQIGRSLRFATTHKGADSLMSFIFKNIGNSPCVFGMEATGHYWYPIYSFLKAKGYTICVINPIQSDSLRKMYIRQTKNDSIDSFFIAEVIRFGQFGTTSMADENILAMRQLCRYRDSVISSRTEIKLRIGTIMEQIFPEYEKQFSSLWMSTSMGILEKNLTPENIENAPIDELFEIIKDKSHNRLTKAKAISIKEAAADTFGIKIAQDAFSFQLKQLIDRMNFLDKQIEALDIEIMKYYEQFDCYLHTIPGIGMIATATILAEIGDIHRFKSSSALVAFAGIDPTVRQSGEFNSTHNHMSKRGSPYLRHAIFLAATTCSFHNSPLNAYYKKKRDQGKHHLTATGAVARKLTTVIYAVLRDSKPYEPKKFC

SEQ ID NO: 128737 - protein, 365 aa, unidentified
MTNVTNWIGIDDHADKWTITQYRGQQDEPTRDWELQPSESGYRKLIGWLKELKGNVRIVYEAGPCGYELYRRLRRSKLECDVAAPSLTPRKPGDRVKTNRRDAQKLAKLLRAGELTLITVPDSQQESVRDLVRAREAANKDLLRARHRLSKLLLRYGHHYGEGRAWTLRHWAWIKRVELEQQSSREVMRLMIRTIEQQLELVAEYDRLITGVAESAEYAPLVRGLGVLRGIARLTAMTLLVELGDLRRFRTAPQIMGALGLVPSEYSTGDKTVRLSITKTGNAHARRVVVEAAWQYQRFKHPGREIRQRRKDQPPELLAIAERCDDRLHRRFTRLTSRGKRSTVAATAVARELAGFIWAIGQKMY

SEQ ID NO: 128738 - protein, 409 aa, unidentified
MDQLIERCCGLDVHRDTVVACVRGPGPNGRRQHEVRTFGTTAVELLALRDWLEAHAVTDVAMESTGVYWKPVFYVLEEAFTCLLVNAAHIKQVPGRKTDVKDCMWIAQCLEHGLLRGSFVPPAPIRELRDLTRHRKVLIQERTRAANRLHKLLEDAGIKLASVATNILGVSGRAMLEALVHGTTDPAVLADLARGKLRKKLPALRQALAGRFRPHHAFLVGQLLAHVDYLDEAITTMSEEVEGRLAPFAAQLTQLDTIPGINTRTAEVIIAELGVDMSCFPSDRHLASWAGICPGNNESAGKHQSGKTRKGNRWLRMTLIEAAGAAIRTKDSALGARYRRVMRHRGHKKAVVAVAHAMLRAVYHLLAEGTTYREPGADYYDRHHTHRVTRRAIQLLERQGYRVVLEPAA

SEQ ID NO: 128739 - protein, 367 aa, unidentified
MMGWMAPLRHLSAKLLSDRISSEWEPSMGEVTTIGLDLAKHVFQVHGVDAEGATVLRKQLRRAQVLAFFSRLPPCLVGLEACATAHYWGRELRALGHEVRLMPAQYVKAYIKRNKHDAADAEAICEAVERPTMRFVPVKTADQQAAVLLHRGRERLVRQRTGLVNALRGHLAEFGVIAPQGLRNVGKLIAIVRDEGDARLPDLARQVLQVLAAQIEQLEAAVAAIEKQLMAWHKSNPVSQRLASVPGIGPIIATALAATVVEPSGFRSGREFAAWLGLVPRQNSTGGKHRLGGISKRGNQYLRRLLINGASANLLRSKATKADPWVIGLRRRRPPLVVAVALANKTARIAWAVMHRHENYQRVAAAA

SEQ ID NO: 128740 - protein, 366 aa, unidentified
MKKLSTMQTISNELLKEQKLTIGMDLGDSWSFYCVLDEAGKIILEQKVATTQEAMKQTFEKIPRSLIALETGTHSPWVSRLLTELGYEVIVAHAQKVELITKSNRKDDRHDARTLARLVRFDPELLGPVRHRSAKAQIHLTVIRARAELVSARTALVNAARGLVKSFGERLPKCGTYQVNEKLAEGLSAELRDVLVPLLRQIESLNEPIKEYDERMEKIAKEVYPETSLLQQVKGVGTQIALTYVLTIEDPHRFLKSREVGCFLGLKPGRRNSGKSEPQKKISKEGDRYLRTMMVQGAHYILGPFGEDSDLRRWGLKLAERGGKNAKKRAVVAVARKLAVLLHRLWVSGEVYEPLRNSQKAMRAVA

SEQ ID NO: 128741 - protein, 373 aa, unidentified
MQHTIFIGLDVHKATISVAVAGGERGGEVRHWGAIPHRPDHVRKLAEGLGADGCQLYFCYEAGPCGYGLHRQLVELGHDCIVVAPSLIPMKAGDRVKTDRRDAVMLAKLHRAGELTAVWVPDTAHEAMRDLVRARATAVRVVGKARQHLQGFLLRHGRIYAGKKGWTVAYRRWLTTVRFQHPAQQIVFQDYVDAVADAEARVERLTGQIAELLPTWNLAPVVEAVQAMRGVAFIVAVTVVAEVGDFHRFDNPRQLMAYLGLTPTEHSSGATVRRGGITKAGSGLARRALIEGAWSYRMQARVSRKLHDRPAKGHPRHRLEGTVADVPALQASGSRWQGEGRGHDRHRPRDGRLHLGHRQSSDGVSSLTSLLRG

SEQ ID NO: 128742 - protein, 370 aa, unidentified
MAQSTPLFVGLDVHKDSIAVAHAAGGSTEPPVFVGAIGTRQADLEHLLRRLHGKTGALTFAYEAGPSGYGLYRYLTGKGLPCQVVAPSLIPKKPGDRVKTDRRDAVELARLLRSGDLTPVYVPSVEDEAVRDLCRARDAARVTGKDAKLRLKAFLLRLGRHYVGRANWNDAHRRYLAKVVCPTPAQQIVFQESVRAVDEQIDRLQRLEAELVERAPAWRLYPVVQAMQALRGVQFLVAITVVAELGDLTRFDNPRQLAAFVGLIPSEYSSGGSRRQGGITKAGNGRARRMLIEAAWAYRHPAKVSLHIQQRIDHLPKPLQDLGWKAQVRLCKRFRRLVARGKHPNVAVTAVARELIAFMWAIAKAVPLQA

SEQ ID NO: 128743 - protein, 332 aa, unidentified
MITTTTTTLPVLGIDISKATFDVALLRAAETRKPKARKFDNRPVGFQALCLWLAKHDVAQVHAVLEATGAYGDALAEFLYAAGHQVSIVNPAQIKAFGQVELQRNKTDRADAALIARFGWCQRPVPWTPPAPELRELQVLMRHLDDLIAQRTQVSNRLSEGRLTPAVEKSWQQVLATLETQISTIKEQVEAHFKQHPRLKQQRDLLDSIPGIAPETAARLLAEIPHLAELNSARAAAAYSGLTPRRHQSGTSVNAPTRMSKIGNARVRYALYFPAITALRCDPSFQQLAARLAARGKHKMQIIGAAMHKLVRLAYGVLKNQQPYDRNYLVEA

SEQ ID NO: 128744 - protein, 407 aa, unidentified
MEVLYPHCAGLDVHAAQITACVRLATGADVTRHRQTFAATTAGLLALGAWLRQHGCTHVAMEATGVYWKPVWHLLEADFELVLANAMHIKQVPGRKSDVTDAEWIGDLLAHGLIRPSFVPPTAVQELRDLTRTRKQLMGELARHALRIQKTLEDANLKLTRVVADVLGRSSRAILRALIAGETDPDRLADLTQGRLKASRAQLVEALQGRVTPHHRFMIQMHLTQIESLEAAVQTIDDRLGEALFPFQQAVALLTTMPGVGDTAARVLVAEIGIDMSRFPTAGHLVSWAGLCPRLHESAGKRRSTRVRHGAPWLKTTLVQAAWAATRAKGTYLQAQFLRIKGRRGPKKAIVAVAASMLTAAYFMLRAGVAYRELGGRYLDHRDKEQITARLVRRLQNLGLTVDVRAA

SEQ ID NO: 128745 - protein, 403 aa, unidentified
MEHVIAFDVSMGKSYMVIYNAQKQCIFESEINHSKPDFEELRKRIDQLMNENKKSPHIVFEATRVYSRQLERFMQDNKFEYFLLNPLEAKLQCDSLRIHKTDRGDAHQLALTHFTASRREKTGTDNLFYQLKSLSRFYNELDDELSLIRSRMHKVIQLTFPELEQVFTTKSDLFLNFVQLFPHPDFVQNLSKTVMKNQIRKNTNKNISIRIAEKKAMEVLEAARYSYPAVRQDDVLCEQLKSYAKRYQELLHQKEQSITKMVRLAESRTEYPIILSFPGIGPNTAIRLLAEIGDITRFENHKQLNAFAGINIRRFQSGKTFFKDKINKRGNKHLRKLLFLIIQNMIKLRRYGQNHIVEYYDKLKTQPYNKCHKVASIACVNKLLKLLFYLITHNIHYDYRLTA

SEQ ID NO: 128746 - protein, 465 aa, unidentified
MVYSTFNHIQGKIGSRWAQLVRETGPENLLLVAIDAAKYTPKVIITSFYGDILVKPFDIDSSMSGFHKLKSLIESTKSSHNLTKVVIGIETTGHYYEHLVYKCHLEGYHVRTVNAATTAKERETLLNWSKTDNLDLMAIIQSVIHGRGTSNELPSGDIHNLRKLTRARRELVSERTKTKNLILMHMDHIFREFQGKTVWMKGKRYLSKPFSKVFGKGSIYLMRHHPHPSDILELGVKGLREISQRENLKIRDKTIQTLIEFAKDSITLPKEQVEADIYLLNQKLDRLEFLEKQIKRLEMKIEELFVTTDGAVILSVQGIGLVTGAELAAEMGDISDFDQAGQLIKLAGTNPIVKQSGGNQPAYYGVSRQGRRPFRNIVYQVGKSLAVNNPEMHQRYLALKERGKHSRQAYIALGNRMVRLAFSMIRNQTLYQTKAENYTLFDEISKKIRKANVEKFFKAHVLSIQ

SEQ ID NO: 128747 - protein, 427 aa, unidentified
MLKHHTEPNPAEEFAAFLAIDWADEEHAFHLQVEGQSKVETGTLEQKPEVLGTWVAKLRERFGGRPIAVGLEQSRGALIHGLMAYDFLVLYPIHPTTVAKYREAFKSSGAKSDPLDAGQILEILTQHRDRLHRFNPDTVETRLLGRLVEDRRKAVELRTTHVQALGANLKEYYPQALELTHGNLSSRLACDLLLKWPTFADFQQAKPSTLKRFYYGHNVRSPEVLERVLALAQKSQALTTDSAMVESGTRLSQMYAGLIPALNRVIEDYDQRIQQVFDAHPEAPIFTGLPGAGPVMAPRLLAFFGTDRSRYAAALNVQSFTGVAPVTKSSGKSRVVYCRVACPKFDRQTFHEFSRLSVTHCQWARNYVQYYTDKGKKYHTIIRALAYKWIRILHKCWKERTPYNEDLYMERLKKRGSIFATLHLQTK

SEQ ID NO: 128748 - protein, 346 aa, unidentified
MWSVGLDFHQRSSRICILDENGKTVKEMPVRGAWPEVIAALKELKHGFAICYEASCGYGHLYDQLKRIAQHVMVAHPGQLRLIFRSKKKNDRVDARKLAMLLLMDQVPQVHVPSVEVRSWRSFIEFRHREVAKRTRVKNSLRSLMRGHGVLLPAGKRLWTRAGLALLRETELPSPMAAVQRDLLLEELSHLEGQIHRVTRELDAIARRHPGVELVRTIPGVGPRTGEAVVAYINEARRFRRNKCVGSYFGLVPCQDASGPANRLGHITREGPAVVRKLLIEAAWQGVNRSARIRAFFERVQGQDPDRKKIALVATAHYLVRVMQAMLRTGEAWWDEEPAVPEPEAA

SEQ ID NO: 128749 - protein, 464 aa, unidentified
MRTIGIDLAITGTHKAVIVDERGNAIGGVIHFRTDPVELEAVLRRAWEGAGEDEPLRAVMEPTGLAWLPVASYCIQRGITVYLVNTQQVSDLRKFYSKHARSDRISARVLARMPWVSPETLHPLDLADADHLSGQRWCKQQEELAQLITATKNRVQAWERAFWPGLEEVVGDLFAPWVRRWREVWYNPWQLQGVETKQLVAFLVEAGADPEAAESLAAGLQAVARRVVALFGTPQQGRPSPYVDYAALQDQVLRELRLLAYYEAEHQAVSRQVQRLYRQVHPGRQLESIMGVGPDGAAVYVFFVGNVERFTSQKKFRGWSGLVPGSDQSGDAEKKGLRLTHAGPDLIKKYAYINAEVGRQWDPQLAAIYHDQMVHKGKHHVQAVCCCATHILDRVRAVLRDGRPYELRDVDGTPVTWQEARAIIAERYHVPEEVRQRNSKRARQARRDEQAERKRKKRRSRPGR

SEQ ID NO: 128750 - protein, 328 aa, unidentified
MNSICLSTDQGKLPVLGLDVAKNSVQAELRIAGKNVRFGFANNPKGFAQLARILNQHNALKIWAGLEATAPYSHALALWLHARAHRVSVLNPRRVKQYARSAGNGNKTDRLDAAVVADFLCAHRPAAWRPPLQEVLQLRALVRRREELSLMLQAEKNRLEGVASQVRCSLKRTIVTLSGEKARVEKLIGQQIRSHKRLCRDHQLLCTIKGIGSLTAAILLAEMAAPGQVQRARQAAAHAGLVPRHEQSGTSVRRNRGIGKEGNRYLRKALYMPALVAIKYNAPLRYFASRLRAACKPKMKIVCAVMRKLIHIAFGILKHQQPFNPSLA

SEQ ID NO: 128751 - protein, 346 aa, unidentified
MVLIGCDFHPSWQQVSWMNRETGEAGDQKLVHEPGAVEKFYRQFPAGTRIGMEATGNCQWFVELVTGLGHRVLVGDAAKIRASDSRQQKHDKRDARLLVQLLAEDRFPEIWVPSREQKDLRQLLIHRYKLVRIRAQVKNGLQHLAMNQGVMKKQKLWSKAGEKVLRELPLAPWASRRREDLFKVREMLNGQIDLLDQAVVEAAEKNEKARLLMTQPGVGPITSMAFVLTIGDVKRFQRGKQVASYLGLIPREYSSGGHQRLGSISKQGNTFLRMLLVEAAQGAVRCDPGFRNEYLHRCHSKPKGVAKVAAARKLAIRLYWMLRTNTGYPEVVRVESSSRVPLVSAS

SEQ ID NO: 128752 - protein, 341 aa, unidentified
MAVAGGLDLHRGQLTFDYVDTGTGESWRGRICPADRESLRGWLRRFHGVPDVEFAVEGCTGWRYVAEELQRAGITPHLAEPAGTAGLRGRKRRAKTDWADARHLRYLLLDGRIPESWIPPGHVLEARALVRLYKDLLEERTSWQQRVHATLFHQGIPVVPKLGTADGQQRLEAAELSAAGRRAVQAGLRQIERLTQEMASLRRELARLSSRQPGCRALRRAHYGIGGLLSVAVWAELGDCRRFSSSDDAVRHTGLDVTIYDSDGRRARGHIARQGPPVLRWALYEAALYASRPASPDYAYYCGVRDRIDGQRALLSVARKLARRCYHTLRDLGEDALAPAA

SEQ ID NO: 128753 - protein, 342 aa, unidentified
MTPFSFFVGVDIASASFMACVGTMPWKIVVKPMKFENHEEGFTSFLGWLKDNRLPSEQTVVCMEATGVYGEGLAYFLAASGYSVAVESPLNIQRKFPVNASKTDELDCQYIAEYACRYVDKLSFWKPRAEILEKIKVLLTTRQHFTVQATGHKNALHALKRKVVSSDLASQAHQDMVQQIAKHIKAIDQEIERLIGSDPTLKQTLLLLLTVPGIGLQLAAHLIILMQASLDPRVLSAFVGICPIKHQSGTSVFSTPTSRHYGPPNLRKLLYLAACSVRTHNQSFQRYFFRKVAEGKHKKVALNNIQNKILKIACAVVRTQKPFIPNYVSVNPLVFQKTLTKS

SEQ ID NO: 128754 - protein, 412 aa, unidentified
MKRIRDRVAGLDVHRDTVVACCRIVEPDGEVQVTKNTFATTRKGLGELAAFLADVAVTTVAMEATGVYWKSPYYALEGLFDELWLCNAQHVKNVPGRKSDLSDAEWLADVAAHGMVRPSFVPPPEIRELREVTRYRKTQVDARAREIQRLEKVLQDAGLKITSVASTVWSVSSREIIEALIAGTRDPKVLAQMAKGRMRAKIPALEEALAGHFGAHHAVVSRQIIDHIDFLDRSIAALTGEITTRLVPFEAAVAIITSVPGISRTTAEVIVAETGADMSRFPCAGQLCAWAGVAPASHESAGKRRAAGTRHGSQWLRRALIEAARAAARTKGSYYSAQYARIARRRGPNKAAVAVANSMLFTIWHLLNTGALYEDPGADYFQRRHDPAVEAKRLTRRIEALGYDVTLREKAA

SEQ ID NO: 128755 - protein, 316 aa, unidentified
MRADEVWIGIDVAKAWLDVADTGGAVVRRFGNDGDGIAALLAAVAELAPRLVVLEATGGHETLVTAALAGAGIPVAVVNPRQVRDFAKATGQLAQTDALDAQLLARFAQRVQPPVRPLPEATAQELAALLARRRQFLEMRTAEQNRRPGLAPRFLPAWETHVAWLTAQVAALDDELDRTLRDSPVWREKETLLRSIPGIGPVVARTLLGELPELGTLDRQHLAALAGVAPLNCDSGARSGSRHIWGGHAPVRAALYMAAISATRFNPAIRALYARLRARGKPVKVALVACMRKLLIIAHAVVRDGVPWRADLVHGA

SEQ ID NO: 128756 - protein, 360 aa, unidentified
MFVERTSVGLDVHARSVVATGLDSMTGEVFKTRLVPAHEEVITWLRQLPGPVATTYEAGPTGFGLYRALTAAGIRCEVVAPSKLTRPSGDRVKTDAKDALLLAQLLQVGQITGIRVPTVSQEAARDLVRAREDVRGDLMRACHRVSKLLLRHGHVYYGGKAWSGDHAAWLRRIRFDQSGTRTAYEADLEAVEFAIARRNRLDAAIAAMAADCEFTATVRKLCCLRGISTLTGFALAVEIGDWERFTGSSIGAYLGLVPSEYSSGQSRRQGGITKAGNSHVRRLLVEAAWHHKPTYRVGKVLQARWDQAPAAARTRAHAGNQRLHRRWASYTARKKKHTTATTAIARELAGWCWSLATLPD

SEQ ID NO: 128757 - protein, 321 aa, unidentified
MDKNTMIGVDLAKNIFQLHIATMTSKVLSKKKLSRDRFKEFMKSHEPAIVVLEACGSAHYWAETLADMGHDVKLIAPQYVKPFVKRQKNDAADAEAIVVAAQRPEMRFVAAKAKEQRAKGVLFRSRERLVHQRTEQVNALRAVLYEYGYVIPQGIASISRIEDILARPNCDLPDLVCDECRHLLEQISSNTKLINAKTDLIKQLAKQTNMARQLQTIPGVGPMTAMAIDAFAPPMDLFKNGRGLSAWLGLVPRQYSSGGKERLGRVSKAGQADIRRLLIIGAMSRLTWLGRKSIPRGSWLDRMMARKPKMLVAIALANKMA

SEQ ID NO: 128758 - protein, 337 aa, unidentified
MIVIGVDVHKQTLTAVAVDEVGRPLSERSCAVDDGVVAWARSLGGERLWALEDCRHVTRRLEQALVAAGETLIRVPPRLTAPQRRRNRTRGKSDGIDALAVARAALQEPQLDGPRDGEETLRELKLLVDHRDDLVAERRRVQQRLRWHLHDLDPQLQVPAGALDRAVWIDRVGRKLARLEQTTQTRIARDLLGRCRSLTRTIGELDHELQTITQTLVPSLLQLPGCGPVSAAKLLSEIGPISRFPSDAKLARHAGVAPLDASSGKRQRHRLDRGGNHQLNCALHRIAITQGRVHPPARAYLERKQAEGKSRREAIRCLKRQLARTIYTTLKNEPRLT

SEQ ID NO: 128759 - protein, 351 aa, unidentified
MRTSQHSLDTVSTIGIDVGKNTFHLVGFDKRGAIVLQQKVTRHQLGRRLSNIPRCLIGMETCSGTHFIARQLTALGHDVRLIPAQYVKPFLKGHKNDYRDAEAIAEAVQRPTMHFVSIKTPEQMDLLALHRVRSRLVRQRTGVANQIRGFLLERGITVRQGFMPLRKALPDILSSKSDALSPRMINLIGELVQDWRRLDERIASVSSEIEALAKQDESCQRLMSIPGVGPIVSSAVVAAIGNGTGFKQGRDFAAWLGLIPKQESTGDRTILGKISKRGNKYVRTLFVQAAHVVLERRPRTARQGLWPWIEQASKRLHRNMLAIALANKLARIAWAVLARGHAYQPRISANA

SEQ ID NO: 128760 - protein, 413 aa, unidentified
MQVVYERCCGIDVHKQTVVACAIVPGPDGQALKETRTFATMTADLEALAGWLAGLGVTHVAMESTGVYWKPVYNLLDGRFAILVVNAEHIKALAGRKTDVQDAEWIADLLRHGLLKGSFIPSEVLRELRDLTRYRTKLGDERKSEVNRVQKVLEDANIKLASVASDVMGVSGRAILAELVAGQTDAATLAALAKGRLRDKQDLLLKALSGCVRPHHRFMLAQHLSHIDFLDEAMAQLDRQIAEQMRPFAAALATWDSLPGINQRIAEIIVAEIGADLGPFEDADHLASWAGMCPGNNESAGKRKSGRTRKGSPWLRRALIEAAHGAAHTKHKYFQALYRRLASRRGKQRAAVAVGHSLLVTGYHLITRQTAYEDLGGNYFDERDREAVKRRAVRRLEKLGYRVELAPCAAPAG

SEQ ID NO: 128761 - protein, 433 aa, unidentified
MDEIRDEPLYRDRVCGIDIGKAAMVATIRVPGDADPARRMAETRTFGTTKRGVLELADWCRCWQVAAVVMEATGDYWKGPFYRLEAEGFECVLADPRQVKNLPGRPKRDPSDSRWLAACFERGAVTSCFVATPEFRIIRLHTRYRRDLTEERTRDKQRAEKLLESAAIKLSSVISDLHGVTGRDIMDHLIAGERNPKVLAQLARTAARRKIPELEEALEGTEFFTAAHAGLLQTMLARIDRASADIEQISAVIEELLAPYEQQVRQATSMPGWARRSAQDALAETGVDMSRFPTGAHLASWGSRAPLDRQSGTRKGRARSKKGNRYLAGVLGETAVAAGRTQTREGARYRRLARRRGKAKAQVAVGNTQLKVLHKLLSTPGSRYEDLGPDYYERRADTRRQIAHHVGKLGALGFEVTLARIPDPDGTPPAQAA

SEQ ID NO: 128762 - protein, 319 aa, unidentified
MMAQDDRVVVGIDVAKDKVDVCVRRLALQQVFPNSAPGHRKLVAWLRQHQVNKAVMEASGGYERAWAKVLRQADIEVRIVDPRRVRNFALSAGRLAKNDPIDAEMIGWFAETFEAPGQIHDAAREELASLVKARKRLIDLKTQLQTQDEHAAPKAVEKAHTRVLKSLATEIAKLEAAICATVKATPEFAERAEIIESVPGLAETASATLIAGMPELGQVSDVVAAALIGLAPYDDDSGKRRGERHIKGGRRWVRNAIYMPCLGAATLSNPVLKAFYQRLIAKGKEPKVALVACMRKLIIILNTLIARRQKWDPSRYARA

SEQ ID NO: 128763 - protein, 373 aa, unidentified
MKKISRLGVGKSKKKEERASKGYTIGLDLGDKKSQYCVVDGAGEIVAEGSVSTTRTALEQQFKSYAGSVVALEAGTHSGWVSRVLKQIGLEAVVANPRKVRLIAESTQKSDPEDARMLARLARVDRKLLFEIHHRSEAAQLDLTVIRARAGLVEARTKLVNSLRGLTKTLGSRLRKCDADAITVEVLEGLPEAVKGALTPLVVQIQALTMGIEEYDQRVAAMGEQYCEIERLKQVRGVGDLIALTYVLTLGDKARFERSRDVGCYLGMVSQRRNSSESQPELSISKQGDTYLRSLLVQGAHYILSRRGPDTDLKRWGVRLAQRGDQKSKGKKAKRRAVVAVARKLGVLLHRLWVSGEKYEPLRQARQQERQAA

SEQ ID NO: 128764 - protein, 359 aa, unidentified
MINVGVDVHKRICQACLKDERGSIIEELRFPNNQEGASRLATVIKKHGDARVALESTGNLWVKLYDRLDEEDNIDVILTNPKKTRVIAEAKIKNDKLDARLLADLVRADLVARSYVPPKDIRMQRALLRERISLVESRTMIKNRIHALLDKYEIQPTYTDMFGKKGREWLRSLNLPGIDQTILEVNLQRLEESEAHIDAFTHKIAQEAVEKPQVRLLMGFTGIDYYSAMLLASEIGDVKRFPSAKKLVSYAGLAPGIRQSADRTVHGHIVKDGNKRIRRILVEAAQHASRHDQRLRPFYLRILKRRGYQRAIVAVARKMLVAIYHVLSKNEAYHGVRGELFERKLKRLEWETARSPQAH

SEQ ID NO: 128765 - protein, 349 aa, unidentified
MQSKSQIKSIGIDLGKTTFHIVALGTRSQVVIRKKFSRSQLLEYTANLPSSLMGMEAGVGSHFLGRALREQGHEVRLIPAQFVRPFVKSNKNDYCDAEAIAEAVERENMRFVPIKTEDQLDLQALHRVRDRLVARRTSVINQIRAFLLERGISFRKGPASQRRQMPEILENADAKLSPAMRRLLDFLWQEWKGLQLQIETLNTQLEQIASSDPSCVRLQQIPGVGPLVSTAVVSAIGNGAAFKKGREFAAWLGLVPRQWSTGGKAKLLGISKRGNPYLRKMFIHGARAAVLRVKREGSGLGKWMSGLETRTARNVVIVATANKLARISWAVLASGNDYQPLHKATVFSN

SEQ ID NO: 128766 - protein, 313 aa, unidentified
MAMETSDFIIGIDVAKAELVVHFQSHGTQMSLSNTKPEIKRWLKQQPANTALCVEATNVYHLDVVEMAHEKGFKVYVVDGFQLSNYRKGIGGRSKTDASDAALLARYLERESRDLRPWAPPPAVYGKLQSLLRRRAALVTMRTALSQSWGNEQLLKAAFKSFTQQMDKLDLLVQKKLKELLKEAGLLEQVARCQAIEGIGFLTATALVMAFIRGEFKNSDAFIAFLGMDLRVSDSGQKTGLRRLTKRGCPEIRRLLHNASMSASRSAAWKETYEHYRNKGKATTEALVILSRKLARVAFALMKNKEEYVSRTA

SEQ ID NO: 128767 - protein, 443 aa, unidentified
MDQCAPYPLRGRAARDGVCVSVRVLRDVLRKADDMNHNVAGIDVHKKVLAVAVGKATDDALVFERKLFGTVGRSLAELAEWLKERGVKEVVMESTAQYWKPVWLALEGSFDLHLAQARSNLAPRGRKTDFRDAERMVRRLLSGDLTLSFVPSAEQRQWRLLARSKYQLRRDRVRLQNQLEGLLEEGRIKLSSVVTDLLGLSSLRILRALAAGENDAVKLAALADKRLRVSGEDLAEALRGSLTRIQRLLLNQFLTRLDVIDGQIRELDRTLAEEMEQYSDAIHRLSQIPGVGPDAAAQIIAEIGPKAAAFAAPEKLASWVGVCPGRQESAGESTSNRSPKGNRPMRRILTEVAFAAVKTKDSHFQEVFRRLVPRLGIKKAIWAIAHRICRLIWKLLHEGAVYIEQGARGQDPQAIRKRARKLVGDLRRLGYKVLIEEPTPKAA

SEQ ID NO: 128768 - protein, 321 aa, unidentified
MEPAVAGIDVSKKTFDVALLRGDRPKNGRFKNTLDGFVMFGRWLRKEGVEGIHVCMEATGTYGEQLAEHLYEAGYVVSVVNPARIKGFAQSELTRTKTDKADAGLIARFCRAMRPEPWQPPTPEIRKLQALVRRLAELNGMLNQERNRLDTADDVVKPSIADVIKVLEEHIKHVRRLIRDHIDSDAALRGKRDLLESIPGIGPATSAMILGEFGDVARFRNAKRMASFCGLAPRHRQSGSSVRGKSMLSKTGSSRIRKALYMPALVAMSHNPLIRGFCARPREGGKCSMVIIAAAMRKLVHIIYGVLKNGRPFDPAIGAAA

SEQ ID NO: 128769 - protein, 310 aa, unidentified
MQIICGVDVSRAWLDAWITPEAYQRFANDAQGVIDLAAFCREHGAELAVMEASGGFEQPPYIALWQLGQLCAIANPAAVRHFAKAMGYLEKTDRIDAQIIAGYAAAKRLNPVPPPSCDQQKLTALAARLRQVTADLSVQKQRRHFTRDEQALASLHEAIAFFTRQAKALAAQIAALVEIDPLWQALDRSFRSIKCVADRTVAVILADLPEIGTISNKAIAKLVGLAPIANDSGTRTGKRPVRGGRDTVRSILFLVADLARKFDPSLADFRKRLLDQGKPKMVVRIALARKLLVRLNAKARDARAQLDQPV

SEQ ID NO: 128770 - protein, 419 aa, unidentified
MTQSNIDRQFVQDPAGTLHAGVDLALEKNVVVVVNERAERLDHFSFPQDRGGYDYFLRRLEGLRQKHQAAKVVVAMEPTNYFWKLLARRLEEKQQIYRLVNAYTVKKHREGDQLDRSKDDRRDADQIAELSRNGKTTQTQLQKGTYEELRQYATLYHQLMQSIRREKTILWGLIGQVFPELIRAFKDLEGETYRALLMTCAAAAAIRQLSPDVFLTQVRATYSGKRLCVSKLKRVYQLATRSIGVTEGIKAIQLAIQEHLTQLQVFENQLEQVAGAMTARLFSIPEALYLLSCPCLKPTSAALFLAEVGDPQRYQKAAQWVKLAGIQPVPNTSGRKQRSRTPMSHQGRPHLRTLLYFSCLRMIQYDTRFAQLYSYLQRRKDNPLTKMQALGVLMNKLLHIWWALIQNQTFYNPPFGQSV

SEQ ID NO: 128771 - protein, 413 aa, unidentified
MIVGIDVGNEKHYFRAFNWRGIELTRKSVAFSNSMEGFNSFYNTIVELMQKSELEEALVGIEPTGHYWFDLGQFMGEKDIKFVMVNPHHVHKTKELDDNSPSKNDRKDPRVIAGLVRDGRYFYSYMPTGAYAELRNASNRRFVLVEEQTRAKNRLQKWIAVYFPEYKGIYTHIDAKGGMLVLKKAPTPEEIVRLGVEGIIKIWKDAKLRGNGHKKAMLILAAAMRSIGLKAGLTEARMEIQDLIEDYELQTKRLERVNDLIKGLCQQVRYADKLLEIKGIGITTVAGFIAEVGDITRFDSTKELQKLAGLELVADSSGKHNGKTKISKRGRKRLRYLLFEAAISVVGKNEEFKEIHRYYTTREKNPLKKMQSLIVVACKLIRVFHAILTKGIRYDASKMLKDIRHPGEQLKAA

SEQ ID NO: 128772 - protein, 332 aa, unidentified
MSEKPTFFLGIDVAKASVQVALICPTATRRCHKFTNEATGFAKLDVWLQEAGIDTNATLCACMEASGSYGEALARHLHAQGHCVSVVNPQRIKAYGQSQLARNKTDPADAALIADFCQTQKPQRWAPPAPEMEELQALVRHLENMQETIRQYQNRLEAEPCVSVRTSIEALLNFHKEQLLQVKEHLQTHIAAHADLKHQRDLLASIPGIGEATAARLLAEVQGLRRFDGARQAAAYAGLTPRRHESGTSVRGKARLCKIGNSQVRKALYFPAMVAIRFNPTIKALSLRLQERGKSAMVIIGATMRKLMHLAYGVLKSDQKYDANYKVGVSTA

SEQ ID NO: 128773 - protein, 337 aa, unidentified
MIAVGVDTHKEEHVAAAVDALGQLLGEIVVAASEAGYRELTAWLARLGEGVLVGIEGAGSYGAGLCEHLLGLGVRVVEVERPRRRDRRAGKSDRVDALLAAKKVLAGEGLSTPRAGGARAALQALLVAYRSCVSERTRLLNQLQAVHVTAPLTLRERIGRGNGERLVRRLLTMRAGAGASVAEATVLAVLRDLARRARSLDEQARRYEREIATLVRSLDATLLEETGVGPISAGKLLACDPARFKSEAAFARSNGTAPQQASSGKTMRHRLSRGGDRQVNNALHTIALSRSIHHAETRAYLARRVSEGKTKREAMRSLKRHLSRRLYKRLIEVPLTS

SEQ ID NO: 128774 - protein, 464 aa, unidentified
MSQQGAKRRGRKKRIAQLPPELAQVNLDAAGIDVAAECHFVAVPPGRDPDGGDVRRFGAFTADLYALAQWLSRCNVTTVVMESTGVYWIPLFEVLEERGFTVRLVNPRHLKSVPGRKTDVLDCQWLQQLHTFGLLQGSFRPEREICVLRSYLRQRTMLIGYASHHVQHMQKALAQMNIKLQHVIGDITGVTGLKIIRAIIDGQRDPCELARMRDYRCKHDEATIAKALQGHWREEHLFALKQAVDLFDFYHRQITECDQRIEATLSTFEEKADGKDLPPPSQRRCRRNAPAFDLRTYLFRMTGVDLTRIDGIDAPTVLKVVSETGLDMSRWKTAKHFASWLGLCPGNKTSGGKVLSSKTKPSANRAAAAFRLAAHGLHRSHSALGAFLRRKKAQLGKPQAVTATAHKLARLFYFMLKNGTAYVDAGQEYYERTHRERAVAAIRRKAQALGYKLLEIEPLSPQGV

SEQ ID NO: 128775 - protein, 349 aa, unidentified
MLADVVDAVIGGDTHRDTHTLEMTTPAGATITTITVSNDDAGFVEALAWIAEHAPGPRLVVGLEGTRSYGIGLARAAAAAGLTVVEVEHPRRVARRRGKSDPIDAHLAAVHVLQLPADRLPTPRADGNREALRILLGARAEITTARTTQINRLRALLLSGDDTDRALARGSLTNNRLTAASRRRGNTHDGVADTIRRAEIRRLAAAISAATQQLTTNKRQLTDLVTTVAPGLLAKTGVGPISGAQAIVSWSHRGRCRTEAAFAALAGTNPIPASSGRTTRHRLNRGGDRHLNRALHDIVKTRWRICPRTHHYITRRRAQGKTDRDIRRSLKRYVARELYHTLNTITTTT

SEQ ID NO: 128776 - protein, 411 aa, unidentified
MDVIVERAGGLDVHKRTVSACMRLPDENGGRRQVRRTFKTFSADLTALADWLAAEGVSEVAMEATGVFWKPVWAALEGRIPTIKLVNARHVRMVPGRKTDVADAAWLAQLCEAGLLRGSFIPPAPIRRLRDLTRYRKRLIQDRTREVQRVDKVLEDASIKLGSVASKTLGRSGRLMIDALIDGERNPAVLADLAIGKLNDKNADLQRALVGEFDRHHAHLARAHLRHIDELTAMIDDLDAHINTEIEPYATARDHLMTIPGVGRITAEVIIAEIGVDMTVFPTAAHLAKWAGVCPGNNESGGKQRSGRTTPASPWLVDVLVQAAWAATHTKNTYLNAQFWRLARRVGKKRAAVAVAHSIIVSVWHILANDVDYHDLGGDYFDQRYDTAHETRRLVRRLEALGNTVTITPTN

SEQ ID NO: 128777 - protein, 355 aa, unidentified
MNSIKYIGMDLHSATISAAVVNDAGKLNMEATLATEAPAVVDFIAGVQGTLHVAFEEGIHAPWLYDLLLPHVAQVLVCNPRQLPRHRVENKNDKIDAQQLAQWLRLGVLKPVYHNPTGLRTLKELVRSYLSLVRDTARVMNRLKALYRARAIPAPGTRVYSPRFREAWLQPLREAGVHYRAQLLYRQLDLLLPLRQEAKRAMIAESRQHGAQKILLSIPTLGPVRVAVLMAVMQTPHRFRRNRKLWTYAGLGLVSRSSANYRIVEGQLTRAGKPALILGLNLNHNHVLKALFKDAAATAVSRPGPLREFYARQLAAGREAEIARVTVARKLATIVLTLWKKGERFNAEHLKPQAA

SEQ ID NO: 128778 - protein, 362 aa, unidentified
MVQTPNIAGWRTAMGYYAGIEVSLELSSVCVVDSAGKIVKETKIASDPESFVLFFQGLGFLVERIGIEAGPLSQWLHAGLTKAGFETVLLETRHVKAALSAMTVKTDRKDARGIAQLIRMGWFRSVHCKSPGSQEVRALLVARKQLLGKLLDVEFSIRGILRGFGLRMGLVTRKSFEPRVRELCAGQAMLEQIAAAMLAARSALQTEYARLHKAMLWIVRGDEICRRLMTVPGVGPLVAITFKTAVDDPTRIKKSKAVGALFGLTPRKYQSGETDVTGGISRVGDEMVRTALYEAANVLLSRVTRFSALKRWGMDVAKRRGTKRAKVALARKIGVILHRMWVDSASFRWTKEAGGAGRLACA

SEQ ID NO: 128779 - protein, 285 aa, unidentified
MENIALIGIDLGKNSFHIHCQDRRGKAVYRKKFTRPKLIEFLATCPATTIAMEACGGSHFMARKLEELGHSPKLISPQFVRPFVKSNKNDFVDAEAICEAASRPSMRFVQPRTESQQAMRALHRVRESLVQDKVKTTNQMHAFLLEFGISVPRGAAVISRLSTILEDNSLPLYLSQLLLKLQQHYHYLVEQIKDLESQLKRKLDEDEVGQRLLSIPCVGTLTASTISTEIGDGKQYASSRDFAAATGLVPRQYSTGGRTTLLGISKRGNKKIRTLLVQCARVFGV

SEQ ID NO: 128780 - protein, 318 aa, unidentified
MSHGYDKFVGIDVSKDGLDVHGLPNSSPSRFDNTAAGRAKLLSLLPPAGACLSVVEATGGYERDLVAEAVTAGHHLAVVNPRQVRDFAKALGLLAKTDQIDASVIARFAETTRPVPKGYDERQEQLRELIVRRRQLLDHRTAEKNRAEMAHSLLVRKSVLKLIETLNKDIQRIEKAILQLVESNDDWRERFERLKGVPGVGEQTAATLMAELPELGRLNRQQVAALVGVAPFNRDSGQFRGRRAIWGGRQSVRNALYMAALSAKKHNPVIRAFAARLQAKGKPPKLVLTACMRKLLIILNAMLHSGDSWSPRLATLTP

SEQ ID NO: 128781 - protein, 411 aa, unidentified
MSYKIAGIDVHKKVLMVVVLDATTPEEKPERRRFATMPSDLHRLLIWLREQGVEEAVMESTAQYWRSVWLELEPDMRLHLAQAFSNRAPRGRKHDFKDAERLVRRLIAKELILSFVPGGEQRTGRNRTRMKLQLTRDRVRRQNQIECLLEEMRIKLSIVVSNLLGASGLRILRAWAKGETDSKQLAQLGDERLQCTEEQLVDALTGRAQPLHREMLALQLERLQLIDTQIAKLNGMIAQAMKPHQEAVMRLAEVPGLGVDSAQQIIAEVGQQASTFPSAAELTSWVGTCPGKDESAEQNHSSRSAKGNKYLRRVLNQAAHAAVKRKGSYFQVVFRRLLPRLGYQSAIWAVAHRLCRVVWKILHEGVRFIEHGIEPDPKAKMRHARRLAQALRKLGYQVTITPTNLASGMQM

SEQ ID NO: 128782 - protein, 340 aa, unidentified
MHKSSAEGFLSCGIDVSAAQLVVALEGEGGSWRQRSFANRASGHQALILWLQKSGGRVRICLEATGRYSLDLALALHAASGIEVAVLNPKVVHAFAATLCRSKTDPADAQVLAEYARRMPFQPWHPPSAVALELRTLTRHIAALTQQHTQQSNRLHALSASSVGSRWVQQDLKRSLRDLQRRKEKMRRAALALIAQDAELRPRFARLLSMPGIAEISALSLLGELALLAPGLSVRQWVAHSGLDPAHHDSGSSVHKRARISRAGNRYLRRALYMPALVAGRRDPHLRAFYQALLARHKAKLQALMAVARKMLHAIFGMFRGHADYDGSRLFPALELATAA

SEQ ID NO: 128783 - protein, 353 aa, unidentified
MSKVKQLSFEGETIYCGLDVHKTNWKVNARMNNIEISTFSQDPDPALLKNYFEKNYRGACVKVAYEAGFCGFGIQRSLSALGISCIVVNAADVPSSDKDRKRKDDKRDARKLSMELANGNLKGIYVPDRLMENARSLVRQRHRLVQDQSRCTNRIKHLLLCNGIKTGEQTERLSLKFIKKLQQLDCGSEALKMTLQFSIEQYLQIRRIIKEITLAIRDLLKQEPFASVQKVLQSIDGIGLISGMVIQTEIGDIHRFKKLDGLCDFAGFVPDIYSSNDKMAIRGISHRANEFLRETIIESCWALIRKDPAMLMKYNEYRSRMNANKAIIRIGKHLLSRIRFLWKNGVTYERGIL

SEQ ID NO: 128784 - protein, 365 aa, unidentified
MTKVRTWVGLDVHAAKTVACVVDAESGEMTVHRLPGEAAAVVAFCVGLPGPVRVAYEAGPTGFGLARALIAAGVGCVVAAPGKIERPAQDRVKTDVRDAERLVRLLMIDGLHPVRVPSGEEEALRDLVRAREDLRGDLMRARHRLGKLLLRHDVRYRGEGDNWTHRHRDWLSKVRLQEPGAQATLLDYLGAIDALIIRRDQVEATITELVPTSPWAQDIARLRCLRGIETLTAVGLCSEIGDFHRFDRPSRLMSYLGLVPSELSTGDRRRQGQITRSGSQHARRLLVEAAWHYRRPPRLGTKLEHRQQGQPAAVIATAWKAQQRLHRLWRQFDRRNKRRAIAAVAVARHLAGFCWAITTHTDPTT

SEQ ID NO: 128785 - protein, 370 aa, unidentified
MKKNSTTKQSPKRAAARQKGPLTIGLDLGDKTSRYCVLGDQGEVVSEGSVATTKKAMLGKFGSMRRCRIAMEVGTHSPWLSRLLTGLGFEVIVANARQVQLISASSRKNDRMDAQTLARLARVDPQLLRPIRHRSEQGQQDLMTIRIRATLVEARTGLVNAARGFAKALGERLPACDADEMGVGQMKELPEALRERLRPLLEEVESLTEKIQELDTTIEQIARTQYPETELLQQVRGVGTLIALTFVLTVEDGQRFQKSRDVGCYVGLRPKQSESGQSQPQLRITKEGDRYLRSLLVQGAHCILRQKSPDTDLQRWGRKLCARGGKNAKKRAVVAVARKLAVLLHRLWVGGEVYEPLRNSQAAALSRQAA

SEQ ID NO: 128786 - protein, 353 aa, unidentified
MKTKTEQLEVILGVDTHLDVHVAAILSLSGKRLGTRSFSASSTGYLELLRWSSSFGQLLRAGLEGTGTYGRGLCRLLRENSVTVFEVNRPDRAKRRLKGKSDPIDAENAARSVLSGVSTAIPKEHSGACGAMRMVSVARRSAVKAKTQTINQIRALLVSSPQEVREKLLKVKALDCINACSNVRCLGDTVVLKTLAQTLKLLAKRWRAFATELRLLDKQLDNLTGQYARQVTSQFGVGPQTAATLLTVAGDNPERLKNEAALAALCGVNPLPASSGKTVRHRLNRGGNRAANNALWTIAMVRMRSDPRTREYVARRTAEGLTSKEIQRCLKRYIVRELFPLIIADLKQSGSIA

SEQ ID NO: 128787 - protein, 416 aa, unidentified
MNAISVGIDVSKGWSMVAAIRAPRETVWKPRKVMHTAAALETLAYEIKGLGYDGGADVRVVMEATGRYYEPVANELHEVGNFVSVVNPKLIKDYGHNTLRKVKTDKADARKIARYGLEYWDDLREYTPVEAGRAKLKQFSRQYNLYSKLKVQLTNNFIALLDQVFPGANELFDSPPKADGRQKWVDFVTTFWHCECIADMSETAFIERYRKWCKRLRYNFSETKAVDVYICSLGHITTLPKNANTKLLVTEAAKQLTSISRMVEIFRSEMLRLAKMMPEYDVVMGIYGVGPTIGPQLMGEIGDVRDFASRKALVAFAGVDPGDNSSGKHESKSNPSSKRGSALLRKVLFLAVETYVKKQPADEPVYQFYKKKRAEGKGYYVCTTACANKFLRIYYARVKEYLDKTLPEEDRFPCQE

SEQ ID NO: 128788 - protein, 422 aa, unidentified
MMDKERKWFVGIDWGSQEHVVSLCDEGGSKIGQRKFPHGGTGLTDMMDWLLKATGGEPGEVHVAIETPHGPIVEALLERGFNVYSINPKQLDRFRDRFTVAGAKDDSRDADVLADSLRTDMRAFRKLSIADPVIVELREWSRIDEELKVEHGRLTNRFKHQLWRYYPQMLELADDVGANWFLDLFEAVPTPEKTAKVREKTIARILKDNRIRRFDAAHVLSELRKPALAVAPGTIEAATARIRGLIERIRLINGQLTEAGQQLDRLCKQLSEPLANEDGETTPGQKTEQRDAAILDSLPGVARTILATLLAEATDTLQRKDYHALRAVCGSAPVTRRSGKSCRVVRRYACNRRLANAAYHWGQNAIQRDPTSRAKYDALRAKGHGHARALRSVVDRLLNVACAMLKSGTLFDPEFAGKRTTG

SEQ ID NO: 128789 - protein, 323 aa, unidentified
MEQKLPTTPEAMKETFSRIPRCRIALETGTHSPWVSRLLTPLGHEVLVAHAQRVQLITKSSRKDDRHDAQTLARLARVDPELLGPVRHRSVQAQIHLTVIRARAELVSARTALVNAARGLVKSYGERLPQCGTYQVSGKLAEGLSAELREVLVPLLREIESLNERIKEYDERMEKIAKEVYPQVSLLKQVKGVGTQIALTYVLTIEDPYRFPKSREVGCFLGLRPGRRNSGKSAPQKHIRKEGDRYLRTMMVQGAHYILGPFGEDSDLPRWGLQLAERGGKNARKRAVVAVARKLAILLHRLWVSGEVYEPLRNSQKAMRAVA

SEQ ID NO: 128790 - protein, 324 aa, unidentified
MKLQKSNYVRYIGVDVSKASLEIDDSAGLAPASVGNQLETITKSLVPFVDTPDETLVICEATGGYERKLVTAMHAAGIPVMVANPRQVRDFANGHGILEKNDTIDAVVIRHFGQDARNLTLAVPKSDDQEKHGALARRRKQLLDMINQEKNRLQQTADPDVASLIQNHLESLEKQRKHIDEQLKKMVAKEAKTNPTVRVLQSTPGVGAVTVSTLLCDLPELGKLSRGQVAKLVGVAPMVNQSGTKDGRRWIFGGRGHVRRVLYMATLVATRRNPVIKRFYARLVAKGKPKKVALVAAMRKLLTILNDMVRNGESWRDADLSGSK

SEQ ID NO: 128791 - protein, 459 aa, unidentified
MKSTLVLGLDVSKGYGDFVLLDTCKKVVEESFRLDDNKQGHDILKRQLLHWKKEHSVARLLLVTESTGGYEDNWLRVSKDKALCSFVESYRINAKIIFHEYEAQRRNSIDDGISALTIAEHVVKNLENFSVTKSFHETAYTPARSLVRHYASLQQERSSHKNGLLKLIYQYLPSLEAIKPSEWPSYWLEIFVRYGSRKSIQIAASKGFKQLKRVPNGKAKEIAEALANGIDVRHTPQMVVFAIRSKARQIKRINEELQEIKKMIIDQAPVDADQVDLLKSIKGMGDITPVILLSFIEEVSRFKDAKHMASFFGVQPRVKRSGDGSYKTKMSKQGAGLVRRELYLLAFRTLSQEPYLRAIYAKARAKGMVHDAALGVLMHKILRIIYGMLVSNTRFNAGIDQLNQHQTGAESKLQKQKKNAARRFQPASTVAPVSFRQRKKRKRDHELQADGISESTESS

SEQ ID NO: 128792 - protein, 349 aa, unidentified
MSDTTKYFIGIDLHKSILQVCVLDKDGEIIKERRFREGSLSGGLAVVDWLMQWKQGGRLCVEAVGMNRWFVNACLDQELQVVVVDPTKMNLRMLGKKTDRRDAYELARRLRLGDVDRNAATYFPDEVEFSGRKLIRIRHRLTQVRQQIVNQIRALFASYRIDAPPGRLYAKGSLEKLRKMALSNEDQTLCLQALVSSLDALQRSIESLSKRIATRARDEQSAEALALLPSVGPLTAMTLAVELGDLSRFRNSKAVASYAGLVPRVANSADKSNHGRITKRGNRELRWILSQWSVRLLSFNSIAKEWAKPLLLRMHRNKVRMALARRLLIGIYIMLTRGEVFSLERCLAR

SEQ ID NO: 128793 - protein, 401 aa, unidentified
MVAVGIDVAKRKSKVAVVGEGKKVIQKPFDVLHSKAEMLKFAENLRQFGDEAHVVMEHTGVYYKVVAETLHKAGICVSVVNPVLINQFGNNTLRKVKTDKKDSMKIARYALENRDELYEYESGEDIRDALKSFVKQFNFESKTLSAHKNNLNALLERVFPGIDDFFNSPAKSSGHQKWVDFVIAFWHNDCVSYLSESKFIEKYRKFCKKNRYIFNEATAKTVHAKSRDNLTTMAKNDTTMLLVQGAAKRVLRLSEDVELLRAKMIELAKQLPEYETVLSIYGVGETLAAQLIGEVGDVRRFQNKRSLVAFAGVDPDKNDSGKKVSVSGSVSRRGDSLLRKTVFQVVECYLKNSPVDEPVYQFLDKKRSEGKQFFVYMTAACNKFLRVYYARVMECMNAQSA

SEQ ID NO: 128794 - protein, 358 aa, unidentified
MVDKVTKAAVVGGVDTHKDLHVAAVVDQNNKVLGTQYFSTTRQGYRQMLAWMTSFGTLKRIGVECTGTYGSGLLRYFQNAGLEVLEVTAPDRMERRKRGKSDTIDAECAAHAAFSGIRTVTPKTRDGMIESLRVLKTCRKTAISARRVALQIIHSNIISAPDELREQLRNMTRMQLIRTLGSWRPDASEYRNVTNVYRISLKSLARRYLELHDEIADLDVMIAAIVDELAPELIKRNAIGYESASQLLITAGDNPQRLRSESGFAALCGVSPVPVSSGKTNRYRLNRGGERAANSALHIIAIGRLRTDAKTKEYVARRVAEGHTKMEAIRCLKRYISREVYTLLRNQNRRINSIPITA

SEQ ID NO: 128795 - protein, 370 aa, unidentified
MLDTTTFIGLDVHARSIKAVSLDVMTGEVRAATFGYDAGAVAEWVRSVDPEARCVYESGVTGFDLQKRLSGLGVDCVVGAVSKMIKPSADRRRKNDRNDAEFLARMLSVGNVVEVWVPDDECEAARDLTRALEDARDDLSRSKQRLSKFLLRHGLVFDERTPTGRRKGNWTRAHWSWIESIRFAERADNDVLAYYVDAVRRAAEEKARLEGLVEAEARKPRWRKRVDSLRCLKGVDTASAADLVFEAGEFSRFRNARSFAAWVGLTPSEHSSGESDRRGAITKAGNKHLRKTLVEAAWHYLTCSGRPKDLAKGQAPDRGARRHAAKGVRRLVERREALLARGVHGNKANVATARELACWVWAVGLMAEEA

SEQ ID NO: 128796 - protein, 357 aa, unidentified
MGKSIIDLSSVTRVGLDLAKRVFRIHAVDATGSVVIARSVNRRTLLKFFDALPRCLVAMEACSSAHHWGRQLLELGFAVRLIPPAHVKPYIRRNKNDAADAAAICEAAGRPGQRLVPVRSLENQAALMRHRARELMVGQRTAALNALRGHLSEIGVVAAQGVQNAYALKRLACDGVDDDGEIVVPDCVRLALAPLVRQIDALDEAIAAIDKELEASASTDETARRLMTIPGIGPITASALLATVQDFAAFSSGREFAAFLGLTPREHSSGGKPRLGRITKMGDRYLRKLLVVGACSALGARKGHDDALRRWASGMLERKTVKYKFKLTAVAVANKLARIVYALATKGGDYDDRPVAA

SEQ ID NO: 128797 - protein, 310 aa, unidentified
MTEHTYAGIDVSKDHLDLAILPSREKRQYSNDEGGIDKLIKRLQNLPINLVVLEPTGGYEAPVAAALAAQAIPVAVVNARQVREYARATGRLAKTDSLDALVMAEFATAIKPKARPLGDEETEEIKALVSRRRQLLEMLTAEKNRLAMARQYLKPKIITHIEWLKKEIENLDTDLRKRIEGSPVWRVKDNLLQSIPGVGKVLSATLLAELPELGKLNRRQIAALVGVAPFNRDSGHMIGKRSVWGGRASIRTALYMATLVGTRHNPVIKEFYQRLVARGKAKKVALVACMRRLLTIMNAIIKHQTAWHYT

SEQ ID NO: 128798 - protein, 347 aa, unidentified
MDQYVGLDVSQDETHICVVDAQGNKLWEGDCASTPEAIGKTVKKHAPDVIKIGLESGHLSTWHWHGLRDLDLPAICIDAYHAHGVLRLQMNKTDKNDAHGIAQIMRCNWYKEVTIKSFENHESRALFRTRSNLVSMRTDVVNQIRGMLKTFGILIKGIAGVSFENRVQEIINEYTALAAPLQIQLEMLRMIKQKIDELDELVLDHAYACQNCRILMSIPGVGPMTAANFVLAVYDADRFKNSKSVGAYFGLTPRRRQSGEMDYNGRISKRGDRVVRHQLYEAANSILTRVKKPSSLQAWGLRIAKRSGMKKARIAVARKLAVIMHQMLQTGELFCFNPATGERAIYA

SEQ ID NO: 128799 - protein, 321 aa, unidentified
MLAAVNDAGEAMNPITIPCADTAAIINTARALGPFRAVIEATGTYRWLYDLLHPCGTILLAHPFRLRAMIQRRTKTDKLDAQLLANLLRINQIPLAYIPSEPYQRLRDLVRCRARLGRELAEAKIQLRGLLARHNREAPFRVPFGVRGLAWFGSQDFGLIDNLVRDELLARMRHFGRQITILDRCLVKTGQRFPQTEVLLDIHGIGLFSALLIVAELGEVERFRTAKQVGAYSGLTSRVHQSGDHCHRGSISRQGSPWLRWILVEAAMKTIHEDAALKNFYTRVRKRSSAKIARVAAARKLAEICWKRLRRWQREHVGKVA

SEQ ID NO: 128800 - protein, 430 aa, unidentified
MNESVSEQPLSPKVAAFVGIDWADLKHDVVLRSVGDPAKSEPQVIKSEINALNDWIAQMHNRFGAKGKVLVCLEQSRGALIHQLMAYELFELYPINPSQLANYRKTFFSSGAKDDRPDADLLSELVMCHRDRLKAWKPDNQLTRELASLNEGRRNAVDRRTELANEIKSQLKLYFPVALQILENEITTALAADLLVQWPTLAELQKVSPGKLRKFFYGHNSRQEKKILERLALIKEAKPLTTDVAIIRPNALRVKLLARQLKSLLPFIADYERRIAELFGSHPDRFLFDNLPGAGPALAPRLLTAFGTDRDRFEVAGDLLNLSGIGPVRIASGKKTGKSASVHCRRACPKFLRQSFHEFGECSIRYCPWAKACYQAQRARGKGHHAAVRAVTFKWIRILFACWKQRTPYDPQRYFQALQTRGSDYAQTTA

SEQ ID NO: 128801 - protein, 416 aa, unidentified
MGKRRNRVCGADVHKDLIVAAIQSPDEPILSEKFGTTCSELERFRVWLIANNCEQVAFEATGVYWFPVYDVLSPSIDTIVANPWMIKGLPKDKSDDHDSKSIAAFCLNGQIKRSRIFSKEDRDLRTMTRARSGYIKTRTQFRNRVHKYLAMCGIKLSSCINNIFGKSGRYILNGLIEGTNIDTLLDDIPSGRIRKKRDLIKAALGNGLDRATKLLIKDALDILDNLEHKLEGMSQEILSGTVKKNKDLAIVMSVPGISFVAGSIILSEIGDYRDFHTPEQLAKWCGLVPGLNESAGKKRPCGITKQGSKNLRTILVEIAHVVARMKNTKFARFFKRIMARKNYNVAITALARKLICVIYHLLINQELYEEGGAKAIASKPDENDRISRPGEKMHDKVAAIVDAYYRVNRNVSSGGG

SEQ ID NO: 128802 - protein, 342 aa, unidentified
MIYAGIDVSSKSFVVHAINNRNKVVFDNSIMPTKRALQKLLDGFGKETKYIVFEAGNQMKWIADYFLTRKDVVLHIVHPNEIKWINQSKKKTDQIDAKKLAKLAKGSILPQKVHVVTGVARRLRELAASREQLQSKRVSLINTVRGYVKQEGLRLPAKFFKSIEWKEKLRKSDLSETLKQIIESFMIAIDGLIEAELKITTELLAIEDERIKLLETIPCIGKLSSRVIVGAIDEVDRFENKKSIAHYTALTPRIHQSGTELHLGRIDFNGRREVRKILLQCAHTIVRTKNPDSKPLRDFFERISKKRGKKKAMVALARKLIVVAYGVLKNNECYDFRVLQAA

SEQ ID NO: 128803 - protein, 332 aa, unidentified
MNEITMLGIDLAKNVFQLHGVDAGGHVLMRRQVRRKQLMNAIAQVAPTTVAMEACAGAHEWGRRIAKLGHQVLLIAPNFVKPFVKSHKTDRNDAEAICEAALRPTMRFVALKSVEQQQMLALHRLRAGAVKTRTATANRLRGILLEFGIVIPQGIARLRSELPSILEDAENSLPPVLRAELALQMQRLRDLDAEVAGITSQIEQLAEAHEPCRRLMQRRGIGALTASAFVAELGDHRAFRNGRQVGAWLGLVPRQQSSGGRAVLLGISKRGDKYLRTLLIHGARGVVRLADRHDDPLNRWIQKLRQRRGTNKAIVAVANKTARQLWAQLAYG

SEQ ID NO: 128804 - protein, 370 aa, unidentified
MLDTTTFVGLDVHARSIKAVSLDVMTGEVRAATFGYDAGAVAEWVRSVDPKARCVYESGVTGFDLQKRLSGLGVDCVVGAVSKMIKPSADRRRKNDRNDAEFLARMLSVGNVVEVWVPDDECEAARDLTRALEDARDDLSRAKQRLSKFLLRHGLAFDERTPTGRRKGNWTRAHWSWIESIRFAEGADNDVLAYYVDAVRRAAEEKARLEGLVEAEARKPRWRKRVDSLRCLKGVDTASAADLVFEAGEFSRFRNARSFAAWVGLTPSEHSSGESDRRGAITKAGNKHLRKALVEAAWHYLTCSGRPKGLAKGQAPDRVARRHAAKGVRRLVERRESLLARGVHNNKANVATARELACWVWAVGLMAEEA

SEQ ID NO: 128805 - protein, 346 aa, unidentified
MDITTIGIDLAKSVFQLHGIDSSGKVLIKKQIKRAQMAEYFVSLKPCLVGMEACGSAHHWARKLESFGHTVKLMPPQYVKPYVKTNKNDAADAEAICEAVTRPNMHFVPIKSTVQQAILSLHRIRQGYVKARTAQANQIRGLLAEFGLEIPQGIGYISKRVPDIIEDASNELPGILRIEIQSLLEHLNELDTRADNCEKKIVAWHKQSETSKKLEAIPGIGPLTATALIASIGDAKNFKNGRQVAAWIGLVPRQHSSGGKQNLLGISKRGDIYLRTLLIHGARSVIYRSGQKENPTDTQGWLNQLTERRNKNVAAVALANKNARIVWALLNHNRDYQDNHKMLVAA

SEQ ID NO: 128806 - protein, 311 aa, unidentified
MTYHTIGVDISKSHLDVFRLEDRAAQRFDNSAAGFRALAKWLGKAPVARIVFEPTGPYHKAFEAALGETFPLVKVNPLQARRFAEAHGTRAKTDAVDARMLARMGVAFDLEPQAPCSREILVLRELHVARTGLIKDRTRLRNRAQTQDIAILKRQTKARLTQVQRQIAELDAEIAALIAAGQTTARNCDILCSMPGIAAVTAAAMLTLMPEIGTLDRKQVASLAGLAPITRQSGQWQGKAFIGGGRKPLRDALYMPALVAMRFNPDLKAKYEHLRSAGKPAKVAIVAVMRKLIEMANALVKADRKWTPKTA

SEQ ID NO: 128807 - protein, 341 aa, unidentified
MKNLFIGVDFSKEKVDVAIIFADGLTETAARVFNEFKTTVSGYKQLVKWVEQNSCGIDSSLWLFCGENTGDYSKGLCNFLYGKGYDMWLENAKSIKDASGLRRLKSDRADASMIAEYAMRNYDKAIMYEPLSESLAQLRELFLYRQMVVRHRCSFQVRRGEKRLTMEKSPVKTMISQSGRHIVSELNKEVEKIDKRIAELIKSDEELTEVFTIVTSVPGIGTQNAVCLMVYTDNFRRFNYDSRKISCYYGIAPFGKDSGTSVHSDPHVHYMANRQIKAMLTQAALAAVNFNPVMARYYMRLVERGKKKQVALNNVKNKLVHLVTAMVRNRQTFTPEYKISA

SEQ ID NO: 128808 - protein, 404 aa, unidentified
MSETRDKVSFSSFLGIDISKRSFDGCCIDREGNVLFHVSLPMNRTGFEKLVTHVCAISLPKGSILIGMESTACYHVSLFSFLMALGYSVSVINPLLISNFVKLQLRKTKTDKKDAAVIARYLSAHGACLPQTMADSHVADLRELSRQRESLLHQMTALKCDIKRVLSITFPELERTMGIFTRTTLRLLGRFPSARALAQANREELAPLLHHASRGRSTPVSVDTLLKLARSSVGTANPSREMILRQKASILVHLEEHLQEMTNTLIELCQSALEQDVEILTSIRGIGDKTAATFLIEMGGEIQKFDTHNKLIAMAGLDPSVYQSGQYDGHSRITKRGNRHLRRVIWLMTIRVIQFNDLFKSYYRKRIEDGLPFKKAVLATAHKLIRIIFVLLTRRTMFCHEVTS

SEQ ID NO: 128809 - protein, 412 aa, unidentified
METIIERPAALDVHKAQVTACVRVPTNGGGREQHVVEFPTTVRGLLALRDWLAAHGVQQVVMEATGVYWKAPWAILEDEFECLLVNARHVKQVPGRKTDVSDAAWLCQLAEAGLLKASFVPPKPIRQLRNLTRYRKTQIQERQREVNRLHKALEDAGIKLDCVAADILGKSGRDMLDALVAGTTDPAVLAELARRQMRKKIPALREALAGHFDAHHRLWIGAILRHIDFLDEQIDRVSEAIDEQIRPFLAAVELVCTMTGFQRRGAECVIGEIGTDMSRFATARHLASWAGRCPGNDQSAGKRRSGKTRNGSKWLDYALEEPAMAAIRVRDSYFAAQYQRLKPRRGHKKALGAVKHSMLCAIWPMLATGETYHDLGGDYFTARDPERQTRRLVKQLERLGHHVTLQEAPPTT

SEQ ID NO: 128810 - protein, 338 aa, unidentified
MVYGAIDLHMRYSQIRVIDSDGRVLSEQRIPTSPERLVSVFRGHGPMRILLETGTESEWVAQALETVGHEVIVADPNYAPMYGEIRRKVKTDRRDVAALAEANRRGWYRATHRVSGPQRALRQVLRSRRQLVPMRSGTIALIRSLLRQEGYRLAPSSSVRVPARLAALVLPRGLTETIAPLRRMVETLTTEIAAVDARLATHATADPLVARLQTVPGVGPVVALTFRAFVDDVGRFARAGQVSAAIGLVPREDSSAERRHRGHITKAGPRELRSLLVQAGWACWRSRASGTLRAWVERLAGRRGKRIAVVALARRLSRILYALWRDQSVVNAAMLAAA

SEQ ID NO: 128811 - protein, 455 aa, unidentified
MPGKKTRGTTSGRLSTVHPDAAGIDIGSTFHVVAVPSDRDDQPVRTFRTFSSDLQQLADWLTAAHITTVAMESTGVYWIPVFEILEERGFEVLLVNARDVKHVPGRKSDVNDAQWLQQLHQHGLLRGSFRPRDGVVRLRAYLRHRERVVDYAAAHIQHMQKALMQMNVQLHHVVTDITGLTGMRIIRAIVAGNQAPEQLAEFRDRRCHASADTIREALTGNYRPEHVFALRQALELYDFHQAKVAECDVEIEGVLRGLNEQRVTPDAPLPSVRHAKGQNEPAFDVRPALYTLLGADLSQIHGFGPYTVLRLVAECGDDMTKWPTAKHFTSWLSLAPANKISGGRLLSSKTRRSSNRATALLRIAAINIGKTQTALGAFYRRLAARTGKAKAVTATARKLAILFYNALRYGMTYVDPGVSAYEERYRQRVIHNLQRRAKSLGFTLTATPPATEGVS

SEQ ID NO: 128812 - protein, 376 aa, unidentified
MSEPDHNEAFLYVGIDAHQDTLAVAVLPERAETPEPIVTLPNRAPTLRRWFRRLADRAPATAVYEAGCLGFSLQRLIEKAGVPCLVAAPSHLPKLPGDHRKTDRIDARRLASFLRAGQIVAVTPPSRETEALRGLTRARQSLREDVVRQKHRILKFLGIRGFVYREGMRWTAKHLRWLRDLDLGLDDDRDTLDFLLDEYEQRANALALLDQRIERRAQRPDVEERVRSLLAFRGIRTLTALSVIAELGDPRRFPNARKVSAYCGITPSEYSSGMRIKRGPITRSGNARLRRLLVEAVQHYARPYPPNSTVLARRARAPKHARSLAQEADRRLRRRYRLLARRKHTNVAKTAVARELIGFLWAALVGLETRAKTPES

SEQ ID NO: 128813 - protein, 316 aa, unidentified
MKNVTKIYVGVDVSKNRLDLFLYPVEKVCFFNNSKDGINEIIKLLSAYTIEQIACESTGGYEDLMLDMLRAAGYKVWQVEPNRIKSFIRSKGKKAKTDSIDARMIAMFSFQEKPEHLHVEYGKNHEQLRELVKRKKDLVEMIVAEKQRLKHPSQSSCKLNIQKHIDFMDKQIKQIEEKIKELIDKDDDLSKKAKIIESVPGIGKATTSMLLAEMPELGTMENKKAAALVGVAPYTQQSGQYRGKSFISGGRAFVRSAIYMAALVAARFNPALKEFYNRLRNIGNKPAKVALVAVMRKLITILNVMIKTQTLWRCEI

SEQ ID NO: 128814 - protein, 374 aa, unidentified
MADYSEVFVGIDTSKLRNAVAIAEGGRNGEVRYLGEIANTEAATSRLVKKLAAQHRRLTFCYEAGPTGYGLHRLIKTLGHECVVVAPSLIPKKPGDRVKTNRRDALNLAKLLRAGELTAVWVPDARHEAMRDLVRAREAAVDDLKSKRQQVLSLLLRLGRHYTGQRTWTRAHMNWLVSQKLAHREQRIAFEEMLLAVRQADERVIRLERAIAAAVPDWSLAQVVTALMAVRGLDLISATIFLAEIGDLSRFASPRQLMAYLGLVPGEESTGDRVWRGGITKAGNHWARRILVECSWSYRHPPRVGKKKLAKVEAAPPAVQEIAWKAQARLTARYRALVRRGKRPTLVVTAIARELSGFIWAVSRAVGAPAAPVR

SEQ ID NO: 128815 - protein, 430 aa, unidentified
MKNRINQRLEEISVTTLVIGVDIAKSVHWARFVDYRGIEIGKAISFNCDREGFESIVARIEEIRNSKVLRVRFDKIIVGMEPTGHYWKTLANYLLKAGYRVVCVNPYHTKKAKELDDNSQTTSDKKDAMTIARLVKDGRYFDPYLPQDVYAELRTLTNARISNMKRSVNLNNTITAILDEYFPEIRTVFKNPLKGKASRQVLKNCPFPVYILKTGEAGILEEIKKAVKKTVGIKKVRQLIKAAEASIGADYGLESAKLRLKQLLDELELVQQHISEIETSMERMLIGTGYAEQLLSIKGIGIVTAAGFLGEVGDPLRFQNARQIANYASYNLVEDSSGKSKSGTRISKRGRSQLRSLLYQMAFTMVGQNAEMKALHQYLTSRPKNPLKKKQSFVVISKKIITVIYSLLKKRTTYNPALVLGDVRKEMMAA

SEQ ID NO: 128816 - protein, 461 aa, unidentified
MRRKTKRKAKAKTTLPEGLETINLNAAGIDIGSTEHYVAVPPGGSSEPVRSFGSYTAALYEMARWLKECGITSVAMESTGSYWIAPYQVLEASGFEVILVNSRHVKNLPGRKTDVLDCQWLQKLHTHGLLSGSFRPVNKVCVLRSYLRHRENLVHAASAHIQHMQKALTEMNLSLHHVLSDLTGLSAMMIIRAILAGERDPWKLAGMKDRRVKKSQEQIARCLEGDYRDEHLFALAQALELYEFYQAKIAQCDLQIEKQLHTFKAQVDPKKNPLPENPKKKSLKAQSNFELKTHLYAICGTDLTRIDGIDVMSAQSLISEIGLDMSRWKSEKHFTSWLNLCPSNRISGGKPLTRQPRKGHNRAADILRLCAQSAIKSSSAIGAFGRRLKARLDAPTAVKAVAHKLARIVYRMLKYGKQYRDAGERYYEEKYRDHLLRRLQKQAAAFGFQLTPQQPIMDPVS

SEQ ID NO: 128817 - protein, 343 aa, unidentified
MYYIGLDVHKKTISYCVKDAAGHVHREGKIGSTRRELDAWIKTLPQPRLIAMEATIFTGWIYDHLLPHAEKVKVAHPLMLRAIAAAKKKNDKIDASKIADCLRCDFLPECHMASTTIRDRRRTLRYRNLVVRQMVQMKNRVSGLLMETGVSYNKQRLHKVGYFAELMSSNEEVQESIRPLLKLSREMIGRSQKLEYALVSSLERDPLLKERLRRLRTVPGVGSITALAWALEIGDITRFASIKQAISYCGLCGDENSSADKAMRMPLSKQRNKHIQRVLVEAAKLAPRECHELAVIHARELGKGNKNRATLAVARKMVCYMLAVERRKQDFVPAEKFNRTAAA

SEQ ID NO: 128818 - protein, 351 aa, unidentified
MTSIAPTKTDVIGGVDTHLDLHMAAVVEPDGTVLGTRAFPTTRAGYRQLLAWMKGHGNLLRVGVESTGTYGAGLVRLLGREGVPVLEVTGPDKSVRRSSGKDDTLDAIAAARAAASGQRVQVAKDRNGQVEALRVLRTTRKTAVKCRRATLQQLHNTIVAAPEDIRDELRGFTRMRLLRTLAASRPNQTAFRDPACATRLALKSLARRVLELNDEIAELDRMIEPLVAELAPGLLALEGVGSACAGELLVAAGDNPERLRSEASFAMLCGASPIPASSGKTERHRLNRGGNRQANSALHMIVVSRIRTDPRTKAYLARRLREGLSKREAMRCLKRYVAREVFAVLTARSRS

SEQ ID NO: 128819 - protein, 370 aa, unidentified
MEETIMYVGLDVHKKSIAVAVADGDIGGEVRYLGVIDNTTKALDRLIARLERPGRVLRLCYEAGPCGYGVYRHLQGRGYTCMVVAPSLIPRRPGERVKTDRRDAAMLARLLRAGELTAVWVPDADHEAMRDLVRTRAAAMRARHRARQQLSGFLLRHGRVRSGKNWTLAHRRWLSTVRFDHPAQQIVLQDLVDAVDDADARCARLVAQIEALVPEWSMAPVVEALQAMRGIALIVAVTLVAEVGDLRRFDNPRQLMAYLGLVPSEHSSGPRVRRGAITKAGNGEARRVLIEGAWSYRLHARVGRTMLDRLQGLPKPVREIAWKAQVRLCARYRRLSAAGKPQPVVTTAIAREMLGFAWAIARHVQPRTTT

SEQ ID NO: 128820 - protein, 474 aa, unidentified
MAAREKNTNKGAAPGEGGDGAEVAEERVEVVVYAAAIDVAKGFGMVCTRVPGSRPDRKRQRVWRAEATYHAVVALMDHLRCEGIQRLVLESTSDYWRIWYYLAEAAGLEVWLVNARDVKHLPGRGKSDRQDCVWLCKLNERGMLRRSFVPPQATRDLRALTRTRSRLAHDQARHQLRVEKILEDALLKISVVISDLFGASGRRFLDALVAGERSPRALAALGDARLKATPEQLADALTGRFRDIHAFETGMHLRLIDTINGEIARLDDRIQQQLASIPRVAPACTSCGLIGGGHAPGCASQGTPVPGLAERLDEITGVGVRNAQVLIAELGTDTTVFPTPGHAAAWARLTPRTLQSGTSVRPGRTGKGNPYLRGALGQCVMTAAKTDTRLGEQYRRIARRRGKQKAIVAVSRVICEIAWILISDPGARFTDPGPSYYRPRSPARQTRSKIREIERLNPGMQVTLTPIEPATTAA

SEQ ID NO: 128821 - protein, 416 aa, unidentified
MFAVGVDVANGRSRVAVLDGMRNMVAKPFEVVHTAQGFAALVEKLRQLDGEVRIVMEHTGRYYESFAMSMHRAGFFVSAVNPLLIKNYQGGINVRKVKTDKADAQKIAQFALDKWTILPHYTPMDTIRYNLKTLHRQFQLASKTKTALSNNLIALLEQSYPGANRYFDSPVRTDGSQKWVDFVDTFWHVDCVAMSSEHAFVERYRKWCKRHGYVFSEQKAIQLHADARQKIPLVPKSDTCKLLVREAVSQLNAVSRTVETYRAEMDRLASQLPEYETVMGMTGVGKSMGPQLMAEIGDLRCFAHQKSLVGFAGTDPIKEESGDKVSQSAPSSKRGSPYLRKTLFVIMSILLQLQPQEDPVYQFLDKKRSEGKPYYVYMTAGGTKFLRVYYGKVRDCLKAKGLWEVPASASQEVNPG

SEQ ID NO: 128822 - protein, 309 aa, unidentified
MKEELVYLGVDIAKSHLDAAIGAQKQRFCNDAVGHRRLVKWIEQTEAAVQVICESSGGYERRLVQALARARIKVSLVQANRVRQFARAAGILAKTDRIDAEVLCEFGKVMQPQTVTAATLEQEHLRELESQRRHLTHLLVMEQNRGARVSDASVVRLNRSLINQIKKQIEKLDLLIKEHIEQSPRLSAKAEKLTSIKGVGLRTAALLLAQMPELGQLNRREVAALVGVAPFNRDSGKMRGKRAIYGGRRPVRHGLYMAALVAARHNPILRQFYLRLRAAGKPAKLALTATMRKLLIVLNSALKRDLRYA

SEQ ID NO: 128823 - protein, 321 aa, unidentified
MTYVGIDVSKVTFVVAYSSVKTNKTRTFKNTVNGVHEFVQTISASEHNCVLEATGNYSALLVYLLSEAGITISLENPLKIKNFARVMLTVTKTDEIDARLIALYGEKMQPAPYKLRSDAILVLKQKRTVLRQLKKQLVATRNLKGSMEVLPFFDPKCKKTIEKTITFLEKQIKEMEEELASLAQGEYKKQMDLLTSIKGIGVTLAAALIVATGGFTYFDNAKQLTRYLGLSPTYKQTGTSVNVKGHINRNGDSSLRSQLYVAAFSSLRCNTECKACFDRLRSNGKPGKVVVIAVANKLVRQAFAVVTQGKPYVDGFKSEKP

SEQ ID NO: 128824 - protein, 342 aa, unidentified
MRIIGCDLHARQQTLAMLDTTTGEVVEVTLKHEGDNVREFYSSLPRPVRVGIEATGSMQWFLNLMEELGIECLVGHPAQIRAAEPRKQKHDRRDADLILKLLAENRFPAIWLPSKELLDLRALLRHRHQWVRMRTRIQNALQSIALANGLRRGTSLWSQDGQSRIAALPLAPHTAYRRSELQALYEKFEAEIEKLNQRVQEQASERSGARLLMTHPGVGPVTALATEVFLGNPARFADSKALASYVGLIPREYSSGGRQRLGGLTKQGNPLLRFLWGEAGAHAARKDAELQRFYRRKLVQKGLGKASVAVARKLGIRLWIMLRDQIEYNEFCRRGQKQQKSQ

SEQ ID NO: 128825 - protein, 363 aa, unidentified
MSECSLKPVWEVTREVVRFVGLDIGKWKCRAAIMNQEGLILDEFWFTNNHEGIENLTAKLTVQDRVVMESTGSVWTNLYDRLDDNHIHISLANPLKTKAIASAKIKSDKVDARILAHLLRSNLIAESYVPEKPLREIRALVRHRVAIVKIRTMVKNQTHAIIDKHGLSCEYSDMFGKSGMKWLRTLELPSLDKLILDNHLTHLESLNQQIDRVDEEVHSKACEDEDVRLLLSLTGVDVYTALLIRSEIGSIDRFQDYRKLVSWAGLAPSLHQSGNVEYHGSITKQGSKMLRWIMVEAATVAVNHDPRMRGFYERVKHRRGPQKAIIAVANKMLKITWFMLTRREPYESRNEKRYLQKLNSIAA

SEQ ID NO: 128826 - protein, 341 aa, unidentified
MKKFIRIGVDLAKNYFQVHALPFEGAPAMMRKLKRSKVLEFFSKIEPCLVGMEACGSAHYWARELKKLGHEVLLMPPAYTKPYVKRGKNDAVDADAICEAMSRPGMRFVPIKSTEQQATLMQHKTRELLIKQRTMNVNALRGHLSEFGFIVAKGIGRVDELLELAEKDATLPNAAKAAVKVLAQTLEGLDKAIDNLEREISSPHGQTEMSRLLDKVPGIGKIIASVVAASVPDPSVFKSGRDFAAWLGITPRQNSSGGKQTLGAITKQGNRYIRKLLVLGATSLLNVVGKRKGALRDWIVALLAKKPARHVTVALANKLARILWAMMKTGETFRTEIFAKA

SEQ ID NO: 128827 - protein, 261 aa, unidentified
MQIIGCDLHARQQTLAMLDTGTGEVVNRTLRHEGNSVREFYSALPGPVRVGIEATGSMKWFLQLMEELGIDCQVGHPATIRAAEPRRQKHDQRDAELLLKLLVEKRFPSIWQPSKELLDLRGLLLHRHQWVRLRTRIQNALQAIALANGLRRGSSLWSESGQRDIASLPLATHTAHRRSELQAMYARFEAEIEQLNQQVLEQAGQRPTAELLMSHPGVGPITALATDVFLGDPKRFNDGKALASYIGIIPRENSSGGRQLL

SEQ ID NO: 128828 - protein, 358 aa, unidentified
MAVNEGTRRIVGGVDTHKDLHVAAVVDEQDRVIGTRSFATTRQGYRQMLAWMRAFGDLQRIGVESTGSYGAGLLRFMQQAGIAVLEVTTPDKQDRRRRGKNDDLDAQNAAHAAFAGQRTVTPRSRDGMIESLRVLMACRKTAVSARRVALQMIHNTIVCAPDGLRDQLRSLTRMQLVRTLAAWRPDLTAYRDLDSAYRIGLKSLARRYLELHDEIADLDVMIAAIVDELAPNLVARNSIGHLGAAQLLLTAGDNPERLRSEASFASLCGVSPVPASSGKTVRHRLNRGGDRAANSALHIIAIGRLRTDQRTKDYVTRRIAEGHSKLDAIRALKRYLAREVFTLITQRRREINATRIAA

SEQ ID NO: 128829 - protein, 339 aa, unidentified
MSKLFKNFVGIDISKTWFDAALIKSDDSSVVIHEQFAQKPEGFKKMQTWLRTHHVLLDEQTLFCMEYTGIYNTGLVHYLVNAKAALWVEMPLRIKKAGGFERGTDDKAAAVKIAWYALRFKDQVKLWQPIDSNIESIKNLIAQRDRIVNAINLLTVPVNELKACGCAEDAKTLEKLQKASVAAMRKAKVSIEALIAKTIQQDEQLNIKVKRVASIKGIGPVTSVALMVYTKGFTAFENGKQLACYCGVVPFTKSSGTSVRYKATVSPFANMKLKKLLHLCAMSAIQNDPEMKAYFERKVAEGKNKMSVINAVRNKLVHRVFAVIRDERNYEDNYVRNCA

SEQ ID NO: 128830 - protein, 314 aa, unidentified
MDKTICGIDVSKDRLDVAVRPSGERFVVARNGAGLDDLVGRLKILKPYLVVLEATGGFETVVVAALAAAGLPVAVANPAQVRAFAKAIGQRAKTDPIDAGVIAHFGEATGVTPRPLRDQATQQLADLVARRRQIVEMIGAERQREKRANSRIKKSIARLVKALERELSSVDTDIDDAVRGSPAWREKEDLLSSVPSVGPTISRTLIAELPEHGTLGGKQIVALVGLAPFTRQSGQWRGKSFIGGGRTSVRKVLFMGAMVGLRHNPVLKAFFERLIAAGKPKKVAIIAVARKLLTILNAILRDGRPWRGTVEAVS

SEQ ID NO: 128831 - protein, 403 aa, unidentified
MEYDLLAYDIYAGFGVGKFSHHVVAIKTNDQRIILSEKIAQEEEVIRGVLKKLKEFGRVLAVVDQKGSVGCLLVAIIKDMGIDAGFLTPSDFHTFAKGYTEIKSDAKDAYIIADIAMRFTNRISPIADFEEKAEALRTLTSFREMLVRDNTQAKNRIRNLLVQIHPVFEACIKKEHLEKPAYLHIFKQYGGPYGIRRAGKKRLKAFISKLPYYGKKADSIVEHIFCALSQQTVHLPGAGAREEAIKSLAAALILREREIKEVEEKIKTSYKNFPESIILNSIPGIGNVFGAVILAEVGDISQYKDAGHLAAYGGVAPSKRQSGTTLNRGRKKVKCNRQLRNAFCESAWISVRCDDWSAWFYEKKRTEGKKHRQAILALARHRTDIIYAMLKTGSLYEPKTMTR

SEQ ID NO: 128832 - protein, 343 aa, unidentified
MERELYIGVDVSKRWLDLAYYDGVTVDWKQGHIRVDNKESGFVLIGKWLKTLGVDKDSVLFCMEYTGLYCQDLRMWLEREGFVYGMVNPRKMHRFEPDLEAGERALDRIKTDEMDSFRIAMYCEKHCRKIRSQPSRLPAAAYFKLKRLIAERRQYVVQAALYKQQLHDVCDYDTDGSVCRKREELKSLMAHVRQTDAEILSVMEEDAAIRKNYDLLRSVTGIGIVVATETIVLTENFTAITNPRRYACYIGIAPAKKESGDSVRGGEHVSRKGFTQAKADLSMACLKAIQSDANIKAYWQRRKADGKKGGVVLNAIKFKLVLRMFAVVKRQKPYVEIDGYRKR

SEQ ID NO: 128833 - protein, 355 aa, unidentified
MNEIKYIGMDVHQSSTSIVVLNAAGRVVTSAVVETRGQPLVAFLQGQRGTLHLTFEEGTYSAWLHDLLWRHVSRLVVCDPRHNALLKSGSKNDPIDAHKLADLLRLNALRPVYHGQSSLGTLKELSRSYLALVQDSTRVMNRLKALYRSRAIACRGSKVYSPRQRASWVGQLKEAGVHKRAELLYQHLDVLSQLRREAKRALLAESRRYTVSRILRAVPGLGPVRIAVLLAMVQTPFRFRSKRLFWAYVGLGLVTRISAQFALVNGQLERSGKAPAPRGLNPNHQRELKEIFKSAASTALHRPGPWQQFYTQRVAAGRKPELVRLTVARKLAAVTLHLWKKGERYDVKHLKSTAI

SEQ ID NO: 128834 - protein, 390 aa, unidentified
MYIVGIDIGKNNHEATIIDDTGAIIGKSLKFTNSHSGADKLITYINKNIGSSEVIFGLEATGHYWLSLYSFLLEKGYTVNVINPIQSDSFRNLYIRQTKNDTVDSFIIAEVIRFGRFTTTQLADDKLLSLRQLCRYRLSLVDSVSELKCRIITILDQVFPEYEKLFSDTWGISSKKLLEKYQTPEDILKLDTSELAKFLKEHSRGQLGYAKAEKIKDAAQNTFGIKIAQSAFKFQLKQLIDQVLFIEKQINSLDQEIEFYYSQFDSHLTSIPGIGSVTAAIILSEIGDVTRFKNASSLVAYAGIDPTVKQSSQFLANNNRMSKRGSPYLRRALFLAASTCTLHESPLNDYYNKKRSEGKHHLTAVGAVAHKLTHIIFAIMRDNKDYEPVS

SEQ ID NO: 128835 - protein, 315 aa, unidentified
MSESKVEVFVGVDVCKDTLDVRIEPPGESFQVGNDDEGIKALCSRVSELAPTLIVMEATGGLETRAAGELAARGLCLAVVNPRQVRDFAKASGQLAKTDRIDTHVLCGFGRAIRPAARPMKDALTQQLDDLVTRRRQLVEMRVQETLRLHGASKVQAKSVKAHIAWLDKRIKSVEIDLGTRLRSSDAWRVKDDLLLSIPGVGEITSRSMLSRCPEIGRLSRREIAKLVGIAPLNNDSGKYRGQRHIWGGRADVRSVLYMATVSAIRCNPVIKAFAASLKSTGKAPKVVIVACMRKLLTIMNAMIKTNTRWNPQAA

SEQ ID NO: 128836 - protein, 381 aa, unidentified
MTPSEHSALGWKKFREKLQPYGSIPFAIETSQGTAVEQLLEAAMIVYPLNPKSAQAYRERKAPSGVKDDRLDAWSFADALRVDGQDWKALRPEEPLIKELRLLCRDEVALIEQRTAFIQQLRHALAEYYPAALEAFEDWTSVSAWMFLQRFPTPELLAQAGKRRWQKFLHSRRLWGSDQGPRRMEIFAHATELSGSAPTAKAKSLLALSLVQMLFVIEKQLAVYRQRIEELFARHPDHDLFGSLPGAGPKIAPRLLAEIGDDRERFDGDTQNLQCFGGTAPVTKRSGKYRHCHQRWACDKHLRHAIHLFAEQSLSRCAWAQTYYQHHRQKDRSHANALRRLGHRWLKIIHKMWMDRTLYDPELHHRNQLQHGSWIFQLKEC

SEQ ID NO: 128837 - protein, 391 aa, unidentified
MSMYFIGIDISKYKHDCCIISAADQKVVSKVTIKNNKAGFDELLTIINSLSNPENIRIGFESTAHYALNLELFLENANHSFMEINPVLIKDFKKSQTLRRTKTDSIDCELIARWLMTVEYKPHSKGFYHAYSLKSLTRLRDRLVRQRSFYLVKITNVLDHTFPEFKPFFHERLSKTALYLLENYGSAEKIARMNSASYEKLRSISRGKFSPQQFIRLKELAANTVGVNNSIFDVELNSLLTLYKSLVDEIKTLESEINRLVDEVHPHYMSIPGIGPISAAIIYAEYGDISNFSSPNQMLAFAGIEPSVHESGTEAYNGKMVKHGSSQLRYVLINCCLPLIRFDVTFATYYARKRSENKPHRVAITHVAKKLVRVIYALESQDIDFDPKKLR

SEQ ID NO: 128838 - protein, 351 aa, unidentified
MVVTIGSDPHKSSHTFVATDGNGRQLAEKTVKAVPEGHLEALRWASQWPERVWALENSRHLVRRLERDLLVAGEAAVRVPSRLMAESRKKGRQRGKSDPIDALAVARAALREPGLPVAQLEGVSREVRLLVDHREDLVGDRSQMQNRLRWHLHELEPGYRVPAGALSRVATLNRLGVLLAGHSGTVAELARELLGRIRELTVRIDQLESQLGQLVRPLASSLLALQGCGVLTAAKIIGEVGNISRFRSKAAFARYNGSAPIPVWSGNDDHHRLNPGGNRQLNAALHRIAITQARSSGLGRAYLDHRLQEQDTKKEAMRALKRRLSDEVYGRLLTDERTRLSDRETPDAQVA

SEQ ID NO: 128839 - protein, 400 aa, unidentified
MQMICVGVDVSKGKSTVAVIDKDGEILMRASEYEHTETGMAELIQKLKALKEEPRIVVENTGYYHWPLVNSLMDDGFFVCVVNSIIVSKFAKVQMRSGKTDRLDAMMLCRFGLAYWSELVRCQPDEERRTLLRLYSREYSHAVHLVVEQKVHFTSLLDKVMPGIKTLLEDKGGRSKLSDFALEFWHFEKISKQKPDSFTKRYCKWAKEKGYHANESKAAQIYALSQNGIPTLPCTDAVKRLVQEAARVLKHLEESVNSILAQMNALASTFPEFEVVSEMKGVGKHTASRLIAEIGDVRRFHSAKALTAYAGLDAPPYQSGKFESHNRKISKRGNKYLRKVGYEVMASLVSTKPVEDHAVYSFICRKKAEGKYYLSAYMAGLNKFLHIYYARVCEAMKEPT

SEQ ID NO: 128840 - protein, 345 aa, unidentified
MEQISRIGMDTSKHVFQLHGVNAVEEVVLRKKLRRKEMVAFFKALTPTVVGIEACGGSHHWARLLRSFGHEVKLIAPQLVKPYVKRGKNDAADAEALCEAMSRPTMRFVPVKTTEQQAALMIVGLRDRLVRNCTQLSNAIRGYAAEFGFTVAKGKAHLKSLLERIQADESIPTLARELFAAQADEYARLQTQIHEVNVKLMACHKADECSRRLAEIPSIGPIGAVLLRLKTPAPEMFRSGRQFAAWIGLTPKDHSTAGKVKLGGITRAGDETLRSVLVAGATAVIQHVRRGGRGAPWILKLLERKPPKLAAVALANKMARVAWKLMVTGERYATKSAPAALASAT

SEQ ID NO: 128841 - protein, 381 aa, unidentified
MKKDIRHVGLDVDSERIAVAVAEPGGEVRSLGSIPYREESVRQLMKKLGPPSRLRVCYEAGPHGYGLYWQLSKLGVHCDVIAPTLVPVKSGDRVKTNRRDAEKLARCYRSGDLTAVWVPDAAHEALRDLVRAREVAKKDQLRARHRLGKFLLRRGLRAAAGVKSWTAKHLLWVKTLRFEQAAQEATFLDYLHEVEHAVERVARLEQAIDQAMESVPVEMRAVIAGLQALRGIKRVSAATIVAEVGPLSRFSRPKQLMGYSGMTSSEDSTGSSVRRGGITKTGNAHLRRIVGEAAWAYQHRPAMSPLIKKRQEGLSEEVKEIAWKAQHRLCTRYRRLMAKGKIRQKVATAIGRELLGFIWAIGTQVEREQQRQSTKEHRRAA

SEQ ID NO: 128842 - protein, 346 aa, unidentified
MKQIIRIGMDTSKHIFVLHGVDASEQPVLRRKLSRKQVLDFFAKLPPTVVGMEACGAAHYWARELGKLGHEVKLMAPQLVKPYVERNKNDGRDADAVCEAMSRPRMRFVPVKSAEQQAALMLAGVRDGLIARRTQLCNAIRGYAAEFGLIAPKGLDKIEPLLARIAQDENLPAVARELFAMQGRDYAQLQGELKAIEARLLAWHRANATSRRLAQIPSVGPIIATSLVMKTPDPGAFRSGRWFAAWLGLTPKDHSTAGKTRLGKITRAGDETLRRLLVAGATAVIRQARLGRGQPSRWLVALLRRKPPKLAAVALANKVARIAWKLMVTGESYDAARINAEPAIAT

SEQ ID NO: 128843 - protein, 346 aa, unidentified
MDKLIAGIDLHGNNLVIGVIDEKGKRLNHRKLQCDLKEVVEFLQPFKPQLKSMAVESTFNWYWLVDGLRAHGYPIDLANPAKIEQYSGIKHADDKHDAFHLAQLQRLNILPKAYIYDAALRPVRDLLRRRMNLVRQRTALMLSFKSLYARTTGATMELKRLKEITPEEAPKLYEHPAHQLIAQVQSEHIGALNASIARVEKAVQPSARELPIYPRLLTLPGIGRILGMTITMEVGDIKRFKTDGNFASYCRTVDSRRMSNGKKKGENNQKCGNKYLSWAFVEAANFAKRYDDQCRRWYDRKAAKTSTVIATKALACKLAKAAWHVMAHKVDYDPRRMFPELAIKKT

SEQ ID NO: 128844 - protein, 415 aa, unidentified
MDTFEELTHFAGFDWAKDHHDAVILDRQGATVESMTIAHTAQGWAQWRERIQAYPALGVAIETNQGAAVEQLLQSQVTVYPMQPKAAQRYRDRHVPSGSKTDRRDAWCFADALRVDGQHWRALAPEDPLIEELRLLCRDEVELITQRTALVNQLQAALYEYYPAALEAFDDWTAPSAWEFVLAYPTAQQLVKAGQRKWEKFLHTHKLWRPGTAAKRLEIFGRADRFGGSEAVTRAKSRLAVSTAQVLRTLHQQLEEYRRAIEQLFARHPDHDLFGSLPGAGPKLAPRLLSEIGPDRRQYPEAQGLQCVAGTAPVSFESGKIRRAKIRWHCNRHLRHAVHLWSDCSRKFCAWAQAYYQAQRAKGKSHACALRCLGQRWLKILWKMWQNRQPYDETVHALNQQRHGSWILQLQPKTT

SEQ ID NO: 128845 - protein, 461 aa, unidentified
MERKMKIGMDVVNFNAAGIDVGSRSHYVAAGQELGDVKEFGVYAEDLTALCQWLMECDVTTVAMESTGDYWQNLYTELIGFGFEVVLANGKFTKNAKGKKTDVKDCRWIQKLHTLGLLTGSFLPDLETEQLRTYCRQRGNWIELASSATHKMQKFLKLLNFRLDVVVKDVCGLTGMKIIEDICKGNLDPFQLAEHRHYNCRKPKEEIARALHGNNRRDYLFGLQQELENYKFCQRKIKACDEQIDRTIKEHIKKHPERKKLKTIEKPHKRINKNAPDIRDMNQLAFRYFDGVDLFAIEGLSHASILSIMSEIGPEGFKNFPTSKHFTSWPRLAPNNKISGGKILSNRVPKGSNRLKIALRQAANAIGNLKDTHLSDFFKRVAFRKGRHSAVSATARKLAVIIWNMVTKKMPYDPPRPYLFLDQKRKMGLAKRIKKQIDKFDLKPEDLGSPWVCSMDFSPVI

SEQ ID NO: 128846 - protein, 428 aa, unidentified
MDPRFAVDNVLALGVDPHRESLDVIAIRFPEEILLDAAFDNCPAGHGALWSQATTLAAEQDLVLVVGLEDGSNYGCTLGRYLANQGCPVKEVNPRMTNRQRDFYGQDKTNRLDALATAAIVLRAYDQLPDITPVQEALQATRELSRYREQLVKDQTITTNRLQCHLANQYPAYKTFFSKVNGVTALHFWATYPTPAHLQGVTSEELAHFFFQTSHHRLGKVASRKKADQILQLLDDSPPQVPGLLTDVEATIITDLAQRLLQLGRSIETMEAKLAETLPATGQKLETFQGISTALAGVLVGETQDAARFNFDKDRYASYNGTAPATRGTGRHVRQVENRWCNRRLKSAFGQVALNARRCEPLSAEYYQACLDRGLTPAQAHKCLSRRLSDVLFAMMRDKTTYDPEIHRHKQMLHKMKGKSVAPTVAGG

SEQ ID NO: 128847 - protein, 402 aa, unidentified
MNAVGIDISKGKSMVAIMRPYGEIVSAPFEVKHTSSAINSLVALINSVEGESRIVMEHTGRYYEALAHQLSQANLFVSAINPKLIKDFDNDSLRKVKSDKADAVKIARYALDKWQNLKQYSVMDELRNQLKTMNRQFGFYMKHRTAMKNNLIGILDQTYPGVNTYFDSPARSDGRQKWVDFASTYWHVDCVRKMSRNAFIGHYQNWCKRKKYNFSQSKAEEIYGKAKELVPVLPKDDITKIIIKQAVDQLNSASTTVESLRTLMNEIAAKLPEYSIVMAMKGVGTSLGPQLMAEIGDVSRFTHKGAITAFAGVDPGVNESGTYVQKSVSTSKRGSSSLRKTLFQVMDVLIKTHPQDDPVYQFLDKKRAQGKPYYVYMTAGANKFLRIYYGRVKEYLASLPES

SEQ ID NO: 128848 - protein, 466 aa, unidentified
MTADNKLWRNRKERKEWARRLRSEDPGLEVLHPHAAGIDVGNSAHYAAVRPDRDPEPVRRFECFTADLYRLAEWLQSCGVKTVALQSTGVYWIPLYEILEDRGFEVYLVNARHTKNLPGRKSDVQESQWLLKLHTYGLLNNSFQPPAEIRVLRTYWRQRAEHVSGAATCIQRIQKALTQMNLQLANVISDLSGLTGQAIVRAIIAGERNPQKLAELSHPRIEASREEIAKSLEGNWRPELVFVLRQEVEMYDTYQRRIAECDQQLQKHLASFGDTVLPQSPEVEPRKRKAKPTKNAPRFDLGSELKRITGVDLTRIDGIDVMVAQTLLSEVGMDMSRWNTEAHFSSWLGLCPDNRISGDKLLGKGTRRVVNRAATALRLAARNLIRSRSYLGAQYRRLRTKLGAPKAITAMAHRLARLVYRMLKYGQRYVDKGTEYYENRYRQQQIHLLQKKAAKLGLQITVAVQS

SEQ ID NO: 128849 - protein, 419 aa, unidentified
MGMVATIELVEVRVTVGVDTHADVHVAAAIDQHGRLLGTTSVPSTAAGHARLTAWAQQLGPIDQVGIEGTGSYGAGLTRHLLDQGISVVEVVRPNRQTRRRRGKTDAIDAETAARSVLAGTALGMPKTADGAVEMIRTLRLVRRSAMKARTQAANQLRAVLVTAPQVLRDRLRALSLPQLVDAAARCRPGRLVGIEAASKLALKSLATRYQQLTAEITTLDAEIEKLAHQAAPQLMAIKGVGADTAGALLAAAGDNPERLHSESAFAHLCGVAPIPASSGKTNRHRLNRGGNRDANRALYVLALGRLSYDERTRAYAARRTAEGKTKREIIRCIKRYLAREVFRALTADGQTAVRSTGASDLAHEHRPDAVPGPDIPGDRTRSGAHEQGVRAVRAHLTSGDCLLERLTDATTTVGAVPA

SEQ ID NO: 128850 - protein, 411 aa, unidentified
MENIYPCCAGLDVHKESVEACVRRMGPNGRLDQQTRHWGTMTRDLLAMSDWMAAQGVTHVAMESTGVYWKPIYNILESRFAVLLVNARHLKQVPGRKSDVRDCQWIAQLLQHGLLKPSFIPPQAQRELRDLTRHRTQLAEERTRTVNRLHKVLEDANIKLASVATDILGVSGRAMLSALMAGQESPVKLADLAERQLRGKIPELERALQGHVTEHHRFMLRLLWKQLAEQEELIAELDARIEAQTRPFADEIERLDAVPGVDRRVAEVVLAEVGADMNPFPSHRHLAGWAGLCPGNEESAGKRTRRRIPPGNRWLKRSLVQAAWAASHTKHTYLASQYRRLVGRRGRKRALVAVGHSLLVIFYHVLKRRTTYADLGGDFFDRLEPERLTRYFVRRLEALGHKVTLESAVAA

SEQ ID NO: 128851 - protein, 312 aa, unidentified
MSKYVGVDLSQTYLDVAVRPGSQQWRESNNSDGVAGLIQQLQDLEPTLVVLEASGGLERPVARALIQAGLLVAVVNPRQVRDFAKSLGRLAKTDTLDAQVLAHFAEATQPEPRPYPDEATEQLHDRLTRRRQLVEMLTAEKNRLKQAPLDLRARIRAHIDWLEEELSRVTEEIEELQQANADWRQRRALLESTPGVGPVTSATLLGCLPELGRLNRKQIAALVGVAPFNRDSGKGQKKRMVWGGRAQVRAVLYMSTVSAIQCNEVIGAFYRRLRAAGKPAKVALVACMRKLLVILNAMMKHQTSWQPQPATT

SEQ ID NO: 128852 - protein, 368 aa, unidentified
MNKTIVDDEGAAARTAAGTQTNVRPETIKLGIDIHQEWLVVVAQHDHATPRPPRRFSREELVVWVERLRIQGHEVRAVYEACGFGFGLCRKLRALGAECLVISPQSLDESHSRVKTDGRDARTLCLRLDRYLQGNRHALAVIRIPSEAQERARHLHRQREQLVRARTKMQAQGRGLLVNHDLPAPPRWWRKQAWSQLEKLVPPWMVAHLEVFRPALDVLDQQIGALTQGLQRAAVAESLPRGVGALTSVVLSREVCDWNRFHNRRQVASYTGLCPGEYSSGGKRLQGHVTKHGNPRLRAGLVELAWRLVRFQPTYPPVRKRLAVLAKGAKSTGAQRKKAIVAVARQLAIDLWRMNTGQCSAAQLGLQS

SEQ ID NO: 128853 - protein, 413 aa, unidentified
MQVLNERCAGLDVHKKSVVACVLSGAERGRVQREVRTFGTMTRDLEALSVWLRERQVEQVALESTGVFWWPVFTILEEAALSVILVNPQHIKQVPGRKTDVKDSEWLADLLRHGLVRASFIPPAEIRELRELTRYRKTLVQERSQEINRLQKVLESANIKLAAVASDVLGVSGQRMLEALANGEENPEVLAELALGKLRDKLAALRLALEGRVKPHHRLLIRAILEHVDYLEQSMARLDTEVQQRLAPFARQQELLQSLPGVGERGAAALLAELGTDMSRFPSAAHLASWAGVCPGNKQSGGKRLRGTTTKGNSWLRGLLGELAWAAIRQKDTAFGARFQRLKRRIGTQKALVAVMHHLLVVIYSVLRDQQPYHELGPDYYQSGDPQPQQRQAVRRLALLGFTVTLTPKDAAA

SEQ ID NO: 128854 - protein, 275 aa, unidentified
MKKIYVGIDISKEKCNLCFRSGLEIVREEECSNDVKAFKKAFKAALKALGASVEEVLVCAEYTGRYIYPLTVACQELDIFLWMDDPTRIKNSMGLTRGKNDAIDAARIAEYAFRYSDKAVRYSIPDAALVSMKNLLADREFLLIDKKRYQSQLTDQKKYMAPGDFKHKNCRWKKVIKSIDEQIAAIDAEIDALISADPVLVRQKELLVSIDGIGPRIAINMIAITGGFTRFQNARQFCSFAGLTPYKYDSGTSVRSKAKISKRANQTMKALLHMS

SEQ ID NO: 128855 - protein, 419 aa, unidentified
MERSKTKKLRTVNEKTMIVAIDIGKTIHHGYFRGPEGLEMKPFPFHNSQNSYEEFWMRALLFKQQSGLEEIIVGFESTGPYAEPLMNFLAKKPIKLVQVNPMHTKRLKELTGNSPNKTDSKDPRVIADVISLGHALTVVVPKGPAAELRRLTQARQRASKNRTAMVNQLHHLVYVVFPEFMQIIKKITSKSALYLLKTHPSPEDIVDLGFERLQALLRKISLGRLNQSQVKALIDAAGNSAGIDDGKDSLLTEIRYLVSCIERESGFIDHLEKQMSQYLKQIPYSQSILSVKGIGEVTVAGLIGEVGDFRQFKTIAEITKLAGLDLYEISSGKHRGQRHISKRGRSYLRKLLFFVAINTIRTNGIMHESYLRMLNRGMPKVKAVVAISRKLLRTIFALARNHTTYMENYGCNNHVKLAA

SEQ ID NO: 128856 - protein, 370 aa, unidentified
MDHHSGAFVGIDTSKLRNAVAVAEEGRGGEVRYVGEIDTTEAATRKLVAKLAAKYRQLTFCYEAGPTGYGLYRLIRKVGHDCIVAAPSLIPKKPGDRVKTNRRDAVGLAKLSRAGELTAVWVPDERHEAMRDLSRAREAARKDLKGKRQQVSAFMLRLGRHYPGKKTWGPAHMNWLMLQKLEHREQRIALEELLGAMRQESERVERVEQAIRDAVPEWSLAEVITALQAMRGIDLVAAVTVLAEIGDLSRFQNPRELMGYLGLVPSESSTGDTINRGSITKAGNGRARRILVEAAWSYRHPPRVSREKQIKVAAAPRAVREIAWKAQMRLCGRFRSLTRKGKRPTVVATAIARELSAFIWAINREVMASR

SEQ ID NO: 128857 - protein, 340 aa, unidentified
MGVFVGIDVSLENSAVCAVDEHGKLLKEMKVASEPGALNACIRSMPGVVEAIGIEAGPLSQWLHKSLTDLGLPVVLMETRQVKAALKAAPVKTDRRDAAGLARLLQMGWFRPVHCKSLSAQELRVLLGARRSVQDAAINIEMSIRGMLRNFGLRLGRIGKVSFEDRVRELTDGNKLIQLSIEPMLRARAALRSELVRLERLARDITREDPVCRLMMTMPGIGPVVALTVRSTIDDPGRFRRSKDVGPSIGLTPRRYQSGETDIIGGVTKAGDLDMRTALYQAATVVIHRSKKPTWLRAWAERVVRRRGVKRAAVALARRMGVILHRMWVDNTEFQAARMA

SEQ ID NO: 128858 - protein, 333 aa, unidentified
MSRFWVGIDVSKRKLDVALLNDAGKVKSKSLANDPAGFTALMTWLEERGANAASTHVCMESTGTYSDGCATAFADAGWLVSVVNPAQPKSFGQSELNRNKTDVMDAALLARYCSKMAPPAWQPPPLEYRKLRSLVERLQALKDMHQQEANRLEATIEAAAQGSITEHLTWLEARIAELDKDIDDHIDRNKETLGKDAKLLTSIPGIGKTTAAKVLGLLGDLRRFSSGKALAAFIGVTPKRHESGTSVRGRSSIGRAGHPRIRHALFMPTLVAAKHNPTIKAFRDRLVAAGKPKKSAALASMHKLVHLMHAIVCKGVGFDSRFGQLALDGQDGI

SEQ ID NO: 128859 - protein, 405 aa, unidentified
MEVVYERCCGLDIHKKSITACVIVGKKKEIRTFGTMTDDLLEMTAFLKESEVQMTAMESTGSYWKPIFNIMEVEEIPAILVNAAHIKNVPGRKTDVKDAEWIADCLKHGLLRASFVKPRDQRELCELIRYRGSMIEERAREYNRMGKVLEGANIKLTSVASSIDTVSGMSMVKALCEGIDDPAILASMAKGSMRSKEAELKRALNGLVQPHQRMILKSMLAHIENLSTLIATLDAEIEERMKQDVELVEALDGITGVGKVSAQTIIAEIGTDMSRFPSAEHLASWACMCPGNNESAGKKKSGKTKKANSTLKKTLVQCGRAAANSKNTYLNAHYKRIASRRGAKRATVAVGHSILTICYHMIKNRTQYNDLGADFFQKRSRESLINQNVKRLEALGFMVSLEEVA

SEQ ID NO: 128860 - protein, 427 aa, unidentified
MTNSQDLKFNAIENTDAIVGVDIAKNVHWAGIILPNGKEIKKSFSFNNNKKGFKSLVETVKNVLIMYNFKNVIIGMEPTGHYWKSFARYLKKIDWIHVVTVNPKKVKDSKELDDNCQTKSDKKDCITIARLIKDARYFEPYLPEGVWAELRNLSNTRAELVRKQNAVKCRIVATMDEYFPEYGKVFKQMLGRTSEEILKRCPFPEDIKSIGKEELLKYIKETVKRGYSKKQVNTIYELAIESIGTTEGLTGARVQLQMYVEEAELLKKQIERTEIYLEEQLKETGYYESIISIQGIGIISAAMLIGEIGEINRFDSYEQIRRYAGLNLIENSSGKHQGKTTISKRGRSLLRSILYRMAFTMVGKNEEIKQLYKYLTTRKERQLKKKQAMIAVTGKILQIIYAVVTKNEEYNATRVFTQERVEQLKVA

SEQ ID NO: 128861 - protein, 368 aa, unidentified
MNTVKFIGMDVHKKTITIAIIEQGRKKQPRFYGSIANQAEALDKFCRKMLSTAARLHFVYEAGPCGYGIYRHLTQKGFDCMVAAPSMVPKKSGDRIKNDRRDATMLARLHRAGELTAVYVPDARNEAMRDLTRAREDAVAAARRSKQRLNAFLLRNGLTFAGRTKWSKAYFGWLSDIAMPYPAQQVALQEYIDTVHESLQRVNRLTDQIRQLVADWRLAPVVSALQAARGVSLITAVTVLAELGDLSRFDNPSQLMAYLGLVPSEHSSGESIKKGSITKTGNGHARKALVEAAWAYRMQARLSRALLKRQQAVPERVCQIAWKAQLRLCARYRKLTARGKSKQKVVTAIARELSAFLWAMAKQMQPMV

SEQ ID NO: 128862 - protein, 433 aa, unidentified
MPTTHPYDLVIGLDRSDRKADLHLIDTRTGTVQKQTVATSPEALHDWLVQLRRDHPQARVAICLEQPAANLIVFLETYSWITLYPINPISLQKFREAFVTSRAKDDGKDAQYLAELLLSHPDKLKAWQPDDSQTRQLQQLVLHRRAVVDQRTGLTNRLKALLKQYFPQALDLCGEDLWRPLARAFLLKWPTLQSLKKARKESLKQFYYLQGSRSQTLIEQRLERIDKAVPLTDELALLQSYTLRVQLLCKELQLLLKTLQQFDQQIAKVFQQHTDRRIFEAFPGAGPVLAPRLLASMGSERERFAQPENLQSFSGVAPLTKQSGGTCSIHRRYLCPKFLKQSFHEYAKESILHSRWAAAYYGQQRNKGCGHHTAVRALAYKWQRIIWKCWQTRTIYKEAIYEAALKKNKSPLIGLLDQIELGKSPVKSRAKKS

SEQ ID NO: 128863 - protein, 345 aa, unidentified
MPIVGGLDIHRKQITFDYLDTDTGEVKRGQIAPADRVHLRAWLARFAGRDGVAFALEGCTGWRYVAEELAAAGITPHVGEPADTAAARGRKRHAKTDKTDSRHLRQLLADGRLPECWIPPAQILECRALLETYNALRREHTAWVQRIHAVFFHQGAPQLGEGALRAGQDLAALRAAAAVHLSPAGQLQAGTALDMLTAVEARLQLLRHRLLDAARQLTGARALTARLYGVGPVTALALTCWLGGAGRFSSARKAVRFAGLDVTVYSSDGKRSPGHLSRQGPAVLRWAVYEAGKAHARGSAPDHRYYAAVKDRKDGKRAALSEARKIIRQAVHILAELGDDALTAA

SEQ ID NO: 128864 - protein, 384 aa, unidentified
MRENILYVGMDTDKNHIDVAVAEPLPGGEIRYWGKIANAPAALDRVIKRLGKDGRRLKVCYEAGPCGYGIYRRLNGKPDVSCQVVAPSLTPRRPGVRVKTNRRDCLTLAKLLRAEELTAIWVPDAVHEAMRDLIRARGAAAQDLARCRQRIGSFLLRQEIRYVGKPWTKKHRAWLGRLEFAAPAHRLLFGELLEALDQAVARRDRLNDHIAELVPSWSLAWLVEALQALRGYQLVNAVSLVAEIGDPRRFTNPRQLMGHIGIVPSEHSTGDKVRRGPLTKTGNRRARKVLIEAAWTYARAAKRPAARALGQPPAVRAIAEKARHRLSGRYRRLTARGKLATVAIAAVARESLGFIWAIAQAAGPTNSIDPGRPAVGAGRGSSSR

SEQ ID NO: 128865 - protein, 341 aa, unidentified
MKHLYLGIDWGKNFSQLFGFDQNGEVVIEERLKTLDLSVWRKKLRSLKGYSIHAAFEIGAHYDWLHDLLTEYCCEVAVIDPAQFAVICKSQRKTDKIDAQKIAEGLRRGDLPLVHVPDKQTRADRRLVAFTHWHSQQASSVKGKIRSLLLAQRLECPYSNIMGMAALEWLNEQAPQMDDDAQLFLRLLLAQVELLRQQRQELDARVAIRAKRYKQVAVLDSIPGFGWLTILAVLSSIAGVARFSRPEQLSSYWGVCSSVYQSGATLRLGSLTRRGNVHVRWLLSQALQHLHRKDARARKRYLKLKRKKPRGVARAAQVRWLTQIIWHLLKKDEPYRIKVAA

SEQ ID NO: 128866 - protein, 344 aa, unidentified
MKIIGCDLHTRYQQIAMLDQETGELIERRLEHANGEARAFYAALAAPVRIGVEATGYTRWFERMLAELGHELWIGDAAQIRASMVRKQKTDVRDAAHLLELLLSERFPRIWRPTLEERDLRQLVWHRQKLVWMRNAVGNQLHALAMGEGVCRKKKLFTKKGRVELEGLQLGRWASHRRQELLRMLDQLQASLQELDHAVAEQAGQNPAAVLLMTHPGVGPVTSLALVLTLGPVERFARSKQVVSYLGLNPREHSSGGRQRLGSISKQGSPLMRSLLVEAGHTAARLDRELRQDYQRLKLRRGSGVAKVATARKLAVRMYWMLRSQANYAQLVRMQDSPWATLVE

SEQ ID NO: 128867 - protein, 338 aa, unidentified
MRTYAGIDLHSSNCYLAVIDEEHRRLFSKRLPNSLDHILSALQPFKEELSGVAVESTYNWYWLVDGLQEKGYRMHLANPSAIRQYEGLKHTDDQWDAFWLAQLLQLGILPQGYIYPKAERPTRDLLRRRLLFVRHRTAHILSLQSMLDRCGGRRLSANKLQQLSPSDAEALFSDTQLGFTARCQVEAIGFLTQQIRSIEKAILPKVKLRPEFVILLTIPGIGKILALTIMLEVGDIGRFAKAGNYASYCRCVKSQKISNAKKKGEGNRKNGNRYLSWAYVEAANFAVRYSPRAKAFHQRKCAKTKKVVAIKALANKLARASFYILRDQCAFDEKRLYG

SEQ ID NO: 128868 - protein, 442 aa, unidentified
MSNEVAVPAAASEPEWAAFVAIDWADQKHYWKLVAAGSQKPEQGQLDNTPEAVAEWAADLIVRFGGRPVAVCLEQARGALVYMLLQFPHLVLFPVNPKMSARFREAFHPSGSKSDPSDTAVLLTLLLCHRDQLRRLKPDTAETRLLQGLVEQRRRMVHEKTRHSNRLTACLKLYFPQIGKWFEDVTLPLVAALLERWPNLAELQRAHDGTLRKFFHQQNCRSEELIQKRIDAIRQAVPATTDRAVLGAEAMSARGFIAVIATLRANITELDEQIAKAFAAHAEVALWNCLPGAGAALAPRLLVAFGTDRERYATANEVQCYSGIAPVTVASGRSQSIHFRWGCPKFLRQTFHEFASHSIVKSQWARAYYDLQIDRGKSHHAAVRALAFKWIRILFRCWKNRTPYDEQVYLQSLKKRNSPLHALLPSGWKDVAGFQKLSENPS

SEQ ID NO: 128869 - protein, 388 aa, unidentified
MIYVGIDVAKLNHFASLISSDGEILVGPFQFSNDGDGFLYLVSAFEPFDDEEIIIGLESTAHYADNLIRYLVAEGYNVCVLNPLSTSSMRKNNIRKTKTDKIDTYIIAQTLMMQKSYRFVTFEDLDLMNLKELGRFRQKTIKQRTRLKIQLTSYLDQTFPELQYFFKSGLHQKSVYALLKEAPTAKSIASMHLTHLATLLAKTSHGHFKKEQATELRVLARKSVGQSDQALSIQVTSVIAQIELLDEQVARVEAEMTEIMRFNDSVIMTIPGIGYLNGGMILGEIGDIHRFSTPKKLLAFAGLDPSVYQSGNFNARRTRMSKRGSRVLRYALMNAAHNVVKNNATFKAYYDKKMAEGRTHYNALGHCAGKLVRVIWKMLTDEVEFNLD

SEQ ID NO: 128870 - protein, 361 aa, unidentified
MTTMTYPPSDARRVIGGVDTHKDIHVGAVLDENGRLLDTGSFPTTVAGYRHLWRWMCGHGDVVAVGIEGTGAWGAGLSRYLTAQGADVREVMRPNRQHRRRYGKSDEADAIGAARAVLAGEAVGTPKSQTGTVEAIRLLRIARRSAMKARTQAGNQIHAVIDTAPEGLRRRFVGRPIVDIVAEVAQFRRRHLPDTPFEAARLTLRTLGRRWQDLDDEITMLDDHLDATAPTLRAINGVGAQVATALLAAAGDNPERLRSSSSFAALCGVSPIDASYGRQQHHRLNRYGDRHANWALHVVIISRLRWHAPTKAYMARRLAQGRTKKMIIRCLKRHVIREIHRAITTDLDHRPEHDRASRIAA

SEQ ID NO: 128871 - protein, 419 aa, unidentified
MNTLNTTSFTAFIGIDWADAKHDICIQSAGSDEREFDVIPHQVERIDEWSQAMRQRFGSPIAVAVELSKGPIVYALQKHDCFVIFPVNPSTLAKYREAFQPSRAKDDPTDAELAVDLILRHPERFEPLQPQSDEIRMLATLVEQRRNLVDDKIRITNRLRVALKQYYPQMLEWFDHIDTPLFCDFLTRWPTLLQVKRARKSTLRKFFHEHNMRFEHVVERRLNAIKTAAPLTLDEAVVVPHRLQALIYTEQLRVMLNAIKQFDVEIESVAKQHEDYALFTVLPGAGPSLAPRLLVAFGEQRERYKTAADIQKYSGVAPVTERSGKKHWVHWRWQCPTFLRQTFVEWAAQTINKSYWAGEFYRQQRAKGSTYQAAVRALAFKWIRILFRCWQTRTQYDEVVYLKALERRGSPLLTVAKVA

SEQ ID NO: 128872 - protein, 381 aa, unidentified
MAMTRIPESNRPSDCLLLAFELGQRAWKLGFAVGMGQRPRLCQIPAGAVSALENQIARAKRRFGLPAEAPVVSCYEAGRDGFWLHRYLLAHGITNHVADSSSIEVNRRARRAKSDRLDLGGLLSLLARYVQGDRRVWRVVRVPTVDEEDARQLPRTLETVTADRTRLINRLKGLLVTQGVSMRIGKDFLEQLETVRLWDGTPMPAGLRERLARDWAQLQNVETQLREAKAGLTLRQPDAVTPTGRALAQLQTLRAIGPIGSWTLATEIFGWRQIRNGRQLGALVGLVPSPYQSGETHYEQGITRAGNKHVRRIMVQLAWRWLYYQPDSALSKWYQHRFAGNGTRMRRIGIVALARKLLVALWRYLETGVVPEGAHLKAAEV

SEQ ID NO: 128873 - protein, 352 aa, unidentified
MKYALEQESILGVDTHLDVHVAAVINQSGQLLGTQSVSTNTAGYFQLFQWASAFGALKRAGVEGTGTYGAGLCRFLCDKGIMVLEVNRPDRANRRLNGKSDSLDAENAARSVLSGVSKAIPKQQSGACEAMRIVSVARRSAVKAKTQSINQLRAMLVSAPQSVREELWKAKASDCAKACTMIASLGDTVVLKALSTTLKSLAKRWLALSEELKDYDRQLETLTQEHAQQLRSRFGVGPQTAAILLTVAGDNPNRLKSEAALASLCGVNPLPASSGKTTRHRLNRGGSRTANNALWTIAMVRMRSDPRTKIYVERRTNEGLSTKEIHRCLKRYIVRELFPLIMGDLGALAGAP

SEQ ID NO: 128874 - protein, 333 aa, unidentified
MKKKWFIGIDISKKTLDVVIYDSSKKQSDSENYKQVTNDKDGYTTLLSWFKKKKIVVNQVAIGFEHTGIYSFNLRFFLEARQIDYCAYCPLHLKRSLGLVRGKNDKVDAERIAYFTYLHRDELTYSKLSGSIILQLQELSAERKGFVAQQARYKAVLTDNKDKPQTNTLRRAKKMEEVLEEEIKSVEEEMNTLIEKDPSIAKNYKLLTSIKGIGDINAISTIIHTNNFEAFETARQYACYLGIAPFPLSSGTSVRGKTQVSHMRAKLLKADLSQAAKSAIVWDKELKEYYERKTKEGKAFGVVLNAVKFKLVCRMFAVIKRGTPFVDLEKYKS

SEQ ID NO: 128875 - protein, 318 aa, unidentified
MTTPTLGIDISKLTFDAGLLTQKKFYHRSFKNDRRGFTALLKWLSKHPCGAIHVCLESTGVYGEKLSEFLYDHEFSVSVVNPARVRGFAQSELTRTKTDKQDAGLIARFCAAMKPDLWSPQAKEVRELRDLVRRLETLNQMRQQERNRLEAATDIILDALNQHIEFITEQINSTKDKIDEHINNHPDLKHKKALLKTIPGIGDATIGVILSELGHIEQFRSAKAVAAYMGVAPKIQQSGTALRERGVMSKMGRKQLRKAFFMPALVALRYNPVIMELKERLTKAGKPKMLIVGAAMRKLVHIIYGVLKNNEPFRADFA

SEQ ID NO: 128876 - protein, 347 aa, unidentified
MVTLGVDAHKRTHTVVAIDANGRQLASKTVPTTTKDHLGLLRWAEQLADGDGLLWAIEDCRHLSRRLERDLLDAGQSIVRVPPKLMAHVRDSARTYGKSDPIDALAVARAAQREPDLPVARLDGPDRDVRLLGDHRESLVRERTRVICRLRWHLHELDPSWEPKARSLDCISTLDQVAARVHGLNGTVARLARGLIERCCELTREISALTAEITVLVSGIAPTLIAVPGCGAITAAKILGETAGIDRFRSKDAYARHTGTAPMPVWSSNKARHRLSRTGNRQLNAALHRMALTQAHWHPPAKQMMERRKSGGDSGREALRVLKRRLSDVVYAALRADLAITTKALPA

SEQ ID NO: 128877 - protein, 389 aa, unidentified
MFYLGIDVGKYTHVASLMNEKAKIIFKAFSFSNSSDGAESLLQKIQPYISNLEVGMEATGHYWLSIYSFLSQNNLTIHVINPIQTDGWRKGLEIRKRKTDIIDSVLIADFIRYGNFVETSLADENTMSLRNLSRFRNYLKSSISDLKRKSVCILDQIFPEYSSIFSDIFGKTSKELLVQLNSPSDFEDITSAQLENLLSQITLKNFATKKINHISKIAKNSFGIKFCIESFSFQMKLLIEQISFIEKQVTDVENEISKLLDKINSPITTIPGIGNIIGAIILGEIGDINRFSNASKLVAYAGLDASISQSGEYESTRNHMSKRGSPYLRRAIFQAAFVASNNDPVFSAYYQKKRLEGKHHNVAIGAVSRKLCHTIYAILKNNLSYEVHQ

SEQ ID NO: 128878 - protein, 379 aa, unidentified
MNKRIIFIGLDVHKETISVAIAEHQKEPRSLGKITNKPEAIYKVMRKLGPFKRLKVCYEAGPCGYVIYRQLSKLGIECVVVAPSMIPKKPGVRVKTDRKDATMLARLLRSNDLAPIWVPDERHEALRDLSRAVEAAQGDLVRAQHRVRKLLLRQGIRKPEGMSSWTYRHQRWLHSVKLPRANQQVVLREMMLTMEQAQERRQRLEAELEHSVGFSPLADLIRAWQCLRGIKVISATRLAAELGDIRRFTNPSQLMGYVGLVPSERSSGSRERRGSVTKTGNAHVRHVMVQAAWHSRHPPSLSGELRRRQRGQPERVKAIAWKAQDRLHRRFRRLVGRGKPRQKAVVAVAREMLGFVWAIAQEIPVQEYEQQPDSFSQAA

SEQ ID NO: 128879 - protein, 440 aa, unidentified
MLSLPVVNQDAAGIDVSATMHVVAIPPGRDIDSVREFGAFTEDLYALADWLKRCGITTVAMESTGVYWKGLFTVLIEYGFKVSLVNARHVKNVTGRKTDMDDARWIQKLHSCGLLTSSFLPDNITESLRTLVRHRKSLIQDSSKYVLRIQKALELMNIKIHSVIADIMGKTGTAIIEAILAGERNAENFIPFINNKIKAGHDTIKKSLMGNWRDEHLFLVQENYDMYKYVQQRITCCEKKIEQYLQQQAAINNEGIMESVQPGDKVLCKRKTKNHPSFNVKDQLIKIHGVDVTGIFGISEGTALEILSETGTDLSKWENEDKFVSWLNLCPNNKISGGRLISSMVMKKKAGNATQAFRAAANSVQRSDNWLGDYFRRMKAKGGNKYAIIAVARKIAIIYYKMVRFKQPFKPVDADEYRKKYKAAKINYLEKQLAKLKAVA

SEQ ID NO: 128880 - protein, 336 aa, unidentified
MTHYCGIDLHSNNHVVVVIDEEDKRVFDKRINNDLSLTLKALSPYQESLQGIAVESTFNWYWLVDGLQEHGYDLRLVNTAAVKQYDGLKFSGDHYEAFHLAHLMRLGILPTGYIYPKEQRAIRDLLRRRLALVRTASTQLISVQSQIWRSTGTRFSSAELRKPDFVPPQVDNYTLQAIHAGLAVYQTLQREIDALEISAHQAVKLTDAFKILQTVTGIGKILGLTIMLETGTIERFAGPGNFASYCRCVDSTRTSNGKKKGEGNAKAGNKYLSWAFSEAAHFAVRFEPLAQRFYERKKARTNGIIAIRAVARKLARATWMMLKHQIPYDAQRMFPG

SEQ ID NO: 128881 - protein, 337 aa, unidentified
MDNCIGIDVSKASINVHISKNAQDLKVDNSIKGFKSLRSKLKKIYKKEIDDNVFIFKPTGSYSEALRKYCSQQNIKCFIINPKQFSNYAKALGVEVKNDVEDARVLSRALHLAKDGQVKVPVYDEDVERIKELMSYYKFTSRQTTQQKNHLESLVSKDGDSFAIRELRKSIKESKTKEQRITDQIQMIIDSNDKYKNDYENIISIMGIGQIGAIALLHLFLKYPEANQRQITSLTGLNPVYKQSGTSIQSGYRISKSGAKTYRGSLFMAAMCAIRYDANFKAFYERLKANGKQTTQAQIAVMRKLIITAHSLYKNDRKYDVNYNSQGDKIMVYSLVE

SEQ ID NO: 128882 - protein, 347 aa, unidentified
MRFYNRPHTYYCGIDLHVKTMYVCILDGAGQVLVHRNMPSTPAAFLAVVAPYRDGVVVAVECMFTWYWLADVCAAEGIAFVLGHALAMKAIHGGKAKNDRIDSHKIAILLRGGMLPQAYVYPAAMRSTRDLIRRRLHLVRKRGQLLAHIQNTRAQYNLPVFGRKLAYHANREGVVEHFPDPSVQKSIAVDLALIDQYDALVTDLELTIVREAKRHNADAFHRLRSVPGIGKVLALTILYEIHDIARFDRVQEFASYARLIKCAKESGGKKLGTGGAKMGNVHLKWAFSEAAVTFLRHNPEGQKLVARLEKQHGKGKALSILAHKIGRAVYYMLVRGTMFSMDKFLAA

SEQ ID NO: 128883 - protein, 343 aa, unidentified
MKLSRVGVDLAKNVYQLHGVDCHGRTVWKRRLRRGQWLQALLDKAEPGCEIGMEACTGAHHWARELRSRGYTVRLIAPQFVKPYVKSNKNDANDAEAICEAMSRPHMRFVTVKSVEQQDIQATHRVRTELKDHRNAKANQIRGLVAEYGLIAPQTLLALRRAIPCWLEDADNGLTDHFRSLLHGLWGDLLTLEDRMTELDKAIRQIADSNEVTKRLQQLRGVGPLVATALVATVGTGEQFSKGRQMAAALGLTPRQYSSGDKHRLLGISKRGDAYLRTLLIHGARAVVSQAKHRDDPLSRWAIGIAKRRHPNVAAVALANKTARMAWAMLQNDTNYDPGLAAG

SEQ ID NO: 128884 - protein, 417 aa, unidentified
MKLIVGLDVSSTELDACFLTDNDKFPVLKEGSFENDQISATQIKEFILYYVEELNIDQIIIGMEATSLYSFHPAMFFHEDTELSALNTSVFVEQPNKIKKYREVFEESKDDRIDAFYIADYFRINRNGVSILKEEQYIALQHLTRTRLQLVEGLVRTKQHFTENIYYKCNTLSKELKSDDKNTSIFSATVMELMTADYTLDDLKSLSLEEFASLVNQLGRGRFKDPEKVAKSISKAIRGSYRLSKTHEESVDQVLSVLVRQIRSFEKSIKEIDKAIEDIVETLPEYQCLTSVPGIGKVYAGGIIAEIGQIERFENQAQIAKFAGLFWPHKQSGKMKSENTSLAKRGNRYLRYYLVEAANSVRRYEPDYRAYYQKKYDETPKHKHKRAIVLTARKFVRLVDVLLRNHQLYTPPKERIK

SEQ ID NO: 128885 - protein, 454 aa, unidentified
MAQSSPSSSMPVIHPNAAGIDIGSQFHVVAVPPERTDKPVRTFKSFTGELHAMAKWLKKCRVDTIAMESTGIYWIPAFEILESYGFKVFLVNARAAKTVPGRKTDVNDAQWLQKLHQFGLLQASFQPSQKIAGLRAYLRQREKLLEYKSAHIQHMQKAMMQMNIQLQHVVTDVTGKTGLAIIRAIVQGQNDPNELVKLRDPHCKNSLEVMTAALTGSYKPEHLFALTQALELIDIYMEKIEACDRVIESALKQLEQENDSTPPTLPKAKGKDSSKNTPSFDVRQALFSFIGIDLTQIHGIGSSVALKLIAECGTDMTKWPTSKHFTSWLCLAPANKISGGKILSSRTRRSSSKVATMLRLASVVVGKTNTALGAAYRRYAARIGKAKAVTAIARKLAVLFYNALRYGMEYVDKGANYYEEQYQKKIINNLQRKADALGFTLQKKALSIAAGGVS

SEQ ID NO: 128886 - protein, 342 aa, unidentified
MKDMMIGVDLAKAVFQVHGAHRTGEVQFRKKLTRKQFPAFMAQQEPCLVIFEACGSAHYWAREMEALGHEVKLIAPQYVRPFVKRQKNDAADAEAIVIAARQPEMRFVARKTVEQQCRAAVFRGRERLVHQRTADVNALRALLYEHGHVFPAGILHLDRMTALMEDEASDLPALIREECRDLLAQIAEKTARIIGRTTKLKMLAAQSDRARRLQTMPGVGPLTAIAVEAFGPDMAEFKTGRAFAAWLGLVPRQHSSGGKERLGRMTKAGQADIRRLLIIGAMSRLNWLGQRTITEGSWLARMLARKPKMLVAIALANKMARQVWAMLMKNEDYKDPALAVAA

SEQ ID NO: 128887 - protein, 380 aa, unidentified
MDVTPAAAPLSDAAPAATLFAALELSRSTWVVALHSPAADKVSQHRLEGGDAEGLMDLLARRRGQAEERTGRPVRIACCFEAGYDGFWLHRWLRARGIENRVLDAASVLVDRRARRAKTDRLDAAGLLRTLMALERGEAQVCRVVRVPTPEQEDARRRSRERSRLVVERGQHTSRIKGLLMTQGIRDFEPTRRDWQERFEALRAPDGRALAPCLRAELLRECRRLRQVMEMVAEVEAEQKAAAEAEDGTSAHLARLRGIGPAFAAVLGDEVFFRDFRNRREVGGYLGLAPSPWQSGGVRRDQGIAKSGNPRARRTAIELAWLWLRHQPGSAVVRWFHARVGEARGRMRRIMLVAMARKLVVALWRYVSEGIVPEGAALKS

SEQ ID NO: 128888 - protein, 335 aa, unidentified
MPVSCSYYKAEPNQRLILIMNQSIVYLGADVSKATIDCRLLDQSFTISNDAAGFAQFAQRLASFSKRLPHTTFHVVCEATGIYHRAFVAALHAQMRPVSVINPRQVRDFARSRGLLAKTDDLDSKVLADFGEANKPKADAPTPILFQRLAALLGQRDHLVALQAEEKTRLHQITEPWLRRQIERTLGFYAREILKLEAQLLALRDSDSELRRKAQRLDEAAGVDWRGALALLGYLPEIGTLNRRAIAKLAGLAPLNRDSGQYRGQRHIAGGRAPVRRQLYLSSLTAIRKNPTFKAFYKKLRAAAKPAKVALVAVARKLLVLLNSALKSPHISLAH

SEQ ID NO: 128889 - protein, 332 aa, unidentified
MSVYVGIDVHRKRSQVAVIDAKGEVLANRNVPNGVEPILKVIGGLPPGTPAALEAAFGTGWLVELLEDYGFDPHLVHPLRCKAIASARLKNDKVDAAILGQLLRADLLPEAWIAPPPVRQLRALLRHNRIHAVLADHGHDRPAGCWSGPGRAWMASLQLPAVSREVVDDDLALIDALETVIDRLDWEIHQRARSDPRVKVLTQLPGVGPFTALVILAEVGDVSRFGSARKLASWAGLTPTVRGSDRVAHYGHISKQGSVWLRWVLCEAAQTAKRSPQFAAGYQAIATRRGKKIATTAVARKLLTRAWHLLTDAEHAAATQPAAASAPQAGTR

SEQ ID NO: 128890 - protein, 315 aa, unidentified
MEANKEVYVGIDVSKVHLDVSLGEEGEDRSFGNDEAGIWKLVEWVKEKKPTLIVIEPTGGLEKMVLAELYAQHLPVALVEPGRVRHFAKSDGQLAKTDRLDARILAKYAGALKPPVVHLPSEEEQYLSALMTRRRQVIDMLTMEKNHLLSTLGKVRPLVERNITSLQQQLDELNQTIHEYVDHNDAFRQKDEILRSTPGVGATTSAILLSDLPEIGHLDRKKIAALVGVAPFNNDSGRYSGKRRVKGGRESVRHVLFMATLAATRFNPVIQRFYQHLLKLGKPHKVALVACMRKLLTILNVLIRNLTAWRSPLTT

SEQ ID NO: 128891 - protein, 313 aa, unidentified
MAQIVPGVGIDVSKARLDVAVYPDGIGFSVDNDEAGWRELCRRLHAIGARAIGIEASGGYEYGVIGALLDAALPVRSVNAWKLRQFAKALGLLAKNDRLDAQAIARFVATLPTRPVERDPQRAQLAELVTARRQAVDLRQVLSNQLEHLRDGELRRMNTRRIRQLDADIARLDRRLVEAIAAAPALAGQYRLLCSIPGVGPVLAATLLAFLPELGRISNRAIGALVGVVPYDFDSGKMKGLRCIWGGRAAVRRVLFMAAQVAAMHNPILRAFKDRLRAAGKMPKVAIVAVMRKLLVILNAVLRDGREWQPAAA

SEQ ID NO: 128892 - protein, 429 aa, unidentified
MDEVDDADLVVERVAALDLGKAGLEACVRVPHPQRPGRRMQELRGYATTTAQLLAMAAWLRHWHVQRVVMESTSTYWKGVYYLLEAEGFDCWLVNAREVKNVPGRAKTDRADAVWLAKVAERGMCRPSLVQPPEIRRLRDLTRYRRALVQDRTREQQRMEKLLEDAQIKISAVLSNLHGVTGRAIMDALIAGERDPRTLAGLAKGLARKKTDRLEEALRGFFTDHHATILQMMLDNSDRISAQIAALDARIEAAIGPFSRAAARLADIPGVSTVAAAELIAEIGVDMTRFPSAAHLVSWAKFCPQIHQSAGKSMSKGRAKGNPWLAGTLGRIAFVNSRTDTFLGARYRRLARRRGKQKALVATGNSVLTVIYHLLSDPDARFCDLGPGYYESRINKHRRARDLATQLQALTGQHIAIRDGKAVITDTAA

SEQ ID NO: 128893 - protein, 336 aa, unidentified
MPMFQLGIDVSKNTLDLCLLREGIKGRIKTRKLKNTADAAKVVAEWLKKQSCELGEVHIIMEATGVYHEPLAYGLHFAGARISLANPHRTREFARGMNILTKNDKVDAWMLACYGSLKEPEAWTPPPESVRYLRALLRRRDALVADSTREKNRLEKSVFTDSPDAVRASIENMLQELSNEIEHLDVLIQEHIKTHPELNQDFRLLTSIKSVGYLLGLNMLAILKSHSFESAEQAAAFLGVVPVERRSGTSVKGKPKLSKIGPPEIRTKLYLAALCGLRFNPVMKQMYTKLCQRGKSKMCAIGALMRKLVHWCYGVLKTQLPFDAEHNQQSHYKTTS

SEQ ID NO: 128894 - protein, 326 aa, unidentified
MKKSFFVGADVSKEKIDFCFLSSSDNTKPKFVSLPNEINTLKAYFQSFIKDDIYVVFEFTNNYHVPLQFALSDLKLKHSVLNPAKISHFLRHLIFQKSDVTDAYGLALYCKIFKAELNPSVYNHEYNLIKSYNSTILLLSKIQTQLKNFKKSQDFVTDTELSEIIKSLTLQVQKTQEKLKLIAYEILKSFVPNCEQIINDNKGFGIDLALNLFPQLHFNRAKSEKQFISFLGLSPRIYESGSSVHKSKRINKRGSSAIRRVLYLSALVSSRFNAKFKERYENLVSKGKSKKVAIVAVMCAIVRYLKSLFPLNESYINESLYHARTS

SEQ ID NO: 128895 - protein, 391 aa, unidentified
MGVVGCSRKDYTRHMKKRTSKGSVTSKVDRNVKHATLIKLGVDAHADDYWVVRQIENGPLQPPQRMSFEKFLRWAEKQRTLADRVVACYEAGTFGFYPARELIQRGVECLVMVPIKLDEGNTRVSNDRLDARRIAVRLDRYLSGNTEALNVVRIPTVEEEEQRDLGRQRQTVMGDIKRYADRGRAYLRKWGYRVKGAWWEESVWERLQKNLSEVRVAYLNPFVAILKALNQELKSVQAALMVQAEKHVKSQGRVLPVGMGLLSHELVRLEVCDWNRFHNRGQVGSMTGLCASESSSGPRRQQGSATKHGNPLMRYVLVEMAWRMTRFQPQCHAVAGWHEELATPKLSSPRRKKIIVAIARQLAVDLWRVATGQTTFEKLNFVMPGTPSAAA

SEQ ID NO: 128896 - protein, 395 aa, unidentified
MLAGIDTHKDTLAVAVIDPGGRPLVVTNLANTEAGFDELEALLAEHHVDRIGIEGSGNYGRGAAVRLVLAGGIDVVEVPPSLTSRERSSRPGQGKTDPVDALSIARITARETSLPPVRLAVGQAADLRALVDYRGQLVHERTGLANRTHAELHGLLPGYQATVPRLTAPAFINSAQQLLLDDTRVRAQLTRRRLDRLAELTTEIKELTAVITAAMDTVDTGLTDLYGVGPVGAATILGEVADIRRYRSRHAFAAANGTAPIPASSGRTSRHRLNRAGNRTLNRVLYTMAITQIRADTEGRAYYQRKRAEGKTSREALRCLKRRLSDLIYKTMHADLAGAQRAATGASETVNAATAPDTTNGQGQLRDRASSPNPALRSSQKTAPTAGRNATPDRR

SEQ ID NO: 128897 - protein, 402 aa, unidentified
MAGRTAGIDWASEAHEVCISEGGRVAERFSVAHEERGLRELARRLRARGVERVAIERPDGILVERLLAAGLEVLAIHPNQVKAARPRFAVAHGKSARFDAYVLAELARTDSHRFRSLVPDGDETKALRALTRAREDLVGARVELANQLRAQLAAFWPGALIFSDVDSPISLAFLRRYLSPADARGLGPKRLAGFLARQRYCGRRSPEELLERMRSAPSGRAGEFEGEARRAVVLGLVHALEPIVAEIRELTFQIRGALAAHPDAAIFGPLFREAKTAICPATLIAELGAARGRYPTEAGLAADAGMSPVALESGKLRVATFRRACDKRLRLAVATLADSTRHWHPWAREIYRRARARGQDHPHAIRTLGRAWIRVLWRCWQDRVPYDPARHGNFSRLQPVRG

SEQ ID NO: 128898 - protein, 408 aa, unidentified
MQVVHTRCAGLDVHKKSVYACVICRTGDGKNREVRSFGTMTADLLRLADWLREHQVSHVAMEATGVYWRPIWAVLQGHFELLLVNPHHIKVIPGRKTDTKDCEWIADLLQHGLVRSSFVPPTDIQDLRDLTRYRAELKQAQCTVANRIQKLLEQANIKLSSVASNALGVSGRRMIEAIIAGEDNPEHLAALAKKRLKEKIPELRLALQGYVRDHHRFLLREFLDEWNALAERISRVEQEIDRRIAPYEHAVTLWQSIPGMDRVTACNLVAELGVNMAQFPSAQHLTAWAGLCPGNNESAGKRMSGTTRPGNKWLRRTLCQSAWAVTRKKDCYLSAQFRRLAARRGVKRAVMAVAHSMLIIAYTMLKTGNTYRDLGGNYLEQTNKEHLQNYFVKRLRRLGLNVTVAPAT

SEQ ID NO: 128899 - protein, 391 aa, unidentified
MDVLYQSCAGIDVHQANIVVCILHGPLTSTRPKREMATFDTTTKGLRACHDFLSQFHVEAVGMESTGVYWRPVWHALCDDFELILAQPAHMKAIPGQKTDKKDAHWIAKLTRIGLLPRSFVPDETIQELRELTRQRKHYVESRNRETNRIHKILQSGGIKLTTYIEDIMGLSGRNLLQLLVDGTPITPRIVHQSVYTSLKKKVPQLLEALDDYFSDHHRFMLKQSLEIYDFYQKQIELLEERMNVYLSQYEKHVEILDSIPGIDVITASVIISEVGVDMSQFPTFGHLASWAGLCPGNNESAGKKRSTKIRHGNSYLKKCLCQAAFAVKRQKGSPLAERYYQIQSRRGSQKATIALAHQLLKIAYILLKEQMTYPEFLAQKKKTTRDELVA

SEQ ID NO: 128900 - protein, 347 aa, unidentified
MTTLEATRGITGGVDTHRDVHVAAALDPLGGVLGSESFPTDVAGYQALLKWLEAFGQVTKIGVEGTGSYGSGLAGYLRRSGIEVIEVDRPDRQKRRRTGKSDPLDAVEAARAALSGRATGKPKSRDGAVEAIRVLVVAKRSARQARVKALLQMRHLGITAPDQLRCRLSGLSVEALIAEGIKLRPTRSGDPVMSATKASLSSLAHRICALDDELAELDERIEGLLVATVPSLLDLFGVGPDSAAALVVAAGDNPERLHSEAAWAHLCSASPIPKGSGKSSGRVKVHDGGDRQANSALWRIVVVRMAHDPETRLYVERRLKEGKNKHEVIRILKRYVAREVYRHLPRG

SEQ ID NO: 128901 - protein, 310 aa, unidentified
MVYVGIDVSKDRLDVHVHPSGEAYAVVRDGKGLADLVERIKTLGPERVAVEATGGFETVVAAALAGAGLPLVVVNPAQVRHFAQALGRRAKTDPLDAAMIARFVEATLPELRPLADEATQLLADLVARRRQIIEMIVAERNRERRVSVKRIAKSISRLIAALEKELSEIDSEIDTGVRGSPAWREKEDLLASVPGVGSVTARTLLAELPELGQLDNKKIAALAGLAPFTRQSGQWKGRSMIAGGRKGVRSALFMAALAACRFNPTLKAFRQRLIDAGKPKMVAAIAAARKLLTILNAIARTGKPWRLEPV

SEQ ID NO: 128902 - protein, 336 aa, unidentified
MTIIRIGLDTSKHVFQLHGVDENEKPVLRRQLQRRAVEKFFAKLPSARVGIEACGASHHWARVLCGFGHEVVLIPPQYIKPYVKRGKNDAIDAAAICEAMSRPTMRFVPVKTAEQQAALTMLGVRDLLVKQRTMLINALRGHAAEFGVTAAKGPQQMRELLQRLTTAEGVPALAREMLGMLAAQIEAVNGKLRAIEARLMAWHRHDQTSQCLATIPGIGPIGGVSFALKVADAKAFRSGRHFAAWIGITPREGSTAGKHRLGRISRAGDEDLRRLLVLGATAVIQQAQRGRASPWLLGLLARKPKKLAAVALANKMARIVWAMMVSGETYRRPAQA

SEQ ID NO: 128903 - protein, 357 aa, unidentified
MKVIWERVAGIDQHRDDVKVGVRSPSADGEREQIVRTYPTHTPDLLAMRDWLKALGVTHVAIESTGNYWKSTYYLLEEEFTVLLVNAAHVKHVPGKKTDTQDCLWLAELLECGLLKASLIPPPPIRVLRALTRRRKHLQQDRTREVQRLHDVLQDAGIKLSSVATNILGVSGRAMLKQLVEGRTDPEALAELARGRLRAKLPELRKALEGQFTPEHGQLVEGILAHIDFLEGALADLQQHIDSQVAPYAAAQQRLDTIPGWDVKTAQAFLGECGADMNRFPTAKHLGAWSGLAPAQHETAGKRRPQPTRHGNRYLRAALVEALGPPCTRTTTASRLNTIAWWGTGARRKPLWRWPTP

SEQ ID NO: 128904 - protein, 390 aa, unidentified
MLAGASLAQSRGLPSVVPCSAFPTGVKEAPVFCERTSVGLDVHARSVVAAAIDGRSGEVFRARLTPSHADVIEWVGKLPGPCAVVYEAGPTGFGLARALSAAGLRCQVAASSKLLRPAGDRVKTDARDALNLARLLRLDEVVPVRIPSAAEEAARDLVRTREAARADLMRARHRLSKLLLRHGIVYYDGKAWTERHDRWLHHQRFDAAPTQSAFEDVYEAVVLATARRARLDEKITALAADSEFSPLTRRLACLRGISTLTGFALAVEIGDWDRFTGASIGAYLGLVPSEYSSGTSRTQGAITKTGNTHVRRLLVEAAWHHRSTYRPGAVLRHRWDQAPAAARARAHAGNQRLHARWVGLNLRRKAAVIANVAVARELAGWCWSLAVLPD

SEQ ID NO: 128905 - protein, 341 aa, unidentified
MKTFIRFGVDLAKNFFQIHGIEQEGGAAVSRKLTRGKFREFFERISPCRVGMEACGSAHYWGRELTAMGHEVVLIAPAYTMPYVKRGKNDAADAAAICEAMSRPEMRFVPIKSADQQATLMLHKTRDLMVKQRTMNVNALRGHLAEFGLIAPKGIHRLEELLALARGEGALPDQARWAVDWLALLIEQLNAHIDRLEKDIVKAAAKNSTIRLLKEIPAVGPLIASAIAASYPDPRAFKSARDFSASLGLTPNQHSTGGKEKLGSITKMGNRYLRKMLVVGCTSVLRVAAKYKGALAEWIVAMKARKPERHAAVALANKIARICWAIMSTGEHFREELYTRA

SEQ ID NO: 128906 - protein, 350 aa, unidentified
METKVLIGVDPHKATNAVAVLDEHGELLERAEFSADWKGLRVLERWARRFPERRWAVEGANGLGRTLAHKLASAGEEVVDVPPKLSARVRVLSVGNGRKNDGLDATFAALAAWRNGRLARVRPDDRIDVLRLLSDRREDLVSERTRVLNRLHGLLRDLIPGGVPGRLSADRASRILRSVRPRRDSRSAAESVRRQLASELLRDVRALNRRIADLDARIRAEVEASGTTLIDIFGVGPILAAKIISLVGDTGRFPTKGHFASYAGVAPVEVSSGEVVRHRLSLGGNRRLNHALHMIAINQVRYEGKGGVYYRKKITEGKTHREAMRCLKRRVSDAVFKRLTADLEEVQTAV

SEQ ID NO: 128907 - protein, 455 aa, unidentified
MEKRAKQGGHLALVHPNAAGLDIGAREIWGCVPAERDGVSVRVFGTFTPDLHQLGTWLVACGIDTVAMESTGIYWIPVFEVLEGLGLKVYLVNARHIKNVPGRKSDVADCQWIQKLHALGLLNGSFRPDGEMCALRAYLRHRAQLMQHRSPHVLHMQKALQQMNIQLPQVLHDITGETGMAILRAIVVGERDAVHLARFRDPRCKSSQDTIAKALSGNWKDEHLFALKQSLELYDFYTQQLAACDAQIQQQFSVMKPRWKPSPDDLPIAPTPKRRRKHKNSPAVEAQATIIGLTGVDLAAVGGIGDALALTILSEIGTDMTKWPTAKHFASWLGLAPHNDISGGKVLRSRTLPTNNRAGQAFRQAATAVARSPSAFGAYYRRKRTQNGPKFAQVATAHKIARTVYYLLKHHVQYIDIGADGFEQKQRDRELAALRKKAARLGFTLTSPQSAEPPT

SEQ ID NO: 128908 - protein, 350 aa, unidentified
MKKFIIGIDFSKETVDASIVQKEQPETLMAYKKFRNNLKGVDGLIAWAKSKVAQDGGIIFCGENTGTYSTLFSDELTDRDFIIWIEHSMNIVRGMGDVRGKDDKTDSLRIASYAARFYDKMKPYVRPKDETRVLKTLLAKRDRLKSFLKAEITNTKENPLMLQDSNIASSINEFFKRLEESLRKELKELERMILDVVMSSSEYAKNFNILTSMKGIGLINAVALIVYTDNFTKFNFNHRKIATYWGVVPFKNESGTSVRRGTHVSPKCNSWLKALLTEATLCAIRYNSRIKAYHDRLMARGKAIGIVLNNCKNKMLKILVAMVRDSKIYSDMDVSKDPHTTTTTSSIVVC

SEQ ID NO: 128909 - protein, 347 aa, unidentified
MSHKTAATAAQTIGIDTGKNTLHLIGLDDKGAIVLREKIARGRIAARFANVPRCLIGIEAGMATHYVARELSALGHDVRQVPPAYAKPFRQGHKNDFRDAHAIAEAVQRPSTRCVPVKTDDQLDLQALHRVRSRLVGQRTAVINQIRGFLLEHGIAVRQGLRFLRQQLPDIMAKRSDVLSPRMIRIIGDLSADWRHLDERIEHVTEEIEVLAQGSEGCRQLMTVPGIGPLIASAMVAAIGNGAAFAKGRDFAAWLGLVPKQMSTGDRTILGRISKRGNRYLRTMIMQGARVILLRPANWAKHSFGPWLTAAAQRLHHNILATALANKLARIAWTVLTQARSYEARVN

SEQ ID NO: 128910 - protein, 373 aa, unidentified
MYYRTVFVGMDVHKENFSLCCYTNEKETAEYPMKVEGHYSKVISYIEAMRFHYGDDAMFICGYEAGCLGFTLYHQLTSHGVKCVILAPTTMLMQKGKKKVKTDKRDAALIARCLAHYDYSPVHIPTEQDEQTKEYLRMRDDHKLALKKVKQQILSFCLRHNFRFDGTSSHWTQAHLKWLRALELEELYAEILKEYLLTYDNLVDKLERLDRRIEELASGERYRENVQKLSCFIGVKTVTALSVLTEVGDFKRFASAQHFASYIGLTPGEDSSGESQNRLGITKAGNRHVRSLLVEAAQCYTRGQIGFKSKVLKARQYGNPPEVIAYADRSNERLRRKYYKMVLKNGKKTNVAKTAVARELACFMWGMITGNVA

SEQ ID NO: 128911 - protein, 339 aa, unidentified
MKITTVALDLAKNIFHVVCINAQGKEVKKRMLRRNQVCPFFVQLPPCVVGMEACASSHDWGRKLRALGHEVKLIQPQYVKPYLRGNKNDYNDARAIAEAVTRSGMPTVGIKTVEEQDMQALHRMRSQCVRDRTALSNSIRGLLGEYGIVFTKGVATLRRKIPEVLEDADNGLSLRFRHCLARRYEQLVELEGHIAFYTKELNRLSEQDEACQRLQTVPGFGPIVASAFRSVIGDGRAYARGRDAAASIGLVPRQYSSGGKNVLLGISKRGNKYLRKQLIHGARSVVLQAANKEDPLSCWINRIRKERGWNKAVVALANKMARIGWAVLRHQTSYQPATT

SEQ ID NO: 128912 - protein, 414 aa, unidentified
MSNPLIVGVDVHRKTNTFCLMDANGQEVRSRFTLDNNRPGTQAFVQQVAELMEADGFSELQVAAEATGWYWFHFFQSLQQDELLSAWPLDLHALNPRLTANFKKSYVDMDKSDPIDAFVIADRLRWGRDIGTSFEYDEAYLALRFLTRYRYHVVHNLAREKAYCTAILYLKASEYSRKDKKPFSNLFGAASRAVIQEFASTEEIAAMPFEELVEFIDLKGKRRFPDPTENARLLKQVAQDSYHLPQALQSPINLVLSLSLKQISALENQEKRLNSAIGERLLGIPNTLETIPGLGPVFVAGILAEIGNPQRFNFDQAKVAKFAGFKWRKTGSADFTADETRMTRTGNPYLRYYFCEAAYSVQRCDREYGQYFQRKLKEVRKHAHKRATVLTARKLVRLVMRLLATNQPYRPRRL

SEQ ID NO: 128913 - protein, 343 aa, unidentified
MKLSYVGVDLAKNVFQLHGVDRSGKAVWRRRLRRHQWLAALMKAADTSCVIGMEACTGAHHWARQLQAHGYTVKLIPPQFVKPYVKSNKNDAHDAAAICEAMSRPHMRFVAVKSVAQQDIQATHRIRTELREQRNAKSNQIRGLLAEYGLVAPQTLLALRAAIPDWLEDAENGLTDYFRSLLHSLWGDLLALDERIKELDQKIEQLANGNEVTRRLQRLRGVGPMTATALVATVGTGEQYRKGRQMAAALGLTPRQNSSGDKQRLLGISKRGDAYLRTLLIHGARAVVSQARHRDDRLSRWVTDIAQRRHPNVAAVALANKTARMAWAMLRDKTDYDPALAAR

SEQ ID NO: 128914 - protein, 358 aa, unidentified
MAYGALDLHKKERQIRIVLDNGDVLDRRIATTRDRFTALFWGRPPMRIVVEAATESEWVAQHLEALGHEVIVADPNFAPMYGHRSRRIKTDRRDAAALAEACQRGCYRAAHRRSARQRTVQIQLNVRRELTDSRTRAIAIVRAVLRGAGFRVRSGSAGTFLARVAELDLPPSIIDTLGPLQTMIKVLSEELAQADERFATIAADNPEVTRLMTVPGVGSITATAYVAALDDAARFGRAAQVASYLGLVPREYSSGEQQRRGRVLRSAHPHVQSLLVQAAWRLSRSKDARTAGLRAWAEGIARRRGRNIAMVALARRLARILFAMWRDGVAYDGARIRPTARHVAPPIAADATKPRVNY

SEQ ID NO: 128915 - protein, 331 aa, unidentified
MEKREYVGVDIGKKTLDVGYEYIDSKGRRKARKRKFTNTFEGFKKLEDFGKRNVGEGVIIHFIMEATGSYHEKVAAYLYAQGHRVSVVNPARVKAFGQSIGVRTKTDEKDPLVLVQFGKALNPDPWEPPPKEYRMLLIFYRAIEMRKKQRTVLINRIEALRSAKESPEVIIEEDIALLKRVEESIERIEKEIRLHLDMHPKVKEEVELLETIAGIGWITAVLLTAVMAGGSRFKSAREAASYAGLSVRECQSGNFCGRSRLSKQGPPEIRKALYWPAITATRYNPDVIDLYNRLIKRGKCKMSAIGAAMRKLVHIAFGVLKHSTKYTSQVG

SEQ ID NO: 128916 - protein, 338 aa, unidentified
MQIVRIGMDIAKNVFQVHGVDAHGKVVVRKQFSRSKVLAYFAQLPACRIGMEACGSAHYWGRELQKLGHDVGLIAVQLIKPYRTKQKNDRNDAEAICEAVSRPQMRFVPIKTVEQQAVLTVHRARELLVSERTAVANQIRGLLLEYGVAIAPGIQRLRRELPAVLGAEDETLPTLARTVVTELQVRLLELDERIAGHDRQIAQVARQNEAAKRLMKVEGVGPITATALVATVGDAKAFAHGRQFAAWLGLVPKQFSTGGKPVLGRITKRGNVYLRTLLIHGARAVLQFTAQRTDAKSLWVEELRQRRGDNIAAVALAAKHARIVWALLAGGHEYQVAA

SEQ ID NO: 128917 - protein, 355 aa, unidentified
MESVKYLGFDVHQSTISVAVVNADGKLVMQSVIATHAATILDFIHGLRGTLHLTFEEGTHSAWLYDLLARRVARVVVCNPRQNALLKAGNKSDTSDARKLAELLRAGLLAPVYHGEGSTRTLQELVRSYAALTEDTTRVMGRVKALYRSQAIACAGKKPYGRRHRPEWLSKLSQAGLHRRAERLYEELDALQGLRRAAKRELVMESRKHAAAKLLRTVPLLGAIRAAWLIGRVQTPHRFRSKRQFWAYCGLALETRSSADYRFEDGQLVRAKKPVFIRGLNRNHNHDLKNLFKSAATTASVIHGPFREFYEGLLAKGLQPAMARLTLARKIAAITLSVWKKGESFDAEQLKPQAA

SEQ ID NO: 128918 - protein, 436 aa, unidentified
MRGCRCSMIMGFTKPIEHFNLQRKKVITMNTLYVGIDVSSKSNVVYLMLPNGDKHSNFSVANSHEGSTLLVKKIYSALTSHSLDTVLIGLEATSVYGDNLVYFLREDATLAPFNRKIHVLNPKQVKKFHDTYNDLPKNDYVDSFVIADCLRFGRINKEVYMGEYRYKALQNLTRARFFAVQNLVKEKQRFMNVLFKKYSTMTQEKVFSDAFSTTALAVYDEFESAEALANMDLHELTDFIIEKGKNRFPDPVAVAKAIQKAARSSYRLPKTVNDSVNQVLSISITSMKALESQIKEFDKAIKALMELLPNVLISIPGIGPVYSAGIMAEIGDINRFDNQASLAKYAGLAWKQHQSGGFEAEVTRLIPLGNRFLKYYLCEAAFSLVRCDKEYSDFYHLKYKEVNRCQHKRALALTARKFVRLVFRLLKDNRLYCPAK

SEQ ID NO: 128919 - protein, 421 aa, unidentified
MNTNWNKITHFAALDWSSDHHDICVVDQSGAIVSEFRFAHTAQGWNEFRDKMKAYPANTPITLETSSGPAVDQLLNGHWPIYPLAPTASALYRQRKAPRGTKTDRHDAWAMADALRTDGHAWRVLLPQDEATAALRLLCRDEIALIEQRTALVNQLQATLRDYYPAALEAFEDWTQRYTWAFIQRFPTPGLLQSAGKRKWESFLHAHHLWRADTRQRRMDIFGKGNAMPARPATVEAKQLLAVSLTNVLTTLQKQIDEYRRRIQDAFKAHPDHGIFGSLPGAKQVLGPRLLAEIGSVREQFPDAESLMCMAGTSPVSYQSGQINKCRLRRACNKVLRATVHLWANASRFTSEWAQAYYARKRTEGQSHASALRCLGKRWLKILWKLWQEGQAYEEAKHLANLQRRNSLTIAVMSAKKTLTT

SEQ ID NO: 128920 - protein, 344 aa, unidentified
MSKVITIGLDIAKHVFHAHGADGRGRAIFSKRISRGKLLDFFAAQPSCTVALEACGGAHHWARQLTQLGHEVRLIPPAYVKPFVKRQKNDAIDAEAICEAAQRPSMRFVAVKSEEQQAAGLVFRTRDLLVRQRTQLINAIRGHLTEYGWVAPKGPSHVAMLSDLIEEEEMASSLPEAAHAMFRLMLDLFAGLNGKIADLDKEIARRAREDEVSRRLMTVPGIGPISATAIAALAPPVETFAKGRDFAAWLGLTPLQRSTGGKQKLGATSKMGERTLRRLLIIGSSAVVQQAIKRGAPKGSWLEQMLTRKPRMLVTVALANKMARIVWALLVKRENYRAPVAATA

SEQ ID NO: 128921 - protein, 367 aa, unidentified
MKKVSTILAKQSRKSFQQKLTIGLDLGDRNSWYCVLDEVGHIQLEQRVRTSAKGLGEVFGAMPHSRIALETGTHSPWISRLLREFGHEVIVANARKVRLIGESRKKDDRLDAQTLARLARIDPELLCPVKHRSAQAQADLMMIRARAGLVRARTGLVNTARGLAKSYGERLRGCNVRNMNPQKAEGLSAELQAALEPLLAAIESVSERIAEYNQRIEKLAQESYPQVAVLKQVKGVGTLIALTFLLTLEDPHRFDKSRDVGCYLGLQPGRRNSGQSEPQLHISKEGDPYLRTLLVQGAQHILGPFGVDCDLRRWGLKLADRGGRNGKKRAIVATARKLAVLLHHLWVSGEVYEPLHNNRRVAVTAAA

SEQ ID NO: 128922 - protein, 315 aa, unidentified
MHAIGIDMSKRSFHAAFDRERVRQFENTEEGVSGFISELERRDLTKADTRIGTEATGAYHLFLCARLVKEGWSIVVINPLQASKLLATQSLRKVKTDRKDALGIRILVENGLGYPYADTDATLALKALVAEREGLVAVRSILKQQREAHEAKEHAAGAPLHNSFSPVIQTLGKEIKTIERQFCKHDPETQALLRSIPGIGLVSAASLVAIICNATRFSSPEKLVAYIGLDPRVHESGTSVKGKGFISKRGNARLRYILFNAAFVARQHNPELKQFFEKKLKEGRHYFSALCAVERKLIHIIWAVWTRGTPFTTKS

SEQ ID NO: 128923 - protein, 407 aa, unidentified
MRIIGMDIHRVAAEVVSLLDGEIVRHGRVQMLRDKLEEFARRELTHDDHVVIEATGNAAAVAEVLSPYVERIVIANPKQVHMIAHAKVKTDTIDATVLAKLYASGFLPEVWVPDPETLALRRQVTRRTQLVRQRSRLKNLIQSILHAHLIPPCPHGNLVGISGRKWLAKQILPADEQAAIERHLALIGQISEALTVVEADIAVCALNDPTIRRLMTLPGIDVTVAASVAAAIGDIRRFSDPQKLVAYLGLNPSVRQSGEGPAYHGRITKQGRGHARGMLVEAAWAAARSPGPLRAFYKRVASRRGKHIAAVATARKLAMIIWHMLSKDADYIWARPALLARKFRATELRAGLPAKHARRGAACDYNIPAKRAEERSRVEKAEAAYTKLTSRWRTRPKSKNAVEKPAL

SEQ ID NO: 128924 - protein, 335 aa, unidentified
MKVFYLGVDVSKKKLDLCLRSNGKDILYDVIPNDLSSIKSWLTRTFEKFFLSEDSLVVCAEHTGQYTYPLVCATKSIGVYLCLEDAAKIKYCHGIPRGKNDKIDACRIAKYAERYNDCLQPYTASELIIQKLKNLSTERSMLVADRAKYQSQLKDQVDYMEHSIYIAKCNRVEGIINTFTDYIAQIDLEIKELINQAPVIAHQMDLLMSVDGVGERVALKMIMETDAFTSFTDPRKFCCHAGVVPFVYVSGSSQRSKNRVSNRADKSIKHLLHMAALSVSQVKNSPLKKYYDRKVEEGKNKMSVLNAVRAKLVTIMFAVIRADAFFSRNYQNSLA

SEQ ID NO: 128925 - protein, 345 aa, unidentified
MKYVGVDLHKQSIVLCVVMVVGGLRQVVARRRFACRDVAALDQFFESLGPFQVAVEATSAYEWLLERVETKADRMVLVHPRKMRIIAESRRKTDKLDAQILAEFLAAGELPEAWRPTPRVRQHRTLVRQLDYLRRKTSGIKCRLRNILARYNADVPGLFTAEGRKHLAQTSLNPADCFVADQLLAALDFQHQQRLAIDGRLRQFAAMALVAEREARAVLESVPCVGPVTIEVLLSELGDVRRFGAQNDVVQYAGLAPGVRESAGHRQSQGITKEGSPLLRWTLIQLAWRLVNKTRRWGFLYEKLKRRCGTKKAIVAVARRVLCVLVSLLRSGQRYNLAMEVLAEA

SEQ ID NO: 128926 - protein, 363 aa, unidentified
MNSVYHTELSSLEETRGQFNGGKADIKLGIDVHQDFYVVVMQVGGSNPKPPQRFHKQAFLLWAAKLKSRSAEVHAVYEACGFGFSLQRQLSQLSIHCYVSCPQKLDEHNKRVKTDSLDAKTLCLRLDRFVRGNREALAMVRVPSEEEERSRAIHRQREQLVKVRKILEAQGRSLMLNHGIEPVKNWWKRNNFAALPLPAWIKELLQNSQPILIALQQKISALTLQLQVAAAFNQPRGLGAMTSVMIDREIGDWHRFNNRRQIASYTGLCPGEYSSGHTRLQSCVTKHGNPRLRAALVELAWRLVRFQPNYSAVRKWKERLAKGTLTTGAARKKAIVALARQLAIDLWRIRTGRLSAEALGLEI

SEQ ID NO: 128927 - protein, 390 aa, unidentified
MDVLYQSCAGIDVHQATVVVCILHGPLTSTRPKREMAQFDTTTKGLKACHDFLSQFHVEAVGMESTGVYWRPVWHELCDDFELILAQPAHMKSIPGQKTDKKDAHWIAQLTRIGLLPRSFVPDETIQELRELTRQRKHYVESRNRETNRIHKILQSGGIKLTTYIEDIMGTSGRNLLQLLIDETPITPRMIHQSVYTSLKRKVPQLLEALDGYFSAHHRFMLGQSLEIYDFYQKQIDCVEERINGYLNLYERPVEILDSIPGIDLITASVIIAEIGVDMSQFPTAGHLASWAGLCPGNNESAGKKRSTKIRHGNSYLKRCLCQAVFAAKRQKGSPLAERYYQIQSRRGPQKATIALAHQLLKIAYILLKENLTYQEFVLQKKATRDEPVA

SEQ ID NO: 128928 - protein, 351 aa, unidentified
MYYAGLDLHKKYFTLCVLTSEGQVVADHRRLPAALEPLTTMLRALGGPVTVTIEATLQWAWLHDRLAEAGIPVVVAHPQQVKLISHARCKTDPIDARKLAELTRANLLPAIWVPTPEIRAWRQLLRGRAALVRWRTRAKNRIHGALAAENLRVAATDLFGAAGRAWLTTAPVTPGTRREIAVQLAVIAALDDQVAGYDGEVKRLAKQPAAQRLMTIPGIGPFGAALLVAEIGTITRFHSAAELAAYAGLVPSTRSSGDKTSHGGVGVANNHWLKWILIEAVQTLKQRPGPVQFHYERLLRAKGKPKATVAAARKLCLYIYWMWHDGLDYPTWLQAEAKRVGCSMQTLASPA

SEQ ID NO: 128929 - protein, 454 aa, unidentified
MRKPQVVPDEDHEVIYERVAAVDVAKASGVVCLRTPDPARPGRFVNRIWDNVPAMRAQIAELGAELLRCRVQMVTLESTSDYWRIWHYVLESIGLAVQLVSASQAKNLKGRPKTDKLDAMWLARLTQWGMLRPSFVPPAAIRAVRDFTRARQDLVAERTRCLQRVEKLLEDAMIKITSVARDGMKAKSVVAMVAALAAGQRDPRALADLARGPLRAKRDQLAQALDGMFDSHHGMIARSLLDQVAFLDRQITLMEDQAIAALAGVPESWGVDADGQTGPQAGTSPGSPVLAAAHRLAEIPGISLWLAIVIIAEIGLNMTCFPTPAHLVSWMGLCRSAASSGTRHGKGKPKKGNSYARAAAGQAAIGAARTATFLGERYSRIARRRGKAIAQAAVARSIMIIAWHLLNDPQARYRDLGPDFYASRINRDKKIRNHIRGLQALGLTIAITGDEQAA

SEQ ID NO: 128930 - protein, 428 aa, unidentified
MSKGKTQSVIKTDDDTLYYERCAGIDVHKTLLVVCLRIGRKTESRECGTTTGEIREIVNWLKGNGCQMVAMESTGSYWKPLYNIFEQENLPAMVVNAYHIKNVPGRKTDWNDAFWIAKCLAQGLLKPSFVPDREQRELRDMTRFRKSQIEERSRNINRLQKFLEGANIKLGSWLSDIEGKSSSELLELIIGKEDFTLDDVRQRMHGRLKSSPEEIFASIEGYITSTQRKFLAHVMNIIKEQTRLIEITDEMIKASFSDEQKKAVEALDAIPGIGTVSAEQIVAETGTDMSCFRNQHAFSNWIGVAPGNNESAGKRKSGKTTHGNKTLKSTLSQCAKSAVKNKKSFFSAQYARLVTHRGKNRATMAVAHSMAIAIYFVLSGYDFKDLGSDYYNQFNREKKVNSHLKQLGKLGITLPDDLIDIIKAQSSG

SEQ ID NO: 128931 - protein, 450 aa, unidentified
MTNGNGVSRGDRNRNARLARLRELVPPDNAIVGIDLADKKQMVVVCDHDSKVLARRTFRCKAWALGAALDWAAQRAAAKGFAGVTVSCEPTGHRWRVLGQLAADRGMSFVCVQPMQTSWARRSEDLTSDKTDDKDAVLIARLTAQLRCYAPEPVEETWGRLRHLGARRERLIVEMVAQVQQIRDLLECVWPAALETARQPFRSKTWAAAMSVVVDRDGGDLERTRRLGLARFERAVRREVTKRGGQKPCLRIVRKLFTALADPPGVLAHRRGALEPVPLLLADWTDTGRKLTDTETRMTAVLDELGLTSLATSIHGLSPVGAAAILAETGDPHRFATARALVKHAGLAPRQRQSGTYTGQTRLTGKGRPRLRAVAWRAVWGTLQTNTVYASRYRHLTTRETNKLKPTQAQAVIAAALLRHLHAVITTGQAWDPTIAQHGTAPKQTATLAA

SEQ ID NO: 128932 - protein, 391 aa, unidentified
MVCVGIDVAKDKHDCCILDSDGTIRADCITIPNNMDGFKQLLQTIRDCTKKSDKIKVGLEATGHYSYNILGFLLDNDLAVYVMNPLHTNLYRKSLSLRKTKTDRVDARTIATMLLSDVDLKSYTDTAYHNEELKSLTRYRFDKVRERAKLKQSVSRLVTILFPELEKLVPSLHIASVYALLSEYPGAKQISEIHLTKLTNLLATASKGRYGKDKAIQIRDAARTSIGSVMPAKFLELKHTIKLIRELTSEIDEIEVSIQKIMDELNPPILSIPGVGIQSAAMILAEIGDFSNFESPDKILAYAGCSPSTYQSGKLTNCYAHMEKRGSRYLRHALYNATKYVCHWNPVFAEYLAKKRAEGKHYNVALSHATKKLVRLIYALQKSGKAYLVAA

SEQ ID NO: 128933 - protein, 419 aa, unidentified
MNDQIAWNAITHYAGFDWAKDHHDVVVVDARGKIVQDLTFEHSAAGWAQWQAMVAAYPRLAVAIETNQGAAIEQLLASGVAVYPVNPKSAERYRDRKAPSGTKTDYLDAWSLGDALRVDGHGWRALKPLDPLIQELRLLCRDEVELISKRTELVNQLQAALQEYYPAALAAFDDWTAPSAWSFVQQFSTPELLQQAGRRQWEKFLHAHRLYRPELNEKRLQIFERAQAFCGRPAVTRSKRRLALALIKLLQTLESQLQAYRQEIQRLFNEHPDHDLFGSLPGAGGKLAPRLLSELGSDRSLFANAQALQCYAGTAPVSFQSGQTHQVYVRFMCNKSFRHAVHLWADLSRRSCAWAQVYYQQLRDRGQSHAAALRCLGQRWLKILWKMWQTNTCYDAELHTANQLKHGSWVLAIKPAATK

SEQ ID NO: 128934 - protein, 374 aa, unidentified
MADYSEVFVGIDTSKLRNAVAIAEGGRNGEVRYLGEIDNTEAATSKLVKKLAAQHRRLTFCYEAGPTGYGLHRLIKTLGHECVVVAPSLIPKKPGDRVKTNRRDALNLAKLLRAGELTAVWVPDARHEAMRDLVRAREAAVDDLKSKRQQVLSLLLRLGRHFTGKRTWTRAHMNWLVSQKLAHREQRIAFEEMLLAVRQANERVIRLERAIAAAVPDWSLAEVVPALMALRGLDLISATIFLAEIGDLSRFASPRQLMAYLGLVPGEESTGDRVWRGGITKAGNHRARRILVECSWSYRHPPRVGKKKLAKVEAAPPAVQEIAWKAQARLTARYRALARRGKRPTLVVTAIARELSGFIWAVSRAVGQPATPAK

SEQ ID NO: 128935 - protein, 404 aa, unidentified
MEVINERCCGLDVHKKIVVACVLTPEGSETRTFRTMTQGLLELADWLVEQQVTHVAMESTGVFWKPVYNLLEGLELTLLVVNARHIKAVPGRKTDVKDAQWIADLLRHGLLQGSYIPDRSQRELRELVRYRRNLIRERSRVINRIQQVLEGANIKLSSVVTDITGVSGLAMLGALARGETTPEQLAALARGTLRHKRAELEAALHGLMGPHQRLMLQSQLRHLEFLAQEIEQMNQEVATRLDPFEEAVQVADAIPGIGRRGAEEILAEVGTDMSRFPSGGHLSSWAKVSPGNKESAGKRKSGATGQGNPWLRSALVEAAWGAAHTRGTYLSAQYHRLAARRGAKRAILAVAHTILVTLYHLLRDGTTYQDLGGNYFDQRNPQAILRRSVRRIEALGYKVTLEAA

SEQ ID NO: 128936 - protein, 415 aa, unidentified
MRVHRNCCGLDVHKKMIAACLLIEDADGNSVAERRLFGTMTRELHTLAQWLCAARVTAVAMEATGVYWMPVWNVLEQYGFQLLLINPEHYKAVRGKKTDLKDGTRIAELLQDGRLEGSYVPPVAIRVLRDLTRYRIKLVQHQSALANRIQKLLEQGNIKLASVASDALGVSAMAMLRALAQGETDAGRMANMAKKQLRKKIPQLQLALEGYLLPHHRLLLREMIEDLDHVAAKITRIEVTIEQQMRPFQEAVNRWLTVPGIKHRLAWTLVAEVGPTVEAFPTAADIVSWAGVCPGNNQTAGKRKSGTTHAGNPWLRRALCEAAWAASKSKGTYLQAQFRRLSTLRGPKRALIAVASSILTAGYYMLQRGTTYQELGPDYFDKRNTHRATHRLIKRLEALGHRVILEPRFIAVPSS

SEQ ID NO: 128937 - protein, 327 aa, unidentified
MRYIGIDVSKTTFMVAYPSNEKEYKTREFGNNAKGIHQFIHTLKEDDHCVMEATGYYSYLLLYLLNQANITTSMENALKVKNFARTMLSVTKTDKADAQLLSLYGERMRPAPFKMPPDSILLLKQKRAALRQFQKQLQANNNLRKSLEALPHRDAATFKYIDKISETLEKQIRKIEEDLVALTQKEFERQMQKLTSIKGIGASLAAALIIATGGFTYFDNAKQVSRYLGICPTYQQSGTSVNVKGHINRNGDSHLRSQLYVASWSMSLYNKECRNLYLRMKEKGKPGKLIMIAVANKVLRQCFAVVKHDTDYIDGFVSRKPNSSMEG

SEQ ID NO: 128938 - protein, 364 aa, unidentified
MDVHLRSTTVCALDAETGEAVTRRFRGNPWGEVAEWMSGFPGPSLAAYESGYLGFAPQRELSGLGVDCVVAAVSKVPRSAADLSSKNDRNDAARMAKAILSHDVTPVWVPSPEIEGLRDLAAAHDAATARLAAAKQRLLAFLARRGYVYGGTTPAGNPRKYWTYGFLRWLDGIHPADDGGIRALAALRNEVEAADETREALLAEYRAAVAAGPLSAEVEALQSIKGCGFALAAAFASEVGDFSRFRSGRQVTAYFGLAPKQRSSADSVRLGGISGAGNALVRKLAVEGSWCYAQAGHQPKLMPKGSGVPLEIRMHGRKGSERLLRRREEMIARGMPQAKANAATAAELVRWLWALGAMCREGAE

SEQ ID NO: 128939 - protein, 359 aa, unidentified
MNKNSMLFVGLDLGDKYSYIAILDKEGELIEETRLPTTKTSFHQRFSVLPPCRVAMEVGSHSRWASHLLNDLGHDVLVANARKLRAIYHNPRKDDRADAETLARLARLDPELLSPIYHRSPQAQADLAVLRSRDALIRSRTLLVNHARSIVKSSGDRLPSCSANCFASKAAPAVPETLRPALSPILETIASLTQQIREYDRQIEQLCQDQYPETKLLRNVSGVGPITALAYLLTLEDPKRFLKSRDVGPAIGLVPRRDQSGDHDPQLRITKTGDEFLRRLLVSSAQYILGPFGPDCDLRRWGLKLAERGGKNAKKRAVVSVARKLAVLLHCLWKTGEIYDPFYLARKHDQAPEAVPVAA

SEQ ID NO: 128940 - protein, 343 aa, unidentified
MSAIAIIGLDIAKNVFQVHGADANGAPVLKRQIRRGQIFAFFASLPPCLVALEACFTSHFWAREIAKHGHEVRMIPPQYVKPFVKRNKTDSADAEAICEAASRPTMRFVAVKSIHQQSVLALHRARDLLVRQRTKLIQALRGYLGEFGLVAPKGAWNVTRLEALLSDANAALVPDLLKEVATVIIAQIRDFDDRIDHLHDRLVAWHRANEVSRRLATIPGIGPVTASLISASVSDAAQFRSGRHFAAWIGLVPREFSTGGRQQLGGISKRGNPQMRRLLIVGAHAVLRWTRRGHGMPSSWLTALMGRRHPNVVAVAIANKLARIAWAIMSRGTSFSPRIAQPD

SEQ ID NO: 128941 - protein, 409 aa, unidentified
MPEQLIDTMDIGVWCGLDVGKEEHHACALDASGTRLFDKPLPQDEANLREVFNRLRARGRVLVVVDQPNTIGALPVAVARDAGCEVAYLPGLAMRKAAQLMPGDAKTDARDAFVIASTALRMPDTLRAVDRDSEVLASLKVLAGYDDDLARESTRSINRLRSLLLQIHPALERVFTGTRLTNQLSLDLLARYGGPTGLAKAGPTRVKIWARKTKHRSVDALVDDVFAALEQQTVTVIGTAAVETVVPRVATQIKAVKTQRAELAVEVERLLDDFPLRDVLISMPGVGTKTAATILLAIGDASGFPTAGHLAAYAGIAPVTRRSGKSIRGEHPARSGNKQLKNALFRSAWVASNCDSESATYYQRKRAQGKKHNAAIICLARRRCDVIYAMLRTSTLYQPHHHEQLPTAA

SEQ ID NO: 128942 - protein, 344 aa, unidentified
MRIAVLGVDLGKNVCSLVGLNASGAVVLRRRAKRETVIALAAKLPPCVVAMEACCGAHHLGRVFAAYGHDVRLMSPEYVRPYVKAQKNDDRDAEGIAEAATRPTMRFVELKSQEQLDMQTLHRSRDRLVGERTALINQLRAILLERGIVAPQGKRKLEQFLFNLMDEQGGPGLSPRMITLATDARAQWAELDRRIAAFDAEFVRWTKENEEARRLATIPGVGATIASALIAAIGKGETFERGRDLAAWLGLVPRQFTTGGKPKLLGISKRGNSYLRKLLIHGARAALPYVAERDVPLGRWAKSLLSRAHPNVVVVAFANKLARIAWAVLRRGEPFAAKGLPVAA

SEQ ID NO: 128943 - protein, 478 aa, unidentified
MKREMMGFCEYVGKEVGSFTGAEEPEYKLDPEPREHPVLQRPGLGSGERAFQTSRNRGFTPTTRHVYREGAMEVLYPRCAGLDVHKDTVVACVRIAEGGKVRREVREFGTCTRALYELVEWLTAQGCTHAVLESTGVYWKPVWHVLEGQLALVLANATEVRNVPGRKSDTNDATWLADLLAHGLIRSSFVPPEPIAELRDLTRTRKQLTRERARHTQRIQKILEDANLKLASVVTDILGMSGRAVLEAVIAGETDPVALAALTSPRLKASREDITEALYGRVTEHHRFMLRLHLNQVDGLDRAIAALEARTEELHEPFRRTVEHLVTMPGVGPTVAAVLVAEIGTDMTRFPTAGHLVSWAGLCPRLDESAGKARSRRTRHGYWLKTTLVQAAWAAVRKKDNYLHAQFLRIKRRRGAKKAILAVAASMLTAAYHMIRNDADYSDLGGDYFDRYDRDKTALRLVRRLRELGLSVQISQAA

SEQ ID NO: 128944 - protein, 377 aa, unidentified
MSKIRFVGLDVHADTIAVAVAEAGGEVRSLGIIPNRVESIRKMIGKLGPVGDLKCCYEAGPTGYVLYWQLTQLGVACEVIAPSLIPTKAGDRVKTDRRDAEKLARCYRAGELTPVWVPDAAHEALRDLVRAREAAKKDQLRHRHRLGKFLLRHGKRPQDAGKAWTQKYLNWIRIHVHFEQPALEATLKYYREEVDHIAERIATLEQAIDEAVRQAPAEIRAVIEALQALRGVAQTTAATVVSELGSLSRFPNPSQLMGYSGLVSSEYTSGNRVQRGRITKSGNAHLRRVLLEAAWTYQHRPNVQGRVLRRQKSLALSEEAKRIAWKAQQRLHKRFSALTARGKETNVAATAIARELLGFMWAIAVHAEAQHKPAKAA

SEQ ID NO: 128945 - protein, 321 aa, unidentified
MHKYNEIYGVDISKDVFDVSNTKAVHSQFSNDVKGFKKFTKNLTKQTLVVMEATGYYHYCLAQYLYGKGYLVSVVNPLSVKRFIQMRLSKIKTDKSDAKAICEYAVLNEVPLYTAKNKNQAESHQLLGLIEIYLKQSTALKNKLHGEKTLGIPSKAVYHSLNRSLKSIQREIKVSEERLTELVKEHQQKQLTLLKSIPGMGNKTALLLIVLTDGFNRFENSKQLCSYTGITPIIRQSGSSIRGRRIKSKMGNQKLRNLLFLCSFSACKYNKACKALYDRIVAKGKSKKLALIAVCNKLLKQAFAIVKSGLPYDESFVSKLV

SEQ ID NO: 128946 - protein, 338 aa, unidentified
MRAYAGIDLHSSNNFIGIVNESNERLFNKKLPNDVNRILMALEPYKNEIQGVVVESTYNWYWLVDALQENGYPVLLANPCAIQRYSGLKFTDDEDDAFWLAEMCQLGILPTGYIYPKEERPVRDLLRRRTMFVRHRATYKNSLRSMMTRHTGKKIEGSKLYKFTDEDLSEYLSDEVLMHMAQYILKGISTTNEIISNIEKEVLSRVKLKEEYKLLQTIPGVGMILALTIMIEVGDIRRFREVGKYSSYCRCVKSERKSNGKKKGENNRKNGNRYLGWAYMEAAHFGIQYSPEAKRFYDRKKREAHEFVALKAVSNKLAKASYYIMRDHVPYDVHKCFA

SEQ ID NO: 128947 - protein, 346 aa, unidentified
MKTKVSVLGIDIGKNICSLVGLDAAGTVVMRRRATRETLIGLAEKLPACVVAMEACCGAHHLGRVFAAHGHEVRLMSPEYVRPYVKAQKNDDRDAEGIAEAATRPTMRFVELKTQDQLDIQTLHRSRDRLVGERTALINQIRAILLERGIVVPKGKRHLAQYLAVLLDEGSGHTLSERMRRLVDDARTQWRELDKRIAAFDAEFAAFAKENEDARRLATIPGVGALIASALLAAIGKAETFDHGRDLAAWLGLVPRQATTGGKPKLLGISKRGNTYLRRQLIHGARAALPHVAKRDTPLGRWLTALLARVHQNVAVVAFANKLARISWAVLRRGETFADKEAMLTA

SEQ ID NO: 128948 - protein, 345 aa, unidentified
MEHFAGRDVSLKDSSIGVVDAAGRIVREAKVASEPEALVAWFGGLGLAVTRIGLEAGPLSQWLHAGLTGAGFEAVLLETRHVKAALSAMVVKTDRKDARGIAQLLRMGWFRPVHCKSADAQEVRALLVGRKLLQSKLRDVELSIRGILRGFGLKVGEVSKGRFAARIRELVAGHAMLETVTGAMLAAREGLLAEFMRLHRRMLAIVRADTVCRRLMTAPGVGALVSITFRTAVDEPGRFRSSKAVGAHFGLTPKRYQSGETDVIGGISKVGDAMVRTALYEAANAILSRATRFSTLKRWAMDVAKRRGLKRAKVALARKLGTVLHRMWVDGSEFRWGKEAPAAAA

SEQ ID NO: 128949 - protein, 350 aa, unidentified
MPQPIEVIGGIDTHTDVHQAAVIDTIGRHLATEAFPTTPEGYRRLLAWLRSHGQVLTVGMEGTGSFGAELARYLRANEMTLVEVDRPDRRARRAAGKSDPIDAYAAATAVLSGRANGTPKDRDGTVEAIRTLRVVRASAIKARTQTINQLKSLIITAPAATREALRSLTTTELIRRLAASRPGSDLTTPAAAVKLALKRLAKRYQHLSEEIADADAELRALITHTAPGLLALPGVGTETAGQLLVTAGDNPDRLASEASFAHLCAAAPVPASSGRTDRHRLNRGGDRQANRALHTIVLVRMRHDPRTRDYVARRTLEGLKTKDIFRCLKRFIAREVYHHLTSAPSTSPAT

SEQ ID NO: 128950 - protein, 357 aa, unidentified
MRFYTTQHQFYCGIDLHARSMYVCILSQDGEIVLHRNMKAAPDPFLKAVAPYREGLVVAVECIFTWYWLADLCAHEGIPFVLGHALYMKAIHGGKAKNDKIDSQKIAALLRGGMLPKAYVYPAQMRATRDLLRRRTHLMRKRAELLAHVQNTNSQYNLPEIGKKIAYKANREGVAERFEEAAVQKTIEVDLALITYYDTLLKDLELYILKTAKHHDPHTLYLLQTVPGIGKILSLVLLYEIHQIDRFASVQEFASYARLVKCSKESGGKRVGTSGKKIGNAHLKWAFSEAATLFLRNNPQGQKLLARFEKKHDKGKALSILAHKLGRAVYFMLQRKVAFDMELFLQTSGSRAGEPGA

SEQ ID NO: 128951 - protein, 365 aa, unidentified
MNKCLHTELSSHEGTRSEFNPGKTVIKLGIDVHQEFYVVVVQEGGGNPKPPQRFKKEAFLSWASQLKQKNGGAQVHAVYEACGFGFALERALAGMGIGCHVVCPQKLDERNKRVKTNGLDAKALCLKLDRYVEGNLEALAVVRVPSEEEEQLRAIHRQREQLVKARKQLEAQGRSLMVNHGIEPVKSWWKRRTFAALCVPEWMKELLNNSQPILLALEEKIRALTVQLQAAATPNQPRGLGMMTSVVIDREIGNWHRFVNRRQVGSYTGLCPGEYSSGNTRVQSCVTKHGNPRLRAALVELAWRLVRFQPEYRPVVKWRKVLAKGALATGAARKKAIVAVARQLAVDLWRIRTGRLNPEQLGLSI

SEQ ID NO: 128952 - protein, 399 aa, unidentified
MHHRRLVGIDLGIISAHTVRVLAGDGSVVCRRKAVPTVASLTETEQAALQGAAPTTRLEVVLGPTGPSWLPIAVFFTSRGHTVYRVSSARAHDLRRVLSRQAKSNGIDADTLARLPLVDPAGLHPLALPSAERAALDRRVRACDRLTQQGACHKRRIKDLVRQLLPTSPLAGELGMADLAVLERFGADPHALLAAGPGRLARLIGKASGGQHGQQRATHWLAAARAALQLYGDHPAVAFTDLAAEVHTEVRLLRATQAELAAHATQREYCYRWVDPLGLARSLPGLAEVGGPALVATMGDAHRFAAASRFRSFTGLAPRASETGNTDRKGQPISKAGNRLLRTTWSAPPTPPAARTPSSPASTTCRWSSAARTTSARSAWSPPTWPSGPGRSWTGGCRM

SEQ ID NO: 128953 - protein, 394 aa, unidentified
MKLVGIDVGKNSHHFCVMDKETGEFNVTPSSFSNNKEGFDFLINSLKPYSKKSILLGMEDTGHYHVALLKFLLSNGYTVALINPKTTDLTRKMEGGITKNDKLDTITICDVLDTPERKKQYRITKVDRFDLYEQRQLTRHHHNLKEELNIYCNRLQKSIDLVFPEFNTLFGSKYGVVYMNLLKTFGSAEAIASTDIRTIRKCFEIKGRGGRISLTPEKLKECAKNSIGISSEVETIQIKHLVSQITLIKEQIAETDKKIEEFSITNNSPILSIPGISHFSGTSILAELGDIGNYSKPSQIIKFAGVAPYHYESSQYNAQHTAITKKASKYLRKTLYQIILPVIKYNPVFKKYYLLKISQGKGHRCAQGHCIRKLLRIIYHLLETGQSFDPALLR

SEQ ID NO: 128954 - protein, 409 aa, unidentified
MDGLIERCAGLDIHQATIVATVRMPDEGGGRQAVTHTFGTMTTDLLALREWLQACGVTHVAMESTGVYWKPIYYLLEEPLTVLLVNMQHLKQVPGRKSDVQDSEWLAQLLECGLLRGSLVPPAPIRDLRDLTRYRKKQIEDRTQEINRLYRVLEEAGVKLASVMSDIMGRSGRAMLDALLAGTTDPTVLAELARGRLRPKIPALRTALRGQFRPHHAFLIGHILTKVDFLEEAITGLSEEIDRQLAPFAATIDRLTTIPGWGRRTATTVFVETGGEMAAFPTAAHLCSWGAMCPGLNESAGKRRTGKTREGNRFLRGALIESALAATRATGTALQARYRRLKRHRGHKKAVVAVGHQMLEIAYYIMRDGTTYHELGADYFARRDRDRTVRRSVKQLEALGYRVTLEEAA

SEQ ID NO: 128955 - protein, 402 aa, unidentified
MQVDDIDVFIGIDVGKSEHWATALTTAGECLHDRPLPNDEARLREVYEHLGEHGRLLVVVDQPATIGALAVAVAQDMGITVGYLPGLSMRRIADLSPGSAKTDQRDAAVIASAARTMPHTLRSITSSDEDAAALSMLTGFDLDLARQVNQVSNRIRGLYTQIHPALEGVLGPWLEHDSVLEVIATWPTPAALRKAGRARIDAKLKANGCRRHAAWAQAIVKALSKQTVTVAGTDAAGVVLPHLARQLIALHTQRADIAAQVEALVEAHPLYPVLTSMPGVGVRTAAVFLAGTLGKTFTTGAHLASYAGLAPVTRRSGSSIRGEHVSHGGNKRLKRAMFLSAFASLRTDPVSRTYYERKRAQGKRHNQAILALAHRRILTLHAMIRNGTLYNPQPAQPLTTTA

SEQ ID NO: 128956 - protein, 312 aa, unidentified
MPQDRVFVGVDVSKDRLDVAVLEGESFAVSNDAAGLRDLVRRLRAAKASLIGLEATGGYEKAAVEALLTAGLDARLLDPRKVRRFAQACGVLAKNDRIDAELIARFVALMPSRSARIDPAAARLAELVDARRRLVEEQARLDNAARMVRDPVLIRLAQRRRGRTRLDLVLIEKRLAQLIAEDDDLARKDALLRSVPGVGPVLAWTLLARLPELGDLDARQVAALVGVAPYDHDSGARRGRRAIRGGRPIVRNVLYMAALVGARFNPALAAMKARLAQAGKPPKVVLVALMRKLITILNAMLRDNAPWRAATA

SEQ ID NO: 128957 - protein, 280 aa, unidentified
MRFYQGQTELYCGVDLHARNMYICVVDREGNVLKHRSLRCRGSDILRAIKPNEGRLTVAVECIYAWYWLADLCHQHAIPFVLGHVLYMKAIHGAKVKNDRIDSEKISRLTAGGLMAYVYPRENRSTRDLLRRRLRFVRQRAELHTHTHHLSTQAQLTPVGNDMKAKTRRNQVAKRFDDDEVRLSVKSNTAMIIQLDKTIGRMEKHILKQAKDKFCKELAVLQTIPGVGIITALTILYEINTINRFATLHQFGSYARLVKCRHESDGKPKGTGGKKISTQF

SEQ ID NO: 128958 - protein, 407 aa, unidentified
MEVQHLRCAGLDVHKDTVVACVRVVRERDVFQEVKTFDTTTQGLLALSDWLGEHGCTHAAMESTGVYWKPVWHVLEASIDLVLANAMHIRNLPGRKTDVNDATWIADLLAHGLIRSSFVPPTHVQELRDLTRTRKQLVREIAQHTQRIQKTLEDANIKMTGLFSDILGKSGRAILEAIIAGESDPERLVDLTSGRLKAPRVKLVEALRGRVRDHHRFLLKLHLAQVDALQLAVRDVEARLGEALQPFHRNIDLLTTIPGISATTARVMVSEIGFDMVRFPSAAHLVSWAGLCPRSDESAGKRRSTRIRKGAPWLKTTLVQASWAAVRAKDSYSRAQFYRLKARRGPMKAIIAVAASILTAAYHMLRDGVPYRELTAQHFDRRDKGKLAKRLIRRLEDLGLHVEVKAA

SEQ ID NO: 128959 - protein, 367 aa, unidentified
MSSVASAAGLIHLGMDTSKNTIVVATLLPGEESPVTDRIANEEAAIRRLIGRFPDRSVLRCWYEAGPGGYELYRLLASMGVACQVVAPSLIPKGSSDKVKTDRRDSRRLARLGRAGELTPVRVPGPAEEAVRDLVRARAAVLEDRKRAQQRLTAVLMRHGRIWRGATYWTRAHREWIAAQRFGEPALATAISYYRATLAVREAELAAVEAELAPWAAREPLAGPVARLGCYRGIAELTALTLAAEVVDWHRFPAARAFMSWTGLVPAEYSSGDRTRRGHITKAGSEPVRVALTEAAWSYRHAPAIGARLRRRQAGAGPATLARSWTAQRRLHARYTHLLHAGKAAPEAATAVARELAGFAWAEMTAA

SEQ ID NO: 128960 - protein, 369 aa, unidentified
MGQDSEVFVGLDVAKARHAVAVADEGRSGEVRYLGEIDSDPVAVRRMVARLEKGARRLHFCYEAGPTGYGLYRQLTAMGHDCAVVAPSLIPKRPGDRVKTNRRDAIQLAKLLRAGELTPVWVPDETHEAIRELVRSREAAVDDLRRKRQSISSLMLRYGRSYPGKKTWGARHRPWLQAQRFEHPAQQLVLQEMILAAQHALERLKRIQAAIIEFLPSWSLAPVVDALQALRGVQLVTAATIMVEIGDLRRFDTPRQMMSYLGLVPGERSTGDSVRRTGITKAGNGRVRRALVESAWTYRHLPRTSKLKHYVHERVPTAVRDIALKAEARLCGRYRALAGRGKKLNVAVTAIARELVGFIWAIGRIVQAA

SEQ ID NO: 128961 - protein, 413 aa, unidentified
MLWGSGGEGVDALERRDHAMEHPMSQSFDASRSLTAFEQDSTLVAVIEMSQSKWLVAAMIPGVARQPLKKLDANADALLKLLQRWQDEARKAGRTVRRIVCTYEAGRDGFWLARWLQARAIETYVIHAASIAVSREHRRAKTDRIDTELLMRSFLGWLRGEKRHCSMVAIPTMAEEDARRPSRERESLVGEQTRIVNRIKAVLALFGIGGFNPRLRKAAQKLETLHTAEGTPLPENAHAELRRDLERLRLVHDQIHIIESERLRRLALAPAAATGPHAMVRLIARVFGVGIETADMLVNEALARKLRDRRAVARYAGLTGAPDESGKRRREKGLARAGNGRVRRGMIQLAWRFLIFQKDSPLVRWFRERTADGRSTTRKTMIVALARKLLIALWRLVTTGEMTQGLKLRPAGT

SEQ ID NO: 128962 - protein, 333 aa, unidentified
MTITTIGLDTSKSWFQVHCVDADGKTVLRRKLARSKVLSFFANIPSCRVGLEACGGSHFWARELAKLGHDARLMPARYVRAYVKTNKHDAADAEACCEAVQRPGMRFVPVKTEEQQGMLMIHRARDLLVRQRTAAVNALRGHLAEFGIVAAKGTAKAHDLMRLAGDDERLPAMAREALGYIVAQIHNIEGKLRAFEQRIVELAKEDEVCRRLMTVQSIGPYIATALAATVGDPRNFVSGRHFAAWLGLTPSQHSTGGKEKLGRISKRGDSYVRRLLIHGARATVARVRSGQVQSAWISGLLGRRHFNVATVALANKTARIAWAVMSTERATAS

SEQ ID NO: 128963 - protein, 395 aa, unidentified
MISVGIDVSKGKSTVCILKPGGEVVKPPFEMIHNAEELDSFVSLINSFDEETRVVLEDTGHYHIPVASYLSSHGIFVCCVNALRMKKFCAQSIRRAKTDKIDAVRIASFGITYWSELTRAYDAPDTYDELRFLARQYYQITSILVKAKVNLSNLLDQVMLGISNLLQNQKDNHKLTEFIDRYIHFQTILDMGEEKFTADYCKWAKKKGYRCNERKAAEIFALAQNGIPSLSNSQSVKIAVREAIKVIHSTEESRNTILAQMQKICKTLPEYSVVRDMNCIGDVLAPRIIAEIGDVRRFKNKHSLIAYAGIDAPPYQSGAFNASERKISKRGNSYLRKTGYEIMQSLIKHKPTDDSVYDFIQKKRSEGKCGKEAMIAGLNKFLRVYYGKVMELYSE

SEQ ID NO: 128964 - protein, 300 aa, unidentified
MTIMVDTQRALTGGVDTHADVHVAAVIDPDGGLLGVKSFATNLAGYKLLSGWMGTFGEIGLVGVEGTGSYGAGLARHLHREGLVVVEVDRPNLQERARQGKSDSLDAIEAARAALPGRAFGVAKTRDGNVEAIRALMVVRRSARESRTKAMNQIRQLVDTAPDELRERFVGVPSWRIAEGVAILRVHADPVRMATKCALGMLGRRAVALGEEGKRLDVLIARLVDKVAPELVELVGLGPDTAALLLIAAGDNPSRLRSEATWAKLCGVAPLEASSGKVTRHRLNRGGDRQANSALWRIVF

SEQ ID NO: 128965 - protein, 405 aa, unidentified
MSKDLNDVAPSLGEVNTLYVALEVSGTSWVVGIGDPEQRDKVGMHKLAPADTEGLLEKIGRARAGADGPSRVLLTYEAGYEGFWLVRWLGEHAPEIDVVICDPASLEVVRRKRRAKTDRIDARKMVRALRAWDGGDRGAMSPVRIPTIEEEDAKRLLRRRERLIKERRRLANSIAGLLRLHGVSLGDPAGKRFRARLDGLETRYGTELQPQLLAEIHGILDRLELVVAELKTVEAEKAAALKASQEALDGLPGHDGETEAAGTSDPAPDRAHFAAALVRLRGIGANDALVLDTERFYRDFDNRRQLASLAGLAPVPFASGGIDNDQGISKAGNPMLRKHLVQMAWRWLFFQPNSALSKWFREYVSARDGRARKRGIVALARKLLVALWRYVTSGLVPEGAILSRA

SEQ ID NO: 128966 - protein, 369 aa, unidentified
MGDRITYIGLDVHKDGIVVAVAESGRRGEVREYGRIAHTPAALRRLADKLGREAVELWFCYEAGPCGYGIQRHLSAHGHECIVVAPSLIPKRAGDRVKTDRRDAASLAKLHRAGELTAVWVPDPGHEAMRDLVRARLDAVRALRRARQQLSGFLLRQGCHYRRPAWTKLHRRWLAGLKFEQAVHHIVLEDYIQAVEAVEARRDRLTAQIEAMLPDWTLAPVVAALQTMRGIALINAATLIAELGDLTRFVNPRQLMAYLGLVPSEHSSGASVKRGGLTKAGNSAARRLLIETAWCYRFPARISRELRLRQEAQPRPIRVIAWKAQLRLCVRYHKLARSGKPANVVTAAIARELAGFVWAIAWRVPPAAS

SEQ ID NO: 128967 - protein, 325 aa, unidentified
MHVIGIDVAKATFDIALPLGQGKYRTRAKVGNDVAGWEQLLAWRHKHAPDAVVGMEATGIYHEALAERLVAAGVTVYVINPAQIKAYGHSELLRTKTDRTDAKLIARFFQSRLLEPERLHPYVPLTPTERTLQALVRRLDDLKQMRQMENNRLESASAVVVKGIRDVVAALDQQIVQVEQAITEHIDNDPDLRGRRDLLNTIPGISDTTSAFLLACLGDLSQYNDVGQIVAHTGLNPARRQSGKHEGKVRISRIGNALLRAKLYMPALVAKRHNPVLAAFAQRLAERGKPPKVILCALMRKLLHIVWGVLKSGKPFDPNKAIATA

SEQ ID NO: 128968 - protein, 340 aa, unidentified
MKANTITIDLAKNVFQLLGVDSSGNKLFSKRLNRAKMIEFMRLQPAAFVVIEACFSSHYWGRLFNEMGHQTAIIPAQHVKPFVRGNKNDKNDCLAIYEASRRPNIRFVPIKSEAQQEVLALHRMRERFIGCRTQCINQTRSILSEFGVTIPQSHAQFKIALVDYMGDNTIRPSVRLLLNTVYDELEQLNQHLALIDSLIRQYNQQSPAAKLMQSLPGVGPIIASAFSAAIDKGQAFQNAKELPVWLGLTPKQHASGETNQLGSITKRGDRYLRKQLIHGARTVVSHAHKKNDDFSRWINRLVERRGKNKAVVATAHRLARLMWILLAKGEAYQPQYTASA

SEQ ID NO: 128969 - protein, 400 aa, unidentified
MLSIGIDVSKGKSTVCGMKPGGEIVYTPFEVQHTREGMSELVSLLRGSGEEVRVVLESTGSYHCPVVATLLENGIFVSVVNSLRMKRFCSQSIRKVKTDRIDAMQIALYGLAYWQELQPTRLPEDTYRELQLLARQYYQMTSLLIKAKVDFNAICDQVLPGMQELMNDHAGRHKLSDFVLRYRHTTHILEMGETRFQKDYCKWAEKKGYRNCERMAVLIFATAQNGIPVLPNAPSTQIVITEAIRVLHTVEASRDAILTQMQALAKTLPEYSLVREMPCIGDTLAPRLIAENGDVRRFHSKRALIAYAGIDAPPYQSGKFCANNRHISKRGNRYLRKTGYEVMQSYVMHKPANDPIFTFIEKKRGEGKSGKLAMVAGLNKFLRVYYGKVTELYRSLPTIE

SEQ ID NO: 128970 - protein, 415 aa, unidentified
MERSYSVAGIDVHKSMLAVVVSDAAREGEFQFERRKFGTTASELRELTAWLAEQGVREAVMESTAQYWKPVWQQLEGKCELFLAQAHSNRAPRGRKRDFADAERLLRRHVAGELILSFVPNAEQRLWRTMTRSKHQLTRDRVRLPNQVESFLEDARIKLSGWVSDLLGVSSRRILKALAGGERDATKLAALADPALRASAEQLQDALSAAATLGALHREVLGFFLERLALIEKHMEMLDQSIAGALHRYHEAVERLSEVPGYGIDSAHQVIAEVGPGAESFPSPEQLSSWVGTCPGREESAEVSKNNRSPKGNRMMRRVLALVANAAVKSKGSVFQNLYRKWVVRMGHNKAIWAVAHRLCRLTWKILHQSVRYVEYGTRANPKAVKKRASKLLRDLKALGYNVTITPLQSQINVV

SEQ ID NO: 128971 - protein, 346 aa, unidentified
MIIVGCDFHPSWQQVAIFDSLTGEIVESKLVNGNGEAERLYRSLPVPSLIGMESCGNSQWFIDMRNSLGHTIWIGDAAQIRASYVRKQKTDRRDAAHILKLLMEGRFPRLWAPDAEVRDLRQLLIHRHKLVEIRTRVKNGLQHLALNRGLQRKSRLWSEAGQKALRELPLKGWAACRREDLQRLRTVLDEQIGQLDEAVKYAADGNQQAQLLMTQPGVGPITSLAFVLTIGDVARFKRGKQVASYLGLIPREHSSGGKQHLGAISKQGNRLARTLLVEAAQSANRLDEGFRKQYQHRCHSKPKGVAKVAAARRLAVRLYWMLRSNMPYPEIVRIEGSSRSPMAGES

SEQ ID NO: 128972 - protein, 295 aa, unidentified
MEKHTTIAVDLSKTVFEIAVSDYPGRVCERKRLTRGQMVRFFANRPPATVLLEACGSAHHWARTLQQLGHSVRLLPVHHTRRYVLRDKTDAADAFALLEANRNEQILPVPVKTVAQQSLAALHRIRSGWMQTRTARLNALRGILRELGISIPKGARHVLPALKASLSDPDNPLPLSLHPTLLAVAAEIRAFEEKIKDLERQLTAAARSCPSATRHLSIPGIGLLTATALFAFVGDLSRFRSGRRFASSLGIVPREHSSGLRQHLGAITKRGDPYLRTLLIHSALGPSGRVPCQAS

SEQ ID NO: 128973 - protein, 404 aa, unidentified
MIIVGLDWSRYKHDFVIMDMQGKIVERGAIAHNANALEELAAGIDRHVSCATQVHVGLELNDGALLAWLVVKGYTVFGIQPKSAQRARDIYRPSGSKDDGIDAFVLAEFVRINKGRLRPWRQPSEITLQLREMLRWREELVQQRTAAYQRLRALLAEWSPQLAELCNNLDCIWQLDLLSQFPTQASLCQAHGNRIRSFIRKHRMHSKKSQQIEDTRRSVPMPVPSGRSVVVEKQTSFLVEQIRMLSTEIDHIEQGLRQLTAQHPDVNIFESLPVRGIVTVASLLAIFGDDHEKALSPDVLAAVCGVAPVTIASGKTKKVRQRRACDHTFRQALVHFAFNTAFRDGCWAAQFYQRKRSEGATHYTALRCLAKRWLKIIHRLWKDRITYDEALHQANQRRNQSHAA

SEQ ID NO: 128974 - protein, 440 aa, unidentified
MAVRRTERQTFPNAAAIDVGASSHWVAVPPARDQTPVREFGPMTDDLNAMADWLLASGIDTVALESTGVYWIPMYEVLEQRGLKVWLVDARQMKYVPGRKSDVQDCQWLQELMSLGLLRAAYRPDADVCVVRAVARQREALLGEQAGWIQRMQKSLVQMNIQLGEVISDVMGATGQAIIRAIVAGERDPQALARHRNGRIKADRAQIARALTGNWRAEHLFVLQQSLAMYDDIGRHLAACEVELRSMMTELERTPVDLGPVPREGSKRRAQFDLRQTLANWAGVDLTLIDGLATTTVMTLLTEIGPDLGRFASVKHFCSWLGLCPGTKISGGKVLSSGTKRSASRARQALKLAAQALSRSDSALGAFYRRLCCRMDKPRANTATAHKIARMVYFMLTRGEAYVDQGQQRYEEQQRQRSIAALKRRAASLGFELAPKAVAA

SEQ ID NO: 128975 - protein, 424 aa, unidentified
MSSDLEIAAFIGLDWADQQHVIRLRVAGSAPVEAQLLDQKPETLRAWIGQLRQRFGGKPVAIALEQSRGSLLYALMNVDFLLLYPVNPQNLAQFRKAFYPSGAKDDPQDALLLLEMLEKHRDRLRVWVPDDADTRCLRLLAENRRKLVNRRTALTNQLTSLLKESFPQALDWAGPLDSLRACDFLQHWPSLQLLQKTSTSQLRKFYRDHTRLDSEAIHQRLDQIRQAQPLTRDSAVLAAAELMIPALVRQLRCLIESIQQFDQQLKDRFQQHDDYTLFHSFPGAGPALGPRLLSAFGSNRDRFECAAEVQTLSGIAPVTERSGKSRWVHWRLACPKFLRQSFHEFAAQSILFSTWARAFYDQLRSRGTSHHAAVRTLAFKWIRILFRCWKNRTPYQEQIYLASLRRHGSPLCAALSPPTTGANL

SEQ ID NO: 128976 - protein, 320 aa, unidentified
MTRRGVMTECAVVVGIDVSKRELAVAVYPSDEQWTSGTDGPTIEVTVTRLQALQPTLVVMEATGGYEGPVAAACAAAQLPVAIINPRQVRAFAQALGRTAKTDAIDAQVLALFGARVQPAPRPLPTAETDSPAELVARRRQLLEMLHAEQHRLEHIATGPVARDLRNHIRWLAKRVSDVDTEINGRIQRSPAWRVNEDLLRSVPGIGPVVSRTLLAELPELGTLDRRAIAALVGVAPFNCDSGQFRGRRRIWGGRSSVRAALYMAALVGARHNPVLARFDQRLRTAGKPGKVALVAVMRRLLTIINAMIKHQSAWRPEPA

SEQ ID NO: 128977 - protein, 407 aa, unidentified
MICVGIDVSKRKSTVCFMAPGDKIIRRPFDVKHTKEELQPLVDEIRVQAKYDEIKVVMESTGVYHLSIAYFLQQNGIFVSVVNALKVANFNKAENFRHTKTDSIDSTNIARYGIAYWAKLPQFDLNGDKYFLLKRLCDAYLNFSEERSRILLQLQSQLEQTMPGIFDLFGGFDINSGKDKLLDFLEKYCHIEDIIAKPEAEFVASYCGWAKEKGYRSNESKAATIYAQAKNGIPSIPNNPIVRETIMWYVGLLRRADEALMASLTRMEDIAKDLPEYELVGEMGGVGRVTRVALIAQIGDVRRFKNKHSLICFAGLTPSIHESGKFRASQNHIVKKGPARLRKVLYQVMMSLVMHKIPKDDAVYRFIKKKEAEGKYKKVAKVAGMAKFLRIYYGRVMHLYRDLGLAA

SEQ ID NO: 128978 - protein, 342 aa, unidentified
MDHFAGLDVSVKETSICIVDDTGRIVREVKVASEPEALLQVLGNPIYRFKRIGLEAGPLSQWLFSALAEAGLPVICVETRHMRAVLQAQINKTDRNDARGMAQMMRAGLYRPVHVKTLRSQKLRMLLTHRKLLQSKAIAIDNDLRGTLRNFGLKVGVVGTVKFEARIKKLVENLPDLAVLVEPLLLVRRVLREQFSILHRRLLAIVRDDEVCRRLMTVPGVGPVVALTYRATVDVPARFRKSKAVGAVFGLTCSRYQSGEIDWSGRISRCGDEMMRVMLYEAAQSMMRSKKWSWLKAWAMQIARRRGMKKAIVALARRLAVIMHRIWVDGTEFRWTREAAVA

SEQ ID NO: 128979 - protein, 425 aa, unidentified
MREHDTRAEAGTVNPPGRGTMFEIEDVGAFLGLDVGKSNHHGHGLTPAGKKVFDKPLPNSEPKLRAVFDKLTAKFGTVLVIVDQPASIGALPLTVARDAGCRVAYLPGLAMRRIADLYPGEAKTDAKDAAVIADAARTMPHTLRSLELTDEITAELTVLVGFDQDLAAEATRTSNRIRGLLTQFHPSLERVLGPRLDHQAITWLLERYGSPAALRKAGRRRLVELIRPKAPRMAARLIDDVFDALDEQTVVVPGTGTLDIVVPSLAASLTAVHTQRRAMEAQINTLLEAHPLSPVLTSMPGVGVRTAAVLLVTVGDGTSYPTAAHLASYAGLAPTTKQSGTSIHGEHAPRGGNRQLKRAMFLSAFACMNADPASRAYYDKQRARGKTHTQALLRLARQRVSVLFAMLRDGTFYQSRTPNDVELAA

SEQ ID NO: 128980 - protein, 369 aa, unidentified
MILLGADTHKHTHTLAAIDAPNGQLLDDKTIPASKTGFVELLDWARDLGDPERVWALEDCRHLTGPLERFLTGTGERVIRVPPNLTARERGQERARGKSDPIDARAIARATLREGVETLPAAHLDEGSMEIKLLLDHREDLTKACSQDQQRLRWHLHDLWPELKIPAGALDRAVWLERIARKLTRAGQSVRVRIARDLVRSLKQHTRRARELAREITTLVEVKAPQLLELTGCGALTAAKIIAEIAGVGRFSSDAKLARLAGVAPIPASSGKNSRHRLDRGGNRQLNCALHRIAVVQGRTHEPARTFLAKKETEGKTRREALRALKRHLARVVWRALQQAAGGQEATRPPETSLPTGLRPEPESTPALT

SEQ ID NO: 128981 - protein, 339 aa, unidentified
MKLYTGFDLHSTNNYLAIIDAKGKKVYKKKLRNDPDCILTALRPYKDDVTGITIESTYNWYWLVDLLMEEGYKVHLANPAGIQQYKSMKYRDDKDDAFWLAEMLRLGILPEGYIYPKEERPIRDLLRKRGHLVKLRTSLILSLQNIISRNNGFKMKANDMKALKTDRVAPFLSNNEDLALAGKVSKEAIDFFTRKIKVIEAAVQKRMTLEDPYTSLLTVYGIGKILSLTIKLETGPIERFKKAGNYVSYCRKVSSKWISNNKKKGKGNVKSGNKYLAWAFSEAAEIARRSYPEARAYYNRKMQKTNFMVAHNALSHKLAKAAYYIMKDGVSFMPEKIFV

SEQ ID NO: 128982 - protein, 371 aa, unidentified
MNTVINIGIDVHKDSYSLSAFTFNNRQCFGQTRIASKSSLVIKYVNRMKQEHQDAQVVCGYEAGPTGYGLYRDLEKAGIPCAIMAPTTMPKASGSKVKNDRLDAQDIAKHLAFGTYSSVHVPTAQDESVKNFTRLRNTRKTALKKAKQNLLSFLLRCDRSFNEGKTHWTKIHFTWLKQQKFDNWVDQETFNEYLQEVHDQMEKVARYDQRIEELASMDCYRENVRKLCCFRGIETHTALSLISEIGDFSRFLNARQFSAFLGLVPSEESSGQKERRGAITKAGNTRLRLLLIEGAKSTLRSNIYGKKSKRLLARHKGNPPDVIAYADRANRRLHKSYDRLTARGVHHNKATVAVAREMACFVWGMMNDRMD

SEQ ID NO: 128983 - protein, 313 aa, unidentified
MDAIFVGIDVSKDRLDVALRPTGEHVAVARDAHGLAELIARLRPLAPAMIALEATGGYETIVAASLAAAGLPVVVVNPAQVRAFARAIGKRAKTDPLDASVIAHFAEATKPPVRPLPDTDTQRLADLLARRGQIIEMMGAERQRQKRLTETRIQKSIVRLLAALQKELSELDTEIDGAVRNSPAWRDKEDLLASVPGVGKIIARTLIAELPEIGTLDRHRIAALAGLAPWTRQSGQWKGRSFIGGGRSRVRAALFMGAMVAARHNRVLKAFHDKLLAAGKPKLVALIATARKLLTILNAIIRDATSWQEIKHV

SEQ ID NO: 128984 - protein, 396 aa, unidentified
MSVVVGIDVGASKHVAAVCRADRQRAERSLLRYRNNRSGFEELDHWLQSQGTVEQVVMESSGHYWLPLASHLRHSGHQVAVVNPLEAKYFAKRRLQRTKSDPADARTLAELGVRDQPPAREPLVGVEVREAARFCIRLVEDQARVCQRIRRLVEISFPELGEVFEDPTCETALAVLRQAPTARSAARRHLNTLANSVRPGGRRRLGQVKAKRLQELARETIAPPELDAQAGLEVQLLIEQYDLLGRQIEIAERRVAEMLDGELARRLQTIPGVGPATAATLMAEIGDIRRFDDVDQVAALSGVHPAEKSSGRKGAREGTSWHMAKTGNPYIRAALYRIAVSGLKHNPVLRQHYAKKRAAGRSPMNAIGHCMGKALDLVWGVWRSDRDFDPNYRVRT

SEQ ID NO: 128985 - protein, 343 aa, unidentified
MQAVKIIGLDIAKSIFQVHGVDANGQVAIRRRLKRRYVLAFFQKLPSCLVGIEACATSHHWSRELQALGHTVRLMPPAYVKPYVKRQKNDATDAEAICEAVSRANMRFVATKTPEQQSGLVLHRTRHLFIRQQTSVINAIRAHLAEFGVVAPVGRTGIEHLLSVIADVSDKRLPEVARACLLALGAQLRALKAQLLELDRMITAWHRSNETSKRLDAIPGVGHVLATALVASIADPKVFRSGRDFSAWIGLVPKQHSSGGRERLGRISKQGDRYLRSLFTAGALAVIRYAKIYGTKHRPWLTALLARRPTKVAAIALANKIARMAWAMMTKGERYKEPIALAA

SEQ ID NO: 128986 - protein, 403 aa, unidentified
MNSVGIDISKGRSTIAVMRPFGEVVISPFEVRHTGSELSKLARQLKSLDGETRVVMEATGNYHASVAKLLHDAGLYVSVVNAKLVHDYGNNELRRVKTDRKDAVKLANYGLDRWLTLPRYIPEEDTRLLLKNCYRQYRQYSKVQTVLKNNLISLLDTVFPNANRLFSSPIRGDGSEKWVDFVAEFWHCRCVSEKSERAFTSKYLRWCRKHGYNFSEAKAHTIYAEASGHIGVMPKSETTKLLVEQAVSQLRATSTALAALKHEMQSLASQLPEYPVVMDMFGVGPTLGPQLIAEIGDVRRFYSKKALVAYAGLDAPPNDSGDVTGRHKSMSKIGASSLRRTLFLVMSVYLQTAPLDEPVYQFMDRKRAEGKPYRVYMMASANKFLRIYYATVKAYLESLEHTA

SEQ ID NO: 128987 - protein, 432 aa, unidentified
MTMWVAHPQPLTLGATAMAAGHVGGGPRLVDKDQALGFQIDLAVEPVVTLLQDVGTVLLDSMASLYGMARPFSPASDMMLVLEEERSGPMSIVILGVDLGKNACSVVGVDAAGAVVVRRSMRRQTLVDYVAKLPVCVVAMEACCGAHYLGRLFAAHGHEIRLMSPEYVRPYVKAQKNDDRDAEGIAEAASRPTMRFVELKTQEQLDIQTLHRVRSRLVAERRSLTNQLRAILLERGTIFPVGRRKLELGIDALLADEDTTLSPRLRQLVAELRAEWRELDTRVEALNGEFVELARNDAAARRLTSIPGVGVLNATALIAAVGDASSFAKARDLGAWLGLVPRQHTTGGKPRLLGISKRGNTYLRTLLIHGARAALPSLARSETPLGRWLTGMIERGVHRNAIVVALANKLARIAWAALRKDATFERGYPVAA

SEQ ID NO: 128988 - protein, 391 aa, unidentified
MVCVGIDVAKDKHDCCILDSDGTIRADCITIPNNMDGFKQLLQTIRDCTKKSDKIKVGLEATGHYSYNILGFLLDNDLAVYVMNPLHTNLYRKSLSLRKTKTDRVDARTIATMLLSDVDLKSYTDTAYHNEELKSLTRYRFDKVRERAKLKQSVSRLVTILFPELEKLVPSLHIASVYALLSEYPGAKQISEIHLTKLTNLLATASKGRYGKDKAIQIRDAARTSIGSVMPAKFLELKHTIKLIRELTSEIDEIEVSIQKIMDELNPPILSIPGVGIQSAAMILAEIGDFSNFESPDRILAYAGCSPSTYQSGKLTNCYAHMEKRGSRYLRYALYNATKYVCHWNPVFAEYLAKKRAEGKHYNVALSHATKKLVRLIYALQKSGKAYLVAA

SEQ ID NO: 128989 - protein, 344 aa, unidentified
MNIATIGIDLAKNVFQLHGVNSHGKVVLRRQIHRGQMRGLFVNLPPCLIGMEACASAHYWARTLESYGHTVRLIAPHFVKPYVKTHKTDATDAEAICEAVNRPNMRFVPIKSIEQQSALSLHRVRQGFVRARTAQACQIRGLLAEFGLVMPRGIANIKQVPKLLQVAGEELPAPFCRLIERLLAHLKELDRQTRELEQQIVDWHERSEPSRRLAKIPGIGPITASALVASISDVRSFKNGRELAAWLGLVPRQHSSGGKPTLLGISKRGDRYLRTLLVHGARSVIVRVLKREDEKDGWLKKLLERRHVNIATVALAHKTVRTVWAMLAHDREYRPNYKSLPVAA

SEQ ID NO: 128990 - protein, 411 aa, unidentified
MGLTCGIDWAEGHHDVAVVDESGKVLAERRIGVGAAGFADLLDMLAECGDSPAQLIPVAIESSGLLLVAALVAGGRMVYAINPLAVSRYRDRHRASRAKSDSGDAIVLANILRTDAHAHRPLPSDSDAVKALRVLTRAQQDAVWDRVGLTNRIRGALRRYFPAAIAAFERGGKHRLDSAACRVILRAAPTPAVASKLSIARLQALLRRAGRVRGIDAEARRLQGYLTRAELRQPFQVEEAMGIQLQMLVDQLDALCQAIDVLTTAAEQLFVAQPSAAIITSMPGAGPITGARLLAEIGDDPNRFQDARALKSYAGAAPITRASGKTHHVGYRRAKNDRIASAGYVWTRAAIQHDLACRSYYQARRRSGDRHVSAQRNLFNKLLGKLYHCLQTQQRYDSATAFPHHQLPTAA

SEQ ID NO: 128991 - protein, 323 aa, unidentified
MNKDIKYFGIDISHLVFDVTDSDGNYYQFKNNEFGFKKFAKLLNSDSHCVMEATGYYHYQLAYHLLESGIKVSVENPLSVKRFIQMGLSKIKTDKSDSKLICSYAEQVELKLWKGSSKDEIECLQILRTLSVYTKQSTMLKNKLHGEAVLGNPSKAVVRSLNRSLKYLEKEIKALEDKLLVLVKQVHQDLLTRLKTIPGIGSKTAIMLVVLTGGFDRFKSASELCSYAGLTPVIRQSGTSVKGRPRISKIGNQKLRNLLFMCSFNACKYNKACRDLYERIVAKGKSKKLALIAVCNKLLKQAFAIAKSGLVYDGEYKSTLVKN

SEQ ID NO: 128992 - protein, 350 aa, unidentified
MIIIGCDFHTRYQQIAMMDTETGELVERRLEHENGEARAFYASLPKPVVVGMEATGYAQWFERMLAEFGHELWIGHASEIRAGVVRKQKTDARDALHLLHLLLEKRFPRIWIPSPAERDTRQLLRHRHKLVCFRVSVKNQLHALAMSQGVCRKKKLFTARGREVLEKLSLGPWARRRCQELLGMLDQLNTVIDELDRAVQQQAESHAEAARLMRHPGVGPVTALAFVLTLGPVTRFRRSKHVVSYLGLNPKERSSGGKQRTSTISKQGNAMMRWLLVEAAQTAARYDPELLRLYQRLKFRRGANVAKVAIARKLAVKLYWMLRATASCAQRAPMQGSSRGTLVPQAGSSF

SEQ ID NO: 128993 - protein, 457 aa, unidentified
MATPEKVDVWVGLDVGKNEHFAEVLDDHGDRLFSRAVGNDQAAVERLLDQAAGYGTPGLAIDQPGSIGQLALAVAARRGTPVAYVPGLVMRRAADLYPGEAKTDRRDAYVLADTARTRRRQVHWLDTSSDELLARLRVLNGFDIDLAADQTRLTNRLRDALTSIAPALERALGDRLHPAGVRDLLARYPTLTALRAAGPIGIEQAIAARSPRVAGKVTRAVQAAVAAQTITVPAEAVTGRVIAELASELDRVCTRRDALAKEIGEAFLAHPFGELLATLPGIGPRTGARILTEIGDGSAFATGSKLAAYAGLAPVTRQSGKSLAAETRSRRGNHRLKNALFLAAFASLRSPDSKAFYDPQTGRRQTSQRRPHLPGPPTLRRHPGHAQDPPVLPARCPSNAAGQRRLTRRPAAADRTSLVQPGHVHTAPHSPQPTSRLDNKMGTPPDNFPLVACGACR

SEQ ID NO: 128994 - protein, 411 aa, unidentified
MQVVHERCCGLDVHKKTVVACILITLANGEVQRHIRTFSTMTAGLLALSDWLESLAVTVIAMESTGIYWRPVFNLLEEGRSVILVNAQHMKAIPGRKTDIKDSEWLADLLRHGLLKASFIPPAPIRELRDLTRYRKSLVQERAREVNRVQKVLETANIKLSSVATDVLGKSGRDMLSALIEGTTDVEILAELARGKLRKQLPQLQQALDGRVQAHHRLLLKHLLAHIIFLEETLEQLQQEIEQHLCPFEETMTLLMSIPGIAALAAAAILAEIGDDMTRFPSAKHLASWAGVCPGNKQSGGKRLSGKTTQGNATLRAMLAEVVWVLSHMKDNYLSAQYHRLARRLGKKKAVVAVSHSLLVIIYHVLSTKQPYSDLGADYFEQRDSARLTQRSVRQLEALGYTVTLVPKEAA

SEQ ID NO: 128995 - protein, 339 aa, unidentified
MQLYAGLDLHSRNTYIGIMDKEFKRIFNKRVSNSLSLILTTLKPFQDQLKGIVVESTFNWYWLIDGLMDAGYQCVHLANPSAMKQYEGIKHTDDQHDAFFLAQMLILGILPQGYIYPKEDRPVRDLARKRLFLVRHKTSHILSLQSLIARCCGQRVSANEIRKFTVEDLQRLLEQEYIVLSAQANLDTIVFLKQQIQQLEKAIQKKVKLNKAFQQLLTVPGIGLILAMTIMLEVGDIGRFPQVGNFASYSRCVPSNRLSDGKSKGHGNRKNGNRYLSWAFTEAAHLSRRYNESFRSYYNRKVAQANTSLATKALSNKLARICYYLMRDQVPFRQELLSH

SEQ ID NO: 128996 - protein, 330 aa, unidentified
MKTTVANFFLGLDISKGSFHAALQMAGRSQCMEHSFTNEAQGFKQLERWLRALGVPPKQVHACMEATSRYGEALAESLHAYLGSVSMVNPRLVKHYAKACNLRAKSDSADARLLAQFCAERHPRPWTPPPEERRMLQEMTRRLGQLRAAQNAEYNRLESVRTEVVRRDVQQHIAELQERLDELQEAVARHIAAHRTLREQEQLLRSIPGIGAKTAAVLLSELPAHLQQHYGSARQLAAHSGLTPRHHQSGKHAAPTPVCRIGSSRLRASLYMSALVGSRCQAFAAFRARLIARGKKPKQAICALMRKLIHIVFGVLKNQQPFNPNMLVPS

SEQ ID NO: 128997 - protein, 434 aa, unidentified
MMRGNEQEPSLKEKRRCAMKMPPPAPSSEGAVIKYVCGIDIGSQCCVGCICRPDKSVVIKSITFANAREGWQIWEEKLKQLDAPAGEILIGMEATSRYGENLYQELEQRGYVLRLFHPGQTHHFHQQRGLRAKTDRLDAMTIARALLSGEARMGYVPDEQVATYRELVRLHTQLSDTAASYQNEIQALVVVLFPEFTQVKASPCLPTALAVLKAFPSAQALVEAGVEALVQVLRAQPAAHYGRPTAKKLVALANQSVSSGRARAGRSTSLRILCDQLEHTQANLARLNTEIEQLLNTDPGVKGLQQVPEFGPKTLAVLRAELGDVQRFSRIDEVIAYGGMDIEIKESGLWKGKAKLSKHGSGLLRRVLYMSALRCIHRKESAFGAYYQRLVQRGLKKGSALMAVMRKMLAVAAHFLMHEDEEYDRSLVCGSAAG

SEQ ID NO: 128998 - protein, 346 aa, unidentified
MRILYCGIDAGSSHCHFVVMDKDGEYVVDTEISTSELHLSAFLDSLQKDDEKVKVHLEAAELSGWIRGIIMERTDIKDVVVSDPKRMSWIAKDPHKKDPIDAYKLAELLRLGRTHPVYYSDDKKMRFFKSQVQYQESLSGEKARIKKKIKAALRRIGIIFKSNEAYSKRRRPEILRSIEETTYRASVEDLYELLDKTQALCRKAEKRLAKAAENWPIIEYFMEVPGVGLILSCRFVAYVQTPCRFATKQKLWTFSRLGLSHRSSDGKQLSAPRLDHNGNGTLKDLSRKVFEGAKKRDDDNAFKRAYYRYLKTTNNEMHARLTVQRKVLTTLWTMWRNNERYDDRRG

SEQ ID NO: 128999 - protein, 391 aa, unidentified
MIYIGIDVAKDKHDCFITNSEGEVLFNAFTIPNNADGFHDLFQKISSLTNDFSNVKVGLEATGHYNYNLLGFLIDKGLPTFVINPLHTNLFRKSLSLRQTKTDKVDAHTIALMMMSGVNLQSYSDTSYHNEELKSLTRYRFDKVQERAKLKTSISRLVNILFPELEKLVPSLHMVSIYALLAEFPSSAQIASCHLTRLTNLLANASKGHYNKEKAIEIRNAAKHSIGSNMPAKSLELKHTIRLIQELTSEIDEIECFIKSIMDEIRSPILSIPGINYRMGAMIIAEIGDFNRFSSPDKILAYAGLSPSTYQSGQLDGCYSHMEKRGSRYLRYALFNATKFVCIWDNQFSAYLAKKRSEGKHYNVAISHAAKKLVRVIYQLEKSGQLYHRAA

SEQ ID NO: 129000 - protein, 361 aa, unidentified
MALLTAFTACKSSENSGQAFKVGCSQRIRKRKAATRSMNYAALDLHERTVQCVLKNQDGRIVKESKTVKDEGRILSFLEGTDASVVMESGRNHQHIYDVLKERGYDVTVAHPLMVKAIAYAKVKTDRVDARVLADLLRADMIPESYVPGRDIREIRDLVRRRHYMVKLRTMQKNKVHAELATRWLKYEGDPFTEDGKVYLRSLAIDAVNDYLETIEFLNRKIHQLDEKVRRVVESDRYAKLLMTVPGISYYSALLISSEIADIKRFPDHEHLCSYAKLSPGVRQSGETQHTSKSVGNSLMNWIMIQCTRVHVRKYDSAITRFYQQVSKRRGEKVAIVAAARKLMRAIYIMLKEEQAFRLDG

SEQ ID NO: 129001 - protein, 374 aa, unidentified
MAQLHELTGRYLGEDGGDAQVAAGIETDRGPWVAALVAAGYVVYPVNPLQASRYRERHGVSGAKSDQGDSHMLADMVRTDSHQLRPAAGDSAEVEAIKVVARAHKTLIWERTRQVQRLRAQLREYFPAALEAFEDLDAPDALELLGKAPDPARAVRLTRAQVSAALKRARRHHIADKTTAIIAALRGEQLAQPPALTAAYAAAARALIAVITTLNEQVKALEGQVGEYFGQHPDAEIYRSQPGMGAILGARVLGEFGDDPHRYTDAKARKNYASTSPITRASGKKKVVAARFIHNDRLIDALMSWAFSALNASPGARAFYDEQRAKGLEHNDTLRRLANRLVGILHGCLKTRTPYDEATAWSHRENLPQSGVAA

SEQ ID NO: 129002 - protein, 340 aa, unidentified
MNVTTIGIDIAKSVFQVHGVDAVGQVTVTKKLRRAEVMRFFEAIPACLVGMEACATAHFWARELSALGHQVRLMPPSYVKAYLRRQKNDAADAEAICEAVTRPTMRFVPIKSAERQGVLVLHRTRELLVRQRTMLINAIRGHCAEFGIIAPQGARRACELVEQVRQAPATELPELARSALLRLAEQLSTLATEIHGLERRLLAWHRQDQASQRLATIPGIGIITATALSAAVTDPGLFRSGREFAAFLGLVPRQNSSGGKDRLGRISKMGDGYLRKLLVVGATSVIRRARTGASASAAWINALLERRPARVVTVAMANKNARIVWAVLKRGEVYRPPVMA

SEQ ID NO: 129003 - protein, 364 aa, unidentified
MLYLGIDQHKRQLTVNLRGEDGMVIHTRQVSTQWEKVRAFFANLADKARPEGGFLAILEVCGMNPWLLKMLAEYGCRETVVIQPTERARQKTDRRDAAELSHLLWVHRHQFLKGKHPQGLRRVQPPTAQEADDRQLTTLRALLTKKRTAVLNGLHKILRKHNLEQAQPTKGFQTQAVRRWLEELELPAVDRLEVNFLLPQWDLLDEQLKSVEAKIAERAAADEEVKLLETVPGLSHYSAVAIRSRIGDIDRFKRPDSLANFLGLTPGSNNSGEKTQRLGSITKRGSKMVRWLLGQAVIKVLRFDGVMRAWYKRIKKKRGSKIARVAVMRRLAVILWHMLKKRQRYRYDPPIKKHQEFLAYEGAA

SEQ ID NO: 129004 - protein, 334 aa, unidentified
MKKRYFMGIDVAKATFDFCLLSRSGACLWRGQFSNDARAIERFFHQLRAGGWKPEQIHFALEATGVYGQRLIAALHQAGLAVSVLNPAQVKYFALSVLRRTKNDTVDAEIIARFCRERKPLATRALRPIETQLKLLVHERESRVVEQTREHNRAKQDPYQIELPKLISRQRQQRLKQLQKELAQLDAEIDSLIANDQRLKTQSQLLCSIPAIAKLTAAKLLAELAGKEFQSARQLGAYAGLTPAECRSGYSLYGKTRISKIGNALLRKALYMPAAVARRWCKPLQPWIAILQSRKLHDLAIRGAIMRKLLHIAFGVLKHQKPFNPMLASIPKTV

SEQ ID NO: 129005 - protein, 356 aa, unidentified
MSEGSWVGLDVHARSVVAGVIDATTGEVRSLRLPPGGEATVAWLQTLPAPVRVVYEAGPTGYRLARACADAGINCLVAAPSRVRAAADRVKTDRRDAERLARLLRLGEITPVRIPTLEEEGARDLVRAREDARGDLMRARHRLSKLLLRHGLVYDATAWTRTHDAWLRRQRFDGGPLAIVFDESYGRMIDAKSRRDALDNAIGGIATTPPYVDVVSRLVCLRGVSTLTAFALTVELGDWHRFRPESLGPFLGLTPSEYSSGERRRQGAITKTGNSHVRRLLIEAAWHQRSPSRRSVTLERRRDGKPLAVQAQAERSARRLHTRWHALEARGKPRSIVVVAVARELAGHCWALATME

SEQ ID NO: 129006 - protein, 352 aa, unidentified
MFSVGLDIHDQRIAICVLSENGQVARRAQVRTIDEMMRILEALPDRFAVCYEASCGYGHYHDTLSPIAARVTVAHPGHLRLIFRSRDKNDRKDAERLAKLLYLGEAPAVHVPAGEVRTWRELITCRSRVVAKRTRAKNSLRTPLRCAGVVPPGRPALWTKKGLEWLRRLELPTESQRLRRDLLLEEIEALTRQAERIEGHLNQQAKHSPAVLRLRSVPGVGVRTAEAVAAFIDDPHRFRDAKAVGAYFGMVPSQDQSGDRNRLGHITREGPAVVRQLVAEATWQAVRRSPTVRAYFERVRRDDPQRKKIAPVATAHYLVRVMWALLKRGTTWEEGVAPAEEPKGHMQAIAMI

SEQ ID NO: 129007 - protein, 402 aa, unidentified
MRFTGIDIGAERHMVAIVDESGAVLLRATSVTEDATGYRRLLELLGDAGDCLVAMEATGHYWRNLYAALATAGFTVALLNPLRTSRFAEEELQRTKTDAIDALGIARFAAQKRPAATRLPEAALEELRELVRLKEQIVQQFGDRVRQLHRAVDLGFPEFTRHVRTLQSELATAILSRYPTAAALRTASVSKLARLCYDGSHHVSEALARALIEGAKQSVGAHHSEPYQLEVRYACEDIDLLRRRLRALEGDIERRLGQHEVGKLLTTINGVGPQTAACIIAEVGDPLRFHSARALASYVGVIPRLHQSGKRKFSASAKVPLGNARLRRALWMPALTAIHHNPWLRAYYQRLRAAGKRPKVALVAVIRKLLAAVYSVAKHRRPFVLPPIFTPAAGGAVVPAAQ

SEQ ID NO: 129008 - protein, 348 aa, unidentified
MRFYTKQHKYYCGIDLHARSMYICIVDEQGKTVFHRNRKASAEALLKAIEPFREDIVVAVECMFVWYWLADVCAKEKIPFVLGHALYMKAIHGGKSKNDKIDSKKIATLLRGGNIPMAYVYPRKMRSTRDLLRRRNHLMRKRSELLAHIQNTNSQYNLPEFGKKLAYKANREGVAEHFPDPSVSKSIEVDLQLLDFYDQLLNDLELYIVKKAKVDDAYSWYRLRSIPGVGKILGLILLYEIHDIKRFPRVQDFVSYCRLVKCPRESAGKKFGTKNSKIGNAHLKWAFSEAACLFLRGNEQAQHYHARLVSKYGKGKALSILAHKIGRAAYFMLKRKEPFSMKVFFNET

SEQ ID NO: 129009 - protein, 330 aa, unidentified
MTYIGIDVSKDTFTVAYSSDKNSKTKTFKNTVKGIHEFIQTISKEDTHCVLEATGNYSALLVYLFSKAGITTSLENPLKIKNFARVMLSITKTDDIDARLIAMYGEKMNPSPYKLKDESILVLKQKRTVLRQLKKQLVATRNLKGSMEVLPFVDSTCKRTIERTIEFLEKQIRNMEENITSLANQEYKKQMDLLTSIKGIGVTLAAALIIATGGFTYFDNAKQFTRYLGLSPTYQQSGTSVNVKGHINRNGDSTLRSQIYVAAFASLRCNSECKECYDRLRSNGKPGKVAVIAVANKLVRQAFAVVTKEKEYVDGFISEKPQKLQKHISA

SEQ ID NO: 129010 - protein, 428 aa, unidentified
MADPANATPACTLVAIDIGRYGNAVLIEATSGKRHRFKMANTAADFGRLLGFLHGLPGNCRVGLEPTGDYHRPLAHRLLRAGFEVVSINSVALSRYREAIFNSWDKNDPKDAGVILEMLRRGDVQRYVDPIMVGTHDLQELAKTYYQVSRARTKVQHSLINHGLTLYFPEMHRYWCTTRNDWFVRFLLQFPTPAHVRSLSCAEFVDAAWDVVGRKVNKRAKLEEIWEMAGATAALPHAPDSLAVETFRITLRRYQQLNALRAELEVRAEQALASNEDFAHLKTLPGIGSVIAMTVLAEGGDLRRFGHHRQFLKYCGFDLAKNQSGTQRGKEQLSKRGNARLRLAFWLAAVAAVHMKENSFRAKYERYIRAAPEDPDLRRKALTAVAAKMARVAHGMIKKNQPYRQFFEQSLPSGSIPLSAAVGAHATP

SEQ ID NO: 129011 - protein, 326 aa, unidentified
METYNNYYGVDISKLTFDIVDQKGKHSCYNNDKKGFAKFYKTNIKDGLCVMESTGIYHLELAKFLHSKSVATSVVNPLKIKRFSQMRLSRNKTDKADAKIISLYAQTQETDLWKPSPKEVEECKDTYQVMEQHIEFRVALKNKLDALKTKKAPKKLIQSVESKIDMLSVWIDELQKEADNLVKSYKPEMLKNISSIKGIGKRTASLLIVAAEGFSEFENAKQVCSYFGLAPTETSSGTSVKGSRRISKMGNPLVRKKLYMCSLQASRYNKSCKDLYQRLLAKGKPKKLALIAVANKLLKQVFAISKSGLPYDDEYLSANRQVNRFV

SEQ ID NO: 129012 - protein, 414 aa, unidentified
MEWVACVGVDWGDQQHACMVQSREGTRKATRLGNSPEEIHQWIRQLREQYPNGTIVVALEQGQWSLIYALMVYEFVALVPLNPRASKAYRESLRLSGASDDASDAALICDFVIKHVDELRVWRADDVRTRKIRMLSEQRRSLVDQRTAFTHALSATLKEYFPQVLQWFGSETSPHLRAFVSRWPTLEQARDASEDQLTATLKSSGKRKASVAAREVKEKIRAAVALTYDRAIIEVQSLHARSLIALIEPLDEQIAKYDQAIAGTWADYPDREIFDSLPGAGAVMAPRLAVAFGLDRSRYDDAREIQNYSGIAPVTEQSGRQRWTHARWGFPTFLHQTFHEFAQASLPKCKWAKSFYDQQRERGAAHHQAIRSLAFRWIRILFRMWKTGQPYHDARYVEALKQKHSSIADRLAAA

SEQ ID NO: 129013 - protein, 352 aa, unidentified
MMKPSKAQPIKFVGIDLAKRSFHLYAADEAGRAVLSNKLTRARLPGFVAQLPACTIAMEACGSAHYWARRFREYGHEVRLIAPQFVKPFVKSNKNDAADAEAICEALQRPNMRFVAIKSVEQQDIQAIHRMRSLTVGQRTALINQTRGLLLEYGIEIAQGRAALQRRLPEILEEAKNGLSGRFRAELHGLFEELQHLNARVAHYDAQIDQMAQESQQAQALMQLPGIGAKSATALLAAVGEDPKLLKNGRGLAAWLGLVPRQPSTGGKDQLLGISKRGDVYLRQLLIHGARSVLRVAERKDDPLSRWATALKTRRHSNVAAVALANRLARIAYAILTTHAPYDPEKLASTAV

SEQ ID NO: 129014 - protein, 342 aa, unidentified
MDELHIVGIDLAKQTFHLHGAKQDGTVLFRKKLPRAQMTKFFDQLEPCTIAMEACATAHFWGREMEELGHVVRLIPPRYVKPFVKRQKNDSNDAEAIVEAALRPTMRFVSVKSPDQQSLAVVYRSRDLLVRQRTQLVNALRAHLAEFGVVTGKGIIQVKKLAAIIEGEDCPLPDTVRGVGVIYLEQIGQLTDQIQGLEVTIRKSARLDAVSVQLQKIPGVGPIGVMALEAFAPPMQCFQSGRSFAAWLGLVPQQHSTGGKAKYGRASKMGQADIRRHLVAGAMSVIHWAKSRGFAGNTWLERLVGRKPTMVAAIALANKMARTIWAMLSTGEEYRMGGVAAA

SEQ ID NO: 129015 - protein, 343 aa, unidentified
MNSTVISLDLAKHVIQAAKFTQDAVMQFNKPMSPDAVIQLLANTKPCIVAMEGCGSFHYWGRVAERFGHTVRAMPPIKVKPFIGSQKTDANDAVGIYVACRQPGMTFCPIKSVEQQTIQSIQTSRRMLERTLKSTGNHIGALLYEYGFVFAKGKKALREAVARYLAPESETLNPAVKAVLTTLWEQYQATEKHFDMLTKQLNQHVMQTEPCKRLMKLEGVGEIGAAGLYASLGDGSGFKSGRHAAVYVGATPKQHSSGGKVVMLGIDKKGGDKSLRATLFIGALSAICSLPAEPKTEKQRWLIALVKRVGTKRACIALVNKTVRTAWALLRYSQPYQPTPLMA

SEQ ID NO: 129016 - protein, 314 aa, unidentified
MTSLVCAAGIDVGRDHLDFAVAPIGVVRRVRNEGRGIVALIGQLRRDDVVRVVLEAIGPYAARLVRALTEAGFEVGVVDPRRIRAFRTAEGRRAKTDRLDAQLIARFALAMPDVVRPVPDARAQQLRALSARRRQLVELIAMEKTRLKQAPDENVAQSHRLLIAGLGAERARIEVAIATALREAGATDRLALLQTAPGVGPAVAITLLADLPELGRLDRRAIASLAGLAPHIAQSGLDRGHAAIAGGRPCVRAALYLAALSACRLERGYRRDYQAMRQAGKPAKVALIAVARKLLVALNAMMRDNTPWAPIHPA

SEQ ID NO: 129017 - protein, 358 aa, unidentified
MDEQVPRVVIGMDPHKRSVTIEVMLADESVVGGGRFDTTVEGYQAMLASVAAWPQRVWAIEGCEGIGRHIAHRLLADGQDIVDVPAKLSARARVFATGQGRKTDATDAHSVALVGTRMAGLRPVVSDEQLEVLQLLVDRRRSIGDEHTRKISQLHRILLELLPGGAKRYLSAAQARVLLAGVRPRDAVGKTRKRVAAELVSDLERIYARKKAADKELQELVAATGTSLLGLHGVGPSGAARLLVEVGDLSRFPDRNHFASWTGTAPIDASSGDHVRHRLSRGGNRQINRMLHIMATVQLRTPTEGRAYFDRKKADGKTSMEAMRCLKRRLSDIVYRTMLGDFVAATATGPGGHPGQRL

SEQ ID NO: 129018 - protein, 473 aa, unidentified
MEDVIRFVGLDVHKNSISVAVADGGLRGESRFVGTIANTPAAFGKLASQLSRPGVRLRFCYEAGPFGYGLWRQLTGLGHDCVVVAPSLIPRKPGARVKTDRRDALALAALDRMGALTAVWMPDADHEAMRDLVRARAAAVRALRRSRQQLSGFLLRHGVVRPGKNWTMAHRRWLSTIRFDHPTSQIVLQDYIHAVEDAGARRDRLTGQIEELLDDWSMAPVVKALQAMRGIALIVAVTLVAELGDLTRFDNPRRLMAYLGLVPSEHSSGESVRRGGITRAGNGEARRVEAAWTYRLPAKDIGRPPQATAGAAQGGARYRLEGRSPAMRAPPSATRGWQAGQSGQRRHRPRDARLRLGYCPACQAAPGGLNPVALNGHEREEDRQANRQPASGHAWRRKHGQGNPRRLYERNIVSTLDHRTRQPRDEPRVRRFKPAHQRVINRRYDAPVSCHARQLYAQPAPHEAVNVKYCPVT

SEQ ID NO: 129019 - protein, 337 aa, unidentified
MTVTTVGLDIAKRVFQVHGVNEQGAVVLRRRLQRDEVAPFFANLPACRVGLEACGGSHYWARRLSSVGHTVRLIAPQFVKPYVKSNKNDANDAEAICEAVSRPHMRFVPAKSVEQQDIQCLHRVRSRLVSARTQLANQVRGLLAEYGIVLPQQIQQLRRGLPLILEQDNELTPFTRRLLASLYDELLDLDSKLAAIEEQVRAAHRASESSQRIAEVEGIGPLTATALVAALSDGKAFQNGRQFAAWLGLVPRQHSSGGKPRLLGISKRGDAYLRTLLIHGARSVVYRAAAKEDQRSRWITDKQQRLGTSKACVAVANKNARIVWALIARNESYQRAA

SEQ ID NO: 129020 - protein, 337 aa, unidentified
MKFCGIDLHSNNSVVVVTDETDRILVSRRCPNELTVILLLLEPHRDELIGIVIESTYNWYWLVDGLKAAGFEVKLANPVAMKRYDGLKHSDDKDDAAFLAHLLRLGILPTGYIHPPEERALRDLARKRIQLVRTRTQHILAVENIAARQLGHSLSCNEIKSLSATSVDSLGLPTDVALAMKANVAVVQALESQIAGLEGRLLHQVKLRPEFSLLKTMPGIGEILATVIMLETGDINRFADVGNFASYARCVKSARYSNGKKKGEGNAKNGNAYLIWAFIEAANFARRFSEDAKRFFERKKAKTNGVVATAALAHKLARASYHILKEKQPFDAKRCFA

SEQ ID NO: 129021 - protein, 525 aa, unidentified
MAKALRALFGNSVYPVWKSASERFKGRPELNINLPISLVQTMKTKKAKASRSHPARSGAKGPIRPAANMPIINGHAAGVDVGSVEHYVCVPADAVPAGQSNVRGFGGFTEDLNQLVEWLQGCAVTTVAMESTGVYWIALAQKLEAAGIEVVLVNARHLKYVPGRKSDVKDCQWLQQLHSYGLLNGSFRPAQDICAVRSLMRHRENLVASCGREVQHMQKALQEMNVHLHHAVSNLVGATGLRILDAILGGERDPKKLVELRDDLCSKTTAEELEKALRGDWRQEHLFVLEQALGTYRHLLGQLEKCEEQVQKALAEVVIPAAEEPESPAPPNPKAKESGQSKKKRFHPHKTGTGLKRDLTEELKRLCGVDLTKIVGLNVLSVLIIISEIGLDMSRWRSAKAFCSWLGLCSGNKISGGKVLDSRTAHVVNRVALLLRTVAPAVGKTDTWLGIFHRRMRARLGPAGANTATARKLACLVYHLLRYKEEFIDVDHLLMMAKLREQRVHRLRKQAEELGLEVIAKQPAA

SEQ ID NO: 129022 - protein, 425 aa, unidentified
MARRVREVAYVGLEAVLAYCCGLDVHKKRITACLLVGPVDQPPKELLSTFTTTTRGLTELRDWLISNGCTHVAMESTGIFWRPVFNILEGSVTILLANARHMKQLPGRKTDINDAQWIARLLRWGLLKPSLIPPKPIRELREMCRYRKKLTQEVSAEKNRVHKTLEDANIKIASVATNIFGVSGLAMLEALIGGDLSPLETAELARGCLRTKIPQLVEALEGEVGEHHRLLLRKHLDHLAYLNEVIAEMNRLIEEEMQPYQPHVELLRTIPGIDTVSAQQAFVEMGGDINVFPSEGHFASWIGICPGNNESAGKQRRARALKGNRWLCSLLVQAAHAAGRTKESYACAFYHRIARRRGNERAAVATGHYLAKCIYRVLKEGKPYEDPGADHFNKRHSDALKKQLLRSLERLGYQVELTPQPATVN

SEQ ID NO: 129023 - protein, 350 aa, unidentified
MNRTTVAVDLAKNRFELAIADSQCRIFQHERLTRARFVRFFSNYPTSLIVMEACGSAHHWARTFRDQGHEVRLLPAHYVKAYVRRNKTDAADAEALIEASRCAEIRPVPVKSVEQQAIQQLHRLRSQWIRTRTARINQLRAALREFGIFIPVGAKRAVTAIREALEEAGNGLPDVLRPFVLEVLQEIAQLEERNVRIDLTLRELTREDAVVQRLLKIPGIGLLTASALRAIIVDARRFPSGRHLASWLGLTAREHSSGERRCLGGISKRGDVYLRTLLIHAARSALLAAGRAARADRPLTRVQTWVLETERRRGHNKAAVALANKLARIVWATWAHDRAFNGNWNCAVMH

SEQ ID NO: 129024 - protein, 337 aa, unidentified
MDYFAGLDISMDETHVCVLDREGVVVRESKTASMAQAIADELAKAPSCRRIVFETGRMAPILFHGLNQLGLPVVCVESRQAYQALKSLATHKTDRNDARGLAHLARTGFFKPVHVKSLQAHALRSLISARKKLVGQRVTLENQIRGLAVVFGVRLPRALTTAFIDQALKASEGVAGLSAAMRGLSAARVAVMTAVAAIDADIRRMTRASAACRRLMTIPGVGQLTALAFVAAIDDPSRIRRSRDIGAYLGLVPRRYQSGEVDYTGGISKCGDGRVRTLLYEAANVMLTRYKGQLKLKDWAFAIAKRSTMRKARVALARRLAIIMHAMLRDGTEFAPA

SEQ ID NO: 129025 - protein, 344 aa, unidentified
MKVTRLGFDIAKRVFQVHGVDENGKVRVRKTLAREKVLEYFAQLPPCLIGMETCGGAHYWGRELTKLGHTVKLMAAQFVIPYRKRGKNDANDAEAICEAVGRPNMHFVAIKSVEQQSVLMVHRARTLVVANRTGQVNQIRGLLGEFGIVVPKGVARLRRELPGILGDAENGLPALAREVLAGLLDQFREFDAQVSAYDRQIRGLAEASEPARRLMQVEAIGPQTATALVASMGDPHVFKSGRSYAASLGITPRQHSSGGIDRLGQITRQGDSYVRTLLVHGARAYLRVIDKKTDGKSMWARRLKERRHINVVAVALAAKHARIAWAMLAKGTEYRPVGIEEAAA

SEQ ID NO: 129026 - protein, 351 aa, unidentified
MERFIGLDVHRDSCTIAVIGPSGKRLKSFPVETNGRAIVEAIRCIPGRRHICLEEGTQSAWLHELLSPHGEEVAVVVPEKRRGSKSDKRDAWTRAEELRTGAIETRVYKAPAHLSALKNAVRGHLMVVGDVVRVKNRLKAVWRSRGIRSTAGVYAPETRAGWIRQLPLAYRPLAERLGRQLDVLEPLREDAERSLLKEAKTHPIIRKLATAPGMGPIRSAQVVAVVATPERFRTRQQFWSYCGLAIVTRSSGDWAYVNGRREPREIQQTRGLSRKRNALLKQIFKGAATTLITLLHDDPLYQDYERMIGSGMKPYLARLTLARRISAIVLSMWKHQEVYDPSRHHVVVEQQ

SEQ ID NO: 129027 - protein, 359 aa, unidentified
MKDTTIAVDLAKSVFQVAVSHRPGRVDAERRLSREKFLEYFAKQPPATVLVEACGSAHHWARQLQPFGHTVRLLPAHDVHRYVRRSKTDRTDAKALLEADRNEEIHAVPVKTIEQQSIAALHRMRSTWLATRTSRINTVRGLLREFGIFIPVGAQHVVPQVRELLASSPHVPDLMRTSLSQACDEIQALAAQMRAVERQLIVLARTRDDLTLLQTIPGIGVLTATALVALVGDIHRFHSSREFASFLGLTPKEDSSGDRRRLGAISKQGDIYVRMLLIHGARAILLRAHGASAATAFQLWARALQKRRGHNVAAVAVANRLARIIWAVWTRQRPFAADYQSTRTTTMASAHQEDCTESN

SEQ ID NO: 129028 - protein, 342 aa, unidentified
MGEVVTVGLDIAKSVFQVHGVDAEGQVVVQRRLTRARLVPFFEKLPRCRVGIEACATAHHWGRRLTELGHEVKLMPPAYVKPYVRRQKNDAADAEAICEAVTRPSMRFVEVKGPDQQSVLVIHRTRMTLMRHRIELSNTIRAHMAEFGLVAPIGRMGLQGLIEIARDEADARVPANARICLKLLADQLDLVNRHALETDRMILASARATEVGRRLMAVPGVGPVLASAMVASVPDPHAFKSGRNLAAWIGLVPRQNSSGGKARLGGITKQGNRYLRQLLVVGALAVIRYAERHGTRRPWLVQLMARRTTKIAAVALANKTARMIWAIMTSGEAYREPVLKAA

SEQ ID NO: 129029 - protein, 331 aa, unidentified
MKIRETVGIDLSKSTLDACIHSNQLFAKFENSNKGFKELVKWVSKHSAHEASETLFVFEHTGRYSHNIGRFLSKHEVKFVIVPGLQIKRSLGITRGKDDKADAARIALYAYRLRDELKPTKLPEKQLTKLKRLLTLRDRMVRQRAGYKASLGEDKRIFCDKEDHCLFECQDNLIEELSKQISQVDKEMMKIIHGTKKLKKIYKLLLSIKGIGTQTALYTIVYTAGFTKFKTWRKFASYCGVAPFPHQSGTSIKGRNKVSNLANKKIKSLLTMCVGTAIQYNPEMKAYYERRLKEGKEKMKAQNIIRNKLLARMFAVVKRGTPYVNTMKYAA

SEQ ID NO: 129030 - protein, 426 aa, unidentified
MADTNHPIAAFHWVAIDVARYWNAVLVETASGQRHRFRMSNSAADMQRLTVFLLGLGGRCRVALEPTGDYHRPIAHRLLRAGFEVVSISSVAQSRFREAMFNSWDKNDPKDAAVILEMLKQGRTQTYVDPMLAGHHDIQELSKTYYQISRARTKVQHAIINHHVPLYFPEMHKYWTSTRNEWWVKFMIEFPTPFHVRQHTCQEFIELASPLVGRRVHRVAKLTEIWECCADSGTLPHDPQSVAVQTFLFTLRHYQHLNDMRRQLEEQVQNLLAGDADYINLMSLPGVGPINALTILAEAGNLRRFGHHRQFLKYCGFDLAKSQSGVQRGREQLSKRGNARLRLAFWLAAVVAIRARENSFREKYDRYVSSNPKDPDLKRKALTAVAAKMARVAYGIIKKNQPYRRFFEQSLPSGSIPLNRAVGAPT

SEQ ID NO: 129031 - protein, 359 aa, unidentified
MDGSKQQPKVTAGLDIGDKYSYLCLIDQESGQVIEEGRLRTTPEAFRRRFASEQPPMRIAIEAGTHSPWASRVLEGCGHEMLVANARKLRLIYSNKRKTDEVDAENLARLARLDPKLLYPLKHRGEESQAHMAIIRSRQALVDCRTQLVNHVRGAVKSFGARLPKCPARSFHKRATEHIPEALWPALGPVLETIGSLTERIRDYERKLEAVSGEHYPETKLLRQVEGIGTLTALTFVLTLEDPHRFERSRSVGAYLGLVPASDRSGERDPQKRISKEGDEMLRKLLVSGAHYVLGPFGSDSDLRRHGEKIAARGGKNSKKRAVVAVARKLAVLLHSLWISREVYEPLRNAHRCSGGQAA

SEQ ID NO: 129032 - protein, 409 aa, unidentified
MEVLYPRCCGIDVHDDFVVACFSRVEQGHRKKEVQRFRAVTGDLIALRNWLLERGCTHVAMESTGVYWRPVYDRLFGFFELTVANAQHMKAVPGRKTDKQDAEWIADLLQHGLLKKSFVPHREQQDLRGLTRLRTTLVQERARLVNRLHKTLQEANIKLSGVLSDIVGVSGKAILHALAAGETDGHRLARLAHPSVRCTHDQLADALESEIGAHHQFLIHELLTLIDGLDHSITHLEHKIEEQLQPFEKTLERLEEITGVSRRILHVLLAEVGTDMSRFPDDAHLASWAGMCPGQHESAGKRLSGRTRKGNRWLRAALIQAAHAAGRTQTYLGEQYRRIAKRRGKKRAAVAVGHSILVIYYHMMLTGEHYQEKGVEFFQQRDKQRHERRLIQRLERMGYQVTLRSGPAA

SEQ ID NO: 129033 - protein, 396 aa, unidentified
MKKRYQGKCFVGLDLHKKYATICGISQRGEVVLREDHLRLDQLSRWAAETLTPNDAVALEATTNTWWAYDCLTAHAGRVVVVNPIKTRLIAEARINTDELSAEVLARLLQSNFICEVWVPDERTRRYRQLISHRIRLAQEGTRLKNRIHAILHRQQIRPAHGNLFSRAGREWLESIDLPEMEKLLVRQNLRLLKCTEEALAEIDQLLARLAQEDGRVPILMQIPGINIFGALAILSELGEVTRFASPKKLSSYAGLVPSLHRSGQKNSSGAITKAGRSRLRWVMVEAAHVAVRYDPQLGRFFRRLRAKKGTNVAVVATARKMLVIVWHLLSGDCVYRGRRVEMVARKFLQWGWKVGDQDRCGSKRQFILERLHQIEINGLTHIKVGRRAYSLSEMN

SEQ ID NO: 129034 - protein, 346 aa, unidentified
MKHFAGLDVSLEETAICVVDEAGGIVREARLPSEPEALVAFFRGLGLVMDRIGLEACSLAAWLHEGLTAAGLPAVCLETRRAKAAMGAMPNKTDRNDARGIAQIVRTGWYRAVHVKSPACRSWRALLAARRLVLNKMRDVENGLRALLREAGLKLGTPARKELAVRVRELTAADPVLSALAEPLLTIIAAMTRELAQLTKRVLDIARAEPVCRRLMGVPGVGPLTALAFRATIDRPDRFRRSRDVGAHLGLTPKRYQSGETDVQGGISRCGDELARTALYEAAHSLLVRSRKWSTLRAWGMQVARRRGMARARIAVARKLSTILHRMWIDGSDFRWGKEGPAPAAV

SEQ ID NO: 129035 - protein, 369 aa, unidentified
MKEHKHYVGLDVHKDTIAVAIAEAGRSGEVRSYGTIANTLHAVERLVDKIGGVAVELHVAYEAGPTGFVLYRWMKKRGIDCIVVAPSRTPQGPGPRQKTDRRDAVQLARLHRAGELTAIHVPDEADEAIRDITRARADAVADHTRARHRLKGFLLRNGYRYPGAANWSEAHMRYLRSLSLPSAIHKAVLEECLLAVDQAVERIGRLEALIEAKAPQWRFYPAVQALMCLRGFRLTAATVLIAEIGDVKRFSHPRQLMGFLGLVPKETSSGMSRRLGSITKAGNTHARWILIEAAHHAFHTPGVSSVLALRQAGQPEPYKSLSWKAQSRLYKRGWHLLRRGLMKQKVVVALARELAGFVWALLQQAPSPA

SEQ ID NO: 129036 - protein, 420 aa, unidentified
MENNQRKLYVGIDVHAKKHKVAVIPITLLEQPGEAWKRVKALSIQNNIDDFQRLDSVIRSHISSTEQAAIAVDHTGGHYSEPIVHFLLTRGYSVYYLESRAIKAARERLLDEENKSDLIDSSGAAYMLYLRDVHGLSFRISAIAPELGSKAAALNSLVLQRCQFTKLVSQTTNRLHQLLLAVFPEGEAQYFRQLLEVTPHYPTPRDMINSKGLEEVKNLRQKDRQGLLELAEKTVGIPDDSYRWLLRELGIQRKDALAKLEVLTSALRSQVRAHPYGGILLSFPHVGEIAAATIIAITRDIERWPDKKKLKKALGVYSSSTQSGSGSVRTKRGKEGSRHGRRVLFQVCLGCITTRAHENDFRDYYNRQVSRGKVRIKALVSTMGKLAEILYHCLSTGELYQYQGKYRSINRAGPDGRVET

SEQ ID NO: 129037 - protein, 323 aa, unidentified
MDGYVGIDVSKDGLDVLLLHGEQRAGQHFTNTPTGFSKLDGWLKRRLKPVQVHICLEATGPYGEAVADYLFEQGYTVSVVNPARIKGYADSQMQRNKTDKLDAALIADFCRTQHPAAWTPPPPEIRQLQQWVRHLEDLTQTFQQAKNRLGLPGQSQPVIDHLQAQIALLDQQMAQTKRAITDLLNQQPDLKHQKDLLRSIPGLGDLTIGKLIAECRDLTAFRDVRQLVAFAGLNPRHHTSGSSVHKKPTMSRTGSASLRAALYMPALVAMRFNPLLRAFADRLRTRGLPNKAIIVAVMRKLLHLVFGVLKSGQPFDPNWVTAS

SEQ ID NO: 129038 - protein, 353 aa, unidentified
MERYIGLDAHSQTCTFAVMGPSGKRLREQVLETNGKVLVDFIKGIAGKKLVCLEEGTHSEWLYELLKPHVDEIVVVQPLRNAGQKNDSIDAWGLADQMRKGTTGTTVFKAPGTYSELRSAVRAHRALVGDMVRAKNRLKAIYRSRGLQGMGTEVYDPEERSTWLKKLPAHRRQLATVLSSELDAVTEVHKTAETWLLEEAGRCSIVKLLATAPGIGMIRAAQIVAIVVSPDRFRTRQQFWSYCGLGIVTRSSSDWTRDRRGDWVRRETAQTRGLNRNRHPALKAVFKGAALNVVQRMTQHPLHQDYQRMTSAGIKPTLARITVARKIAAAVLAMWKNKEEYDPAKSQPKPHAA

SEQ ID NO: 129039 - protein, 417 aa, unidentified
MKKHNNSRKKSEATAKPAKPRGPMRRDTKEVLAELVGKLKEKLDPKKVAAPSAGEEHPRGELRPNLDRLTVGVDLGDQWSHYCILGLEGETLAEGQLRTTQEDIAEFFQALNAARVVFEVGTHSPWVQEVVCGCGHEVLVANPRLMEGSKRRKRKNDRIDANKLARLGRVDPQSLHPMQHRSREVRQDLVVLRARDALVAARTELINATRGLVKSMGSRLPKCSSPSFAQKAEEAVPIEIREALLPLVRMAEALSDCIQGYDEKIEKLGREKYGHTALLRQVKGVGPITALAYVLTLENPDRFVKSRDVGPYLGLVPKQEDSGESQPQLGISKAGDTMMRRLLVGSAHYILGPFGPDTDLRQYGLRLCERGGKNAKKRAVVAVARKLAVLLHRLWVSGEVYEPLRQGMSATMTPAAA

SEQ ID NO: 129040 - protein, 347 aa, unidentified
MESTLIAVDTAKLVFEVAESARGKVVRRLRLNRAAFADYLAQHEPAEFVLEACGGAHHWARLMQAYGHRVRLLPVPYVCVYRRRNKTDRVDCLAMLEAAKNSEILPVPVKSPEHQAIQGLHRCRSAWMETRTARINTLRGLLREFGLILPVGAGAALLRIPELLEHEALPPLLAPTLRQLFDEIHELEQRIDAVERQLEAVSRQNPVISHLRQISGIGLLTATALYASANDASHFRDGRHLASWLGLTPREHSSGSIRKLGGISKRGDRYVRMLMVHGARSVLLRAGQMQRAGHDLNALQRWALALKDRTNHNKATCALANKIARIAWATWRHGTVFDPNQAAAAAA

SEQ ID NO: 129041 - protein, 314 aa, unidentified
MIISPHCVGIDVSKRMLDIFDDAVGRPERIANTLQAITERVAGWRCGNVFVVFEATGVYDRELAEALRQADIRFARINPARARDFARADGRLAKTDAIDARMLAIFARKMMPAVEPAPEPARSALASLAKRRDQLVQIRAQEKNRRSEATDRTTIEGIQRHLDFLNGEIKAIEASIKTLIKAEPDISEQARLMRSAPGIGPVACMQLLAKMPELGCLGSKQVAALAGLAPFNVDSGSYRGKRAIGGGRKRVRDALYMAALNAVCRDLTMKAFYQKLRTVGKPAKLALIAAARKLLTTLNAMLRDRNAYVRPQPT

SEQ ID NO: 129042 - protein, 346 aa, unidentified
MEISTIGLDLAKNVFQVHGISATGEVVIRKALRRSQMLPFFEKLPPCLVGAEACGTSHHWARELTKLGHEVRLMPAAYVKPYVKRGKNDAADAEAICEAVTRQTMRFVPIKSREQQAALSLHRVRQLLIKQRTQLVNMMRSVLAELGTAIPVGIVKALQMAREIVDGESELGLPPEAANVVAMLAGQLLQLHAQLRKLDLRLAALQRSDERARRLATIPGIGPIGATALAASVTDPSQFSSGRQFAAWLGLTPRQSSSGGKERLGRITKMGDRYLRQLLVVGATALVRYAKQKPSTVDPRFVALLARKPARVASVAIANKMARIAWAVMARGGVFERGHAPMLAAA

SEQ ID NO: 129043 - protein, 357 aa, unidentified
MEVAIGVDPHKGSLAVAAVDPLGKVIDAREFSNDPPGHGALLGWVRERSPDRVIGIECSLSYGASLSRLLLGAGEDVREVPTTLTHRERRRRRSHGKSDLVDSVAIARIVASGEVLPSAHRVEVLSDLRALVDYRDQLVRARTQVANRAHADLLNIRPGYGRAVPNLRAKVHRAKARSLLRGDRSVRAELLRRRLGELSRLDGEIAAMDRRIEATVRETGTSLTDIPGVGPFVAAKILGEVGNPSRVRSKAAFAVLSGTAPLAASSGQTHRHRLNRGGNRQLNWALHYIALVQCRISSEAQAYMARQREAGKSHKEAMRQREAGKSHKEAMRCFKRQLSNVVYRHLLADARGAELAA

SEQ ID NO: 129044 - protein, 346 aa, unidentified
MKIIGCDFHPGYQQIAMLDLVTGEMVEKALSHERKEEVRAFYAGLEGSVRVGIEASGQSQWFERMLAELGQQVWIGDAAKIRASCERKQKTDRRDAELLLRLLAEDRFPRIWVPTAAERDGRQLLLHRHKLVRMRTQVKNQLQLQALALNQGVQRKWKLWSKTGRKQLELLPLLPWASRRRAELLQLLDQLEASIAELDRAVAEQAQARPAARRLMTHPGVGPVTALAFTLTMGPAERFSRGKQVASYLGLIPREHSSGGRQQRLGHISKQGNPFLRGLLVEAAQSAVRHEPEMRRAYQRLAQRKCRALAKVAMARKLAVRLYWMLRLQVDYAQLIQGSHAGQLGT

SEQ ID NO: 129045 - protein, 336 aa, unidentified
MVYVGVDLHRKTSHVVALDDDGTVLLRRRVGSRPDELMRVFGELEPAPLEVAFEATFGWSWFADLLADAGIPAHMAHPLATKAISSARVKNDSVDAKTLAHLLRSDLLPEAWIAPPEAREARRLARMRTSLVRLRTRLTCQVHALLAEHCVAPEMTDIFGRGGKRFLATLELPEISQHRIEANVRLAEEISVEITQAERELRQLFKGDDRIERLMKIPGIGFVTAVTVVTEVWDVTRFPSADRLASWAGLTPSEHSSAEHTRRGHISKQGSRWLRWVLVEAAARPQRDPDLRAFIDRIAARRGTKIARVALARRLLTLCYYALRDERGCRSYPVAS

SEQ ID NO: 129046 - protein, 427 aa, unidentified
MRVMYERVAGIDVHKDMIKVAIRFPGEKGTRKTEVLEFRTFWGVLQEVARELRRRGVTHVAMEASGVYAEPVYHALCEQDFTEVLVINPRHVKALKGHKTDARDCRRIAELLECGLLRGSYVPSAEQKEMRDLTRYRKKLVQARTSEIQRMQKALESAGIKLGSVLTDITGVSATAMIDALIDGERRPRVMADLARGTLRAAGKQADLTMALAGRFTAHHATLLRMHRDQVKLNNHAIAGLDEQIAAAAGRWQREMDLLMTIPGFGPVAAATWIAEIGPEPHKYSGSHDKLGSFVTLAPGNYVSARKRRHGRTGDAGTYIKPALIEAAWGAIRARGRLQARYNRLVRRFGGDKNPGAKKKAITAIAHTLLKIAYQVLRSGEPCAEPGADFCTRRNSPESQQAWLLRKLEQLKPRRHHHHHLAWRGTA

SEQ ID NO: 129047 - protein, 355 aa, unidentified
MFYLGIDQHARQITISLRDESGDVVQARQVSTEPKRIRAFFEHLTRERLGPDESFVAVLEVCGFNDWLIHMLHEYGCRKVIMIQPDDRQKCKTDRRDASSLSELLWVNRARLLEGKPVRGLRQVDIANSVDQENRRLTTLRKEAGQARTRLVNKVRHILRRHNLQWEMPTKRFPTKASIAWLKQLVLPEVDRLEMNHLLVDVEHLQERLKELEQVIAARCGVSEDGMLIATMPGVSYFTATSLACRVGQVERFPRSHSLANYWGLTPGCRNSGENMQRLGSITKAGSGMARWLLAQVTHKVLRKDGRLREWFKRIKRRRGSTIARVAVMRKLATIIWHMLKKRKSYAECRAVAAA

SEQ ID NO: 129048 - protein, 423 aa, unidentified
MDVIQDCVAGLDVHKDTVVACVRTMSRTRAMRECRTYETTTDGLLALLEQLSSSGCSVVAMEATGVYWLPVWKMLSDGDFKLVLANAAHIKAVPGRKTDMNDAMWIADLAAYGLIKASFVPDEQLHELRTLMRTRKQLTREQTRHVQRIQKTLTEANIRLDSVISDIMGASGRRMIEAMIAGQRDPRKLAALAHRSVKATPKQLYDALHGRLTEHHRFLLKLHLGQWDALDASIRIIDREVDARVARLDAERPADKARFSDLIDLLDLIPGVNRLSAVSVLSEIGTDMTRFDSDGHLIAWTGLCASQNESAGKRKRTRLRKGNPWLKTALVQCAWAAKNAKTSYYRAQFLRLRARRGPQKAICAVAASILTAIYHMLSNGTAHQDLGADYFDRRSPEAKVGRLVRQITKLGYEVTVQPTTKAA

SEQ ID NO: 129049 - protein, 337 aa, unidentified
MECKRIAVDTSKSVFTLHGVDERGRPILRENLTRARFEKFLGKVSPTEVVLEACGSSHHWGRFAQERGHTVRLVPPQYVKPFVKRGKNDRNDAEAISEAASRPGMRFVPVRSAEAQAEAMDLSARDLLVRQRTQLVNAIRGHAAEFGVIAAKGIAHIAPLLQKVAETDMPQAAKDTLAQLGRVVAQLDAQLAEIDRRLAERHKANPVSRRLAAVPGVGPVTALTVATTIDPGQFASARHFAAWLGLTPKEHSTGGRQRLGGISRAGNERLRQLLVVGAMAVIRQARPGSKTASPWLLALLERRPRKLAAVALANKMARILWAMMANGTAYRRSPQAA

SEQ ID NO: 129050 - protein, 443 aa, unidentified
MSCRWGRRWSRPGAEHCYWGVRTLLGLAKRLEQEVCAVVFVGIDWSEQQHEVELQAGSGKVLKRLRVSADIAGLSRLQEAITDAAEEPSQVVIGIESNHGLLVNALVASGYRVYPINPLTSARAREGEAPSRSKSDPGDAHVLANLVRTKRQDLRPLAGDSEQAQALQVRARSHLRAIRVQQRLRSQLRSALAKFFVGALPLLGDESEDLRDALAVLSLAVSPEQGRGLSQNKIRSSLARHGRQRNLEVKAAEIQAQLRAPQLELNAPKVVSAYADEVSHLVRSLLLARSEVAQLEAQLAADFREHPDAEILLSQPGLGLVLSARVLGESGDDPTRYVNAKARKNYAGNAPVTKRSGKWKMVSRRLARNRLLADAGFLWANSALSASPGARRYYDQLRARGKTHNQASRALANRLVGILHGCLRRRCLYDEAVAWLQPLKEAA

SEQ ID NO: 129051 - protein, 416 aa, unidentified
MDRRRYNVCCGADIHKKFLIATILLLDGTKLTKRFSMDLRSLFEFRDWVIANGCEAVAVESTGSYWVPIYRVLEGHVELIVANAYKIKNVPGRKTDTIDSEWIAELCRNGQIKPSRIFPKDARDLRSLTRARERYVDDKTRVKNRIHHVLDSNCIKLSSVLSNIFGKVGRYILNCLLEGVDIEEIIDGIPVKRMKKKGDQIREALAIQLSCTDVILIRGCLEQIDAIQKNIDELESEIHKRIAPLRKNMAIVMSVPGIGFISAAVILAEIGNYNDFDKAEQLAAWCGLVPSVYNSADKNYTGSITKQGSGHIRRILVEVAHVVARTKGRSKLKNFFLRIKAKKGTNIAAVALARKVLCIVHHLLTEQEMYQEEERDRYDEVEYDRIPKQMMSLDDMIRYVAKAGYEVRKRTTGAGG

SEQ ID NO: 129052 - protein, 357 aa, unidentified
MVERETEAKSSGSGVTNPYRRTEHCDKIHAYRCDKEVGVIGVDVSKEHLIISRGRVRKYENDLKGYEEILRMKPCAIVLEPTGVYAIRPSQYFKERGVRVLQVSPNVLSREKEFRGKKTDFYDAEKLENMVDKAKEYDYNPLRELVTLYLFLKDIETKYKNRLKRTLFLVSDNDKVSKDRLEKLAKGDFTQEELYQLEYTPIVLEEIKILAKNLLETQERLKEVRRMVEGQVPQDHVLLTIPGVGRLAAGIIIGIVGDVKRFPKPESFVAYCGLDPVVERSGRAVVSRGISKSGNKYLRSLFYFLAMRNYSRNPTLLEFYETHKDRLKGKKLYVALARKLARVVWSVWYNNKPYEPK

SEQ ID NO: 129053 - protein, 460 aa, unidentified
MFKETRKMMELFEEVGYKKVLIMGIDVSKNKFTMAAVNGMYENKIKARDIDLNKKSLGKLYKELDKIIEEEKIEQLIFGCEPSGVYYKPIMKELACRYPDAMFRLINPSSTKANRDQRMEREKTDPIDTYAIVDLLIRGESYELDFGDNIFNIINVYVKELDHLIKESVRFKNKIHAHTDELYPGLESESNSFLESQYGMRFLTILPEPETLPGLKIEDWQLLLSTRDYKLPEHLARRLKQKSSQIIVTKHENFKIIRDFITFLVEGYEQLITRKRMIEKKLEELINSLNFGINLKEIKGIETSTVARIIAYIGNPYMFKSGKQVASFAGLIPKADQSGKQDKNKILSKKGHKKLRVTLIQAAQRVINSTGYFTAYYNRLVIENRKDPMVAIIATANKLIRVIMKMIHSGEKFNPPTAKSKEMAKSKINRLTSKKLKDWNKNKGLDSLTQDIKKLYPARV

SEQ ID NO: 129054 - protein, 372 aa, unidentified
MDEGIKVFVALDVHKDSIVIGAAQAGSRVPARQVGRTAHEVNKLLKALAKLGAPSEVHVVYEAGPTGYGLQRALAARGYRCQVIAPSLIPRRAGERIKTDGRDCLKLAESSRSGDLRAVWVPDPAHEAIRDLSRARDDAVTARTQARHQLRSFLLRHDRRYPRKTAWTAAFHRWLATLNFGPDGAQTAFIEYQLAVQAADQRVERLTQALIGSIAGWRFEPVVQALQALRGVAAVSAIGLVAEIGDLARFEHPRKLMGYLGLVPSEHSSGERTARGSITKTGNAHARRLLVEAAWNYRFKPRIGVQAMRRQQTLTSDIQASAWKAQLRLSRRFAALDARGVQRNKVCVAVARELAGFVWAIGRQAMNTTPIH

SEQ ID NO: 129055 - protein, 385 aa, unidentified
MANHNDLSRSLVALEQSNTIIAVIEMSLNYWLIAGIVPGVDRHPLKKLNVDEKALLQLLHQWRDEAAKVGYVITRMAVAFEAGRDGFWLARWLRARGVEAHVIHPTSVAVPREHRRAKTDRLDTELLKRAFLGWLRGEPEHCSMAAIPSLQEEDAKRPTRERENLVGERTRIINRMKACLVRFGIRNFKPTLRKAPERLNELCTPEGDLLPPNTLAELRRDMARLRFIIDQINEIGTARLQRLEQAPVEGPAAMVRLVARVIGVGIETADMLVHEILSRNLRDRRAVARYAGLTGAPDESGSKRREKGLAKAGNARVRRGMIQLAWRFLLHQKDSALTQWYRARTASDGRKRKTMIVALARKLLIALWRLVTTGEVPTGVVLRAA

SEQ ID NO: 129056 - protein, 334 aa, unidentified
MNNVSLIGIDLGKNSFHVHCQDATGKALSRKKFTRAKLFEFLANCPSATVVMEACAGAHYIARKISDMGHKPKLISPQFVRPFVKSNKNDFVDAEAICEAASRPSMRFVAPRTESQQEILPLHRVRESLVRDKVKTTNQMHAFLLEFGISMPKGLAVIRRLSVVLTENELPPYLAKLLVKLQSHYLYLVEQIRDIENELKLAVNHDDTTQRLMSIPSVGPITASVLMANLGNGQQYKQSRDFAAATGLVPRQYSTGGRPTLLGISKRGNKNLRRLLVQCARVYILHLEHQSGYLAEWVRHQLSKKHSCVVACALANKLARIAWAITTKQSVYMA

SEQ ID NO: 129057 - protein, 351 aa, unidentified
MTSKKRQVIGGVDTHRDTHHAAVIDSAGGLVGDAEFPASAAGYAAMLAWLRGHGRLDKVGIEGTGSYGAGLARFLSAAKVAVVEVNCPDRASRRANGKSDPLDAIAAARATLAGVAAGVPKARTGPVEAIRTLRVTRRGAVKARTAAVNQMRGLIAAAPEPLREHLHRLSLPNLLIRCQQLSYEGEALHDPTHATAAALTLLAARVAALNSEISILDRQLRPLLHAAAPRTCALFGVGPDVAGQLLTTAGDNPDRLRSEAALARLCGAAPIPASSGQTHRHRLHRGGDRGANHALHTIALCRLRYDPRTRAYAARRTKQGLTGAEILRCLKRYIVREVYTALRADFFALTT

SEQ ID NO: 129058 - protein, 332 aa, unidentified
MKIIYFIGMDFGKISFDVCLMDNEAQIIGNEQFNNDTSGFKALLLWLKKMKIDLNSALFCAENMGVCVTAFSAFSLKKQLQLSLACPLDIKKSIGLTRGKNDKIDAYRIAYYALKNEDKLSLFQEPKKVLSTLRQYLKTRQMLVKMKVALLAQYRDTLSNELFADVCALGEMLKKELDFIKAEIQKCELIMEELLASEPTLYQNSQLLRTIVGIGLISIVTMICQTENFTKFTETRKYACYCGIAPFENSSGISLRGKTKVSPYANKEMKHLLAQSVQSAKVHDPQLKAYYERKLAEGKHKSLVMNAIKFKILDRCFAVIRRQTPYVKLQIA

SEQ ID NO: 129059 - protein, 368 aa, unidentified
MFDDTTVFTGLDMHKDSITAACVGSSPDASVVDLGSIGTQQYAIDRLLKKLPPRDHLRLAYEAGPCGFWLQRYLASRGYDCQVIAPSLIPKKPGERIKTDRRDARKLALGLRAGLLTPVHVPTPEQEQFRDVVRAWQQSKRDVTIARQRLKAFLLRHDIRYAGTANWSAAHRRWLSEVSLPGNAQQIVFQEHVDTISERERRRDRLERQLDALAPGWSGYPLAQALQAFRGIQKTVAYTVVAETHDLSRFARPTHFMAWLGLVPGEHSSGATRRQGPITRCGNHWARTLLVEAAWSYRHQPKVSRIIEARAGDIDPAIRAIAWRAQIRLHHVFSKLVGRGKHRNVAATAVARELAAFIWAAARQLETH

SEQ ID NO: 129060 - protein, 373 aa, unidentified
MIAIPVISERCAAIDVGKRGLAVAVALGPADKEAEIKTRASGTTVPALLDLKAWLVEQGCTTVALESTGSYWIPVKNILEDASQITLVCARKHHPKKGDKTDFRDAIDMVIHHRHGLLTGSYLPERGIVELRDLTRRRKKLLGNLRAEKNRIQKVLETANVKMGNVVSDVFGVSGQEILQALLEDQPLTAEQLADKAKKRLRDKIPQLTEALEAHQMNHHHRWLIDQSVEHAKFLDRQIEELEKKIDQHLPPYRRQHELLMTIPGIKEAAAANILAEIGADMNQFPDGDHLSSWAGICPGNNQSAGKRKGSRIKKANQFLLAALVEASWADSAEKGFGASAKVSSLVTGQGGEENQCGHQPQPAQSDLVGAET

SEQ ID NO: 129061 - protein, 385 aa, unidentified
MSKSDCQSNSESKAMHYVGLDVHARRSSLCILGPNGKVVKRAEILGPWSKVLGELQSLVPGGGPFKVCFEASCGYGHLYERLSALPRCGRVAVAHPGQLRLIFRCKRKNDRVDAEKQSKLLYLDQVPEVHVPKSDVRAWRGLIELRRRLVGRRTAVKSQLRALLRSLGTPDVPAGKAMWSKKGQARIAAMELPEGDALRRDLLIEELKEADTRIARVTAELDRRAEAHPGVTLLRTIPGVGPRTAEAFIAYIDDVRRFSSVRQVGCYLGLVPCQDSSAGAERLGHITGDGPSTVRMLLCEAAWQAIRRSPSMRAYFERVSGGDPGRKKIALVAVAHKLARIMAAMLRSGEAWRETPAPAPATATATATATTKKRSQQRAQKKPAA

SEQ ID NO: 129062 - protein, 343 aa, unidentified
MNISRIGIDLAKNVFQLHGVDRRGKTVWKRRLRRNQWLKALLAQAEPGCEIGMEACGGAHHWARELQSRGYTVKLIPPQFVKPYVKSNKNDANDAEAICEAMSRPTMRFVAVKSVAQQDIQATHRIRSELMTQRTAKANQIRGLVTEYGLVAPLTMRALRTAIPCWLEDADNGLTDYFRSLLHGLWTDLATLDDRVLDLDRQIKKLANSNEVTRRLQQLRGVGPMVATALVATVGDGKQYHKGRQMAASLGLTPRQYSSGDKHRLFGITKRGDVYLRTLLIHGARAVVSQAKHKDDRLSRWVTGIAQRRHPNVAAVALANKTVRMAWAMLRNETDYDPDFAIS

SEQ ID NO: 129063 - protein, 409 aa, unidentified
MIETLFVGIDVGKTFNTVRLLDPYGTTLKLFTVPNDKPGAEKLRDSLKDTLLHADFDSVTIGMEYTSVYADHLALFLRNDEFLRKWNVRVHILNAKQTANFRKAYIDLPKTDNIDTLVIADFLRFGRVSKEVIFDEKCIALRNLTRARFQAAQNLSREKARFLDTLFYKFSNLDASKVFSNTFGATSLAVITEFMSTDDINNAPLDELTAFIREKGKNHFADPEEVAKALQAAARGSYRLGKVANNSINQLLSVRVAAIRAIEQQIDNLDSAIADYMVLFPNTLTSVPGIGFVYSAGIIAEIGDINRFPNHAALAKYSGLVWRKHQSSSYEAENTPIVTSGNKYLRYYLIEAANKVRMHDTTFKRYYHLKYAEVTKHKHKRALALTARKLVRLVYSLLNTNRLYTEPTK

SEQ ID NO: 129064 - protein, 391 aa, unidentified
MIYVGIDVAKDKHDCFITNSDGEVLFNVFTIANNLDGFNDLCQKIASVMEDVTKVKVGLEATGHYSYNLLGYLIDKGLPTYVINPLHTNLYRKSLSLRQTKTDKVDARTIASMLMSDVNLKSYSDTSYHNEELKSLTRYRFDKVKQRAKLKSSVSRLVCILFPELEKLVPTLHMASVYTMLSEFPDAKQVANAHLTRLTNLLSESSKGRYGKETAITFRNAARTSIGSNMPAKSLELKHTIKLIQELSSEIDEIENEIKLIMDEINSPILSIPGINYRMGSMIIAEIGDFNRFDSPDKILAYAGFSPSTYQSGQLDGAYSHMEKRSSRYLRYALYNAAKYVCNWDPTFAEYLAKKRAEGKHYNVAISHAVKKLVRVIYHLEKTNQQYIKAV

SEQ ID NO: 129065 - protein, 450 aa, unidentified
MSPLALDVVTKTDKTPVLGRMLSKYVGRKTSSIENGITKARNHSRQRGNIMRVVFGIDVSKASSEVAILVNGEKVHGYTIPNDAIGFNRLLGDLKTVHQPEIVFEATGVYSRRLQAFFEDNSYTYTRLNPLESKKQLDSLRVRKTDKIDAEKLAMSQFILNRKPSYVQEALYQELRDLSRFYQNLTEDIVCAKNRLHKVLQITFPELENILSAPTGEQYWNLVITFPCNSFVLESDDATLTAIIRQSTAKRISEKRVTYLVDKLTKLANQSYCAVKKTSPVIEEVKYYAGELLRLSEHRQGVVEEMVTLAQSLPEYEILLSIPGIAETTATSIIGELGDIRRFHSANQINAFIGIDLRHYESGNFLAKEHITKRGNPYARKILFKCIHNIASASHTNPCHIADFYEKRKRQSQVTSTKPHTIASIHRLIRTMYYLITHNKLYDYTSIQNR

SEQ ID NO: 129066 - protein, 400 aa, unidentified
MRAVFGIDVSKASSEVAILVNGEKVHGYTMSNDALGFARLLGDLKTVHKPEIIFEATGVYSRRLQAFLDEHGYAYTRLNPLEAKKQLDSLRVRKTDQIDAEKLAQSQFVLNRKPTYVQEEVYQNLRALSRFYQNLTEDIVRAKNRLHKVLQVTFPELETILSTPSGQQYWNLVIDFPCKDFVLEFSKDELSESIRQSTSKRISDKRVAYLAEKLIALANQSYCAVKKTSPMLEEVRYYGKELLRLSEQRQTVLDQMVELAQPLPEYDILLSIPGIAETTATSIIGELGDIRRFQSANQINAFIGIDLRHYESGNFLAKEHITKRGNPYARKILFKCIHNIASASHTKPCHIADFYEKRKRQSQTTSTKPHTIASIHRLIRTMYYLITHNKLYDYTSTQNR

SEQ ID NO: 129067 - protein, 395 aa, unidentified
MFIVGIDIAKRSHEAIIIAEDGQVVRKAFSFRNNCTGYNLLLEQVRRLTLVKSQIVFAMESTAHYWLALYARLLKDGYAVMVLNPIQSHSLRELYIRKAKTDARDSLIIADLVRFGRCKASNVPQDKILALRELCRSRAYLVDMAADLKRKLIALLDRIFPEYESLFDSVFSKASIAVLSKYSTPQKVKNANLRKLTDILMESSNGHFGKWKAHQLKEAACSSFGIDDSGGVYSTLLGMFLEQILSLTAQADSLEKQISVFFQEFNNPLTSIPGVGTVLAATILSEIGDITRFSSADKLLAYAGLDPSVKQSGEFKSNQNRMSKRGSPYLRRAIWLASTVAVHRDPMFQTYYEKKMSEGLHYMNVIGHVSRKMTAVIFAVLRDGQPYQPILQSAG

SEQ ID NO: 129068 - protein, 318 aa, unidentified
MSHGYDTFIGIDVCKDGFDVCCATSGPLGRFDNTADGVSRLLPLLPAAGTCLVVVEATGGYERQLVGDLMTAGHHVSLVNPRQVRDFARAFNILAKTDRIDAAVLARFAEKVQPIPREKAGRIEELRQLVTRRRQLIEHRTAEKNRCAQGVSSFVRKNILRHIEMINKDIKAIDKLLLSLVQSDDDWRNKFDKIKEVTGLGTQTATTLVAEMPELGKVNRQQAAALVGVAPFNRDSGQFKGRRMVWGGRQSVRNVLYMAALSAMKHNPVIRDFAARLHAKGKPPKVVITACIRKLVVILNAILKANQSWQPRLATATP

SEQ ID NO: 129069 - protein, 343 aa, unidentified
MQTITTIGLDIAKSVFQVHGVDAGGQVIVRRQLKRRSVVAFFQKVPPCLVGIEACASSHHWSRELQALGHTVRLIPPAYVKPYVKRQKNDAADAEAICEAVTRANMRFVPAKTPEQQSGLVLHRARHLFIRQQTAVINAIRAHLAEFGIVAPVGRHGVEELLNIVADPNDKRVPEIARACLSAFGTQLCRIKEQILEFDRLIRAWHRSNEMSMRLDEAPGVGPVLATALVAAVADPKSFRSGRNFSAWIGLVPKQHSSGGKERLGSISKQGDRYLRSLFVAGALAVIRYAKIHGTKHRPWLTALLARRPTKVAAIALANKIARMVWAMMARGARYKEPVALAR

SEQ ID NO: 129070 - protein, 458 aa, unidentified
MKKEIPPVRIQGVRHACLPIMNKNLTTEVSKMKYTQNAKIMQITEKTLIIGVDIASEVHYARAFDFRGIELGKLIRFNNDAAGFKEFTAWAEEIKTKHDKSKVMVGMEPTAHYWFNIAPYLKDQSMKIVLVNPFHVKRSKELDDNNPTKNDRKDPKTIAMLVKDGRYMEPYIPEGVYSELRTAMETRWQIVKQLNGTRNRVLRWLSIYFPEFNKVFGDWEGKAALIVLKEFPLPAQIIELGAMGIVSRWKQDKMRAVGIKRAVALVEAAKTSVGVKEGIAAAINEITTLLEDYELKVKQYERVMAMVEKLALQIPGMQEILSIKGVGLIMAAGFVAEVGDAFRFEHSKQIVKLAGLNLKENSSGKHKGKSTISKRGRSRLRAMLFQGMLPMVAKNEEFKALHEYYTTREQNPLKKKQSLILLCCKLIRIFHTLLTKGVTYDPKKMMSDIKRLSMPAAA

SEQ ID NO: 129071 - protein, 403 aa, unidentified
MESDALWVGIDVGRYFHAFCALDGAGQVVWERKRVANTTSAMRTALEQVARVAAGRPVWFATEEAGGNASALVRLLSEQQACLLLAQPLRVHRFHLALGQPHKSDPYDAQVIAEFARQNQARLPRVRPGVPELQALRVLSRRLEAVSKDLRRNLNRLRGTLAEYAPEWLVCAVFSDWSTEAALGTLERYGRLSKLQRTPLGRLASALSRWTRGRFGKEQAYRLQSTLSEVCLPPSLEEAYAETLASLVRQIRSLLAEKRQLLQLLAARGQSLPAFVTLQQEYSYGLETAAIIVSEAGEMADFPTEAKFATYCGLTPLKRSSGISAGSSRLSRFTNKRLLRAIFQATVAAVRRDPRSQAYYHKKLAGRTDPRAKTTALLALARHRCRRLYKLLSQASPTPSLAA

SEQ ID NO: 129072 - protein, 426 aa, unidentified
MNTTTDFAATIGLDWADQKHDLWIRPADGSKAEHLRLEQTPEVLHAWVAKVRERFAGRKIALAIETSRGPVISALVAYDFIVLFPVNPKCLKDYRSAFAVSGAKDDRTDAQLLEEFIRLHRDRLRALEPDTELTRKLGGLAENRRRLVDERTRLVNQIHATLKTYYPLAETLLDGQMNTALAADFLVRWPELALLQKARLEAVRSFFYKHNSRGAKKNEERLEAIPKAKALTTDAAIIVPARHLVLALAGMLRPLHQAVARLDKEIQQAMDQHPEAALFRSFPGAGPALAPRLLAAFGTDRERFPKAQDVAEFYGIAPVVVQSGTSRTIHVRHRCPKFGRQTFHENAGCALKKEPWAKSYYDQQKERNKGKHHQACRALAYKLVRIYFACWKQRKPYDPDRYLKALQDHASPLHRKLENLTSAHGE

SEQ ID NO: 129073 - protein, 438 aa, unidentified
MSNNVIFNFDELFISVGIDVGADFSWMSIVLPNQQFVGKPYKILHNSMDSLASAVSKIKEAEEMYSLESRIFLESTGIYHYPLFCYLRDKGFNCSVINPIITKNSTNINIRKVHNDRFDSKKAALVGLKPDLKVSLMPSDLALNCRNLCREYYDLMDSRNAYVNKLIDELRMVFPQYLGIFSKVTIDTSLILLETYTSPSAFINADKQEIIDLIRSTARFGLTYACNKYNAIIQAANDADEFGYILDSNIKRIRLYIGFIRKYDEEINSILESMHELAAANEDTDFVKQIRLIETFKGAGFLSAMSLMGEIGDFSAFSKPKQLFAYFGLDPAVKQSGKFEGTKIQMSKRGSAIARRVIHTLTLQSISASRTGESKNPVLLDYYLKKCESKPKLVAMGAVSHKVCNMIFAILRDSKPFEIITPQEHIKKYNVAKCDVAA

SEQ ID NO: 129074 - protein, 309 aa, unidentified
MEHFVGIDVAKDRLDVHLRPSGESFAVARDGEGLVQLVERLQTLAPRLVVMEATGGYETIVASAVVAAQLPLAVVNPRQIRDFARATGRLAKTDRIDAAAIAHFAEAVRPPIRPIADAQAQALGELVARRRQVIQMIVAERNRRRRATQGRVLRAIDRHLDLLQSELCELDADIDGAIRKSAVWQADAELLVSVPGIGPATSRTLIADLPELGHLDRRKIAALVGVAPINRDSGTMRGRRTIAGGRPAVRTALFMAAMVASRKNPIIAPYYEKLRAAGKTAKQALTACIRKLVVILNAILRDRKPWQPA

SEQ ID NO: 129075 - protein, 340 aa, unidentified
MRHIGLDVHRDFCEVAIAEDGEVRSAGRIRTTVEELELFAQSLGTDDEVGLETTGNALTIARILEPFVARVVVADTRNLRAITHAKVKSDPVDARMLARLLASDMLPEVWRCDEETRVLRRRISRRTQLVRQRTRAKNQVHAVLIRNLKKAPMTDVFGRKGRGWLAELELPEDERHTVDGCLREVDFLSEEIATLDRALAQHAVSSPDIRRLMTVPGISRLTAATLMAAIGDVRRFPSPRHLVGYLGLDPRVRQSGESAARHGHVSKQGDAAARHVLVEAAHSVEKAPGPLRAFKRRVQARRGFQIAMVAVARKLATIAWHLLTKCVPGSLQVAVRRLGR

SEQ ID NO: 129076 - protein, 401 aa, unidentified
MQVLYSRCCGLDVHQKTVVACVMITQPNGKVDKSIRTFATTTAALLDLADWLASLQVSHVAMESTGVFWRPIYNVLEDQFELILANAHEIKALPGRKTDVRDCEWIADLLRHGLIRPSFIPTKPVRVLRDLMRYRKSLVYQHTQQINRLHKILETANIKLTSVVSDVWGKSGQSMIKAIIQGESDAQTLSELARGTLRGKLPQLQEALEGRIQPHHRMLLQQIFAHLQFLESSMQQILKEIEAQMDPYQEVVELLMTHPGVQAVAAMGVVSEVGIDLSRFPSAKHFASWIGVCPGNHTSAGKRKHGKTTKGNAYLRALLAEIVWGISHTKDNYLSAQYHRLARRIGKTKAIVAVSHTVAVNFYHMITKRVPYQELGANYFDTADSRTPHDTHGQTLRSPRL

SEQ ID NO: 129077 - protein, 343 aa, unidentified
MKLSRVGVDLAKNVYQLHGVDRHGKTVWKRRLRRSQWLQALLDKAEPGCEIGMEACTGAHHWARELQSRGYTVRLIAPQFVKPYVKSNKNDANDAEAICEAMSRPNMRFVTVKSVAQQDIQATHRVRSEIKDQRNAKANQIRGLVAEYGLVAPTTLLALRRAIPCWLEDADNGLTDYFRSLLHGLWSDLVALDDRMSELDKQIKRLADSNEVTQRLQQLRGVGPLVATALVATVGTGEQYKKGKQMAAALGLTPRQCSSGDKQRLLGISKRGDVYLRTMLIHGARAVVSQAKHRDDRLSQWVTSISKRSHPNVAAVALANKTARMAWAMLRNDSNYDPDFAIS

SEQ ID NO: 129078 - protein, 332 aa, unidentified
MDNFYFIGVDVSKKKLDFCVLFEGKVLREEQVSNHQQAVARLIGELKNDLEMDNEQFLICAEHTGQYTFPLVCACKSVECKLWLENPSQIKYSSGMQRGKNDKVDAKRIAIYASRFGDKVKYYDRPSEEIERLKQLERERALYVTDLAKYKGQMYDQKDFMPAALYRKKTKRMKGLIQELQAAIDAITAEMEKIIGSTEVLARQMELLMSIDGVGKVVALNVIIETEAFSRFDNPRKFCCHAGVAPFSYTSGSSQHSKNKVSHRANKNIKKLLHMAAGSVTHRKEGELKAYYMRKVEEGKNKMSVINALRAKIVARMFAVIKRNEFYTPIYS

SEQ ID NO: 129079 - protein, 352 aa, unidentified
MQHFIGCDVHTRDQVVAWIDEQTGEIKKRRLEHASEEVKEFYAEFPRGTVVGIEATFPVYWFERLMGELGHALWVGDAARIRASEVRYQKTDARDAEHILDLLRTDRFPRIWVPSLGERDLRQLLVHRMKQVRARTQVKNQLHALAISQGVCRKDKLWSVKGRKELESLALLPWAARRRKELLETLDGLDEQIRELDRAVEEAGREREEVALLRTHPGVGMVVGLAFVLTVGPVERFRNSRKLVSYWGLNPREFSSGGRQRLGAISKQGNTMMRWLLVEAAQTAARLDPQLRRIYQRLKKQKTSAVAKIAIARRLAVRLFWMLRTRHNYTQLVHMSGSPSSGVVPPPAGSTT

SEQ ID NO: 129080 - protein, 386 aa, unidentified
MQASTVGTPTASHYGTIFITIELSQKSWLVTLHSPDQDKLSRHQLAGGDHAGLLALIGRIRDRAARALGGVPAVASCYEAGYDGFWLHRLLLAAGITNYVLDPASIAVDQRARRVKTDRIDGETMLRTLMAFLRGEPRVVRIVRVPSAEQEDARRASRERDRLVREQTAHTNRIKALLRLLGMAIGNPRRRDWLSWLATQRDWQGQAVPPQMLGEIRHEHARLMLVRERLDALAKTPAQADPTPAAAQMTERSELLLRLKCLGPAFATTLTNEVFYKDFRNRREVASYFGLTPSPWRSGGIDRDQGISKAGNPRARCAAIELAWLWLRHQPNSKLTLEYRKRTLDAGKRIKRVAIVALARKLVVALWRYLTTGLVPEGAVLKTIKV

SEQ ID NO: 129081 - protein, 425 aa, unidentified
MGVYCGVDWAEGHHDIALVDDEGRLVGKRRIVEGLEGLAELIAMLAAAGDSAAEPIPVAIETPRGLLVAALRATGRPIYPINPLAVARYRERTSVSGKKSDHVDAMALANILRTDAHLHRMLPDDTSLARSITVLARAYQDAVWRRTKTVQELRARLREYYPGFLAAFAAGTGSGGGLSTTRLASRDARAVLAIAPSPAEGLRLSTARVEKALRRAGRQRRIAAVAGQVVAALRVPQLRQDPVVEHAMRIEALALLAVLDAVCASIEDLENALVAAFAEHPDHEIITSFPGLADVSGAIVLAEIGDDRSRFADDRALQAFAGSAPVTRASGKSRTVTRRRTKNNRLASIGYSWAFTASARPSPAREHYLRRRDRGDGHPAALRHLFNRMLGQLFHCLQTGQPYDPVKAYPHSTTITGAPATTVAA

SEQ ID NO: 129082 - protein, 423 aa, unidentified
MRGFGLDVHRDFCEVAIAEGSEVRSAGKVPTRVPALELFAESLVASDLVALEATSGAEKVTSVLQARGIRVIVANTRRLRSISQAKAKTDKLDAQTLARLLMSGLLDEVWTPDERTRTLRRLTNRRERIVRARSRAKNEAHGVLARNLCERPPVTDAFGKAGRRWFATLELPVDERLTLDGCLRQVDFLEAEVEALEREIARHALAWPQILRLMSVPGVNVNTAATFLASVGDIRRFSSPRKLVSYLGLDPRVHQSGGTPARHGRISKEGPSEARHMLGEVAWKVTLTAGPLRAFFERIRARRGSQVAATATARKLVVLFWHMLTSEEDYAFARPAMTRNKVRQLELTAGAPSQKGRKGIAGRKSKRLFEAERELSRQAEVAYRRFISDWTASGPSKGGAGATPGRASQKPLKGKAARQATSP

SEQ ID NO: 129083 - protein, 350 aa, unidentified
MIIIGCDYHPSFQQIAFVDTETGELQERRLQHREEAERFYRDLAAQGRKVRVGMEASGHARWFERLLAELQCELWIGDAAEISAKRVRKQKTDRQDAQLILRLMMKDDFPQIWVPSWENRDLRQLLWHRHRMVQARTRIMNQLQAVALNEGLRSKKRLWREAGREQLEAIRLAPWASQRRRDLLELLDRLNPTIAKLTQAIEEEVEKCPAARRLQTHPGVGPLTALAFVLIIGKADRFQCGKQIASYLGLVPLEKSSGNQRRLGHITKQGNSLLRFLLVEAAQVTARSLPEWRSKYVHLTMRRGRKIAKVAMARRLAVRLYWMMRKEWNYGQLTKFGSHAGKPGTGDGVK

SEQ ID NO: 129084 - protein, 370 aa, unidentified
MKKRITFVGLDTHKNSIEAALADNGRNTEVRLYGTIGGDLASLDKMIRKLQTTGVELRFVYEAGPCGYEIYRHLQAQGFHCDVVAPSMVPKRSGDRIKTDRRDARNLARLYRAGELTAIYVPREDDEAMRDLVRGRQDAIHAQRKARQQLGGFLLRHGFRYSGKCAWTLAHRRWMAEIKMPHPSQQIILEDYVHSVEECTQRVHRLTEQILQLMPDWRMHPLVTALQALRGVAPVVAATAVAEIGSMDRFESPRQLMSYLGLVPSENSSGQSIRRGAITKTGNGHARRALIEAAQAYSYPARISRVILKRQEAVPEPIRQIAWKAQLRLCARFRKLTARGKSRNRVVVAIARELSGFMWAIAKHVPVPQD

SEQ ID NO: 129085 - protein, 373 aa, unidentified
MPKYSTAFGMDVHLRSTTVCALDADTGEAVTRRFPGNPWGEIAGWMDGFPGPSLAAYESGYLGFAPQRELAGLGVECVVAAVSKIPRSAADSASKNDRDDAARMAKAILAHDISPVWVPSPEVEGIRDLAGAYDGATARLATAKQRLLAFLARRGFVYGGTTPAGNPRKYWAYDFLRWLDKVRPEGDGGVRALAALRNEVEAAAEARSDLLSEYRAAVDASPIAAEVAALQSIKGCAFALAAAFSAEVGDFTRFRSGRQVTAYFGLAPSQRSSGGSVRLGGISGAGNALVRKLAVEGSWCYAAARHQPKLMPRDTGVPLEIRMHGRKGSERLLRRREEMLARGVPAAKANAATAAELVRWLWALGMMCREGAE

SEQ ID NO: 129086 - protein, 315 aa, unidentified
MDSAERYVGIDVSSQVVDVHVRPDGAAKRFERRFGFDAVVEFLRPYSPKLIVLEATGGYEAPVAAALASAGFALAIVNPRQARDFAKATGKLAKTDKIDASVLAHFADAVRPAAQQLRDEEARELDALVARRRQLVEMLVAEQNRLHVSPSRSAKKDIEQHVEWLKKRIKDLDGDIGKAVRQSPLWREKDDLLRSVPGLGRITSSTLLAALPELGTLDRRKIAALVGVAPFNRDSGTMRGRRTIWGGRADVRSVLFMATSVAVRCNPVLKAAYARLLATGKAKKVALVACMRKLLTIANAILRDKSAWRLDSPPG

SEQ ID NO: 129087 - protein, 400 aa, unidentified
MSGLKGRFDSFVGIDVSKDKFDACGVTRDEVKLFQFSATMDRKGFEKLKGHLAVVSASSVLIGMESTASYHVNLFSCLVSEGYNVIIINPLLVSNYVKMQLRKTKTDKKDAVVIALFLLANGDTLIQRVTPSLISDLRDLSRQRVSLVDEMTALKINIKRLLNITFPELEHMTLVFTKSMLKLLRRYPSAFALRSADLVQLSQMLIADSYGRKREVFAAELMKAACSSVGTNSHAKEIILKQQVTLLLHLEEALQEITGVLIEMSRKLMEEDMNILTSIKGIGDKSAANFLIEMGGNINQYEGPGKIIAMAGLDPAVYQSGQHEGKGRITKRGNRHLRRIIWLMATRVIHYSDMFNVYYLKRRKEGLPYKMAVLATAHKLIRVIYAMLTQRKTFCPQVNS

SEQ ID NO: 129088 - protein, 311 aa, unidentified
MTETTIGIDISKATLDVHRLSDGAAAQFSNNKAGFRALKAWLKGHDIARVVYEPTGPYHRDFEVALQKNLPLIKVNPLQARRFAQSLGTKAKTDTVDARMLAVMGDAFSLVPQPQVSAIQRDLKELHVTRLALIRDRARSLNRQKTLTMALLKRQAKARLKLVIAQITDVDAAIADLLQNAPDTARATEIICSVPGLSKISAAAILTEMPEIGTLSRKQVASLAGLAPMTRQSGQWRGKSFIQGGRKLLRDALYMPALVAMRHNPDLKAKYTALIKAGKPAKVALVALMRKLIILVNTLIHDDRNWEEIRA

SEQ ID NO: 129089 - protein, 343 aa, unidentified
MQSISTIGLDIAKSVFQVHGVDAAGQVVLRRQLKRRYVLAFFQGLPPCLVGIEACASSHHWSRELQALGHTVRLMPPAYVKPYVKRQKNDITDAEAICEAVTRPNMRFVPTKAVEQQSCLMLHRARHLFIRQQTAVINSIRAYLAEFGVVAPVGRRGVEQLLEVVADPADRRLPEVARVCLAALGSQLRALKAQILEFDRRIIAWHRSNATSKRLDAIPGVGPALATALVASLADPRAFRSGRDFSAWVGLVPKQNSSGGKDKLGSISKQGDRYLRSLFTAGALAVIRYAKIHGTAHRPWLSGLLARRPTKVAAIALANKLARMAWAMMARNECYREPAALTA

SEQ ID NO: 129090 - protein, 346 aa, unidentified
MEHYAGIDVSLELSSVCVVDTQGKIVKETKVASEPEALIDFFGSQDFAVKRIGLEAGPLSQWLHAGLKRAGFETVLLETRHVKAALSAMTVKTDRKDARGLAQLIRMGWFRPVHAKSMGSQEVRALLVARKQLLGRLIDVELSIRGILRGFGLKVGPVTRKGFEARIRELVTGQATLERIAWAMLSARAALKSEYEKLHKTVLAIVREDAVCRRLMTVPSVGPLVAITYKSAMDDPNRIAKSKAAGALFGLTPKKYQSGEKDVTGGITRAGDEMVRTALYEAANVLLSRITRFSKLKRWGMDVAKRRGSKRAKVALARKIAVILHRMWVDGTTYRWTAADQIAAQA

SEQ ID NO: 129091 - protein, 386 aa, unidentified
MLPMYALEVPERKPAMKKNSTCPRSPKGRRMTPRRSFTIGLDLGDKTSRYCTLNDNGEVVKEGSVGTTRKGMLQAFGALSRCRMALEVGTHSPWVSRLLEQLGHEVIVANARQVRLISDSSRKDDRLDAQMLARLARVDPKLLRPIRHRGEKAQGHLMVIRVRAALVEARTSLVNAARGLAKSMGERLPKCDTDQMDVERLEGLPAQLQKTLQPLLQEVKSLTEKIKECDGKVEQIARSEYPETELLRQVSGVGPLIALTFVLTLDDRERFQKSREVGCYVGLRPKRSESGESQPQLRITKEGDVYLRKLLVQGAHGILSHRGPDTDLKRWGWKLAQRGGKNAKKRAIVAVARKLAILLHRLWVTAEVYQPLRNSPAAGGANQQAA

SEQ ID NO: 129092 - protein, 326 aa, unidentified
MTDLNNGILGIDISKAKFDVALMVAGKVKKTHIFENAPDGFATLSHWLLKQGITKVAACMEATGCYGEALATYLYDQGIEVSVVNPAQIKSFSGAQLKRAKTDKADAKLIAQFYQQMQPAHWTPPPLHVRELQALVQRLTALAQMEGQEQNRMQVAPAVIRPSIETVLATIRSEIKTVEELIRDHIDRHPDLKDQSALLDSIPGIGKATIARLLAFIGDVQRFDHAKALAAFAGLNPTVHQSGSSVRGKPHLSKKGNSLLRKALYMPAIVARRYNPVIKEFADRLKKAGKSNMVIIGAVMRKLLHIVYGVLKSGMPFDPAWAVNHA

SEQ ID NO: 129093 - protein, 339 aa, unidentified
MKVSTLGIDLAKNVFQLHGVGCNGQTVLKKKLTRDKFLPFLMQLEPCLIGMEACASSHHFARVLRQYGHEVKLIPPQYVKPYVKTNKTDAADAEAICEAVARPNMRFVQIKTAEQQAILVLHTERNILIRERTACANSMRAILAEFGIIMPRTLSQLYKKVPEILEEYDNELSPFVRCSAARQLEHLQGVEDQITLIEQELSSWAKTQPACQRVMKVPGVGLMTATYLVASVGNGQQFHSAKQFAAWLGLVPREFSSGGKQRLGRISKRGDRYFRYLLVHGARAVAAVIERHKDNMPWLYRLLSKKAYNVAVVAQANKTARILWSMLVHHTEYRTLSAV

SEQ ID NO: 129094 - protein, 348 aa, unidentified
MKNKSFVGIDISKNVIDVSIFREDTNIKMFPHEVFNNTRKGFGDMCSWLKKSRVVLSQALFGMEFTGCYSLDLEKFLTSKNYSFCMLSTRIVKHHPMGTIDKRDKNDSAKIADFLYRYDGTECAKPYKLPSKAMQQLKQLVNERKFLVEQRTNFMNRMQMFETKEDSAMYESYIKKLNHDIEEIDQEECELMSKEEDVFDTFQNLLTIPGIGFVNATNIIAITRNFTAFDTARQYARYVGVAPCSHTSGTSVKWRARPSAHCNGQVKADLSMAALRAVEYDVEMQMFYNRKLGGRKDSDTKRKALNAVKFKLIRRMFAIGKQKRKWEVLNTSDDRKNLHIEKSKASEL

SEQ ID NO: 129095 - protein, 366 aa, unidentified
MKKTSTVRVNGNMIFKGHKLTIGMDLGDRSSNYCVLDEAGEVLLEQKLATTPEGMKQTFERIPRSLIAMETGTHSPWVSRLLKELGHEVLVAHAQRVELISKSTRKDDRHDARTLARLARIDPELLGPVRHRSAKAQIHLTVIRARAELVSARTGLVNAARGLVKSYGQRLPKCGTQQVSRELAAELNAELREVLEPLLKEIESLNERIKEYDVRMEKIAREGYPQVELLKQVKGVGTQIALTYVLTIDDPHRFPKSREVGCFLGLRPGRRDSGQSQPQMHISKEGDPYLRTMLVQGAHYILGPFGEDSDLRRWGLRLAERGGKNAKKRAVVAVARKLAVLLHRLWVTGEVYEPLRNSHKAMRAVA

SEQ ID NO: 129096 - protein, 427 aa, unidentified
MNYTQNEKIMSITESTLVIGIDIAKQFQYARAFDYRGLELGKVKTFENTAAGFKTFQEWLELVAKENKKDNIIVGLEPTGHYWFTLGNFLKELEIKLVLVNPFHVKRSKELDDNSQTKNDLKDPKTIAKLVIEGRYSQPYIPEGIYSELRIAMGMRESLTKNLNIIKNKVDHWLDKYFPEFNDVFADWEGKAALMSLTEFATPEEVLLTGVQQIVATWRKEIKRAVGNQRAVRLVEAAKISIGIKEGLKMAKRELEANLEQYELYLKQNEQLEIEIEELAFQIPGVKEMVSIKGVGIMTAAGFISEVGDIKRFTHPSQIQKLAGLNLIENSSGKHKGKTSISKRGRSRLRSILFRVIMPLVSKNNEFKMLHEYYTNRKENPLKKKQSLILLCCKLIRIFFTVITKKVEYNPQKLISDTGFNLQLKVG

SEQ ID NO: 129097 - protein, 353 aa, unidentified
MTRDAKHTVSECYAGLDVSLKETAICIIDDSGSVVFEGKVETDPHAIAKRLADRAGDLVRVGLESGMTSAWLWRELRQLGVPVICLDSRHAHRVLSMKRHKNDRNDARGLAELVRMGWYREARVRSIDSQFARALLLSRQQLLQARRNIENQLRGTLKALGVMTGPSAGRRFMPRVVDLRADNPWLAPLLDPLLAVHASMLKQLNTVTRSVLDAAREDADVRRMMTVPGIGSMTALAFKAAIDDPLRFTSSAKVGPYLGLTPRQYQSGESEWVGGIGQANDPLLRSYLYEAAAVLMTRVRRSCPLRDWSLRLAKRIGWKRASIAVARKLAVILHAIWRDGTVFEWHTEEPQAG

SEQ ID NO: 129098 - protein, 328 aa, unidentified
MKLQHIIGADLSKESIDLASHQLQTHLKIANTVNGFGQMLKWLRQQKINCSDVMIVMEHTGLYSYHMEKFLYQHQISFAKVSALAIKRSLGLVRGKNDKIDAQRIARYGFEKKDVLVPAKKPHEAIKRLQMLHSTRNRLVRQRASLKCAVKEYKSVTKQSDLIIESQLILIKSFSQQIKKIETQITELITKQQEVNQNFQLLTSIKGVGEVVATAAIIKTGNFTRFMNGRKFACYCGTAPFEHSSGKSIRRKTRVSHLADKQMKTLLDQSAKTAIQYDKELKSFYERRLEMGKSKKSTINIVCNKILYRMFAVIKRQTPFVENYLQTT

SEQ ID NO: 129099 - protein, 343 aa, unidentified
MQTITTIGLDIAKSVFQVHGVDADGNVVLRRQLKRRYVMAFFQKLPPCLVGIEACASSHHWSRELQALGHTVRLMPPAYVKPYVKRQKNDTADAEAICEAVTRPNMRFVPTKSPEQQSCLTLHRTRHLFIRQQTAIINSIRAHLAEFGIVAPVGRRGVERLLEIVADPDDNRLPEVARACVAALGSQLLALKAQILAFDRRIMAWHRSNETSRRLDAIPGVGPALATALVASIADPKVFRSGRDFSAWIGLVPKQNSSGGKDRLGSISKQGDRYLRSLFTTGALAVIRYAKLHGTKHRPWLAALLARRPTKVAAVALANKIARMVWAMMTRGERYKEPVALAA

SEQ ID NO: 129100 - protein, 409 aa, unidentified
MTTDIDLSASPVAGVDTHTDTHTVAAVTPTGRHLATETFPTTRPGYTHLAEFLSKHGVGAVGVEGTNSFGAGLTRHLIDRGYTVVEVLRPARSIRRRDGKSDPVDALAAARQVLTGEGLSTPKDSTGPMESLRALQITRKQLVSTTAKLITTMKSLLVTAPDDIRTRYATMTNHALVNALVYCRPSSDVTDPRNGVLTSLKILATTYRALRVQCDELETRIAALVSVINPHVSNIMGCGALVSADLLISIGDNPERIHSEAALAHLCGVAPLPASSGRTNRHRLNRGGDRRANSALYRIAMVRMKCDQRTREYVARRTEEGLSKREIIRCLKRAIVREIYRVICTRRSTPQPRDLRRDELKELRIAKHLTQVVVAKHLGCAPARISDIETGKRPLTELASAYEKFLKSA

SEQ ID NO: 129101 - protein, 401 aa, unidentified
MKEFNAEAVRIEAASALEAVRPAQAGRKYPAYIGLDVHKETIAVAVARVGRAAPESRGEIANKPKTVANLVERLNQEFDGEVLLFCYEAGPCGYGLYRQLLALGHDCQVVAPSLIPKKPGERIKTDRRDACKLAGTLRSADLTAVWVPDEEQEAMRDLTRARDDMKGQERKARQQLNAYVLRHGHAWPSNKTRWTQTHYNWLESLKFAHDWQQVVLQEYIDAVKAASQRVADITAQMERVLPQWSLAPVVDSLVALRGIDKLAAMVLLAELGDISRFDSPKQLMAYLGLVPSEHSSGGRRRQGAITKTGNSHARRMLVESAWSYRFPARQTAHLKRKAANASDEAKVIAWRAQKRLCGRYRTLLQAGKNTKQTTVAIARELTGFIWDIVCHEMPKVQQTTR

SEQ ID NO: 129102 - protein, 345 aa, unidentified
MKIIRVGVDLAKNVFQVHGVDRDEKPVWRRKLSRDEWLKVLLDKIEPGCEVGMEACGGAHHWARQLEARGYAVKLISPQFVKPYVKSNKNDANDAEAICEAMSRPNMRFVSVKTVEQQDIQAIHRIRAGLIDQRTAKGNQIRGLVTEYGLVAPKVISNLREAIPCWLEDAENGLSSRFRRLLSGLWADLLSLDQRVKELDQEITAVVAEDPVAQRLQQLRGVGPMIATALLATVGDAAQFANGRQMAASLGLTPKQNSSGGKEKLLGISKRGDSYVRCLLIHGARAMIWAARDKEDRLSQWVTRIATTRHPNIAAVAMANKTVRIAWAMIRNGSDYQPGFASAAA

SEQ ID NO: 129103 - protein, 341 aa, unidentified
MRHNGVVENRADVVIKLAGRLGRRGERLHFCYEAGPCGYGLHRLLSGLGHDCTVVAPSLIPQKPGDRVKTNRRDAAMLARLHRAGELTAVWVPDTAHEAMRDLVRARATAARTLTKARQHLGGFLLRHGKIYAGPRAWTVAYRRWLTTVRFDHPAQQIVLQDYIHAVEDAEKRIARLVEQIEQLLPHWSMAGVVKAIQAMRGVAFINAVTMVAEIGDFSRFSNPRQLMAYVGLVPSEHSSGDSVRRGGITKAGNSQARRALIEGAWTYRMQARVSRKLHDRLEDLPQGIRDTAWKAQVRLCARYRRLVAKGKPKVVVTAAIAREMIGFIWAIARQVPLQPV

SEQ ID NO: 129104 - protein, 346 aa, unidentified
MMAIGVDTHKASLAACAIDALGRSRAERTFANSAAGHRAFERWLRALPLPRRIGIEGSGSFGAALAQRLAAAGEDVREVPVILTHRERRRTGRPGKCDPADALAIARVVLREERLPLVRDPLAYRDLKLLVDYRDQLIAEQTRLRNRLHSDLQVLMPGYGAQLGRLGDLKHATSIPAARSLLARLSGVAVELTGLRLARLEALAAEIAETKRRLDAALVSKHPALTSICGVGAVTAARLLGETGDPRRFRSAAAFAMACGVAPIPASSGKTQRVRLNRRGNRQLNRALFIVALTQTREHAPAREYMERKRSEGKTWNEAMRCLKRHLADVVYRAMLKDRCEELLTT

SEQ ID NO: 129105 - protein, 342 aa, unidentified
MSISYVGVDLGSSNFHQVAVNHSGRPTRNREFTTSEANLIKAFADLHGEIHVHLEAGELAPWASEIIRPLVTRVVCSHPQTNAWIARDRDKCDRIDAYKLASLLRLNEFKEVHYPREPLRRDFKTLVHHYDELTQQQARWKTKLKARLRMQGIIVRGEEVFSARGRQAVLEQVKSPVVRTALKQLYAVLDQSVASQTEAQMLMLRAAQALPEIRIMRTAPGVGPIGACRFSAYIHTPQRFSSTRKLWKYCRLSVSHRSSNGKPLRRPRLDRMGCGRLKDVSRKAFEAALRRRDNNGFKRAYQRALETTHDATHARLTVQRKIVSTLRAMWINQTPYCDELMR

SEQ ID NO: 129106 - protein, 334 aa, unidentified
MNYTHFVGIDVSKSKLDYAVYHGKQLSFQYESGNNLEGIKSFLKLLKKQPGYLMEQTLFCMEHTGIYNQYLLHSLHTFKANVCLESSLQIKLSLGLQRGKNDRIDAVRIAQYAYKSREELRLWQPKREVIEQLRHFTTLRYQLIQAKKQLTVAVKENIPLNKKLQKQLTATCKTTMAALQKDIEKVDHHIEEIIVSDDELTRLFSLITSVQGVGKVTAAEIIISTNEFKNIDDPSKFACYSGVAPFEHTSGSSIRGKTRVSHKANKYMKSLLHMAALVAIQFNEDLKAYYHRKLLENKNKMSIINAVRNKLIWRIFACVNQNRPYQNNYLTALV

SEQ ID NO: 129107 - protein, 472 aa, unidentified
MRTIGIDLAINAAHMAVVADEQGKVITPLIRLETTPEELEALLGRAREGVNEEQPLRVVMEPTGLAWLPVASYFIQHGVTVYLVNTQQVADLRKFYSKHAKSDRISARVLVRMPWVNPETLHPLHLASASYLSGQRWCKQQDGLGELITAIKNRVQAWERAFWPGLEQVVDDLFAPWVRRWREAWYDPWQLQEADTTQLAASLAEAGADPAETMSLACALQAVARRAVALFGTPQGRYPPYVDYAVLQDQVLRELRILETYESEQQAVQRLARRLYRQLHPTRHLESIKGVGQEGAAVYLFFINDVMRFTLQKEFRGWSGMVPESDQSGEVEKKGLRMTKAGPDLVKKYAYINAEVARQWDPQIAAIYYDQMVHKGKHHVQAVCHCATHLLDRVRAVLRDERPYELRDVDGTPVTWQEGRAIIAARFQVPEEVRQCNSQRARKARRDMRAEKKRRRRSHHAGKRLTQSRHPN

SEQ ID NO: 129108 - protein, 330 aa, unidentified
MFQVHGVDERGHALVKKTLKRAQLPAFFASVPPCLVGMEACSGAHFWARKLQGFGHTVRLISPQFVRPYVKSNKTDAADAAAICEAVSRPDMRFVPIKSIESQGLLVLHRARQGFIRSRVAQTNQIRGFLAEFGIIIPQGAYHIQPRVAEILEDAEIALPGTVRELLLQLVAHVRYAHEQEQLLEARIKRWHKDNEASSRLAQIPGIGPLTASALVASIGDVSAFRNGRQLAAWLGLVPRQHSTGGKAHLLGISRRGDTYLRTLLTHGARSVIICAKQKPGYEQSWLGRLLKRKHHNVVVCALANHNARVVWALLKHDRQYRADFSPQAA

SEQ ID NO: 129109 - protein, 397 aa, unidentified
MYIVGIDIAKRKHEAAVIDGEGTVIIKPFSFTNNCSGYNRLLAMLAKAKLPLDEVSFAMEATGHYWLALFTRLQKEGFRVQVINPVQTNSIRSFYIRQAKTDPRDALLIAEVIRFGHFSESTLHPENIYELRELCRGRHAIVSMQADVKRKVVALLDQVFPEYETAFTNMFSDTSMAILQTCPTPKELSEMPLEELCHLIEVSSHKRFRMAKARELQELARNSFGFAMAGDVFSTMIRLYAKHLDFLKQQVQEMDRKIAEIMDTLDTPITTITGIGPTLGAYILSEIGDISRFSSAARLAAYAGIDPTMRQSGEYNGVRNRMSKRGSPYLRHAIWLAASSAVLHDPALKLYFQKKRDEGKPYMASVGHACRKMVSIIYAVMRDNKAYTPYIPNEISA

SEQ ID NO: 129110 - protein, 341 aa, unidentified
MQVATISLDLAKHVFQIHGIDAAEKVVVRKQLRRSQVMAFFEALPPCLIGMEACATAHYWARELTKLGHEVRLMPAKDVKAYVKRNKNDAADAEAICEAVRRPTMRFVRLKSAQQQGQLMQHRTRDLLMRQRTQVINALRAHMAELGIVAAQGREGTKALLAIIADDGDERLPVDARASLIVLAAQLQALQTLIGSIEKRIIAQHRASEASKRLATVPGIGILGASAITTMVTDPKAFRSGRDFAAWVGLVPRQDSTGGKHKLGPISKQGDRYLRRILVVGAHAVLRRARQHPEKYPWLTRLLARRPFKVVAVALANKMARIAWALLAKGGSYRVPRLAAA

SEQ ID NO: 129111 - protein, 311 aa, unidentified
MDATVVGIDVSKDRLDVHVRPAGDAFAVARDGKGIAELIERLRPLGCGVIALEATGGFETVVAAGLAGAGLPVVVVNPAQVRAFRRALGQRAKTDPIDAAVIAHYAEATRPPVRALPDAATQLLADLVARRRQIVEMIKAERQREARAPARIAKSIARLIRALEKELASVDSDIDDAVRGSPVWAAQEELLASVPGVGKTIARTLLAELPELGRLDRRQIAALVGLAPFTRQSGQWRGRSFIGGGRTAVRSALFMGAMVAARFNPTLKAFRDKLVAAGKPKLVAIVAVARKLLTILNAITRTQQPWQPQNA

SEQ ID NO: 129112 - protein, 406 aa, unidentified
MKCFVGLDVSSTKLDVCIMLSDTSTPVTASLSNDLSGATEIKNHILDLNHTYHFERIVIGMEATSLYSFHPAMFFHEDSQLKELHVEIMVEQPNKIKKYRDAFYIADYFRIERFSPSFLKEEKYMALQHLTRTRLQIIEQLTRTKQHFIENIYYKCNTLAYQFKKEELSTNLWSSTMMTLMTDEMTLDELANMPLQELDDWLQKLGKGHFKDSEKLAQTIQAAIRGSYRLSKLQQDSVNVILGLLAREIRNLEKMIKEIDKAIEDMVETIPEYQCLTSIPGVGKVYAAGIIAEIGQIERFKDHPQVAKFAGLNWREKQSGNSNSQHTSLVNRGNRYLRYYLVEAANSVRHYDDEYKDFYKKKYHEVPKHQHKRAIVLTARKFVRLVDVLLRNHQLYTPPRRLMEDN

SEQ ID NO: 129113 - protein, 349 aa, unidentified
MEVTTIGIDIAKRIFQVHGVDKNSKTILKKKLMRDQVLIFMANLPKCLIGIEACGGANHWAREITKLGHEVKLMAPQFVKPYVKTNKNDEADAEAICEAVSRPNMRFVPIKSVEQQDILSIHRVRARLVKNRTALANEIRGLLLELGFIIPKGINKIMDKLNEILDSNELSGISYRTFSELKEEFIDNNNKVKALEKRLKELAGQCELYERLHTVPGVGLIIGTALVATIGNASNFENGRQLAAWLGLVPRQNSSGGKEKLLGISKRGDVYLRSLLMQGAMSVLNAKLRYATGEQKDKKSTSKFTHWMMNLAERCGHNKTVVAVANKLARVIFSVLSTGEVYAENKVCS

SEQ ID NO: 129114 - protein, 361 aa, unidentified
MKVVCGLDVHKDSVFCCILCANGEKIQHKFGVLTEELVTLRDLMVSEGVEECAMESTSIYWIPIWRVLEGSVKLHLVNPYFIKQLPGKKSDVNDAEWIATCLSKELIASSFVPDDKIQRLRQYDRRIFDLNASISRNLVKLDQCIQRCNIRISNYISTTDSKGYRSIVKLISQGVTDAEVLVKELHGRTINRHGRETLVKALTGVVSETDIDIIKQLVEEIELQQRHKDEAQQKMTALCMEWFPQEVENLQTIPGVKERSATSIIAEIGTDMTHFQTPKKLVSWVGLRPRNEESAGKIKARGITHGNRFVRKTMIECSWGAARMKDSFFAEFSYRQCIERRKNKMKVQVAIARKILVAVCT

SEQ ID NO: 129115 - protein, 457 aa, unidentified
MNRKRTKSKLDRAMPMVHPNAAAIDVGATMHMAAVRADRTPEPVRSFGTFTTDLDRLVTWFKECGVETVVMESTSVYWIPIFELLDARGFTVFLVNARDAKHVPGRKTDVSDAQWLQRLHSYGLLRASFRPKGQIAELRAYVRQRERLLEYAASHIQHMQKALTEMNLQLHHVVADITGATGQRIIRAILAGEHDPKALAHLRDYRCHASAETIEKALTGSYRAEHLFALEQALALFDAYHEKVSACDVRIEAVLKELSIGRGRRSGSLPSSRRRTDQTNAMAFDVRAALFALLGKDVTQIDGLGPYLSLKLIAECGDDLSAWPSAKHFTSWLCLAPSNKISGGKVLSSRTRRSGCRAAALLRLAAVTVGRTDTALGAFYRRLSARIGKAKAVTATARKIAVLFYNAVRHGMEYVDPGASFYETRYRARVVDNLHRRAKAFGFVLQPAEPTSSVAVS

SEQ ID NO: 129116 - protein, 409 aa, unidentified
MTNTLFVGIDVSKRSNVLRFTDSTGETLSLFNAPNNHDGAVKILEKLKDTILNTDFSSVTIGMESTSIYADHLAVFLRNDNFLKKWNVKVHILNAKQVSKFKESYPELPKNDNIDTLIIADYLRFGRIAKEVNLDEKYIALRNLTRARFQVAQNLSREKTRFLETLFYKFSALDSSKVFSDTFGATSIAIISEFFSVDDINDMPLENLADFLAQKSKNSFTDPEKIALELKAAAKSSYRLSRTVTDSLNQLLAVRLVGIRSLQQQIKDLDKAISSYMQLFPDILSSIPGFGPVYSAGILAEIADIHRFNSHAALAKYAGITWSRYQSGGFEASNTKLILSGNKYLKYYFLEAANKVRVHDTEFQRFYHSKFKEVPKHQHKRALALTARKLVRLVYALLDTNRLYISPTK

SEQ ID NO: 129117 - protein, 353 aa, unidentified
MDGEVLISVDPHKASSTLAVFDPVTRTAIDGARFANTKEGYRELARFAGRWAHRRWAVEGCHGAGRSLAQRLVADGERVVDVPAKLAARVRVFSQGHGKKTDRHDAVSIGLAALDAVGLHDVALDDAAVTLRLLSDRRQELVSLRTQAICRLHRLLAELTPGGVRRELNATKAAAVLGRLRPRDEPGRIRRQLAMDHLGDVRSLDRRIKAVGAQITDVVATTGTTLVGIFGVGPVLAARILAEVGDTARFPDKDHFASYNGTAPIDASSGEQQRHRLSRVGNRRINHALHMAAVTQLRNPTSAGRAYYERKLAGGKTRKEALRCLKRRLSDVVFRQLVIDLQPAATAPNTITP

SEQ ID NO: 129118 - protein, 339 aa, unidentified
MKLYTGIDLHSSNNYIAIVDNKGKRVFKRRLQNDPTSILTTLLPHKNNITGIVVESTYNWYWLVDLLMEEGYKLHLANPSAIQQYKGLKYSDDKHDAFWLAEMLRLGILPEGYIYPKEDRPIRDLLRKRSHLVKLRTSLILSLQNIISRNNGFKMKANDVKALTTDRVAPYLKHNEDLALVGKISKESIDFFTRKITDVEAIVLKRIKLQKPYTFLLSIPGVGKILALTIMLESGPMERFKKAGNYVSYCRKVSSKWLSNEKKKGKGNSKSGNKYLAWAFSEAAERARHFYPEPRAYYNRKMQKTNLMVAHNALSHKLAKAAYYIMKDGVSFMPEKIFV

SEQ ID NO: 129119 - protein, 503 aa, unidentified
MTTGKRQAVHALQQPLTAVHRAARIPEQVREQAEACAKLASLPVQHEHAAGINVGDASHWACVEATPDGSDRVREFPAHTPGLRQLVAWLRHCGVTTIALEATGVYGHVLYLTLLEAGFQVITIPPQFARQIKGRPKTDKRDCQWIQRLHKHGLLPSIFQPDEATHTLRDYVRQRANLVRLSGQHIQRMQKALELMNLKLTKVLGDVTGVTGLKIIRAILAGQRDPHELAKLRDRRCKHTETEIAEALDGRYRPEHLTELRLCLALWAKYQEAIAELDTVIAAQLRSMRRQTELPPLPPKPRVRGRKPHDPRFDVRTALYYLTGVDLTAIEGIDEIHALTLISELGSDLTKWPTVKHFTCWLGLCPNWQKTGGKVKSSRVRRGKNRAALALRLAAWSLMRNPSYLGAYLRRQRSRLGAPKAITATAHKLARIVYHLMRYGLAYVRQTEAAYAVQVRDRLEQQLHRRAKELGYELKKIEPKLETLMVNGEQLTVKDDGEIVAAK

SEQ ID NO: 129120 - protein, 378 aa, unidentified
MTETTTTTATLTKATSTIGIDLGDRKSHICVLDEAGQILEEGTVATTAAGLRKRFERCEPTRIAIEAGGQSGWVNDLLTELCHDVIVANPRKLRMIFQNESKCDRLDAEQLARVARLDIKLLYPIQHRERSARVDLAKVRSRDTLVSTRTALINSVRGVLKSFGARVGPKGAAYFHGWVEDQIPEELRDALRPILATLTTVGEQIALLDKEIERLATEVYPETEILRQVDRVGLHTAVRFVLTVEDPARIKDSRDVGAYFGLCPRRQQSGARDPELRITKAGDRDMRRHLVQCAQQMLGPFGKDSDLRRWGLALAERGGKSTKKKAIIAVARKLAVLLHTLWKTGQVYEPLRMAERKAKRTAKAPAPAAATPTEAVSA

SEQ ID NO: 129121 - protein, 313 aa, unidentified
MQQPSHVGVDVSKHHLDVAFPGVSKVWRTPNDASGIAALIRRVQRLDSPHVVCEATGGYTRRLTSDLAAEAVPLSRVNPRQVRDFTRATGRLAKTDEIDAVAILRFADAMHPTASPVPSPDQVRLTELIRRRRQLVDAAAQEKQREPMHGQPFVTGSVERHLAFLATEIAALYQAIADAIEADGMLARRAELLRSIPGVGVVTAATLVAELPELGTIGNKQIAALTGVAPMNRDSGMSRGQAHIAGGRMSARCCLYMATIVAIRCNPAIRPFYKRLREQGKPPKVAIVAAMRKLITTANAMLAHDRPWHADPA

SEQ ID NO: 129122 - protein, 322 aa, unidentified
MQGKIPSVRAGTTVYVGIDVCKAWLDVNLHPVGQSFRVANSKEGIKLLCQKLAGAEVVLAVVEATGKLHRLAHSLLSQAGYPVAAVNPARPRKFAEAVGQLAKTDKIDARLLALYGAAIGPKATPVPAKTVAALQELVLARQAAKADETALKNRHAAAESKVLKRLLQQQLKACARAIAGLEAAIAALLESDALLKRRHSILGSIKGVGPAIAATLAACLSELGLLASGKIASLAGVAPFDDDSGNRRGLRRIKGGRAPLRQALYMAAVSAARCNPDLKAFYERLRAAGKPAKLALTAVMRKLVILANSLVREDRYWTPKHA

SEQ ID NO: 129123 - protein, 351 aa, unidentified
MKTKTTTNHTAPDNNLYYVGLDVHMKFTAICILNPRGAIVKEQKVYGDSEKVCRLLRGDVPGPFAVVIEASDSYGVWYDRLAPIARSVRVAHPTDLKNIWNCKRKNDRIDARKLALMLMLGTVPAVHVPDREVRQWRSTIQHRKKLVQKRTGIKNQIRALLRRAHIKAPRNLWSKKNLRWLAAVIFPTEGEALQRDMALEDLEHVNAQIRRVEAELDARAEAHPGVMLLKTIPGVGNRTAEAVIAWLDDIKRFSRAKQVGAYFGLVPTEDSSADRRRLGHITRQGPGVVRQLLVETVWRMMRCNPLVRGWVERFQHGQAKRKHIAVVATAHKLARCMFAMLRTGEVWNPAA

SEQ ID NO: 129124 - protein, 412 aa, unidentified
MEVLHNRCCGLDVHKSSITACVLLEQGHKPQRHLQRFGCTTRDLLELVSWLKGFGVQYVAMESTGVYWKPVWNVLEEHFQMLLANAQHIKTVPGRKTDMKDCQWIAELLRHGLLRGSYVPSLLIRDLRDLTRTRATLSQEQSSVGSRIQKVLESANIKLSSTASNTMGKSGRAILDAIVSGEDSAERLADLALGKLRSKISQLQLALEGRIRDHHRFLLDSLLRQFRFLEAEITALDLRLEHLGKQHKELADAVARWITVPGVERVAAWAFVAEIGFDMAQFPTAAHLASWAGVCPGNHESAGKRLSGKSRKGSPWLRRMACQSAWAAARTKNCYLSAQFKRLAARRGSKRAIIAVAHSLLVIGYHLQKNCSVYQELGGNYFDHLHAEGLKRHLVKRLESLGLTVTLEPHTA

SEQ ID NO: 129125 - protein, 367 aa, unidentified
MSEITANPIVRVGVDLAKRVIQVHGVDSAGKVVTNRALPRDKFLIWCAQLPAGCVLAMEACAGSHHWARQLGTLGLTAKIIPTHLVSPYRLQGKGGKNDANDAAAICEAASRPTMHFVPLKRADQQAMLCVHRLREGIKSDRAACINRIRGLLTEFGVVFAQTVVALREHLDDALEDAANALPGLARLSIERLKTQWQDLDEHLHWCDERIAAHVKESVQANQALQVMGVGPVTASAVVATVGDFTQFKNGAQFGAWLGLTPRQNSSGGKSKLGRITKRGDMYLRMLLIQAAKSMVLTAKLRDDPISLWVQKLRERSGWQKAAVALANKNARILWAMMTKGEAYNARHVSVQPGLVPSPMAVVATPT

SEQ ID NO: 129126 - protein, 363 aa, unidentified
MTVYIGVDFHPYEQSVAFADDRDGEIGYRRFLHSDKQSIKAFYRKWGEDAVIGVEATGCLWWFEQLLTTNGQQLQIGDPRMIRRAALSRHKNDFRDAETILDLLMRGQFPAIVPRSEESREVLDLLHYRQSLVKKRTSIANQLQAFARNKGLAKFRLPAVKARKQLLDTAGTEVETLLVSSRLLLWAELTAQMKALEVRLEKLAAADERVLLLMTHPGVGLINALALVHTLGEVRRFRRKEEVVAFVGLDPLEKSSGQKKRIGQISKHGSRLARHLLGQAAQACRDQRIRTFYAQVSRRRGRPKAKVAAARKLLINCYLMLREGIGYEEFRRRGEVGLCEGSGELRGNTSVSEGLRARPAISG

SEQ ID NO: 129127 - protein, 306 aa, unidentified
MFPVGIDVSKNTLDLCMLYDGIKGRIKTRNIQNNRHSVENILRWLRLQHCGPEDVHVVMEATGVYHERLATELHDAGFYVSLANPHRSREFARGMGIMTKTDKVDAYMLACYAFLKNPHRWEPPAPEIRYLGALLRRRDVLLGDALREENRLEKYLSTDTPADIISSCMHMAQLLREEVSNIERQIKAHIKASPALRRDYTLLTSIKSVGPQLGMHMLAVLRSHDFSSAEQAAAFLGVVPIEKRSGTSVRSRPRMSKIGPPQLRAKLYMSALCGKIYNKRMRNIYDEMCLRGKPKMVAIGALDVAP

SEQ ID NO: 129128 - protein, 343 aa, unidentified
MERVYYIGLDIHKKTISYCIKLQDGAIVRRGEIASERNSLRQWLTEIPRPWKGAMEATMFTGWVYDFLKPHALELKVAHPEMLKAITAAKKKNDRSDSEKIADLLRVNLLPECYMASEEIRELRRILRYRNMIVRTAVRMKNKISGLLMEVGATYSKKRLHGKKYFNGLLETIEDVPPSVHDLLQLSRSGLEMFQGIQKKLLDTLRDNDLIRERVERLMTIPGIGEVTALTWVLEIGDAGRFSSARQAVSYCGLCSAQKESAGKEQRGPISKKRNKHLQTVLIEAAKLAPRWNKQLAEIHAKELMRGNRNRATLAVARRLVFYMLSVERRGTAFEPMITVDAA

SEQ ID NO: 129129 - protein, 452 aa, unidentified
MAKKSNRRCDTLPILHPDAAGIDVGASELFVAVSADRDPHPVRSFPTFTRDLHALADWLVECGIRSVAMESTSVYWIPVYQILEARGLEVYLVNAQHVKNVPGRKTDVSDCQWLQYLHSVGLLRASFRPPGFICAIRSLWRHRASLIQMAAEHVLHMQKALDQMNLQIHRVLNDITGVSGLRILDAVLAGERGPLTLARLCHGGVKSSEDIIAKSLEGDYRPEHLFALRQSLAAFRYYQQLVLEADREIQLQLGELKTAATAQPTTPPRTKANPHYARHYEPKTFDLRGELYRVFGVDLTNVPGISALTAQTILCEIGTDVSRFRNASAFASWLGLCPERKISGGKVLFTKSRRVRSRVATALRMCAQSLHHAKDYLGEFFRRITRKLGRPQAITATAHKLARIVFHLLSTKEDYDESVFHKCEADTIRRAEYRLRRQAAQLGFQVIPAENI

SEQ ID NO: 129130 - protein, 336 aa, unidentified
MRSIGVDLHTNCFTVHYRPERGKSRLLEYKLSDISKFVSSLEKTDRIAVESTGNTRYFVDLIRPSVKKVVVVDPNHFEVIRKSVKKTDANDAESLSLFLSKDMLPEARMKDKEEAQISSLIQTRDQLVKLRSSLYNKIHGIFNSHGLKGKKESYGTEKGLERVLAMDFDAIVKLELKVIVSQIRGLNSGIKELDDEIASKGKELYKGHDNLTSIKGIGDRAATILLSVIGDVKDFADEGRLAAYFGIVPRVSQSNEKQQYGSITKRGSKIGRTTLIQCTLVAKKYSPYLSSYFDRIKHSRGAGKAIVATARKFLGIIYRTLKNGWVFKDFPNFEVA

SEQ ID NO: 129131 - protein, 343 aa, unidentified
MSDYSYFCGIDLAKNHFSLHAVDQDGKVILHKSVTRSKLLTTIANMPLMRIGVEACGGAHYWARTLNKLGHDARIMAVKYVVPYRTKGKNDLNDAVAICEAVQRPSTRFVPVKSPEQQAILSVHRMREHWVRERTALMNRMRALLSEFGLIIPVGRSSLMKHVPLMLEDAENELPHLARTVIADAYHHLGELNQRIADTEQVFDSFAKVSANVQRVMKVRGIGPQTATAILASIGNGSQFDKSRDFSAWLGLVPKQYSTGGKPRLGRITKHGDKYLRTLLVHGARTVIANLGDKQDKLSQWCRGVLERRGMNRAIVALAAKNARIIWALLTTGKEYKINYVNG

SEQ ID NO: 129132 - protein, 345 aa, unidentified
METMYYIGLDVHKKTISYCVKDGSGRIHTEGTIPATRLDLDIWMKTLPQPWTAAMEATIFTSWIYDHLLPHAAAVKVAHPLMLRAIAAAKKKNDRIDANKIADCLRCDFLPECYMASTEIRERRRTLRYRNLLVRQAVQMKNKIAVLLMEAGVSYNKQKLHKVGYFRELLATNQDIDEGLKSLLRLCRETVVRLGKTESALVRSLQRDSLLMERVERLMTIPAVGPITALTWALEVGDVQRFSSIKKAISYCGLCGAENSSANIIKRTPLSKQRNKNLQTILIEAAKMAPRNSVDLAMIYDREKQKDNANRATLAVARKLVAYLVAVDRRQKDFLVVESENRTAA

SEQ ID NO: 129133 - protein, 541 aa, unidentified
MGCGPVTIPSSENPLMCAAVRRPRPGRRSRQRGHVGKPNGVFSPRVQKVGPQHFGVVSVDCAKDRSKWMLTDFYGHVVVPPTFVEHHRTAFDQAVAAVRSAVSRHGIKDLVVAVERTGRYHRPVQSAFAAAGFDTRVVHPSVSCYFREAGAYDTKTDDTDLEGIFRAAVNGFGLQEQPWDAVYGSLQLWSRQRRDLVDKTSQLRCQILEYLNEYLPGYQRCFDDVFISKVALLIACHYAAPQAIAAAGLSALVQLCRQAHVQVHNATLMRIMGWAQDAPAPEQSASFYQQWVCNLNEDRLTKEKQIAACEQQLVALLVQTPYVRLLALSGINVVLASELAGELGPMTYYATARVITGRAGLYPRRYQSDQVDHASGTLARRGNRRLRYVLVMSADTLMRCNQYFGVLRAKWAHQGRDPRDIRVRVAGRYSRISFQMVTGKGGFRHPACQGPPAVLSKLIEFHNEHDIDPYTARTNLQRAAAQLPRAEQAREKKALHAQLDAARQSWGRGPKQLCSILPAVLEQLGGVPTNLIKSIASGETP

SEQ ID NO: 129134 - protein, 377 aa, unidentified
MITHYIGIDAHTTNYTLSTASDFEEKPYNTSKYAAKLHYILKYANTLCKKDKIQKENILLGYEAGCLGFKLQRDLNKEGFNCIVIAPSSIPGTEMNRKRNKKTDYRDAEAIAKALRNNDYSAVATPDEQDEAIRDYIHEREAQKKTLKAIKQRIGALCNRQGFYYEAGGYWTKKHLDWLKSLTFPNEFFREVLDSLLLEYEHVTEKIETMDKRIEAFAEMDKYRESVHKLLCFKGIKTLTALAVIVEVGDFARFMKAKNFVAFLGLSVGEQSSSTDHNQGGITKQGNCFIRRLLTEAAQCFSRVTSSKSKALKERQEGNSEEVIAYADKGNERLRKRYYHLIIHNMKNPNKAKTAVARELACFIWGMMTDNIHTVLS

SEQ ID NO: 129135 - protein, 412 aa, unidentified
MEILYPRCAGMDVHKESVSVCILTPGSGAEPNKEIQQFGTTTGELRQLRDWLQQNGVTHAAMESTGVYWKPVFNILESACQIIVVNARHIKQVPGRKTDKADCAWIASLLRHGLLDASFVPELEVRQLRDLCRMRTTLVRECVQVGNRLRKVLEDANIKLDSVASDALGVSGREMIVALVEGCQDPAELAELARGRLRAKLPELERALEGQVTPHHRFLLRELMRQLTFLEEQVERFEKQIEQQMPPFEWAAALLMTMPGIDRTAACALIAEIGSDMTRFASSRHLASWAGLCPGNNQSAGKQRSGKSHRGNRWIKGVMTEIAWAASRTKHSYAASFYRRLTPHRGKKRALVALANSLLQAAWHMLAERRTYREPGADYFDRLYRERLTVNLIRRLQKLGHTVTLQPAARCT

SEQ ID NO: 129136 - protein, 302 aa, unidentified
MVESYIPLGIDISKATFHVALLKGQKQSKYQQFTNDDEGFTKLSQWLEQQGSDRVHGCLEATSIYGHALALHLYQQGHRASIVNPMRIKGYAKSQLTRTKTDRADAKLIAQFCRDLKPAAWQPSEAEVVTLQAYTRRLGALEQMLPQEKNRLKISPDELKDDIEVHLAFLKEQVKSVKKRLLKHIQSHNNLKEQHSLLTTIIGVGDDTAARVLAEIGAIEHFDSARQLAAFAGLTPQEHESGTSVKGKTRLCKIGNRRLRKALYFPALVLLQRCPLAQTFRERLLAAGKCKMQDASGRSIDA

SEQ ID NO: 129137 - protein, 392 aa, unidentified
MYIVGIDIGKNHHEASIVSPEGKQIGRSLRFATTHKGADSLMSFIFNNIGNSSCIFGMEATGHYWYPIYSFLKARGYTIYVINPIQSDSLRKMYIRQTKNDSIDSFLIAEVIRFGQFGTTSMADENILAMRQLCRYRDSVISSRTEIKLRIGTIMEQIFPEYEKQFSSLWVSTSMGILEKYLTPENIENAPIDELFEIIKDKSHNRLTRAKAISIKEAAADTFGIKIAQDAFSFQLKQLIDRMNFLDKQIEALDCQILEYYEKFDCYLHTIPGIGMIAAATILAEIGDINRFKSSSALVAFAGIDPTVRQSGEFSSTHNHMSKRGSPYLRHAIFLAATTCSFHNSPLNAYYKKKRDQGKHHLTATGAVARKLTTVIYAVLRDSKPYEPKKFC

SEQ ID NO: 129138 - protein, 326 aa, unidentified
MEHELHYIGIDTAKEKLDVDVLRPDGRHRTKKFANTTKGHDELVSWLKGHKIDHAHICIEATGTYMEPVAECLYDAGYIVSVINPALGKAFAQSEGLRNKTDTVDARMLAEFCRQKRPAAWEAPHPLERALRALVVRHQALTDMHTQELNRTETAREVQMPSIDAHLLWLEAELKRLEKQIKDLTDDDPDMKHRRKLLESIPGIGEKTSAVLLAYIGLKDRFAHARQFAAFAGLTPRRYESGSSVRGASRLSKAGHVSLRRALYMPAMVATSKTEWGRAFRDRLAANGKKGKVILGAMMRKLAQVAYGVLKSGVPFDAARHNPVAA

SEQ ID NO: 129139 - protein, 345 aa, unidentified
MPIVGGLDIHRKQLTFDYLDTETGEVKRGQVAPADRAHLRAWLARFAGRDDVAFALEGCTGWRYVAEELAAAGVAAHVAEPADTAFARGRKRHAKTDRTDARHLRVLLEQGRLPECWIPPPQILECRALLEAYHDLRREHTAWIERIHAVFFHQGAPRLGEGALRTDRGLAALREAAAVHLSPAGQLQVATALDMLAAVEARMEVLRQQLLHAARHLAGARALQARLDGVGPLAGLAMTCWLGGAGRFSSSRKAVRFAGLDVTVYSSDGKRSPGHLSRQGPEILRWVAYEAGKTHGRASAPGHDYYAAVKNRQDGKIAALSQARRLIRQACHILAELGDDALAAA

SEQ ID NO: 129140 - protein, 355 aa, unidentified
MTSEKYIGLDVHQATISVAVMDASGKLVMESILETKAATLLQFLAGLRGNLSVTFEEGTWAAWLYDVLKPHVAHLVVCNPRKNALLKAGSKSDRIDARKLAELLRGNHLKPVYHGETGVRMLRELARSYLTLMEDQIRVMNRLKALYRSWGIACAGRDVYYSRHRAEWLEKLREPGVRLRAERLYQQLDAMQRLRRAARHDLLVESRKHSISSKLRQIPYVGPIRAALLIALLQTPHRFRTKRQLWAYSGLALEIHTSGDYGYPDGQLRRSKKVVSIRGLNKDHNHDLKGLFKGTATMASMRPGPFREFYLGLLAKGMKPAMARLTLARKIAAITLTLWKKGESFDAEKLKQQAA

SEQ ID NO: 129141 - protein, 336 aa, unidentified
MKSYEKVMGIDVSKKSLHLSLFDGVRHRQYQIGNDIPSLKEFLSHHPEEDFSQILFVMESTGVYHLRIALFLSKDLGYQVSVVNPFVIKKYAEMLLKRAKTDKVDARLIAQYGYNNPSSPFLVRDEESYELDQLLKGIEDLKLEIVTLKNQIEALTHQPYINQLMLSTYQELLSQLKKKVKELEKEIKKIIANYAPEEFLLLKSIPGIGDRVAAALVAMLNRFEPFDNAKEVCSFCGLSPNPYQSGETVKKKKGIVKKGNRYLRKLLYVAALSASRYNPDCKRLYQRLLSQGKPKKVALVAVANKLLRQAFAVIKSGIPYDPYYLEKKMNLLPQSA

SEQ ID NO: 129142 - protein, 357 aa, unidentified
MLSSNVKYIGLDVHKEAIAIAVLNGAGKLVMESIVETKSSTVLDFLHGLRGELHVTLEEGTWAAWLYDVLKPHVREIVVCNPRRNALLKEGSKSDKIDARKLAELLRAGLLRAVYHGENGLQTLRELARCYLTISKDLKRVKNRLKALYHSWGICCAGKQVYAARHREQWLSKIAQVGVHRRADLFYEQLDGLLVLRNTVRGELLAESRKHQAVKILRQIPSIGPLRAALLLALMQTPHRFRGKRQLWTYSGLAVVTHDSAQHRYVDGQLQRSRKPQLIRGLNQNHNHAMKEIFKSTALNASRCTGPLQDFYARLLARGMKPDMARLTLARKIAAITLALWKKGGSFDAEHLKSQAA

SEQ ID NO: 129143 - protein, 457 aa, unidentified
MPRPRRRSLQPAAPPLVNPHAAGIDIGATTIYVCVPLERDSAPIRHFGTFTEDLHALATWLEGCGVTSVAMESTGVYWIPLYQILEARGLEVCLVNARHVKHVPGRKTDVQDCQWLQYLHSVGLLRASFRPPEAVCAVRSLLRHRDTLVQLAATHTQHMQKALNQMNLQLHHVLSDLTGVTGLAILDAILAGERDPQVLATHRDPRVKAAPETLAKALVGDYRVEHLFTLRQALESYRHYQRLLGECDAQIAALLAGFASEVDPGAPPLPPARAKTQRHAPRFDLRGELYRILGVDLTAVPGLATLPLTLFAELGRDLRKFPSGKDFASWLGLCPDNRISGGTVLSVKTRQVIHRVANALRMAAQSLQRSRSALGAYYRRMRARLGAPKAITATAHKLARILYHLLTTRQPYEETRVATAEAQYHRRSESRLRAHARALGFQLVPLTAEATSMPPTV

SEQ ID NO: 129144 - protein, 402 aa, unidentified
MNAVGIDVSKGKSMVAIMRPFGEIVSAPFEIKHTASDINSLVELINSVEGESRIVMEHTGRYYEVLAHQLSEANLFVSAINPKLIKDFDNDSLRKVKSDKADSVKIARYALDKWHNLKQYSVMDELRNQLKTMNRQFSFYMKHKTAMKNNLIGILDQTYPGVNAYFDSPARSDGSQKWVDFASTYWHVDCVRKMSLNAFTCHYQNWCKRKKYNFSQSKAEEIYGKAKELVPVLPKDDLTKLIIKQAVDQLISASTTVESLRALMNETASKLPEYPIVMDMKGVGPSLGPQLMAEIGDVSRFTHKGAITAFAGVDPGVNESGTYEQKSVPTSKRGSSDLRKTLFQVMDALIKTKPQDDPVYRFLDKKRAQGKPYYVYMTAGANKFLRIYYGRVKEYLATLPES

SEQ ID NO: 129145 - protein, 370 aa, unidentified
MEQYTEAFVGIDTAKNKHALAIADLGREGEVRYLGEIDSAPAAVERMIRKLAGRYGKLYFCYEAGPTGYGLYRQVRALGHDCIVVAPSLVPKRPGERVKTNRRDAVTLARLLRAGDLTPVWVPDTVHEAVRDLVRAHAAASQDLRRKHQQLLSFLLRHGRIYSGRKHWTKPHLRWLAQQKFDHPAQQIVFQDAVDTIEDAVTRLRRLDEQLAAIVPSWSMAPVVEAYQAMRGVSFAVAVTFVAEIGDLQRFDNPRQLMAFLGLVPSERSTGERVRRGGLTLAGNKRARRVLIEGAWSYRHPARVSQTLQARLEGLPKAVRAIAWKAQIRLCARYRRLTAAGKKRPVVIAAIAREMAAFLWAIAQHVAPTA

SEQ ID NO: 129146 - protein, 291 aa, unidentified
MTITVVGLDLAKNVFQVHGIDESGRAVVRRKLRRSDVLLFFSKITPALVGLEACHTSHYWAREIAKFGHDVRMMPAQFVKPYVKSQKNDANDAEAICEAVQRPTMRFVPVKSENQQAALMLHRTRDLLVRQRSSLISAIRAHFAEFGIVVGQGIRNVERLLVLLRTEGDNRLPALAAEMLGILAEQLREIAARVHEVEIKLLAWHRANPASRRLESVPGIGPITASAIIATVGDPRQFKSGRQFAAWLGLVPQQRSSGGKERLGGISKRGDGYIRRLLVHGCPTSAPVRQI

SEQ ID NO: 129147 - protein, 372 aa, unidentified
MNYNTVYVGMDVHKESFSLCAYTIEAEKAFHYQRTEADYKKVLNYLEFLRTIYGDDANFICGYEAGCFGYTLYHQLTANNVKCIILAPTTMLEQRSKKRIKTDRRDAEIIAKCLAQHNYSPVHIPTAKDEETKEFLRMRDDHKLALKKVKQQILAFCLRHNYRYDGKSHWTAAHLKWLKALTPEALYKEILDEYLLTYQTLSDKIERLDKRIEELATQDEYREAVKKLCCFIGVKTHTALSVLVEVGDFKRFASAQHFASYLGLVPGEDSSGDDQNRLGITKAGNRHVRLLLTEASQCYARGQVGFKSKELKSRQSGNTPAVIAYADKANERLRRRYYKMVLNKYKKHNVAKTAIARELACFMWGMMTDNIA

SEQ ID NO: 129148 - protein, 313 aa, unidentified
MSQSTFVGIDVSKRSLEVHILPSGEYFSVNYDEAGLASLIQKLKTLQQLQVILMEATGGYEKPLAAELCAAGLNKVCIRNPRFIRDFARSTGQLAKTDTIDAAMIALFAQMFNLKPQTIPSQAEEQLKALVSRRQQLNKIRTAESNRLEKATTPRIIESLSKSLEFLNGEIQKLDNDIQLTIKQNPVWYAKEKSLRKVKGVGPLTACQLLATLPELGQLNRRQIASLAGLAPINRDSGQFRGKRMICGGRPAVRKALYMATLVATIYNPTIRNFYNRLLATGKPKKLALTACMRKLLIILNSILKNDPITICI

SEQ ID NO: 129149 - protein, 371 aa, unidentified
MKQSIADPGRKTKPARRAAIQRTGLAIGVDVSDKYSEICVLDRDGTVASQTRLRTTQAALHEYFSSHSPARVALETGTHSGWISRLLAACGHEVTVANARELRKIHQSDRKNDRADAQILARMVRFDPQLLAPIQHRSEQMQADISLIRARDVLVGARTKLINAARGLAKSMGGRLPHCTAPHFAQRVREQTPKELEPVIAPLVAVIDSLTEQIRCCDKQIEALADRRYPETAVLRQISGVGALTSLAFVLTLFDKDRFARSRDVGPYLGLVPRQDSSGDRSPELPITKAGNSYMRRLLIGSAHYILGPFGPDSDLRRFGTRLAERGGKNGKKRAIVAVARKLAVLLHRLWLTAEVYDPLRAGGLPATDAA

SEQ ID NO: 129150 - protein, 429 aa, unidentified
MHYTQNQKLEQVTEKTLVIGVDIGSESHHARAFNYRGIEYSQKDFKFGNDAKGFEAFKGWMQGYVRTNGAKKVIVGFEPTGHYWYNFADYLKALEIMFVMVAPQHVKHSKEMDDNSQRKDDHKDPRVIAKLVTEGRYIIPYVPEGIYAELRTAYSRYCELTETKVRLENRITRWFDIYFPEYREVYKNPGAKTGMMVLRIAPLPADVLKLGAEGINQLWRSVKVKAAGMKRAETLVAAAKRSTGRAGGDAVRRDLWQMLEEYELVTRHLAEMQVMLEELVAQIDGAERLLRIKGIGFITVAGFFAEVGDLSRFTDPKQIQKLAGLSVVTPDSSGKHNGQSEISRRGRKRLRMILFRAAMSLVKSNKEMKMLHEYYTTREQNPLKKMQSLMAIAGKIIRVFYGIMRNGTEYDPVRLLTDIRRPGTDKNAA

SEQ ID NO: 129151 - protein, 353 aa, unidentified
MNQIIRIGMDTSKSFFQLHGVDGAEQPVLRRKLSRKQMMTFFQTLTPTVVGIEACGAAHHWGRLLSELGHEVKLVPAQLVKPYVKRNKNDARDAEGLCEAMSRPTMRFVRVKTAEEQAALMLAGMRDRLVRSRTQLANSIRGYAAEFGLIAPKGLAKIEDLLLRTQMEESLPALARELFAKLAKEYAELEVRLAELDAQLMAWHRSNEMSRRLAKIPGIGPIGASLTVMKVQDPKAFRSGRDYAAWLGLTPKDHSTAGKQRLGVITRAGDEDLRRLLVTGAMSMVRQVQHGKDKPSPCKPSPWLVALVKRKAPKLAAVALANKNARIAWKLMVSGESYTPRSMPVPVALEQAA

SEQ ID NO: 129152 - protein, 421 aa, unidentified
MTFPQEREAVVGLLHEALPASTLVVAIDPGKVSNRVWMSTGEAGEVVPPMSLPVLRPGLDRLQRLVADHIGPSAPVFAIEATGGLHQAWVRELNQRFPGTVRLFAPSETTAARAQLGSRRFKTDDRDCAALTYLARQGQGRLVPDQLQDALAAAVRHRRGLIAEHKVTQQRLHDQLHALCPGLAAPDGHGRALHADSVIGQAVLDCAAAFAGRPPSARSLRARARGRILDREAEFWIDRWRTCLPPPADAAARAARLGRSLARWRALNADIAAIDGEIAALLAGSDGQVLTTLPGVGTSRAAAFAAFSLPIDRFPSAEHLYSATGLAPASYRSATINRRTPISRQGLPEHRDALMNLAWGLSQHCGPFIDRHHELRARGLRPIPARIALARHACRLAYTLLRTQQPFDEQRYRRARHQSER

SEQ ID NO: 129153 - protein, 341 aa, unidentified
MTGSSVNERCKGMKNQWYIGIDVSKNTLDVSIFTENEKLCNFPHKKINNDKQGFKELLSWIKGLGIQPKKTSFAMEYTGFYSWDIRCFLDHKKLKYRMENPLEIKYRSGVCNDKNDKLDSARIADYLCRYSDILTPSKLPEKNQIQLDALKKERKYYVEQRVCLQNRIQVVRYSDEKKRHQVLIDTLDKQIETVEKQMLAIIESDELLRNNYELLLSVPGIGPVNAINTIVNTENFTSFETARQYASYVGVAPHSKTSGKSVKWKPKPSRYCDCQAKADLSQAASCSIVYDKEMEHFYKRKIKNKNNADVIRKTMNAVKFKLIQRMFAVIRRRTPFEVLKA

SEQ ID NO: 129154 - protein, 360 aa, unidentified
MKYYAMKYYTSTTEFNCGIDLHAHQMYVCLMDRQGKILVHTNVRHNDFNFFLKLVAPYRHDLTVCAECMFGWYWLADACQAAGITFVLAHALYVRAIHGGKNKNDRIDSEKLAHLLRSNLIPPGYVYPAAQRPLRALLRQRLNFVWQRTQLLTRIQSHQQAHNWQSPFPASTNRDRWQEHLLAHESDPVYQLSLQNSLALIGHYDAQIRTVEAQLQKLTKVHAHRDYTLLQTVVGIGEHLGLTLLYEIGDIHRFPTVKDFLSYCRLVKGTVASAGKIKGLRGAKLGNPYLRWAFGEAAIIAKRDHTLIGPLYQRLEARMNGNKFKANTVLAIKLARSVYYMLKNKTVFDPQRLVAALAHN

SEQ ID NO: 129155 - protein, 450 aa, unidentified
MMEPQEIEDGEYEQILERVAAVDVAKASGMVCTRVPREDQPGKRRTRVWQVDAATSAILELADHLVGEGIEKVTLESTSDYWRIWFYLLESAGLSVQLVRAQDVKQAPGRPKSDKLDAVWLAKLTERGMLRPSFVPPVEIRQLRDYTRLRTDLTRERTRHYCRLEKLLEDALIKVSAVASKLDTLSVRDMLEALIGGERDPQVLAGLARGRMRAKHDRLVQALTGKFDDHHAELARMLLDQVDALSAQIGKLTTRIEELIAAIPAAQGVDADGTTGPTAGLGARAPVLPAVDRLDEVTGIGREAAQAIVAEVGLHMSVFPTPAHLVSWAKISPRTVQSGARSRAGRTGKGNPYLKGILGEAAAAAVRTDTFLGERYRRLARRRGKLKALVAVARSILVIVWHLLADRTTRYHDLGAGYYTSRIDKNRKTRNHIRQLEALGYTVTLAQAAA

SEQ ID NO: 129156 - protein, 348 aa, unidentified
MRFIGVDLHPTSLTACYLTEAGTETLQTYPLTQWPQFHESLQPTDRVAVEATGNTRHFVGQLAGVVAEVVVVNPSQFEVIRKSTKKCDRHDARALALFLSKDLLPTSRLKSELAAAINSLAQTRDRLVKLRTTLQNKLHALVVARGEQSRKSAFSSERGLGAVLEREWSATTRVEVEVIVAQIRSLNESLKRLDAELKASGAQLEGFNNLVTIKGVGERAAAILLSVIGDVADFDSEEKLASYFGVVPRVANSNETVQHGRITKRGSKLGRTTLVQCTLVAIKYSTYLRAFYDKLKAKKGAGKAIIATARKFLGVIYRTLKYNWVFEDFPNFVLVEGQNLNLGVDNSS

SEQ ID NO: 129157 - protein, 332 aa, unidentified
MKNKQVIIGIDVSKASLDVFIHGCKGYFVVDNGPAGFSTLLETVIKRTGCRKDELFFCFENTGKYSRMLSVFLHTQSIPFVMESALSIKRSLGLTRGKSDKVDAQRIALYAYEKRERLSPTVLPGAEIDQLKALLSLREKLVRHRTAYKNGLTDLHDCYKEGENSTIIGVQQRLICSVNQEIAEVERGIQAIIQGDESLLKNFKLVLSVKGVGKILAFYLLAYTANFTLFGSARAFACYAGIAPFEYSSGMVKGAPRVHPLANKHLKSLLNLAAMSAIQQKGEYQLYYHKRVNELGKNKMSMLNVIRNKLVYRVFAVVNRGTPYVDLLKFAA

SEQ ID NO: 129158 - protein, 418 aa, unidentified
MDRTKYIYIGMDIHKETHTAVLLNYLEEKLGEIKIKNNLQGFHKLEDYILKQKGELIPIFGLEDITHYGRNLSIFLLDRDYPVKEVNPSLSYMERMSYASTRKNDTWDAQCISAVLMRRSHLLPDANPQDYYWTMRHLVNRRNALVKASTKLMQQFHEQIQTAYPNYKGFFRELDCQTSLTFFEHYPSSKHLENISEEELGAFLRIPSNNSCSTNRARKILDLVAEETTKERDYQFARDTVIQSITRQLRAYQREIKELERTERQMYQELGYQLETMPGIDIVTACALVGHIGDIQRFFNGDKLANYAGVSPLRFSSAGKGKDLQNKSQGNRKLYSTLYFLAIQQIYLTNKGEPRNPVFRAYFERKVSEGKTKIQALICIMRKLIKIIYSMMKHKTAYDLPKIEEKMASDEKCAKMLV

SEQ ID NO: 129159 - protein, 498 aa, unidentified
MATNWLRLAGSTPLESFIKPIRNRAESVELHFMEADEMAKQLGKRKKDGAKADATEGLPPLNLHAAGIDVGSAEHYVAVPPDRDAEPVRKFGSFTADLHRMARWLKDCRIKTVVMQSTGVYWMALYDVLESHGLEVNVANARHTKTLPGRKTDVQECQWLQKLHTFGLLNNSFRPPDEIRVLRGYLRQRENLVAAAATCIQHMQKALTEMNIQLANVISDISGTTGLAILYDIVRGERDPYKLAMHKHSRIRASRQEIARSLQGTWRQELLFVLEQSLDLYQTYQQKIQTCDERIDGQLRSMEPRIDPLSEPIPEPRRGKDARGHQSGFDLRGQLYRITGVDLTRIAGIEVQTAQTIISEVGVDMSRWKTEKHFASWLGLCPDNRISGGKVLKRGTRHVVNRASTALRLAASALLRSQSALGAKFRRLRSKLGAPKAITAMAHMLARLLYRMLKFGHDYVDRGIAFYENKYREQQLKRIAKQAAALRMQLVPLAEVVS

SEQ ID NO: 129160 - protein, 360 aa, unidentified
MSNVPVFVGLDYHQDSVQVCVLDQQGTVLLNRAAANDCQALGRLVGPLGVVQRVGIEACCGAADLGQQLVEQLGWNVSLGHPAYIAHLKGSPDKSDYSDGRLIADLARVGYLPRVWLAPAYVRELRQLVNHRQRLVDRARALKLQVGAVLREQRVKIDRDRGSRWSKAWVASVRDNQRLSEHARWIVNDLLDDLAYTAGKVAGADGRLREATSADGVVERLMTQPGIGEVTAWVLRAYVGDFGRFRTARQLARYCGMSPCNASSGTKRADAGLIDGCNRLLRLTVVQAAHRLIRTVQRWGRLADSMRARGKPACVIVGAVGNRWLRTLHHAMKGAAAGTAPQPQPQPQRAGAGAGVTIAN

SEQ ID NO: 129161 - protein, 356 aa, unidentified
MSRDIKYIGMDVHKEAVVIAVRNSTGQLVMESIVETKASSLLQFIHGLHGELHVTWEEGTWAAWLYDLLKPHVHEVLVCNPRRNALLKEGNKNDRVDARKLSDLLRTGMLRPVYHGEHGLRTLRELARCYQTISQDLNRVMNRVKALYRGWGIACSGTQVYAPRYRQQWLEKIEHAGVRRRAELLYQQLDSLQALRRTLRSELLAESRKHKASKLLRQIPCIGPIRAARLLALMQTPHRFRSKRQLWTYSGLGIATRASAQYRFVRGQLQLAKKPQQIRGLNQNHNHEMKEIFKGAATRASCGVGPLHDFYVALLDKGMKPEMARLTLARKIAAIALTLWKKEERFDAEQLKTQAA

SEQ ID NO: 129162 - protein, 426 aa, unidentified
MAKIEHTSDALVLVGIDICKHRHEVLIAVPGKTRRRRLTITNSTDDFMRLIAILREYGLPVRIGFEATGNYHRVLMYHLGVAGFDLKLVSSVALARTREALHNSWDKNDPKDAQVILHMLQIGAVQIFQDPMVAGTNDIQELSKTHDAVSRSKTELWHRILTHYLPLYFPEADRFHRSSRTDWFLAFLEMFPSPHMISAMTKEEFIQTAWEVVGRKVEKSLLLSDIYETAKVSAGLPVAPDSDALRMFRMMLAEGRSLIRQRNAIEDRAVELLGDRPDYQLLRTIPGIGPINALTILAETGDLRRFHHHRQFLKFCGMDLATVQSGMFRGRSKISKYGNARLRRTLWLAGQTAVLKKANSFRDKFERYIAQDRHNPDLRRKAYTAIAAKMARTIHAVIKSGEPYRPFFEGTSPSGRTSLSKGRGGA

SEQ ID NO: 129163 - protein, 360 aa, unidentified
MSFNGTSVGLDVHALSVVAHAVDEQTGRVERARLCPDHGEILAWLRRLRDPVRVAYEAGPTGFGLARALAGAQIDCVVAAPSKLIRPAGDRVKTDVRDAAHLTRLLRLGEITAVTVPEADVEAVRDLVRAREDARADLMRVRHRLSKLLLRQGRIYSGGHAWNGVHETWLRRQRFDDAHTAAAFDHHFDAVLTATAARDRLDEQIVAVAASPRWADPVNRLGCLRGISALTGLALSVEIGDWTRFSGSSIGAYVGLVPTESSSGTSRVQGSITKAGNAHVRRLLIEAAWHHRAAYRNPGPTMRARWAKVDPALKARGHAGNRRLHQQWCRFNERKKPHVVANVAIARELAGWCWSLATLK

SEQ ID NO: 129164 - protein, 425 aa, unidentified
MKNNFLSTLFVGIDVSSKTNVLCALDFQGNKLLNLKALNNQPGAESILESILDCLNSNSLKFVVIALESTSFYSTHIANFLSSNEVLLAYSPMVYCLNPKTIANYRKSFVDMDKTDPLDAYIIADFARCGRIKSEPWRGAQFLALQRLTRHRLHLVESIAKEKTYMVSNIYLKFSQLAVLEKPDMPFSNTYGATSEAVLTEFLSLEDIAYSSIEDLVAFIKDKGKNRFSDPVGTAKLLQKAARDSYRLDKVLYEPLNIAIASSFNVISALQNEIKELDKAIEKNIKGINTTEYQSLISIPGIGPVYASGILAEVGSITSFSSNDALAKYAGLTWRIKESGDYSADDTNMTKTGNKYLRYYLIEAANSVRNNIPEFNVYYRKKFNEVPKHQHKRALALTSRKLVRLIFGLLTKNQIYSSSKVGEVQ

SEQ ID NO: 129165 - protein, 340 aa, unidentified
MTNNTQFFMGIDVSKPYFDAALLPVVEHKKKEMICERFDNSHEGIKSFEKWLKSHKVSFDDNTLLVIENTGIYHRLLWSFCSKKNLPIHIGNAAHIKWSFGIARGKNDKIDSQRLCQYAYKEADELKASPALDPVLLQLKDLMTARTKLLSQINAIKVYIKELKNVSDKSIQKTLEQGYKQALEGMAASIKNFEAEIKKIIANNTALEANYNLLITVPGIGHLTAVYLICCTCNFAGKITGKQLACYAGVVPFGHRSGISIKGKDRVHPMANKDLKKALHLCALTAIQFYPEFKQYYERKKAEGKHSMSVLNAIRNKIVLRAAAVVSKQQAYVDNTKIAA

SEQ ID NO: 129166 - protein, 379 aa, unidentified
MRRVCGLDVHKDSIYMCILYENGSKIESVFGVLTPELDKLRDLLVSHHVCEVALATASFHWIPIWNILSVDFSLKLVNPYFIKQLPGRKSDVKDAEWIATVLQKGLIRGSYVPDRMIQCLRQYERRNHELSKNIVHAEQRMDMILQRCNIRISNYVSCISCKGYQKVVNAIISGESNPKVLVTLIHKRTLNKHGRQVVEDSLNGFVSDTDRDILRQYRDERMQMEQHKSENKAKMQAICEAHYCEELELLQTLPGIKEESAANIIAEIGVDMKMFLTASAIVGWAGLKPRNDQSAGKIKSRKITHGNKYLRKILVEAAWSAARTKDSRFMKMYQRLLARGKSKQKALIAVARKLLVLIWNMLSKKEAFNPEYKRRIQAA

SEQ ID NO: 129167 - protein, 360 aa, unidentified
MASPTLTQPEGADHPDVVIGVDTHKEFHVAVALAPNGGRLGECSIPANRQGYGVLQDWALELGSRPVFAVEGTGSFGAGLCRELLAVGYSVVEINRPDRSTRRRLGKDDAIDAEAAARSFLAGTATIAPKGGTHLVEMIRLLKGNKDSASKSRTRAINQIKAILVTAPAVLREQLEPLAHDVLMATSSAFRVPLVDSPMAAAKKALRFLARRVLRLEREIDELLNDLDQLTQQACPGLRQTYGIGTDGAATLLVTVGDHPERLRSDAAFASLCGVSPLPASSGKTNRHRLNRGGNRQANATLHRIVVVRLRSHEQTKAYAARRLKEGRSKAEIMRCLKRFIAREVFHTLLGRPPVRTTAA

SEQ ID NO: 129168 - protein, 423 aa, unidentified
MIQATSEELIVSLDRSDASLAVALLSVATGRLEHTTVSTKPEELEVWWRDLQAAHPDTRLLVAFEQPAPNLLAFFAARPPAAIYALNPSATWAYRQSLVVSHARTDQSDAHHQALYILHHRDKLTPWTPPPRTVEQLGRLCEARRKFVDTRTGLTNRLQAVLKRYYPQALEIMHEDIWRTLNLAFLRRWPSPQALRTVRPATLQRFFHQQGSRSQARWERRAQVVAALVPLSPEEPISELLEVAVLVGQLEALNTGILRYDQAIAELFAGCADAALIEALPGAGPAMAPRLYVAFARYAGACESAEAFAAAVGIAPVTDQSGKMRKVYRRLRCDKHTRQSFVEWARESIKHSAWARAFFDQRKAAGHYAQAIFRALAYKWTRILWRCWRERAAYDEAKYLATLRAKGSPLLKDLPADSPLQPA

SEQ ID NO: 129169 - protein, 367 aa, unidentified
MKKHTTMNKPVSATDVSVCTTVAVDLAKKVFQVAGEDALGQLAYAQRIKSREAFQVFLQKLPEGVTVLMETGPGAQAWARLLQAQGNPVRILPAQRVAEHRSGAKNDRNDAHAILRAGRDSSIASVPVKSVAALAMQAWHRVRRGYVQRRTAMGNQIRGLLLEQGIALAQGDVGLKQGVTRVLEDASQPLPALLRELIDEMLNEWQRLGERIAALTGRLEACAAADPTAKRLMTVRGIGPITATALLAKQVEPERFANARQFAAYFGIVPDQHSSGQKIRLGKMTKRGDAYVRSLMVVGSHAVLKQLRPDSEHPDDRRLQRWLQRLGRKGAAVRLANRNLRIAWVLLCSEQTYQRKPNACREMEMSH

SEQ ID NO: 129170 - protein, 786 aa, unidentified
MKHYVTATHWGVYNVKVTDNEVTHVEPALADRDPSAIGRSLTESCTHKVRIEQPMVREGWLKDPETKNRQQRGRDPFVKVSWETAIDLVSAELRRVKDHHGNSSIYAGSYGWASAGRFHHAQSQLGRFLNLFGGHTNTVNTYSFAAAEVIVPHIVGSFFDVLFAGTTIANIAQHGELVVAFGGWPAKNSQANSGGVSRHEAMSAQRHCKEAGVEFVCIGPNKGDMAGFLNAEWLQVRPTTDIAVMLGLAHTLYEENLYNAEFLSTHCVGFEPFRCYLLGINDGVVKNADWAAEVSGLSADSIRRLARKMGTSRTFLSASWSLQRAEYGEQPYWMLIVLAAMLGQIGLPGAGFGFGHSAVEGIGTRWDHPVRPASLPIPENPVKDVFPVSRIADLLLNTGKACDFNGKQWDGLLLTLSNRRRCARMVIARPPFKGRGEAQMNITRVGVDIAKSVFHVHAVDSRDRLQWQCKLKRSQWIDALCERLSPGAEVGMEACASAHHWARELQKRGYHVRLIAAQFVKPYVKSNKNDRVDAEAICEAMGRPGMRFVRAKTVAQQDIQAAHRIREELVGQRTAKANQIRGLAGEYGIVAPTGIRRLRQALPRWLEDAENGLTQDFRVLMAGLAEDLCYLDKRIQALDERIAQYVKQDPVARRLMELRGVGPLTASALAGALGDGKAFGKGREFAASLGLTPRQHSTGGKDRLLGISKRGDSYLRKLLVHGARAVIRHAKGRDDGLSQWLRELSARKHVNVVIVALVNKTARVAWAMVHNDTAYDPVLVTEHQVA

SEQ ID NO: 129171 - protein, 350 aa, unidentified
MKNDLYIGNDVGKEISILFAVVKQTGEVVLDGKRMLTNDVDEWRKLMASLGEKYVLHIAFEVGPHYDWMYDLFKEFAAEVVVVNAALFGIITKSHKKTDKLDARKLAEGLLRGDLPDVFVPDKETRADRRLVSFVHYSSQQLSSLKGRLRGLLQSFRIECPRTNILSKAALQWLKQKARPQLDADAQMILDQLLEQAALLKQHRAQLDGTVKARVQRYPEAAIVQSVPGFGPLISLAVLCAIAGISRFAQPRQLSSYLGVCNGIRQSGQLLVFTGLTKAGNPHVRCLLAQALLHVLRKDPQARACYLKLRRRKSCGVARGAMMRWLTVILWHVLTKREAYRLGGTPRKGA

SEQ ID NO: 129172 - protein, 337 aa, unidentified
MKSIGVDLHSNSLTACYLSEDGTEQFRTFPLRELAAFQESLCAEDQVAVEATGNTRWFVKQIKALVSRVVVVNPNQFAVIRQSVKKTDKHDARALALFLQKGLLPEARLKSEACAGLNSLCQTRQKLVELRTTLINKLHAIHRSHGIESKKSEFGSEKGLEQALARDWSVVERVEIEVITSQIRSLNESLKKVDKQLSESGADLEGHQSLLSIKGIGAKSAAILLSVIGDVKDFENEEKLSSYFGIVPRVSDSNQTQHHGRITKRGSKLGRTTLVQCTLVAIRYSDYLKSYYTKKKSEKGAGKAIIATARKFLGIIYRTLKNKWVFADFPNFVLAEG

SEQ ID NO: 129173 - protein, 331 aa, unidentified
MTSPIIHVGLDISKRFLDLDLPNSSASIPYDPKGCKTLIARLLALKTPLQVICEATGGWEHQIVAALHEADIPVSVVNPRQVRDYARSMGKLAKTDKIDKKVLSAFGKAVQPRLTPRPSALHAEISAWVTRRQQLQAMLAAEECRVMPGLPKAVAKNIAASIAHLSKELEKVTIQITQLIKKDADLTAAKERLCAFQGVGPVTAAVLLGHLPELGKVDNNQIAALAGLAPFNNDSGPRRGFRHIAGGRHSVRSALYMAAFNAYRRNPVLKPFYERLRAKGKSFKVALIAVARKLLTALNTAFKNPDFTLVTAPIGSPRTPAAASGAGFGGA

SEQ ID NO: 129174 - protein, 330 aa, unidentified
MNSYKIVVGVDVSKNSFTATVLYDNKKETFEVKSDPVEFEKKIKPYLKKFKQSDMLIIMEHTGVYHLKLANYLYENGYKVAVINPFSIRKFMEAKMTRVKTDKTDSYFIAEYGRTFFDGELYKPKPDVEKEIEVKLKILEDLQHQLTKLRNQRESLSHVPIPMKKLKENLEYYDEIIEKIEKSIKELEKEIKELSKKNFQEEYKLLKSIPGVSDRTIGMIISVFDGFKRFKSVKEAASFAGLNPSPYESAACVKKSGSIKKMGNPYARKILYMAALSAIRFNKYCRELYERLVSKGKAKKLALVAVAHKLLRQAYGVLKNRRPFDENFCT

SEQ ID NO: 129175 - protein, 356 aa, unidentified
METQTTALPNLFIGIDIHKKTWSIHIKSDISDHKSFTMPAEPKILFDYVDSNFPTYQVNLVYEAGCCGFSAARYFLQLGWTVTVVNLADIPTSNKQYYQKTDQLDCRNLSKQLALGQLKGIHIPLAEEDELKSLLRHRAGVTRQLRAAKTHIKSLLLYQGIVIPPEHDNANWTKSFIAWLKNLQWQTVSGKYCLESKLRTYEFIYGEYLELANQLRSYCRKHYKKDYYLLKSIPGVGGYLAAALLAELGDIRRFSNEASFASYIGMVPMMRSSGGTENVFGITPRCRGLLRSYIIESAWVALRIDPQMQLYYRTHIGKNPKSIIVKIARKLLNRILSVIKTETPYQNNYQKTLVMT

SEQ ID NO: 129176 - protein, 350 aa, unidentified
MEYIALDAHKRYSFASVEGVDGVKRTEARVEHGPGTIRRFLEKFDRGSPVAVETVGNWYWIVGEIEEAGMVPKLVHARRAKMMLATVNKTDRLDARGMNRLQRSGTLPTVWIPSAALRDQRELFRTRMLFTQQRTRLKNRIHATLAKYGLRVEESSDAFSKKGRLELALCLTKLPTQTRYAAELVLQQLDSVTVQIVALEERMKKVFRPNKEVEYLLSIPGVGFILAVVIVSEVGDVARFLSASHFASYAGTTPSVHASGGKVRIGQLRSDVNRYLKWAFVEAANAISRNHRRWPHCHAARLYERVRSRRGQQIAIGAVARHLAESTYWMLTKGEQYKEPETSSISSTKR

SEQ ID NO: 129177 - protein, 389 aa, unidentified
MLLDHPSDGPTAIRTHIGAIFVSLELSRKNWLVTSLSPGKGEKMSRHSVTAGDVAGLLALFAELGRKAEAGTGQSYPIITIQEAGLDGFWLHRVLQQNGIESQVVDPASIAVPRRRKRAKTDKIDGETLLRTLLAYKRGEPRVCAMVVAPSPEEEDRRRLCRERQALIAERIRHVNRIKGLLFAQGISDYKPLRRDRRARLEALRTGDGRELPSHLKAQIGRELDLIELLLKQIKSVEAERDALLAAARKPASEAAAPNPVTMLLALKGMGANFAAVLWSEAFYRQFANRRQVAAYAGLAATPWQSGGIRHEQGVSKAGNPRLRTTMVQVAWLWIGHQPNSALTRWFKERSPQGRKRAIVALARKLLVALWKYVTQGVVIEGAVMKTAA

SEQ ID NO: 129178 - protein, 314 aa, unidentified
MVSYGFDVSKDWVDVVHSDYSRQPKQHWRLDNDQVHLTTFLQEQKIRYPKLRCSVESTGPYHAALLRVCLSLDIPCYLLNPITTKRQTKASVRGTKTDTLDALRIALIGLEADRPINAHTLDPAKSLQRAATKLEQLATVLIGSQAHYELLQPYDSEPLQVAFNECRQQLRSSAKLLRSEALARCDPRVEKLVMSLPGVGQKLAPVLMTEIGDITRFPHAKQLIAYAGLDPIIRQSGTSVHGAGRLTKRGSPHLRRALFIAASIARRYDPDLQAVYERKRTQGKSYRQAVVHVARLLTIRLYAVWQRGTPYVSE

SEQ ID NO: 129179 - protein, 353 aa, unidentified
MAIVAHTHPFVIGVDAHAKTHTLAILAAPLGELVDSAQFPTTHAGLQRALDWAARRTGADLDVLWVIEGIGSYGAQLAKTAAQTGYQVAEAPRMNARANRGVGKSDPLDARRIAAAPLPLETTRLRSPRDDDGERAALRVLVAAREHMTTERTATLNALTGLLRIVDLGIDARRPLSSTRIAEITRWRVRDETIAAATARAEAIRLAQRVAALDDDLTENRSRMDTLVQETPAAALLDEPGIGTVTAAIAMTAWSHAGRLRSEAAFASLAGVNPIPASSGNTTRHRLNRGGDRRLNRALHMAVVTRMRCDPETRAYVERRTAEGRSTKEIRRCLKRYLARRIYRQLNRAATLT

SEQ ID NO: 129180 - protein, 434 aa, unidentified
MTASKKLWRNRKERKEWARRLQSEDPGLEIVHPHAAGIDVGNNAHYVAVRPDRDQEPVRRFECFTADVHGMADWLQSCGVKSVAMQSTGVYWIPLYEILEERGFDVYLVNARHTKNLPGRKSDVQESQWLLKLHTYGLLNNSFQPVSEIRVLRTYWRQRGEHVRGAATCIQRMQKALTQMNVQLANVISDISGLTGQAIVRAIVAGERDTRKLAALSHPRIQASREEIAKSLEGNWRAELVFVLQQEVEMYDTYQKRIIECDQQLQKQLANLTVVTPPGIGQPQKPKSKPPAAKNAPRFDLSSELQRVTGVDLTRIDGIDVMVAETLISEVGLDMSRWKTESHFASWLGLCPDNRITGDRVVARGTRRVVNRAATALRQAANTLIRSRQLSGRPISPFPYQARSAKGRHCDGPSISATRLSHAQVRSSLRRQRD

SEQ ID NO: 129181 - protein, 312 aa, unidentified
MTQQVFVGVDVAKDWLDIHHPSRGATRIDNSTAASRSFAARCAKEGAWVVFEASGGYDHQLRDVLEAADVPFSRINPRQARDFARAMGVIGKTDRVDARMLSELGTRMTPAQTAPLAPARRTLQAQATRRRQLVEMRKQEATRLQQTVDPDARDDIRSLIALFDRRIAKVETRMTGLVAADPELAAIARRLRTAPGVGPIVAATLIAELPELGQLDRRSIAALAGLAPVARDSGRRSGPRSIGGGRPVVRTILYLAALQASRRSATFSRFRDRLQAAGKSIKAAIIATARKLVITLNAMLASGTDFRPMPAD

SEQ ID NO: 129182 - protein, 368 aa, unidentified
MDESITGFVGLDAHAESTAIGYAEAGRATARFVGTVGARRAELTKALGKLGGPGSLLVVYEAGPCGYGLARELLAAGYRCEVIAPSKIPQKPGERVKTDRRDALKLASLARAGELVPVTIPDERDEAVRDLCRARVDAVRARLKARQQLKALLLRQGRRYSGKTSWTAAHERYLADISFPHPAQDIAFAEYRQAVGTDEARVQRLTQALAREVESWRMQPVVSAVMTLRGLDLLAATTVVAELGDLKRFGHPRELMGYLGLVPSEHSTGSKRRQGAITKTGNGHVRRLLIEAAWNYRFPARISRPLQLRQQGQPPAIREIAWRAQLRLSHRYRRLTARGLQHNKVCVAIARELAAFIWDIGRHVGPSA

SEQ ID NO: 129183 - protein, 345 aa, unidentified
MLYVGLDFHKYFSFVTVMDGQGEIVKRAKVQNRPDTLLAFFGQLEDEVTVAVEATWNWYWLQELFEDHHIPMKLVHPQRAKAIASARIKTDKIDSEILAHLLRTDLLPEAYIPTRETRLLRERLRYRASLVRLVAQLRHKLHAVVAKNGLRLPNRNILGKKSLSYLREISLADAFRQGIDGYLRVAEILRQEIERVSETIACEAQQDPRALRLTELYGIGYYLALLIVAEIGDITRFPRTKNLCAYAGIVPSVHSSGQTHYTASITKQGSKWLRWALTEAAHHIQRKPPFDRFYQRVKSRRGPKIAQVAVARKLCKTIYHMLTEEENSIIVGQARWGHGLIRPQM

SEQ ID NO: 129184 - protein, 339 aa, unidentified
MKITTIGIDLAKNVFQVHGVDANGKVTLRKALTRTQMQTAFANMTPCLIGMEACGGAHYWARKLQAMGHTVMLIAPQFVKPYVKSNKNDARDAEAICEAVSRPNMRFVPIKTEEQQALLSVHRVREGFVEARTAQGNQIRGLLAEFGFVLPQGLTSLFKGLPQLIGDTCNGLTQSMRNLLQRLYLALQELDRQVEELEREIKLANRDNQACTRLQKIPGIGPITASALVATLGENVDHFKNGREMAAFLGLVPKQCSSGGKTTLLGISKRGDGYVRKLLVHGARAVMRYEQPEESWLGRLSKRRPKNVVVVALANKNVRVIWALLKYKDREFSPNYAQA

SEQ ID NO: 129185 - protein, 351 aa, unidentified
MPHKSTVHAVTAIGIDMGKNTLHMIGLDLRGAIVLREKVLRGRIASRLANLQPCLIGIEAGMATHYVARELAALGHDVKQVPPTYAKPFRQGHKNDFRDAHAVAEAVQRPTTRFVPAKTNEQLDLQALHRVRSRLVSERTAVINQIRGFLLERGIIVRQGLRFLRQQLPDILAKRTDVLSPRMVRIVADLAGDWRQLDERIETVTDEIETLAKSDDNCRRVMTVPGIGPIISSAMVAAIGSGAAFARGRDYSAWLGLVPKQMSTGDRTILGRISKRGNGYLRTLFMQAARVILLRPANWPKHGFGAWLIRAAQRLHPNVLAAALANKLARIAWTVLAQERSYEARVTKAAA

SEQ ID NO: 129186 - protein, 413 aa, unidentified
MLSGLSRSRIVSRDSHLLTEREGISAAMMVIGVDPHKSTHTATAVDPQTNQPVASVRIQATLSDYRRMLTWARQFEQRRWAVENAEGLGRHLSSWLLSRGEQVVDVPSTATARVRQLSRGGGRKNDQIDAAAAACVAALQGDGRPLEAEGITDALALLDEARMNLAQSRVRLVNQLHALLRELLAGGAPRDLSASTAAALLRRIRPAGDVERVRKQIAADLVTQIRSVDALLKSNAKQISELVTASGSTLTGTVGIGAITAGRVIGRTGRAGRFPTSASFANYAGAAPIEVASADKARHRLSRGGDRQLNAALHTVAITQVRTPGSRGHTYYNAKIAQGKTAREARRCLKRRLADHIWRTMITDERRSAASPRGQAGATLRSSAAGLTPTTSSSDKSLPGPANRDDTTPQPAP

SEQ ID NO: 129187 - protein, 265 aa, unidentified
MNTTTYGLDIAKTVFQLYWVEPSGKCFNRRFSRAKLLEFLANRESGRIALEACGSAHWWARQLQALGHEPVLLHARYVRPFVQTNKTDAADAKAIWTAAQQPGMPIVAPKTESQQCVLGLHAMRQLRVKMRTMLVNQLRGTLFEFGIRIRPGLRAGLQEIVQRMDELEQNVPPMLFEFVREQLQSIERLDQEIARLDQRIDAWGRQNRACKTILAIPGIGMLTATAMIATIGDAHTFKSGRQLAAYLGLVPKQTGTGGKVWLRQS

SEQ ID NO: 129188 - protein, 406 aa, unidentified
MGHRVGIDWGGVRHAVCVVDEAQGTIAARFEVAHTAAGLAELERRLAKFGPPSALPVAIERPSGLLVETLVEAGHPVVPIHPNVVKASRPRYRAAGGKSDQSDSYLLGDLLRTDGHRFRPLQPCSGEIKALRTLVRGRDDLVAQRVALANQLRSLLDSFWPGAGALFAAIDSPIALAFLQRYPTPGSAARLGEKRLAAFLAQRRYCGRRTSGELLARLKASPAGLAGDTEAEAKGELVRALASMLETLVAQIAKLSSRIEHALAELPDGAIVTSFPRAGRICAAQILAELGDVRERFQTADQLAAEAGVAPVTRQSGKSRGVVFRWACNRRLRRAVTCFADNSRHASAWAADIYRRARARGCHHPHAIRVLARAWIRILWKAWTDRTTYDPDAHAAARRLASPIPA

SEQ ID NO: 129189 - protein, 345 aa, unidentified
MKIVGCDLHTRYQQIAMLDRETGEWVERRLEHATGEARAFYAALSAPVRVGIEATGHTRWFERMLAELGHELWVGDAAEIRASMVRKQKTDARDAAHLLDLLISDRFPRIWRPTLQERDLRQLVWHRQKLVWMRNAVGNQLHALAMGEGVCRKKKLFTKQGRVELEGLKLGPWASHRRQELLAMLDQLDESLHELDQAVAQQAEQNADAVRLMTHPGVGPVTSLAFVLTLGPVERFQRSKQVVSYLGLNPREHSSGGRQRLGAISKQGNPMMRSLLVEAGHTAARLDAELRQDYHRLKLRRGSGVAKVAIARKLAVRMYWMLRSQAGYAQLVRMQGSPRGTLVGQ

SEQ ID NO: 129190 - protein, 401 aa, unidentified
MQETQQHDAIDVFIGVDVGKGQHHAVALDRHGKRLYNKALPNDEAKLRALIAELKTHGRLLFVVDQPSTIGALPVAVARAEGILVAYLPGLAMRRIADLHAGEAKTDARDAAIIAEAARSMPHTLRSLRLADEQLAELTMLCGFDDDLAAQVTQTSNRIRGLLTQIHPALERVLGPRLDHPAVLNLLERYPSPSALAAASEKTLANRLTKLAPRMGKNLATEIVQALSEQAVIVPGTQAATIVMPRLAQQLAALRKQRDEIAAEVERLVLAHPLWPVLTSMPGVGVRTAARLLTEVAHKAFASAAHLAAYAGLAPVTRRSGSSIRGEHPSRRGNKVLKRALFLSAFAALRDPVSRAYYSRKIQQGKRHNQALIALARRRCDVLFAMLRDGTIYQPKSALNA

SEQ ID NO: 129191 - protein, 337 aa, unidentified
MKFSGIDLHSNNSVVVVSDEEDRIVYQKRLPNNQEQIRAALAPYRDELAGVVVESTYNWYFLVDGLMDAGYRVHLANTTAIKKYEGLKYSGDFADAAYLAQLLRLGLLPEGYIYPREERAGRDLGRKRMQLVRCQTAQILAIENILARQTGGRISSERVKRLTAEQVEGLGFAPDVALAVEANRAVSETLQRQIEVLEKRLQQRVKLRPEYRLLKTVPGIGKTLATTIMLETGTITRFASVGNFSSYCRCVDSRRESNGKKKGEGNAKNGNKYLAWAFVEAANFALRYCPEAKRFYERKKRKTNGIVALKAIAHKLARACYHMLREQKPFDVQRCFV

SEQ ID NO: 129192 - protein, 444 aa, unidentified
MTMRKREDEVFPNAAGVDIGASSHWVAVPRHLADSAGCDPVREVGAMTADLQALAAWLVSLGVDTVAVESTGVYWIPVFEVLEQHGPKVWLVDARQLKYVPGRKSDVQDCQWLQRLMSLGLLRAAWRPGAEVCVLRAVARQREALLREQARWVQRMQKALVQMNIQLTEVLTDVMGMTGQAIVRDIVAGERDPVRLARHRQRRVKASQPEIIRALQGNWREEHLFVLGQSLAMYDDIGRHLADCDARLDGLLEARARTQIDLGKLPRAGSKTRMEHDVRQRLANWAGVDLTRINGLGVTVVMKLLTEIGPDVSRFASVKHFCSWLGLCPGTKISGGKVLSSGTKRSANRARQALKMAAQSLWRSESALGAFYRRLSSRMDKPKANTAAAHKPARMVYFMLTRGEAFVDQGQQRYEEQQRQRSIAALKRRAASLGFQINPVPTAA

SEQ ID NO: 129193 - protein, 338 aa, unidentified
MDTEISYDHYIAVDWSIRNMAIARMTARSNKITVMDVSSDVAELQMYLKSLKGKKILAIEETTTSQWLYTELKDHVDRIFICDPYRNKLLSEGTKTDKIDASKLVQLLKANLLKEVFHSVDRFLDLRRVVSGYEDLVKAGVRLKNQRYSLLRACGLSGKEKKGIVRLKGSGDQLVLECLERQIESYEKEKEAYEAEFAKLRKRYPEIRHQDSLPGIGIIGAIKIVSQVVSPRRFADSGHFLSYAGLIKLEKKSGGVSYGRKTPRYCRRLKSVYKMAALATIGGNNVFNNYYEYLIQKKGYPDYQARHKVSRRLAVLSWGIFKSGEKYRRDPIEESQEV

SEQ ID NO: 129194 - protein, 427 aa, unidentified
MTISPVAGIDVSKEYSDFCILTPDRTVFSRGKVFHHPTSMDKLIKQLEDVENAFDMKPVCIMESTAYYHRILYRYLTKHKYKVIVINALQSKAASNFNIRSAKTDKIDAYKLATMYGMTNLKPSIMPSKTIQELRDLCRNHNALEEQLVVSEERLRAYVEQTLPGFVKVFSRLGSKSSLTLLSYFASKEEFNEAGFEKIAEIITKVSRSGRNWSESKAQMILTSINNGQEYISTPSHSAIIKSIAITIMGIKEAITENDNALELLFELNETLNEDRTLLMTIPGVGKQTAAVLIGETGNFDGFRNYRQLAAYYGLDPNVNKSGTVRKKHLGISKKGSSLVRKMLRLAVQNSVYRTIKGDAANPVLAKYFDSKKETKPPKVAEIAAMRKLTAIIFAVMRDRQPFELRLPEEHIAIMGIDSDKKKKISA

SEQ ID NO: 129195 - protein, 367 aa, unidentified
MKKISTVAAKQSGNFSEQKLTIGLDLGDRSSWYCVLDEAGAVLLEQKLATTPKAMREGFGGMPRSRIALETGMHSPWVSRVLSELGHEVIVAHARSVRLIGESRRKDDRLDAQTLARLARIDPQLLCPVKHRSAKAQADLTLIRARAGLVRARTALVNTARGLAKSYGERLRGCNVRNMNPEKAEGLSPELQRALEPLLAGIEALSERIREYNEGIEGLAQESYPQVALLKQVKGVGTLIALTFLLTLEDPHRFGKSRDVGCYLGLQPGRRNSGQSEPQMHISKEGDPYLRTLLVQGAQHILGPFGADSDLRRWGLKLAERGGKSGKKRAIIAVARKLAVLLHRLWVSGEVYEPLRNSKQSPLAIAA

SEQ ID NO: 129196 - protein, 409 aa, unidentified
MDVMFERVAGLDIGKKSVTVCVRTPGAGGRRHSETRTFRTMTRSLTVMADWLVEQGVTLAAMESTSTYWKPVFYCLEERMECWLLNAGHMKAVPGRKTDVKDAEWIAQLLEHGLVRPSFVPPPPIRRLRLLTRYRAQLIGDRTRDAGRLEKMLEDASIKVSSVASSVTTVSARAMLAALIAGEADPAVLADLAKGKMRAKIPDLVEALTGHFDANHARLASAMLGRLDRVDAALAGLDEVMATATEPWAHQIELLQTIPGVGPKVAQVIIAETGGDMSQFPSAAHLAAWAGVAPAIHESAGRRTPAGARHGNKWLTSMLVEAAGSASRSKNTYLAAQQARLASRRGAKRAQVAVAHSILVSAYYMLERDEPYRDLGPDWLQRRHDHAHTRRLVAQLERLGHTVVLDPVA

SEQ ID NO: 129197 - protein, 429 aa, unidentified
MSYRIAGIDVHKKMLAVVICNVEIESEFQFERRMFGGNPEQLHSLAEWLLQQEVEEVVMESTAQYWKPVWEALEWYWKPICEKREGALRKSGTLHLAQAESNRGRRGRKRDFADAERLVKRLVARELTLSFVPDTEQRLWRTVTRKKYQLRRDRIRLQNQLESLLEEAHIKLSSFVSDLLGLSARRILKALAEGETNPAALAALADERLRATSEQLCDALGACTELNAVYRRLLKMALEECRLIDEQIGQLDKEMASLLSEHQHAVQRLAEVPGLGVDSAQQIIAEVGPTAATFPSEKCLSSWVGACPGDKESAGINYSHRSPKGNRHMRRLLNQAANAAARTKGSLFEIVYRRSIPRLGHNQAIGVIAHRLCRLIWLILHQGAQYEERGPAVTKRSKQLRTWKMIRQLRTLGYRIEPPSPQPGQTPVP

SEQ ID NO: 129198 - protein, 328 aa, unidentified
MNLPHIIGADLSKESIDLASSDTQSHLRINNSLKGFRQLLKWLKDQKIKISAVMIVMEHTGLYSCRMEKFLHRHQVAFTKIPALAIKRSLGLIRGKNDKIDAHRIARYGLEKRDILIPEKELNKTLERLKMLHATRGLLVKQRASLICAVKEFQELLKRSDLIIKTQLQLINDYSMQIKKIEAEMMDLIKQDHSMKQNFKLLQTIKGVGNIVAIAVIVKTRNFTMFANARKFACYCGTAPFEHSSGKSIRRKTRISHLADKKMKTLLDQSAKTAIQHDKELKAFYERRTGLGKSKKSTINIVRNKILYRMFAVIKRQTPFMENYLQTA

SEQ ID NO: 129199 - protein, 356 aa, unidentified
MTAPYDYHIGVDYHKSYSHLIVQDSRGKTLRSGRVKNDRQSLGSFLERYRESSHAVMEATRNWMVMYDWLDDICDDVVLAHRLKVKAIADAKIKTDKIDATVLAHLLRADLVPEAWAPGDRVRELRLALRERMFYVRLRTMTKNRVVTVFDRYPEQTAQLKKLGDLFGKTGRQQLAAIDVSEIDRVQIDRGLEFIGDINERIKQSEATIRAMTKTNGNVKLLKTIPGIGEFFARLIDAEIDDIGRFRNPKKLAAYAGLVPSTYSSGGKTYHSKIIKQGNKWLRWAFVEAVQPAIATDPQLRAQYEHLKFRGVNKARVAIARKLLTITFQILRDQRPYERRGTNSEEGLSSTISRLS

SEQ ID NO: 129200 - protein, 420 aa, unidentified
MKSRRQTTKVRIEDLEDLFPHSAGIDVHKAVLTVCAIAGGAEGEVAEFGTTTGELRRLVEWLLEQGITHVVMESTGVYWKPVWQILESGEFKLMLANAQQVRNMPGRKTDQNDAVWLALLLRKGLIRPSFVPPAEVRALRDLCRSRATLIHDRTRVVQRVEKVLEEANLKLDTVVSDLMGVSGQRMLEAVGRGETDPEKLADLAVGRLRSKIPELIPALEGNFRGHQLFMLRELLSQHGELSERIERFEQEIGAFAPPFESAVQRLIEIPGFDRLSALAVLAETGQDMSIFTSPQRFARWARVCPGNRQSAGRSKSGSTGKGNSWLRAILVQCAWAAAHTKDTYLSAQFKRLRPRGAKKAAMAVAHSMLRIIWYLLQKQTQYRDLGGDFFAKQNLEGQTRSYVNRLKKLGFEVTLTPIAA

SEQ ID NO: 129201 - protein, 341 aa, unidentified
MQITTIGLDIAKNVFQVHGIDATEKVVVRKQLRRGQVMKFFASLPPCLIGMEACATAHYWTRELTKLGHEVRLMPAKDVKAYVKRNKNDAADAEAICEAVRRPTMRFVRAKSAEQQGKLMQHRTRDLLLRQQTQVINALRAHLAELGIVAAQGREGLKELLAIIADQADARLPLDARASLIVLAAQLQALHTMIDSIERRLMLQHRASEESKRVATVPGIGTLGASAITATVTDPSAFRSGRDFAAWIGLVPRQDSTGDKQKLGPISKQGDRYLRRILVVGAHSVLRRAKQNPEKYPWLTQLLARRPFKVVAIALANKMARVAWALLARGGTYRVPARVAA

SEQ ID NO: 129202 - protein, 409 aa, unidentified
MERQIERGCGLDVHRDTVAACVRVPGAGGEREQHVRTFGTTAAELLRLRDWLGAHGVTHVAMESTGVYWKPIWNLLEGSFELLLANAQHIKAVPGRKTDVRDCEWIADLLRHGLLRASFVPDRAQRELRELTRYRQALVRERSREVQRLQKTLEGANIKLGSVASDILGKSGREILTRLAGGSTDTSELADLAQGQLRKKIPALERALVGRFEAHQRFLVARQLAHLDELDGLIAEVSAEIAERVRPFEDAVARLDGIPGVGRATAEILVAEIGTDMARFPTDAHLASWAALCPGNHESAGKRLSGKTRKGNRALRTALVEAAQAAGRSRSTYLSAQYHRLAARRGKKKATVAVAHSILIIVYHLLKDGGTYDDLGADFFDRRDQDALERRLVSRLEALGNKVSIEKVA

SEQ ID NO: 129203 - protein, 398 aa, unidentified
MSEFTVGLDWGAREHSVCVVDASGRVRARWRVPHDREGLERLLRDLRHVADPSELPIAIERPSGLLVDTLMDAGHPVIAIHPNIVKACRARYRASNSKSDDADAFLLADLLRTDHHRFTPVRPRSDEMRAIRALARARNDLLRQQIMLTNQLRAHLENGFPGGAGIFADLSSPIALAFLQHYPTLASSRGLGEKRLQAFLSKHAYCGRRSASELLARLRAAPERQLGEHEDAAARNITLALTSVLHTLGERLTLLTRALEHASSETAIGQLVMSFPRTGRLNAAQIVAELGEDPHRFADRDHLASEAGVAPATRASGKSHHVSSRYACNKRLKNAITTWANNSRHADPWAKALYDRARARGHRHPHATRILARSWTRILYACWRDGTPYDPTLTTPRG

SEQ ID NO: 129204 - protein, 339 aa, unidentified
MKYTPVGVDIAKHLIQVHFIDEHTGEVIDKQLRRQDFLMFFCNREPCLIGMEACGGSQHWARELTKQGHKVRLLQARFVKAFVMGNKNDVMDARAIWMAVQQPGKEIAVKTEEQQSVLVLHRSRRQLVKFRTMQINSLHGTLLEFGETIHKGRAAMEREFPEALERMKERLPPYLITVLENQYNRLNELDSLIEDIEKQLTSVAKQNETCKRLLDIPGVGPLIATAAVATMGEASAFKSGREFAAYVGLVPKQTGSGGKIRLLGISKRGDTYLRALFIHGARAAALLTKEPGQWITELKKRRPASVAIVAMANKLARTVWAIAAHGSKYDKNHVSIRPY

SEQ ID NO: 129205 - protein, 393 aa, unidentified
MKQRKNAESEPVRIKKFARFIAISGLPACLNPDPDSRLTSIVKVVGLSSNPFFLKSVKDKSMENFYFIGVDVSKKKLDFCVMFEGKVVHEEETSNNQGAIMSLLHHLEEDYGIASGQMLVCAEHTGQYTFPLACACKAVECKLWLENAAEIKYSSGVQRRKNDRVDAKRIAIYASRFQDKVQYYERPTEDIERLKQLESERTLYVTDLAKYKGQMKDQKEYMPKSLYERKMKRLQALMDDLEEAIQSITDEMDEVIASCPVLFRQRELLMSIDGVGRVVATNMIIATEAFTRFGDPRKFNCYAGVAPFSYSSGSSLHSKARVSHRADKVMKRLLHLAAVAVTHRIGGELKKYYERKVAEGKNKMSVINALRAKIVARMFAVIKRNERYKPILS

SEQ ID NO: 129206 - protein, 325 aa, unidentified
MQTQTHYTGIDISKLFFDVAFLESDRYVYHKFSNDKAGFKALLAVLPPDSQAVMEASGPYYLQLACLLHDSGIAVSVINPLVIRRFSQMRMSRAKTDKKDARMIAEYGKTEQPVLWQKPEQYVITLQQTEALLVRLQTEHTALNNQLESFESSGMLTKELRRQIVAELKHKQGLINKLTKQMEQIAQAHYSNMLADLESIPGLGRKTAMMLTVLSGGFSRFDDYRKLSSYIGICPRIFESGTSVKGKARICKMGMSRIRATLYVCSWSASRYNKACRELYERLLAKGKAKKLALIAVANKLLKQAFAIAKQQTKYQENYSNITCF

SEQ ID NO: 129207 - protein, 366 aa, unidentified
MCVGLDTHKAKIAVAVAEPGRSGEVRFRGEIANRPEAVRQLLERLAGKHGRLRVCYEAGPCGYGLHRQITALGHDCTVVAPSLIPRKPGERVKTNRRDALTLARLHRAGELTPVWIPDPTHEAMRDLVRARTAAMEAVRRARQQLQGFLLRHGRVFAGRKTWSPAHRRWLAGLRFEHPAQQVVLQEQIDTIDEAERRRDRLEAQIRELVPGWSLAPVVTALQAMRGVAFLSAVVLAAEVGDFRRFANPRQLMAWLGLVPSEHSSGSKVERGGITKAGNGRARRVLVEGAWSYRFPARVTGPIQARLEGVPDGVRAIAWKAQLRLCARYRRLIAAGKNANLVTAAIAREMAAFAWAIACQVRPAAAA

SEQ ID NO: 129208 - protein, 348 aa, unidentified
MERYIGLDAHATSCTFAVLSERGRRLDSAVVETNGRALVKFLRGVPGNKHVCLEEGTQSAWLYEVLRGHVRELVVTHAHERNRGPKDDQRDAFHLANSLRLGAVSPVYKDAGQMGELRAHADVYAKLVTDVVRAQNRLKALFRSRGVQVVGGAVYTQRDRQAYLDELARPYRGSALILYSELDALRAIKKEAEKQLIAQSHTHCISAVLQSCPGMGPIRVAETIPIIVSPYRFRTARQLWAYSGLAIVMRSSSDWVKTPHGWERAQTVRTRGLNRNYNRRLKNIFKGAATTVITQRLEPMVGDYQRALAQGTKPPMAKLTLARKISATVLAMWKNKEAYHPERYRPTP

SEQ ID NO: 129209 - protein, 348 aa, unidentified
MLADELDYVLGVDTHRDEHVAAVVTAPTGAVIAGSAALANAHGYRELLRVAERHAPGRRAWAIEGTGSYGAGLARFLAGRGELVLELSRTPRAERRLRGKDDSLDAVRTARAALASETLALPRAGKRREALRLLLAARRSAVDVRRQALGQLRAVIVTAPEPLREQLRTLPLGKLLDRCSRLRRSATATADELATRLVLRSLARRIQAATIEADELEQELLIHVRALAPALLDEAGVGPIVAAQLIVAWSHRGRLRSEACFARLAGVAPVPASSGQTTRHRLSRGGDRQLNRALHTIVLHRRQHDPATRAYIARRVAEGKSQRDATRLLKRYLARHLYRLLQQQPAVT

SEQ ID NO: 129210 - protein, 388 aa, unidentified
MAQASASVSHSIAVDYDKTLVLAIELSNASWVLAAQVPGLPRVKAKQSIEPTAEALLAAVDRYRDRARAAGKTVQRVVATYEASWSGFWLARWLARRGVETHVVQPSSVPVDRRARRAKSDGIDAELLLRTLLAWLRGEPRVCSMVPIPDEADEDERRRVREREDLVAERVSLVNRIGAVLATLGVRDYNPLRRDRRERLDAIRTALGDPLPPHARARILRMLDRLELVCAQIAELERERDAVLDEEAPGKAEKMIQQLAGLRGIGVQSATVLVREAFVREFANGKALGSYAGLTGTPFSSGGTEREQGIDKAGNRRLRTVMIELAWLWQRYQPGSAQVIWFRERVGGTGKRMRKVMVVAMARRLLIALWRFATQGVVPEGAVMKPVS

SEQ ID NO: 129211 - protein, 390 aa, unidentified
MACLRVRERGQVRREVRRWATTTAELLKLGDWLRQAGCTHIAMEATGVYWKPVWHMLEGAFELLLANPAHIRNVPGRKSDVNDATWIAELLAHGLIRASLVPPGPIQELRDLTRTRKQLMREIAQHKQRIQKVLEDANVKLASVVSDVFGESGRRMLKALSAGQTDASQLAALRHGRLSASRETLAVALQGKVTAHHRFLLSRHLRMIDYLEQTVRDFEGQIEVVIAPFRSAVACLVTIPGISATAAHVIIAEIGVDMSRFATVAHLRSWAGLCPQLNGSAGKIMSRRLRHGAPWLKTVLVQCAWAATRNKHNYLYAQFVRLRARRGPQKAIIAVAASILSIAYYLLRNQVPYRDLGALYFIRADQERTAQRLARRIEELGYEVQIRKAA

SEQ ID NO: 129212 - protein, 317 aa, unidentified
MLQTNTNTAGIDTSKLKLDIAVHGRTACWQVTNALPGWRSLVVNLIKAGVARVGIEATGGYERGVVEHLRAAGFVVLVLQPGQVKAYARVHLRRAKNDALDAVLIAACAATIDAPRIAPDPRLVELAEYLTFLEQAEEDIARFKTRLEHVSEPRLRRIVTNDIARLKARRSTQILLIERHLRAHPDLGRRLDLVLSVPGIGRRTALALIIRMPELGQVSREEAAALAGLAPFDDDSGKHKGQRHIAGGRGRLRRSLYAAALPAAFRWNKALVALYARLTARGKAHNAVLIACARKLLVYANTVVQRGTPWIESPVRV

SEQ ID NO: 129213 - protein, 362 aa, unidentified
MSKSITIIAFDHHAATTVAAVLLPGQRTPALHPLASDSATILRFVERLRRRGPVQCCYEAGPCGFELQRTLTTHNVPCDVIAPALIPRRPGDRVKTDRRDAGQLAVLYRAGALTAIHIPTELEEAVRDLLRCREDIRADLLRARHRLSHFLLRHGRRFTATKRAWTKRHTEWLQAQRWSLPALEQTHRNYVRAVDEGVARLHTIDLELRDYLTVDPLRTRVERLRCFRGIDDLTALTIAAELGDARRFPSAPSAMAFMGLIPSEYSSGTRTVRGAITKTGNAHLRRVLVESAWHYRHHPFLGDALRHRQRGAPPAVIDHAWLAQRRLHRRYRRLAARGKPKQLIVTAVARELTGFLWAALTQ

SEQ ID NO: 129214 - protein, 423 aa, unidentified
MEQARKESTRESSYKVAGIDVHKAMLAVVTADAAEVGEFHFERRRFGAAPSDLKALAEWLTSQGVREAVMESTAQYWKPVWQELEGKCELHLAQAHSNRAPRGRKRDFADAERLVRRHVAGELILSFVPDPQQRLWRTMTRTKHQLTRDRVRLHSQLEAFLEDAHIKLSGCLSDLLGVSGRDMLKALAAGQKDAAAIARLAQPEVKATQAQLCDALSAAAGLSDLRRQILRLFLQRLELIESQMETLNQAIAGELREHEDAVRRLAEVPGFGADSAQQVIAEVGPKAAAFPSPGQLSSWVGSCPGREESAQVSKSNRSPKGNRPMRRVLDQVANAAVKTKGSVFEALYRRLVGRLGHHKTIWAIANRLCRLAWKILHQGVTYEERGFRPNPKAVRQRAAKLTKALRNLGYNVQIIPSHSGASA

SEQ ID NO: 129215 - protein, 352 aa, unidentified
MSEHSKEAVIKVLGIDLAKRSFHLHGVDGDGRQVLSKKLTRARLSEFVANLPPCTVAMEACGSAHYWARKFRRYEHEVRLIAPQFVKPFVKSNKNDAADAEAICEAAQRPNMRFVAVKTIEQQDIQAIHRMRSLAVERRTAQINQIRGLLLEYGIEIAQGRPAIQRRLPEILEDADNGLSERFRAELHGLAKELRHLNERVAHYDTQIDAIAQGDRQARDLMTIPGIGPKGATALLAAVGEDASVFSNGRALAAWIGLVPRQHSTGGRDRLLGISKRGDVYLRNLLIHGARAVLRTVERKEDRTSRWATALKVRRHTNVAIVAMANKMARVAYAVMTTGKPYNPAIGALATD

SEQ ID NO: 129216 - protein, 433 aa, unidentified
MRNLSLGRCDVKPLYTQTFTAYVGIDWADTKHDVCLQAVGSDQREFACIPHQMHRIDAWAKLLHQRFGGTIAVALELAKGPIVYALQKYDFIVLFPINPLTLAKYRQAFKPSRAKDDPTDAELALDLLLRHPERFAPIQPQSVAMRSLISLTEHRRELVGDKTRLTNRLTNTLKQYYPQTLDWFEQRDTVLFIDFLTRWPTLAQAKRARIDHLKAFFHAHNSRRTKVINTRLESIKSALPLTEDLGVITPCRLHALMLVKQLRVTLQAIEQFDHEIAELAPTLPDYSLFQRLPGAGEHFAPRLLAAFGEDRQRFQHADELQKYSGVAPVTERSGKKSWVHWRWQCPTFLRQTFIEWAGQTINKSFWAGAYYRQQRAKGSSYQAAVRALAFKWIRILHRCWKTRTPYNETTYLNALRKRGSPLLKNLMPDATNT

SEQ ID NO: 129217 - protein, 430 aa, unidentified
MEQPTRFIGMDVHKDTIAVAVTATGDSGAATPYGTCPNTTAALEKLVKRLRQAGSGPMRFCYEAGPCGYGVHRTLTRLGEECMVVAPSMMPRKRGDRQKNDKRDAANLAVLHRGGLLTAVWVPDAAHEAMRDLIRARLAAVRAVRSARQQRGAFLLRHERVCPHGRKAWTKAHRRWLAEQRFAQPAQQIVLEESIEAVRLSEQRRDRVEGCLRAQIPTWSLCPLVRNLAALRGLDVIASAGLAAAMGDPARFASAPDLMAYLGLVPSEHSSGCKRRIGAVTKAGDSHARTLLVEAAHCYRFPPRITRHKLAAVDAVPEAVREIAWRAQTRLCQRYRQMMARGKLKQVVVTAIARELAGFVWATACTTSDPPHETAVDTSVPQAVCPGGSAGGSRAPRRQPLKRATRRARATYERPGQTGLAASAGKTMTE

SEQ ID NO: 129218 - protein, 357 aa, unidentified
MSSNMKKYIGLDVHKEAIAIAVLNGAGKLVMESIVETKASTLLDFLHGLRGELHVTLEEGTWAAWLYDVLKPHVQKIVVCNPRRNALLKEGNKSDRVDARKLAELLRTGMLRAVYHGENGLRTLRELARSYLTISKDQRRVMSRLKALYRSWGIPCAGRQVYAPRHREQWLSKIAHAGVRRRAELLYQQLDGLLVLRHTVRGELLAESRKHQAVKILRQVPSIGPLRATLLLALMQTPHRFRSKRQLWTYSGLGVETHDSAQHRYVDGQLQRSKKPQQIRGLNQNHNHEMKEIFKSTALSASRCAGPLQDFYAGLLAKGMKPDMARLTLARKIAAITLTLWKKGEHFDAEHLKSQAA

SEQ ID NO: 129219 - protein, 417 aa, unidentified
MIRAVIECCAGIDVGKKILVACVMTGPADGEAREETHKYGTTNAGLQQLRDWLSSRGCTHVVMESTGAYWKPIFNVLEEVPGMEVVLANSQQMRNLRGHKTDPNDSRWLAHLLRHGMIRPSYIPPRYIRELREFTRRRKQLVRAGVQERNRVQAVLEDANIKIGNVLTDIFGLSGQLMMEALIEGQATADQIAELAQRQARKKIPQIQAAIEGHRMTEAQRVLIRFSMAHLAFLEQQIAQLDEQIFGHIERCRLGRTHALLQTVPGVKRLAAAAILAEMGPDMDVFGTGSRCSSWAGVSPGNNESAGKRKRAPVLRGNPWLRSTLVECAWGASHRNQSTFQARYQRLAPRIGHKRAIVAVAHGLLLTVFEVLRSNEPYSALGADRMPPEKTKRLIRHHSKRIIALHRWLTQTSRSAT

SEQ ID NO: 129220 - protein, 353 aa, unidentified
MTVYVAVDFHAREQTISWCDTAEGEVHRTKLRHQHDDVRKFYEQFSGEVLVGFEASGYSAWFEQMLAELGHSVWLGNAAEIRRKAPRKQKNDRRDADLMLELMLKGDFPRVHTFSAESRTVLRQLRYRHKLVKVRTIAKNSVHAIGINAGLPLRGRLLTQAGLEQLQALSLSPVLSQQRDEWLALIRLMNKQIGAVEESLEQCAKNDTAIELLRTHPGIGLLTALALRYTLDPISRFTSTRAVVGYAGLDCVEEQSSERRRMGSISKQGSRLLRFLLNEAGQTAARRDPQLKQFYKRLLRRRDKPKAKVAVARKLLVRSFIMLRDHIDYAEFVRRGVAARVARETHSPKVTDL

SEQ ID NO: 129221 - protein, 344 aa, unidentified
MGEITTVGLDLAKRVVSVCGEDASGRVVVRRTLRRDAVLAWFVQRPACVVGMEACASAHWFARELEALGHSPRIIAPEFVRPFRLSGKNDANDAAAICAAVRQPQLRFVAVKSADQQARLVVHRLRQGWQEERTAGLNRLRGLLAEFGRVYPNSATAALAGARSALVDETLPPALRRSVARQLEHLRELDAHLAECDREIAQQARDDPRAVRVARLSGVGALTASAIVATVADASQFRCGRQFAAWLGLTPRQYSTGGKARLGRITRRGDSYLRGLLVQGARSALQAAMRMAPERRSRLAAWMVETHQRIGYHKTLIAIANKHARLIWVLLTRDEPLHAHAAVN

SEQ ID NO: 129222 - protein, 400 aa, unidentified
MRAVFGIDVSKASSEVAILVNGEKVHGYTMSNDALGFARLLGDLRTVHKPEIIFEATGVYSRRLQTFLEDNGYAYTRLNPLEAKKQLDSLRVRKTDQIDAEKLAQSQFVLNRKPTYVQEEVYQNLRALSRFYQNLTEDIVRAKNRLHKVLQVTFPEIETVLSKPTGEQYWNLVTAFPCKDFVLELSKDELLESIRQSTSKRISDKRVAYLAEKLTALANQSYCAVKKTSPIMEEVRYYAKELLRLSEQRQTVLDQMVELAQPLPEYDILLSIPGIAETTATSIIGELGDIRRFQSTNQINAFIGIDLRHYESGNFLAKEHITKRGNPYARKILFKCIHNIASASHTNPCHIADFYEKRKRQSQTTSTKPHTIASIHRLIRTMYYLITHNKLYDYTSTQNR

SEQ ID NO: 129223 - protein, 348 aa, unidentified
MDHIIRIGMDTSKHVFQLHGVNAAEEPVLRRKLRRNDMVVFFERLAPTIIAIEAAGASHHWARLLRSFGHEVKLIAPQLVKPYVKRGKNDAADAEALCEAMSRPTMRFVPVKTAERQAALMLLGLRDRLVRNRTQLANAIRGYAAEFGLAAAKEIAHLAPLLARIQSDESLPGLARELFAAHAKEYAQLQAQIDEVEGKLMAWHKTNPGSRRLAQIPGIGPIGAAMLIMKTPAPEMFRSGRQFAAWIGLTPKDHSTAGKVRLGVITRAGDEGLRSALVVGATAVIRHLRNGKGRSMLSAWVEQLLKRKPPKLAAVALANKLARIAWKLMVTGETYAAKPRPVASAGIA

SEQ ID NO: 129224 - protein, 313 aa, unidentified
MSQNNTVILHVGLDVAKLSLELHLAGHFHSLANDAKGHAQLAKLLRPHAGAHVVCEATGGYEQPVVRALQAANIPVSIIEAARVRYYARAQGQRAKTDPMDAAVLTAYGQAFKPVATRVASPRQQRLADLSQRRRQLLQTRTAEHNRAEHYTDPLCVRQARQLRKTLDKQIEQCDQGITTLIAEDAVLAHKANRLEAIAGVGPVVAATVLAELPELGTLNPQTAAALAGVAPYNRDSGAQKGVRHISGGRRTVRCALYMATLSAVRHDRILKAFYIRLLAAGKKPLVAMTACMRKLIVLMNHVLKNDKFQLAN

SEQ ID NO: 129225 - protein, 354 aa, unidentified
MTSTKYIGMDVHKESISIAVMNAAGKIVMECVIETKANMILQCIDGLRGDLHVTFEEGTSAAWLYDLLKPHVTELIVCDPRKNASMREDNQNDKIDACRLAELLRIDHLTPVYHGEHGLRTLKELVRSYLTVTKDLARVKTRVKAIYRSWAIPCDGKEVYAACHRAEWLEKINELGVRRRAEFYYQELDGLRVLRQGVRRELLAESKKQKAWKRLCQIPAIGPIRAAVLLGILQTPHRFRSKRPLCKYSGLAIETCSSADHRSINGQLQRSKKNSVRGLNQNCNHDLKNLFKGAAVIASSKAGPFQEFYAALLAKGMRPEMARLTLARKIATIVLIVWKKGVCFDAQHLKPQTA

SEQ ID NO: 129226 - protein, 301 aa, unidentified
MEHYVGLDVSLKRTSICVVNHTGSVVRGGVVDSDPEAIASFVRSNAPGAVRIGLETGATATWLWNELKRLGLPVICIDARHAKAVLKMQINKSDRNDAAGIARIMQTGWFKEVRVKDLDSHAVRALLASRALLVKIKRDLENQVRGLLKNLGLVIVRATFNVFSARAGELIEDRPDLVAAIGPLLEARKAIEQQVRDLDRKVLKLARHDVQVRRFMTAPGVGPITALCFKATIDDPTRFRRSRSVGAYVGLTTRRHASGEVDWSGRISKCGDAMLRTYLFEAANVLLTRVPKWSALKAWGA

SEQ ID NO: 129227 - protein, 320 aa, unidentified
METEKAYVGIDVSKETLDVAVHGSDRRWRFANSDKGITETVSCLEELSPLLVVLEATGGMECPLAAALAVSGVPLVVTNPRQVRDFARATGRLAKTDVIDARVLAHFAAAMQPESRRLPDSQGQELKAILARRRQLIEMLTAERNRLHSARSKAVKANIKAHIDWLEKEMTHIDHDLEQSIRQSPIWREKDDLLKSVPGVGPVLSTTILADLPELGLLNRRQIATLVGVAPFNRDSGHMRGQRTVWGGRAVVRSALYMATLVATRRNPIIRDFYRHLLSLGKPKKLALTACMRKLLTILNAMVKHQTPWHYPASGTLQTP

SEQ ID NO: 129228 - protein, 358 aa, unidentified
MAVTGGTRRIVGGVDTHKDLHVAAVVDDQDRVIGTQSFATTRQGYRQMLAWMRSLGDLQRIGVESTGSYGAGLLRFMQQAGIAVLEVTTPDKQDRRRRGKNDDLDAQNAAHAAFAGRRTVTPRSRDGMIESLRILMACRKTAVSARRVALQMIHNTIVCAPDGLRDQLRSLTRMQLVRTLASWRPDLTAYRDLDSAYRIGLKSLARRYLELHDEIADLDVMIAAIVDELAANLVARNSIGHIGAAQLLLTAGDNPERLRSEASFASLCGVSPVPASSGKTVRHRLNRGGDRAANSALHIIAIGRLRTDQRTKDYVARRIAEGHSKLDAIRALKRYLAREVFTLITQRRKEINATRIAA

SEQ ID NO: 129229 - protein, 416 aa, unidentified
MNAVGIDVSSRKSTVAVLRPLGEVVCLPFDVTHDIAGLASLAEKLKAIDGETRVVMEHTGRYYEAVAKALHEAGFFVCAVNPLLIKEYGANSLRRVKTDKADAVKIARYALDNWADLRDFTPMDAIRYDLKTLNRQFQLASKQRTASANNLIALLEQSFPGIRKCFDSPVRSDGTQKWVDFAHSFWHVDCVRKQPFPAFCERYRKWCKLHAYFFKLRNAEKVYALAKSAVVLTPKSKVVKVLVQEAANQLISISRSVEVYRAEMDRLAAMLPEYPVVMAMYGVGKSYGPQLMAEIGDVRRFERKQALVAFAGIDPMPNQSGDKNVRSNKSSKRGSPYLRKTLFNVIRTYLQCAPQDEPVFQFLNRKRAEGKPFYVYMLAAANKFLRRYYAKLRDYFASLDTLQPVAPIPTILKATL

SEQ ID NO: 129230 - protein, 417 aa, unidentified
MSEYAALVAIDWADQQHAVCLSDPSTGEREQTIVKHTPAALQEWALSLRQRFAGQPLAVCLEQARGPLIYALLQYDFFVLYPINPATLAKYRQAFSTARGKDDPTDADYLLDLLEHHRNRLRPWHPDDQKTRTLRLLVEQRRRLINDRTRVSNRLTALLKGYFPQVLDWFEDIRTRLVCDFLERWPQLSVLQQARPATIDKFLRSHHSTSKATNQRRLTEIRTAIPLTKDAAVMTSSVLNVKVLVAQMQTVIAAIAEYDRHLEALCQTHDDYHLFAALPGAGPVHAARLTAALGSDRSRWQSADELLRFSGIAPIIERSGKQFRIRWRYFCPKFFRQTFHEFAAQSIQDSFWARAYYYSQRAKGKEHHAAVRALAFKWIRIIWKCWHTRTPYNEVIYLESLRKKGSSLLKFAADYQH

SEQ ID NO: 129231 - protein, 312 aa, unidentified
MTELCVGIDVSKDRLDVACGDGLEFTVGNDEAGHAALTERLLELQPTLVIMEASGGLERAVALRLTVSGLALRIVNARQVRHFAKAAGLLAKTDALDARVLRAFAERMQPEPRALASEQVQELQALTARRRQLIEMLVMERNRQRSAHVRVRRDLRDSIRSLERRLARTDDDIGCTLRDCGVWREKVELLESVPGVAQRTAVALLASLPELGQLNRRQISALAGVAPFNRDSGRWHGQRHIYGGRAPARRALYMAALVGARHNPVLRPYYQRLRQAGKPAKVALIACMRKLLIILNSMLRQQRSWRPTDVPA

SEQ ID NO: 129232 - protein, 391 aa, unidentified
MVCVGIDVAKDKHDCCILDSDGTVRADCFTIPNNSDGFKRLLQTIQDCTQKSDKIKVGLEATGHYSYNILGFLLDNGLPTYVINPLHTNLYRKSLSLHKTKTDRVDARTIATMLLSDVDLKSYTDTAYHNEELKSLTRYRFEKVQERAKLKQSVSRLVTILFPELEQLVPTLHIASVYSLLGEYPGAKQVSEVHLTKLTNLLVTASKGRYGKDKAIQIRDAAKTSIGSVMPAKSLELKHTIKLIRELTSEIDEIEDSIQQIMDELHSPLLSIPGMGIHSAAMILGEIGDFSNFESPDKILAYAGCSPSTYQSGKLTNCYAHMEKRGSRYLRYALYNATKYVCYWNPVFAKYLAKKRAEGKHYNVALSHAMKKLVRLIYALQKSGKAYLTAA

SEQ ID NO: 129233 - protein, 375 aa, unidentified
MKEKVRFLGLDVHAETIAVAVAEPDGEVRSLGTIANREESIRKLIKKLGSADQLRACYEAGPTDYVLYWQLTQLGVECVVVAPTLVPTKAGDRVKTDRRDALKLARSHRSNDLTAVWIPDGDSEALRDLVRTREAAKQDQLRARHRLSKFLLRMGRRPAVGMKAWTEPYMAWVRQVQFERPAQQATLEDYLHEVDHMAARIKRLEQGITEVVKLASPQIQEVVKGLQALRGIAEISAVTIVAELGNIARFDTPRQLMGYSGVVPSEDSSGKRKRQGSITKTGNAHLRRIVVEAAWSYRHRPAVGPRLRKRQEGVPEPIKEIAWKAQVRLSKRYARLAAAGKDQRKIVTAVGRELLGFIWAIGTRAEATVKQQMAT

SEQ ID NO: 129234 - protein, 338 aa, unidentified
MKLYGGIDLHSTNCVVVLLDGEDRVVYEKRLPNELGYLLLELAPYQGRVDGLVVEATFNWYWLVDGLMEAGYQVHLANTAAIQQYTGLKYTDDRSDARWLAHLLRLKLLPEGYIYPKEERAVRVLLRKRSQLVRQKVTHILSIQNLMSRNKGMRLSADKIRQLTEAKVEGLLPQAGLARAVKSNLAVYRCLVEEIDGLEKVVKQRVKLRPSFQHLLTVDGIGPILGLTIMLETGDIGRFERVGQFASYCRCVDSHKISNGKRKGSGNTKNGNKYLAWAFIEAANFAIRYNPKVKRFYQRKKDKTNGIVALKAVAHKLARACYYILRDQEPFYVEKAFG

SEQ ID NO: 129235 - protein, 373 aa, unidentified
MKKVRFLGLDVHAETIAVAVAEPDGEVRSLGIIPNREESVRKLVRKLGPAEQLQACYEAGPTGYVLYWQLTALGVKCEVVAPSLVPVKAGDRVKTDRRDATKLARSYRAGDLTAVWVPNQEHEALRDLVRAREAAKQDQLRARHRLSKFLLRHGRRVPAGIKVWTQRYQDWVKEQVHFEQPAQEYTLLDYLHEVEHMGDRIQRLDQAIAEAVKLAPPRMQEVIQGLQALRGIAQISAVTVVAELGKISRFDRARQLMGYSGAVSSEHSSGKRMQRGQITKTGNAHLRRIAMEAAWAYRHRPAIGPRLRKRQEGLSEEAKEIAWKAQHRLHKRYRTLSAAGKEKQKVITAVGRELLGFIWAIGVQVERNSKRVA

SEQ ID NO: 129236 - protein, 459 aa, unidentified
MAQKVRQGLVKGNRQSRRTAAALSIAHPNAAGIDIGGAAHFVAVPPDRDSEPVRQFRSFTADLNQLADWLLECRIDIVAMESTGVYWIPLFEILDARGIQVLLVNARHVKGVSGRKSDVLDCQWLQQLMSYGLLRGAFRPQEQICVLRSYSRQRQQLLRGQAKQVQLMQKALIQMNIQLTNVLSDIVGLTGQAILRAIVNGERDGRKLAKLRHWRVQAEEAQIAKSLAGNWREEHLFSLKQALAMFDAYAERLAECDAQIENTLSKLQRHTTELPPSQRSQHAKNSPKFDVRERVFRVLGVDITAIAGIDIGTALIVAAEVGPDFSRFPTVKHFTSWLGLCPGTKITGGKVISGRTLRSANRLAQALRVAAVSLRSSKSSLGAYYRRLAGRMEKSKAIGAVAHKLARLIYMMITKGREYVEQGLERYEARQHELAMKNVAKRAAALGLRVVPATEACQL

SEQ ID NO: 129237 - protein, 450 aa, unidentified
MMEPQEIEDGEYEQILERVAAVDVAKASGMVCTRVPREDQPGKRRTRVWQVDAATSAILELADHLVGEGIEKVTLESTSDYWRIWFYLLESAGLSVQLVRAQDVKQAPGRPKSDKLDAVWLAKLTERGMLRPSFVPPVEIRQLRDYTRLRTDLTRERTRHYCRLEKLLEDALIKVSAVASKLDTLSVRDMLEALIGGERDPQVLAGLARGRMRAKHDRLVQALTGKFDDHHAELAQMLLDQVDALSAQIGKLTTRIEELIAVIPAAQGVDADGTTGPTAGLGARAPVLPAVDRLDEVTGIGREAAQAIVAEVGLHMSVFPTPAHLVSWAKISPRTVQSGARSRAGRTGKGNPYLKGILGEAAAAAVRTDTFLGERYRRLARRRGKLKALVAVARSILVIVWHLLADRTTRYHDLGAGYYTSRIDKNRKMRNHIRQLEALGYTVTLAQAAA

SEQ ID NO: 129238 - protein, 363 aa, unidentified
MTETVKYVGLDVHKETIAVAVADGERGGEVRFVGTVANEDDAIRKLVKRLTGPGVTLNVCYEAGPCGYGLHRLLTKLGQNCIVIAPSMMPRRPGDHVKTDRRDAMTLLTAIWIPDEAHEAVRDLIRARRSAQDDAIGAKQTVRSFLLRHDRRFGGKAAWTKMYWRWLSEQRFDFPHQQLAFEEMQKRVLEAQARVGRLEAALTEAVDAWCFAPLVRNLQVLRGIRLVSAATLVAEVGDLTRFDNPKQLMAYVGLVPSEHSSGARTKRGRITRAGNAQARTMLIEAGWSYRLPAREERRYRERVIDLSEDIQAIGWKAQVRLCQRYRRLAATGKPQPKVTTAIARELVGYAWDIARRVSPAIAG

SEQ ID NO: 129239 - protein, 416 aa, unidentified
MSDEDKVASIDIHKKVLMVVVGSREGAASGPQCELERRRFGTTTSQLRALSAWLREQGVKEAVMESTAQYWKPVWMELEPYMRLHLAQAFSNRAPKGRKHDFRDAERLLRRLLAGELILSFVPEPEQRAWRTMTRMKTQLARHRVRVHSQLECLLEEMRIKLSSVLSDLFGTSGLRILHALAEGETDPQKLAALGDDRLKCTEEQLVDALTGNVQTMHQQLLTLYLQQLRLIDEQMEKLNRMIAQAMKPHQEAVARLAEVPGFGPDSAQQVIAEVGVQASAFASAGNLASWVGTCPGLEETAEENHSSRSAKGNKYMRRVLTEAAQAAVKAKGSHFQVVFRRLLPRLGYKQALWAVAHRLCRLVWKILHDGVRYIEQGAYRDPKARKQRAQTLARALRKLGYDVQITPREPATVQA

SEQ ID NO: 129240 - protein, 371 aa, unidentified
MKKYNTYVGLDVHKDSISIAIAEEGRSSEVRYYGSINGDLASLDKVIKKMNKDVGELHFVYEAGPCGYGIYRHLVKEGYSCTVVAPSLIPKRAGDRVKNDRRDAESLARLHRSGELTAIYVPREEDEAMRDLTRGREDAVKAQRIVRQELGAFLLRHGFRYTGKSHWTAVHRRWFAEVKMEHSGQQITFQEYIEAERTAGERVERLTEQIRKLVADWRMEPVVRALQAMRGVSLIAAATTVAEIGDMSRFASPRELMAYLGLNPSEHSSGDKIKRGRITKTGNGHVRRSLIEAAQAYAHPARISRRLVERQESLPKTIRDLAWGAQLRLCKRFRDLIKRGKNRNTVITAIARELCGFIWAIAKEVPLQPAT

SEQ ID NO: 129241 - protein, 352 aa, unidentified
MRRTTTLHTVSTLGIDMGKYTLHMIGLDTRGAIVLREKVSRGRINSRLANLPRCLIGIEAGMATHYVARELTALGHDVKQVPVSYAKPFRQGHKNDFRDAHAVAEAVQRPTTRFIPIKTNDQLDLQVLHRVRSRLISSRTAVINQIRAFLLERSIIIRQGVSSLRQSLPDILSQRTDVLSPRTVRVIIDLASDWHQLDNRIETVTDEIEALAKDDETCRRAMTIPGIGPIISSALVAAIGNGVAFGNGRDFSAWLGLVPKQRSTGDRTILGRITKRGNGYLRMLFIQAARVILRRPKNWPKHGFGLWLTHAAQRLHTNVLATAFANKLARIAWTVLAQGRSYEARTTEITTA

SEQ ID NO: 129242 - protein, 345 aa, unidentified
MMVIGIDAHKRSHTAVAVDEMGREKSTKTVGTTTEDHLRLLQWAVQCDEHRLWAVEDCRHMTRRLERDLIAAGESVVRVSPKLMAHIRDSARTYGKSDPIDALAVARAALREPDLPVARLDGVEREVRLLVDHREDLVAERIRIIARLRWHLHELDPGWTPPAKIERASAFDKVAMHLASCRDGALVRRLALRLVEHLRMLTAEIDELTAEITERVTIIAPSLLAIVGCGALTAAKIIGETADVGRFRSKDAFARLNGTAPLPVWSSNKQRHRLSRTGNRQLNAALHRIAMTQARCHPLARALLDRRKSSGDGGMEALRILKRRLSDVVYRAMLADQNQSQSIAA

SEQ ID NO: 129243 - protein, 350 aa, unidentified
MSATCVVTLGVDTHKDVHVVVALDQLGRRLGVADFPTDDAHHRALWDWVADFGELRQAGVEGTGSFGYRLAQFLTGAGVAVFEVNRPNRTTRRRRGKSDPVDAENAARTVLSGDATATPKARTGPAGQLRALLVARRSAVKSRVQAELQLRSLVLELDDATRGRVDRRRAADLVAACAELTATDGTSLGLRALARRWQYLDREVRDSDSAVELLVRQTVPGLLAQPGIGPICAAQLLVTAGDNPERLGSEAAFAALCGVSPVEHSSGKTQRHKLNRGGDRAANSALWTIAVNRLIHDPRTREYAARRTATGSSRKEIIRLLKRYIARQVFGEIIRALTPPKTPAAERPLT

SEQ ID NO: 129244 - protein, 384 aa, unidentified
MHHRQNYLYVGVDLHKEQHTAVIINCWQEKLGEIQFENKPSAFSKFLLEVETYVSDGLSVVFGLEDVGGYGRALAKYLVDHEQVVKEVNPALSFLERKSQVMIHKNDSWDAECVARILINKFNQLPDAKPNDLLWSIQQLVSRRNALVKAQSALKNQLHIQLNHHYPSYKKFFSELDGKTALAFWQQYPSPSCLEGVSIKKLTAFLLDVSNNTCSVKKASDILKLVKEDGQTMKEYQEMRNFLVRSIVREIEFKKKEMKYIERELKQLVNLLDYQLETMPGIELVTASALIAEIGDVRRFPNANKLARFAGIAPVYFGSGGKGKTHKSKQGNRALHALFYNLAVQQVQVAKGSKKPRNPVFHAYYQKKLKEGKTKEKDKHWYVL

SEQ ID NO: 129245 - protein, 415 aa, unidentified
MDEVDEQELHVERVAALDLGKTVLEACVRVPHESRPGRRMQELRGFATTTSALLAMADWFRCWGVTRVVMESTSDYWKGAYYLLEAEGFECWLVNAREVKNVPGRAKTDKADAVWLAKVAERGMCRASLVHPKPIRELCNLTRYRRSLIRDRTREMQRVEKLLEDAQIKITSVVSDVFGVSGRAILHALIDGQRDVLAGLAVGRLRPKTAQLREALRGFFTDHHATILAMMLDNIDRLSAQITALDTTIGDAVDPFAHQVAQLGEITGAGRTAAQELIAELGVDMTRFPSDAHLVSWAKFCPQTRESAGKTKNKGRAKGSPWLAATLGNIAASACRTDTFLGARHRRIAKRRGTQKAIVATGNAVLVIAYHLLADPAVRYHDLGADHYDTRINKHRLQALTGQKITIRDGKAIIA

SEQ ID NO: 129246 - protein, 356 aa, unidentified
MTIVAHAYPFVIGVDAHARSHALAVLASPTGELLDETQFPATVAGLQRAVSWVARRTGGDLAVLWVIEGVGTYGARLARAANDAGYAVAEAGRMSARANRGVGKSDPLDARRIAQSVLAVDEGMLRRPRADDGVRAAVRVLIASRDHISTERTSAANALTALIRVADLGIDARRPLTAAQITAMAAWRARDEDLATAVARKEAGRLAKRVIAADRELAANTKQMTDLLNASPARVLLDQPGIGPVTAAVALAAWSHPGRVRSEAAFASLAGVNPIPASSGNTVRHRINRGGDRRLNRALHMAAVTRIRMDPRTRAYVERRTAEGRTPREIRRCLKRYLARQIYRQLNAAETALNPT

SEQ ID NO: 129247 - protein, 364 aa, unidentified
MRFYSTQHRFYAGIDLHARTLHLCVLDHTGTVVCDKKLPCHFESLLQALAPFKDDLVVGAECMFGWYWLADRCQAEKIPFALGHALYMKLIHAAKAKNDKIDAGKIARLLKGGNFPLAYVYPKGMRETRDLLRRRSYLVHKRSELITHLEILNAQNNLPPFGKKLSYAANRTELNIPERFAHPSVQMSVTLDLGLIDKLDELIGTVELHLTRTVKVDDVQTYHRLRTVPGIGPILALVLLYEMHDVARFDQVGQFLSYARLVRPEHESAGKKLGWGGKKIGNAHLRWAFAEAACLFLRGSERARQWKQKQEKKHGPAKALGILAARLARAVYHMLRKQEAFDEDRFWNGQAAAVQPATRTTKGS

SEQ ID NO: 129248 - protein, 396 aa, unidentified
MTTIGIDIGGRSHAVALCRSGNGRADREILRVSQSRAGFAALDAWLDRQAEPVTLVTMESSGHYWMPIASHLRRRDVPVAVVNPLAAKYFAKSRLARTKSDPADARSLAEMAMRDMPPTRDPLVGAELRQAARFAMTLVAEQAKVCQRLIRLVELGFPELGELFDDPTCRTAREVLRIAPTARAATRRRTSTLANANGGPGHRRLGQAKAERLQAAAADSIAVPELDAEVAFEVGLLLNQYDLLELQIEAADRRVAELLDGELARRLQTIPGVGPSITATLLAEIGDITRFTDFDQLLAYAGVHPAERSSGRKGSSPETAWHMSKAGNSHLRAAAYRMAVVGVQHNPVIAAHYARKRAAGKSKMNALGHCMRKALSIVWGVWRNGRDFDPNWGAEA

SEQ ID NO: 129249 - protein, 363 aa, unidentified
MEERKRRYVGIDLGKREYTMAIIGKNKKMSVHQGKTNIHGRQALYKKLEADDKVALEAGNLAFIMAREIMEQNGCEVRVLNSAKLPFIWDAPTKTDKEDAMKLAHLIEERRDEKLPLVPLPSERELERRKILASYGREMRSRTRHLNTLHAIFVHQGHTTVVKKNLATAERRQEAIKALSGLELEEAQWILRYLELHEQRLKELKGKIQKEAKSDEDMKILQTIPGVGPIVAYAFTAHVGDGSRFSKGAQVSNYIGFVPRLDYSGTTQRNGPITKQGNGYLRGLLVQAAWMTVRSKQGGTLRTRYTHYTLCQGVSKKKTVVSIARKLTEHMYSVLRTKTAYEPRRWKGPQDKKIGLASLINIA

SEQ ID NO: 129250 - protein, 322 aa, unidentified
MDMKAVGIDVSKDRLDVHVWPDGIAFAVARDGKGLAELIERLLPLTPDLVVVEATGGFETVVAAALAGAGLPLVVANPAQIRHFAQAAGTRAKTDPIDAAMIARFGHDMKPDVRPLPDEATQLLADLVARRRQIIEMIVAERNRERRATVRRIKKSIARLVRALEKELAEIDAEIDAGVRGSPAWRDKEDLLASVPGVGPVVARTLIAELPELGTLDKKKIASLAGLAPYTRQSGQWKGKSMIGGGRKSVRCALFLAALVASRHKPRPQGLPRSPPRRRQAQDGRPHRRRPQAPHHPQHHPARPKTMAARLTRKTVAPPLRG

SEQ ID NO: 129251 - protein, 318 aa, unidentified
MKKAFFCGVDVSKDKIDVCFLTSITSEKAKFETLPNNYELIKVYFNSFKNDEILVVFEATSNYHLALQRALSNLSIRYCVTNPYKSSLFLKHLSTIKTDTSDSYGLAVYARTFKSEIAPDKYNAEYLEIKSYNSTLKLLQKINTQLKNFKSSQKTLNNKIIDDVIANLIKEIAKLQAMLQKLAFDLVKKAIPETEEIIKENKGFGIDLALNLFPQLHFNRDKSEKQFISFIGLSPRIFQSGSSVHKSQKINKMGNSNIRRILFMTALCAIRFNAKFKLRYERLLANGKKKMTAIVAVMCAIVRYLKSLFPFNPEIKAI

SEQ ID NO: 129252 - protein, 344 aa, unidentified
MSAAYDGPQIVGIDLHRRRSVIVRMDEAGQRLDTVRIDNDPMALAAQIAKAGEAPQVVLEATYGWYWAADVLRDAGAQVHLAHPLGVKGFAYRRVKNDVRDATDLADLLRMGRLPEGWIAPPAVRELREMVRHRAKLVAWRSGLKASVHGVLAKQGLHPPVTDLFGVAGRQWLSVAPLDAAYRLRTNALLRLVDAIDFEITAVAGPLRAVLADHPGFRAVQQVPGVGPVLAAIFVAEIGDVTRFASPAHLSSWAGLTPKHRESDIVVRRGPITKQGSTLVRWAAVEAAQGARNADWLTESRTRIAERRGRNIATVAVARKLLTYVFYGLRDGYIRALEQTAKAA

SEQ ID NO: 129253 - protein, 316 aa, unidentified
MNTKKNQNINVGVDTGKSQLDIYIRPLDIYFTVTNDEKGIKEAVKTIKKYKPERIVIEATGRLEMPFIIACANNELPFTIANPVHIKRFAGAIGQRAKTDKLDAQLIAHYSEAIKPKLSKLKPDTMQAMSDLVTRRNQLLTMQTMEKNRLQIMPKALAMTIKPVLTLFKNQIIKIEDKIEKLIESCPEYQAKNMILQSMKGIGKIAAASIISNLPELGYINSKQASALIGVAPMNRDSGRYKGHRKIQGGRPQVRTVLYMAMMSAMQSNPVFKATYQRLVAAGKPKKVAIIACVRKMIVILNSMLRDGVMWEAPKI

SEQ ID NO: 129254 - protein, 405 aa, unidentified
MATPGEVDVWIGLDVGKEEHFADVLDDEGDSLFARSVANDEAQIEALLERAAARGTPGLVIDQPGSIAQLAIAVAARHEIPVAYVPGLVMRRAADLYPGEAKTDRRDAFVIADTARTRRRSVHWLDTHSDELLGQLRVLNGFDVDLAADLTRLTNRLRDSLVSVSPALERAIGSRLHQAGVRDLVAKFPTLTALRAAGRARIATTVKKRSPRLATKVTDAVMAALDAQTVVMPAEVAVGRVVAELAIELDRLHSRRDALAGEIEEVFLAHPFGQVLVTLPGIGPRTGARILAEIGDGSRFANGSKLASYAGLAPVTRQSGISIRGEHQSRRGNHRLKNAMFLAAFASLRSPDSKAFYDRKRNEGKKHNAAVICLARRRCDVILAMLRDGTTYQPVHPSTALPDAA

SEQ ID NO: 129255 - protein, 340 aa, unidentified
MHTTIIGIDIAKSVFQLHAEDRSGKVLWRKRLRREELEPFLAKQAPALIGMEACGSAHHWGRVLRALGHEVRLMHAKYVKAYVKRGKSDLRDAEAICEAVQRANMRFVPIKSIEQQTARALERARDLLMKQRTQLTNATRGLLAELGIVASVGLRGFKTLVARIDAGDSVIPDALLSALKPLVEHWRALHTSIDALEARIVAQARSDERMRRLQTIPTVGPIIAHALVSAIGDPRRFASARDCAAWIGLTPLTNNSAEKTRIGHISRQGDHSLRRLLVLGAANLARRAKAKPNPADPWLNGIIARRPFKVATVAQAAKTARIAWALLCSGETYRATVPAV

SEQ ID NO: 129256 - protein, 395 aa, unidentified
MFIVGIDIAKRSHEAIIIAEDGQVVRKAFSFRNNCTGYNLLLEQVRRLTLVKSQIVFAMESTAHYWLALYARLLKDGYAVMVLNPIQSHSLRELYIRKAKTDARDSLIIADLVRFGRCKASNVPQDKILALRELCRSRAYLVDMAADLKRKLIALLDRIFPEYESLFDSVFSKASIAVLSKYSTPQKVKNANLRKLTDLLMESSNGHFGEWKAHQLKEAACSSFGIDDSGGVYSMLLGMFLEQILSLTAQADSLEEQISVFFQEFNNPLTSIPGIGTILAATILSEIGDITRFSSADKLLAYAGLDPSVKQSGEFKSNQNRMSKRGSPYLRRAIWLASTVAVHRDPMFQTYYEKKISEGLHYMNVIGHVSRKMTAVIFAVLRDGQPYQPILQSAG

SEQ ID NO: 129257 - protein, 400 aa, unidentified
MRAVFGIDVSKTSSEVAILVNGEKVHGYTILNDAIGFNRLLGDLKTVHNPEIIFEATGVYSRRLQAFLEEYSYAYTRLNPLEAKKQLDSLRVRKTDKIDAEKLAKSQLVHNRKPTYVQEEVYQHLRDLSRFYQNMTEDLVRTKNRLHKVLQVTFPELENLLSTPTGEQYWNLVMAFPCKEFVLSLSQSNLCEIVRQSTSKRISEKRITYLTDKLIKLAKQSFCAVKKNSPMLEEVRYYAQELLRLSERRQVVLNDMVALAQPLPEYDILRSIPGIAETTATSIIGELGDIRRFQSSNQINAFIGIDLRHYESGNFLAKEHITKRGNPYARKILFKCIHNIASASHTNPCHIADFYEKRKRQSTIASTKPHTIASIHRLIRTMYYLITHNKLYDYSLTQNR

SEQ ID NO: 129258 - protein, 345 aa, unidentified
MEPMYYIGLDVHKRKISYCVKDSSGRIHSEGWIPATRFDLDRWMKSLPQPWSAAMEATMFSGWIYDHLKPHAAALKVAHPLMLRAIVLAKKKNDRVDARKICDSLRCDFLPECYMAPTAIRERRRTLRYRNLLVRQMVQMKIKISTLLMEAGVSYNKQKLHKAGYFRELLATNPHIDAGLRSLLRQCREMVVRLGKTENALIRSLQQDRLLTERVGRLMSIPAIGPITALTWALEVGEVQRLSSIKKAVSYCGLCGEQKDSGNTVQRTPLSKQRNKHLQTTLIEAAKMAPRYSPTLALLYDREKQRGNANRATLAVARKLVAYLMAVDRGQTHFLTLDREACTAA

SEQ ID NO: 129259 - protein, 415 aa, unidentified
MKKHSNSVKKSESPMKRRNPRAEPRRDSSEVMAELVSQLRHQLEVKSIPAAESAGDEHDAARPNLDRLTVGVDLGDQWSNYCILGLGGETLREGQFRTRRQEVGEFFQGLATSRVVIEVGTHSAWVGEVIAGLGHEVLVANAQRMEGRKRHRRKNDRIDAAKLARLGRVDPKSLYPIQHRSTEVREDLLVIRVRDSLVESRTKLISTVRGMVKTMGARVRGCSSVSFSVKAADQIPPEVRETLEPLLRLIQTLSEEIKSYEKRIEKLGNEKYMDTKLLRQVNGVGPVTSLAYVLTLETPQRFKRSRDVGPYLGLVPQQEDSGDSQPQLGISKAGDRMLRKLLVGSAHYILGPFGPDTDLRRFGMKLCQRGGKNAKKRASVAVARKLAVLLHRLWSSGEVYEPLGYGKTITESAAA

SEQ ID NO: 129260 - protein, 428 aa, unidentified
MEPSISTSPSAALSAYIGIDWADQKHAIALRSAAEPSKVQHQVVEQKPEALMQWIGQLEQRFGVQGKILICLEQSRGALIYHLMGYEFLELYPVNPLQLARYRETFSPGGAKDDRPDSELLCELLYCHRDRLRAWKADSALTRKLAFFNEGRREAVDQRTALSNAIKSQLKVYFPLALELLNEESSTALAADLLLRWPSLEVLQKQSANTLRKFFYGHNCRGETKMLQRLELIQQAQPLTQDSAVIEPATFRVQLLARQLKSLLVDIARYDQKIAQLFEAHPDRFLFENLPGAGTALAPRLVTAFGSDPTRWDSAQEVATLLGIAPVRRASGKNTGKKASVHFRLACPKFLRQSLHEFAGCSIRSCSWARACYEAQRARGKAHHASVRAVAFKWIRILFACWKQRTPYDPQRYQSALQHRGSPFASAC

SEQ ID NO: 129261 - protein, 389 aa, unidentified
MVCIMRPFGEVVASPFEVTHTGSELGKLANSLKSLHGETKVIMECTGSYYYPIAYALHEAGLFVSTVHAKLIHDFGNNTIRKVKTDKADSIKIANYGLSHWLELPEYIPEEDVRRMLKAFSRQYTKYGKLKIMLKNNFISLTDETFPGVNELFTSPPRKSDGHEKWMDFAFKFWHCECVCGLIPKAFADRYRRWCKKAGYNFSQDKADDIYASACGHLIGMPKNDTTKLLVTQAVHQINAISESIAVIAREMKRLAAMLPEFPVVSSFYGVGDILGPQLMAEIGDIYRYRNKGSLVCYAGLEAPPYQSGKFESSSRSISKKGSPHLRKALFQVMECYLQRSPADEPVYQFLDRKRAEGKHYYSYMTAGSAKFLRTYYARVKEYLDKIED

SEQ ID NO: 129262 - protein, 405 aa, unidentified
MEELLVGVDWSQSHYDIAVVAQSGALLSQFRIAKTAPEFSLLAEKIDKFGVPAGNCLIGLETAHNILIDFLWSRQYAAYVIAPSIVKSSRGRFGNSGAYNDAKDAHLIADLLRTDRERFAPWRPDSELLTRIKTKLGHVDYLTKLTTSHTNRLRSILLRVYPQVLQAFNDVHVCLALHLLVAYPTAITLARLSYADFAAFCRHQRCHRLDWITTWYSRLQQPQPSVQASMAAAYQDEIGFIAQQLLWLIQEKKQALQQVQVIYQQHPDHPIFASLPGAGDMLQPKLLVMFGEDRARFPSPQDIRALAGTCPVTKQSGKRRHIQFRRACNHGFRETAQQYAVASVQQVDWAAAYFTSALSRGLRKNHAYRCVANRWLGIIWKMWQTHQPYDETYHLKQIHHQRRPT

SEQ ID NO: 129263 - protein, 417 aa, unidentified
METFSTLDVIYSCCAGLDVHKQTVECAVRLMQEGGRVEVQIRQFGTMTDDLLEMVKWLKAQGVTHVAMESTGVFWKPIYNILEGHCTALLVNARHVKQVPGRKTDVRDCQWLAQLLQYGLLKGSFIPPRWQRDLRDLTRERTQLTDEQTRVANRIHKVLEDANIKLGSVATDILGVSGRDILERLMAGEEDVEKLAECARGKLRGKIPELRRSLRGCLNEHHRFELRLNWKHLQSLQQLIEELDERISELCKPYQPQIQRLDKIVGINPASAEAIVAEVGVDMQVFPSAQHLCAWAGMCPGNNQSAGKRRSGRTPKGSRWLRRTLALAAQAAGHAKDSFLASRFRRLAARRGKKRACIAVGHSILKIVYYMLKDGRCYQDLGGSYFDRLNPERLARYLVRRLERLGLKVTLEPATTA

SEQ ID NO: 129264 - protein, 372 aa, unidentified
MSPNSITWVGMDAHKNSIAVAAWLPERPEVVEWTEATTPEAIRRLARKLRREAPGEVRCCYEAGPTGYALQRLLEAEGVICEVVAPSLTPVKPGSRIKTDRRDARKLGELLRAGMLTEVHPPSESEEALRDLCRCRDDVRVDLLRARHRLTKYLLRRHCIYRQTKRHWGSRHWAWLEQLRFDDAMSQATFDSYMLAVRQLEERQRQLDAQLAEFGGQDPYREPVGWLRCFKGIDTVTAVCLVAELHDFRRFRSARHLMSYVGLVPSEQSSGERERRGSITKAGNRHVRRLLVEAAWHHRHRPALSAPLRRRREGQPARVLAIADRAQERLSARYRRMTARGINTPKTIVAVARELTGYLWAVLHPDATDTRN

SEQ ID NO: 129265 - protein, 370 aa, unidentified
MAKSTTLFVGLDTHKDFNTVAYAEGATTDPPVFVGPIGTRQADIDKLIRRLHSKASHLVFAYEAGPTGYGLYRYLTGKGEECRVVAPSLIPKRSGVRVNTNRRDAVELARLLRSGDLVSVWVPRVEDEAIRDVCRARDAARITLKAAKLRLKSFLLRLGLQYTGRATWTDAHRRYLARVVCPTPAQQIVFQESLHAVDEQVERLARLERELVELAPSWRLSPVVAALQALRGVQFLVAITVVAELGDLTRFTNPRQLAAFVGLIPSEHSSGTTRRQGGITKTGNGRARRVLVEAAWAYRFKAKVSEEIRMRLEKLPAPIQAISWKAQARLCARFRRLISRGKNANVAVTAIARELLAFMWAIAKEVPLEA

SEQ ID NO: 129266 - protein, 330 aa, unidentified
MNHIGIDVSGKALSVVFSVNGKHRKAQRYENTPEDHKRLIALIQKLQGESIVCMEATGMHHFDLAVALSRSEKITVTAINPKAAHNFAKALMQRCKTDSIDADVLASYAERMPLVAWQRPSEEALALRALARRISATNKIKAQVKNQLGALMVTQETPEVILTQTKSLIGTLEEQIASFRINALSIINRNQELREIFALITSMKGIAEASAIQLLGELLTMPDDLTIKQWVAYAGLDPRHFESGSSVVKKTRISKAGNRYIRQALYMPALVASRSEPHVAAYYKHLQEKRGLLKIQALCAVMRKILHAIYGMLRSKRPFDGRMFFRMETT

SEQ ID NO: 129267 - protein, 413 aa, unidentified
MQIISRCCCGLDVHKKVIVGCLISIDDDGVESRQVRKFGTMTEDLLSLLDWLQESRCTHVAMESTGVYWKPVYNILEGHIDQVLVVNAQHLKAVPGRKTDVRDSEWIAELLQHGLLKGSFIPPPPVREVRDLTRYRSSLIRERARTVNRLQKVLEDANIKLASVVSDIKGASATAMLRALVAGHTNPEILACLAKGTLRKKREQLIKALTGRLKPHHQFLIAEQLSQIDYLDEAIERISAKIGECLRPFDDAIERLDGIPGINRPTAEVLLAEIGWDMSRFPTAKHLASWAGMCPGNNESAGKRRSGKTRKGSPWLRHALVEAAHGAVHTKNKYFKAQYHRIAARRGKKKALLAVGHSVLVVVYHLLTRQSDYADLGADYFEERDREAVQRRCVRRLERLGYAVSLVPTSQAA

SEQ ID NO: 129268 - protein, 343 aa, unidentified
MKLSRVGIDLAKNIYQLHGVDRSGKTVWKRRLKRHQWLKVLLDTAGPECEIGMEACAGAHHWGRELQSRGYTVKLIPPQFVKPYVKSNKSDAKDAEAICEAMSRPNMRFVTVKRVEQQDIQATHRIRAELMTQRTAKANQIRGLVAEYGLVAPKHLSSLRAAIPCWLEDAENGLTGDFRRLLHGVWEDLRLLDDRVGEMDKTIKRLADNNEDCVRLQQLRGVGPMISTAMIATVGDARQYHKSRQMAAAIGITPKQHSSGDKHRLLGISKRGDVYLRTLMIHGARAVVARATYKDDRLSRWVTNIANTKHPNVAAVALANKTARMAWAMLRNKADYDPDFAMS

SEQ ID NO: 129269 - protein, 348 aa, unidentified
MYIGVDTHKTQHVLVALDAQGRSLGTRTCANTPEGWANGLAWARGWEGRVWGIENSGSLGKGFAQSLRVQGEGTVHEVSPHRTAQYRRRGRTQDKTDETDALAIARLLLAEGDTLPEVQRDDLSTELRLLSDHRDNLLAEKTRLINQLHGQMLQVDPSYKEKSGRLTDARGVAYCRHLALPQDDRLLRTRLLIVHQLAEQILRLDAEVAAVAAALTERVQESQTPILALRGVGTIVAARIIGEIGVAPRIRSAAALAALAGISPVAVSSGGRGGYRLNRGGNRQLNRAIHVIALTQRRCDPRGRAYYMKKRAEGKTPRAALRCLKRRLVDVLFRAFSRHVEPSLCTAA

SEQ ID NO: 129270 - protein, 413 aa, unidentified
METLVARCAGLDVHKDSVTACVRVPDGHGGRHAETHRFTTTTAGLVLLAEWLASFEVTRVGMESTGCYWKPVWQLLEGQVECWLLNAAHLHNVPGRKTDVADAAWIAQLVEHGLVRPSFVPPRPIRELRELTRYRKTQIQERTREVQRLDKVLQDAGIKLSSVATDVIGASGRAMLEALVAGTHDPAVLAGLAKGRLRTKLPALREALAGRFRTDHHGLLVAQILAHIDYLDEAIALLSERIEQVIAPFAEQVALLDTIPGIDRRAAEVIVAEIGPDMGQFPTAAHLASWAGVCPGNNESAGKHRSGRTRKGSKWLGGCLSEVAKAASRTKGTYLNAQYHRLRGRRGPGKATMAVAHSVLVIAYHVLDQGVPYQELGDDYFQRRQSAEHYQRQLVRQLERLGHKVTLEPIEPA

SEQ ID NO: 129271 - protein, 342 aa, unidentified
MQVTTIGLDIAKNMFQVHGIDAAERVVVRKQVRRRQVLEFFKALPPCLVGMEACATAHYWARELTKLGHQVRLMPAKDVKAYVKRNKNDAADAEAICEAVRRPTMRFVQIKSTEQQGRLMLHRARDLLMRQRTQVINAMRAHLAELGIVAAQGRDGIKELLKIIANEEDARLPVDAHASLVVLAAGLQAVQTMIGSIEKRIMVQHRSNEASQRLESIPGIGVIGATAIAATVPDPKVFGSGRDFAAWIGLVPREDSTGGKQKLGPISKRGDRYLRRILVVGACAVLRYARHKPEKYPWLTRLLARKPFKVVAVALANKMARIAWALLAKGDTYRVPVLAAAA

SEQ ID NO: 129272 - protein, 496 aa, unidentified
MKHCEVVNNSAGDHNGVRRHLASARTRSSLPNVTNISLRSPVVPSVPGQTYERTSSPEDPCIRFTHRRSDQAKRGINMNATQWNEQPYFAALDWARSHHDVVIIDRLGQIKETIRFDHTAEGWQSFQRLARQHPHLPVAVETSHGTVVEQLFAAGVSVYPINPKAAERYRERQAPSGVKDDQLDAWSLADALRLDGHMWRALAMRDPIVAELQLLCRDEIALIEQRTAFVNQLKQALHEYFPAALEAFDDWVSPSAWNFVLTFPTPSQLQHAGRRRWEKFLHVHKLWRPDTVETRIAIFGRATALSGSAPTVAAKSLLAVTLARLLRQLEGQLDAYRERIGAVFASHPDHDLFGSLPGVGPKLAPRLLSEIGDDRARFFDAEGLQCVAGTAPVTFQSGKRLRYQKIRHACDDTLRATVHLWANLSRPQCAWAEAYYQAHRKKGQSHACALRCLGQRWLKILWKMWQSRTPYDEALHTRNQTQHGSWVLALSSPQSS

SEQ ID NO: 129273 - protein, 317 aa, unidentified
MTYTSRFVGIDISKSSFDVCVLPEERFANFANDAAGIARFVTFLAQWEGVERLVLEPTGGYERGVVEGLLAVGLPVAKVNAKQIRQFARACGRLSKTDRIDAFVLADYARRMDTKVLEPSSPAHAMLIDLVSRYRQLSHMIVQEKNRREKLVNQDNARTRAWIEQTLAFLQQQRQAVVDAMAACLTSDEHLALKAEVLMSLKGIGLRTACFLLAGLPELGQMNKGQIAKLVGVAPINRDSGQMRGKRMISGGRKPIRDALYIAALPAIRFDPNMKAVFQRLKAKGKPGKVALVAIMRKMIVILNARMRDHRATALDC

SEQ ID NO: 129274 - protein, 394 aa, unidentified
MPELLVGIDVAKDTSSAQGIDSGGKGMFSLSFAMGSEGFMQLWKAITQHSKNLSEVLVAVESTACYHINLYSFLTAKGVSTVVINPLLIANFAKLSLRKTKTDKKDAMTIAQFLLVHRDAVSQLSLSQDMQDFRDIARERESVCNMLCAHRVEIKRLLQSTFPELERIGDFSTRVMQEFIAAFPSARLVRMAKPKAIQKILQRKGVGTRLTYTAEDLIQAAKQSVATISPAKELILQGKVRTLQHLRERYDELTKILTEYCKASMLEDFEIITSIKGINKRTATTFLAEIGCIGNYTSHKKLIAFAGIDPTVYQSGKFEGASRISKRGNRHLRRVIWMMTTCVIQHNATFRIYFAKKRNEGQPFNKAVFATAHKLVRVIFAMLTQRTMFKEVCA

SEQ ID NO: 129275 - protein, 367 aa, unidentified
MPTLFECSERDDTFSMAAKKRPVTGGVDTHGHTHHAAVLDRVGRVLGDRQFPATAVGYQALLAWLRSFGRVAKVGVEGTGSYGAGLARHLTAHGIALVEVDRPDRRTRRAKGKSDPIDAIAAARVALSGQACGTPKTRTGPVEAIRALRVARGGAVKARTAALNQLHGLITAAPEVLRAELTALPTATRVATCAAWTVDDARLGNPVEATKAALAATALRVQALTAEITQADKRLRPLVARTAPRLSALTGVGAEVAGQLLTTAGDNPDRLRSEAALAHLCGTAPLPASSGRTNRHRLNRGGDRQANRALYTIALCRMRYHPTTQAYVERRTKQGLSKKETMRCLKRYIIREVHTALLADFTALNTT

SEQ ID NO: 129276 - protein, 338 aa, unidentified
MKTHVGVDLHQRFCYLTAVSASGKVFKQGQVVNEGDALRSWLRQLPVPRQVVVEASGFWPAFARATRAESERLVMVHPQRVKAIASAKLKNDRVDSETLAHLSRCDLLPEAWMADEATQQLRLLVRLRIRLGRQRARAKNQLQAVLHQEGFKKPVTDVFGKRGRAWLAGLELSVAGRLVVDTWLREVDHLDVELDAQTAELERMATADARARCLQTVPGIGAYSAMVILAELGDVKRFGNKRALASYAGLTPVVRESAGKRKRGGITHQGSNTLRWIMLQVTQVAARSSPGARSYYAGLRARQPAQVARIALARKLLTVVWALLHHGVCFDEELFARG

SEQ ID NO: 129277 - protein, 371 aa, unidentified
MESIVYVGIDVHKDTYSICCYKASEDRFYYEKKIKAESKSVIKYLESVKKEFGEETIFICGYEAGPTGFGLYRDLEKANYNCVIIAPTSLKHPTNHKIKNDKVDARFLARTLFTKDYSSVHVTTEHEEAIKEFCRMRQDVKLHLKKAKQVLLAFLLRQGIKFTDGEYWTVKHRNWLKTLTFKDGYLEEAFNEYMITVNSLEDRLKNIENRLKEIAEDETVKDKVDKLVCFCGIETLSALTIVSRIGDFSRFSKAYHFSNYIGLTCGEDSSGLKEKHLGITKNGDKEIRRILTESAKSLKLANPRGEKSKRLLERQKSKDPAVIAYADKCRYRLKSKIAHLEMKGKPANVAATAAARELACFIWGMMTNNIA

SEQ ID NO: 129278 - protein, 312 aa, unidentified
MTNDTIGVDISKDYLDAHRMSDGASHRFANDENGHRAFLKWLGGETGTRIVYEPTGPYHRAFERRLAQAGLALVKVNPRQARRFAEATGRLAKTDRLDAAMLARMGAVLDLEARPVRSPTLNDLKDLHMAREALVKNRTAAKNRAKSLTLAILRRHNGEQLRQIERQMAAIEAEIMAIIKGDPALARRFDILVSIPGISAITTFALLIDMPELGELENGQAASLAGLAPATRQSGKWTGRAFIRAGRANVRQALYMPALVAIRFNADLKAKYERLKAAGKASKVAITAVMRNLVILANALVRDDRTWQPSRP

SEQ ID NO: 129279 - protein, 352 aa, unidentified
MTVTIVETRAEIRAITGGVDTHADVHVAAALDSIGGLLGVKEFPATAAGYGRLLSWLGGFGTVCLVGIEGTGSYGAGLARHITTAGVRVVEVDRSDRQDRRRQGKSDPLDAVSAARAAQSGRARGASKGRDGAVEAIRALMVAKRSAAGERTQTINQARALILTGPDDLRARFTGHTTAALVAELASLRPRPGSTVGYATRIALRELGRRAEFLDGQLERLDELIGPLAAARAPGLLALYGIGPHTAALLLIAAGDHPERLRSEAAWAHLCGAAPIPASSGKTVRRRLNPGGDRQANHALWRIVFTRLGSDPATRAYAERRTAEGKSKKEIIRCLKRYVAREVYPHLRTTIG

SEQ ID NO: 129280 - protein, 344 aa, unidentified
MNHYAGIDVSLESSTICVVDGAGKILRETKVASEPEALIAWFRSVGLTLERIGLEAGPLSQWLYAALREAGFAVELLETRHVRDAFKAMPVKSDRNDARGIAQLMRLGWFRPVHCKSMEAQETRAVLTARKLLQSKLRDVENSLRGVLRGFGLKVGKTTECKFAERIQELVAGHPGLELVAKALLEAHAVLRREFNGLDKCTQKLARAHPSAKLLMTTPAVGPIVALTYASAIDDPKRFSSSKATGAHFGLTPKKYQSGQTDYTGRISKIGDASVREALYQAAHVMLTKPLKNCSTLKSWAMRIAKRAGMRKAKVALARKLAVILHRMLADAKPFNPMAKAAAT

SEQ ID NO: 129281 - protein, 412 aa, unidentified
MRRVIGIDVHRTFGEVVIWEGGILRHAGRVDMTRTALEGLGKSLRSTDEVVIEATGNSMAVSRVLTPFVARVIIANPLQVKAIAQAHVETDKIDAGTLASLHAAGYLPQIWTPDAVTERKRRLTARRYQVVRHRTRIKNEVHSILHAHLIPKCPHADLFGARGRAWLARQPLPDDESAAVERHVRELDRLAEDLAVLDREIAQVAIDDPAVKRLITITGVNLTVATGIVAAIGDISRFKSPQKLVSYFGLNPRVRQSGLGAAHHGRISKVGRSHARAMLVEAAWAAAKAPGPLHAFFVRIRAKRGHQIAAVAVARKLTVLCWHLLTRGEDCLWARPALVATKTRAMELQAGHPQQKGSRRGPAYAYNVKALRDQEMLIAAQAERSYERFVAQWKPRRPKEPARGRLKSAGHK

SEQ ID NO: 129282 - protein, 406 aa, unidentified
MRYYIGVDWADRDHAVWVEDEHGLKVTAHTVTQTAEGWATWGRWLHERRAEGTELWAGIEKPEGRVVEFLLDHGVIVYPINPRAIHKARDRFRTSGAKSDQFDARVIATFVRTDHAHLRPLAPNSEATQELKLLTRDYQRLVRQQTRLLNQLTATLKEYFPLALELFDDLTSAAAREFLQQYPTPDVARTLTAPQWRRWARAHRLSEARTTARWETLQAPPLPIPPGVVRAKARLVGALLRQLTPTLSAVEEYRAEIDRFFATVPAAEWARTLPAGRSGTTLPTLWAELGDAPGRWQSWQHLQAQAGSVPVTTASGQSKAVGFRFACNAQLRAAVQQLAFLSLQRSDWARAYYTACRKRGHQHHHALRALGAKWLKIIFVMWSRHVPYDETHHLATIARQRMRQAA

SEQ ID NO: 129283 - protein, 369 aa, unidentified
MMIFAFSAFFDQMKGPSPNRGAGDNAVFQTRVLRAMRGGQPMEREYIGIDLHKQFFQACAIRATGERRWEQRFPRTDGGLTLFGARCTPATAIAVEATGPTWAFVDALQPTGATICVVDPRKTRLKAGYAAKTDRLDARRLADALRRESVVSIYVPPPLVRELREVCRGRHQVVRLRTRVAQMIRALLLRSGVDDVPVRRVFSDRGLAWLETVRLSPDAATSLARLRQVLVAIQAEAASADALVRARAAADPIACALDAMVGIGPVLGLTIRAEIGDGGRFRRGAELASYAGLVPRVDASADRYWSGRITREGSPWLRWALVEAAMHAIRRSDAIGHWARQLAVRKGAFKARVALARRLCDDVVRVWSH

SEQ ID NO: 129284 - protein, 413 aa, unidentified
MEVVYHNCCGIDVHAKFLVACLLRDGKKHIRRFSTMTDDLINLRDWLVSEGCEIVAIESTGVYWKPVFNILESALPVMLVNPEHVKALRGRKTDVKDCGRLAEFLSVGLLEPSFIPPPHIRRLRELTRYRESLIRTRAAIANRIQKVIESGNIKLGQVASDVLGVSGKAMLQKLAAGEKDPVVISELARGSLRKKMGELKLALQGELNEAQRFVLGELLQRLKELEIADYKVSRQINQAICDPEHPELFKAWELLQTIPGIGEQVAEVVIAEIGANLREVFPTAGHLASWAGVCPGNKATGGRRISGKTRNGNHYFGCAMVQAAWAATHTKKTFLSAKYHRLVRRLGKKKALIAVAHTLTVVIYNVLVRNEPYNELGADYFDRNHSDKQRKYLVKRLQALGFTVTLEQNVNAA

SEQ ID NO: 129285 - protein, 392 aa, unidentified
MVISVGIDVSKDKHDCFIVSSEGEVLADVFTVPNNMDGFHCLLQRIQSCAVSQGKIKVGLEATGHYSYNLLGFLLDNGLATYVLNPLRTNLYRKSLSLRKTKTDRVDARTIASMLLSDAGLKPYTSAAYHNEELKSLTRYRFDKVKERAKLKSSVSRLVCILFPELEKLVPSLHIASVYALLEAFPGAKQVASAHLTKLKALLEAASKGRYKRDMALKIRDAARNSIGSRMPAKSLELQHTIRLIRELDAEIAETEEQIQSILDELHSPITTIPGLGFRMAAMILAEVGDFARFDSPDKLLAYAGMSPSTYQSGQLKNCYPHMEKRGSRYLRYALYNATKYVCQWEPGFSAYLAKKRAEGKHYNVAISHAAKKLVRLIFAMEKSGTPYHLTV

SEQ ID NO: 129286 - protein, 378 aa, unidentified
MSQSTTLYVGLDVHKDSIDIALAEASRDAEVRHLATVGGGNEAVTKALRRLVSAGHRLHIVYEAGPCGFALQRHLSALGWRCDVVAPSSIPRPSGERVKTDRRDAMKLARLARVGELVPVRVPDSADEALRDLVRGREDAVREQRNARHRLKALLLRNGIAYSGRAAWSGAHLRWLASMKLAHPAQQIAFQEYLHAITEAGARIVRHEQALRDALSGWSLAPVVLALQALRGVQLIAAITLVAEIQDFGRFATPRQLMAYLGLVPCEDSSGPRRRQGVITKAGNAPARRMLVEIAHQYRLAARVSPSIARRQSDLELPKAVTDIAWNAQTRLCARFRRLSARRLPHNKIVVAVARELCGFVWAIARQVTPAPSTPQTI

SEQ ID NO: 129287 - protein, 337 aa, unidentified
MEYFAGLDVSMAETQVCVVTRNGTVVHDAKVPSTPADIAAELAQVPPCRRIVFETGRMAPMLYHGLNKLGLPVICIESRQAYMALKLLTTHKTDRNDARGLAHLARTGFFKPVHVKSLPAHAVRSLIIARKKLVGQRVTLENQIRGLAVVFGVRLPRALNPAFVRQALRASDGVPGLSAAMRGLVAARTAVLAAIVAIDGDIRRMVRASEACRRLMSIPGVGQLTALAFTAAVDDPGRFRRSRDIGAYLGLVPRRYQSGEVDYTGSISKCGDRRVRTLLYEAANVMLTRYKGPLKLKDWAFAIAKRSSMRKARVALARRLAIIMHAMLRHGTEFKPA

SEQ ID NO: 129288 - protein, 333 aa, unidentified
MGFEPEPSKEGSWMMAQNGLVVAGIDVAKDKVDVCIRALSQRRTFESTAEGRRQLISWLRKHKATKVVMEASGGYEREWAKALREKEVEVRIVDPKRVRHFAQSAGRLAKNDTIDADTIAWFAETFGEAPGQAYDAEREKLLQIVNARRGLLETETMLANQGEHSVPDVVRKMQARLLKKIALEVAKLDAAIAAMIKATPHFAKLAEIIESVPGLGEGASAGLIAGMPELGQVSNKVAAALLGVAPYDDDSGKRRGERQIKGGRRRIRNLFYMPCMGAATRHNPVLKAFYDRLIAKGKLKKVAIVACMRKLIVILNIMIARGEKWDAKRYAVG

SEQ ID NO: 129289 - protein, 355 aa, unidentified
MVKQDQIEVYGGIDTHAETHHVAAIDGAGRRLADVKVSATAAGYQAALQFLRSWPGLVKVGIECTGSYGAGVSRAIRGAGIEVSEVNRPNRFDRRLRGKSDPFDAYSAAEAVLSGRASAAPKGGDGLVESLRVLRTSRSSALTARTATINQIKGMLITAPEELRSRYRGMSNTKLIAALAASRPTHAPVTATEATAYSLRLLARRWQALTEQIEDLAGHLQRLLDDHAPELMSVFGCGRDTVAQLLITAGDNPDRLRSEAAFAALAGACPVPASSGKTNRHRLNRAGDRQANSALYHIVLVRLRYDKETRDYAQRRTAEGKTKMEIIRCLKRYLVRQLYPLIVEVLLPQRETAAA

SEQ ID NO: 129290 - protein, 311 aa, unidentified
MKVSIGIDVSKDHLDLYCLDDGRSARFGNDAAGFRKLKAWLPDAGCIARVVYEATGPYHAALERRFGGELPLVKVNPLQARRFAQSKGSRVKTDAVDARMLAQMGAALDLAPQAPMSESLRELRELQVARQALVKDKTRLENRIKTQSVAFAVKQGKARLALIKRQLRDIDAEIQTRIGAETPRARAFEIMRSIPGLGAVSTAAVLIECPEIGTMNRKQVASLAGLAPMTRQSGHWNGQAFIQGGRHHLRAALYMPAIVAMRFNPDLKAVYDKLRSAGKPAKVAITALMRKLIELANTLVKADRLSVQKGA

SEQ ID NO: 129291 - protein, 344 aa, unidentified
MELFTLGIDLGKTTFHLVGMNQRGEVVLRKRFSRSQLLHCTANLKVDLIGMEACGGSHFLGRALRDQGHEVRLIPAQYVKPYVKTNKSDYIDAEAIAEAVGRPRMRFVPVKSEDQLDLQSLHRVRERWVMRRTAVVNQIRGLLLERGTTLRKGRRYVDEALPGILAGGPSKLSGTVLVLLAELKQELEQLAEKIDRSDKSIEKIARGNESCRRLVAMPGVGPVTATAIIATIGNGAAFRKGRDFAAWLGVVPEEHSTGGKQTLWKIPQRGNQYLRRLFVQGARAVMQHRTKQSSGLSAWLAQLTARTHQNIAVVALANKLARMAWAVLAKNEAYRPPLLAGNTI

SEQ ID NO: 129292 - protein, 358 aa, unidentified
MAPADPPVRDNRSGALGPSPQSRTTVQSPDIPIARTRQVTVTQIICGVDVSSISLDAFVGPQGPARSFANSAEGIAELVKFCVEHEVKLVAMEASGGYEKRAFGYLWGKKIEVTLLNPREVRQFAKAMGSLEKTDRIDARMIARFAEVKGSRPTPVVSATQEQLKALAKRLQQLTTLAAMQKNQRSTASDALAKKSIAEILAVLQKQMREFEKRIAEVLSSDPLWEKLVEALQSIKGVAGRTVARVMAELPEIGTLSKKAISKLVGVAPLADDSGKHQGRRSVRGGRRNVRAILYLVAGVVRRHNPEFAEFSERLASRGKRPKVIRIALAHKLLVKLNARARDARQAFASAAVVRESA

SEQ ID NO: 129293 - protein, 356 aa, unidentified
MSRDIKYIGMDVHKEAIVIAVLNGSGKLVMETIVETKASSILQFIHGLRGELHVTWEEGTWAAWLYDLLQPQVEQVLVCNPRRNALLKEGSKSDQVDAQKLADLLRTGMLRPVYHGENGLRTLRELGRSYQTISKDLTRVMNRLKALYRGWGIPCAGTQVYGPRYREEWLNKIPQAGVRRRAELLYQQLDGLQGLRRHLRPEFLAESRKHKAAKLLRQIPCIGPIRAARLIALIQTPHRFRSKRQLWTYSGLGIETHDSAQFRFVSGQLQRSKKPQQIRGLNRNHNHEMKEIFKSAATRASCGRGPFHDFYAGLLAKGMKPEMARLTLARKIAAITLTLWKKEERFDAEQLKTQAA

SEQ ID NO: 129294 - protein, 444 aa, unidentified
MTSNIIRFVGLDVHKRVVEPCLVDAAGKVVRRERFALNRQVLQRFATRILRPTDRVALEATTNCWAVADALRPHVAGVLVSNPMATKAIAQAKVKTDKVDAYVLAQLLRCDFLPEVWQPDEATRRLRELTGRRSTLVGQRTAMRNRIHSVLAMRLVDAPLRLFTPAGLKWLAGVEVDPQGRRLIDSDLRQLDFLQGEIDAIDEELARRGHDSDAVKLLMTLPGVDVATSEAMVAAWGDPRRFPDGDHAASYLGLVPSTKQSATQCYHGPITKRGNSQARWMLIQAAQHLDKHPGPLGHFFRRLARKKNRNVAVVACARKLAAIGWQMLVTGEPYRYAVPRSTEAKLSRLRVKATGKRRKSGPPKGTKAMAKLPGGSRTIRALAEVCHSEGLPQPRPLSAGERRTVEQTDSQTLVARIATAQVVPRSTGAGKVNQGANDVAKRSS

SEQ ID NO: 129295 - protein, 276 aa, unidentified
MTIIRVGLDTSKHVCQIHGVDENEQPVLRRQIRRSEVAKFFAKLAPTRIGIEACGVAHYWARVLRGLGHEVVLVPPQYIKPYVKRGKNDKIDAEAICEAMSRPSMRFVPVKTAEQQAALTMLGVRDLLVKQRTMLINAIRGHAAEFGLTVAKGPKQVNELLQRLASEEGVPALAREMVSVLASQLEGLGVKLKTIEKQLMAWHRQDPTSQCLATIPGIGPIAGVSFALKVADPQAFRSGRHFASWIGITPRETRPPGDRSSVGSAAPATKICGACW

SEQ ID NO: 129296 - protein, 335 aa, unidentified
MPLYCGIDLHSNNHVICVIDDKDKRILEQKLDNHSELTIRALSKYKRCLKTIAIESTFNWYWLVDALMAAGFKVELVNTAKVVQYSGLKRTNDRYDAFHLAHLMRLGILPTGYIYPKADRGLRDLLRKRIQLVQDRSRHIIRFKSQIQMHTGQTIRADYIKAKKYRAPIVGDDNVQLALQSHIVLIRALTVQIKILEKSILKQVEPTPGFDHLKTASGIGDILAETILLETGDITRFKGPGNFASYCRCVDSRRESNGKKKGENNRKNGNKYLAWAFIEAATFAIRHSDKANHYYHKKGKATNPIVARKALAHKIARACYWVMRNQVDFNENLVF

SEQ ID NO: 129297 - protein, 342 aa, unidentified
MSVYVGIDVHRKRSQVAVINQDGQVLANRNVPNGAEPILKVIGGLPPGTPAAFEAACGTSWLAGLLEDYGFAPHLVHPSRCKAIASARLKNDKVDAAILGQLLRADLLPEAWIAPAPVRQLRALLRHRVALVRLRTRLRNRIHAIVADYGYDRPGGGYWTGPGRAWLASLELPAVSRELVEDYLGVIDALQQRIDRLDWEIRQRARAGPRVKVLTRLPGVGPFTALVILAEVGDISRFGSARQLASWAGLTPTVRGSDRVAHCGHISKEGSVWLRWVLCEAAQAAERSPEFAVTFQRIAKRRGKKIATTAVARKLATRAWHLLADAGHAAAPPPAAPQTAAR

SEQ ID NO: 129298 - protein, 387 aa, unidentified
MEVRIENTPSAGTNNDPVHCFVAIELSKSSWVVGFQTPLSKQTSRYQVKACDAEPLLQLIERVPTRVTREVGRPVEVTSCYEAGYDGFWLHRVLEAHGIHNHVLDPASLQVNRRARRPKTDRIDADRMVRALIRHLRGEPDACSVVRVPSPEQEDARRLHRERGRLIAERVGHVNRIKGLCATQGIYNYEPLRSDRLERLDKLRTGDGRALPARFKTEIVREIKRLEVVLEMISTVEAERDAILKDKKSTHINADKIKMLAKLKAIGAEFSTTLVGEVFYREFANRRQLGSYVGLASSPFCSGSLDRDQGISKAGNSKARAMMIELAWTWLRYQPDSALSRWFQARVGNLKGRPRRIAIVAMARKLLVALWRYLQTGVIPTGAELKA

SEQ ID NO: 129299 - protein, 356 aa, unidentified
MEPIKTDCVGCDAHRRYSVFVVMDERGHTGKETRVEHSRELYRHFLSTLPPGSPIALESIGNWYWMIEEMERAGHQPLLAHAKKAKLMMGLTNKTDKLDARGLALLLRNGTLPSVWIPPGELRDQRELPRMRMVFARIRTMLKNRIQSTLAKYGIQIDEVSDLFGVTGRGLLQNRLNELPPETQRSIQEHLKLLDGVLEQIEGTEKRIKELIKETPQMQLLMSLPGVGPILAIVIILEIGDIERFPGAPQLASYAGTVPQVRSSGGKTYYGKVRSDVNRYLKWAFIEAANSIVVNQRRMPNRHVVQLYHRIMKRKGHPKAIVAVARHLAEATYWMLTKNEAYREPTSSRWISPTQK

SEQ ID NO: 129300 - protein, 346 aa, unidentified
MNHYVGLDVSLKTVSICVVNEKGKVVREQELASIPEAINGFLMGTGLKIGKIGLESGSLTHYLKKGLLEMGFEVITMEARKMAAILATVVNKTDKNDARGIAEALRAGHYRECVHRSDEAMEIRTLLHGRQTAVQERSHVTTSIKGHLKVYGIKLGKGSGKGFRIKVEESIAHLNQIIQKVIGSLLNILDSLEIEIKKLDQLVKEVAKQNEDVKLLQTMDGVGPITALAFKMEIDDVNRFTNSKDVGAYLGLTPSQYSSGEINRQGGISKQGSKQVRCLLVEAATVLLTRTKIWSKPKAWGIKLMKKKGKKKAIIAVARKMAVILHRMLVTKKPFERTDKKLEQAA

SEQ ID NO: 129301 - protein, 315 aa, unidentified
MAMRVTLQKPIIGVDVAKNELVIYHDQYDRLEAIPNTKVAITQWLKALASSCAIAIEATNVYHVLFADAAHEAGCDIYMVDGYQLSHYRKGVNIRAKTDAQDARLLARYLKNELDELRPWIPASPLYRQLLSLFRRRAALVQARTGLVQSWTNEPFLRTAFANQVNSMKRFEALVEKKIRDVLQEAGLMRQVNRCMKVEGIGFLTAARLVTSFQRGEFSGANAFIAFLGLDLRVSKSGQSDGPRRLTKRGDPEARRLLHNAAMSGSRTPAWKPFYEEQRKRGFSTTQALVMLSRKLARVVFALLKNQSEYQTKVA

SEQ ID NO: 129302 - protein, 398 aa, unidentified
MHQATVVACLLIVLQNGKVQKQIRTFGTTTRELQSLREWLLSEGCTHIAMESTGVYWKPVYAILEGALEIVVANAQHVKKVPGRKTDVKDAEWIADLLCHGLLRSSFVPPKPIRELRDLTRYRRKLVESQTAERNRLLKLLETANIKLASVATDVFGVSGRLMLEALVEGKATPQEMAELAKGRLRQKIDELGPALEGKLEEHHRFLLRLQLDRLEAAEKDLAVLEQRLQEKLKPYAEQLTLLDEIPGVDWTLAAVIIAELGVDMSVFGSVSQLASWAGVCPGNNESAGKRKSSRIPKGNVYLKTALVEAANSAAKAKGTYLRDKFYRLKARRGYKRAAVAVAHKILVAIYHMFSDRVCYNELGDVYLDKLNKHHLTRNLVHRLERLGYTVTLEQKAA

SEQ ID NO: 129303 - protein, 324 aa, unidentified
MEIFSLGIDISKAKFDVALLRDGGKLRHKVFPNTEVGYQQLSVWLSKHSALSIHACMEATGTYGEALACYLHQAGHLVSVVNPAVIKAFASAEMSRTKTDKRDATLIALYCLKHRPPAWDPPPPEISELQALVRRLEALLEMLQQERNRLSAGIVSSSVRESVEQHIAYLDEQITHTQSLIKDHIDQNPTLRQRRDLLTSIPGIGETTAARFLAEIVDIRHYESARQVAAFAGLVPKHRESGSSVRGRPRMCKVGAARLRKAMYFPAIVATHHNPIIKAMSERLREAGKCPMVIIGAAMRKLIHIAFGVLKSGKPFDPYHGKTA

SEQ ID NO: 129304 - protein, 380 aa, unidentified
MDHAIAGTPTTKTVLYGALELSKNTWLLALQLPDRVQPSLYPIRGGDTEGLMAKLMAARDRWAKKSGKAPSIVLCYEAGYDAFWLARFLKARGIECLVVDAASLQVNRRARRAKTDRIDVGMLLRAVIKWSQGDHHVWSVVRVPGGDEEDLRRSHRERDRLVSERTAHINRIKGLLFGQGIRDIKVKSKYKTLQIDKLVTGDGRPLPPRLASEITREIARLALIQEQLAVLERERDQAPTPCKATEKKRVQLMSLTGIGPAIAAVMTREVFYRQFDNRRQVAGFLGLATSPHDSGDVERSQGISRAGRGQVRGTIIQAAWLWLKHQPKSAITRWFVQRTAGQSGRIRRIMIVAVARKLAIALWRFLEHGLVPQGATLASR

SEQ ID NO: 129305 - protein, 416 aa, unidentified
MDLVHPRCAGLDVSKRDAKVCVRVAGSGRAAATSTVTTWGAVTNQVLALREHLIAEQVTLVVMEATGDYWKPFYYLLEDGPFEVLLVNARHVKNLPGRKTDVSDAAWLAQLGAHGLLRGSFVPPEPIRQLRDLTRTRTTLVRERAREIQRLEKLLEDAGIKLSSVASDITGVSGRAMLEALIAGRRDPTELAELAKRRLRSKIPALTEALTGRFAEHHAFLARLHLDLIDQHSRAVEELTARIEVVIEPFRGARDLMITIPGISVGVADVIIAETGPDMSRFPTAGHLASWAGTCPGSNESAGRIKSTKTRPGNPYLKGALGVAAMSAARSKDTYLSAKYRRIASRRGPVKALVAVEHAMLIAIWNMITTGSFYSDPGGDYYTRLHPDRTKQRALDQLKNIGYTVTLSPLAEAVAG

SEQ ID NO: 129306 - protein, 355 aa, unidentified
MSSEKYIGLDVHQATISVAVTDSQGKVMMESILETKASTLLEFLAGLRGSLFVTFEEGTWAAWLYDLLKPHVTEVLVCNPRKIPLHKQGNKSDKIDARKLAERLRLHDLKPVYHGENGIRMLRELARSYLTVVKDLSRVMNRLKALYRSWAIPCAGRDVYYRRHRSQWLEKILEAGTRRRAEQLYEQLDMLQSLRQQARRELLAESRKHAITAKLRKIPSLGPIRCALAVALIQTPHRFRSKRQLWTYSGLGLETRDSGEYHFVKGQMRRRKKQATIRGLNKDYNHDLKSLFKGAATRASVKPGPFQDFYQRSLSKGIKPTMARLTLARKIAAITLTLWKKGEDFDIHKLNSQAA

SEQ ID NO: 129307 - protein, 350 aa, unidentified
MIVLGADTHKRSHTIAAVAAATGELLGERTVPVGRCGFGAVLRWARRLDGERVWALEDCRHVSGSLERFLIERGERVLRIPTHLAAKARRSARQRGKSDAIDALNVARAAVQEGLDGFPAAHLDGPELDLRLLVDHRERLVRHRVELNSTLLWHLHDLWPELMLPGGALFSKKWTTRIGRRLARAQQSMRVRIARDELRRLRELTLAINQLEREITDLVARLAPQLLSEPGFGPLTAAKLVGEIAGAQRFATPAKLARAAGVAPIPASSGNTQRQRLDQGGNRQINAALHRVIVTRARCHQPTRDYIARRLAEGKSTREAIRCLKRYLTRTVWRLLQPPPVKEKLSQSIS

SEQ ID NO: 129308 - protein, 389 aa, unidentified
MITIGIDIAKENHYACVMDNRTGEVLIEPFEFKNNKEGFNNLLSAINPFRDYIVGFEDTGHYGDNLLFFLLSNGFKVGLINPITIEMKRKSKLKTAKNDKLDTLLIAQALIHKDEYRLVNIETYHLRDLKKLTRHHHDLKEDLNVYKNRLQKSIDLVFPEFNKLFGSKYGVTYMNLLERFGSADTISKTDMRVLRKAITLKGSGKPVSFTAEELKALATNSIGEKSLASEFQVKHLIMTIRLMEEQVKEVDAKIKELSMQLNSPITSIPGIGTFSGMSILSEYGDINKFDSAAKLISFAGVAPYVFESGQFAAGRTSITKKGNPYLRKTLYQIALPVIRYNPVFYKYYTLKRHQGKSHRCALGHVVRKLLRIIYHLVSNDILFDEINLN

SEQ ID NO: 129309 - protein, 425 aa, unidentified
MNYKQNEKINQVKESTLVVGIDIGSTTQYARAFDWRGIELGKVFTFSNSREGFEAFKAWMQHLQDKYKKLDAIVGIEPTGHYWFDLGAYLEDEGILLVMVNPYAVKQTKELDDNSQSKNDRKDPKVIAKLVTEGRYSAPYTPDGVYADLRIMVANRKRLIREMTQIKNRFARWFAIYFPEYTDVFGDYEAQSSMLLLKKVCTPEAIVELGAEKINQIWRDAKLRAVGMKRATTLCETAKRSIGLKKGSSAARYEMKLLLEDYEYKKAQLDAVMEEIEKLCRKIPESEQMLAIKGIGVITVAGFLAEVGDVRRFESPRQIQKLAGLSLRENSSGKHKGQTTISKRGRSKLRAVLFNAAIPLIAKNPEFKSLHEYYTTRANNPLKKKQSVIAISCKLIRVFYAILAKGVTYDAQKLISDIHRQPQVA

SEQ ID NO: 129310 - protein, 412 aa, unidentified
MSYTVAGIDVHKKVLMVVVVRLEASQPEWQPQQRRFGTTSSELHRLSVWLREQGVGEAVMESTAQYWKPVWYELEPQMGLQLAQAFSNRAPRGRKHDFKDAERLVRRLVAEELTLSFVPPPEQRAWRTLTRMKVQLARDRVRLHSQLECLLEEMRLKLSSVISDLLGVSGRRILQAPAEGETDPKKLAELGDQRLHCTNEQLRDALTAKPEPMHQQLLALYLERLRLLDEQIAKLNAMTAQAMHAHQDAVVRLAEVPGFGVDSAQQVIAEVGPQASSFPSPAQLSSWVGTCPGQQESAEHNHSGRSAKGNKYMRRLLTEAAQAAVKAKGSHWQITFRRLLPRLGYKQALWAIAHRLCRLVWKILHDGVAYLERGSQRDPKARRQRAQTLLRALRKLGYQVELKPLEPTLATT

SEQ ID NO: 129311 - protein, 328 aa, unidentified
MVFFGIDISKLTFDVSALIETKACHKKFANTETGFKEFKQWIKTFESEHYFCMEATGIYGVCLAQYLIQQNYKTIVANPFIIKSYSRMQMNRNKTDKADSFCIASYCKNLYLEENIDANLYKPKSKYYQQLQSLVTRLEQVKLLKNQEVNHLESSLDKTVVKIITQSIGSLDRQIKAIKTAIKKCVKKDETLRKHVQLLVTIKGIGDLTAWSILAYLGDISLFLTSAQVASFVGLNPCVETSGTSINKTSLSKSGNKRLRKALYMPAIVAKKHNPILAEFYDRLIKKGKPKKIAICAVMRKLLVLSFGVLKSETAFNPNYLKEKASQY

SEQ ID NO: 129312 - protein, 425 aa, unidentified
MQEKILRVSDKTIIVGVDVAKKEHWARITDYRGVDLAKPVKVHNNIDGFEKLMAWIEKICNNTGCDKVMIGLEPSGHYWKPLGWYLYLHQSNPMLVGVNPYHTKQAKELDDNSQTKSDKKDALTIAHLVRDGRYFDVYLPEGAYAELRILCNERKRLQKQVNRANNVIVAVMDEYFPEYDGVWEKVTCPTSREVMRKMPFPWDILDAGEEKVAELLRESSGGVEGKARAARLLEAAKRSIGVVEGRNSAKIRLLSLIDELEFYEKKVAAIEDEMTSIMDSLEMGELLQSMKGVGPVISAVFLGEVGDVSRFDNWKQVRKLAGMNLVEQSSGQHKGKTKISKRGRPYLRYMLFLAGQVGSLHNPEMHSYYRCLRERKNNPLTGYQAFVAVGLKIMRILFHMAKNRVPYDPAKALGKVREQQIAALA

SEQ ID NO: 129313 - protein, 351 aa, unidentified
MATSKRSIIGGVDTHTATHHAAAIDINGRLIADAGFPATPAGYVSMLTWMRGKGKLTQVGVEGTGAYGAGLARYLHDQGIEVLEVPRPDRRIRRQRGKSDPIDAEAAARTVLAGKASGAPKLADGPVEAIRMLRVARSGAVKARTAALNTLRSMVITAPEPLRSQLRTMSSAQLVTACARLRPDLTDLAEPVQAAKHALPSIALRVQHLNVETRSLRKQLDDLTQAAAPATSAVFGLGPDTVSALLLTVGDNPDRLRSEAAFAHLCGVAPIPASSGKTNRHRLHRGGDRAGNSALHIAAVVRLRYDPRSRAYADRRTAEGMSMPEIIRCQKRYLAREIFGALRADYAKLST

SEQ ID NO: 129314 - protein, 353 aa, unidentified
MVETLSEAKSSATGVTNPYRRTEHCDKIHEYRCDKEVGVIGIDVSKDYLITSRGRVRKYENNLKGYEEILDMKPCTIVLEPTGVYSIKPSQYFKEKGVRVLQVSPNVLSREKEFRGKKTDFYDAEKLENMVDKAKEYEYNPLRELVTLYLFLKDIETKYKNRLKRALFLVSDNDKISKERLEKLAMGDFTQEELYQLEYTPLVLEEIKILAKNLLEIQERLKEVRRMIEGQVPQDHVLLTIPGVGKLAAGIVGDVKRFPKPESFVAYCGLDPVVERSGRAVISRGISKRGNKYLRSLFYFLAEMNYSRNPTLLRFYESHKGRLRGKKLFTALARKLARVVWSVWYNNKPYEAK

SEQ ID NO: 129315 - protein, 410 aa, unidentified
MKVAGIDVHKKVLMVVVLDAGMPEEKPARRRFVTMPSELQRLLVWLREQGVEEVVMESTAQYWRSVWLELEPHMRLHLAQAFSNRAPRGRKHDFKDAERLVRRLIANELILSFVPSGEQRIWRNMTRMKLQLTRDRVRLQNQIECLREEMRIKLSIVVSNLLGASGLRILHALANGESDPKKLAQLGGERLQCTEEQLVDALTGRAQPVHGAMLALQLQRLQLIDQQMAQLNNMIAAAMKPHQDAVMRLAEVPGLGVDSAQQIIAEVGAQAGTFASAAELTSWVGTCPGKEESAEQNHSSRSAKGNKYMRRVLNQAAHAAAAKKGSHFQIVFRRLLPRLGYQSAIWAVAHRLCRLIWKILHEGVRFIEHGAEVHPREKKKRAQMLARALRKLGYAVTITPTDQLAPKPVA

SEQ ID NO: 129316 - protein, 368 aa, unidentified
MQALTMKSYEVVLGVDTHLDTHVGVVLSGAGNLLGTLTIPVSTKGYRQLLAWAMSYGDLRRAGVEGTGTYGAGLTRLLREHDIEVLEVNRPDRAARRFQGKSDPTDAESAARAVQSGKATAIPQTQTGVAESMRAVLVARRSAVKARTQAINQVKALLISAPQPLRERLWRNKSAECIAGCLRLREKATHPLQALTATLRLLAKRWLLLDREVNALDAMLECLTQLYAKRLRSRFGIGPQTAATLLAVAGDNPERLRNEAALAALCGVSPLQASSGKTIRHRLNRGGDRSANNALWTIALVRMRGDIRTQAYAERRTREGRTTREIHRCLKRYIVRELYPLIRLTWSIQRTLVDIGASMPWRNPSSIV

SEQ ID NO: 129317 - protein, 459 aa, unidentified
MGHARARRVPARIVEDEEYQLRHERVAGIDVAKASAVACTRLPAGRDGGRRRSKVTGPVPATVPAIMGLAWQLLADGVELVSMESTSDYWRVWYFTLEAAGLRVQLVSSSAARQLAGRPKTDALDAQWIARLCEMGLLRPSFVPPAEIRALRQWTRARLQLVRDRTAEWQRLEKLLEDALVKLSSAVSGLAGHKTARAVIEALIAGDRDPARLADLAMGPLRGRRAGLAQALEGMAFGAHHAWLARMHLDRADALDRQVAAIDDEIEACLDAIPAAQGIDGDGARAPGPGPGAAALPAAERLAEVPGVSLMLARAIIAETGLDMTRFPTARHLVSWAGLSPVAQQSGPRHRKSKKGQGDGYLRRYCTQAANGAAPTDTFLGDRVRRLTRRLGGSRARCAVARSILVIIWHLLSDPGARFTDLGPGWHARSTDTSRRTRSLLAQLRALHPGSDITITPAA

SEQ ID NO: 129318 - protein, 369 aa, unidentified
MQRKEISFKGQKVFIGIDVHKDSWRVAIAPEVGVVKGHSQKPSARELLDFLKKYYPDGEYHAVYESGFSGFSTYYALQDVGIDCIVIHAADVPTTQYEETMKTDKVDAAKLVRSLKSGLLTGIYIHKRDDIDARSMVRLRKTIQKQLGSYKSRVKHLLHSNGVTFPERFSTPGSHWSKVFIRWLKEEVVLLSATRISLDLLIVQVEAIRKTLLMATRNVRELSRSERYRHGCELLTSIPGVGVNVAMTLLTEIGDINRFHNEKEFASYLGLVPTSHSSGGKVAHGEKTFRGNKYLGPQIVEASWVSIYRDRGLGCAYTNYKKRMKPQEAIVRVARKLSNIIFSVLKTGQKYKPYEWDEQQKHTDLQATS

SEQ ID NO: 129319 - protein, 312 aa, unidentified
MIEQCFVGIDVSQDRLDVLLLPQATGFSVANNEAGWNALIARLRDLPVAAIGLEPSGGYERGVIRALLTASLSVRRINPNRLRQFARARGALAKNDRLDARLIAAYVATMPTHVVRHDPAAARIAEIVTVRRQLCDEHVAIENQAAQLEDAMLRRLAKRRLARIETDIRLLDKRLTQMIAAEADLARRYARLTSMPGVGPVLAFTLIALLPELGRMSRKQIAALVGLAPYDFDSGKLRGHRSIYGGRMPVRNVLYMAALSACRYNPALKTFHNRLAAAGKKPKVILVAVMRKMITTLNAMLRDGAGWQPQAA

SEQ ID NO: 129320 - protein, 427 aa, unidentified
MAVAVNRVGTGADAAVPTSVRLRLSRCALLRPYGVAKGRRVQRAGAPRIVVRGLVTAPMEEAPTMTESTTRWVGLDVHARQTLATVFTPASGEVAQRRIEGRPRAVVEWLTGVPQPFRAVYEAGPTGYVLARAAAERGLEVAVCAPGHIPRHPSDRIKTDPRDSLRLARLYAAGELKLVRIPTVEEEQLRDLVRAREDVRVDLMRVRHRISKFCLRRELPYPGPGKTWTLAHRDWLCRLRFPDRASELVFADSLQAHDHLLGRRAGLEHALAELVPESPWASTVAALRCLRGIDTLSALGLCAEVGDWRRFPHPKFLCSQLGLVPSQSSSGERRRHGAITKAGSKHARRLLVEAAWHYRHPPRVPSTLLRRQQGQDPRAVEIAWRAQRRLHQRWQRLDSERGKRTTVVAVAVARELATFCWEIATLD

SEQ ID NO: 129321 - protein, 373 aa, unidentified
MENTITKVAMDTHKKQHTIAYLSLETGETEVFTVKNNTKDIKKMVKKLSKQLGTELHFCYEAGVCGFTLKRQLEAIGCKCDVIAPSLVPIKKGERIKTDRRDAQKLLAYFISGDLTVVYPPTLKQEADRELTRCRGAAHEDLKRSYHQLLKLLTRHGYIYKDGAHWTHKHFVWLRSLQFDDSRLREVFDHYQSHVQYCIQRLETLDKEIESLATSKPYCKIVGLLRCFRGIDTLTAITLITEIIEFGRFSSPRKLMHYLGLVPSEYSSDETHNRGRITKAGNKRVRRLLVESAWHSRHRVWVSKELKRRRQGQPQWAIAIADQAMARLHKRYWRLMDRGKLKHKVVVALARELSGFIWAVLREHQLREQGQVA

SEQ ID NO: 129322 - protein, 403 aa, unidentified
MNQYKTCGLDVHKDTIFCGVFDGKRHQEVKEYSTLTSSITSLGEYLKSEGIEDVAMESTGIYWIPVWNILEEMGFNLTLVNPYLIKQMPGRKSDVKDAQWIATLLHKGLVRSSLIPCKEIRELRTYSRKYVRLQQRLTSILQEMERNLEMCGIRITSFVSNISGKSVMKVIHALIEGETDPEVLAGYIHGRIVNKHKRKTIVESLRGHITPQHLFQLELSLEEYELLCRQRDRCEEEMSRLCYLHYPEELALLQTIPGISLLSAMIVIAETGADMKAFENSGKFAGWTGLRPRNDESAGKFKSTATTKGNRYLRAVLVQIAWAASRTKGSFFKEKFTRLCLRKNRKKALIAIARKMAVLIWNVLSYREEYNPQKVIVHEPGKVQAKMDYHQKEFKRLENLLIS

SEQ ID NO: 129323 - protein, 487 aa, unidentified
MPVSEHGRKEGVIKHGASNSVGMPDKQSFDDKYSFQHTCFHHLKNVEMKRIRKNASGIDIGARNIFVSVGSESVQSFETFTESFYEARDYLLSKGVETVAMEATGVYWVILYEVLVQAGLDVWLVDGRQTRQVPGRKTDVKDCQWIQQLHSYGLLNRCFVPEEAVKEIRAYQRIREDHIRNASMHINHMQKALTEMNIRLKEVLSQIHGASGIAIIEAILAGERDAEKLLSLCHVSIREKKAEAVRKSLNGYYSQAGLFALRQAYDGYQFYQQQIKACDQQLQQAMERLNRFHEDQQSQEEITSKKGRKPIRHNKPDVDYLGGHLLKIFSGTDATKLPGITDYTWLQLYAEVGKDLKNWPTEKHFTSWLGLAPGQHQSGKKNKSRNKKYRPKAGQIFRQIAQSLIESKKIALGAFGRRLKSKRGPGIAVKATARKLAVLYWRIMVNGCEYVEKGIKTYEEQMQMQKERWLHKNAKDLGYQVVTKGAS

SEQ ID NO: 129324 - protein, 348 aa, unidentified
MRIIGCDYHPSWQQVCWLETTTGETGELPLPHASGEAERFYRQLPGHALIGMEATGNCQWFVEMLARLGHELWVGDAAKIRASDPRQQKHDRRDAELILKLLLEGRFPRIWVPSSEEKDLRELLIHRYKLVCLRAQVKNELQHLAMNQGITKKRKLWSKAGERVLRELPLRPWSSRRREDLFRIREMLNGQLDLLDQAVADAAEKNERARLLMTQPGVGPITSMAFVLTMGDVNRFQRGKQVASYLGLIPREYSSGGHQRFGSISKQGNRFMRMLLVEAAQNAVRYDPQMRNEYLHRCHRKAKGVAKVAAARKLAIRLYWMLRTNKGYPEVVRVESSSRVPLVVRYHG

SEQ ID NO: 129325 - protein, 405 aa, unidentified
MYFIGLDWSEKEHMVCIINQDGRHLALFSIPHSPEGFARLEEEVRRLGATPEQCLVAVETAHNLIIDFLWSRNFTVYVIPPKAVTRYRDRHRQSRSRSDKGDAVTLAHILHTDRQVHRPWQPDSLLTRRLRSQVRLIYTLHQTEQRYIGQLRALLLRYYPQALTVFSDLALPITLSFVVTYPDPQAAQALGKEPFYAFLKEHRHPRPAMWTQLYAGLQRPAWEPDPALTQIYSQRTQQMARLTLEVVQARRDAIQELKALFEQHPDREIFASLPGAGELLAPSLLAKFGDRRERYPDPAIVQALAGTCPVTDQSGKKRRILFRRACDKEFRRIMQQFSKASVAESVWAAAYWQEVRPHCDSDAHAYRCLANRWVPIIWRMWRDHKPYDEAYHLRRRAQRRRPRKT

SEQ ID NO: 129326 - protein, 399 aa, unidentified
MASMRSNGDRIKRFRELKTTLRTQRDRLLVGIDVAKAEDVAQIRLAHTRILDKAVAIPNTTAGFGTFWRRLERHQRATGGVEIVVALEPTGTYHQALAQFLDAHGADVVLVDNHVAALHRRLLDRTWDKNDPKDAHNLCDLLEQGRVLFCALPDEPVATLRRLVRLLRRARVELGACKARWQNTLRPALGPAGEPLPAPVITALPAPLRAFLPAAERRGAPGRPRALPPGVAAELTDLAARCIAVRSRIATLEAALVTATTPLPATAWLRSIPGLGPTLTAIMLAELGDITWFTKFSQLRKLAGLDIIRVQSGQWAGTARISRCGRPLLRWALYQAALGACRTPAWRAKRETLLAKRQGDPHAFFKTIVELAAKLLRVIWGVWRSGRPYTAGQAGAPAA

SEQ ID NO: 129327 - protein, 344 aa, unidentified
MQIITIGLDLAKSVFQIHGVDATGQVAVRKSLRRSQMLPFFAKLPPCLVGIEACGTSHHWARELIKLGHEVRLMPPAYVKPYVKRGKTDAADAEAVCEAVTRPTMRFVPVKTPEQQAALSIHRTRDLLVKQRTQLINMIRGLLAEFGVDIPKGLERALLMARQIVDGKAPEVPIEAARIVATLSQQALDTHVRLRGIDRDLAVWLRGNDLARRLMTIPGIGPVSATALAASVTDPHQFRSGRQFAAWLGLTPLQKSSGGKERLGRISKMGDKYLRKLLIVGMTSLVRRAKYNPGKIDPRLADLLVRKPTRVATVAMANKTARTIWAIMARGETYRAGHRPALAA

SEQ ID NO: 129328 - protein, 402 aa, unidentified
MYNAVGIDVSKGKSTVAVLQPAGVIIRKPFNVNHTSSELDELAKYIGSLEGETRVVLECTGRYHEPVVKTLSEAGLFVSAVNPHLIKNFGNNSIRKVKSDPADAKKIARYTLDNWIELRQYSSMDNTRTQLKTLNSQFSFFMKQKVAAKANLIALLDNTYPGVNKLFDSPVRDDGSEKWVDYAYSFWHVDCVRKIGLKTFTERYQAFCKKHHYNFQPAKPAELFLASKDLIAVFPKEASYKLLIQQSIQQLNLASSHVEELRSKMNELASTLPEYATVMGMYGVGKTFGPQLIAEIGDISNFSHREALTAFAGVDPGVDQSGTHNSKSNKASKCGSNRLRKTLFQIMSTLLQTAPEDDKVYQFLVKKRAEGKPYYVYMTAGANKFLRIYYGKVKECIRNLEQ

SEQ ID NO: 129329 - protein, 319 aa, unidentified
MSERREERFVGIDVSKATLEVAVRPSGERWSVANEEVQVRELTKAIVRLAPTLIVVEATGGMQTLVVAELAVAGLPVAVVNPRQARDFAKATGRLAKTDSIDADVLANFGQAIRPEVRELKDEQAQLLSALMSRRRQIVDMLTAEKNRLAAAPKPVRQEIRKHIEWLEGRLKAMDGQISDTIKENPAWREKDLILRSVPGVGPVLSLSLLAGVPELGRLDRQKLSALVGVAPLNDDSGKHRGRRRVWGGRAQVRAVLYMAIVSATRANPVIRAFYQRLILAGKKPKVALTACMRRLLCILNSMIKNGTRWQQREVGAGA

SEQ ID NO: 129330 - protein, 452 aa, unidentified
MYVQVEHERCCGIDVHKNSVTACVLLYENGPKPTVRRKECATHTKALETLRAWLSAQQVTHVALESTGVYWKPVWQALESHFQLLLLNPYQVKNMPGKKTDKRDSEWLAELLAHGLVKASFVPPAETRVLRDLTRYRVKLTEEMNRIHNRIHKVLEVACIKLDTVATHILGVSGRSMIKAVIDGQEQPNELAQHAKGKLREKLPALRLAMNGHVTEHHRFMLKELMEDLEFVEKKILRLDPTILQHVDMNAVARLCTIPGVDVITAWTLLAELGSDMRAFPTAKDAASWAGLCPGNNESAGKRLSNRTRKGNRWLRRGLCQAAWGASRKKNCFLAAFFLRQRAKGGAQKAIIATAHRLLVIAYCMLRDGTEYREAGGDYYDKQQPHKVRARLQERLRRLDAPATLPPLTPALSPLAASPDPPPTPSVPTAARKKRGRPCKCAERLIPCIHST

SEQ ID NO: 129331 - protein, 358 aa, unidentified
MRNLAALARNRLDRRFDREVTPVCGHPSKHTLALGDSGMQTTTAAPLYIGVDVSKDTLVSVVHGTALRRALANQRSAIEAWLNTLPAASHIGMEATGSYHELLADLAHAKGMRVFVLNPKDVRRYASGVGVRGKTDRVDAALIARYIAHEQSKLHPYRPPSPEQRQLHRLLTRRAKLSRARASVQQSLQGMPGLKAPLRALLLRFDALIACIDARIRALVDACPQRRAASERLRRIKGVGPVVAPALLNALEYFAFARADSFVAYSGLDPRPDDSGKRVGRRRLSKHGPSELRRLLYNAAMAGVTSPVWKPLYQRYLAKGLPRTAALVIIARKIARTAWSVYTHNTTFDPQRLTSRLT

SEQ ID NO: 129332 - protein, 429 aa, unidentified
MEEIDDTDLVVERVAALDLGKAGLDACVRVPHTHHPGRRMQELRSYGTTTAQLLELAAWLRHWHVQRVVMESTSTYWKGVYYLLEAEGFDCWLVNAREVKNVPGRAKTDRADAVWLAKVAERGMCRPSLVHPPDIRRLRDLTRYRRALVQDRTRERQRVEKLLEDAQIKISSVLSDLHGVTGRAMMDALINGQRDPHTLARLAKGSARKKTARLEEALRGFFTDHHAMILQMMLANSDRLSSQIAELDGRIEEAVSPFCAQSARLADIPGVDVMAAAELIAEVGVDMTRFPSAAHLVSWAKFCPQTHQSAGKSKSQSRGKGNPWLAGTLGRVVFANSRSETFLGARYRRLARRRGKQKAIVATGNSLLTVVYHLLLNSDARFCDLGPGYYESRINKHRRARDLATQLQALTGQHIVIRDGKAVITDTAA

SEQ ID NO: 129333 - protein, 324 aa, unidentified
MAKHTTICAGIDISKRKLDVAIDGSSERLQVGNTAEGHKALLEWLRRHKVKRVGIEASGGYELPVVIELRRKRFVVVVFQPARVRAYAKFHSQPAKNDKLDATLIAACAAAVKKIHDAPDPRLAPFAEHLTLIEQIGEDIKLYKNRIETCRNPRIQKLWKEEISRLEKREKVELKALVAAIRQHRDLANRLDLIYSVDGAGMPTAVAILVRMPEIGKLSREQVAALAGLAPYDDDSGERSGARHIDGGRKRLRRALYTAALPASFFWNPQLIALYKRLRAAGNVHKSALIACARKLLIFVNTVVARGTPWQEEPPIRATNPAAA

SEQ ID NO: 129334 - protein, 352 aa, unidentified
MLIIGCDFHPGFQQVAIFNKQTGEYQEKRLSHRQEAEQFYRSLAGQKVRVGMEACGHYPWFERLLADLGMELWLGDAAKIRASVVRKQKTDRRDAEHLQVLLREERFPRIWVPTLEERDARQLLVHRHKQVQARTRTKNQLHALALSQGVQKKRKLWTEAGRAELEKLELLPYAAIRRERLLETLDRLEAEIAALNRQVEAEVQQRPAAVRLMTHPGVGPVTALAMVLTLGPAERFASGRKVGSYFGLIPSEHSSGGRQQLGHISKQGSSFLRFLLVEAGQSAARYDAELGRFYRRLAVRKHRGLAKVAVARKLATRLYLMLRENWNYAQLCKAVVQVSPSHSVEGRQKPSA

SEQ ID NO: 129335 - protein, 354 aa, unidentified
MYYVSGVDLHKRYVTCCALDSDGAVVAAERRLPTTVEALLGFVTALEGPATVAVEATLHWAWVHDQLSAAGYPVVVAHPQQVKLICHARCKTDPIDARKLADLLRTHLLPAIWVPDAETRARRQLLRGRAFLVRLRTKLKNRIHAYLAEQNERVEVSDLYGQAGRAWLATVALPREVREQVELVLELVDHLLRRLDRRIRDRVTLSAEAKQLMTIPGVGPYGALLILAELGRLERFPSAQAVASYAGLVPSTRSSGGKTAHGSVGMAGSHWLKWILIEAVVTLKRRPSPVRNHYEKLLRAKGKQKAAVAAVRKLATYIYWMRREGWTYEQWLAQHQAAKREGRPVHSLATVAVA

SEQ ID NO: 129336 - protein, 453 aa, unidentified
MEQPREVHDEEHERVWERVAAIDVAKGSGVVCTRVPDEDRPGRRKTHVHTVPARVNAITELGDYLRARQIQVVTLESTSDYWRIWFVILEAAGLKVQLVNARTVKNVPGRAKTGKNDAVWLAKLTERGMLRPSFVPPPEIRRLREFTRLRASLVQDRARYWARMEKLLERALIKISDVMSELNCVSGRAMIEALIAGERNPRVLAGLARAGLRKKQAALIEALAGRFEDHHGELARILLDLIDALTAQVDRLDTRIGELLDQIPAAWGIDAGGATGPQAGAGPDAAVLPAVARLDEIAGCGLIAARAVIAEIGLDMTVFGSPHRLVSWARRCPQTRQSGAKTSHAPPGKGNPWLNGILGEIAASAARTDTFLGERYRRIARRRGKRKALAAIARSILVIIYHLLADPEARYHDLGPDYYDTRTDRDRKIRNHIRQLQALGLDVTICPQAEPAA

SEQ ID NO: 129337 - protein, 346 aa, unidentified
MMIIGCDYHPSWQQICWVDTATGETGERKLEHASGEAEKFYRGLPASALIGMESTGNCQWFVEMAAAAGHDLWIGDAGKIRACDVRAQKHDRRDAALILKLLLEGRFPRIWTPSGEEKDLRQLLIHRYKLVRIRAQVKNELQHLAMNQGITKKRRLWSKAGEKVLRELPLAPWASRRREDLFKVREMLSAQIDLLDQAVVEVAEKNEKARLLMTQPGVGPITSMAFVLTMGDVSRFQRGKQVASYLGLIPREYSSGGHQRFGSISKQGNWFMRMLLVEAAQNAVRYDPGFRNEYLHRCHNKAKGVAKVAAARKLAIRLYWMLRTNTGYPGVVRVESSSRVPLVSAS

SEQ ID NO: 129338 - protein, 340 aa, unidentified
MTIIIGIDPHKATHTAVAIGSDESELATVTIRATRQQTDKLLSWAEPFEERTWAIESAGGLGYLLAQQLVGAGEQVLDVPATLASRVRVLGSGRSNKNDPNDARSVAIAALRSPGLRAVSIADHAEVLRLLAKRNGDIGDHRTQVVCRLHALIAALEAGGIAKELNASDANGLLGSFEPSSPAEHTRHQLALELLADVRHLDGQLAESKQRIKVAVQASGTSLTEVFGIGPVIACALLGYTGDVSRFASRDQFAAYNGTAPIEVSSGGRVAHRLSRRGNRNINHAIHMVAICQIRHTHSEGRAYFDRKVAEGKTKREAIRSLKRQISNTVYRHLVLDAAK

SEQ ID NO: 129339 - protein, 444 aa, unidentified
MAMRKREDEVYPNAAAIDVGASSHWVAIPPRLAEQAGCEPVRECGVMTDDLNELARWLVACGVDTVALESTGVYWIPVFEVLEQHGLKVWLVDARQMKYVPGRKSDVQDCQWLQKLMSFGLLRAAWRPSAEVCVIRAVARQREVLITEQVSWVQRMQKSLVQMNIQLTDVISDVMGQTGQAIIRDIVAGVREPQVLARHRHRRVKASEAEIVRALTGNWRDEHLFVLTQALAMYDDIGRHLAECDAKLQALLQQRSAARVDIGKAPKAGTKLRLEFDVRQSLADWAGVDLTRINGLGVTIVMKLLTEIGPDLSRFATVKHFCSWLGLCPATKISGGKVLSSGTKRSANRARQALKMAAMTLVRSESALGAFYRRLCMRMDKPRANTATAHKLARMVYFMLTRGEAFVDRGQQQYEEQQRQRSVAALKRRAAALGFQINPLEVAA

SEQ ID NO: 129340 - protein, 345 aa, unidentified
MDTIGLDLHKRESQLCIIGSGREIAEKRILTTRERFTAVLGARARCRILLEASTESEWVARHLESLGHEVIVADPGFAPMYATRSKKVKTDKRDARTLAEACILGAYRVTHRVSAKQRHVRSELMVRDALVRTRTRYVALIKAAVRREGLRLPQGEAEHTAKKARAAGLREEVLGELAPILDLFSPLNREIQSADKRIEQLGRNDPVVRRLMTAPGVGPVTALAFVAALDAVTRFSTAHQVEAYLGLVPSEYSSGERQHRGRITKRGNARMRSLLVEAGWRILRSRKSECAALKAWAVQIAARRGKRIAVVALARRLSGILYAMWRDGNEFRAPNVRVEDRRVAA

SEQ ID NO: 129341 - protein, 442 aa, unidentified
MKVLYERVAGIDVHKDMIKVAIRSPGEKPWTRTTEIFEYRTFYGVLQQMAADLRKRGVTHVVMEASGVCTEPVYYALCEQDFEQVAVINPAHAKALKGHKTDAKDCARLAELFECGLLRGSYIPPAELKEVRDLTRYRMKTVQARTSEIQRLGKALESAGIKLGSVASSITGASATAMIEALIDGERRGGVLADLAKGRMRAAGKLAGLSMALSGRFTGHHALLCRLHQDRIAGFDAAVAGLDERIAGKVTRWQREADLLTSVPGFGDVVAQAWLGEIGPAPHLHFATCEKLASWVTLCPGNNISARKRKHGRTGDAGTYIKPMLVQAAWSAIRVRGRLQARYSRLVRRFGGDKNPAAKKKAITAIAHTLLKIAYQVLKSGTPYQDLGADFYTRRESPEHKHAWLERQLQRLHPGCTVTITISPPEAALTPSYVGVSLQFRV

SEQ ID NO: 129342 - protein, 345 aa, unidentified
MKVTTIGIDLAKNVFQVNGVDEHGRAVFNKPLKRNQMAVFFANLPACLIGMEACGSAHHWARKLQGMGHNVRLIAPQFVKPYVKTNKNDAADAAAICEAVTRPSMRFVPVKNVEQQSVLALHRVRQGFVKARTAQANQIRGLLAEFGLVIPQGIGHIRQRVPQLLEDASNELPGMFRQLMDRLLEHLKELDHQVQELEAQIVAWHRQSDLSRKLEQIPGIGPITACALLASLGDARHFKDGRQVAAWLGLVPRQHSSGGKQNLLGISKRGDTYVRTLLIHGGRAVIYHAHNKESDSAQCRWVNGVLLRRNKNVAAVALANKNARIVWALLAHDRSYEPGYTPQAA

SEQ ID NO: 129343 - protein, 324 aa, unidentified
MDAAPNRIETYVGIDVSKAKLDVAVGDDGPAFTVANTPEGHADLVARLTPLRPRRVLLEATGGLEAAAAATLAAAGLPVDVVNPRQARDFAKAMGRLAKTDAIDARALAQFAAAIRTEPRPLPDAATRELDALLDRRRQLIEIQTMETNRLKSAACKPIQDDLEAHLAWLGDRIKAVDLELDRRVRSSPAWREKDDLLRRIPGIGPVLSRTFLARLPELGRLSRGAIAALVGVAPMAAESGCRKGRRRIAGGRAEVRWVLYMAARSARSHNPLLRPFAERLEAAGKPDKVIQIAVARKLLILANAVIRDMTPWNPNHHESLSPA

SEQ ID NO: 129344 - protein, 346 aa, unidentified
MPKLYAALDVSLNKTAVCIMDHDGRIVREVEVVTCPDAVADVLGAHHDQLERVGLEAGPMSEWLIRGLLNHSIDAVLMETRQAHKALSAMTVKTDRNDARGLSHLLRMGWFRPVHVKALSAREQRARLAARQTLVRQVRDLENSIRGLLRGFGLRVPVRLGGRWSATVRSLVEDHPSLATTFEPLLRAREMLREQLAIIDRQVRNAARDDKVCRQLMTAPGVGAIVALTFRSTIDDPHRFRSSRSVGAFLGLTPKRYQSGETDRVGAISKVGDPAARVALFEAAHVLLTRVSKWSTLKAWGVRVAQRRGAKRAKVAVARKLAGILHRMWVTGSNFCYTSPTPARER

SEQ ID NO: 129345 - protein, 359 aa, unidentified
MTKTASPSLPTTYVGIDVSKDHLDACRKSGDQDPGDQNLGNQSPKEQRDARRFPNTPAGHRRLLGWLATSSSGKVQAVVESTGRCSLDLTLALYEADDTEVMVANPKALRGFAKAQMRRTKTDAVDAAVIADYARRMSFSPWEPPPEATRELRAIARRIQALTVERTREKNRLQSLTDSRSASSVVENDIEVNIRHLERRINELLRQAMACVNSSEPLTKAYGHLTSVRGIAEKSAVLLLGELAMLPSDMSVREWVAHAGLDPKKWESGTSVNAPERISKIGNARIRRALYMPAHSAIRYEPRVGAFYEKLLRRGKAKMVAVVAVMRKLLHAIYGMLKHGQDFDGEKFYATPETAPSTP

SEQ ID NO: 129346 - protein, 420 aa, unidentified
MNKITISKKGQYVNSDVLVIGVDIGKGFHMAVARRRDGSFTRALKFSSDAVGFNNLKVWLDQWYAQDRFSRVLIGLESTGHYWMTLAFWLQNQGIEVVQVNPLHTHKAKDLYDNTPGKTDKKDARIIADLVNQGKFLNCIIPRGRYADLRYLVLLRNRLIKQRTRELNNMHRVLDVLFPEFTKVFKNLKTQSSLYLLRYYYTPALLLSCSHKRLAKRLGKISRGQLRLDKLCLLYELARSSVGITEGINGLRIMLFRGLLRYGQLAQELSALEDRLEELVCGLPETVYLRSVKGIGLVTVAVILGETGGLQHYSSAEEVIKLAGFNLYEISSGKHHGKRRITRRGRSLLRAGLYRAAVGMVRRGGPLHDFYQRLRDRGKYGAVALVAVACKLMRLLFALVRDQRYYVADYTYSNVISRVA

SEQ ID NO: 129347 - protein, 343 aa, unidentified
MDQYIGLDVSLKDTAISIREDGKRIWRGKRASDPKLLAQVIRKHAPHAKRVVFETGPLSTWFYHALMAEGVPAICIEARHAQKILHETLNKTDANDADGLAQMAEAGFYKAVRVKAFDSMLTRTLVAARNQLLSISTQLSNQIRGMMKTFGLIVSNGKGRVFDGKVRELLAGNDALAAIILPLLDAWRDIRKRAADLDRQLLAVARQSQPTKLLMTIPGIGAVTAVSYVAAIEDPENFKTSRSVGAWLGLTTRRYQSGEVDYDGHISRRGDSHLRGLLYEAATVLLTRTRPGNESRLRSWGLKLRERLGFKRTAVAVARKLAVIMHSMLRTGEVFNASAGAAA

SEQ ID NO: 129348 - protein, 397 aa, unidentified
MIAVGIDVSKSKSTVAILNGDASIRAKPFDVHHVADELQALVDYIKRTSEPPTILMEPTSHYHYPLLKAFTEAELPVCLINPYQMKKYGDTELRKAKTDKRDSLRIAQYALEKSYSLIPYTPQDQKYEDLRFLSRQYSQRISTLTVAKVQLLSLLDETMPGITTILPLKSRDPDNCVLLRFIKRFKSFDVIRKMGKTRFLDSYQVLVKKTKDRFAGSKGLAIYELVLNSVTTRGENPLSAMTQDQCVDLVSTSQKAADEINLQMRIIAETMPEYKVLRSMAGVGDRLGPIILGEIGDIRRFHSGKALNAYAGNDAPPYQSGQFESRNRHISKRGNPALRKACFEVMQALKLTKPQDDPVYLFLLKKEQEGKPYNVAKMAAVNKFLRIYYARAMELYK

SEQ ID NO: 129349 - protein, 352 aa, unidentified
MNSIHYVGFDVHKKRTSYCIKLQDGTIVEEGEFLSRPAALDQWCHLRTMPWEGALEATLFSDWIYDRLEPHAVELSMADARKLDAIGKAKKKTDRHDARMLADLLRCNLIPACYVAPAYIRELRRMLRFRNLLVHQAVRMMNCTAGLLMQTGVSYNKEKLHGKRYFGELLDSLEDVPESVIELLRYSRAATELFINTQRRLLDKLRDHPRLCERVAVLRTIPGVGEVTALTWVLEVGEHERFPSARHAASYCGLTAAFRESAGKCQRGPISKQRNAHLQTVLIEAAKLAPRWNPVLAEVRERALQRGNRNQATLTVARKLVAYLLAVDRSGQRFQMPETATPETEAATTKTT

SEQ ID NO: 129350 - protein, 354 aa, unidentified
MSQKINTVIAVIGIDIGKNSFHIVGLDKRGAIALRQKWSRGQVETRLANMPPCLIGMEACVGAHHLSRRLKSLGHDARLMPAKYVRPYNKGQKNDFRDAEAIAEAVQRPTMKFVATKTADQLDLQALHRVRARLVGQRTGIINQIRAFLLERGIAVRQGLRFLRIELPGILATRTDLLSPRMLQVIEDLAGDWHRLDERVEDLSTEIAALADQDAACKRLMTVPGVGPIISSATVAAIGRGDVFSKGRDFGAWLGLVPKQISTGDRTILGKISKRGNRYLRTLFVQAAWVVLIRPKSWERYGLKAWIEAAKKRLHHNVLAIALANKLARIAWAVLNKERNFECVRRDAMAPHAA

SEQ ID NO: 129351 - protein, 346 aa, unidentified
MHYVGMDCHITTLDFAVVNEAGRLVKADSVATSVTGFMEFVKTVPPPRTIYMEEGTLAAWALETCVRFREKLVITDAKKNHWIGSSGQKDDSIDALKLAQLARGGYIKEIHHPVGQRRRFRELMIAYHDAVRSTTRIKNKIKAKFRQNGIQCTGITVYSETCREEWKGKLPQETTLLLIVDNLWRQLGQSERTEKELLAAARAQAKHYPEIKHFEAIPGIGFISAATISAILETPHRFADKKKVWMYAGLGIMTRSSGGKTYSEKLSTDYNRLLKYTLKQAAEAAIQAKDNPFRRKYLDMTLLHGIAPHRAKLTIARDMLATMWAMWRKGEKYNPEIREKAAYKQG

SEQ ID NO: 129352 - protein, 343 aa, unidentified
MDHYVGLDVSLKQTSICVVSGTGSVVREGVVDSDPDAIAAFVRSKAPGAIRIGLETGPTTTWLWTELKRLGLPVICIDARHAKAVLKMQVNKSDRNDAAGIARIMQTGWFKEVRVKDLDSHTVKALLASRALLVKIKRDLENQIRGLLKNFGLVIGRAKFNVFAVRAEELIEDRPELIAVVGPLLKARKAIEQQTGDLDRKVLTLARYDAQVRRFMTVPGVGPITALCFKATIDDPTRFKRSRSVGAYVGLTTRRHASGEIDWTGRISKCGDAMLRSYLFEAAGVLLTRVPKWSALKAWGMRLVKRNGLRKAKVAVARKLAVILHRMWIDGTEFNWSKKEVAA

SEQ ID NO: 129353 - protein, 352 aa, unidentified
MERTAICVVDDKGEVQMQTEVVTDPDAIMTALRPFAPRLRRVGHEAGSLSPWLQPELVKRGLAAVCLETRHVRAAMSAQRNKTDATDALALAHIVRTGWFRQAHIKTESCYRLRLLLTQRRNLKRKVLDLENTIRHSLKAFGIRIKGTGRSGFDAAVREAVAGDALTSELMDAMLAARAVLWKQYCRLHDLVVKFVARHEVCRRFMAIPGVGPVTALSFVTAIDDPQRFRRSRDVAAYFGLTSRRWQSGTSIDVQGRISKAGDGDVRRALYEAASALMTRFKGRDKVRTWGLALAKRGCHRKATVAVARKLAVIMHAMWTDGTCYVGDGAASATDRAARAARKDGKLLGAHA

SEQ ID NO: 129354 - protein, 352 aa, unidentified
MVSAELEGAAVKVIGIDSHKATLAGCAVDELGTPVDERTLGNDRAGHVALADWARSLGVDRIGIEGSGRYGAAAARRLAAAGFDVRDVPPHLSYRERLRTRRPGKSDPTDALAIARVAAREQTLPPVRLADRSEDLGLLVTARDELVAEATQLRNRIHADLVVLLPGYGERVPNLVARRHRRGVALELATLSGVRAELTRSRLSRLEETDAATKLLERRLAALLVGHPLLALPGVRVLLAARILAETGDVRRFRSADAFAMFSGTAPIPASSGQTERMRLNRGGDRQLNRALHAMALIQGRYHDRAKAYLARKRAEGKTQREAIRCLARKLARVVFEVLRRSTLATADAFAA

SEQ ID NO: 129355 - protein, 344 aa, unidentified
MPPEPQTYSLYVGIDIAAANASVALMAFDQSISEVFTIEQTEPGITGLVAKLEAIGHPVNQVRVVMEATGTYWMRLASQLYQAGFAVSVVNPAQAYHYAQAWQQRAKTDELDAQMLAYLAYQMQPDLWVPDPVVYEELEQRLVERESLLRIRQQLRNQLHALRHRPTIVAEVEARKQALLASIQEQIDIIEREIKALMRQEHAWSTSAQLLQDIQGIGVITAAWLLVATHNFTSCESPEQLAAYAGLVPYKRESGTSVRRRGHIGHAGHARLRHALYMATLSATRHNPAIKTFYDRLRAKGKPMKVARCAAARKLIHIAWAVVTKQMPYDPHYQSNRQIHLQMA

SEQ ID NO: 129356 - protein, 344 aa, unidentified
MDHFAGLDVSVKETSVCIVDDTGRIVREVKVASEPEALLKVLGSPAYRFKRIGLEAGPLSQWLFSALAEAELPVVCVETRHMQAVLKAQINKTDRNDARGIAQMIRAGLYRPVHVKTLRSQKLRMLLTHRKLLQSKAIAIENDLRGTLRNFGLKVGMVGTVKFEARIQELVENIPDLAVLVEPLLIVRRALREQIIILHRRLLAIVREDEVCRRLMTTPGVGPVVALTYRATVDVPTRFRKSKSVGAVFGLTSARYQSGEIDWSGRISRCGDEMMRVMLYEAAQSMMRSKKWSWLKAWAMQIARRRGMKKAIVALARRLAVIMHRIWVDGTEFRWIREQATAAA

SEQ ID NO: 129357 - protein, 421 aa, unidentified
MDKINSTRLEKFRQIKEEIRGSKEYLIVGIDVAKENHHAFFGTARGKTLFRRLVFENNREGFEKLLFQAEALKAQQRLKTVVFGLEPTANYHKPLGEYLIKNEHQVVLVSGNAVKNNRELLDGRWDKHDIKDSANVADLISQGKCLFYDYPEEGLRELRNLISLKRRLKKYEHGTKARIRNHLIAQYFPEFDRYWGYGEGLRIVRWYLNPSKIAVMGCEQFIRLAASANGGIAQRRRLRSIWEKAHASIGCGSSEALAFESQVMVEQLQQTQKVIRSIDEKIKQRCLEFSEYRHLLTIPGFGPDVSAKVLAAIGNPFRFENTTQVLKLAGLDLSAQRSGKGSDRANPVLSKKGKAEDLRYALYQAALIASTRDFTNKLKGREREKGIKTKMRVKLSAKLLIIAWTIMKKKEPFNPEFLTID

SEQ ID NO: 129358 - protein, 411 aa, unidentified
MRNRQNYLYIGVDLHKQHHTAVVINCWQEKLGEIKFNNKPSAFAKFLLEVDAYNTEGLTLAFGLEDVGGYGRALAKYLVDHGQIVKEVNPALSYAERKSQMTTHKSDSWDAECVARILVSKLDQLPDARPTDLLWTIQQLVTRRSALVKVQGGLKNQLHVQLNHHYPSYKKFYSQIDGKTALAFWKKYPSPSCLEGVSVEELTDFLRETSSNTCSTDKASTILSLVEEDGDTTKEHQEARNLLVRNIVQDIVCNKGLVKETESELKQLMKLLGYQLETMPGIDLVTASALVAEIGDVRRFSNANKLARFAGIAPVYFGSGGKGKIHKSKQGNRVLHGLFYNLAVQQVQVARESKKKRNSLFHAYYQSKLKEGKTKGQALVCIMRRLVNIIYGMMKNKTEYKAPKVEESTVV

SEQ ID NO: 129359 - protein, 363 aa, unidentified
MSKYTWIGLDVHLDSITAAILHGDAEIPEVVKLSGDLMKVRRLFRRLSKKGPVKSCYEASGAGFVLHRVLVNDGFHCDVIAPSLIPRKPGDRRKTDRLDAVMLARLYRSGHLTPVHVPSEDQEALRRLLRLRTTYQIYCKATKHRISGMLRNHGFVFTEGVSTWTKKHRQWLTKLRLDLEGPFQTALATELEHLEYLETQREALDAELERFARSHPYRAKVEALCCLRGVKTLTALTLLCEVADVRRFRSPTSLMAYFGLVPSERSSGDRERRGPITKAGNVHARRLLIEAAWNNRHRSGADLILKRRRQGQPPAVVAIAMKAQHRLYKKFWRLDHKKHRHVAITAVAREMCGFIWAILNALP

SEQ ID NO: 129360 - protein, 346 aa, unidentified
MKNITTIGVDLAKEVIQVCVVVRGKVISNTEMTPQEFRCFLAKMKACIIVFEACATSNYWKQVSVSQGHDARLISAKLVSQIRQNQKTDKNDALAIVQASQLTGVRFIQGKQFSQQELQSISRMRGLAIKQKIATSNQIGALLLEFNIRVSNRHGGINGVVKATLEDAENDFSPEFREALYETWQGYLALVTRIAKYDEHLNVSVENTPACKKLMALEGVSAINAVNLYISLACAEDRVFSSSKDASASLGLTPIQYSSGGQVKLGGIGRRVKNALVRSNLISGAMAVVRQVSQREPRTAKEKWLKALIERRGNKCAAVALANKTVRTAFAMLRDGTEYHAQALTD

SEQ ID NO: 129361 - protein, 407 aa, unidentified
MIFAGVDWAEAHHDVHVQDESGKRLGGGRLPEGVEGIARFHELAARHAQEPGDVVIGIETDRGLFVTALVAAGYQVFAVNPMSVSRYRDRHSVSGAKSDPGDAKVLADLVRTDRHNHRPVAGDSDLAEAVKVLARAHQSMIWSRRRQANMLRSALREFYPAALAAFDDLTSGDAIEVLRAAPAPALGAALSRPKIAAALCRGGRQRRIDARATDIQATLRSPQLAGSPVVAAAMGASVSASVAVIAEMTTQITVLERRLAADFEQHPDAEVVRSLPGLGTVLGARVLGEFGDDPGRYATAKCRKNYGGTSPITRASGTRRVVLARHVRNKRLADAIYLWAFASITASPGARAYYDTRRAAGNTHDAALRALGNRLVGILHGCLTKHTVYSETTAWAHRTDTKLTQAA

SEQ ID NO: 129362 - protein, 406 aa, unidentified
MKHVVAFDVSMGKSTMVIYNQYRQCDFEGEILHNRASFEQLHETLQTLIAQDGQPPEIIFEATGVYSKALERFFQDHDYAYYRINPLEANLQMASMRRQKTDKNDAHELAKSHFRVERRQTYQEEDYYQQMRGLTRYYDELDSEITHLQNRMHAILQLSFPELERLFSTRSALFLNIVQLFPHPDEVLAHSKTVIRNRLKANTRKNLSLKRAEEKGMALLQAAQNAYPAISKDDVRCEQVRDYARRIADLKEKKEQLVKRMVELSEERGEYQVLLSFPGIGETTAVRIIGELGDISRFKNHKQLNAYVGIDVMRYQSGNTFYRDKINKRGNNKLRKILFYMIQTMITLRKKTNNHLVEYYDKLKTQPQRKPHKVASVACINKFLKVAFHLITHGITYDYETASTCS

SEQ ID NO: 129363 - protein, 315 aa, unidentified
MAMPVLVSKPIVGVDVAKNELVIYQAELDLLEAIPNTKAAIKQWLKALPETVAIAIEATNIYHLEFADLAYEAGCTIYMVGGYELSHYRKGVKVRAKTDALDAKLLARYLKNEAEELHPWTPPSPLYRQLLSLFRRRAALVQARVGLVQSWANEPLLKTAFAEQVKSMQQLETLVEKTIKDHLKEAGLLGQLKRCLKVEGIGFLTGARLIAAFQRGDFRNANAFIAFLGMDLRVAKSGQKDCRRSLSKRGDPEARRLLHNAAMSASRTAAWKGFYEAQRARGFSTTQALVMLARKLARVVFALLNGQSEYQPKTS

SEQ ID NO: 129364 - protein, 339 aa, unidentified
MFYVGLDVSVARTSVCIMDALGQIVREQSVASTPEAIAGAIRAAGTKVERVGLEAGINSAWIARGLLDAKLPVIVIDATHAAAALKTGFRNKTDKNDARGIADLMRVNKFRAVWVKSPGAQRDRAMLTVREQLRRQSLDTRNTIWSILQIEGLKPPKLANPAFDALVARSLEDEVLAPLLRPLVAVVEHVDRQVAELDKLIAARAKASAVCKLLMKVPGVGPLVAMTYTAGVDDPARFGNSRSVGAHFGLTPRRFQSGEMDWSGGISRAGDASVRRALYQAANVLIHHSGGWCALKSWAVRLAKRRGLGKAKVALARKLAVVLHRIWLTGKDYRLTAAV

SEQ ID NO: 129365 - protein, 373 aa, unidentified
MNNNTTVYIGMDVHKESFTLCCFALGEKEPGHVQTVPSEHILVVKYVNRLRKLYGEETEFICGYEAGCLGYTLYHQLKGCGLECVILAPTTMMEQKGKKRVKTDKRDAKNIAKCLAYHTYSPVHIPTEEDEQVKEYIRMRDDIKANLKRTKQQILSFCLRHGLVYTQTKTTWTQAHLKWLHDQKLDSLYQEILDEYILQLTKLMETVERLDKRIEALSNRETYRESVDHLTCFIGIKRPTALATVVEVGDFKRFASACQFSSYLGLTPGEDSSGDDQKRLGITKAGNTHVRKLLVEAAQSYGRGKAGYKSKALKERQEGNPPQVIAYADRGNERLRRKYYNMLFRGKKVNVAKTALARELACFIWGMMNEKLA

SEQ ID NO: 129366 - protein, 344 aa, unidentified
MEKFSRIGVDTSKEFFQLHGVDEREQVVLRRKLRRKQVLRFFAGVEPTLVGLEASGGAHYWARELTRLGHDVRLMAPQYIKPYVKRGKNDAADAEAICEAMSRPTMRFVAIKSAENQAALMLAGMRERLARNRVQLANTIRGYAAEFGVVAAKGRANIRSLLLQLQADTTIPAMARELFAEHAKQYAALTVQLATINAKLLAFHRANEMSRRLARIPSIGPVIAAHLVMKVPDPQAFRSGRHFAAWLGLTPKDHSTAGKTRLGVITRAGDETLRSLLVVGATAVVWQARRGKSRSASPWLLALLKRKPPKHAAVALANKIARIAWKLMATGEAYDTRRFLAATT

SEQ ID NO: 129367 - protein, 352 aa, unidentified
MTRATTIGVDLAKNVMQVHGVDAGGKVVVAQPLRRKQVLAFFAKQPSCLVGMEACGSAQHWARELTKLGHRVRLMPPKYVKAYVKRGKTDAGDAAAICEAVSRPSMTFVAVKSVEQQGLSMLHSVRQTLIGQRTQAINALRGHLSELGIVAAQGMLGLAELVAIVRDESDARLPATARAALLILSGRIAHASAEIAKLDAVLEAEHKTSATGKALDTIPSIGPVTASALRARVSDATQFKGGRHMAAWIGLVPEQDSSGGKVKQKGISKKGDRYLRQLLVNGAMAVIRQARRRPDKYPWVAGLLVRMPVKAVAIALANKTARIAWAIMVRGGRYQAGYRPARYQPAALAAPQ

SEQ ID NO: 129368 - protein, 334 aa, unidentified
MENLAVFVGIDYHKDSVQVCVMDDTGRVLGNRSCGNDPQAVADYANRYGCVRGAVLESCEGSADFADHLLARTGWSVDLAHPGYVRRLGQSPDKTDYSDARLLADLERVGYVPRVWLAPQWIRELRRLVRYRRQLVNERRNTKLRIRALLREHRRPCSAPCWGKAWFDWMGQVDLPEDSRWILDRHLDRLQQLNGDVRVVEQRLDDVTKDDAVVQSLLTRPGVGPVTAWVLRAEVGRFDRFRSGKQLARFCGLSPCNASTGLRQADSGLIRACNKNLRSVLIEAGHRLKRYDARWSALAKKLREAGKPGSVIAAAVANRWMRWLYHEMKTIQAA

SEQ ID NO: 129369 - protein, 402 aa, unidentified
MNAVGIDVSKGKSMVAIMRPFGEIVSAPFEIKHTASDIHSLVELINSVEGESRIVMEHTGRYYEVLAHQLLEANLFVSAINPKLIKDFDNDSLRKVKSDKADAVKIARYALDKWQNLKQYNVMDELRNQLKTMNRQFGFYMKHKTAMKNNLIGILDQTYPGVNTYFDSPARSDGSQKWVDFASTYWHVDCVRKMSLNAFIDHYQNWCKRKKYNFSQSKAEEIYGKAKELVPVLPKDAITKLIIKQAVDQLNSASTTVESLRTLMNETASKLPEYPVVMAMKGVGTSLGPQLMAEIGDVSRFTHKSAITAFAGVDPGVNESGTYEQKSVPTSKRGSADLRKTLFQVMDVLIKTHPQDDPVYQFLDKKRAQGKPYYVYMTAGANKFLRIYYGRVKEYLSSLPES

SEQ ID NO: 129370 - protein, 356 aa, unidentified
MSRDVKYIGMDVHKEAIVIAVRNTSGKLVMESIIETKASSVLQFISGLRGELRVTWEEGTWAAWLYDLLKPQVHEILVCNPRRNALLKEGSKNDRVDACKLSELLHAGMLRPVYHGENGLRTLRELGRSYQTISKDLNRVMNRIKALYRGWGIACAGTQVYAPRYREEWLQKIEHAGVRRRAELLYEQLDGLQALRRKVRPELLAESRKHKAAKLLRQIPCIGPIRAARLIALIQTPHRFRSKRQLWTYSGLGIETHDSAQYRYVRGELQRSKKPQQLRGLNHNHNHEMKEIFKGAATRASCGMGPFRDFYASLLDKGMKPGMARLTLARKIAAITLTLWKKEERFDAQQLKTQAA

SEQ ID NO: 129371 - protein, 344 aa, unidentified
MEKLSRIGIDTSKQIFQLHGVDDFERVVLRRKLRRKEILGFFGALAPTLVGLEASGGAHYWARELTRLGHTVRLIAPQYVKPYVKRNKNDAADAEAICEALSRPTMRFVAVKSAESQAVLMLAGMRERLVRSRTQLANAIRGYAAEFGLVAAKGRAKIEALLERLQTDETIPALARELFAAHADEYARLKARLEAVDAKLMAWHRSNEPSRRLARIPGVGPVIASLLAMKTPNPHTFRSGRQYAAWIGLTPKDHSTAGKTRHGVITRAGDETLRSLLVVGATAVIWQTRRGKSRHASPWLLALLKRKPPKLAAVALANKIARIAWKLMTTGEAYDPRRASAAMA

SEQ ID NO: 129372 - protein, 364 aa, unidentified
MKKVTTTATNRLEKLQGLTIGLDLGDRWSHYCVLDESGQVLTENKTATSPKAMEAVFGAMSRSRIALETATHSPWVSRVLSKLGHEVIVAHARNVRLIGESRRKDDRLDAQTLARLARIDPQLLCPVKHRSARAQVNLSVIRARAGLVRARTALVNTARGLAKSYGERLRGCTVRHMNPRKTEALSPQLQTALQPLLTAIEMLSQQIREYNERIEELAEKNYPQVQLLKQVKGVGTLIALTFLLTLEDPHRFRKSRDVGCYLGLQPGRRNSGQSEPQMHISKEGDPYLRTLLVQGAQHILGPFGPDSDLRRWGLKLAERGGRNAKKRAIIATARKLAVVLHHLWISGEVYEPLHNQQRTISAAA

SEQ ID NO: 129373 - protein, 339 aa, unidentified
MELYSGLDLHSRNTYIGILETDFKRVFKKRIPNKLDQILETLEPFREQLKGLVVESTYNWYWLVDGLMDAGYGCVHLANPSAIRQYEGLKHSDDKHDAFFLAQLLILGILPQGYIYPKEDRPVRDLARKRMFLVKHKTAHILSLQSLIARCCNQRVSPNQIRTFISADLRQLLKEEHLVLSAQANLDSIAFIKQQIHRLEKVIRSKLKLSQSYNGLLTVPGIGQILAMTIMLEVGNIGRFAKVGNFTSYCRCAPTQRLSDGKSKGSGNRKNGNRYLSWAFSEAAHLARRYNDRFRRYYNRKAAQTNTIVATRALSNKLARVCYYILRDQVVFTEELILH

SEQ ID NO: 129374 - protein, 372 aa, unidentified
MGHHSEAFIGIDTSKSRNAVAIADGGRGGEVRFLGEFPATEATIRKLVSKLAAIYAKLTFCYEAGPTGYGLYRLIKSLGHECIVVAPSLIPKKPGERVKTNRRDALSLAKLLRAGELTAVWVPDERHEAMRDLSRASQAAKKDLQGKRQQISSMMLRLGRIYPGKTTWGPTHMNWLMAQKLEHVEQRIAFEELMEGMRQESERIERLQQTIREAVPEWSLAELVTAVQAMRGIDLIAAVGVVAETGDLSRFQNPRELMGYLGLVPSESSTGDKVKRGGITKAGNARARCILVEAAWAYRHPARVGREKQAKVAAAPRRVREIAWKAQTRLCRRFRALERKGKRKTVVATAIARELAAFVWPINREVMAARKA

SEQ ID NO: 129375 - protein, 420 aa, unidentified
MNDYRIAGIDVHKKMLAVVVAELTAAGELAFQRQQFDNTEAGIRQMRDWFVECQVQEAVMESTAQYWRTVWLELEEKFRLHLAQAMSNRAPRGRKRDYADAERLVRRLIAGELVLSYVPDREQRLWRMLAREKHLARRARVQQVNALEAFLEQTRIKLSSVVSDLTGVSAWRILDELAKGAQDPAKLAKLADPRVACTREQIQAALAAAPHLRAEERAVLRQFLDRIELFGKQIADNDRLLAACLARYQDAVTRLAEVAGLGADSAQQMIAEIGPKAEAFDSPAQLASWIGVCPGREESAGVSKSDRSPKGNRPMRRLLAQCANAAIKAKDSVFELYYRRKVAHLGHFQAVWAVAHKLCRVIWKVLHDGVRYEERGSRLNSKQAAKQLQRLKRTLRLLGYDPNSLHKLQPNNITPGPSMA

SEQ ID NO: 129376 - protein, 367 aa, unidentified
MVSSSLMRHQSAIIEIKIFQLTEKETTMNINTIGLDIAKTIFHLVGLDKNRKQVYKKKLRRGQVLPYFTNLPPCTIAIEGCGSAFYWQRELTKLGHRVKLLPAQYVKAHLRGNKNDYNDALAIAEASRVPELREVTPKTIEQQSIQALHRLRERTVNDRTSLSNQIRGLLAEFGIIFNQGISAVRKGLPAVLEDAENGLPHTFRDALGLKYLQFRQFDDLVKEFNKLINQASEAHKEIALLQSIPGFGDLVSSSYYSVIGDGKAFAKSRDASASVGVVPRQHSTGGKTILQGISKRGDKYLRKMLINGARSVVNHAHKKDDALSVWVTRLVEKRGRNKATVALANKLARIAWAVTVSGKPYQTNYAL

SEQ ID NO: 129377 - protein, 538 aa, unidentified
MSFEVKIINGDVPCTKGRFFIGAFICPNRSMVSDVGDTHIGGMRSITPFRRMSFSRTPDARHVTLLTYPKEEANMSDDKLDDKHKSRKRMEQTKELGVINPNSAGIDIGSQEHYVAVPEGRDKKAVRSFASFTPDLYKLADWLKKCEIETVAMESTGVYWIPLYEILSSKGFDVKLVNARHVKNVSGRKTDVLDCQWLQQLHSYGLLSGAFRPDDQICQLRAYNRHREMLIQQSAKHVLHMQKALQQMNLQLHNVLSNITGKTGMQIIRAIISGEHDPKKLAKYRDGRCKNSQEVIEKSLEGNYRTEHLFALKQALELNDFYHEKIQDCDKEIEELLSKFDDQVDLDETDVPKAKVENKQEKSNTPKFDLHKHLFRITGINLTALPGINSHTAFKIISEIGLDMECWPTENHFASWLGLCPGNKISGGKRLPGPSTPTANRAAAVFRMAASTLYRSKSALGAFHRRMKSRLGPAKAVTATAHKLAKLFYLMLKYGEAYVERGQDYYEKKHKDRVVKNLQRRAQQMGFKLVAVPNSGSA

SEQ ID NO: 129378 - protein, 337 aa, unidentified
MNITTIGIDLAKTSFSLVGTNKHGKIVLRKTLSRKKLMSFIAQCPPCMIGFEACSSAHYWAREFEKLGHKPRIIAVKFIEPYRKGSKNDNNDAEAICEAVRRPNIWYVPVKTADQQALLCVHRVRQGVAGERTRWINRSRGLLSEFGIVIPKGRYALQAVLPAILTDMDNGLPELARQMIHDLWLSIQQANEQILGYDRALSRLAREDDTAKRILTIPGVGELTATGVVASVPDPRLFKNSRQFAAWLGLVPRQYTTGGHVRLGRITKRGDKYLRMCLVHGARAVIAKLGDKQDHVSCWVRGVIERRGYLRAVVALAARNARLIWTLMVKREDYRAI

SEQ ID NO: 129379 - protein, 352 aa, unidentified
MNTITRNSNSQHNIFVGIDTHKDTHCAVTVTETGKFMSSLEIETNSKGYRNLINWARKQGTISCFGIEGTGCYGKNLASYLTNYDYQVVEINRVNRQHRRRYGKTDETDAHAAAKAVASGEQTNSHKQTYGRVEIIRVLQIARSSAVKARTQTACQIKAILITAPEPIKNEVNGLTTLKLTTKAVKWRPKHYLTNEISATRHTLKILATRWLTLNKEIKQHDQDLATTLKETVPEMMELQGIGNDVAAKLVIAAGSNPQRMKSEASFAALCGVSPVNASSGKQQRHRLNQGGNRKANNALYTIAITRMKHDPETKKYVNKKTAEGKTKKETIRQLKRHISRQIYKQLTKQLT

SEQ ID NO: 129380 - protein, 460 aa, unidentified
MGDTKKTRNAEGSALPVVHRHAAGIDIGSTFHMVAVRADVDPEPVRRFESFTGDLHRMADWLMQAGVTTVAMESTGVYWIPTFEILEARGFEVLLVNARDVKHVPGRKTDVNDAQWIQRLHEHGLLRGSFRPTQQVATLRAFVRHRERLVESAASTVQHMQKALLQMNVQLHHVVSDMTGVTGMHILRAIVAGERDPAVLARLRDVRCQATGETIQAALTGNYRPEHVFALQQSLELYDVYQEKIRGCDAKIEEALRLLDDPRSVRPDRRPEARPARSKRPQKNEPRFDIRSALQTLLGVDLTQIHGIGPYAALKLVSECGTDMRRWPTAKNFTSWLTLAPGNKITGGKVLSSKTRRSSNRAAHLLRLAAVSVGRTSTALGAFYRRLARRIGKAKAVTATARKLAILFYNTLRHGAAYVDPGATYYEERYRQRTLTNLRRRAHSLGYQLVAATPDGAGVS

SEQ ID NO: 129381 - protein, 438 aa, unidentified
MSNKVIFNLDELFISVGIDVGADFSWMSIALPNQQFVGKPYKILHNSIDSLTTAVSKIKEAEELYSLESRIFLESTGIYHYPLFCYLRDKGFNCSVINPIITKNSTNINIRKVHNDRFDSKKAALVGLKPDLKVSLMPSDLALNCRNLCREYYDLMDNRNAYVNKLQGELRMAFPQYLGIFSKVTINTSLTLLETYTSPSAFLEADKQEIIDIIKSTARFGLTYAQNKYNAIIQAATDANQFGYIIESNIKRIRLYISFIRKYDEEINDILESLHKLVDSNEDTKFVKQVHLIETFKGAGFLSAATIMGEIGDFSAFSKPKQLFAYFGLDPAVKQSGKFEGTKVQMSKRGSSIARRVIHTLSLQSISISRNGKAKNPVLREYYLQKCDSKPKLVAMGAVSHKVCNMIFAILRDNKPFEIITPQEHIKQYNAAKCDIAA

SEQ ID NO: 129382 - protein, 346 aa, unidentified
MSYSTTVGVDLAKNVIQISVVSSRGKELCNRSLTRKKFAEFLGKQKRSLVAFESCATSHYWARAAERHGHEARIIPAKAVAPFRQGHKTDSNDALAVAEAARRPNIKEAPMKTVEQQGLQAIHRSRELLIQESTALSNHVRSLLMEFGIVIKRGFASLLRAVPEILEDGENELPDLYRPTLHRMYTRLLELRKDIEAMTGEVERLAKAHPICSKLMALEGIGPVGALLLYATMGSGTAFSSGREFAAYLGLAPKQYSSGGKTTIVGLSKKIGNSRLRSVLILGARAYVYKLKEPKSSKDRWLKALIERNGESRAAIALANKNVRTAWAMVTQGTEYQRREQLPMAA

SEQ ID NO: 129383 - protein, 391 aa, unidentified
MIFVGIDVAKDKHDCFILNSEGTVLADVFTIANNRIGFETLLSRIQSCSQGESKIKVGLEATGHYSYNLLGFLLDSGLTTYVINPLHTNLYRKSLSLRRTKTDRIDARTIAMMLMSDVDLKSYSNTAYHNGELKSLTRYRFDKVKERAKLKSSVARLVNILFPELEKLVSSLHIAVVYALLSNYPGASYIANANTEELAETLCTASKGRYTKSKTAKIQVAAGVSIGSKMPAKSMELKHTIALIRELDKEISEVESAIDKITSQMDSPIFTIPGIGRHMGAMILAEVGDFSNFASADKLLAYAGLSPSTYQSGQLQNCYAHMEKRGSRYLRYALFNAAKYVCLWCPTFSAYLEKKRSEGKHYNVAISHAAKKLVRLIFAMQRSGKAFLADY

SEQ ID NO: 129384 - protein, 366 aa, unidentified
MDTIYIGVDFHARQQTICYLKTETGELVFHELKHQDKQQVRAFYAQFVGQVIVGLEASGYSPWFERMLEELGCQVWLGHATEIRRRARWRQKNDRRDAELILDLMLHNEFPRLHRPAVQSREVLRMLRYRQKLIKMRTMSKNSLQAIALQAGLAKGSRLFTKAGQQELGTAEMSPVLHWQREHWLQLMEPLNQQLLETMVWFKSQSKDDDSITRLRTHPGIGLLTSLCIVHTLQPVSRFRNTRKVAAYAGFDPIERSSAERKCFLGISKAGSRLLRYLLVEAAQTAVRKDEDLKRFYQRLAARRGRPKAKVAAARKLLIRAYIMMRDEIDYAEFRHRAVAARLARRSQGPANVPEVLIGQPASPEQ

SEQ ID NO: 129385 - protein, 397 aa, unidentified
MIAVGIDISKAKSTVAVIDSDGTVLASPFTMAHTQPEMEAFVTYLKGLGEPTTILMEYTGHYHYPVLKKLQDEGFPVCIVNPYQMKKYGDVEIHKAKTDKKDALRIAAYALEKSYKLVPYSSMEQKYEDLKFLSRQYSQRITYVAKLKVQLIALLDQTMPGITRILPLNSRNPEKCALLLFIKRFKSFDEIQRIGKARFLASYDVLAKKASERSASSKGLSIYELAVDSITTRGEDPYIWLSQNQCVDLLSATQNAADEIISQMRNIAETIPEYKVLRAMRGVGDRLGPIILAEIGDIRRFHSGKALNSYAGNDAPPYQSGQFESRNRHISKRGSSALRKACYEVMQALKLTKPQDDPVYLFMLKKEQEGKPFNVAKMAGVNKFLRIYYARAMELYK

SEQ ID NO: 129386 - protein, 479 aa, unidentified
MAVRSKHATTGADGKDAATVAEHGGDGAEVVEERVQVVERAAAIDVAKGSGMVCTRVPGSRPDRRRQKVWQVTATYGEVTALMDQLRCEGIQRLVLESTSDYWRIWYYLAEAAGLEVWLVNARDVKHLPGRGKSDRLDCVWHCKLNERGMLRRSFVPPQAIRDLRALTRTRARLAQDQARHQNRVEKILEDALLKISVVISDLFGASGRRFLDALVAGERSPKALAALGDTRLKASRKELEDALTGRFRDIHAFEITTHLRLIDAINDEIARLDEAIGQQLAKVPGTAPACTACGLAGGGHAPGCGAGGTVLLPLAQRLDEITGVGERNAAVIIAELGTDPSIFPTPGHAAAWARLTPRTMQSGETTRPGRTGKGNRYIRGGLGQAAMATARTDTRLGALYRRIARKRGKQKAIVAVSRVICEIAWILICDPAARFEELGPDYYSPRSPARRTRDKIREIERLNPGKKVILADASPDAA

SEQ ID NO: 129387 - protein, 356 aa, unidentified
MSRDIKYIGMDVHKEATVIAVLNGSGKLVMESIVETQASSILQFIHGLRGELHVTWEEGTWASWLYDLLQPQAAQVLVCDPRRNAFLKEGNKSDKIDARKLADLLRTGMLRPVYHGEHGLRTLRELGRSYQTISQDLNRVMNRIKALYRGWSIPCAGTQVYAPRYREEWLQKIEHAGVRRRAELLYQQLDGLQALRRTLRPELLAESRKHKASKLLRQIPCIGPIRAARLLALMQTPHRFRSKRQLWTYCGLGIETRDSAQYRFVRGQLQRAKKPQQIRGLNRNHNHEMKEIFKGAATRASCGVGPLRDFYVALLAKGMRPEMARLTLARKIAAIALTLWKKEERFDAEQLKLQAA

SEQ ID NO: 129388 - protein, 324 aa, unidentified
MLPTLGIDISKDSFHLELSINEKLRHRKFANRKEGFGELRAWLAKHKATQVHACLEATGPYSEALALYLHQQGHTVSVVNPVRIKAFGQSELRRNKDDRPDAGLIRRFCEKQRPAPWTPPPVHLRELQALTRHLENLIETRQQQINRLDATNTKNVAKSLRKLVAHLDAEIKRTEQQIDDQVDRHPDLKQQSKLLESIPGVGKRTAAKLLAEITDISQYKSARQVAAYAGLTPRNNRSGTIRGKTRLSKTGNARVRKALFFPAIVAKRHNPIVRTFCQRLARNGKNKMQVIGAAMRKLIHIVFGVLKSGKYFDPSHELLLNSVS

SEQ ID NO: 129389 - protein, 399 aa, unidentified
MNAVGIDVSKGKSMVAIMRPFGEIVSSPFEIKHTTSDINSLVELINSIEGESRIVMEHTGRYYEVLAHQLSEANLFVSAINPKLIKDFDNNSLRKVKSDKADAVKIARYALDKWQNLKQYSVMDELRNQLKTMNRQFGFYMKHKTAMKNNFIGILDQTYPGVNTYFDSPARSDGDQKWVDFASTYWHVDCVRKMSQNAFIDHYQNWCKRKKYNFSQSKAEEIYGKAKELVPVLPKDEITKLIIKQAVDQLNSASATVESLRTLMNETASKLPEYPIVMAMKGVGASLGPQLMAEIGDVSRFTHKGAITAFAGVDPGVNESGKYEQKSVPTSKRGSSDLRKTLFQIMDVLIKTHPKDDPVYQFLDKKRAQGKPYYVYMTAGANKFLRIYYGRVKEYLSSL

SEQ ID NO: 129390 - protein, 350 aa, unidentified
MTIVGGLDVHRQQITFDYVDDDGLVHWGQIRPATRSTLRGWLAEQCPHGDGDFALEGCTGWRYVVEELAAAGVGVHLGDPAETAAARGPKKRAKTDRADARLLRTLLVEGRFPESWIPPAHVVEIRTLGRLYCTLMDERRAWQQRIHAQLFHQGCAPIRALLTQAGREALAQAELSPAGRQYVDTALRRIDELSAEIGPLRTQLVNFARRQAGCRALQAHYGIGWLCAVIIWAEIGDARRFASSDQLVRFAGLDVTVYSSDAKRSPGHLSRQGSPELRWAAFEAAKSAARRGSPDYAYYHKLAAKRDGHNGKNPTLAVERKILRRCYHMLRALGDAALALPVPEREEAAA

SEQ ID NO: 129391 - protein, 356 aa, unidentified
MQSKFTKTLDFTGHNVYVGLDVHKASWAVNIMVDGMEHRGFTQPPSPVVLHNYLAENFPGATYHSAYECGFCGYHHHRKLLELGIDNIVINPADLPVTDKEKNNKRDPLDSRRISHALQKNELIGIHVFDSVHEQFRTLSRMRNKAAGENRRVKNRIRSFLFYYGINPPPELNPENWSNAFVEWLGELKLPTEAGTFSLQYLLLSYQNTRAQMLQVAKQLRYQVKIFYPDVYKRLLTVPGIGPTNAICLIAEIGDMSRFKSYRQLASFVGLVPRAHQSGETDHPGSLTYRNNKYLLSSLVESAWMALRYDPALMMYYKERIINHKSQVVITKVAHKLLNRIRNVWLSDTTYQLRVI

SEQ ID NO: 129392 - protein, 395 aa, unidentified
MQVMHPVCCGIDVHQKSIVCCILDGPLTSNEPKKYQTSFGTTTKELKAALDWLLEHQVTHVFFESTGQYWIPLFNIFSDSDLELVLANPQHIKNVPGRKTDVKDAEWIAQLGRCGLINQSYIPSQEVLQLRYLTRYRISVKQRLTQIKNHIHVILQRGNIKITSYLADIFCKTGQALLTLFINGEVINEDNVESCIHGRIKASTRQLIEAMEGKLSTVDRFLIKECMEEYKLQKKISDELNKEINEYILEHFPEEYQLLLTIPGISDNCCATILAEIGPNVDAFKTDKKLASWAGMCPGSNESAGVKRSSHTTQGNKYLKQALVMSVLSVQRAKEETFSLFYQRISSRGSKMKAIIACGHKMLRIIYKILQSHQPYNSQKALGLRQQTNALSLTI

SEQ ID NO: 129393 - protein, 350 aa, unidentified
MRIIGCDYHPGFQQIAFVDTDTGECGERRLQHREEAEKFYRDLAAQGMKVRVGMEASGHARWFERLLAELNIELWIGDATEIARKRERKQKTDRQDAQHILKLLLKDDFPKIWVPSWENRDLRQLLWHRHRMVQARTRIMNQLQAVALNEGLRCKKRLWREHGRQQLEAVRLAPWASRRRRDLLELLGQLNPTIAELSQAIEQEVEKCPAAQRLRTHPGVGPLTALAFVLIVGRAERFQCGKQIAAYLGLVPLEDSSGKRRRLGHITKQGSSMLRFLMVEAAQVTVRSLPEWRSKYFHLMMRRGRKIAKVAMARRLAIRLYWMWRKGWDYEQVKKFGSHAGQLEPGDGVQ

SEQ ID NO: 129394 - protein, 343 aa, unidentified
MKISTISIDLAKSVFQLMMFDEQHKVQQERRLSRAAFHQFIKNHPPCKVVMEACYSAHYWGRELQQLGYHVQLIPAQHVTPFVRGNKNDRNDSLAIFEASQRPFIRPVPVKTEYQQEILMLHNIRERLTKQRIELSNQTRGLLTDFGLVFNKGHKAFFEGLTLLLDTELSATKRFVIQQSLDDYKHLREQQAQIETQLKHFISESSAAQILLSLPGVGPIIASAVAASVDKAQAFKSAKDFAVWLGLTPKQSASGNRSKMEGISKRGDSYLRKQIIHGARTLLRRAEHKPDALNQWITNLRCRKHVNCVVVAIAHRLARLMWVLLSRNSLYQAQPAQAVCAKC

SEQ ID NO: 129395 - protein, 405 aa, unidentified
MTSPRRVVIGADTHLDTIHVAAITDTGQPLGDAEFRTNPTGYWAAICWARSFGDIVTAGVEGTSSYGAGLTQALQANAIHVVEVNRPDRAARRRQGKSDPLDAYSAARAALASNSPAVPKDPHTNALKALLTARRGAVKARTAAIQQIKDLLVTAPAEIRERYRGYTTTLTLVAALSRCRPATHNDPVTVSVLTACKTLARRVTFLQDQADEITAELDTLTAAFNPALRAAHGVGPDTAAQLIITAGTNPQRLRSEASFAMLTGVAPIPASSGKTSRHRLSRGGDRAANNALYRIALVRMAHDQRTRDYVTRQTAAGRSKKEILRMLKRAIAREMFKHLTAPSPIDDYSDLRPARRATNITLTAVADHFGVWPNDISRLERGLKRDDTLAATYRQWLNTQLNHAA

SEQ ID NO: 129396 - protein, 331 aa, unidentified
MNKGKIIGIDLAKTHFYLFTLDKEGNPAGKKRLSRGELLRWLAQQTVAIVALEACDSAHYWAREIQALGHQVLILPAQHVKAYRRKQKNDYNDAQAIAEACQHGTIRSVRVKSLEQQDEQTFLKMRRRVVEEKTQLINHIRGLLADYGIILKQGASALHHLLPSLLEDGDPALTPKLKILMQRQYARFVALEQELIWYDSKLRIQVKKNTVCQRLQTIPGFGPLVSQLFKVWIGDGQQFRRGRDASAALGLVPRQFSTGGRQILLSITKCGDSYIRAMLIQGARSVVSRAANKTDALSLWINRLREKRGFNRTVVALANKLTRIAWAIISR

SEQ ID NO: 129397 - protein, 351 aa, unidentified
MPCKTEVAVARTIGIDTGKNTLHMVGLYQEGAIVLREKVSRTRIAARLVNVPRCLVGIEAGMASHHVARELLALGHEVKQVPPAYAKPFRQGHKNDFRDAYAVAEAVQRPSTRCVPVKTADQLDLQALHRVRSRLIGNRTAVINQLRGFLLEHGIPVRQGLRFLRQQLPQILATRNDVLSPRMVRIIGALIGDWTYLDERIERVTDEIETLARADENCRRLMTVPGIGPIIASAMVAAIGNGAAFAKGRDFAAWLGLVPKQMSTGDRTILGRITKRGNRYLRMLFIQGARAILFRPAGWAKHSFGPWLAAAARRLHRNVLATAFANKLARIALTVLVEARSYAARIEPRAT

SEQ ID NO: 129398 - protein, 443 aa, unidentified
MEREEKRLEQFRRLRKEIRGSQDYLVVGIDISKDTHNAFMRTTSGNILYRRLIFNNTREGFQTLLLQVEAVRVQHGLKEVVFGMEPTANYHKPLGEFLINQEQQVVLVSPEAVKQNRPLLDGRWNKHDGKDCANIADLMCQGKCLFYEYPSSELRDLRNLLSLNRKLKKLEQGLRLRIRNHLVAQYFPEMDQYCHWGAQEGLALVRWCLDPAVMGKLSDEELVKRLHTEGRTLAQRKRLSALKDKAPSSIGCQFGSSVEFEGQSVVKLLKEVRQSVADTQEQIEQACLKFKEYNCLLSIPGFGPSLSAMVLGAIGNPWRFQNGAQVIKMVGLDLSASQSGKSQGSPVVSKKGKAEIRYALYQAAMVGSSRDKHFVAYFTDQLRGREKEKGIKTKKRVKLAAKMLMIAWTLMKKQELFDPKYLAAQVDPIALRQTVKNGNRGYT

SEQ ID NO: 129399 - protein, 402 aa, unidentified
MRFIGLDVHLDFCEIAICEDGEVRSGGRVATTPQALEVLANSLAPDDQVALEATGNALAIARLLEPHVGRVVVAARKELRAITEAKVKTDRRDARTLARLLAAGLLSGCWLPDEETRALRRRLARRAQLVRQRTRCKNEVHAVLMRNLKGRPPMTDPFGKRGRAWLGELALPGDERQTVDGCLRQIDFLDEEVALLERAIAEYALASPEIRRLMTVPGVSLMTASTFVAAVGEIERFDGPRRVVSYLGLDPKVRQSGSEPARVGRISKQGAAQVRQMLTEAAFTAVSTAGPLRAFYERIRARRGNQIAIVAVARKLAVLFWHLLTREQDYAFERPSLTRRKLRALELRAGAERHPGSRSLATKNSYSQRAHRERERELSIQAERAYRRLVADWKATKTPART

SEQ ID NO: 129400 - protein, 408 aa, unidentified
MTVVGIDVSKSKSMVAAMKPGGKLVAAPYEVRHSDIELSHLALDVLCMEPDTRVVMEATGRYHEPVAAQLHSAGIFVSILNPLLIKQSGAGSLRKVKSDPKDALKIAKYGLDNWSTLREYTPMEAIRQQLKLCARQCDLYNKSIVMLTNNLISLSDKTFPGVNELFSSPEKADGHLKWVDFYRTFWHCDCINRMSPDTFGERYQKWCKRKGYHFSADAADALYAASCGLYTTLPRDNNARLLVTVAADQLIALRENQSKLEAEMLNFCKQLPEYETVMAMYGVGKSTGPHLMAELGDVRRFLHRSSIVAFAGVDPGVVGSGKMQLSSVATSKRGSPQLRKALFQVVSTYVKCKPENEAVYQFYTKKRDEGKPFFVCTTAAANKFLRIYYARVKECLNAAESATQVEEG

SEQ ID NO: 129401 - protein, 363 aa, unidentified
MEAKKRRFVGIDLGKREYTMAIIGKTGKMSIHQGKTSIQGRHALYNKLERTDKVALEAGNLAFIMAMEIQDRVGSEVRVLNSAKLPFIWDAPTKTDKEDAMKLAHLVEERRDEKLPLVPLPSEKEMARRKLLANYSREVKGRTRLINLLHALFVHQGYTTVVKKNLATAEKRLVAIKILQGQESEEAGWILKHLELYEMRIHELKDKIQQEAKADEDMQLLQTITGVGPIVSYAYVAHVGDGSRFSSGSQVSNYLGFVPRLDYSGTIQRNGHITKRGNGYLRSLLIQSAWAMVRYGHGGSLKERYVHLTLFQGKSKKKTIVSIGRRMAELMYSVLRSKTKYEPRPWKGKRDKTAVLVEQASCA

SEQ ID NO: 129402 - protein, 457 aa, unidentified
MSHKRKVKRSGQPGRLETIPILNPNAAGMDIGADEIYVAVPADRDRQPIQSFGTFTSELGRLSEWLQQCRIETVAIEATGVYWIPVYQILESCGFEVCLVNARYFQNVPGRKTDVSDCQWLQRLHSAGLLRGSFRPAQEICVLRSITRHRDKLIRLASTHILHMQKALDQMNIQLHHVLSDITGLSGLAILDAILAGERDPKVLVQLRDGRVKASEETLILALTGDYRAEHLFTLKQSLAAYRHYQKLIAACDLEIEQQLKRFDDKLDGKREPLTPLKVRRKKPFSNEPNFDLRNHLYRIFGVDLTAVPGISVLTAHTILSEIGPDLSKFRNSSAFASWLGLCPHNDISGGKVLNVKTRRVNNRVSHALRMAANALFRSQSSLGDFFRRMRAKLGAPAAITAAAHKLARIVFHMLTTREGYDESSFTKNERRFRARAEARLRAQAKALGYSIVAATA

SEQ ID NO: 129403 - protein, 331 aa, unidentified
MNYSHFVGLDVGKKTFDASLMSADEKELSHKSFDNTPTGIQSLLDWIAGYHLSLSKLLFCAENMGSYVTELSVSSVSMGFSLALVCPLTIKKSIGLQRGKNDRIDAKRIANYAVLHYRKLELYKLPDKDLVRLRGWIIIRDNLVKQKVSSIKLLETFSWMAKLADVTESISFLEEQLKSIKERILEVEEDMEQLIAASTSLYTNYLLLRSIKGIGIINAIVLLCVTDNFQRFDNPRKFACYCGVAPFEHTSGISIWGKTQTSSLANKEVKVYLTRAAITAISWDPQMKAYYKRKIAEGKHKASVINAVRAKIIARSFAVIRRQTPFVTLAV

SEQ ID NO: 129404 - protein, 398 aa, unidentified
MFIMALDVSKGKSYMVVYKNEYCIEEREIVHTPEQFDKLLPFLKNNQVEVVFEATGVYSKCWEHFFTKNNFSYSCLNPLEAKLQIATMRQRKSDKNDAHQLAQTHLTNKRSKTFCHSNNYNELRMYSKLYDEVHSNLLVQRNYLHSELQLVFPGLEKIYSSNMTYFVLNIMDKYTHPDTVQKTSPTKIKNYILKQTGKKLSEKQAKEKALWLKFIAKEAYSVVEEDSFMVKEVKYRLKTIRSLKQQKDRISNELIHFAETCTEFKYIESIPGIGPLTAALLIAELGDIRRFDTHKQMNAYVGIDLRTYQSGTIQHKDKIQKRGNSRARMILFFTIQNMIKKQKNIRNHFIDYYYKLKKPPYVKKHKVAMIACMNKLLKTIHYLISNNEYYDYTKSPRG

SEQ ID NO: 129405 - protein, 358 aa, unidentified
MRAHDWTPGPSIEWRTAMEEYIGLDVSMKETAVSIRRAGQRIWRGKCASDPSIVAELIRKRAPSVKRVVFETGPLSVWFYHSLRTEGLPAICIDARHAKAALDMATNKTDANDADGLAQLAEVGFFREVRVKGFDSMLTRTLVAARTRLVRITTELSNQIRGVMKTFGLLVPAGKGSTFEKNIRSLLADQDRLASIVLPMLEAWRGIRVRAAELGRQLVRDARQSRACRILMSIPGIGAITATSFTTAIEEPDNFRNSRSVGAWIGLTTRRYQSGEVDYDGHISRRGDRPLRGLLYEAAAVILTRSSTHSTLRTWGLQLRERIGFKRAAVAVARKLAVIMHTMLKTGELFNPNAGAAA

SEQ ID NO: 129406 - protein, 351 aa, unidentified
MNILAMDLSKSNTVFCLYNKDSAKSRYGKVKTTPQQIHDLIVKYSPDRIVFEVCSAAGWVFDTADGLCAEVQVANPNTQAWRWKNVKNKNDKKDALKLAQLSAMNQLPTVHMPKPQVRQKRALIQYRQSLVSRVVGIKNSIRSILDKQGYSITAGKSGWSKRQVEILERLSLPFERCDIDNLWRGQLYVELEMLCSAQKALADVTGKLDELAKSDKNIVLLQTAAGVGPRLAEAIAAFIDEPARFTSGKQVGSYVGLTPRQYQSGSMNRQGKISGQGNKLLRALLVEVSWLGLRHNAWISRTYHRLLRGSPSRKKISITAVARKLLVRCWAMLRDGQPWRDIEAETEKQAA

SEQ ID NO: 129407 - protein, 356 aa, unidentified
MRFYDRQHRFYAGIDLHARTMHLCVLDATGTVVADVNLPCRPDAFLAALAPFRADVIVGVECMFAWYWLADLCAKEQLPFLVGHAYYMKAIHGGKAKNDKIDAGKIARLLRGGNFPLAYVYPKGMRETRDLLRRRTYFVRQRAALFTHLQILNSQYNLPPFPKKLSFAANRQEMDLAARFADKSVQKNASVNLAVINSLDEQIAALELYLTRTAKVDDVQTFHRLQTIPGVGKVLALVLLYEIHDIRRFATVGQFLSYARLVRCQHESAGKVLGSGGAKIGNAHLRWAFGEAACLFLRSSERAKRWKQRQVKKRGEGKALAILAARLGRAVYHLWRKREAFDEDRFWQGSGVTTKA

SEQ ID NO: 129408 - protein, 344 aa, unidentified
MHVGVDMGKRAFLAVVRWEDGRFERPWLVENPGEIREFVDLLRRAGRGRELTVAMEPTGTYGDAMRQALSDGGLRLERVSPKGAHDYAEVFDGVPSQHDGKDAAVVAELAALGKSREWRYEPPSEVDQEMAYWVDWMDAERVQGSMWLGRLEGLLARHWPEATRWLKLSSATLLRILQEYGGPGGLAEDGRAFSRVSSWGRHYLGEEKVGGLLASAADTVGVRQTTIDVRRMQVYAGQALAARREVERSRRRLADLARGNPVIQAQARAVGVATACVLWVHLGDPHEYSCAAAYRKAMGLNLAEYSSGQYQGRLRISKRGASQVRRWLYFAALRWVQREPVKRW

SEQ ID NO: 129409 - protein, 359 aa, unidentified
MSSFAPKAPVRKIIVGVDTHKHIHVAVAIDELGARLGDVSVSVDTGGYGQLEAWATELGKIQAFGIEGTGSYGAGLTSFLRRRGHRIVEVNRGDRRARRQNGKSDTLDAETAARAVLSGTATATPKSADGLAEMIRQVKIARDTARKGRTSAIITLKTVVVNAPAELRETLDHLADKALIDHCASFRPGDISTPTASAKHALRALARRWLDLDAEIKAHDVVLDGLTAQASPTLRDGFGIGADTAAEMLVVLGDNPERVRTEAAFAKLCGACPIPASSGMTNKHRLYRGGHRQANAALYRAVIVRMRFHQPTIDYVARRTEEGLSKRDIIRCLKRFLAREIYQRVMADYQARCVELQPA

SEQ ID NO: 129410 - protein, 332 aa, unidentified
MLYKNYVGIDVSKLSIDAFIRESRIHRQFNNEESGFKQFIRWIKEHIGEGLESLLICFEHTGLYSLSLALFLEREHITYAMVPALDIKRSLGITRGKNDQIDAKRIAEFAYRFNDRVMPTSLPAEDIRKLHSLLAMRDKMMRNMGGYITSRNELFRVIPDRELPVLTSVYENIISTLKNEVHELEREIRSIIMANKELKTTFELITTVKGIGFIVASFLIVYTCNFTRFENWRKFACYSGIAPFEYQSGTSVHARTQVSSIANQQMKRLLHLAAMTAIHFDAELHNYYVRRQSEGKSKMATINIVRNKLIARVFAIVKRGTPFVDIQKYAYW

SEQ ID NO: 129411 - protein, 312 aa, unidentified
MPDNNPPYYVGLDIAKDQLDYCVTETQEGRCPNTPEGRAELIRILKALPSPRVIAEASGGYEKVVMAELFAAGIEACLVQPGRVRALAYAEGLLVKTDRIDARLLRRYGQKVEPRLAVPIAPAAATLRELLEHRRQLLTQRVEVQGRLPLAGRTLGPLLKLQERSLLSQIEKVEQRIKQHFGEHPELASKSERLQLVKGVGPILAATLIAYVPELGTIESDQLSALIGVVPYAKDSGPKRSPRHIRAGRTQVRNVLYMAAVCASKCNPILKAFYERLIAKGKPAKVCIVAVMRKMVCLLNRLIQDPNFVLAN

SEQ ID NO: 129412 - protein, 315 aa, unidentified
MDQSLSPFVGIDVSKDRLDVAVLPSGESWSTANQDEDIQSLVKRIRSLKPELIVLEATARLEMPLVGALAARGLPVVVVNPRQVREFARASGILAKTDRIDAQVLARFAEKMRPEVRPLKDEETRELTALMARRRQLVAMLVAERNRLAAAPKAVQKDIKTHIAWLEKKLSKMDDHLVETVRNSPVWREKETLLQSVPGVGPVLSISLMADLPELGTLNRRKIAALVGVAPFNRDSGSFRGKRCVWGGRGHLRSTLYMATLAATRSNPVIRAFYQRLRESGKPFKVALTACMRKQLTILNAIIKTQTPWRAQCAA

SEQ ID NO: 129413 - protein, 516 aa, unidentified
MKQKSIYQNQCPQLRELFSKAQSLDRVLVVPLDFARDKHLALFCNGLGDQLVKPFPVFNDRTGVDLLNERIHKTLKRCRIDSAHVLLGGEDDPPYAKNFLWTLHEDWLVLRVNAFKAKKQRENIQASSDELDLLGIGKMLLNREATVVFNDDGLADQAEHYDALKTLGRTRDGLVRDQTRLSNRIHSHVKILFPGFLSDRKDNPIKPFSEVSLKLMEKSDFTATQYADKKNAPLARTLKKQCLRKPEQQASQLIAQARTALPPAPHMVQAHQDTLGCLVDAYRAIKQNTAQLEHRQAFHLAQVPGALLTSLPGMAIINSSALAGELGPPDQLGCRGQMASYAGIIPRIKQTGGPDSASKTLSVGHHCNHRLKNHVVSAATAIGQQHGPPEIKEHWQRLLDKGQHAGFIHARHLLSTSKALMINGTIWLPESLRRGAVSGKEGAQLYRRQMFEYLQELWPKLRAKWVERKALELAFAPQNPLGKWRQVIEELYRIQLPLENLTPRMEEDRPSASIDH

SEQ ID NO: 129414 - protein, 332 aa, unidentified
MYLGIDVHKRYAQVAVMDEDGEIVEEVRVENANLDDLAQRYVGAEAVIEATTNYYHIHDTLSEHLDVTVAHPGKLSLIANADKKTDRVDAKELARMGRLNSVPESYVPTDEIREARALVRGRQKLVENRTNYANKIHGLLSEHGITREIKPLSVSGRESLRDLSLPTPWDELLASYLTMIETLTEEIERLEAAIEERAGSLKETQLLMTIPGVSYYSALMIYAEVGDIERFDRDKEVVSYAGLNPVIRESGDSRIEGGISKRGSRQLRWILVQCARTAVHTCNDEYLTRFYDRLAGKKGSQKAIVATARKLLVSIFHMLDRKEVYNPPGVSA

SEQ ID NO: 129415 - protein, 457 aa, unidentified
MSQTKRPRKLRGLSPVHPAAAAIDIGATMHVAAVGPDRDKEPVRTFRTFTGDLERLADWFARCGIKTIAMESTGVYWIPVFEILQQRGFEVMVVNARDAKHVPGRKTDVSDAQWLQRLHEYGLLRASFRPQSEIAELRAYLRQRERLLDYAAAHIQHMQKALMQMNLQLHHVLTDITGVTGLSIIRAIVAGERDPGVLASYRDRRCHASIETVCQALAGNYRAEHIFALTQALELYDVYQTKVLACDKQIEAILRRLKKSATPAANKLTPARQRTRQPNAPAFDARAALHAILGVDLTQIDGLGPYLALKLVGECGTSLAAWPTAKHFTSWLALAPHNKISGGKVLSSKTRRTSNRAASLLRLAAGTVGRTDTALGAFYRRLSARVGKAKAITATARKIAVLFYNMLRNGMSYVDPGASYYEDRYKQRVLNNLQRRAKSLGFVLQPSAPDIVQADVS

SEQ ID NO: 129416 - protein, 399 aa, unidentified
MNYFGIDISKRTSVIAHYQDDIFQKEFTIQNNKNGYNQLLNYLNEMDQFQFVFEATGIYSRGMVKFCRVNQIDFIEMNPLEARFKTSSLRAWKTDESNAHKLALLAPYLKASTSLDSNPDIFFELRERARFHVEIENDQNRLKIMIIELLHQTFPGLEKLFKNRYSKIALNIIEEYAHPDLVSQKDIESLTSSIMEYTNKNLSYQKAQNYAERLNKIAQESYPNVKHSSFLVKKVRLLIQQLKSSIQQLSQLDKEMIELAQQLECFEVMHSIPGIGKLTVAMIIGELGDLTKFKTNKQLNAYVGIDIKRYQSGKTQYRDTINRRGNKKARRLLFLVVMNIIRGQRNYNNHIVDYYYKLRKQPNEKSHKTAVVACINRLLKTLHYLVNESKLYDYQMSPH

SEQ ID NO: 129417 - protein, 400 aa, unidentified
MKVVFPTCCGVDVHKTFVVATIITTPADSLQPHYQKKRFSTFNSDLNRFADWLLEHNCLDVCMESTGKYWVPVFNILEKRGIRVVIANPKWVKAVKGNKDDTKDSKWIGDLFRIGLVKSSFIPELNIRILREFLRYRYKLVSMKSSEKNRFQNAFTVCNVALDSVVSDMFGKSATAITDYLTSDESFDPDHCVSLLQRSLKKKAEKVLESIEGYSISDEQKARIKIIREHYDFIEKLIAKVDTCVNEMVEKYEGEINLLCTIPGIDRNSAITIISEIGTDMSQFGSSKRLCCWAGLTPGNNESAGKKKSVRISRAGVYLKPALVQVAHAAVKDKANPYYALKYERIAKRRGKKRAIIAIARMILTAIYTMLCTGEVWTPVDLFKIDMPEHFEGTAACQSH

SEQ ID NO: 129418 - protein, 446 aa, unidentified
MRDEVEELDTEEPEDRLERVAAIDVAKASGKVCTRTSGPSGRRVTRVWDVGSTTKAIMALADQLGDEGIERVVLESTSDYWRPFYYLLEARGMLVWLVNARDVKNVPGRPKTDKLDAVWLAKLNERGMLRPSFVPPQPLRELRDYTRLRSDLVAERSRHAQRLEKLLEDALIKLSRVADNILGRSRRDMIESLIAGERDPEVLANFARGRMRTKHAQLVEALTGRFDAHHAELARVLLDSIDALSAKVDLLTSRIDQLVADMPEAQAPEVPDGPPAGAVPASAPLPVIDRLDEVPGIGSRAAQVIIAEIGLDMAQFPTAGHLVSWAKVAPRTVQSGPKTRSGKPEKGNRYLKAILAEVATGAAKTDTFLGERYRRLVRRRGKQRALVAVSRSILVIVWHLLADPNARFADLGPDYYDNRIDKDRRTRNLVRQLNALGLQVTLNPAA

SEQ ID NO: 129419 - protein, 354 aa, unidentified
MNLQKNEMEVVLGVDTHLDVHVGAVVSRSGKLLGTQSISTNTLGYLNLFNWATSFGHLEEAGVEGTGTYGAGLCRSLIDKGITVYEVNRPDRAKRRLKGKSDPTDAESAARSVISGIATAIPKHQSGACEAMRIASVARRSAVKARTQAINQLRAILVSAPQDIREKLWKVKAVECVQACNRVRNIGDTPLLDTLLITLKSLAKRWQMLTAELNQLDKLLEKLTQTQAKKLRSRFGVGPNTAAILLSVAGDNPERLKSEAALASLCGVNPLPASSGKTVRHRLNRGGSRAANNALWTIAMVRMRSDSRTKVYVERRTQEGLSSKEIQRCLKRYIVRELFPVILSDLGDSHNVLT

SEQ ID NO: 129420 - protein, 449 aa, unidentified
MGKGSGITRGDRRRNAKKARLRALVPEENAVAGLDLGEKRQALAVTGADGVVLARRSPQVSVHDLGPYLDRALAQARAAGYAGLSVACEPTGSRWMAVQDLCAARGLPFVCVQPLVSHLAREQEDLTGDKTDEGDSGLIARLARELHCYEPERLEGAWAELRDEGRRRAQLITGATAAKQLIRDKLGLAAPALLETACEPFDSATWLASLEVVLERCGGDAATVTAMGYEAFAAAVAAVLPGWGGKRVGGTCRQLFSALGDSRGVARMRRAAMRRVRGALADLKYARSRRGQAEADMIALLSELGADAGRICEIPGLSPVTLAAILAETGDLHKYESSSSVVKHAGLSPARNESGSFRGQAKISRRGRPVLRLAAWRATWAVLRHCAVLAAKHAALTSRDDDSRLTPGQARVACAASLLRWIWSLTVHGTRWDARIAAGDLGHHHAMAA

SEQ ID NO: 129421 - protein, 345 aa, unidentified
MKITTIGLDLAKNVFQVHGIDEAGEVVVGKALRRRQMLPFFSKLEPCLVGMEACATSHHWARQLSRLGHRVKLMPPIYVKPYVKRGKTDAGDAEAIAEAVTRPTMRFVAVKSLDQQSMLALHRTRDLLIRQRTQLVNMIRGQLAEFGIVLAKGIQHVLKFTGQLLGGEAPDIPPLAASVIVALAEQLRDLQARIGGLDKDIRTWSRGNAVVQRLLTIPGIGIVTASALAATVTDPHQFTSGRQFAAWLGLTPRANSSGGKERMGRISKMGDQYLRRLLVNGMTSLSQSVRRNPDAHPWAASLMRRKPDKLVAVAMANKTARIVWAVMTRDEIYRPPQTSTMKEAA

SEQ ID NO: 129422 - protein, 351 aa, unidentified
MITIGVDYHPSFQTIAFLMEETGEYVEQELNHSDGEAERFYRKLKEKGVRVRVGMEATGHARWFERLLAELGFELWIGDPAEIKAKRVRKQKTDREDARLMLKLLQENRFPRIWVPSPENRDLRQLLWHRHRLVQMRTRIMNQLQAVAMNEGYRWKKKLFSEKGRALLEKLSLALWASRRRKELLELLDQLDPKIAELTAAVEQEAKKRPEVVQLMTHPGVGPITGLAYVLVIGTPGRFPCGKQIGSYTGLIPCEDSSAGKQRLGHISKQGNTLLRFLLVEASQAAARCNPDWRRRYMHLMMRREKRIAKVAMARKLAVRLYWMWRNNWQYSQLVEFGSNAGKLGTVHGVK

SEQ ID NO: 129423 - protein, 375 aa, unidentified
MSAIDAVDGSSTGTQGAMIVGAVKASLSQEFVMHTVTTIGLDIAKSVFQVHGIDAQGKVVIRRQLRRRYVLAFFEKLPPCLVGIEACASSHHWSRELQALGHTVRLMPAAYVKPYVKRQKNDATDAEAICEAVTRANMRFVKTKTAEQQSCPMLHRTRNLFIRQQTAVINAIRAHLAEFGFVAPVGRNGVEELLDVVADPSDKRVPEVARACLAALGAQLRLLKLRILEFDRMINAWHRSSETSRRLDEIPGIGPALATALVASVADPKALRSPRDFSAWIGLVPKQRSSGGREKLGNISKQGDRYLRGLFTAGALAVIRYAKIHGFKHRPWLTTLLARRPTKVAAIALANKISRMAWALMARSERYREPVALAA

SEQ ID NO: 129424 - protein, 355 aa, unidentified
MESTKFVGMDVHQDAITIAVMNSAGKVVMESIIETKGVTILQFIQGLRGDVHVTFEEGTWAAWLYDLLKPHVTKVVVCNPRKSALLQDGSKGDRIDARKLAELLRGGYVKPVYHGENGLRTLKELSRSYLTISKDLTRVMNRIKALYRGWAIPCAGTQVYALRNRSVWLSKILEAGVRRRAEHFYEQLDALQGLRKQVRRDLLAESRKHNATKLLRQIPSIGPIRAAELVALIQTPHRFRTKRQLWNYSGLGLETHDSAQYCYVDGQLQRSRKPQQLRGLNQDHNHDLKKIFKGAATMASISAGPFHGFYEALLAKGAKPTMARLTLARKIAAITLIVWKKGVNFDAKHLKQQAA

SEQ ID NO: 129425 - protein, 442 aa, unidentified
MSELAVLDPRAAFVDVGSEKMHVSIGGGPPQVFGAVTSQLQALRDFLVEHQVRSVAMEATGVYWLPLYSVLEAAGLDVRMVDGRQTRHLPGRKSDMQDCQWGSTLHAHGLLRAGFVPPAHIRRLQDYLRLRGEHIAAAAGHVQHMQKALERMNIKLHDVISSLTGASGLAVVRAILAGERDPAALLALCDVRIRKVKAERVVEALRGDWADEHLFALGQAVQSWDHYQAQITDCDGRIAEVLARMPGGDGPAAGAEKPAKPRTRPGVNAPEIPNLRELLQRMCAGNDATTLPAHSEYTVLQLVAEVGTDLTRWPTEKRFASWLGLAPGSAQSGKRRTAVKRRRNRAGQIFCVMARALARSKYIALGGYYRRMAARRGGLVANKALAHKLAILFWRVMVKGIDYVEQGLAHYEAQVLQTRQRLLHKLAKQFGQQLVPIQGNPP

SEQ ID NO: 129426 - protein, 416 aa, unidentified
MNAVGIDVSSRKSTVAVLRPLGEVVCLPFDVTHDIAGLASLVEKLKALDGETRVVMEHTGRYYEAVAKALHEAGFFVCAVNPLLIKEYGANSLRRVKTDKADAIKIARYALDNWADLRDFTPMDAIRYDLKTLNRQFQLASKQRTASANNLIALLEQSFPGIRKCFDSPVRSDGTQKWVDFAHSFWHVDCVRKQPFAAFCERYRKWCKRHAYLFKQSNAEEVYALAKRAVVLTPKSKVVKVLVQEAANQLSSISRSVEVYRAEMDRLAAMLPEYPVVMAMYGVGKSYGPQLMAEIGDVRRFERKQALVAFAGIDPMPNQSGDKNVRSNKSSKRGSPYLHKTLFNVIRTYLQCAPQDEPVFQFLNRKRAEGKPFYVYMLAAANKFLRRYYAKLRDYFASLDTLQPVAPIPTILKAAL

SEQ ID NO: 129427 - protein, 436 aa, unidentified
MRGCRCSMIMGFTKPIEHFNLQRKKVITMNTLYVGIDVSSKSNVVYLMLPNGDKHSNFSVANSHEGSTLLVKKIYSALTSHSLDTVLIGLEATSVYGDNLVYFLREDATLAPFNRKIHVLNPKQVKKFHDTYNDLPKNDYVDSFVIADCLRFGRINKEVYMGEYRYKALQNLTRARFFAVQNLVKEKQRFMNVLFKKYSTMTQEKVFSDAFSTTALAVYDEFESAEALANMDLHELTDFIIEKGKNRFPDPDAVAKAIQKAARSSYRLPKTVNDSVNQVLSISITSMKALESQIKEFDKAIIALMELLPNVLISIPGIGPVYSAGIMAEIGDINRFDNQASLAKYAGLAWKQHQSGGFEAEVTRLIPSGNRFLKYYLCEAAFSLVRCDKEYSDFYRLKYKEVNRCQHKRALALTARKFVRLVFRLLKDNRLYCPVK

SEQ ID NO: 129428 - protein, 419 aa, unidentified
MEAKFSISPKAEMVNEKTLIVAVDLGKNSHMGYCRAPDGREVKPFRFDTNRKGFDFLRSTVQSAMAKYGLERAVLGFESTSCYGEPLRDFFMDKPGVVLVQVNPAHVKKMKEVTDNSPNKTDKKDPRVIAQLIQMGNFLTCIIPEGAPAELRVLSQARDSQVTSRVQRSNRLQDLVYKIFPEFSSVIKDPLSRTGRYLLSEYPAPGQIVSLGLERLTQIMREKSRGKLGSNQAQRLWEAAQISVGVKQGVESVCLEIKLLLEQIEGIEKAIEQIEAQLLPWLEQVPYSKRLLSIPGIGPVTVAGIIGETAGLERYSRQKALLKLAGLNLYEISSGKHQGERHISKRGRSLLRRLLFFAALNTVRKNGIMRRTYQEMVGRGMKKIKALVAISKKLLQIMYALARDNQDYIHNVSELRKVA

SEQ ID NO: 129429 - protein, 340 aa, unidentified
MQVTTIGIDLAKHVFQVHGVDAAGGVIVRRKLRRSEVISFFAKLPSTVIGLEACATSHHWARSLLALGHQVRLIPPAYVKPFVKRQKNDAADAEAICEAVSRPSMRFVPVKSAEQQGVLVLHRTRDLLIRQRTMLANAFRAHLAEFGIVERLGGAGLESLISQVEADASNEAPKVARDALRLVAEQIRDTQSRIAEIDKRIVAWHRSNEVSRRLETIPGIGPIIASAIASTTTDPGLFTSGRQFSAWLGLVPRQHSSGGKERLRGITKQGDPYIRRLLIIGATAVLRFARQRAPTAAWTSRLLARRPPLVVAVALANKMARIAWAIMTRGTIYRAPMAAA

SEQ ID NO: 129430 - protein, 342 aa, unidentified
MRSVKRGGRSCHTMSASVCGLDVHKDSTYATILSPEGKIVNQTRMENERVLPYLSHFKVSKVGMESSNQIAPLFRQLTAKGHNVVVSHPKKTRYIAEAKIKSDRVDSKAIAELVRLDALPLAYFPTGEIAKLREKVRRRAFLVRERVKLRVKVKSVLTYEGLKWPSDHGLFTKKGVEWLHELKIDSVESYLRILESLDEEIKLLSKELVGVAEDDEDVKLLMTIPGIGYYTAVLMKSEIGDINRFPFPERLCSYAGLVPSTHASGKSVWHGGITKEGSRWLRWVMVEAAQTHVHKYDTAITKAYNRIAEKRGKKIATVAAARRLLMCSYSVLKNKKPFYDQA

SEQ ID NO: 129431 - protein, 400 aa, unidentified
MLLFFEVITMIFVGIDVAKDTHYAAVSDDSGAVLVKPFAFQNNAEGFCLLLKKLSEFDRSKLLIGLESTGIYSENLICFLYESGFRLAVINPIQTATLRKTAIRKTKTDKVDTMLIIKSLMVNSYRLYSQRDADSLKLRTLCRFRQNLKKSKARLKIQLAGYVNLVFPEFGKFFKSGIHIAASYALLKKYSSPKEIAALRTSTLCTLLSKASHGRFGKDTAEALKSLALSSVGVKNPYISIQIAQTIAQIELLEQQIKDLNSAIEEAMESINSVLMTVPGIGAVNAACILGEIGDIKRFSKPCKLLAYAGLDPTVRQSGQFTAKSTRMSKRGSALLRYALINSAWQLTLNDTTFKAYYDLKRSQGLNHYGALGHVAHKLTRVIFKLLTSDTPFNPAKLVA

SEQ ID NO: 129432 - protein, 340 aa, unidentified
MSLVMGLDQHRAQISAEWIDTMTAEVFRARIAPADRAGVRKFLKRFAGETLEVALEATTGWRFVVEELERVGAEVHLAEPTETSGMKSKKKRAKTDWADARHLRELLLLGRLPESWIPPAHILDLRGRVRLRHTLSHQRTEWQQRIQAVLYHHGIPQRRDLLTLEKRQWLTRQKLPAAAREQVTIALEMIDALDIQLAPFDVALRAYARKQPGCRALIDQIYGVGELTSITILAELGDARRFPSSRDTVRYSGLDITVYQSDQRRAPGHLSRQGPPALRWALYEAAQRARFPSSPDRQYYLQLAERIGGNRACLALARKLLKRSYHILKALGDDALKPAA

SEQ ID NO: 129433 - protein, 437 aa, unidentified
MRRKKNKANKSVNLQVLPVVHPNAAGIDVGAKDHVVAVPCDRDPQPVRTFQAFTPELHELAAWLKRCGIQTVALESTGIYWISLYEVLEQYGFEVRVVNARHVKHVPGRTKTDVLDCQWIQKLHSFGLLNGSFRPDQQIRKLRTFMRLRDNLVVASTQAVHHMQKALFEMNVQLSNVISDIVGETGLIILEAIIAGQRDPQQLAALCSSRIKASRETVAKSLHGNWDEALLFGLKVALETYRFNQIKIQDCDWCIQHHLAQFESRAEVINLPQNLKIQLHRVCGVDLTKIPGIKEQSAQIIISEVGLDMTKWNTEKQFCSFLGLCPNNSISGGKVLRRATRKVYNRAADTLRLCAQSLTHSKSALGAKYRRLKARLGAPKAIVAMAHHFARLVYRMLRYGQNFVEQGIHQYELKFQLQRIKWLKKEARSLNLQLVPA

SEQ ID NO: 129434 - protein, 357 aa, unidentified
MKITKKKVIGKAYVGIDVHKTSWKVCVLSSGGFKKEFSCNPQVEALVASLENMLPDFEFQCAYEAGFSGFWLADGLNETEGFTCIVVNPADIPTSDKERAQKEDKRDARKIASQLKAESLEGIYIPSAEDIAFRELQRLRSTITKDLVRSKARIKSFLFRSGINITSQEFPDSKQHWSARFIKRLNELPIENSALRFTLTQLVQTLINLREQQKTVLLELRTQIRNSKKEKMHEALCKITGIGEITSATIISEVIDINRFSSYEKYHSFIGLVPSTNSSADIEVVRGITNRANKRLRKVFVESAWIAIRKDAELHHLYHSLKMRMKPNKAIIRVAKKLANRVRFTLLELENEMLITT

SEQ ID NO: 129435 - protein, 356 aa, unidentified
MSKILALDLGKFKTETGGLDTDTGEIRFQRIASNRHYMSRLLKKEQPDVVVFEACTMAGWVFDLCQELGIPAKVANTSGEAWKFKNLKRKTDRDDAERLARLESMGELPTVYVPAVAVRERRSLIEYRESLIEHRVKLKNQIRSLYLAQGLELPRGHAAWTVEGLKKLQEMAQALLECTATELWRGQLHAILQELRELYQRIDTVEKRLDALGEADPATRLLQSADGIGSRTAEVVAVYLENPRRFKNGRAVSAYSGLVPRQYQSGELDRRGRITRRGPRLLRKMLVEAAWCMLRYNEWARQVVARISGGQRARKKQAVVALARKLLVRLWAMLRDGVPWNDQPPRAIGQPAIALV

SEQ ID NO: 129436 - protein, 377 aa, unidentified
MFRPASCQSEAAASDWQRHRVRTRPWIFKSAGSLSRWRTPWSNSNSCQSGEYFTLTSSYHKEENTMNTITYLGLDIAKRTLDLSPHPALPKRNYSNDPTGLRLLLATLQRLPNPVHIICEATGGYEHLLLKTLHQAQVNVTLLNPRHVRDFARAKGLLAKTDRLDAAVLAEYGQMFHPAPTPPASPAQQRLAALVTRRQELVTLHTQEQHRAEHHHDRFVQRQARSLLRILAGHLTKLETEIKALLQNQTRLRTQVERLTSIQGVGARTAWQLLAALPELGTLARGQTAALAGLAPYNHDSGPQRGQRHIAHGRPLARTALYMAALVAARYNPVLRPLYQRLRAAGKPAKVALVALMRKLAELANLLLKNPQLSITQ

SEQ ID NO: 129437 - protein, 387 aa, unidentified
MAQVNDLSRSLTAFDPISTLVVVVEMSKASWLVSGVVPGVERQPLKKLEPDATALLRLIERWRNEAVRAGRPISRIALAYEAGRDGFWLARWLIARGIEAHVIHSASVAVSRERKRAKTDRLDAAMLMRVFLGWLRGERGHCGMVAIPTMEEEDARRPSRERESLVDERSRITNRMKSALARLGIRGFKPHLRKAPERLAGLQTAEGTGLPANIIEEFRRDMARLALVREQISSIEKTRAERLERAPDTGPHAMVRLLARVIGIGIETADMLVREILSRKLRDRQAVARYAGLTGSPDESGLKRREKGLAKAGNARVRRGLIQLAWRFLMFQKDSALAQWYRTRTEGPSGARKTTMIVALARKLLIALWRLVTTGEVPDGVELRPAA

SEQ ID NO: 129438 - protein, 347 aa, unidentified
MRFYTETHAHYCGVDLHARTMYVCIVDAEGQICLWEDMKAEPEAFLRAIAPFREDLVVAVECIFTWYWLADLCLEEGLTFVLGHALYMKAIHGGKAKNDKIDSHKIAALLRGGMLPQAYVYPREMRSTRDLLRRRLGLVRQRGRLQAHIQNTHHQYNLPAPGARISYKANRAGVPECFEDESARKMVEADFEIIGHLDGTIRRIEAYLIRQAKVHDPQAFHRLRTIPGVGPIISLTLLYEIHDIHRFPSVQNFASYARLIKCTKSSSGHDLGTSGAKIGNVHLKWAFSEAAVLFLRKNGPGQVLAQRLRRKHKKGKALSVLAHKIGRAAYFMLLRETAFDLNRFLAA

SEQ ID NO: 129439 - protein, 405 aa, unidentified
MKPTSQMTLDVYFRQCVGIDISKDKFTACLYMYDRASDVGCCTKSIDFANTKSGFNQMVRWSRKEAVKSHPLTYLMEPTGIYYEHLAYHLHRIGQTVYVVLPNKARKFCESEGIKTKTDAMDARCLALMGCVSRKLKPWSPPAPIYRELRQMTRFHADLCEVRTSVANRLEALNHMEGTTKSVLRNCEKLLQEIDTLMEKNGKAVMKKVAEDKELHANVKRIATAKGLREPTIVCVIAETEGFHYIENRKQLVGYAGLDVKAKQSGKDDPKHCISKKGNAHIRAALYMPALVAVRYNRQIKAAYDRICQKHPNEKMIGVIAAMRRLLLLIYTLWKNGEEYDEMRDTAHAMRKEEPEQEYSQDDCMGRIDNEPADRDVVDENGEPTLYKKWLRPEATATRDSTELA

SEQ ID NO: 129440 - protein, 354 aa, unidentified
MKDYDGRQVVAMDLHRRRSVLVRMTEDGRRLGTVRITNSPAELRREIARAGKGPRVVLEATYGWYWAADVLAAAGAEAHLAHPLGVKAFTYRRVKNDVRDSADLADLLRMGRLPEAWIAPHQVRELRELTRYRAKLVRLRTSCKDQVHGVLAKLGIPVTCSDIFGTAGSAWLDGLRLPQPYAGKVTSLRHLAGEFTAEIDMLGEVIADLLAGHRGYQVIQQLPGIGPVLAAVIAAEIGDITRFKNPAQLCSWAGLTPRHRESDTKVARGHVSKQGSRLLRWALIEAIQRIPKDSVIGAVKDGIIARRGKEARNIAKVAAARRLLTLVFYGMRDHQIRCLARPAGPAAAAPAKAA

SEQ ID NO: 129441 - protein, 346 aa, unidentified
MMIIGCDFHPSWQQVSWLDSETGEVGEQKLVHASGDAKNFYQALAAPVLIGMEATGNSQWFVELVEDMGHEIWIGDAAQIRASYVRKQKTDKRDAGHILKLVVEGRFPRLWAPDREQRDLRQLVLHRHKLVEIRSRVKNELQHLAMNKGMQKKRTLWSQAGQQMLRELSLKPWAACRREDLLGLLEMLNQQIGQLDVAVQKAAEENSGSKLLMTQPGVGPNTALAFVLTIGDVSRFRRGKQIASYLGLIPREESSGGRQKLGAISKQGNRMLRSLLVEAAQTAVRVDPGFRKQYLHRCHQKPKGVAKVAAARKLAVRLYWMLRTQTAYPEIVHIESSSRVPLVGAS

SEQ ID NO: 129442 - protein, 353 aa, unidentified
MKSRMESKMSSPVVVGVDIGKEVFHLVGFAADGKIAFRMRIRRLGLKDAFEKLPPCIVAMEACLSAHFVSRTLRTLGHEPRIVPAIYVKPFVKGQKNDYNDAEAIAEAALRPNLRLVQEKSQDQLDLQACHRVRSRLVSRRTATINQIRAFLIEQGIAVRTGPRALRKSLFAILDNRKEEISPRTAKLIRGLYDDWCCLDERIDTVTGEIEILSRSEAKCRQLMSVPGIGPLISTAMVAAIGSGEAFERGRDFAAWLGLVPRQYSTGGRSILGRISKRGSKYLRTLLIQAAKVLLMRPHNWARFSFGPWLNSASERLHRNKLAVALANKLARIAWSVLRNDKAFDTHLEVAAI

SEQ ID NO: 129443 - protein, 344 aa, unidentified
MSNHDSCGIEVSAKELLVKVRRAEEGVRERSFTNTPQDHPAIVGYLRRAGRVVRVCMESTGLYGLDLALALSGQEGIELMVANPRAVRHFAHALMRRSKNDPIDAGVLEEFAARMPFQPWVRPSPAALALHALARRLHELVEIQTAEKNRQHAAGLSQAIPAAVRRDLVRSLRAQQGAIERLTREARKLIAQDAQLRERFELLISVPGIAETSAVQLLGELGVLAPDLSARQWVAYAGLDPRCFDSGSSVHKKPRISKAGNKHLRHTLYMPALVAVRHDPHFRGFYQHLQAAGKLKMQALVAVMRKLLHALHAMFASHQPYDGSKLFQLRSTPAQEVASAPALA

SEQ ID NO: 129444 - protein, 374 aa, unidentified
MKDYTKYVGLDVSKDLISVAVADSGRGEPRFLGNIPHTPEAIRKLMKKIGPNEQLHVCYEAGPTGYGLFRFLLSLGIDCVVVAPTLIPKRAGDRIKTDRRDALRLAQLLRAGELTPVWTPDEDHEALRDLVRARHDAKEDLHRARLRLVQFLLRHDLRPEKGTRNWSVKHREWLDSLRFEKSSLRIVFQEYLHAIDEVQDRMKRIEFEIHEQATSSVHAPVIQALQTMRGVAEVTATTLVAEIGQFSRFSSPRQLMSYAGLVPKEYSSGASRWQGSITKVGNSHIRHVIVESAWAYRHSPSLKGQIRVRQEGQDPEAKRIAWKAQHRLHQKYQLITSRGNAGKKAAVAVARELIGFIWAIGCEIEKKQSEALVA

SEQ ID NO: 129445 - protein, 338 aa, unidentified
MIKNASSLVRIGRCSSVGIDVSKATLEVVGLGVSHAWKRTIANQCADVERLARSLVQANYRGKIVCESTGHYHYLLALVFSRHGLDLRVINPLQSSKHQRSRIRKTKTDPVDGYVLATMCQTERDLPQAAHLQPEQVLARLRQGQLHSLDKTIQRLTRSLATYRETYEHLGLEAGKAIEDIEAALSHLRRAKRELESELEAIFAELAGSEDITKLRALPGFSTLVAAMVAGGLNRNVKSERSWVAFTGLDVSIRESGTWKGRGRLTKRGNSFFRKRLYAAAWGAWMNYPEVKRAYDRLKAQGRHHTEALCMIARKLLRIAYAVLVKGKSFDIETAFPA

SEQ ID NO: 129446 - protein, 366 aa, unidentified
MKRKVYVGMDVHKETIQIAYLTSNSKEILKEQQIKHNEVQIKKFIKKLKTEWNEIYCCYEAGVTGYPLYRYLKSLGVNCILVAPGKIPRQNTDKIKTDKRDAIKLARLMRSGELESIHVPSEEDEAVRDYLRSRDSLRLDLGRNRQRLMKFLLRKDIKYSTTKYWTVSHYKWLNNLHFNNEILQETFNDYYSRVRVQEENLKSMDKKIQEIAESEPYREKVGILRCFRGVDYLTAMFSLCEVNDFKRFKTAGSFMSFLGLVPGEYSSGSKRKQTGITKTGSPRLRRILTEAAWQHRFPGTGSKIITARRSGQPALVVALAEKASLRLHKKFRNLQRKNSSSDDNGSFKRVIRISLGGNESCSLKLE

SEQ ID NO: 129447 - protein, 417 aa, unidentified
MKAWTELTHFAALDWADDHHDLVVVDAQGKVALELTFAHNAEGWQQAQQALAAWPGLPVAIETSAGPAVDQLLQRGFVVYPIMPKAAARYRERKRPTGSKDDRHDAWSLADALRTDGHGWSALSPLDPLTGELRALCRDEITLIEQRTALVNQLQAALKEYYPAAVEAFEDWTAPCSWAFVLAFPTPKALAAAGKRKWEKFLHTHKLWRPQTSSQRMEIFARATAFSGGEAITAAKSLLAQSLARLLQTLEQQLANYRARIQALFDQHPDHDLFGSLPGAGAKLAPRLLAELAGADWSQLSQVQARAGTAPVTYESGKIKRVKIRRACTHPLRATLHLWADLSRHYSAWAAAFYRAHRDKGQSHACALRCLAHRWLEIIGAMSRTHSTYNPEHHLRQIQKHGSYVLKLISSPDPKPL

SEQ ID NO: 129448 - protein, 338 aa, unidentified
MELSVIGMDIAKNVFQLHCVDRQTGEIERIKLRRNEVLPYFARRTPALVAMEACGGAHWWARQLQQLGHTVRLLPAKAVRPFVLRNKTDAADARAIWTAVQQPEMKTVAIKTEYQQSILALHRMRAQLLKFRHMQTNAIRGLLLEFDHPLPESYLALRKAFPTVMATLDKQLPGILIETLREQWARVQSLDNEIALIEGRLKRALAETPTCQMISDIPGVGLMTATAAVATMGDPASFKTGREFAAWLGLVPRQTGTGGRIRQLGISKRGDAYLRTLLMHGARAIIARRTYSDWVAGLIARRPYSVVIAAIANKLARTIWAVLATGKRYDGAAFAAAI

SEQ ID NO: 129449 - protein, 413 aa, unidentified
MQVLFASCAGLDVHKKTVVACLMLTQSTGEVRKQVRTFATTTESLLVLADWLTSQQVSHVALESTGIYWRPIFNILEGAFNVVLVNAQHMKAVPGRKTDVKDSEWLADLLRHGLLKASFIPPQSIRDLRDLVRYRKSLIQERTREINRVQKVLETANIKLSSVVSDVVGASGRAMIQALITGEQSPEVLAELARGSLHKKIPQLREALLGRVDAHHQILLSHLLSHVDFLDQAIARLFLQIQPYLRSYDEAVELLVSIPGVAAETAACVLGEIGVDMSCFPSAAHLASWAGLCPGNRESAGKRLSGKTAAGNKRLKAALAEVVWVLAHMKDNYLSAQYHRLARRLGKPKAVIAVAHSLLVIIYHLLRDKQPYQDLGATYFETMDRERVVKGAVRRLQGFGYTVTLQPQEEVGA

SEQ ID NO: 129450 - protein, 340 aa, unidentified
MEKRYIGIDLHRNRFTCCTRLENGRTYLREWALKDLARFVKELRASDEVAVEITGNTRLFHEAVAPQVARVVVVDTNQFRVISQSVKKTDPHDARLLSLYLSKNLLPEVRMKDKQHAQLASLTQTRDTLVKQRSALKNKVNNILSGRGLNLAKEALSSEKKLTEVVELPFDEIVRIELRVIVEQIRSLNKSIAELEKTIGEEGSKLEGHKGLSSIKGIGKITGAILLSVIGDVNDFPDEGRLASYFGIVPRVSNSNETERSGRIHKRGTKLGRTALVQSALIAANYSPYLKRFYEQVKARRGAGKAIIALARKFLGIIYRTLKNKWVFEDFPNFVLAEES

SEQ ID NO: 129451 - protein, 398 aa, unidentified
MTESSDYESVQVFIGVDVGKDTHHAVAINRSGKRLFDKALPNDENKLRSLISDLKQHGQILLVVDQPATIGALPVAVARSEGVLVGYLPGLAMRRIADLHAGEAKTDARDAAIIAEAARTLPHALRTLKLADEQIAELSMLCGFDDDLAAQTTQASNRIRGLLTQIHPALERVLGPRLDHPAVLDLLQRYPSPEKLASLGEKKLAAQLCKLAPRLGKRLAADIAQALAEQTVVVPGTNAAAVVLPRLALQLITLRKQRDEVALEVEQRVLAHPLYPVLTSMPGVGVRTAARLLTEVACRAFASAAHLAAYAGLAPVTRRSGSSIRGEHPSRRGNKALKRALFLSAFAALRDPISRAYYTRKMSQGKRHNQALIALARRRCDVLFAMMRDGTFYTPQAS

SEQ ID NO: 129452 - protein, 369 aa, unidentified
MSKTVKYVGLDVHKNTIAVAVAEDGKRGEVREHGEIANTPTALTKLLGKLGGPGIELHICYEAGPCGYGIQRQVAAADHSCVVVAPSLIPSRPGDRIKTDRRDAVKLARLHRAGELTPVWIPDSAHEAMRDLVRARLAAVRSLRHARQQLSGFLLRHGHHYHRPAWTQMHRRWLSGLRFAEDAHHIVLEDCIATVDAAKERRDRLTVQIQKRLADWTLAPVVEALQALRGMAMVAAATIVAELGHISRFSKGEQLMSYLGLVPSEDSSGKRRRQGGITKAGNGAARRMLVEAAWSYRFPARISREQLLRQEQLAAPIRAIAWKAQERLCLQYRKLSRAGKPITTVTTAIARQLAGFVWAIAHEVGMPKA

SEQ ID NO: 129453 - protein, 296 aa, unidentified
MIIIGCDFHTRYQQIAMMDTETGELVERRLEHENGEARAFYASLPKPVLVGMEAPGYAQWFGRMLAEFGHELWIGHASEIRAGVVRKQKTDARDAQHLLRLLLEKRFPRIWIPSPAERDARQLLRHRYKLVCFRVSVKNQLHGLAMSQGVCRKKKLFTAQGREELEKLSLGPWGSCRRQELLGMLDQLNPVIDELDRAVRQEAESRADAARLMIHPGVGPVTALAFVLTLGPVARFRRSKQVVSYLGLNPKERSSGDKQHTYAISKQGRRNAVELARGRAVNFSESRREPHKFGQR

SEQ ID NO: 129454 - protein, 417 aa, unidentified
MSRTLTKKMVSVKPGSLQVGVDLGLDRNYVVVLTERGERVDRFSFSNDRAGYDYFFSRIRRAKGEEAGRSVLVGMEPTNYLWKLLATELEQQQQGYCLVNAFTVKKHREGDQLDRSKDDPRDAFTIADLLRTGKFTQTHLLHGGYAELRGYGKECERLQVQVSRQRNLVWAAARQAFPELQQAFKDLGGLTVRAMLRHQACALQIARLSQAEFIQAVRQDFTGKRIELSKLRRVYQLAPTSVGVRDGLIALQMSLLSDLKVLETLEEQLQVARQLLLGQFLALPEAQWMLSIPGLGALTAALILAELGDPHTFRGSQEWIKLAGTQPTPDSSGHHAATKTPMSHKGRSALRLHLFMACLRLVQFNPSFAGWYGYYQHRPQKPLTKMQALGVLMNKLLKILWALIHHQVTFQSLPAAL

SEQ ID NO: 129455 - protein, 432 aa, unidentified
MDVVFPRCAGLDVHKKRITACRIVPDPTGQKAEGITELQPFGTMTRDLLALADWLTEASLTHVAMESTGEYWKPVYNLLEDTFTVFLVNAAHVKNVPGRKTDKADARWLAKLMRFGLLQASFIPPKGQRDLRDLTRYRTKLVQERVREVNRVQGVLERANIKLASVIADIMGVSGRAMLEALIAGRADPATMAALAKRRMRSKIPVLEQALTGIVHDHHRQLLAMQLAHIDFLDEQIEALNAAIETSLKALSTAEPSREAQPLPLTFSRAVELLDTIPGIDQRGAEVIVAEIGIDMSRFETAPRLAAWAGVAPGNDESAGKQRSGKTRKGNRPLRAILTQLAHAAVRTKDTYLSALYQRLAVRRGKKRAIIAVAHSIMCSVFHMLSRNEVYRELGANYFDERRRQFTVDRLTRRIERLGYRVHLEPVAASAA

SEQ ID NO: 129456 - protein, 364 aa, unidentified
MLIVGCDYHPGFQQIAFVDTDTGELSERRLAHREQAEQFYRELKQQNLVVRVGMESSGHSRWFERLLHELGFELWIGDPAEIRTRRVRKQKTDRQDAQLIVQLMLENRFPRIWVPDAENRDLRQLLWHRHRMVQMRTQVMNQLHVVPLNEGLRRKKALWRPAGRKELESIVLAPWASRRRQDLLDLLDQLTPKIQELTRALEEEVEKRPVTRLLMTHPGVGPLTALAYELVIGTPERFHCGKQLASYVGLVPEEKSSGDRRRLGHISKQGNVLLRFLLVEAAQVTVRSQPEWRSKFFHLAMRRGRKIAKVAMARKLAVHLYWMWRQGCDYGQWRKLGSHAGKPGNPDGVQSSTDVMIGHPAPRK

SEQ ID NO: 129457 - protein, 342 aa, unidentified
MLIIGCDYHPSVQQIAWVDTETGECGERRLTHSGGEAEQFYRELKKKGISVRVGMEATGHSRWFERLLAELNDELWVGDPAQIRAKRVRKQKNDRRDAEHLLKLMLENNFPRIWVPTPENRDVRQLVLHRHRLVGMRTRVLNQLQAIAMNEGVRRKRGLWTEKGRAQLESLPLPPWTTRRRQELLELLDRFDPSIDQLSQAIVQEAARVPEVQRLQTHPGVGPITALAFVLVLGTPCRFGCGKQVASYLGLIPCEDSSADSWRLGHISKQGNALLRFLLGQAAQSVARSEEQWRHQYVHLALRRNHAIAKVAMARKLAVRLFWRWRRGWDYQQLKKFGSHVG

SEQ ID NO: 129458 - protein, 350 aa, unidentified
MDNTFPPLGIDVSKGTLDVRLLSQHRPGPPRRFATTTDGLTLLAQWLESQGTSRVHACLEATGTYSDAVATFLFEHAHQVSVINPARVTAFRLSEGMRTKTDRHDALVLARFCEQKRPALWRPTPVEIQRLQSLLGRLDDLQLTVQQERTRFENLRLDAQIRQEIGAHVSWLQQQRERTLQCAITHVQQYPHLQQACDRLDSIPGIACLTAMRLYSVYFDQHRFRGAPQLVAYAGLCPAQRLSGTSVHGKPSIAMAGNAQVRQWLYMSALSVLRYDPDFAQWAGELKARGKCGRVIVVAIMRKLLHVVHGVLTSDEDYDPRKAFPTHEHSTGVQAPMPTDQEHVASARKE

SEQ ID NO: 129459 - protein, 357 aa, unidentified
MERYIGLDAHGASSTFGVIGPSGRKLRQDVVETTGAALVQYVRNIPGRKHLCLEEGTHSAWLYEILSPHVEEIVVAGIGKSRGQKSDILDAFQRAEDLRTGTIKTLVFKAPRRFSRLRELSRVHSMLVGDVVRVQNRLKVMYRARGVSTPGKQVYQPKGREGWLKKLPVPCRWATEKLHEEYDRLLDLKQETEKELVAESRKHRISKILATAPGIGSIRVAQLLPIVVTPHRFRSRSQFWAYCGLGIVMRSSSDWVQTPAGQWGRAQIQQTRGLNRNHNSRLKSIFKGAATTIITHLSSDPLYGHYLRMTSAGTKPNLAKLTIARQVAAILLRMWKDEKEYDPGKLKQQEIIASAVD

SEQ ID NO: 129460 - protein, 413 aa, unidentified
MLAIEGVLERCAGLDVHQASVVCCVLIGAPGRKAQKLLRSFGTTTRELEALRAWLAEHGVTHVGMESTGVYWKPVHSVLEGHVDLTVGNAHHIKTVPGRKTDVKDAEWIAQLVRHGLVAKSFVPPPAIRDLRELVRHRRTLIETRTAVRNHVLKLLEGANIKLSGVASDVFGVSGMAMLEALAAGTNNATGMAGLARGRMRRKHAALEATLDGRRREHQCFLLGMQLRTLGTIDQDREALDARIGAQLEPYQAQHRLLMQIPGVDWVTAASLIAEIGIDMDVFATAHRLAAWAGVAPGNYESAGKPKGAGTRRGNVFLKSALFAAASAAVRTKGSYYRDKYNRLRARRGPVRAIMAIAHKLLIAAFHMLSTGEAFRDLGESYLDQVARKRSTAKLVQRLSNLGYDVMLVPKAA

SEQ ID NO: 129461 - protein, 384 aa, unidentified
MDVHTSNYTLCSLDPGYGVEKDNYFAEVQFTNDFIKNVVNYVTNLKKKLKDCEFVCGYEAGCLGYSTYKDLTKVGIKCVLMAPSTMAVQKGGKKVKNDRRDARVIAQCLAYQTYKEVYVLSEHDEAVRGYLRMRDSHNKALKRIKQQIIAFCTGHGLFSPTKSNWTVAHLKWLKDLKFNDPVEQEILNEYLSSLTFLSDKIKAMDVRIEELASEKQYCENVKKLRCIKGIETNVALTLLAEIGDFNRFSKPTNFASYLGLIPGEQSSGDKVRGTGITKAGNSTLRRKLTESAKGYWRGRIGIKSATFKKLEKELPKEVTEYALKANTRLQRKFFNMTHVKGKNMNVAASACAREMACFVWGLITNHYDKAPAVPKTDEELLDLN

SEQ ID NO: 129462 - protein, 412 aa, unidentified
MKRIRERVAGLDVHRDTVVACCQVKQPDRSIEVTKQSFATTANGLGELAAWLSDAGVDTVAMEATGVYWKPVYYCLEGLFDELWLCNAQHVKNVPGRKTDLSDAEWLADVAAHGMVRPSFVPPPEIRELRDVTRYRKTQVEARAKEIQRLEKTLQDAGIKLSSVASKVWSQSSREMIEAMIEGERDPKVLAQMAKSRLRAKIPQLEEAFSGRFGSHHALVCRQVIEHIDFLDRSIATLTADVTDRLCPFESAVTILCSIPGVSRTTAEVMIAEMGVDMTRFPTSGHLCAWAGVAPASHESAGKRQPVGTRHGSTWLQRALVEAARGASRTKGTYLSAQYSRLARRRGSNKATIAVAHSILDVSWHLLTNGALYDDPGARFFELRHDPAVEAKRLQRRIEDLGFDVSITPTAA

SEQ ID NO: 129463 - protein, 416 aa, unidentified
MKKNSNSPMKKEPRAKRAKAQRPVQREAKEVLAELVEKLRGKLELKSTSASQAEASPRGELSPNLNRLTVGLDLGDQWSHFCILGFEGETLSEGQLQTRQAEVAEFFQALPPARVVMEVGTHSAWMQEIIAGEGHEVLVANPRLMEGSKRRKRKNDRIDAKKLARLGRVDPQSLHPIRHRSREVRQDLVVLRAREALVAARTELINATRGLVKSMGTRLPKCSSPSFEQKVKDAIPERVREALLPLVQLAGALSDCIRSYDQKIEELGSEKYGHTKLLRQVKGVGPITALAYVLTLENPEHFAKSRDVGPYLGLVPKQEDSGESQPQLGISKAGDTMVRKLLVGSAHYILGPFGPDSDLRSYGLRLCERGGKNAKKRAAVAVARKLAVLLHRLWVSGEVYEPLGYVASRAIVQQAA

SEQ ID NO: 129464 - protein, 417 aa, unidentified
MEVLVTRCAGLDVHKKSVMAAVRAPGPDGKRLQVVREFPTFTRNLVQLRNWLVSQGVTEVAMEATGVYWQPVWHVLEDMPGVELKLVNAEHVKNVPGRKTDVSDAAWLAQLLECGLLRGSFIPEPAMARLRDLTRYRKKLVEERAREVQRIQKLLETAGIKLDSVATDIVGKSSRRMLEALIAGERDPDALAELALTRMRAKLPALRLALEGRFSEHHALMARLYLDHIDHLSEAIDRLDAQVVSETAPFAQQIDRLCTIPGMGRRVAEVVIAEIGVDMSRFPTAGHLASWAGMCPGNHESAGKRRSGRARRGNDDLRTALCEAAWAASHTKDTYLSAQYRRFVARFGKSNGGETKAIFAVGHTMLVIIWHVLAHSGNYEELGFDYFEKRNETEAYKRRLVHQLEKLGLKVTVEPAA

SEQ ID NO: 129465 - protein, 343 aa, unidentified
MEHFAGLDVSVNETSVCIVDDAGRIVREVVVASEPDALLAVLKSGAYHFKRIGLEAGPLSQWLYSALGEANLPVVCVETRHMRAVLKAQINKTDRNDARGIAQMMRAGLYRPVHVKTLRNQKLRMLLTHRKLLQSKAIAVDNDLRGTLRNFGLKVGLVGAARFETRIKELVENLPDIAALVEPLLIVRRVLREQIAVLHRRLLVIVKDDEVCRRLMTIPGVGPVVALTYRTTIDVPARFRNSRAVGAVLGLTPCKYQSGESDYTGAISKCGDEMMRVMLYEAAQILLMRSTRWSWLKAWAMQIARRRGLKKAIVALARRLAVIMHRIWVDGTEFCWTREAAVA

SEQ ID NO: 129466 - protein, 361 aa, unidentified
MAKSTTIVAFDQHAATTVAAVLLPDQRTPALHTLTSDSPTILRFVQRLRATSVQCCYEAGPCGFELQRALTGHAIPCDVIAPALIPRRPGDRVKTDRRDAAQLAVLYRAGALTAIHIPTEQEEAARDLLRCREDIRADLLRARHRLSKFLLRHGRRFTATKRAWTKRHADWLHAQRWAIPALEQTHRAYVRAVTEALGRLQSVDAELRDLLTLEPLRTRVERLRCFRGIDDLTALTLAAELGDARRFPSAPRVMAFTGLVPSEYSSGATQARGRITKTGNAHVRRVLVESAWHYRHPPFLGRALRLRQRGASAAVIAQAWHAQHRLHRRYRRLAARGKPKQHIVTAVARELSGFLWAALTH

SEQ ID NO: 129467 - protein, 336 aa, unidentified
MKKYIGLDAHSSTCNFCVMDGTGKVLDAVKITTNGRLLREYVKGISGEKKLTFEECELSSWLYEMFKNEDCELLVCNPVENRNYKKAKTDKIDARNLADLLRGNFLKPVYHDGSTREKFRDLMSGYQQLVDDAVKVKNRYKSLFRKGGKRHVGIRLYNDENLLEEFDRKDLKFVGVQTYELLREMEKRRKEYIIEIKKHSKKFKEIKVLKTLTGIGDIQAAKIVAQVVNPARFKNKYKYYSYCGLVRHRQISGDKAYGDKKIWGNRTLKCAYKMAAHSALKGNNVFRKYYDNLRSKGTNHKCASNAVSRKIAAISLVLWKNNVRFDPKMVTNSIIE

SEQ ID NO: 129468 - protein, 410 aa, unidentified
MLNTLFVGIDVSKRNNVVRFTDSLGDTLTVFSVQNNQDGANNLLEKLHNTLTSNDFQAVSIGMESTSIYADHLAIFLRNDAFLKKWGAKVFVLNAKQVNAFKKAYPELPKNDNIDTLIIADYLRFGRISKEVNPDEKFIALRNLTRARFQVAQNLSREKARFLDTLFYKFSSLDSSKVFSNTFGATSIAVITEFFSIDDINEMPLEDLAKFVMDKGKNKFDDPEQIANDLKAAARSSYRLPKTVNDSVNQLLAVRLVGMRSLQEQLKDLDKAIESYMQLFPAILNSIPGIGPVYSAGLLAEIADIHRFKNHAALAKYAGIAWTEYQSGDYEASNTRLILSGNKYLKYYFLEATNKVRIHDAEFKRYYQSKFKEVPKHQHKRALALTARKLVRLVYSLLSTNQLYIPPTNR

SEQ ID NO: 129469 - protein, 340 aa, unidentified
MNIKRIGIDLAKNSFSICAFDENDKIVLERTLKRKDLLVFLSNINPCVIAMESGSGAHHWSRQLIKMGHDARIIDPKFVIPYRAGGKSRKNDRNDARAICEAAGRPHMNFVPVKTEIQQSILIIHRRRRQVVAEHTRTANQIRGFLAEFGVVVAKGVNRLKREWLQCRLENSDKVPLMAWEELDDLYSQLLALHQQILKYERKINHLNKEDERTERLMKIGGVGPITASAIVATVGNATVFKNGRQFAAWLGLTPREYSTGGKPRLGRISKRGDVYLRTLLVHGARSELMLTHKRSDAKSRWAEYLKLNKSWNKAAVALANKHARIIWVLLAKNETYHLV

SEQ ID NO: 129470 - protein, 334 aa, unidentified
MKQVNDMGVDVDSEKLVCAMRRAELRLPLATFANTAAGHKKFIRWATKRARPARVCLEATGIYSLQFALALHDAKNVEVMVVNPRAIKDFARACMQRAKTDAVDAGGILEYLERMPFTAWQPPAPEILQLQAINRRIVQLQTELTREKNRGHASEFAGASGDAVANDIEINIRHLERRIERMHDSGLQLVHGVPALATKLAHLVSAKGIGEASAMRLLAEVLVLPVDLAAPQWVAHAGLDPRPYESGTSIHRPRRITKVGNRHLRAALYMPALVAIQHEPNVKAFYNKLVAAGKKPMQAVVAVMRKLLHAIWGMLKHDQDFDGNKFFKLTGKPA

SEQ ID NO: 129471 - protein, 335 aa, unidentified
MIGIDTAKNVFEVHGRNAAGEVVLRRRLKRAQMEKFFASHPQAVIGMEACGAAHYWGRLLEGFGHEVRLMPPAYVKPYVKRNKNDAHDAAACCEAMSRPGMRFVRVKTAEQQASLSLHRSRQLLVRQRTQLGNAFRSLLAEFGVVAAKGREGLAQLAADLRAGVLDLPESACAAALTLADQRDNLVPAIKDLERRIGEQAKAEPRARMLQTAPGVGPMSAHATLATMPDPAMFKSGRDFAAWIGLTPRESSSGGKQRLGSITKQGDQTLRRLLVLGATAWLRQVEKHPEKASPWLRGMMARRPKKVVAVAQAARTARILWAMLTHNQPYRAPASA

SEQ ID NO: 129472 - protein, 340 aa, unidentified
MIGLDTAKSVFQVHAVDPSGKVAMKRKLQRGELIPFFEKHEASTVVLEACGAAHHWARVLTGLGHDVKLIAPEAVRPFVKKGRKNDAADAAAICEAASRPSVKFVSAKSLEQQSVLTLHSARCLLVKQQTMLANALRGLATEFGLTVPKGIGKLEELAALVNADEAFPETARHVLTGLFDHCRATAASIETVEAEIVVQARQDETARRLATIPGIGPITASLIAATVGDIGMFKSARHFAAWLGLVPRQYSTGGRNRLGRITKTGNREIRRLLVLGATSMVYRAPQWKSAAGLWTRAVLERRPVRLVTVALANKMARIAWALMTRKEVYHAKGRAAAAAA

SEQ ID NO: 129473 - protein, 401 aa, unidentified
MTDGQVTVGIDIGSHMHRVAIGTPEKKIAEEFDLPHNKDGFEKFFERISYYENTYQVPVVVAMEGFNGYARPLDQMVQKKGYRLLNVNNLKLRRFKEIFPSPAKTDAIDARKILELVRLQPLLTDQEVILQEVREVPREHQMLKRLTRRRRQLVCEKAAVLNRMQSDLHAVSPELVELARNKDGLAFLRFVTCREDLRQLERVQKRTLLGIKGIGKGFAGKIQEWQKKAQFSEEAEYAGPMIIEDARRILELKKRIKGLDTQIGELCERSRLAEIVRSIPGFGLTCTSEIVAEIGTMDRFRSEQSLAMYLGMAPLDNSSGRRKGTRHAKQVNIRARTAMMTAMNRHILRVEESELYYRKKRNEGKKTQSGDKVIGTSHGKGLVVHDKGRAFLRRKSDRQHY

SEQ ID NO: 129474 - protein, 341 aa, unidentified
MTEIIRIGVDIAKNVFEVHAVNAQEQVVVRRSLRRNQVLAWFGKLPPCLIGMEACGTATHWARELSGLGHTVRLIPPAYAKAYVRRNKNDPADARAICEAVGRPSMRFVPIKTVEQQGEAVTHKARQLLIKQQTMTRNSLRGLMAEFGIVVPQGPQHISKLLVILADPEDPRIPAVARTALNAMADLLAALEQQVETLDKTIRAQVRANPIARRLDTIPGFGPILSGAIAAIVADPRHFDSGRDFAASLGLVPRQDGTGGKVKLGPISKRGNGYLRRLLVNGATAVLNGKNARNDAWQAKLLDSKPKKLAAVALANKMARIAWAVMTRQETYRPRAVAAAA

SEQ ID NO: 129475 - protein, 356 aa, unidentified
MVQSNKKDFSGQNISIGIDVHLKTWSVTVLTPSGFMRTHTQKASAKELFEHLNKHYPNGSYHAAYETGFSGFSTYYALTELGIKCTVVHAADVPTTQKEKVSKSDPVDSKKLAKALMRGELGSVYIHSKDSLDDRALVRHRATIVKLSGGIRSRIKHLLYNNGVEYPEEYFRSNRHWTRSFITWLQNDVRLLSDTRVSLDLLIAEVLHYRERLLDVNRRLRSLARSDRYAEKYGILMSVPGIGSTIAMSLLTEIDDIGRFSNQRQFASFLGLVPMMSSSGDKEYVGEKTFRGNKFLGPKIVEASWIAIRHDAELSAKFGALCTRGMKSQEAIIRIARKLSNIIFSVLKSNRRYECR

SEQ ID NO: 129476 - protein, 357 aa, unidentified
MAALSLADVPANVTVGVDTYKHSHIARAKDGLGRHLGQLEIETDPRGYVRLLAWAQGFGPVVTFGIEGTSSYGAGLTRFLRAQGQAVIEVLRPVRRDRRFGGKSDPIDADAAAGAVLSGRATAVPKAGDAGVEMVRALKIAKQTAIKARTQAVNAVKGLVVMAPDPIREQLRNLNTPALVRTCSAYRVGRASDPTSAIKLSLRSMCRRYVVLDQEVRSLEKELDALTVRLVPQLRQLFGVGQDVAATLVLAAGDSGERLRSEASFSMLCGASPIPASSGMVQRHRLNRGGDRQANAALHHIVIVRLRHDEATKAYFAKRKADGKSKKEIFRCLKRYVAREVYRTLVGPREEVIRSAA

SEQ ID NO: 129477 - protein, 430 aa, unidentified
MKSNTQNAKIEAITEKTLVLGIDVGSETHYARAFDYRGIEYSKKPFKFSNTEAGFVTFKEWILDLKERHEKDKVVPGMEPTGHYWFNLGKFLQDNEMKPVLVNPHHVKKTKELDDNNPTKNDRKDPKVIAGLVREGRYMIPYLPEGVYADLRTASNIRFQLQAELTRIQNRISRWFNIYFPEYKMVYGKPDAKSGMLILKAAPLPEDILTLGIDGVNQIWRDAKLRAVGKARAKTLIEAAEHSVGSKEGAVSARMEIRMLLEDYESRNTRLQEVMVLIEELVRKIPMAEKLLEIKGVGIRTVSGFLAEVGDISRFNNPKELQKLAGLALVENSSGKHKGETTISRRGRKRLRYLLFEVAMSLVSKNQEFRELHNYYTTRRLNPLKKMQSLMAIAAKLIRVFYAMLTKGVDYDPKKMVSDIKRPAVYLQAA

SEQ ID NO: 129478 - protein, 353 aa, unidentified
MAVKYVALDLHQASTSISIRDARGRVIRREVVPTSAAAILQAIDSAGGTIHVTLEEGTLSQWIYDQLISRVARVIVCDPRHNRLLAAGNKSDRIDADKLSDLLRLGALRPVYHERSAVAALRELVRSYNTLVEDTTRVMLRIKAIFRSRAIDCSGIAVYHPRNRSRFLTALCDWGARLRAEHFYAQLDALLQVRAHARHQMLEEAKRHPAVRLLRSIPFIGPVRAAEIVAIVVTPERFRTRRQLWPYAGLAVTTRSSADHRFDRGAAVRNARPVSRGLNRNFNRTLKKVFKEAAASAVCSPGPMHVCYERLLARGMRPELARLTIARKMASIVLAIWKKGVPFDPQILNAQNA

SEQ ID NO: 129479 - protein, 410 aa, unidentified
MQVVHERCCGLDVHKRTVTACVLAPGEDGRPGKEVRTFGTMTEDLERLADWLAARGVAEVAMEATGSYWKPVWNVLEERRFALTLANAQHVRHVPGRKTDVKDAQWLAELLRHGLIRGSYVPDRAQRELRELTRYRTSLGEERTAAVNRLQKVLEGANIKLAAVASDVTGVSARAMLAELVAGSTDAEALAELAVGKLREKIPALQRALRGRVGEHQRFLLAQQLSHIDFLDGQLAQLDAEVAERTRPFEEAVARLDTIPGVGQRTAEVLAAEIGTVLDRFPTPGHLASWAGMCPGSDQSAGKRRSGRTRKGSPALRRVLVQAAHAAARSKTTYLGAQYRRLAARRGAKRAAVAVGHSILVIAYHLLTRATAYEDLGPTYYDQRDREAVLRRLVTRLEKLGYEVTTKPAA

SEQ ID NO: 129480 - protein, 331 aa, unidentified
MNYSHFVGLDVGKKTFDASLMSADEKELSQKSFDNIPEGIQSLLDWIAGYHLSLSKLLFCAENMGSYVTELSVSSVSMGFSLALVCSLTIKKSIGLQRGKNDRIDAKRIANYAVLHYRKLELYKLPDKDLVRLQGWIIIRDNLVKQKVSSIKLLATFSQMAKLANVTEAISFLEEQLKSIKEKILEVEEDMEQLIAVSTSLYTNYLLLRSIKGIGIINAIVLLYVTDNFQRFDNPRKFACYCGVAPFEHTSGISIWGKTQTSSLANKEVKVYLTRAAITAISWDPQMKAYYKRKIAEGKHKASVINAVRAKIIARSFAVIRRQTPFVTLAV

SEQ ID NO: 129481 - protein, 450 aa, unidentified
MAKSKRRKHRKLERSLPEMRPNAGGIDVGATEVFVAVPADRDPDSVRSFPTFTQDLHELADWLKQSRVDTVAMESTGVYWIPLFQILEARGIEVHLVNAQHVHHVPGRKSDVLDCQWLQYLHSVGLLRASFRPEQAVCEIRSLMRHRESLVEMSCVHVQHMHKSLDQMNLQIHHVISDITGVTGLAIVDAIVAGNTDPKELAKLRDYRIKASMETVTKSLVGDYRAEHIFTLKQSLTAYRHYQQLIADCDAEVQRRIQTFDRENAGPRASADTNSNAPANPTRFDLRSHLERIFSVDLTVIPGFECLRIQTLLSELGADLSPFQTPDAFCSWLNLCPKDGSSAGRRIRAPKIKTKNRATQAFRFAAQALHHNQSYLGDYYRSQRARYGAPKAIKNTAHKLARIFYHLVMTRQPYNETVFAKLEIRNQQRRFRKLQSLATQMGYSLVQLHA

SEQ ID NO: 129482 - protein, 366 aa, unidentified
MKKISTVRVFGNEIFEVQKLTIGMDLGDRWSFYCVLDEAGRIILEQKVPTTPEAMKQTFSRIPQSRIALETGTHSPWVSRLLTELEHEVIVAHAQKVQLITKSNRKDDRHDARTLARLARIDPELLGPVRHRSLQAQIHLTVIRARAELVSVRTALVNAARGLVKSYGERLPKCGTEQVSRELAAALSTELRDVLEPLLKEIESLNERIKEYDERMEKIAKEVYPEVSLLKQVKGVGTQIALTYVLTIEDPHRFLKSREVGCFLGLKPGRRNSGEREPQKGISKAGDRYLRTMMVQGAHYILGPFGEDSDLRRWGRKLSERGGKNAKKRAVVAVARKLAVLLHRLWVSGEVYEPLRNSQKAMRAVA

SEQ ID NO: 129483 - protein, 410 aa, unidentified
MKVAGIDVHKKVLMVVVVDASRPEEKPTRRRFVTMPSELQRLLTWLREQGVEEAVMESTAQYWRSVWLELEPHMRLHLAQAFSNRAPRGRKHDFKDAERLVRRLIANELILSFVPSGEQRIWRSMTRMKLQLTRDRVRLQNQIECLLEEMRIKLSIVVSNLLGASGLRILHALANGETDPRKLAQLGGERLQCSEEQLVDALTGRAQPVHGAMLALQLQRLQLIDQQMAQLNSMIAAAMKSQQDAVIRLAEVPGLGVDSAQQIIAEVGAQASTFASAAELTSWVGTCPGKDESAEQNHSSRSAKGNKYLRRVLNQAAHAAVCKKGSYFQAVFRRLLPRLGYKSAIWAVAHRLCRLVWKILHEGVRFIEQGVAVSPREKKKRAQMLARALRKLGYEVTVTPINQLVPKPVV

SEQ ID NO: 129484 - protein, 342 aa, unidentified
MTAIGVDTHKATLAACAIDELGRVVGEATFGNDPAGHLAFIAWARSIEPEATIGIEGSSSFGAPLARAIHAAGLCVREVPPHLSRFERRRTGRPGKSDPGDALAIARVTAREPNLPPIRLPDRTSEIRLLLEAREDLIGETTRARNRLHAHLRVLLPGYGGNVANLVAARHRTMVRRLLRGNATVQGELARSLLDRLLRFERESDVLTRRIEALVDGHPLLGLSGAGPITVARLIAEAGDMRRFRTPDAFAALAGVAPIPASSGQVQRMRLNRGGNRQLNRAMHVIAVTQARFYPPAKAYVTRRIEADGKTRREAIRALKRQLVRPVFRLLVEGSEVSLEAA

SEQ ID NO: 129485 - protein, 393 aa, unidentified
MKLIGIDIGKNKHFFCVMDQQTGEIISQPVSFSNDKEGFDFLVQKIKSYPKDSILIGMEDTGHYHFALLKYLLDLQYTVALINPKTTDFNRKMQGGITKNDKLDTINICDVLDTPERKKQYRITKVNSFDLYEQKQLTRHHHNLKEENVYKNRLQKCIDIVFPEFNKLFNSKYGIVYMNILKMFGSAENIANTDIRTIRKCFEIEGRGNRISLTPERLKECARSSIGISSSAEVIQIKHLTAQIELIEEQLTEIDKKIEEFSIQNNSPILSIPGISHFSGTSILAELGDISNYSKPSQIIKFAGVAPLHYESSQFNAQHTAITKKGSKYLRKTLYQIILPVIRHNPVFNKYYQLKISQGKGHRCAQGHCVRKLLRIIYHLLKTNQQFDPQLLR

SEQ ID NO: 129486 - protein, 310 aa, unidentified
MTNHCGVDVSKAWLDAWIAAAGHRRFANTAQGVAELGAHCREHRVDLVVMEASGGIEQTAFLALWQAGQPCAIANARSVRQFAQAMGYLEKTDRIDAMMIARFAGAKQMVATPPPSAEQHKLTALATRLRQVTGDLGIQKQRLHSAREPMARDSLREAIAFFTAQADALAAEIAAVIGTDPLWEALDRSFRSVKGVADRTVAYLLAELPEIGTLPNRAVTKLVGLAPLPDDSGQRRGRRSIRGGRAGLRSILFLVADIARRFDQSLADFRQRLLAKGLSKMEVRIALARKLLVRLNAKARDTRAALPAPA

SEQ ID NO: 129487 - protein, 418 aa, unidentified
MPETSVAHFYDELADDYHLIYSDWDLDVGKSAHHGHGLTPAGKKVFDKPLPNSEPKLRAVFDKLTAKFGTVLVIVDQPASIGALPLTVARDAGCQVAYLPGLAMRRIADLYPGEAKTDAKDAAVIADAARTMPHTLRSLELTDEITAELTVLVGFDQDLAAEATRTSNRIRGLLTQFHPSLERALGPRLDHQAVTWLLERYGSPSALRKAGRRRLVELIRPKAPRMAQRLIDDVFDALDEQTVVVPGTGTLDIVIPSLTASLAAVHTQRRATEAQINTLLEAHPLSPVLTSMPGVGVRTTAVLLVTVGDGTSFPTAAHPASYAGLAPTTKSSGTSIHGEHAPRGGNRQLKRAMFLSAFACMNADPASRASYDKQRTRGKTHTQALLRLARQRISVLFAMLRDGTFYQSRTPRDVELAA

SEQ ID NO: 129488 - protein, 419 aa, unidentified
MSLKDCSAFVGIDWADQEHAVFLIDAETGATELSDLAQDPEAISMWVASLQQRFPGKKIAVCLEQKKGALIYALMKFECLVLVPVNPTQLASYRLAIGPSGVKNDPNDARLLAELLMMHGKDLSPWLPDDPATRKIRLLTEDRRNLVNTRTALTNRLKSRLKEYFPLALQVCGTNIHSEMACQFLLRYNCLEKLQSATNDDIAGFYREQNCHRKAIIEKRLQKIRLATPLTTDSAIIESDQLIVEITVRQILTINEAIDKYDQEIAAIMQSHPDAKIFTALPGAGAAMAPRLLAALGSDRQRLASAGELQQLSGIAPVTRQSGKTQVVHQRWACNRFLRQTFHEFAAHSTKQSPWAKAYYEMMRARGKKHQAAIRALAYKWIRIIFRCWKNNLLYDEMAYSAALIKRQSPVLKHLAPSE

SEQ ID NO: 129489 - protein, 409 aa, unidentified
MRVLHERCCGLDVHKDTVVACAITPQGQKTKTFGTMTGDLEKLVQWLKERGIRHVAMESTGIYWIPVFNVLEEELNPEALMVVNARHIKAVPGRKTDVKDAEWIADLLRHGLLRGSRIPERPQRELQEAVRYRRKLVDMRADEVRRLQKVLEGANIKLGDVATDVMGLSGRDMLRALVEGQDDSARLAEFARGRLRRKRDQLESALEGSIGQHQRFILGHLLQHIEFVERQIEQLSAEIEARMRPYEAHMESLQRIPGIGRRGVEAILAEIGVEMSYWPTAEAIASWAKICPGNNESGGKRRSTSIGRGNQSLRGALVEATLAAIRVKDSYFSALYHRVATRRGAKRAIIAVAHAMLIVIYHMLKDSTVYSELGGDYFERVDREAILRQSVCRIEKLGYQVTLHEASAA

SEQ ID NO: 129490 - protein, 404 aa, unidentified
MEQHDVIGIDVSMGKSSCAIYHQNQCLYDFTFTHTITGFGTLLSRINLTVNPVVYFESTGIYSRPVRTFCINNRLNYVEVNPLALHFQMSTLRRLKTDRNDAHKIAQYGLQYPQVLSQPFAPTYERLRELSRFHSQVETDIKDKRMRLHNALQQTFPELEHLFINRVSKLALNIIVLMPHPDFVRSVSQTKLKNIIMKSTDKSLSKTKALKHAQELLHFTSVSYPSAGSNSIQVDEVRYYAQQLINLIHEKEKLVEQLKGLAQTLPEFEIMTSFPGIGDQTAAELIGELGNLRRFANNRKLNAYIGIDLNRYQSGTYTRSDHINKRGNAHARSILFFTIGNMIRQQAAASNHIVDYYYRLKKGPYPKQDKVAKVACMNKTIKCLLVMVKANQKYDYSYHGLGVQ

SEQ ID NO: 129491 - protein, 388 aa, unidentified
METVVERPGALVAEFQTTVTGLLTLRDWLAAHGVTQVTMEATGVYWKPVWAILEDEFELLLVNARHVKQVPGRKTDVSDAVWICQLAEAGLLKASFVPPKPIRALRNLTRYRKTQIQERAREANRLHKALEDTGIKLDCVASDILGVSGRAMLDALIQGTTDPGVLADLAKGRLRAKIPALKEALEGRFDQLHAVWIGAILAHIDFLDEQIASLTETIGGQIAPFESAVELLCTIPGVQRRTAESILAELGTDMSVFPTAKHLASWAGQCPGNDQSAGRRRSGRTRKGSKWLDWALEEAALAATRTNDVYLAAQYQRLRPRRGHKKALGAVKHSILCTVWHTLSTGELYNDLGGDYFRKRDPQRTTKRLVAQLEALGHTVTLQEAVAA

SEQ ID NO: 129492 - protein, 378 aa, unidentified
MTTMAHPAVTRVTVGVDTHGDVHLAHAGDQLGRRLDTVIVPTTPSGYRGLLAWARGLGELDAWGVEGTGAYGVGLARFLRGHGQVVVAVNRPDRAARRRRGKSDPVDAEAAARTVQAGQATALPKAGTGQVEMLRSLRMARASAMKARTQAINAIKALLVTAPVDLREQLRGLPAAQLVRCAAALEPGRLTSPTAAAMLALRTLACRYQALSAEITTLTTELKRLTATAAAPLVALFGVGSDSAGALLVAAGDNPGRLRSEATFSMLCGSSPIEASSGTTIRYRLNRGGDRQVNAALYRIVLVRLRYDPATRAYMARRITQGKSKREVIRCLNATWPGGSSQPSARWSACAAHVPEGSRHPLPPAQRDHGWRRGQCQW

SEQ ID NO: 129493 - protein, 438 aa, unidentified
MSNKVIFNLDEPFISVGIDVGADFSWMSIALPNQQFVGKPYKILHNSIDSLTTAVSKIKEAEESYSLESRIFLESTGIYHYPLFCYLRDKGFNCSVINPIITKNSTNINIRKVHNDRFDSKKAALVGLKPDLKVSLMPSDLALNCRNLCREYYDLMDNRSAYVNKLQGELRMAFPQYLGIFSKVTINTSLTLLETYTSPSAFLKADKQEIIDIIKSTARFGLTYAQNKYNAIIQAATDANQFGYIIDSNIKRIRLYISFIRKYDEEINSILESLHELVDANEDSDFVKQIHLIETFKGAGFLSAVSIMGEIGDFSAFSKPKQLFAYFGLDPAVKQSGKFEGTKVQMSKRGSAIARRVIHTLTLQSISISRNREAKNPVLREYYLKKCDSKPKLVAMGAVSHKVCNMIFAILRDNKPFKIIAPQEHIKQYNSAKCDIAA

SEQ ID NO: 129494 - protein, 402 aa, unidentified
MNCVGIDVSKGKSMIAVMRPFGEVVISPFEVQHTASELSELAKLLKSLDGETRVVMESTGNYHTPVAWLLHDAGLYVSVVNAMLVHDYGNNSLRRAKTDKKDAVKLANYGLDHWLTLPRYVPEEDTRLLLKNCYRQYQQYSKVQTMLKNNLISLLDAVFPEVNRLFNSSPRADGSEKWVDFVSTFWHCQCVSTLSLKSFSARYLKWCRKHGYYFSQEKALEIHSKAKNCIGVMPRNETTKLLVQQAIAQLKATSAALAALKQEMQSLAASLPEYPVVMEMFGVGSTLGPQLMAEIGDVRRFHSKKALVAFAGIDAPPCQSGQMDIHSRSISKRGSAALRRTLFLVMGIYLQSAPLDEPVYQFMDKKRSEGKPYKVYMMASANKFLRIYYASVTAYLNTLARI

SEQ ID NO: 129495 - protein, 350 aa, unidentified
MTIVETPTQARAITGGVDTHADVHVAAALDPIGGLLGVQEFPASPVGYACLLEWLGGFGTVCLVGIEGTGSYGAGLARHITAAGVRVVEVDRSDRQDRRRRGKSDPLDAVSAARAALSGRAAGTPKGRDGQVEAIRALMVAKRTARSERIQTINQARSLIVTGPEDLRARFAHHAVGNLVAELASLRPRPGSMIRYHTLLSLRELGRRVTFPGGQLRRLDALIVPLVTARAPGLLALSGVGHDTAAKLLIAAGDHPARLRSEAAWAHLCATAPIPASSGKVTRHRLNPGGDRQANHALYRIVITRMSSHPPTRAYVNRRTKEGLSKKEIIRCLKRYVAREVYPHLRPGSG

SEQ ID NO: 129496 - protein, 344 aa, unidentified
MENYAGIDVSLELSSVCVVDAQGKILKEAKVASEPDALVEFLETLGFAVKRIGLEAGPLSQWLHGGLKEAGFETVLLETRHVKAALSAMTVKTDRKDARGIAQLIRMGWFSPVHAKSIGAQEIRALLVARKQLLGRLIDVELSIRGILRGFGLKVGPVTRKTFEARIRELVAGQATLERIATAMLSARSALKAEYGRLHKAVLATVRDDAVCRRLMTVPGVGPLVAITYKSAIDDPNRIKKSKSAGALFGLTPKKCQSGEKDVTGGITLAGDEIVRTVLYEAANVLLSRITRFSKLKRWGMDVAKRRGSKRAKVALARKLAVILHRIWVDGTIYRWGEAESIAA

SEQ ID NO: 129497 - protein, 320 aa, unidentified
MEKEKVYVGIDVAKASMDIAVHPSAQHWSFTNDDAGIGQAVSCLKGLAPTLVVLEATGGIELPVTAALAAAGLPVAVVNPRQVRDFAKAMGRLAKTDALDAQVMARFAAAVQPTPQPLPDAESQEFAALLARRRQVVEMLTAERNRLSSARKSVGQRIQSHIAWLEQELANIDGELKRRVQDSAIWREKDALLRSVPGVGPVLSVTLLAALPELGTLNRRRIAALVGVAPLNRDSGALRGHRTTWGGRGHVRATLYMATLAATRHNAAIKAFYQRLRAAGKPPKVAITACMRKLLTILNAMLKHHKHWDHALPQTVGSRC

SEQ ID NO: 129498 - protein, 371 aa, unidentified
MIRSWTDSRRDWKPVAASVVGPRMSLVLRSFLPHPNSCLGTSPYQQGRDTKMAQRSFCGIDVAKDRLDVMVLPEELCWSVANDAAGWAELVAKLRGLRIAASGIEASGGYERGVVRALLAAGMSVRQINPFKLRQFAKACGVLAKNDRLDARMIALFVATLPTRSAQRYAPVERLAELVTARRQLSDDKVAAENASRLFEDAALRRLYGGRIARLAADIALLDKRLAEILAGDAMLARRYALLVSMPGVGPVLAVTLLALLPELGQMNRKQVAALVGVAPYDFDSGRLRGMRCIWGGRAPVRRVLYMAALIGCRCNPQLRAFHDRLAAAGKKAKVVLVAVMRKIITILNAMLRDNVPWVDHSIGRHILPAA

SEQ ID NO: 129499 - protein, 336 aa, unidentified
MKENYFIGIDVSKKNLDCCLLCNGIVIRQDVISNHPKSIESYISIICIEESTDIEQIVVCAEYTGLYIYPLVVACQTNSYKLWLEDPTQIKYSSGLQREKNDLIDAKRIALYAFRYIDRIKLYKKPSASIESIKLLSAELNMLCVDRAKYQAQLSDQKEYMPDYIYKLKSKRLNLLIKELDKAINNIEIEIENIIKNDVLLSRQMELLLSIEGIGSKTSVKMILETQAFTKFTDSRKFCCHAGVAPFSYLSGSSQHSRNRVSQRANKSIKTLLHLAALSALQNKDSELRTYYDRKIAEGKNKMSVLNAIRGKLITRMFAVIRNDQSYDFNYANQFA

SEQ ID NO: 129500 - protein, 344 aa, unidentified
MAIVGGLDIHRRQITYDILDTDTGETRRGQLSPATRLELRAWLARFTGQQADFAFEGTTGWRFVAEEVMDAGFRAHLAEPADTRALRGPKRRAKTDRTDAHHLRELLRAGTLPESWMPPAHIADARTQVRLRRALVGEHTGWYQRIHAILFHHGLPDRSQLLTADGRAWLARVELPAVARQAVELALRMIDHLDTELDLLDSELARIARGQPGCKALQRRYGIGWLTAVAIWAEFGDVRRFANSRQAVRFTGLDITISESDGKRARGHLARQGSPVLRWALHEAAMCAARPSSPDHGYYLQVRQRLGGKRAALSVARKLAREAYHTLRELGDQALVPAELPTAA

SEQ ID NO: 129501 - protein, 335 aa, unidentified
MYLNFVGIDIAAATFTAAWCTEAGWHHATFEQRTTDYGRLVHQLRQIAAPEQTLVVMEVTGTYWLALAWFLHDRGLVVSIVNPTQANLFARLEMQHAKTDRIDAYLLAEFARQRQPAAWTPPPTICEQLQQRLHQRDDLLGIKTQETNRLHALRKNPRAEATVLERLERHIAFLQTEIDVLDGELEDLLNSAHDWTDAAHRLFTIPGMGKIAVAWILVATQAFAYCDTPEQAAAFAGLVPYRRESGSSRRGHRPVGRGGHAALRKTLYMSTLSAARINPCIKSLYNRLLARGKPNKVARIASARKLIHIAWAVVVKERDFDPSFALRSDLVPFEA

SEQ ID NO: 129502 - protein, 427 aa, unidentified
MNEPKYKPTLCVGADVHKDEIVLRAVDKALGHEVLERFRVTNNRPGAQAAAATLAQVAAEQGYTCIEIGWEATGMLWIPFHRYLSTEPLLHPFELELICFNPKLVAKFKDGLVLRSPKNDDRDAFDIAARIRFGELPDTYVPGDFWQGLRRLTRYRYRLSKALSQEKMRFQAYAFLKASDWKRVKPFSNVLGATSAALLTEFTIAELQEMTHDQLVDLIARRGRGKFADPTATARLVRQALRTSYPIDPRMDEMVTASLAAMWDHIRYLNRAMKRLDQQIARYIDLIPNPIITIKGLGAVITAGILAEIVDVLRFKEHKHLAQFCGLTWRKSSSAGFVSQNTRLTKVGNVYLRYYFILGANLLRQHNLEYKAYYWRKYQQVSKYQHKRSLVLTARKLVRLVHALLTKNVPYVRPRMTDPGLEDDGLQ

SEQ ID NO: 129503 - protein, 340 aa, unidentified
MRELYAGCDLHGNNNLIGIVDGEGKRVFKKKLSNDLALVRDTLKPFQGELVGIAVESTYNWYWLVDGLMETGYKVHLANPSAIQQYSGLKHSDDQHDAFWLAEMLRLGILPEGYIYPKEERPVRDLLRKRGHLVRLRTSLVNSLQNILSRNLGRKMNVNDMKAIKEDRVSLLLEMNEDLALAGRVSKEAIDHLTRQIHKIEWVVQKRIALKEAYRYLLTLPGVGKILSLTIMLETGPIRRFATVGDYVSYCRKVPSQWTSNEKRKGSGNTKNGNKYLAWAYSEASEFARRLYPEPRAYYNRKMQKTNAAVAHSALANKLSRAGYYVMRDQVPFQPEKLFG

SEQ ID NO: 129504 - protein, 452 aa, unidentified
MEEKEISMEIVNPNAAGIDIGSRSHWVAVGQGIDDFKEFGVYNEDLYLIAAWLKEKKISTVAMESTGTYWQSLYAVLISEGFQVILFNGKFTKNIKGKKTDIQDCQWIQKLHSIGLLSGSFLPDEATEQLRTYCRHRANLLDSAASASKKMQKYLRLLNLRLDVVVNDTCGQTGLSIIKAICNGESDPAKLASLRHYNCRKSEEEIAKALQSNGRKDYLFALEQELEMYEHFQQKIKLCDIEIEKMLARTIDNDDNKKQHYIEGKPHKRINKNTPKNIDINLVAYQYFEGVDLMAIEGMSHATVLALISEVGLEGIKRFPSAKHFASWLRLAPNNKISGGKVLSSKVPKGSNRLKIALRNAANAIGNLKDSTPLRDFFQRVNFRKGRVSAISATARKLAVINWNMVVKNIPYVNPEGYLFLDQKRKLGMIKRIQKQIDKFGVSDKDLNFATT

SEQ ID NO: 129505 - protein, 314 aa, unidentified
MNEIVRTNVGIDASKAQLDIYVRGQGVFFSVTNDAKGIRAAIRRIQSYDPERVIIEATGRIELAFVVAGHQAGLPLVVSNPFYIRRFAGAVGQLAKSDQLDAEIIAHYGEAVQPRLTELKPEKTRLISDLLARRSQLLGMSTQEKNRISIMPKTLQVSLRRILRQLKAEVERIEQRLDKLIDELPEWQEKRDVLMSVNGVGKVLAYTLLSDLPELGRLNRKEIAALVGVAPMNRDSGNYKGKRHIRGGRAKVRRVLFMASMSAVQSNPKLKKKYQELKAAGKPPKVALVACMRKLLTILNVMVRNGEKWNPEYA

SEQ ID NO: 129506 - protein, 318 aa, unidentified
MMQPILNVGVDVAKDAVVVACAAHSFPVKSLPNQRAPLRAWLKSLPAGSRIGLESTGAYHELLADLAQAHGHTVFLLNPLDTRHDAKAMGTRAKTDRVDAELIARLLAQEHPRLRAYTPPTANQRKLDRLIRRRATIVRVKGTLKLTMRHLGGFAAELKAVMGKVDALLAKIDATMAALAACSPQHQEAQHRVETIVGVGPLVGIGLTNTLERIPFRKADAFVAFIGLDPRANDSGHKTGRRRLSKRGPAELRRLLFNAAMSGIKTKVWKPLYEHSRTQGWSTTASLVIIARKIARTAWSIHHYHTTFHPERITKCLT

SEQ ID NO: 129507 - protein, 344 aa, unidentified
MNITTVGLDLAKNVFQVHGIDDEGKVIVCKTLRRRQMIPFFTKLEPCLVGIEACGTSHHWARQLSALGHAVKLMPPVYVKPYVKRGKTDAADAEAICEAVQRPTMRFVAIKSPEQQSVLFLHRTRDLMIRQRTQVINMIRAQLAEFGITLAKGIQHILKIVPQLIDGKVPDVPELAIKILSTLATQVEDLQVLICDLDKELKVWFQGSKIARRLETIPGIGLITATALAATVADPHQFTSGRQFSAWIGLTPKSNSSGGKERLGHISKMGDQYLRRLLVNGMTSQLRWIRSHPGSHRWAANLLAKKPPKLVAIAMANKAARIAWAVMTRDEIYRKPQMTTGEVV

SEQ ID NO: 129508 - protein, 319 aa, unidentified
MSDKTTIGIDVAKNTLEVFIDTTGQLLHLENSTTGVLELQEALSGFAVTGIIMEATSRYHCTAELMLTAAGLPVAVINPRQIKNFARAMGRVAKSDPIDARIICEYGRRMTPQFRPAKSEKQQYLAVLLTRRRQLIQSRVMETNRLKERCGAYIEQGIKRHIEWLGVEIDMLDAEIKQRLRQDETLAEKRRLLEKVKGIGPITQATLLIQLPELGSLTRRQVSALVGVCPYDRDSGQLRGKRAIWGGRSGLRATLFMAMLSAVRFNPQIKAFFNGLLARGKPKKVALTACIRKFITILNAMFRDQKDWDYGDMSDQHMT

SEQ ID NO: 129509 - protein, 372 aa, unidentified
MGLDVHAETISVAVAEPNGEVVSLGTIPNRGESIAKLMRKLGPPEKLRVCYEAGPTGYALYWQLTKLGIHCEVVAPTLVPVKAGDRVKTDRRDAERLARSYRSGDLTAVWVPDRACEALRDLVRAREAAKQDQLRARHRLGKFLLRHGRRAPAGIRAWSRKHVAWMEQVRFEEVAQQVVVLDYLAEVEHASHRIQRLEGAIEEMVKVMPERMQAVIAGLQCLRGVAKVTAVTVVTETGDLGRFTSPRQLMSYAGIVSSEMSSGSSTRRGGITKTGNAHLRRVIVEAAWSYQYGPAVGAELKKRQQGQSEQVKEIAWKAQHRLCGRYRRLVARGKPHQKVVTAVGRELLAFIWAIGGAIDKARSTSQDTRRAA

SEQ ID NO: 129510 - protein, 376 aa, unidentified
MEHNSEAFIGIDTSKLKNAVAIAEGGRDGEVRYLGEIDTTDGATRKLVAKLAAKYRKVTFCYEAGPTGYGLYRLIKSLGHECSVVAPSLIPKKPGDHVKTNRRDAVGLARNLRAGELNEVWVPDTRHEAMRDLSRAREAAVDDLKSKRQQILSLLLRLGLHYSGKKTWGKSHRNWLASLKLGQREQRIVLEELFGAERQAQERVDRLVGAIIEAVPEWSLAKIVTALMAVRGIDLVAAVTIMAELGDLSRFASPRELMGFLGLVPSESSTGDSVKRGGITKAGNRRARRILVEASWSYRYPPRIGRDKLAKVAAAPEPVRAIAWKAQTRLSSRFRELSKKGKRPTIVATAVARELCGFIWAIHRAVTGPGGQQLVF

SEQ ID NO: 129511 - protein, 311 aa, unidentified
MTQIVCGVDVSKRRLDAHVVPCGAFESFDNDADGIAALAGFCRRHGVQLVAMEATGGYERTPFSLLWEAGIACGMTNPRSVRRYAEAMGILEKTDRIDAGVIARFAIAKELRPTNPPTPRQQRLNALVARLRQVTDDLAVQKRRRGSAINEEMVSSLDEVIALLKRQARALEGEIGSLIDDDPLWARLDAALRIKGVANRTVARLLAALPEIGLHANKALAKLVGLAPLAHDSGAKTGKRHIRGGRAGIRSILFLVADIVRRYDQSLADFHRKLTQAGKPKMVVRIALARKLLVRLNAKAREAREQYALAT

SEQ ID NO: 129512 - protein, 340 aa, unidentified
MKKFLFIGIDFSKSKFDVTVLKSIDQQDFAQAIFLNERKGFTDFLRWVSKQSNVPKQDWVFCGEHTGLYSRELTDFLIKKNLFVWLENPLQIKCSWGIKRAKTDKIDSLEIARYALRFEDKAVACKPANKDIESLRLLFAYRGRLVKNKVSLEVSAKETRRVISRDVTSRFIFENSQHDIDRIKKEIEVIETKMHNIIVSGELKENYLLVVTIKGVAMITAIALIIHTNNFEAFKTARQLACYCGVVPFEKSSGTSINKGNHISQLANKEIKTLLTQCARCAVQYDKELAAYYNRKIAQGKKDRIVINNVRNKLIHRIFAVVNNRIPYRENYLNPFADCA

SEQ ID NO: 129513 - protein, 364 aa, unidentified
MFDRIAVGLDVHARSVVAHGVDRDTGEVFDRYFGKDHSDAEVIAWVGGLPAPASAVYEAGPTGYGLARAFTDAGMSCLVAAPSKLLPPPGDRVKTDKRDAAHLAMLLAAGGVTAVRVPSVGQEALRDLLRAREDVREDLMRTRHRVSKLLLRHGSVYEGKTTWNQTHLDWLAHQRFDQKATQIGFDDCLAAVIQAVAREKHLDEQLEAILPGSGYQPVVAALSCLRGVSTLTGFGLAVEIGDWSRFTGATIGAYLGLVPSEHSSGQSRSLGGITKAGNQHARRLLIEAAWHHRAEYRPGASLRLRKQWEQVDPLIQARADQANRRLHRQWVKFDARKKRPVTANTAVARELAGFCWSLAMMTTM

SEQ ID NO: 129514 - protein, 358 aa, unidentified
MQSNKKSFKGQKIFVGIDVHAKTWAVETLTESGFTKRHAQEASAKVLFDFLSKNFPDGEYHAVYESGFSGFSTYYQLKEYGIHCVVVHAADVPSTQYEQVMKTDKIDAGKLARALRKGDIKPIYIRERENLDDRAVVRLRKTIQKQLSGYKTRVKHLLHTNGVKLPARFDKPGTHWSRAFMNWLKDEVVLLSSTRLSLDLLVNQVESIRKNLLEATRVMRILAATDKYKANYELLLSIPGIGFNVAMCLLTEIYDFKRFGNENCFAHYLGLVPTCHDTGDKHSTGGKTFRGNKLLGPMIIEACWVAIHKDYGLSQAYCSYKQKMKPQLAIVKVARKMSNIIFSVIKNGKKYEPYKWEE

SEQ ID NO: 129515 - protein, 390 aa, unidentified
MMTESYRIFVGIDWGADAHQVWVTDAAGTAVGEQTVDHTGTAIAALVDWIVGLAEGDARAAAVALETPRGPIVDACLARGCQVFAINPKQLDRFRDRFSVAGAKDDARDAEVLSSAVRTDRRAFRHVTAEDPLTVQVREYSRQDTELGEDLRRLANRLRDHLLRTWPELLRLVPAADEPWFWALLKRAPTPVEGRRMRPAQVRQLLRAHRIRRITAEALLTVLRAPSVSVAPGVREGVRVRILDLVDQLPVLARQRRAAERRLATTLEAMTQGPDGESVREHTDVTVLQSLPGIGTRIAATMLAEAADALRDRDYHALRLLAGAAPVTKRSGKSCVVIMRYACNHHLQTALYHWARGCMQRDPRSRAHYAQLRRAATGTRAPCVALRIAC

SEQ ID NO: 129516 - protein, 413 aa, unidentified
MHVEHERCCGIDVHKATVVACVIGPGADGKPVKVTRTFSTMTGDLEALAQWLTEHNVTHVAMESTGVYWKPVYNLLEGQFQILVVNAEHLKKVAGRKTDVADAEWIADLLQHGLLKGSFIPSTQQRAWRDLTRYRTTLTDERSREVNRVQKVLEDANIKLASVASNVVGVSGRAMLEQLIQGQTDPASLAELAKGRLREKRDLLEKALTGTFQAHHRFMLIQHLSHIDFLDEQITKLDAELEAQMRPFQAALTRWDQIPGINLRIAQVILAEVGTDLQQFEDAAHLASWAGMCPGNNESGGKRKSGRTRKGSVWLRRALVEAAHGAARTKDKYFKNLYHRLAGRRGKKRAIVAVGHSVLVTGYYMITRGQDYQDLGANYFDERNQEMVKRQAVRRLEKLGFQVELKLAAPALA

SEQ ID NO: 129517 - protein, 338 aa, unidentified
MKTYVGIDYHKRFSYGTIMTETGQIVKQSRFDNHPESVASFLGSHCEGDCSAVLEAGYNSLVMYDWLDGFVDSVQLADPLKVKAIAEAKIKTDKIDSAILAHLLRCDLIPSAHASSPAARVGKKLLRHRMFLVRLSTMVKNRIHSLMDGFPLIRNTRPMKDIFSKKGVGWLKQIELPKHARQILDSEISLLEFFGLQIKSVEGSIGSFGSKDPRVKNVMTIPGIGKFFSLLIVSEIDDVGRFNSPAKLHAYAGLVPSTYSSGGRTYHGRIIKQGNKYLRYAMIEAVWPALNKCVDLERVYNRISSRRGSNSAKVAAARRLLTIVYRVLKENREYRYRY

SEQ ID NO: 129518 - protein, 412 aa, unidentified
MRRVIGIDTHRTFGEVVIWEDGRLRHVGRVDMTRTALEGFGKKLLATDEVVIEATGNCMAVSRVLTPFVKRVVIANPLQVKAIAHAHVKTDKVDAGTLASLYAAGYLPEIWTPDAATERRRRLVARRYQVVRHRTRIKNEVHSILYAHLIPRCPHADLFGHLGRTWLTSQPLPDDERAAIERHLRELDRLGDDLRVLDQEIAQSALDDAAIKRLITITGVNLAVAAGLVAAIGDIGRFSSPQKLVSYFGLNPRVHQSGLGAAHHGRISKVGRSHARAMLVEAAWATAKAPGPLHAFFVRIRARRGHQIAAVAVARKLAVLCWHMLTKQTDYHWARPALIANKRRAMELQAGRPQKKGNKRGSTYAYNVKALRDQEMRLAQQAEQSYENLVAHWQPRPAKKQARGRLKPAGLE

SEQ ID NO: 129519 - protein, 401 aa, unidentified
MKRLSGGIDVGSVSHHITILGEEDNILYNQKVSHKLNEFTESIKQFKKIERKEKGEISFALEGKNGYSSPFDRILLSKGFTLYNVDNLKLKRFREAFAGEWKDDGRDALMLSKMLKLKQHINSKREKVFIKIEKPSPVTESLKILSRHQQTLIDEKVRLTNRLSKKLLEVCPRILELGKVKNKKIIAILAKYPDFSKYKRITLKSLLKIKGIGEMKAPFLLKRLNNIAYVPGLTDIYKTIISSFTKRISELQEEIKVIDKKLDEIGEKNKAVKHLKTIPGVATKLASRFIGEVGDIHRFPSEKQLAIYCGVACVNNDSGKITKAKAVYKANKIGKQTLITMAGCSIRFIPQCKYYYLKKRTEGKSHNHTLRCLARQMIKVIHRMLTEDRDYIIKKALKKVA

SEQ ID NO: 129520 - protein, 357 aa, unidentified
MIAMKYYTSTTEFNCGIDLHARQMYVCVLDRTGKKLVHTNIKNNDFDFFLKLVAPYRHDLTVCAECMFGWYWLADACQAAGIPFVLAHALYLTAIHGGKNKNDRLDSEKIAHLLRTNLIPPAYVYPAAQRPLRALLRQRLLYVWNRSELLARLQSHQLAYNRPTPRQTLYNRQAWSQQLLTAEPDPVRQLALQNDLALVRHYDAQLALLEKELLKLTKQTAGRDFTLLQTTPGIGDYLGLTILHEIGDIARFPTVKDFLSYCRLVKGTVASAGKIKGLRGAKLGNPYLRWAFGEAAVVAKRDPLVIGPLAQRLEARLNNKFKANTILAIKLARAVYFMLKTKTVFDPERLVAALSKN

SEQ ID NO: 129521 - protein, 373 aa, unidentified
MPKYSTAFGMDVHLRSATVCALDADTGEAVTRRFPGNPWGEIAGWMEGFPGPSLAAYESGYLGFAPQRELAGLGVECAVAAVSKIPRSAADSASKNDRNDAARMAKAILAHDISPVWVPSPEIEGIRDLAGAYDGATARLATAKQRLLAFLGKRGYAYGGTTPAGNPRKYWTYDFLRWLDKVRPEDDGGIRTLAALRNEVEAAAEARSDLLSEYRAAVDASPIAAEVAALQSIKGCAFALAAAFSAEVGDFTRFRSGRQVTAYFGLAPSQRSSGDSVRLGGISGAGNALVRKLAVEGSWCYAAARHQPKLMPRDTGVPLEIRMHGRKGSERLLRRREGMLARGMPAAKANAATAAELVRWLWALGMMCREGAE

SEQ ID NO: 129522 - protein, 340 aa, unidentified
MTVIIGIDPHKASHTAVAIGHDERQLAEITVRATCQQTDRLLAWAEPLGERTWAVESAGGLGYLLSQQLVGAGEQVLDVPATLASRVRVLGTGRSNKNDPNDALSVAVAALRSPGLRPVEPANHTEVLRLLAKRNHELGRLRNIVVSRLHAALANLSPGGISKELNASDAVRLLNDFDPITPVERIRYDLAHELLDDVERHDVQLKESHKRIKTAVRASGTSLTELYGVGPILACELIGYTGDVRRFTTRDQFASYAGVAPIELSSGGRIVHRLSRRGNRQLNHAIHMVAICQIRQTNSEGRVYFERKVAEGKTKREAIRSLKRHVSNAVYRQLLIDAQK

SEQ ID NO: 129523 - protein, 315 aa, unidentified
MDVTPTATGFVGIDVGKAHLDVYTHPAGEAFRVTRDPPGLDDLIDRLRLVAPALIVLEATGGYERVVVAALAGARLPVVVVNPRQIRDFARATGRLAKTDRLDAQVIARFAAAVEPKERPLPDAAAREFAELIARRRQLVEMITTETVRSHQVMGAAVRARLKAHLDWLSQELSQFDRDLDAAVRASPVWRERVTLLTSVPCVGATTARTLTADLPELGTLDRRGIAALVGLAPVAHDSGQHRGTRHIRGGRGSVRAALYMAAWIGTRWNPVLKATYQRLIAAGKPRKVALVACMRKLLTILNAMVRSNTPWQAI

SEQ ID NO: 129524 - protein, 323 aa, unidentified
MTRTICGVDVSSQSLDARIGNQGAYAQFPNTAAGIDSLASFCHTHRVDLVAMEATGGYEQRALALLSKQGLPVAILNPRAVRQFAQSMGQFEKTDRLDAGMIALFAETKNSQPVCLSSASQQQLRALVTRLRQLTEFRTAQKNQSRLVADPAVVGLFKQFLDVVNRQIDELEIAIAAIIAADPLWHQFDQAFRTIKGVADRTVTRLMAEMPEIGSLSNKTVSKLAGVAPLASDSGKHQGKRAVRGGRASVREILFIVASVVGRYEPDFIAFQKRLSAAGKPRKVIRIALAHKLLVRLNAKARDVRRQLALAQACEPGKECVAV

SEQ ID NO: 129525 - protein, 452 aa, unidentified
MAQRKRTIPLKPGKSRALTITHPNAAGIDIGSASHFVAVPPDRDDQPVRQFPSFTVDLNAVADWLDACGVDTVAMESTGVYWIPLFELLESRGFTVLLVNARHVKNVSGRKSDVLDCQWLQQLMTYGLLSGAFRPTEQVCVLRSLWRQREMLLRTQSRYVQHMQKALTQMNIQLANVIADVVGQTGQRILRAIVAGERDGHVLAAMKDVRIHASADEIAKSLQGNWRAEHLFALKQALQAFDFIDTQLAECDMQIDAQLQSLQVHEGAPAKGKKRSRSRNAPKFDLRARLFKMCGVDLTRIDGIDVTTALAVISETGADMSRFASVAHFASWLGLCPGTKITGGKVMSGKTKRVANRAAQALRLAAAGLRTSQSALGAYFRRMCSRMDKPKAVAAAAHKLARLIYTMLTRGEEYTDRGQAYYEERYRQRVLHNLAQRASKMGMKLVAVQSPA

SEQ ID NO: 129526 - protein, 350 aa, unidentified
MLRKSLPREVATIGIDLGKSTFHLIGLDRRGAIVLQLKVSRAQLERRIANVPRCLIGMEACSGAHHIGRQFEALGHDVRLIPAQYVKPFLKSHKNDYRDAEAIAEAVQRPTMRFVRIKTPEQMDLLALHRVRSRLVGQRTAATNQIRGFLIERGITVRQGLMPLRKALPEILSSGALSPRMVALIADLAADWRRLDERIEGVSADIESLAEQDASCQRLMTVPGIGPIISSAVVAAIGNGTGFKQGRDFGAWLGLVPRQESTGDRTILGKISKRGNKYLRTLFVQAAHVVLVRRPGAARRGLWPWIAQASKRLHRNMLAIALANKLARIAWAVLARGNAYQPRIAADAAS

SEQ ID NO: 129527 - protein, 396 aa, unidentified
MLYLAIDQHRKQLTVNLRNEAGDVILKRQVSTEWARVREFLEEVRNRSVPEGGFVAIVEVCGFNDWFLKLLADYGCKDIVLIQPEKRSKNKTDRRDANALGELLWTNRQRLLAGKKVQNVRQIVPPSPRDAEDRQLTALRQRVGRLRTRAINRVQHLLLKHNLQQECPTKGLQTQAAKRWLAKLPLGRIDRMELDQMLAQWQLLDQQLEELEAEIVPRQAKSLTAPIIATIPGAGAYGSLALASRIGSIGRFPRARSLANYFGLTPGCRNSGDATRRLGSITKEGSAIARFILAQMVLHVLRRDARMKEWFVRIKRRRGAKIARVAAMRRLATIIWHMLKQQQPYRPGGKREKGGGPEDACLLPDRRAFLEALQERARGGKQKGCPGLTTEAAARS

SEQ ID NO: 129528 - protein, 362 aa, unidentified
MDDGSTEQMKMTAGLDLGDKYSYLYVLDNQSGEMIEESRLRTTPHDLRRRFDSAEQMKVAIEVGTHSNWVNRILKECAHEVLIANPRKTRLIYGDKHKTDKLDAQKLARLARVDPELLYPIEHRGEQSQTHLALIHSRDALVRSRTQLINHVRGTVKSFGARLPKCSAESFHKKVADALPSELAEALQDVVKTIGSLTVKIRDYERRIERVCKEGYPQETELLRQVAGVGALTSLTFVLTLEDPDRFKKSRAVGAYLGLVPGKDQSGEHDPGKGISGEGDEMLRRLLVSSAHYILGPFGPDSDLRRHGGKIAQRGGKNAKKRAAVAVARKLSVLLHRLWVTGEAYEPLRNARLSGTLGEEVA

SEQ ID NO: 129529 - protein, 341 aa, unidentified
MKNLFIGIDFSKEKVDVAIIFADGLTETAARVFNEFKTTVSGYRQLVKWVEQNSYGIDPSLWLFCGENTGGYSNGLCKFLYGRGYDMWLENAKSIKDASDLRRLKSDRADASMIAEYAMRNHDKAVMYKPLNESLEQLRELFLFRQTLVRYRCSFQVRREEKRLTMDKSPVKTMISQIGRHMVTTLEKEIEKVNKRIADLIKSDDELTEVFTIVTSVPGIGTQNAVCLMVYTDNFRRFNYDSRKIACYYGIAPFGKDSGTSVHSDPHVHYMANRQIKAMLTQAALAAVNYNHVIARYYKRLVERGKKKQVALNNVKNKLVHLVSAMVRNRQLFSPEYKISA

SEQ ID NO: 129530 - protein, 412 aa, unidentified
MAEVTFPQLIQRACGIDVHLKVVVATIDGAGIQRETRSFKTFTSSLNELKEWLLSNGVTHVGMESTGVYWKPVYKVLEDSIPNVWIVNARHIKNVPGHKTDKMDSEWICKLLLAGLLKPSYIPPKEQRQLRDLTRYRNKLIQQIASEKNRMMRILEDCNIKLSSVVSNTSGTTATSLIDMLCEGKVLTLDDINSVYHGKLSASPEELLEACTGFVEEHHIYLLQMIRKDIDQTQTLVDDLSERIKRLLSKYENVLELLREIPGFSTKVVEDLVSEIGLDMSHFPSEKHLSSWAGLIVRVKKSARITHGNKQVKAVITEAAWAATRTKNTFFSERYHRIAARRGKKRALIAVGHSQLISVYLILSTGSRYHELGAQYMQSKIEQKRKVYLSSELKKLGYNVSLTKVPQAVTLN

SEQ ID NO: 129531 - protein, 381 aa, unidentified
MEKASGLDVHKDSVFACILDEQGNKIFEKRFGTLTPELTSLRDTLVSHGCGRVAMESTSIYWMPVWHVLASDFSLKLANPYFIRQLPGRKSDVKDAHWIAQCLQKGLIKGSFVPEGVLQEMRQYGRQCFRLTKNRVRLEQQLDNQLQRCNIRFSNYVSNQGNNVSLRKIINALIQGERDRGKLARLVHGRIRNKHGDQVIGDSLDGVLCPTDIELLKQCMEQLDLFEKQQAACLNHLEELADKYYAREISLLCTIPGIQKYSAMCILSEIGNDMGAFGSASQLVGWAGLRPRNDESAGKIQSRKTLHGNKYLRKSLIQVSWSAARSKRSFLGKKYNQLSRRMKSQKALMAITRKILVIIFNVLKTGQPFDANRNLQAVTPG

SEQ ID NO: 129532 - protein, 341 aa, unidentified
MNIITVGIDLAKNVFAVHGVNDNGKPVLVKPKVSRADLLPLIAQLPPCLIGMEACSGAHHWARLFRQHGHTVKLMAPKFVAPYRMTGKRGKNDAADAAAICEAVTRPNMLFVPIKEEHQQIILSLHRTRQGFVEERTASYNRLRGLIAEFGIVLPQKVACLRREIGAHLEDLPGYANRCVADLLTHTDRLDERIAEYDRAITQAARDDARSKRLMQRPGIGPVTASALLASIGGGHDFKNGRQVAAWIGLVPGQYSSGGKARLGRITKAGDSYLRSLLVLGARAVLNSIGDKQDGFSRWARSLQERRGYWRAVIAIAAKNARIAWAVLKYGEDFKLEPCSV

SEQ ID NO: 129533 - protein, 317 aa, unidentified
MTTPEIFVGIDISKHRLDVALNPGDHTFHCPNTEAGIHQLLARLEKLHPRLILLEATGGYEFLLVAALREAGLPACFINPKLVRNFARAVGIAAKTDRLDAKVLALYASVTKPQPRPLPEAAQQELKLFMTRRRQLLEMVQMEKNRLDPMPLPRIVQSIRQTIKSLEDQLAALSREIEDFFQQHPLWVELALILTSVLGIGRLTALMVIAYLPELGRLNRKQIAALAGVAPFNRDSGTYRGQRHIEGGRQRLRQALFMATLVAAHRNPVLRSYYQNLLSRGKAKKTALIACMRKLLTILNAMVRKQQPWCPCAPITS

SEQ ID NO: 129534 - protein, 344 aa, unidentified
MTSNDYIGLDIHKKTISFCAKAQDGTILDQGTIVARRDTLVAWAKARPRPWIGAMEATLFTGWIYDLLKPLALELKVAHPAMLKAITAAKKKNDKVDARTIADLLRCNLLPECYMAPSAIRDLRRVLRYRNLVVRQATRMKNRIAGLLMETGTPYNKERLHGRAYFSELLGSLREVPRSVVELLQLSRGQLEFFATIQRRLLKGLGQNPDLSERVARLQTIPGVGEIMALSWALEVGEVKRLPSIAQAASYCGLTSAQHNSAGKEQRGPISKQRNKHLQTILIEAAKLAPRHNPQLAVVHERELQRGDRNQATLAVARKLVAYLMAVDKSGKPFAMRASGEEAA

SEQ ID NO: 129535 - protein, 330 aa, unidentified
MKNWNVILGVDVSKLTLDICWAEGNLHVKIDNCTKGFNVFKKWCKIHEINLNDTLIVLEYTGGYEYRFIQFCQSLSIPYCRIPGLEIKQSLGMVRGKSDQVDSFRISQYGQEKIKRLTPSKPLNNNVLNLRQLLSFRKRLVRENAGWESTVKERKHMYPIKNADTIIHTAMAKIKANKKYIIQAEQEITTIIKSDDSWLQSYRIISSLKGIGKVNAWMTLAYTENFSSFTDARKYAVYVGVIPFEHTSGTSVKGRKRVSHLAHKELKQELNQAAKTAMFHDPEIRAYSERKLKDKSYSLVLNNVKFKLILRMFALIKRGEMYVENYKRAA

SEQ ID NO: 129536 - protein, 468 aa, unidentified
MKKLDPQHSKSNRQGQPTTMDEDTEGLPVIRPLVAGIDLGSEQHWVCAPRRDGAGREAAVFGATTPELEKMAGWLKERKVESVAMEGTGVYWIAPHEVLERHGFEVALVNTRELARVPGRKKTDRVDARWIQRLHSCGLLRGSFRPVEQVCILRTYVRDRSILVAETADWMRRMQKSLDQMNVRVHRAVSDLNGMTGMAILRAIVGGERDAVKLAQLRDRRCRKSAEEIAEQLTGHWREDHLFSLEQALKVYDGLQERIADYDRKILEKVGEMTREERRGLPAPELKNKEKARCIQRRGEEPLRQALYRMSGVDLTAIDAIGVGAVEVGLSEYGPDLSRFPTENEFVSHVNLAPRKPVTGGKPLKKKKRGSASTRTAGALRMAAVSMRNSKTALGAYYRQVARRIGGDVAVFATARKLAQLIYRLLRWGQPYVDEGAESYEKRYTAQRLQRLKASANNLGYELTPKTA

SEQ ID NO: 129537 - protein, 341 aa, unidentified
MKLYGGIDLHSNNSVINLVDEDGEVVTKRRLSNNLREIILFLEPYSDSMTGLVVESTYNWYWLVDGLMDAGYTVHLANTAAIQQYSGLKHSDDESDANWLANMLRLDILPEGYIYPKEERMLRDLLRKRLQLVQQRTQNLLSIQGIYDRHLNIKLNADRVKRLKQDQIEEDFNDTNVCLAVGGTLVIQQCLSKQINQIELSLKRQLKLRKEFIGLTSIDGIGLILALTIMLETGDISRFKTVGQYASYCRCVNGGRYSNGKKKGKTNTKNGNKYLAWGFIEAAHFAIRFNDVVKRYYQRKMSKTSVTVARKTVAHKLARACFYVLRDQVEFDVNRVFGCIK

SEQ ID NO: 129538 - protein, 318 aa, unidentified
MRQLEDNTSVAGIDVSKAHLDVGLLGSGQVRRFAHDAIGFRDLGDWLQTQGITRVGLEATGGYERALMQHLQSSGFTVIRHQPLEVRLFARLQRVRAKNDRIDALVIAAITARTATPSRPISPALLELAEWLTAYEQVADQIARLKTACEHVHLDALKRHYEELMRHCKDSKARILGDILARIRMHPQLCQRYDLLRSLPGVGEVVAAVLVVRMPELGELSRGQAASLIGVAPFDRDSGAQKGSRRISGGRERPRRFLYIAALTAKRNSQTFASFAARLKDAGKPPKLVNVAVMRKLIEAANLVLKRQTPWQSEMQTT

SEQ ID NO: 129539 - protein, 340 aa, unidentified
MRLYTGIDLHSSNSYLAIIDENGKRVFKRKIPNDPEQILSALAPYKDAINGIVIESTYNWYWLADGLMTEGYKVHLANPTEIKQYKGLKYSDDQHDAFWLAEMLRLGILPEGYIYPKEDRPIRDLLRKRSHLVKLRTSLIISLQNIICRNNGFRLKTNDVKALNTDRVAPFLEQNEDLALAGKISKESIDFLTRQIKAVENVVEERMELREPYKKLLTMQGVGKTLGLTIMLETGPISRFAQVGNYCSYCRKVSTKWISNDKKKGKGNKKSGNKYLAWAFSEAAEIARRYYPEARAFYQRKMQKTNAMIAHQALAHKLARAAYYIMRDGVSFMPEKIFRS

SEQ ID NO: 129540 - protein, 320 aa, unidentified
MTSRGAEKMKNDAIGVDVSKDHLDAHRLADGAIRRFANNKGGHKALIKWLAETPLYRVVFEPTGPYHRAVERALGASGVPFVKVNPRQARRFAEATGKLAKTDRLDAAILARMGALLELEARPARSEVLLELKELYVAREALVKDRTAAKNRGKALTLSLLKRQNAQRLEQIDRQIATVEAAILQIVEADASLADRFDILTSIPGVSSITAFALMIAMPELGDLEAGQAANLAGLAPIARQSGRWTGRSFIRGGRADVRQALYMPALVAARFNPDMKAKYAHLIQTGKPAKVALTAIMRKLVVLANALLKANRPWTPRTA

SEQ ID NO: 129541 - protein, 428 aa, unidentified
MLFVGDDWAEDHHDIELMDASGRVLARARLPEGAAGMARLHAMIGEQLGDDAEDAGVAVGIETDRGLWVQALVAAGYEVFGINPLQAARYRQRHSVSGAKSDPGDSHVLADMVRTDSHQLRLVASDSEGAQAVKVVARAHKTLIWERTRHVQRLRHQLRDFFPAALEAFEDLDAPDTLELLAKAPDPASAAKLTTAQVSAALKRARRRNISDKTAVIRAALRGDQLTQPPAVTAACAAVIRSLVAVITTLGEQIKVLEKQVDAHFSQHPDAEIILSQPGLGPVLGARVLAEFGDDPHRYASSKARKNYAATSPITRQSGKKKTVMARYVHNDRLRDALDGQAFAALNASQGARACYDAHRAAGAGHRAALRHLANRLVGILHGCLKTRGVPVRAGRSFALQTGPPGKETIKSSRPLCQVISRLTPSAK

SEQ ID NO: 129542 - protein, 411 aa, unidentified
MTSQTLMAGVDVHRKTNTYCLMNEVGQEVMPRFTLANNRPGTEVLVTKIGQAMEANAFEQLKVAAEATGWYWFHLFEALRTAAYPTELFLLNPRLTANFKKSYMDMDKSDDLDAFVIADRLRWGRDVEHPFQYDEKLLALRFLTRYRYRVVHQLAGEKAYCLSILYLKASEYANADKPPFSNLFGAASRAVIQEFASMEEVAALPFDELVEWLDQRGKRHFADPQETARRLQAVARNSYPLSPALQAPVNLVLNLSLKNISQLEGLQKRLDCAIAERMETIPNTLTTIPGIGPVFAAGIIAEIGGIERFHYDEAKVAQFAGLKWRKSGSAEFEAEETPLTRRGNSFLRYYFCEAAFSVQSQVSEYHAYYQRKYNEATKHKHKRAIVLTARKLVRLVVRLLTNNQPFQVRKA

SEQ ID NO: 129543 - protein, 368 aa, unidentified
MMIIGVDYHPSDQYIAFADTETGECGERRLNHDDGEAQKFYRDLQSRGASVRVGMEATGYSRWFERLLAELGIELWIGDAAEIKTRRVRKQKTDSNDARLLLKLLLEDNFPRIWVPSPENRDLRQLLWHRHRMVQMRTRIMNQLQALAMNEGQRRKKKLWSEQGRAQLEKLPLAPWASRRRKDLLELLDRMNPTIEELTRAIEREARKRTEVARLMTHPGVGPITALAFSLIIGTPKRFGCGKQIGSYVGLIPAEDSSAGHQRLGRITKQGSTLLRFLLVEAAQAAARCDADWRQRYMHLAMRRQRNIAKVAMARRLGVRLYWMWRNGWEYSEWVKFGSNAGQLGTGHSVHSNAVHMNGHPAPLREGV

SEQ ID NO: 129544 - protein, 344 aa, unidentified
MDAPTRNGFDLAKNVFQVHGVDERGHVVVRKQLRRDQVAVFFANLPACLVGMEACGSAHHWARKLQGIGHRVRLISPQFVKPYVKSNKTDAADAEAICEAVARPNMRFVPIKTMEQQAVLSVHRVRQGFVKARTAQANQIRGLLTEFGLVLPQGISNVMRGVPQLIDVATDLPASMRQLIARLLENMKALDRQVKELEAQIKAWHQGSELSRKLEKIPGIGPLTASALVASIADARSFKNGRQLAAWLGLVPKQDSSGGKAKLLGMSKRGDTYLRTLLIHGARSAIVAAQRKGKPNVWLSGLLARRHPNVAAVALANKNARTIWALLAHECEFRPDYLPRPATA

SEQ ID NO: 129545 - protein, 430 aa, unidentified
MSLDRSVEQEPQFAAFVGVDWADQKHVWSLQGAGSQKRESGELEHAPEAVEVWVAQLCQRFAQGPIAVALEQSRGSLVFMLSKYERLHLFPVASTMAGNMRDALYPSGAKDDPRDADLLLDLLLKHRDKLRRLSPDTEATRRVQNLVEERRKLVDEKTEQINRLTSHLKIYFPQMLEWFDRLDREAACALLERWSTLEELQKVPPAKLRTFFCKHHCRDQEVIGRRIVGIRQAVPAIRDRAVMEAKSAVVKVITQMIRILVQGIAELDRKIEEEAAAHPDFFIFNSLPGAGPALAPRLLSAFGSQRTRYGSAQEVQAYSGIAPVIERSGKKKWVHFRWAAPKFLRQSFHEWAGRSITQSQWARSYYEQQRQRGKGHHAAVRALAFKWIRIAFRCWKDSVAYDESRYQATLVRRASPLSASMVASTLAKTL

SEQ ID NO: 129546 - protein, 352 aa, unidentified
MNTQSTDWTGQTLYAGIDIHKSKWVTTVRTRDLQLKTFVTGADKQALLKTFLHLYPKATIEAVYEAGCFGIHLAEFLNNHGIKTIVVAPHLIPTAPGLFVKTDTIDSRKLASELAKGSLSGIYLHRTEDLYDRGLLRKRRQLVKRRVQLQHQITSDLRYLGFDTESPIKQSWSRWLIAELRTMQFPSEHYQLAFQMMVEDYVTIRAQIRQLDQVLVEMANSDKYRRQVELLRTIPGCGRLSALTFLVELGDINRFSSAEKFASYLGLTPSEYSSGESIRIGSLTGMGHAALRTILVQMAWSGVKKDPVLLARFQRLCIGKSKTQAIIPIAKSLGNRLRHILIFQEPYVIGVN

SEQ ID NO: 129547 - protein, 424 aa, unidentified
MPYRIAGIDVHKMLAVVVSDVEVDGEYQFKRRLFGSNPEQLRSLAEWLLEQEVEEAVMESTAQYWKPVWGALERFWKPIRQKREGAGPMSGALHLAQAQSNRGPQGRKRDFPDAERLVKRLVARELTLSFVPDGEQRLWRTVMRRKYQLTRNRVQLQNRLECLLEEAHIKLSSFVSNLLGVSARRMLKALAEGETNPASLAALADRRLRATPEQLCDALGACMDLNSVYRRLLKMMLEELRLIEEHIGKLDQEMADLLHPYQDQVKRLAEVPGLGVDSAQQILAEVGAHAAAFPSAKQLSSWVGACPGDNQSAGVNYNHRSPKGNRAMRRILNQSANAAVKAKGTIFEVVYRRSVSRLGHKQTIGAIAHRQCRLIWKILHDGVRYEERGPAVSKGSKQRRAWRMIRELRCLGYRVELENSNCPT

SEQ ID NO: 129548 - protein, 345 aa, unidentified
MSKLSPDMSRVTRIGLDLAKHVFQVHAIDAAGIELDKRAIRRGKLIAYFAALPPCTIGMEACSSSHHWARQLEALGHKVMLIPPIYVKPFVRRQKTDAADAAAICEAMGRPGMRCVPVRTIENQAAKMVHSVRETLSGQRTQLMNALRGHLAEVGVIAAQGHQHVRKLAALVEESCAHIPACVRAALMPLVDRLADIEAALSAIDKRIAAEAKADADARLLMTIPGVGPIKASAIVATIGEQGIHQFTGAKNFAAWLGLTPGQNSSGGKQRMGRITKMGDRYLRKLFVVGAHTVLIHADKHDDRMRAWAKELKATKKIKLAAVALANKTARIVYAVLATQKPYAA

SEQ ID NO: 129549 - protein, 355 aa, unidentified
MRILGGLDVHRSQITYDWVSVDGGEARRGRIVPASRVELRSWLEGLPCSEGDFAVEATTGWRFVVEELGRAGFVAHLAEPADTSAARGRKRRAKTDRADARLLRELLSQGRLPESWIGPSHILDLRETTRLRHTLSAQRTQWYQRIHADLYHLGVAKPQGGLAAVSREWLKTIDVPAAVRYAIGVGLAEVDHLNAVIRPIDRWLGAYSRLQPGCRALCENHYGVGPVTAATILAEVGDVRRFHDGDAIVRYTGLDITVHSSDTKTRPGRLARQGPPALRWALYEAAMSASRAGSPDHAYYQRVKQRKGGKRPALSVARKLIRRIRHTLIELDDQALAPVDPHRLPNLEETMHTAA

SEQ ID NO: 129550 - protein, 467 aa, unidentified
MAKKAKKVRKDKRLELKIVNPDAAGIDVSSTEMQVCVPLDREADNNRKFGAFTEDLNKIGDWLVGCRITTVAMESTGVYWVPLYMHLVSLGIEVYLVNAASVKNFVEEKTDEVDAESLMLMHAYGLLKASYQVNNFAREIRNLSRHCDSLTRAASKEIQHMQKSMELMNIKLAVVISDIAGKSGQEIIGAIISGERDAVKLSSLADWRCKTPVEIIAKSLTGNWSEDLLFALKQSYDLYHFIQKQIIECEQKIQELAHKYSVNLPTQSNEFIRSRKQAHAKTKVAFDVEEYGHKIFGVNLMRIPGINQGTLLKLIGELGHDFAEKFETYKKFCRWENLAPNNKITGGRIISSKLPKRKNPVGQIFREIAVTMSSSKSPLGEYYRRLRNRKGPMGAIVATANKISKIVYTMVKNKTEYDENLIKISDIGFLTRKLKNMQKGVTKLQAQIESIQKENDEYIANLVRVAV

SEQ ID NO: 129551 - protein, 342 aa, unidentified
MRIVVLGIDLGKNLCSLAGLDETGAVVLRRRMKRASVLPFTAQLETCTVAMEACCGAHHLGRQLVAQGHVVRLMSPAYVQPYVKAQKNDERDAEAIAEAATRPTMRYVEIKSEAQLEVQSLHRVRGRLVAERTALINQLRALMLERGITVPQGRRKLERYLPEILADERNGLGPRLRRLIEDMREEWRSIDQRIKGYDDELAERVRNEDTAKRLIRIPGIGVLTATALVAAVGNAQTFSCGRDLAAWLGLVPRQATTGGKPRLLHISKRGNGYLRMLLIHGARTALPGLAKKDTPLGRWVKALLARAHRNVVTVALANKLARIAWAVLARDRQYVTVQAIGK

SEQ ID NO: 129552 - protein, 415 aa, unidentified
MSDPFRFFVGIDLGSASHQVCVVDAWGQTLGERGVAHSGADMAALFQWLATLTQGADPQSIAAASEMPHGAMVEAFLERGYAVFAINPKQLDRFRDRFSVAGAKDDRRDAFVAAHALRTDRYAFRPLALGDPRLLRLRELGRAEESLQQDLRRAANQLWQLLQRYFPGLLTLVPAADEAWLWDLLENAPLPEKAARLRPSTLQRILKKHRIRRVSAQQLAELLAQPALPLAPGANAAIAEQVLLLLPRLRLLRKQHTQLGRNIETLLEQLAGDESFKQHRDVQILRSVPGVGRIFTATVLAEAAEPLAQRDYRVFRTVSGVAPVTQQSGKTKLVSIRRACHPRLRHAVYHSAARYAQDDPRGQQHYARLRARGCSHARAVRGVADRFLALIFALLTHNQLYDPCRRALLDPAPTC

SEQ ID NO: 129553 - protein, 402 aa, unidentified
MNAVGIDVSKGKSMVAIMRPFGEIVSTPFEIKHTTSDIHSLVELINSVEGESRIVMEHTGRYYEVLAHQLSEANLFVSTINPKLIKDFDNDSLRKVKSDKADAVKIARYALDKWQNLKQYSVMDELRNQLKTMNRQFGFYMKHKTAMKNNLISILDQTYPGVNTYFDSPARSDGSQKWVDFASTYWHVDCVRKMSLNSFIDHYQNWCKRKKYNFSQSKAEEIYGKAKELVPVLSKDAITKLIIKQAVDQLNSASTTVESLRTLMNETASKLPEYPVVMAMKGVGTSLGPQLMAEIGDVSRFTHKSAITAFAGVDPGVNESGSYEQKSVPTSKRGSSDLRKTLFQVMDVLIKTHPQDDPVYQFLDKKRAQGKPYYVYMTAGANKFLRIYYGRVKEYLSSLPES

SEQ ID NO: 129554 - protein, 352 aa, unidentified
MILVGCDLHSRKQQVAALDTDTGEVLEQELAHTGDAVEQFYRALPRPVTVGIETTGYTLWFHALMQQLGHTLLIGEAAKIRAMVVRKTKTDRRDARHLLGLLKDDRFPRVWIPDPATRDLRALVTHRARLVRMRTMVKNSLQAIALNARVALGPSLWTRRGLAQLQALPLPIHTARRRAESLELLTWLTIRIDGLDARIEEAAAADPGAQLLLTHPGVGPLTALSTVLVLGPVTRFPSSKHVVSYVGLAPAVDASADKYRLGKITKQGNALLRWVLGQAAPLAARRDAELKRRYFAILRRRGRPKAKVALARMLLVRLYIMLRDQIDYEEFRRRGHPRPSRNDLAPATGSMP

SEQ ID NO: 129555 - protein, 428 aa, unidentified
MDTPASNPDVVAWVGLDWADQRHEIRLQAAGSARAESFSVEQKPEALHAWVAQLRTRFPHRMIAVALEQSRGAVIYALMNYDFLLLYPLPPKALARYREAFATSGAKSDRTDADLLLELVRAHGDRLRAWQPDDALTRQLRLLVEHRRKTVADRTRLTNRLTALLKTYFPQALEWAGDLRCVAACDFLGGWPTLQAVQGASRSELRRVYHAHRRLSAEEFAQLWEQIRHAQPLSQDRALIEASALMTQTLVEQLRAVIAALARLDRTLEDLFGQHPDHGLFDALPGAGDALAPRLAAAFGTDRHRYQSAEELQQFSGIAPVTVASGKMCWVHWRLACPRFLRQTFHEFADASRKKSLWARAYYEQRRQHGASHHAAVRALAYKWIRILYRCWKTSTAYEESRYLRALQRRRSPLWLAATQLSLQEARP

SEQ ID NO: 129556 - protein, 413 aa, unidentified
MLKICYNICCGIDVHKKMLVATIATTNERKVTTYQTKQFSTFTKDIKKLKQWLIDNNCKDVCMESTGKYWIPIFNILEDSCNVTITHPKYVKAIQGKKTDTKDSVWITDIFKHGLVEGSFMPPLAIRQLRDLMRYRFKLVNCKSSEKNRFQNSLTVSNIMISNILTDTFGKTSKSILELILSKEDNVSMEEIKPLLRKNLKSSPQEILDSVEGNLTHEQNSKMKVCLNHYDNILDCINQIEQAILPLIQPFQNEINLILTVPGVKDISAITILSEIGADMSVFKDAEHLCSWAGLTPQCNESAGKKKSVHISRAGIYLKPLLIQCANNAIRDKKCPYFKLRYDAIKKRRGHKRAIIAIARMLLTCIYHMLSKNEPFNHQIYEQLSQKNFKSKDKKLNINNAIKFLESQGYKVS

SEQ ID NO: 129557 - protein, 406 aa, unidentified
MTLDQEPGQVCERVYGGVDTHEDTVHVAVISGDGRDLADREFPTSPAGYRRALAFIASYGEPIAVGIEGTSSYGAGITRAAIQDGIAVCEVVRPERAERRRLGKSDPIDAYQAARAAISNHRIAPAKDASIDGIRALHNARRSAMKARTAAMRQIHQQLVTAPAPIREKYRQLGGDKRVQVLAGLQVRSAPAPLQRAVLLALKSLARRCVDLQREHHRLGIELDQLVTAANPGLRAVYGVGPDTAAQLLLTAGGNPARLRTDAAFAALCGASPIQASSGKVTRHRLSRGGDRAANNALYRIAVVRMAGDQRTKDYVARQRQTGFSSKEIQRKLKRAIPREIFRNLTTPVTVPAIDDLRPLRQHKNITLTTAAHHLDVWPTTISELERGTRRNDQLATTYRQWLKTA

SEQ ID NO: 129558 - protein, 377 aa, unidentified
MQPIEPFNPTIHLAIELSTSTWLVAAQMPTSEKIRLHRIHAGDAAALLELIKKLQSHVAAKLGCVEVIVASCFEAGRDGFWLHRLLIAHGVANHVMEPTSILVNRRAHRAKTDRLDAQGLLRVLVAYRRGDHHVCSVVRVPSPEEEDAKRQHREREHLVQERVRIGNRIQALLATQGIRKRLSLRSWDRDLKALQTGDGRPLPLHLHAELNRLRRRLVMTLEMIREVEAEREQELVEKKNDPATDTIRALCRIRGIGKNVATVLTREVFYRSFSNRRQIASYVGLAPMPFQSGEVDRDRTISRAGNPRARTTIIQFAWLWLRYQPDSALARWFRERVGNLQGRTRRIAIVAMARKLLIAIWRYVSSGIIPEGAHIAA

SEQ ID NO: 129559 - protein, 318 aa, unidentified
MSNKVIFNLDELFISVGIDVGADFSWMSIALPNQQFVGKPYKILHNSMNFLTTAVSKIKEAEELYSLEIRIFLESTGIYHYPLFCYLRDKGFNCSVINPIITKNSTNMNIRKVHNDRFDSKKAALVGLKPDLKVSLTLLETYTSPNAFLEADKQEIIDTIRSTARFGLTYAEKKYNTIIQAANAANEFGYIIDSNIKRIRLYISFIRKYDEEIEGILDALHNLVDANENTDFVKQIHLIETFKGAGFLSAVSLMGEIGDFSEFNKPKQLFAYFGLDPAVKQSGKFEGTKVQMSKRGSAIARRVIHILALQSISISRNG

SEQ ID NO: 129560 - protein, 403 aa, unidentified
MSNYFAGLDWASKTHALCVIDERGGVVERFDIDHDAGGLTELRRRLRRFGSPPVAIERPSGLLVDTLVDADFTVVPIHPNAVKASRPRYRSHGGKSDASDAYVLADLLRTDGHRLKALTPQSDEIRALRALVRGRDDLVATRVQLANQLRTLLESFWPGAAAVFADIDSPIALAFIERYPTPQSASRLGPKRMAAFCAQHAYCGRRSPDDLLARLQEAPSAVSAETEMEAKGELARCVARTLTRLVEQLRLLSSRIEHLVASLDDGRILMSFPRAGRICAAQILAELGSVRERFATDAQLAAEAGVAPVTYESGKSKAVTFRWACNHRLRAAVTCLADNSRHVNAWAAHVYANARARGCDHPHAIRILARAWLRVIWRAWTDRKTYDPMQHRAAQLLLKAAGG

SEQ ID NO: 129561 - protein, 339 aa, unidentified
MRLYAAIDLHSNNGVLVIIDELDKVVYEQRLPNDLQVVLAEMAPYRERVQAVAVESTFNWYWLVDGLMAAGYEVRLVNTVAVKVYDGCKYTGDEQDARHLAHLLRLGILPTGYIYPKEERAVRDLLRKRAQLVRCRTLQLLSMESWVNRHTGRGISADRVRGLGDVEIRRMAGGNPNGLLSMQSNRTVLQCLDAQIQRLEQEILRQAKLKPAFEPLLTVDGIGPILGMTIMYETGPIERFGRVGQFASYARCVNSRRLSNGRKKGEGNRKNGNKFLGWAFVEVAHHAVQANERIRRFYQRKKAKTNGIVATKAVAHKLARACYHVIRDQVPFDVARAFL

SEQ ID NO: 129562 - protein, 337 aa, unidentified
MDYFAGLDISMDETHVCVLDREGAVVRESKAASTAEAIAGELSKAPSCRRIVFETGRMAPILFHGLNQLGLPVVCVESRQAYQALKSLATHKTDRNDARGLAHLARTGFFKPVHVKSLRAHALRSLISARKKLVGQRVTLENQIRGLAVVFGIRLPRALTTAFIDQALKASEGVAGLSAAMRGLSAARVAVMTAVAAIDADIRRMTRASAACRRLMTIPGVGQLTALAFVAAIDDPSRIRRSRDIGAYLGLVPRRYQSGQVDYTGGISKCGDGRVRTLLYEAANVMLTRYKGQLKLKDWAFAIAKRSTMRKARVALARRLAIIMHAMLRDGTEFAPA

SEQ ID NO: 129563 - protein, 349 aa, unidentified
MRFYKDRHKYYCGIDLHTSVMYVCITDAAGTILVHKNLRTNPDAFVRVIEPYREDLAVAVECVFVWYWIADLCAQLGITFVLGHALYMKAIHGGKVKNDRIDSEKIAQLLRSGMLPEAYAYPKEMRSTRDLLRRRMYLVRRHAELQAHIQNTRHQYNLPAFEKPIHRAANREGIADRFDDPMVAASIQVDSNLLDSLHQQILFVERQITDQARSHDPVAVQLLRTIPGIGKTLAFTILYEIGDIGRFPSVGKFISYARLVKCSHESAGKRTGGKNNKIGNAHLKWAFSEAACLLLRESEEAKVWHQKLVSKYGKAKSLSIIAQRLGRTAYMILKRRTPFDREKFFASLM

SEQ ID NO: 129564 - protein, 375 aa, unidentified
MGKSIATVRRFVGLDVHAETIAVAVAEKDGEVRSLGTIPNREQSIRKLVTKLSGSGTWRACYEAGPTGYTLYWQLTKLGVECLVIAPTLVPVKAGDRVKTDRRDAERLAKSFRAGDLTPVWVPDAAHEALRDLVRAREAAKKDQLRARHRLGKFLLRQGRRPAERMTAWTQRHLDWIRREVKFEQFAQRATLEDYLEEVDHLGQRIARLEKVIDEAIEGAPATMKAVSALQALRGVAKMTAITIVAEVGQLSRFPKARQLMGYSGAVASEHSSGERTSRGGITKTGNAHLRRVLVEAAWSQRFAPSLTRRLRERQEGLSAEVLEIAAKARHRLSVRYRRLLARGKSKQQVVTAIARELLGFVWAIGVEVERKAVA

SEQ ID NO: 129565 - protein, 369 aa, unidentified
MAKSITYIGLDVHKDTIAVALAEASLRGEVRERGKIPNSPAALKALAVKLASTGRDLRFCYEAGPCGYGIQRQLAGMGHDCAVVAPSLIPRKPGERIKTDRRDAINLAKLHRAGELTPVWVPDQAHEAIRDLVRARQAAVRSLRQARQQLSGFLLRHGYHYHRPAWTQLHRRWLASLKFEEPVHHIVLEDCIATVEAATARRDRLETHIEAALPEWSLASVVQALQALRGVGLVAAATLVAELGDITRFTNPRQIMAYLGLVPSEHSSGGTRRQGGITKAGNGAARRMLIEAAWSYRFPARISREQLLRQERLAKPIRDIAWKAQERLCRRYRKLARAGKLPTVITAAVARELAGFIWAIAKQAQPTAP

SEQ ID NO: 129566 - protein, 319 aa, unidentified
MHCIGVDVSKQELVTFDGIKERIFPNTHGLPEFRRFLNRSTNALVVFEPTSTYSRRLETLCRAQRVWCCPLNPRVVPHLRLVGKGRSKTDSSDAELLYRYGVERGHGEAVQLENDSLAESIQARLACYRVAQKARVACQGVVEALSHDPATPQELLAELEVEIADLKAKERHHLVGAEQLVEEDAQAAQRLAGLVSIPGVGPITALTLLSLFRKYSDSNRRQIVALAGLDPIQFQSGTSVHGKSRISKRGNREVRKRLYEATLSAARYNPSVRAIYRRLKAQGKPEKVARIAAARKLLLIAHAIYTTGDAYREPAEKEG

SEQ ID NO: 129567 - protein, 348 aa, unidentified
MRQETKVYVGLDVHKEFCQACVMNKSGKVISNERFLSNQESLDKFLDRFDKAKFVLESTGIWEFIYEGIEKRGFEVLLAHPLKVRAISEAKVKTDKVDAETLAHLLRADLIPRSHVPPRDIRNLRQLVRHRAYLVRQCTSIKNRIHAELLRRGIRRPDDLKKTFTFKHVGWMRSLGILTITSSLNCLEGIQEQIKEVESFLLAEYNSRKDAQLIATIPGIGFYGALLILAEIDDIHRFSHPEKLCAYAGLVPTVHQSASTMYHGGITKNGSPHLRWMLIEAVHVHTNYCPGSKLSKFHAKVAQRRGKQRATVATARKLLHTIYWMLLTKEKFHCQGFNLVEKAATLIA

SEQ ID NO: 129568 - protein, 331 aa, unidentified
MKNLSIIGIDVSKLVLDVYILSKKYYFQVENSPAGFAQLLEISCKKLGVHRDQLYFCFEHTGRYSRLLSVFLEQSGITFSQIPALDIRASKGISRGKTDKADAKDIALYALRKKNELKPTKLHSAETSELRQLVALRDKLIKHRTAYKNSIKDLQDCYYDGETKFIKDAQVRMINQLNDEIMKVEQRMDKIIGSMPEWKNNYQLIQTVRGVGPVIARYLIIFTENFTRFVNYRKFACYAGIAPFEYSSGSSVKGRTRVHPCANKQLKSLLNLAAMNAIQIPGEYKQYYLRRQNEGKNNMSTLNIIRNKLLARIFAVVKRQTPYVDLYKFAA

SEQ ID NO: 129569 - protein, 464 aa, unidentified
MSKHSNKQNQTQLKKQRDSFPVINPNAAGIDVGSGEHWVAVAKDRDQQPVRSFQCFTADLNAMADWLKKCGIDTVAMESTGVYWIPLFQILESQGFEVKLVNARHVKNVPGRKTDVLDCQWLQRLHTYGLLSGSFRPEDSICVLRSFWRHRDNLVRYASSHVQHMQKALTEMNIQLHKAISDITGLTGMRIIKAILTGERDLLKLAQMRDPRIKSSVDTIAKALEGDYRQEHLFALKQAVELYDVYREKIEDCDWQIEQYLTKLDSKVDLESNPLPVSAKRNKKPKGNAPHFDLRSHLYRVSGVDFTQINGLDAVSVNTILTEVGLDPSAFPTGKNFCSWLGLSPNNRITGGRIKSSKTKKVNNRAATAFRIAAQSLTRSSSALGGYYRRMCTHLGAPEAITATAHKLARIFYHLWKNGGTYQDPGSMYYEQKYKQRVIKNMIKKAKHLGFQINIEPLDELQVS

SEQ ID NO: 129570 - protein, 387 aa, unidentified
MEVRIENTPSAGTNNDPVHCFVAIELSKSSWVVGFQTPLSKQTSRYQVKACDAEPLLQLIERVRTRVTREVGRPVEVTSCYEAGYDGFWLHRVLEAHGIHNHVLDPASLQVNRRARRPKTDRIDADRMVRALIRHLRGEPEACSVVRVPSPEQEDARRLHRERGRLITERVAHVNRIKGLCATQGIYNYEPLRSDRLERLDKLRTGDGRALPARFKTEIVREIKRLEVVLEMISTVEAERDAILKDKKSTHINADKIKMLAKLKAIGAEFSTTLVGEVFYREFANRRQLGSYVGLASSPFCSGSLDRDQGISKAGNSKARAMMIELAWTWLRYQPDSALSRWFQARVGNLKGRPRRIAIVAMARKLLVALWRYLQTGVIPTGAELKA

SEQ ID NO: 129571 - protein, 342 aa, unidentified
MNQYAGIDVSLECSSVCVVDANGKILREARVASEPEALIAWFRSSGFGLERIGLEAGPLSQWLFAAMREAGLAVELLETRHVRKAFEAMPVKSDRNDARGIAQLIRLGWFRPVHCKSMSAQETRTLLTARKLVQSKLRDVENSLRGILRGFGLKVGKTTELKFAGRIEELVAGHPHLQVIAKALLAVRAVLRKEFAAFEKQVRKMARSDLRTRLLMSTPAVGPIVALTYASAIDDPSRFKSSKQAGAHFGLTPKKYQSGETDYTGRISKIGDSSVRTALYEAAHVMLTKPVKSCSQLKSWAMRIARRAGMSKAKVALARRLAVIMHRMLADGTPFNAAAAAA

SEQ ID NO: 129572 - protein, 358 aa, unidentified
MPMLAEFVDGVIGVDTHRDTLAAAALSSVGGVLAQTAVPADAAGYQALLGFADAYLPGRRCWAIEGAGSYGAGLATLLRSAGEPLVEAGRPKRPPRRSSAKTDAIDAVRAARDALGQPPQQLPAVRQRGDHQARRVLLTTRRTALAARVAAVNQLKALLVSAPEELRAKLPDLPTNQQVAVCAALRDRPTKSLEHRMTARALRCTARRVHALQAAAEELLAELERLVAAIAPWLLEAFGVGPVSAAQLLVSWSHAGRFRSQAAFAALAGTSPIPACSGQVVRHRLNRRGDRQLNQALHTIVLVRLRDDPETRAYAARRTAEGKSSRDIKRCLKRIIARQLFRLLQRYDQPGVEVLMAA

SEQ ID NO: 129573 - protein, 353 aa, unidentified
MTNGSSLNETMGLDLSDKTGVYVVLDHEGEVCREGKVALTRQALSRAFGGGSPCLVAIEVGTHSPWVSRELALLGHEVVIGNPRQVKLISQNKKKSDREDALLLARLARLDRRLLRPVQHRGEQAQADLAMLRARSLLVAGRTSLINSVRGMVKTTGLRLPRCSAESFAARAQPHLPRELVPALEPLLAEIASLTARIKQITHAIEHAAAERYPETQQLRQVPGVGLICSLTYVLTLEEPQRFRRSRAAGAYLGLVPRQRQSGEQQPQMHITKAGDIALRSVLVQSAQYILGRYGPDSDLRRWGLKLAGEGNKARRKKAVIAVTRKLAVLLHHLWSTGQVYEPLRQADLQTVG

SEQ ID NO: 129574 - protein, 335 aa, unidentified
MKVLFSVGVDIAKEKFDVCIKQAKEERVSVIKGSKSFPNTEVGFKELVQWIMKRTKDTSSLIFVMEATGVYYENLAYYLHSLGFNVSVELANKVKHYFKSLNVKTKTDKKDASILAQMGLERKLTLWQPMSPIYRELRDVSRLKLAFKKDLNALKNQLSAMESAHQKYEKVISLQKEQIAFYEKSIAELDRELEQVAQKDPELYQKIIKICTIKGLKFNTVVAVICETNGFLLFENMRQLVSYSGFDVKLDESGKYKGKTRISKKGNARIREVLYMPALSAIQHNKPIAELHKRICEKNPTAKMKGVVAGMRKLLILIYVLWKKNEVYNENYIWI

SEQ ID NO: 129575 - protein, 390 aa, unidentified
MYIVGIDIGKNNHEATIIDNTGTIIGKSLKFTNSHSGANKLITYISKNIGSSEVIFGLEATGHYWLSLYSFLLEKGYSINVINPIQSDSFRNLYIRQTKNDTVDSFIIAEVIRFGRFTTTQLANDKLLSLRQLCRYRLSLVDSVSELKCRIITVLDQVFPEYEKLFSDTWGISSKKLLEKYQTPEDILEIDTSELADFLKEHSRGQLGYVKAEKIKDAAQNTFGIKIAQNAFKFQLKQLIDQVLFIENQIKSLDKEIEFYYNQFDCHLTSIPGIGAVTAAIILSEIGDVTRFKNASSLVAYAGIDPTVKQSGQFLSNNNKMSKRGSPYLRRALFLVASTCTLHESPLNDYYNKKRSEGKHHLTAVGAVAHKLTHIVFAIMRDNKDYEPMS

SEQ ID NO: 129576 - protein, 335 aa, unidentified
MRLYCGIDLHAKNSYLAIVDEQRKRIFKRNVTNDRKLILTLLDPYRSELQGVVVESTFNWYWLVDTLMDDGYAVHLANVSAIQQYEGIKYVDDKHDAFWLAELLSLGILKEGYIYPKEQRPIRDLLRKRGHLMKLRTSLLVSLTNTMANICGVKVPSHRIKGKEDHVSVHLDHDASLALMGQVSKTAIDMLTDQIKTIESHVEKQCTFDTPLLSLPGVGKILGLTILLETGPIGRFPAVGNYVSYCRKAESTWKSSEKVKGRGNRKNGNRYLSWAFAEAAEHARMFDSASRNFYNRKLHERNSPVAHAALANKLSRAAYYIMRDRVPYEEAKLFG

SEQ ID NO: 129577 - protein, 330 aa, unidentified
MQKVQHIIGADLSKKTIDLLYHLKETHLKIDNNLQGFKSLLKWISQQQINPSELIIVMEHTGLYSFCFEEFLHRHQISFTKVSALAIKHSLGLVRGKSDKIDAFRIAVYGYEKKDKLAAEPPTSKELQRLQLLYATRERLVKQKVGLINAVKEYRNVGLLQNDPVLKCQQRLIKNYEKEIAKLEAQLDNVLKSNPSLQKNHLLLQSIKGVGKVLATATIIKTKNFTRFTNARKFACFCGTAPFEHTSGISIKGRTRVSHLADKQMKTLLDLSAKTAIQYDKELREYYLKRTQNGKPKMSTINVVRNKILYRMFAVIKRQTPFIENYLQVA

SEQ ID NO: 129578 - protein, 314 aa, unidentified
MIIPPRCVGIDVSKRTLDIFDDGLGRTERIANASRPITEQVARWRCGHVFVVFEATGVYDRVLAEILRKAGIRFARINPARARDFARADGRLAKTDAIDARMLADFARVMVPADNPAPEPIRDTLALLAKRRDQLVRMRAQEKNRRSEAHDPALIEDITCHVDFLDQAIKTIETRINALIKAEPEISEQARLMRSAPGVGPVASMQLIAQMPELGRIGPKQIAALAGLAPLNVDSGTYRGRRTISGGRKRVRDALYMAALNAVRRDGIFRTFYQKLRTAGKPAKLALIAVARKLLTTLNAMLRDRTIYLQPQPT

SEQ ID NO: 129579 - protein, 348 aa, unidentified
MYIGIDLHKETCYATTLDKEGEIVDRREFKNEREEWEKFVEGIPRDSKVAIEACSYWYPVCDFLEERGIEMVLSHPSKTRIIAEAKIKTDKIDSKNLAKLLRADFLPRSYIPSKEIRENRELLRLRVQLGKDRTVVKNRIHALMAKNGVKHEFSDLFGVEGMKFLKEIELAESQRIALDVLLRQLESVDKEVEYVQKRIAIVAKGDEVVIILMTIPGIDYYSAMIIKNEIGEIERFPGYKELCSFAGLVPRVHQSGNTRWEGHITKEGNALLRWILIQAVHQVVRYPGELRKFYLRLKKQKGTKIAVVATARKLLRVIYCMLTRKENYRYERKALTESKLKRLEKTAC

SEQ ID NO: 129580 - protein, 320 aa, unidentified
MVVGIDSHKETVAACVVDELGGELATAIFPNTGAGHDSLLSWARSRGEVSLFGIEGSGGVGYALARRLATLGEGVVEVPPFLTVRERKHLRQRGKSDPADALAIARVVAREADLPRFLIHDRARQLGQILNYRDQLVGYQAEIKNLVSRRSLRRVQALIEAGASIETALLLRRLSSLRLLSSEIADLNVHINRLVEQSRTGLIDITGVGALVAARILAEVGDVQRIASESRFAALNGTAPVPASSGTIQRHRLNRGGNRRLNRALHTIAVIQAHLDPRARAYLQRRRAEGKTQREAIRCLKRQLSNVVYRQLVADRGRLR

SEQ ID NO: 129581 - protein, 367 aa, unidentified
MQKHIFVGIDLGDKNSVARIGVELEKSERFGFVNTKAGRARLIVEVKRRSEEAGAAVVVMAYEASSCGFVLRDQAQAAGIDCKVLAPTKMEKSVEQKRNKNDDRDADDVLEKLRGHVLAGNRLPEVWVPDLETRDDREVLRTRLALSERQTQVKTQIQMLLKRHGLERPSDLGTTRSKQYRQWLEGLSQWESLGWGTRQSLSSLLRQLSGIESEMESLEKLIRQLGDQPRHKPIVEALMKEKGVGLLAALVYRTEIGLARRFHRGRHVGKFVGLTPTSHESGQQSDRKGHISRQGPPRLRKVLCQASWVHVRYDPHSREMYQKLVAKNPKKKKIALVAVMRRLAVRLWHRMREAELLQQSPVLLIEN

SEQ ID NO: 129582 - protein, 448 aa, unidentified
MKILALDLGKFNTMCCFFDTKTRKHSFLNAPTDRDYLTTVFKKHKIDLVVMEACGPSGWITDLAKGLELETVVCSTNEDAWKWANVKRKTDKDDALKLARMASMDELKAVHMPSEAHREFRSLVKYRKTLDCRICKMKCTIRAWFVNHGISIDTGEKAWHTGRERINSFRKPLAECKPNELWKGELDLELTQFDALTIQLQCVVKKLEELGKNDPRIVRLRTIPGIGPRTAEILVACIDDPHRFENGRQVAAYFGLVPRQFQSGETDRNGRITKRGNPLARTILVECAWASLKYNPWAKGIYDRICGKQKTRKKKAAVALARKIAVLAWAMLRDEKDWDPKTMIDITETYGRMSPSLKESLQSMKPKENSDQRKSRLRREAKKAKEAEANTEAKPTTKANASRKAKKAVRSPQAKAKPSSSKLKPTPEKTLTKKTTKPRRARKPVSAA

SEQ ID NO: 129583 - protein, 353 aa, unidentified
MKRTSKYVALDVHQATTVASVRGASGRVIARSILPTEPSALVEYFRGMRGSIQVAFEEGTQAQWLHDLLAPVVDQVIVCDRRGVHRGNKADRRDADQLSHRLLSGDLRAVYHDSHDRLTLQELTRTYLNVVEDSTRAMLRLKSLFRARAIRAPGKGIYGTKERALWLTRLPDRGARFRAEVLYAELDVLRELRPKAKAVMVVEARRDPAWEVLRSIPFLGPVRVALLLAAMKTPWRFRTKRNLWAYAGLAVVTESSGDHEFIAGRPVRRRRKPLTRGLNQNHNRVLKGVLKGAATASIGKPGPFQDLYHGMLARGMREDMARVTLARKFAALTLRLRKTGEPYDPAKLTVQAT

SEQ ID NO: 129584 - protein, 336 aa, unidentified
MQVYGIDLSKERFDVNYIDKNGKEKNKQVKNKLSDISAFLDNVAESAVLCAENTGTYGDLLVFLCSQLGKKIALVPGYTIKHSLGLIKGKSDPIDARRIREYGERFKDKLVFKEYDPEEVVELKSLYSLRSQLVKARKLLLTGEHSRSNTPMQSVAAKRLTERSIANLDMQIKDVEDEIEGIIKSNEELSENYELSKSVVGVGPVIAIDLIIKTGNFENIDTARKASSYAGVCPFPNESGKMVGKRKTSPFADRKLKSLLYMGAKSAVKHNKEYRLYYQKKQQEGKPHYLIMNNVSNKLLRTIYSVVMNKTPYSKDYICLDPRELNNINSSTKKVA

SEQ ID NO: 129585 - protein, 329 aa, unidentified
MDRQGKKLVHTNVKDNDFSFFLKLVEPYKHDLTVCCECMFGWYWLADACQLAGLTFVLAHALYLRAISGGKNKNDRIDSEKLTHLLRSNLIPPAYVYPAEKRPLRALLRQRIFYVWHRAELLARIHSHQLAYNRIPARQTRRNRDPWKEQLLAAEDHPLRQLALKNDLAMIQHYDNQIQSMEQELMRLTKKHESRDYALLQTVAGIGRSLGLTILYEIGDITRFPTVKDFLSYCRLVKGTVASAGKIKGLRGAKLGNPYLRWAFGEAAVIAKRDHHIIGPLAQRLEAKMGGNKFKANTVVAIKLARAVYFMLKNKTVFDPERLVAALAK

SEQ ID NO: 129586 - protein, 400 aa, unidentified
MISVGIDVSKEKSTICILKPYGEIVSKPFEVCHTEKELSELTSMLLRLNDDVRVVMEATGIYHLPVLCYLQEKGLFVAVVNPFEMKEYRCQGLRRVKTDKQDAVTISNYGIDHWYRLKEYEPEESIYAELKLLGRQYRHYMRMRVESVLELTHLLDYTMPGIKTLLKGWNETNGKDKLGDFVEEYWHYDNITKKSEEQFIESYLKWAKEKGYHQSQDKAAKIYMLAKEGIPTVSSDTSSTKMLVQEAVRVLREIDNTLMTILTQMQALAKSLPEYPVVRAMGGVGNVLAPKLIAEIGDVRRFHSGKALIAHAGIDAPPYQSGQFTGTERKISKRGSSSLRKIGYEVMRCLKTHKEPEDAAVYRFILKKEKEGKSKRAAKIAGLNKFLRIYYARVMEVYQK

SEQ ID NO: 129587 - protein, 342 aa, unidentified
MSSSQSTAVYSLFVGVDIAATTATVSWMRPGEKASRPMTIEQTPDGYASLERKLRATGQVPGEVLVVMEATGSYWITLATQLVHAGFCVSVINPAQAHHFAKALLKRAKTDAIDAQTLAQLALMLQPAPWTPPPPIYYELQQRLAQRDALLDLQQQVRNQLHALEQLPEVIITVRERFAHLLATFTAQLAAVEAEITAVWQQDAAWATAAQRLKSIKGIGWVTAAWALVATLNFTTCDTVESLTAYAGLAPISHQSGTSVWHRPTLGHTGNGRLRTAFYMATLSAAQHNPMIKAFYTRLRAAGKPEKVARCAAARKLLHIAWAVVTKAQDFDPHYVQTRQRA

SEQ ID NO: 129588 - protein, 371 aa, unidentified
MNSIVYVGMDVHKESYTVCCYSFDADEILYKQKIASDYKMILKYLEQVRKQFPEETEFVCGYEAGCLGYSLYHQLTDHAVKCIILAPTTMAITNKNRVKTDKRDAANIARCLAFHTYSEVHVPSEEDNSIKEYIRMRDDQKMALKKLKQQILALVLRQGKRFEGGKTYWTIAHMKWLKSLNLGGITQEALEEYLITYEYLTEKIERIDKRIEELASGEKYQEKVKKLGCLIGVKTHTALSMVVEVGDFKRFVKPEKFAAFLGLVPSEDSSGDSQKRYGISKAGNSHLRRLLVEAAQAYTRGAIGHKSVALKQRQQGNIPQVIAYADKANERLRRRFYKMTLSKGINRNVAATAIARELACFMWGLMTDNVA

SEQ ID NO: 129589 - protein, 339 aa, unidentified
MQLYAGLDLHSRNTYIGIMDKEFKRVFGKRVSNNLPLILETLDPFQNQLKGIVVESTFNWYWLIDGLMDAGYQCVHLANPSAMKQYEGIKHADDQHDAFFLAQMLILGILPQGYIYPKQDRPVRDLARKRLLLVRHKTAHILSLQSLIARCCAQRISANEIRKFTAEDLQQLLKEEHIFLSAQANLDTIVFLKQQIRRLEKAIKKKVKLNKAFQQLLTVPGIGLILAMTIMLEVGDIGRFPQVGNFASYCRCVSSQKLSDGKTKGHGNRKNGNRYLSWAFTEAAHLSRRYNENFRSYYNRKVAQANTSLATKALSNKLARICYYIIRDQVPFQKELLSH

SEQ ID NO: 129590 - protein, 338 aa, unidentified
MVAIGVDTHRDEHLAVALDGLGRELGSVTIGADGSGYARLWEWASELGEPRFSVEGTGSYGAGLTAFLVGAGGVVFECERPRRRDRRGGKSDRIDATLAAKRLLTGERLPRPRGGGVRDDLRLLLGERQGAVRARTAALNELQAAIVTGPETLRSRFRGLNGKQAAKLALKLRGRNGETAVAAVVVRRIAVRIQQLSCEICEIERQLETITSELVPELLEECGVGPVCAAQLVVSSGDPSRMHSEASFAALAGTSPVQASSGQTQRHRLNRGGDRQLNRALHVIALSRARHHEHTAAYYQRLLSEGKTPREARRCVKRQLARYFYQRLKTSPNLALTP

SEQ ID NO: 129591 - protein, 357 aa, unidentified
MPSSDVKYIGLDVHKEAIAIAVLNGAGKLVMESIVETKASTLLDFLHGLRGELHVTLEEGTWAAWLYDVLKPHVLEVVVCNPRRNALLKEGSKSDKVDARKLAELLCSGMLRAVYHGENGLRALRELARSYEVVSKDLKRVMNRLKALYRAWGIPCTGTQVYSRRHREQWLKKIREAGVRRRAELFYQQLDGLQVLRRTVRGELLAESRKHQAVKVLRQIPFIGSLRAAQLVALMQTPHRFRSKRQLWTYSGLAVETHDSAQYRYVDGQLQRSKKPQQVRGLNQNHNHAMKEIFKSAALSATGRAGAFQDCYAGLLAKGMKPELARITLARKIAAITLTLWKKGECFDAGYVKRQAA

SEQ ID NO: 129592 - protein, 412 aa, unidentified
MIYVGIDWSDEDHKVYLTDDSEKRLDAFVILHTPEGVSELFARVEKFAKSVDDVLFAVEKPSGLLVSAILDRGFTLYPINPKAVDRYRDRFKVSGKKDDFFDARVLANILRTDRHIHKPLIPDSPVCRNLKILTRQYESLSRLKRRVMNQIISTLKDYYPVALELFGKIDQPITIDFLKRFPTAEKFSKLTRAQIKNFLKKHHYPGVEKKADELFQLAKTPHFQVEEFVVESRSLYLSTLLTQLKNLMNALTTFEHEIEKILSQHPDKDIFLSLPGSGNLTSAKLIAEFGDDRDRYKKVGAVQAVAGSCPVTRQSGKYRNVYFRKACIKPFRNATNQFAFNSIKNSQWAKDRYKKYVDSGKKKTHALRCLSNAWLEVIFAMWKNRSTYDEQKHLKIVKEQFQGEISPSFLTC

SEQ ID NO: 129593 - protein, 412 aa, unidentified
MDVLYPRCCGIDIHKKSITVCVLIREPGRQEQKHIREFGTTTAAILSCGDWLRDLGVTHVAMESTGVYWRPIWNLLEGQFELLLANATHVKNVPGRKTDVKDSEWIAQLLQHGLLKPSFVPDTVLRDLREFSRDRTSLVAERSRLKNRIQKILEDANIKLGSVASDILGKSGRAMLTAMVRGKENPEELADLAQGQLRLKIPQLVEALRGRVRAVHRFRLQQQLERIDFIDGQIAQLEAEIENQNAPMEEAVCLLAEIPGFDRTTAWSVIAEIGVDMSQFPSADDLASWAGVCPGNNESAGKRLSGKTRKGSRWLRQKLCQSAWCASRCKTSYFASYFQRVAAHRGKKRAIVAVSHSLLVVCYYLLQRKCHFQDLGVNYFDQLNHEKLTHYFVKRLIRLGHKVTLEPCPAAA

SEQ ID NO: 129594 - protein, 439 aa, unidentified
MKPIYYVGLDVHKETISIAYALGGSRDDATYHGQCAGSVAAAVKALQKLAEKLKVEFRDLKVCYEAGPTGFVLARQLIKKGVDCVLMSPSKTERKPGDKIKTDKRDACNIARLFRNGDITQVRIPPVLDEAVRDVCRARTDATDDLTRAKQRLNAFLLRNGFNYTGKSKWTAAHMRYLRELTMPSDPQRIVLEESIQAIESCENRIERLVTKMKQILETWEWKPIVQAVMAFKGFQEVAAMTLISELGDLRRFDHPRKLMAFIGLVPSEASSGGKKRQGAITKCGNSHSRWMLVECAQHFRKAPRISPALTTRQEGQSEQVKALSWRMQNRLYNRYVKLKARGKTETKIIVAIARELSAFLWELQNKLKLPMPGVAPIAAAAGESGTAHGAAAPNPAELRQLDPICFPLNPQGDFSPPVPQGSGGKRSKKPILAKGMTL

SEQ ID NO: 129595 - protein, 340 aa, unidentified
MKKPKYYIGLDVHKEKTTYVVKNQLGDVLLTGEAASRYETLHEQLRSFLPSSLIGLEASTSYYTLYQNFLHNGYQIKVANTIQLRQLIAKNDTLDAKRLAEMLRLGTYPCSYIPDEPIQRIRNMVQIRHALMEEKVRCNARIQAFLDRNKVIMPSTRAFSKRWRQALMQYMGSSEINTELRYAYDHFIFLEKKMEQVDQELQGYARKHWPKEYHLLQSITGIGPVIACYIIAQVFPIQRFASHKKLRRYAGVIPLSKSSGNYTSKGRIPKTSSRTLLRWALIQAANTIGKTKTPLGSYYRMKKKQKKNAGIAKVAVASSLIDIIYKVLTTKKPYKINMNN

SEQ ID NO: 129596 - protein, 350 aa, unidentified
MGMTMRMRISVLGVDLGKNVCSLVGFDASGAVVLRRRAKREPLIALAAKLPPCVVAMEACCGAHHLGRVFAAHGHDVRLMSPEYVRPYVKAQKNDDRDAEGVAEAATRPTMRFVELKSQEQLDMQTLHRSRDRLVGERTALINQLRAILLERGIVAPQGKRKLEQFLFNLMDEQGGPGLSPRMITLVTDARAQWAELDRRIAAFDAEFVRWTKENEDARRLATIPGVGATIASALIAAIGKGETFERGRDLAAWLGLVPRQFTAGGKPKLLGISKRGNSYLRKLLIHGARAALPYVAERDVPLGRWAKSLLSRAHPNVVVVAFANKLARIAWAVLRRGEPFAAKGLPVAA

SEQ ID NO: 129597 - protein, 349 aa, unidentified
MEVVIGVDPHKATNVVAAIDEQGELVGQETFAANRKGLRTLERWAKRFPKRRWAVEGAGGIGRPLAQKLLAVGERVVDVPPKLSSRVRVLSTGNARKNDALDATFTALAALRNDRLASVQPEDSPEGHAEILRLLTERREDLVCERTRALNRLHVLLRDLLSDPVGKQLSTNVAAKLLRRARPQHPAARVRRRLASEVVRDVRALDRRIAELEERIGVEVEASDSTLTEIFGVGPILAAKIVGIVGDVSRFPSKAHFASYAGVAPIEASSGEVVRHRLSLSGNRNLNEVMHIIAVCQARSDPRGGAYHRKKLAEGKSRREALRCLKRRVSDVVFKALVADSRRASLAVA

SEQ ID NO: 129598 - protein, 322 aa, unidentified
MAMLSFGGIDVSKDRLDIMVLPDEQSSWVSNDAAGWAELVEQLRGSSITAIGVEASGGYERGVVRALLAAGMSVRQINPFKLRQFAKASGTLAKNDRLDARMIASFVAIMPTRPVQRQAPMIEQLAAMLTVRRQLSDHKVATENASRLLEGAMLQRLSRRRIAGLTADIDLLDQRLVEIVTADPALAHRFRLLTSMPGVGAVLACTLIALLPELGQMSRKQVAALVGLAPYDFDSGKLKGRRCIWGGRARVRHVLYMAALSASNWNPGLKAFHDRLEATGKKPKVVIVAVMRKMITTLNAMLRDGTTWVDRYSGRRSASTAR

SEQ ID NO: 129599 - protein, 389 aa, unidentified
MLARETIEHTSAGFGVLMALGRRFPHRVWAVEGCNGVGKNLAHRLVACKETVLDVSSRKSSLVRAFATNSGRKTDDTDAYSIALVGLHTPDLPVVTRDEQTEMLRILSGRRRELVALRTQAVCRLHRELVILIPGGASRRLTAKQANVVLGKVRPADEVDRLRKSLARDQLADLVVIDKRLDAINTEIRTAVRASGSRLTRIVGIGPVNAAMVIGGVGDVARFATRAHFAAYNGTAPAQWGSGGDTHDRVNLGGNRKLNHAVHIAAITQARYPGPSRDYYQRKLAAGKTKKEALRALKRRISDAIYRQLVADARAVKKSVTSPGGQVGATLTSSAADRSPMISTSERPQPGPVNPDPTPAAATPGKRSSARSRRPKIAPTRRRRQAQSA

SEQ ID NO: 129600 - protein, 316 aa, unidentified
MNKSKSEPSPAYVGIDISKDALDISLAGESPSRSTNDTAGIAQLVKVLEKLPEPAWVICEPSGGYERDLLEALWAAGIVVSLVNAARIRAFARARGLLAKTDQIDAAVLRAYGELLTPAVVAAPSLLRERLSALGRRREQLVEILATEQQRLNQSRNDSVQKMGRQLGKILGKQIAQLDAMIAALIASDETLQKQDARLQQVQGVGPVTSATLLAELPELGELEDKQIGALAGLVPYNRDSGQQRGRRVIHGGRVQVRRVLYMAALTATRYNPILKEFYQRLVAAGKPKKLALTAVMRKLVVLLNRLIKNPKFNLA

SEQ ID NO: 129601 - protein, 315 aa, unidentified
MMNEQTYCGIDVAKRHFVIGLSTQKRTKTETNNPKGIAHTIEYLRRFSVDLIVLESTGGLELPLAKALHRTGFRVVIANLRQTNQFAMSQSLAKTDNKDAKMLAFYAQMLAMRDNVAQQLYIPPTPEQEQLEALVSRRNQLIEMRFAEKNRLEQVHSTQVFSVEQHIDYLSLRIDELDREIEQHLKHFDDTIKKFKDIKGLGTQTIAVLMSMLPELGQYTHKQIASLVGVAPHPKESGNTKWKSRCSGGRKVVRNALYMATFVCVRFEPKLKQLYERLRANGKAFKVAINACMRKLLTILNAIVRDDSQWDAHAL

SEQ ID NO: 129602 - protein, 338 aa, unidentified
MTIVMGLDQHRGQVSAESIDTETGEVSRARVAPAHREAVARFLGRFRGVESEVALEATTGWRFVVEELRAIGAGVHLAEPAETAARRGNKKRAKSDRADARHLRELLMISRLPESWIAPDHILDLRARVRLRHTLQDQRGEWQQRIHAVLYHHGVPQRRQLMTAEGRRWLGNVALPETAREQVTVAVAMIDALDVQIAPLERELRAYARRQVGCRALMCHYGIGELTAVTILAELGDCRRFSSSRHAVRYSGLDITVHQSDQRRAPGHLSRQGPPALRWALFEAAQVARRTGSPDRDYYAQAAERLGSNRACLAIARKLLKRSYHTLRELGEEALQPV

SEQ ID NO: 129603 - protein, 340 aa, unidentified
MIGIDPHKGSHTAVALDDQELELASLRVRAGRRQRQQLHEWATPFDVRVWAIESANGLGYLLAQQLLAAGERVLDVPATLASRVRVLSSGRSNKNDPNDARSVAVAALRSPAMTEVRCEDHVTVLRLLAKRHLDLGRWRNKVCCRLHAHVAELVAGGISTEIVVAQAAELLAGLHPRGVAAVERHRQALELVEDLARIDDQLRASRRRVTGAVAASGTTLTELFGVGPINAAILIGYTGDPLRFATQHHYAAYNGTAPIEIASAGRTIHRLSRRGNRQLNHALHMAAVTQIRHTHSPGRAYFDRKVEEKKTPKVALRCLKRRISDSVYRRLVADARRARR

SEQ ID NO: 129604 - protein, 405 aa, unidentified
MISVGIDISKGKSTVCILKPGGEVLAAPFEILHNIESINSLVSLINSYDEETRVVLEDTGHYHWPVVTMLLEHNVFVSCINALRMKKFCSQSIRKGKTDKIDSAKIAQFGITYWNDLKPHMPADEVYESLRLLSRQYYQYVSLLTKAKVNFSNILDRVMPEISSLLSVQNSKLYDVVERYCHFSNINKMGERRFISDYCKWAKKKGYHSNESKAKQIYSLAVNGIPALPYNPASICVVREAIKSIRELSRSRDTILSQMKELANTLPEYSVLISMHGIGDVLSTRFIADIGDIRRFHNKNAVVAYAGIDAPPYQSGSFTASARHISKRGNKYLRRTGFEIMQSFMKQKPTEDCAVYDYMLKKQAEGHPAKYYNIAGLNKFLKIYYARVTELYRNIDNQSIFGSNV

SEQ ID NO: 129605 - protein, 345 aa, unidentified
MDQVIRIGMDTSKHVFQLHGVNAAEAPVLRKKLRRKEMVAFFEKLAPTVIAIEACGASHHLARLLQSFGHTVKLIAPQLVKPYVKRGKNDAADAEALCEAMSRPTMRFVPVKTAEQQAALMLVGVRDRLIRVRTQLSNAIRGYAAEFGLTAAKGVAQLVPLLERIQADESLPALARDLFAIQAKEYAQLQEQIAEVDAKLTVWHRADECSRRLAKIPSVGPIGAVMLTMKTPDPTLFRSGRQFAAWIGLTPKDHSTAGKTKLGVITRAGDEGLRSVLIVGASSVIQQAQRSGKMSPWLVALLKRKSAKLAAVALANKTARIAWKMMVTGEAYDAKLVAAAKDVTG

SEQ ID NO: 129606 - protein, 357 aa, unidentified
MWTQHTQVRFDGQDVYVGLDNAKRSWKVAIYLGDMFFQAFTQTPSPEALMHYLRHHFPGARYHIVYEAGYFGFWIQRAFSQLGAECSVTNPADVPTTNKERRGKNDRIDANKLGRSYAHGELHTIYVPDLAREEDRTLVRTRMRFVRKQTRTKCQIKALLCQFGYHLPEDMTDRYWSRAYISWLQGLTLTRASGTMAKDVLIQELLSLRKTIATMTLSIRHLAQEDPYRCPYDLLRTIGGIGPLAAMTLLTEIIDIARFKNLDRLCSFVGLIPDEKSTGDREYHTGITKRRNPVLRFILIECAWMAIRSDPALAEAFQRYCTRMPSHQAIVRIARKLLNRIRFVLKNQAPYVSGVAA

SEQ ID NO: 129607 - protein, 340 aa, unidentified
MHATIIGLDLAKNVFQLHAEDRSGTVLWKRRLRREELEAFLRKQPPALIGMEACGSAHHWARVITAMGHEVRLMHAKYVKAYVKRGKSDVRDAEAICEAVQRPSMRFVPIKSVEQQIDRSLERARDLLVKQRTQLMNATRALLAELGIVARAGLRGFTTLADKITAGDVVIPRPSLTALKPLVEQWRALHASIDELEARLVARAHSDERMCRLMQIPGVGPLTAHAVVTAIGDPKRFSTGRDFAAWAGLTPLTDSSAEKTRIGHISRQGDHSLRRLMVLGAVNMARHARAKPCEANAWLNGVIARRPVKVAMVAQAAKTARIAWALLCSGENYRGRTAAA

SEQ ID NO: 129608 - protein, 321 aa, unidentified
MHSNNTVVYAGVDVAKATLQLHLQGQQSEFNNTPKGLHQLCAQLQKVPGVHVVCEATGGYERALVKVLHQGQIPVSVTNPARVRAAAQAQGQRAKTDQIDARGLTDYGQRYQPQPTPPTSATQEQLVALTQWLKQLIHGRALAKTQAEHHQDPFVRRQHAKLMTHLQSQIEAVEKQIQALLEQDAALQQRVNRLDEIAGVGPRTAWMVLAHMPELGRLNRHEVAALAGLAPWTRESGTMKGMRCIGGGRPEVRLALYMAALSAARCNPVLRSLYKRLRAKGKVAKVALTAVMRRLLTYMNHCIKALPSEPATASAKELKIV

SEQ ID NO: 129609 - protein, 341 aa, unidentified
MQITTIGLDIAKNVFQVHGIDAAERVVVRKQLRRGQVMKFFLAVPPCLVGMEACATAHYWARELTKLGHQVRLMPAKDVKAYVKRNKNDAADAEAICEAVRRPTMRFVGVKSAEQQGRLMQHRTRDLLMRQRTQAINALRAHLAELGIVAAQGREGLKELLAIIADERDERLPIDARASLIVLAAQPQALHTMIGSIEKRLIVQHRANEASKRLQSIHGIGIIGASAIAATVTDPTAFRSGRDFAAWIGLVPRQDSTGGKQKLGPISKQGDRYLRRILVVGAHSVLRRAKQSPQKYPWLTQLLARRPFKVVAVALANKMARIAWALLASGGIYRAPRLAAA

SEQ ID NO: 129610 - protein, 427 aa, unidentified
MAYRVAAIDVHKKMLAVVVAEVGGEGEYQFERRKFGATPDQLHLLAEWLVEQEVEEVVMESTAQYWKAVWGALERYWKPVRQKQEGAHKMSGALHLCQAKSNRGRRGRKNDFGDGERMVKRLVAQELVWSFVPDPEQRLWRTVTRRKYQLTRNKVRFRNQLESLLEQAHIKLSGWVSDLLGLSARRMLQAIADGETDAAVLAALADKRLQATPEQLRDALGACTQLDGVYRRLLKMALEELKFIEEQVEQLEKEASKLLTRHQDAVQRVAAVPGFGVDSAIQMIAEVGPEAAAFESEKSLSSWVGVCPGDEESAGESQSTRSPKGNRHMRRLLNQAAHAAVKTKGSIFEVTFQRLLPRLKYQGAIWAIAHRLCRLLWKILHQGIHYEERGPAVSAKSKRTRTARMIRELQKLGYRVEGQTLPVGNPA

SEQ ID NO: 129611 - protein, 403 aa, unidentified
MNSVGIDISKGRSTVAVMRPFGEVVISPFEVRHTDSELSELARQLKSLDGETRVVMEATGNYHTPVAKLLHDAGLYVSVVNAKLVHGYGNNDLRRVKTDKKDSVKLANYGLDRWLALTRYVPEEDTRLLLKNCYRQYRQYSKVQTVLKNNLISLLDTVFPNVNRLFSSPAREDGSEKWVDFVAEFWHCRCVSEKSEKAFANKYQRWCRKYGYNFNEAKAHTIHAEASGHIGVMPMSETTKLLVEQAVAQLRATSAALTALKHEMLALAAQLPEYPIVMGMFGVGPTLGPQLIAEIGDVRRFYSKKALVAYAGLDAPPNDSGDVTGRHKSMSKIGASSLRRTLFLVMSVYLQNSPLDEPVYQFMDRKRAEGKPYRVYMMASANKFLRIYYATVKAYLESLEHTA

SEQ ID NO: 129612 - protein, 275 aa, unidentified
MNHKNSCREISVGVDTGKKQLDIYIRPLDIYFTVSNDDEGIKKAIKTIKIHSPTPIIIEATGRLEHAFVLACSKSNLPFVLANPMHIKRFAGAIGQLAKTDKLDAKLIAHYGESIKPILTSIKNQLEKVDNKLHNLIEQCDEYKTKKNIVQSMPGIGDVVTFSLLSNMPELGYITNKKAAALIGVAPMNRESGVYQGHRKIRGGRHQIRTVMYMAMKSAMQCNPVFKAMYQRLVAAGKAKKMSIIACVRKMIVILNSMVRDGVMWDAKFAEKNAC

SEQ ID NO: 129613 - protein, 394 aa, unidentified
MAFKIFRKNCCGLDVHKTWIYACMGITDTNGRTEYKQARFSSFTKGLQELADWLAKYDCNDVCMESTGKFWIPVFNILEKTCWVTLAYPKYTKPQKGNKTDHKDAKWICDLYMCDMVNPSFIPPPDIRQLRDLMRYRSKLTNIMTSEKNRALNCLTVSNLKLDDVFSDVFGKSSRSVIRYILEHPGETFQVAPFIDRRCKHPVEEIQAVIDGTISHQQAVKLRECLQHLDELEVHKTNVEKGILCLVQQYPYQLELLQTVLGFSGNIMTAIALISEIGADMSVFPSAKHLVSWAGCCPRNDQSSKKVKSTRISRAGVYLKPLLVQVAIQPFTANADKLSAAGALEIRCQICDGRFLSMWAALFIFLGCPLSPCPKNLHVHNGRIVILASVAWIF

SEQ ID NO: 129614 - protein, 365 aa, unidentified
MQQDKVTKVRFDGQHVHVGIDVARKSWKVCIYVGQSYHKRFSQVPDPEALVDHLHHHFPGAVYHTVYEAGYFGFWIHRSLTKLGVHSMVINPADVPTTDKERHTKTDRIDAAKLAWALATGGLRAIYVPERAAEEDRSLVRMRASFICKQTRTKCQIKAMLRYYGEQVPDEIGDRYWSRAYIAWLESRMFEHESGRAAFQALVQELLTLRATLAALTKQIRLLSRTERYQRPSELLLTVTGISLTAAMTFLTEIVTLDRFKDLSHLLSYVGLVPGQHSTGDAEDDTGLIPRRNAALRYMLIECAWIAQREDPALLQAFTEYCKRMPKSQAIIHIARKLVARMRYVLKHEEPYVTGVLSSGRPWAA

SEQ ID NO: 129615 - protein, 425 aa, unidentified
MNNTQNKKITQVTDDTLIVGVDIGSESHWARAILARGYEVSKKPFHFDNTEEGFERFVTWAYGLEAENKLKKIVIACEPTGHYWFNLYDFLKKYDVKLVLVAPQHVKHSKEMDDNTQRKDDRKDPIVIAKLVPEGRYMEPYIPEGIYAELRAAFNRRCDLSEALTRNSNRMTRWFDVYFPEYRTVFKGSDALSGNMVLKRAPLPADILELGVKGICQIWREAKLRGAGEKRAQKLVDAATQSIGLKGGPAVRQELWQLIEERELLDKQHSDIMALIEEILKQIPGADRLLSVPGAGVVTVAGFLSEVGDINRFSDPKQIQKLAGLAVVENSSGKRKGLPGISRRGRSRLRWVLYLAAMSMVKNNKEMKTYHRYYTTRKKNPLKKIQSLMAIAGRIARIFYGILKNGTDYDPMIVMRDFNKEKATA

SEQ ID NO: 129616 - protein, 421 aa, unidentified
MARTVEIVYPNCCGMDVHKNFLVACIAVTDERSHTEHHIRRFSTYTGDLRRLTEWLATHNCHDVCMESAGKYWIPVFNALENADVNVCLTHPKYVKAIKGKKTDKKDAKWISELFKCDLVRSSFIPPPDIRQLRDLCRYYVKLTGFASGEKNRAQNCLTMCNFKLDDVFTDVFGKSATRVLDALLEHGNGDFELDGLISKKCKSSPEKIRAALDGELNPMQSEKLNLIRQHMENINDVKSALEKLIYKLATNYQPQIDLLMTVPGISTQLTAIRILAEIGVDMSVFETAKQLVSWAGLTPQNQESAGKKKTTRIGRAGAYLKPLLVQIALAVGKSNKNPELKNRYLALKKRRGGKKAVIAIARKLLTAIWHILSKNEAYNAELYRIADKPPITRELTTAQAVAFLRKKGFLIVDEETGEVA

SEQ ID NO: 129617 - protein, 338 aa, unidentified
MKLYGGIDLHSNNSVLVLIDEEDRVVVEKRLRNDLALILQELTPYRKKLTGLVVESTYNWYWLVDGLMDSGYRVHLANTAAIQQYEGLKHTDDRHDARWLAHLLRLNILPEGYIYPREARAVRDLLRRRHRLVQQRVGNLLSIQNQFARLGMNGFSAQRLKRLQDGELDRLIAEPNVRSAVTANLALVRCLNLQIERLEREVLTQVKLAAQFAPLTSVTGIGKILALTIMLETGEIGRFAKVGNFASYARCVDAKRLSNEKKKGSNNAKCGNPYLAWAFVEAANFAIRYSPRIKRFFDRKCARTNKIVAFKACAHKLARAAFHVMRDRVVFDETRAFG

SEQ ID NO: 129618 - protein, 421 aa, unidentified
MTTIRCTTDQATWVGIDIAKKFNDVLIEQPGRRRQHFKVANQLEDYRRFAKFLGDLDERPVIGFEATGNYHRPLAFFLAEKGFSLRLISSVAAARTREALYNSWDKNDPKDAQVIVHMLKTGVTQLYHDPLVQGINELQELSKTHFQISLHKVRVQHSILTHYLPLYLPEAEKYMKSKRAQWFTHLIERYPCQAAVTKFSQKEFIDDAWTYVGRKVNKTAFLEDFYATASQTIGLPVSEDSEAIRMFRIVLREHQRLCEIRADIEKEAESFLANNADYARLKTLPGVGPIVALTILAEAGDLRRFSHHRQFLKFCGLDLSSQQSGQFRGKKKLSKRGNRRLRYVFWLAATVAIRMRENSFRDKYARYVASDPTNADLKRKAFTAVAAKMARVAHGMIKNETNYRPFYERAVPGGTIPAQGR

SEQ ID NO: 129619 - protein, 342 aa, unidentified
MNSTTIAVDVAKLVFEVAVSEHPGHVRERHRLSRARFHRFLGEQPPATVLMEACGSAHHWARRAQACGHRAVLVPPHVVRPYVLRNKTDRTDTKGLLEAFRNEEVRAVPVKSETQQALSALHRLRSTWLATRTARLNTVRGLLREFGVVIPIGARQVVPHVMTLLEDADAGVPGLLRPALAEATHEIRELEARIRAVERQLETAAAQTVVVGQLRTIPGVGLLTATALVATVGDVQRFPSARHFASYLGLTPRERSTGQRRHLGAISKRGDTYLRTLLIHGARSVLCHAKTKTAPPPDRLRRWALQLERLRGHNKAAVAVANKLARIAWAVWRHGTEFSSAA

SEQ ID NO: 129620 - protein, 348 aa, unidentified
MAIVGGFDIHRRQVTFDYLDTVTGQVRRGRISPACRETLRHWLERFAGRADVTFAVEGCTGWRFVVEELQRAGITALLAEPAETAHLRGPKRHAKTDKTDSRHLRMLVADGRVPLSWIPPRQVCELRALLQLYRDLAEEHTAWTQRIHATLFHQGVPSLAGRLGDPQVRARLAADGAGMGLSPAGTQAVAVALRRMDDLEAELGPVHARITAFARRQAGCKALARELFGVGPLVAAVVWAFLGDARRFSSSAQAVRHTGLDVTVWSSDGKGPPGYLSHQGPPILRWALFEAGHQSSRTASPDHRYYADVAERIDANRAALSVARKLARRSHHILRRLGDQAYTPVPGW

SEQ ID NO: 129621 - protein, 410 aa, unidentified
MNTNSPLSAPKRYAGFCGIDIAKNKHVACVIDRDGNVVVKSQTFTNDAAGYQQILTRLKEAGGPRKITVAMEATGHYWYSLHDFLVRNRYHVAVLNPIQTAQQAKKSIRKSKTDRIDARHIATLIKNGEGRPAIIPGELGMNCRQLTRLHHNMVRQESRIKQMIWSWLHPVWPEYEPLFVAPFCKTGRVLLRTAPTPSDIIDMSEEDLYELIRKTSRGKFGRSRANKIHQAAESSIGMHRGLAATRICIRLLIDQLEALKPIRQQLETEIQTLANQLPGYMFTLPGISAASAVSLFGETDPIDAFSSPSQLVAFAGLDPAVSQSGEPAAQEPARHISKRGSPFLRKTLWLMTFRALQQDGELRDYWLRKRRQGTHHLAAVTATAVKLCRATWRILIDRRDYLPQQPITKH

SEQ ID NO: 129622 - protein, 412 aa, unidentified
MQVLYARCSGLDVHKNSVVACVMITGTDGQVQQQTKKFGTFTPDLLALSDWLTSQQVTHVAMESTGVYWKPVYNLLEGLFQLLVVNAHHIKAVPGRKTDVNDAEWIADLLRHGLVRGSFIPPARQRQLRELTRHRSNLVQRRAQAVNELQKCLEGTNIKLASVVTDITGVSATEMLSHLLGGQTEPEMLAELARGRMKAKKPLLQKALQGKVHPHHQLILTQLLAEIGYAEEQISEVSTEIAARLKEQEEFLQRLDEIPGVNRRAAEVLAAEVGQDMKPFPTDKHLTSWAGLCPGNNESAGKRRSTRTRPGNRHVKAVLIEAANAASHKKNCYLRAKYHRLAGRKGRKRALVAVARTILQSAYYMALRGTHYQDLGENYYEMRNPLRLASRLAKRIEKLGFKVSLEPVPMAA

SEQ ID NO: 129623 - protein, 343 aa, unidentified
MQMITTIGLDIAKSVFQVHGVDAAGEVVIRRQLKRRYVLAFFQKLSPCLVGIEACASSHYWSRELQALGHTVRLMPPAYVKPYVKRQKNDMADAEAICEAVTRANMRFVPTKTPEQQSCLMLHRTRHLFIRQQTAVINSIRAHLAEFGIIAPVGRKGVTELLHVVADPSDKRVPEVARACLAALGTQLLRLKQQILEFDRMIMAWHRSNQTSKRLHYIPGVGPILATALVASVADPRTFRSGRNFSAWVGLVPKQHSSGGKDRLGSISKQGDRYLRSLFVAGALAVIRYAKIHGTKHRPWLTALLARRPTKVAAIALANKIARMAWAMMAKGEHYKQPVALAA

SEQ ID NO: 129624 - protein, 417 aa, unidentified
MERLQTACGGLDVHKRTVVACVLRPAADEQGQGIKELRTFATTAEAAQALRDWLVAAGCTHVAMEATGVYWKALYRTLEGHCTVWLVNAQHIKKVPGRKTDALDAEWLAELVQHGLLRPSFVPSAAQRALRDLTRTRTALIEERTALINRIQAVLEDAQIKLAGVASDIMGVSGRDILAALLAGCTDAAAMADLARGKLRQKREALEQALQGRLDGHHRLLIALHLEQVDLLDEQIARLSAEIAARLRPHEAVLVRLETIPGVGRRTAEILVAEIGVEVSRFPSAGHLASWAGMCPGQHESAGKRKGGPRRHGNRALRRVLTEAAKAAARTKKPQQTYLRGRYWRLVARCGKKKAAVALGHTILRIVYHVLATGEPYREPVLLAIDERRRAQVQQRALAQLAALGYEVTLTPTVPAA

SEQ ID NO: 129625 - protein, 346 aa, unidentified
MLAEDVAFVLGVDTHAEAHSLALIEAKTQQLSRCLTIPASRRGYRQALRLARRHAPGGRAWALEGSGSYGAGLARFLAARGERVLEVERPTRAGRGGRMKSDSLDAERAARQVLSGSAGARPRFGSETQALRALLATREGAVRACTAALNELRALVVTSPAELRERLEGRSEATLIGSCARLRPGRSDSERAACALALRSLAVRVRQLRAESETLERELVRRIETLAPALLARRGVGPISAAALLVAWSEPGRLRSEAAFARLAGAAPIPASSGKTVRYRLDRGGDRRLNRALHTIVLCRRRVDPETKAYIARRVSEGKSEREAVRCLKRYLARSLFRMLEAMPRT

SEQ ID NO: 129626 - protein, 439 aa, unidentified
MKNNVHTKMAAHKAIQQAKSAPDKMLCIGIDIASQTHVARAVLGNNKRLKKGCGFNSTIEGFEKFISWVADLKTSYNIEHIFVSMEPTATFGRPVYTYLKNALPNCGFFQVDPMAVAYARKMHSSNLSKGDPEDAFLIAELTNNGKCRTPLKRPQLCLALRELFRNKQHAVKNAIICERQLRQLLDSLLPGVLNFIPERCKMDVYSVFNKTLDPEKIRSLSLEKWIEINSEFSCPKEKLKSFHQLACTGIKAFDNAVFCIETWPTVWQAYKLSQLTCESFKEQIEKVAKKHPDYENLITVPGFGPNTIGGFLAGAGEIEQFSKPGQLEKTFGLDLQRTQSGKTEKTPRITKRGYIHARTAMYMAAFAGCGLPAWREYYNRKKQSSGCGNKALIALAAKMTRTGWGIVKSKKKFDVTKVSTISTARHEQLLAAPSDFSII

SEQ ID NO: 129627 - protein, 354 aa, unidentified
MQTQSTQFDFTGQNIYVGIDTHLKSWNVTVMMDPYYQKTFSQNANAMTLFNHLQEHYPGGSYFSAYEAGFAGFMPHYRLMELGIQSIVVNPADVPTTGKEKVQKNDSRDSQKIARSLKNGELTPIYVPSLQTLADRSLVRLRKTVARDLAKTKTQIKSFLHCNGIDIPEDLSKENWTRKFIKWLTEIEIGPFRDTLDGHLGKYHYVYAQKLGINRKVKTLSATPRYKENMELLQSIPGVGYITAITFLTEIENIKRFKNLDRLCGFIGLVPSTNSSGENERIGEITPRGHRILRDILIEASWKAIGKDPALGTTYSRLGNRMKPNKAIIRITKKILSRMRFVLNNRTRYELGYK

SEQ ID NO: 129628 - protein, 429 aa, unidentified
MQESSSSAPAEGVAAYVGMDWADQRHDVILRAASEPAKVEYRRLPQQPEALMEWVAELQQRFAGKGKILVALEQSRGALIYHLMGYEFLELYPINPSQLASFRQTFSPGGAKDDRPDAELICELLYCHRDRLKAWKPDDELTRKLTFLNEGRRKAVDQRTQLANEIKSQLKVYFPLALEVLDNDCSTALAADLLLQWPTLDSLQKQRAHKLRKFFYAHNCRQEQKLLERLELIKAAKPLTRDLAVIEPTALRVQLLAQQLKSLLPYIARYEKQIAELFDAHPDSFLFRDLPGAGSALGPRLLTAFGTDRERFERSMEISSLSGIGPVRRASGKKSGKHATVHFRSACPKFLRQSFHEFAACSIRYCSWAEACYQTQRNRGKGHHAAVRAVAFKWIRILFACWKQRVPYDPQRYQQTLQTRGSEYAKITA

SEQ ID NO: 129629 - protein, 344 aa, unidentified
MVTFGVDAHKRTHTIVAVNDRGTPVGQTTVGTTSQDHLVLLRWAARFGAERRWAVEDCRHLSRRLERDLLAAGESLVRVPPKLMAHVRDSARTYGKSDPIDALAVARAAQREPNLPLARLDGPDREVRLLVDHRESLISERTRLICRLRWHLHELDPAWEPKARSLDAQRTLDEVRGRLQDHVGVVARLAGELTERCAELTITIKVLEKEITELSTQLAPALLELPGCGALTAAKIIGETAGVDRFKSRDAYARFNGTAPLPVWSSNKARHRLSRTGNRQLNAALHRIALTQARWHPPAKEMIERRKSGGNSGREALRVLKRRLSDAVFQALLHDQTAGLTLAA

SEQ ID NO: 129630 - protein, 464 aa, unidentified
MTRKRTGTRKRSAQSKLDLKTVEIVHPDAAGIDVGGSEHWVAISPDRDAEPVRRFGSFTADLRDMARWLVEKGVKSVAMQSTGVYWMPVFEVLEQHGLEVFLVNARHTKNVPGRKSDVQECQWLLKLHAFGLLNNSFQPTDEIRIARTLWRQRGNLVADASGTIQRMQKALIEMNVQLSSVLSDLSGISGMSIIGAILEGERDPWKLAALVQPEVKAAPQAIAKSLEGNWRKELLFVLRQEVELYRTYQEKIHDCDLQLREHLKSFGSVVNLAAQPIGPKPKGKSGSKNAPQFDLRTELYRITGIDWSQVNGIDVLTAQTVIAECGADLSAFPSEKQFTSWLGLVPTNEQSGGKILKRRTRKVVNRAATAFRNAATTLLRSQSYLGAQYRRLRTRLGAPKAITAAARKLACLFYRLIKNGQQYVDKGTEYYETKYREQQVRILAKKAQRLGFQLFTPTPLAPAL

SEQ ID NO: 129631 - protein, 343 aa, unidentified
MGEVSTIGLDIAKSVFQIHGVDAGGAVVIRKRVTRAKLLEFFATLPACLVGIEACPTAHYWSRRLQALGHTVRLMPPSYVKAYLKRSKNDANDAAAICEAVTRPSMRFVATKSEQQQSGLMLHRSRQLLVCQRTMLSNAIRGHMAELGIICAKGRNGTAELLEIIADEQDDRIPSAARFSLDVLARQYAVVRAQIVAIEKRIHAWHRSSEESRRLEEIPGVGPIVATALVAEVGDWKEFTSGRSLAAWIGLVPRQHSTGGKERLGRISKQGNRHLRWLLVAGAMAVIRYARQHGTKRPWLARLMDRRPIKVAAVALANKIARMAWAMMVRGERFKEPKLLPAA

SEQ ID NO: 129632 - protein, 357 aa, unidentified
MDTFVGVDIHKRFSQVHVQSQDGNALAQVRLEHDDPDSIRDFFGELPGTVHVAVEATMGWMWLADELQALGCTVHLTHQKKAKAISESRLKTDKVDAETLCHLLRTGFLPEAYLAPPHVRDQRMRLRYRMALVHMRIRVKNAIHAILVRYNIRLPYADIFGRKGMQVLKELVLPPPAPACLKGWLELLEFLQSQIALAEHSLYMGCQDDSRVELLTSIPGIGKLTAHLILAEMGDVSNFCRPRKLASYAGLAPSVHQSAERFRTGHTAPGRPYLKWALVEAARAASRKDPALSRFYERKKRQKGSAKATVAVARKLSKIVWHVLTEKRAYRPAASQQPGSARTTNWVSASRRTARVS

SEQ ID NO: 129633 - protein, 335 aa, unidentified
MKKIHVGIDISKEKCNLCYRSGLENVREEESPNEVKALKKTIKAALKVLGVSLGDILVCAEYTGRYIYPLTVACQELDIFLWLDDPTRIKNSMGLTRGKNDAIDAARIAEYAYRYSDKAVRYRIPDAALVSMKNLLSDREFLLTDRKRFQSQLSDQKKYMAPGDFKHKNSRWKKVIKSIDEQIAAIDAEIEALIAADPVLARQKELLVSIDGIGERIAINMIAITGGFTRFQNARQFCSFAGLTPYKYDSGTSVRSKAKISKRANQTMKALLHLAAVGAATHMKKGEYKDYYERKTKEGKHVMCVLNVIRAKLVHRMFSVIKRDAEYTKEYKTAS

SEQ ID NO: 129634 - protein, 362 aa, unidentified
MEEKRFVGIDLGKREYTIAIIKEKGKVSTHHGKTSIEGRMALYRLLRKGDRIAVEAGNLAFIMAWEILNIVGSEVIVLNSAKLPFIWDAPTKTDKEDARKLARLVEERRDEKLPIVPLPDKEEMERRETISNYGREMKNRTRAINTLHSLFVKQGITTVVKKNLATVERRAEAIKVLSGREREDAVWQMKYLEMYEQRIKELKDRIKKEAKTDENMKLLQSIAGVGPIVAYAFVAHVGDGRRFSKGAQVSNYIGFVPRLYYSGTIQRNGHITKRGNGYLRGLLVQAAWAAVLSKSGGALRERFIIKTKEQGYGKKKTIVAIARRLVELMYSVLRSKKKYEPKPYMGISSKTTTQLAEQAMSA

SEQ ID NO: 129635 - protein, 425 aa, unidentified
MTRPQLTPPAGVLVAIDVAKARNEVLIEVPGSGRRRRLSVLNTRAEHDRLIALLTDLGQPVTCGFEATGNYHRPIAWRLLQAGFTVRLISSVGLARTREALHNGWNKNDPKDAQVMLHMIRIGASQVYQDPLAAGINEVQELSKTHDAVSRAKTEVLHRILTHYLPLYFSEVDRFRHNSRSDWFFAFLDRFPTPASITALSKEAFIAAAWDVVGRKVAKAQLLGDIYETARISIGLPVPPDAPAVSMFRLVIGEVRGLIRQRDAIEATADALLTDSSDYKLLRRIPGIGPINALTILAEAGDLRRFSHHRQFLKFCGLDLATQQSGTFRGQTKLSKYGNARLRRTLWLAGQVAIRQRENGFRDKFERYIARDRHDADLRRKALTAITAKMARVVHAVIKTGADYRPFVEGPVPGGRTPLSRAVRA

SEQ ID NO: 129636 - protein, 356 aa, unidentified
MSEGSWVGLDVHARSVVAGVIDQGSGEVRSLRVPPGNDGTVAWLKTLPTPVRVVYEAGPTGYRLARACAGAGISCVVAAPSRIRPAADRVKTDRRDAERLARLLRLGEITPVRVPGPEEEAARDLVRAREDARGDLMRARHRLSKLLLRHGMVYDATAWTRAHDAWLRRQRFQGGPLAVVFDECYGRMLDAKTRRDALDKAITELAGAPPYVDVVERLVCLRGVSTLTAFALTVELGDWNRFRPTSLGAFLGLTPSENSSGERRRQGAITKAGNSHARRLLVEAAWHQRRPPRLSVTLERRRTGKSLAVRAQADRSARRLHGRWHALERRGKPRTIVVVAVARELAGHCWALATME

SEQ ID NO: 129637 - protein, 423 aa, unidentified
MKFKSQARQNQLIENITSSHLVVGIDMAQQTHVARAVNFRGIIIGEPLSFTNDEDGFHSLLHWVNKLQVTHQLNSAIVGMEPTGHYWFNISQWLVKREFEVVLVNPHLVKKNKENRDNTRSKSDKKDALVIADMVKNGYYSTRRSTPEAFEELRVLLSNRDSVVKRLVSTKNQIHRWVDVVFPEFRQVFKHITCIGALATLRLFPTPAELREKQSKDVVQGWKKLMKRHSGLRKAQELIKLANHSVGAKHAAHAYKLHLKQLLAEYDLACEQLQIVEKEILCALERIPFAKSMLAIKGISVISLAGILGEAGDLSGFVHGNALLRHAGLNLTEASSGKWSGQIILSKRGRSRLRHFLFMATMSMVMTNPEFQRMHSYNVQTKKMKKMKSIMKLCGKLARILVGMARNGQDYIPHKTLSHQKAA

SEQ ID NO: 129638 - protein, 343 aa, unidentified
MNISRIGIDLAKNVFQLHAVDRHGKVVWKRRLKRDQLLKAVLNRTEPGCEIGMEACGGAHHWARELQSRGYSVKLMAPQFVKPYVKSNKNDANDAEAICEAMNRPNMRFVTIKSVGQQDIQATHRVRSELMSQRTAKANQIRGLVAEYGLVAPLTLCALRAAIPCWLEDAENGLTDHFRSLLHGVWTDLVTLDDRVRELDRGIQKLANSNEVTQRLQQLRGVGPLVATALFATVGDARQYHRGRQMAAAIGLTPRQHSSGGKDRLLGISKRGDVYLRSMLIHGARAVVSQAKHRDDRLSRWVTDIAQRRHPNVAAVALANKTARMAWAMLRNETDYDPDFAMR

SEQ ID NO: 129639 - protein, 412 aa, unidentified
MSRVVDIVRPVCCGIDVHKSFLVACIATTDARNNTTHQIRRFSTFKGDLKRLAEWLLANNCHDACMESTSKYWIPVFNVLEKTCNVCLTHPKYVKAIKGKKTDKKDAKWIAELFKCDLIRSSFIPPPLIRHLRELCRYHAKLTYMNSSEKNRGQNCLTVCNFKFDDVFSDVFGKTATRLLDKLIELGHSDFDVAPLMHKRCKATPEQVKAALDGELAPAQAQKLNIIRLHMKHLESLKSTLESSVSQLASPYQPQINLLLTVPGISSPFTAIRILAEIGVDMSVFETAKQLCSWAGLAPQNNESANKKKTTRIARAGAFLKPLLVQCTLAAVSSNKYLWLKEKYQALKKRRGHKKAVIAVARKLLSAIWNMLAKNEPYNIELHRKSDTPPVNRVLTPEQAFTLLRKHGYQIV

SEQ ID NO: 129640 - protein, 343 aa, unidentified
MYYIGLDVHKKTISFCVKDTAGCVHQEGKIGSTRRELDAWIKTLPQPRVIAMEATIFTGWIYDHLLPHAEKVKVAHPLMLRAIAASKKKNDRIDARKIADLLRCDLLPECHMASTEIRQRRRTLRYRGLLVRQMVQMKNRISGLLMETGVSYNKRRLHKVGYFAELLSTNEEVNQSIRPLLKLSRETIVRCQKTDYALVSSLERDPLLAERLKRLRTVPGVGPITALTWALEIGDVTRFESIKQAISYCGLCSAEKSSADKVMRTPISKQRNKHIQRALVEAAKLAPRQCHELAVIYQKEKQRGNSNRATLAVARKMVAYLLAVERRKQDFVPAEDFASRAAA

SEQ ID NO: 129641 - protein, 338 aa, unidentified
MTIVTLGIDLAKNVFAVHGVDESGKPALVRSSVPRARLLELIASLPPCLIGMEACSGAHHWAREFARFGHTVRLMAPKFVIPYRLSGKRGKNDAADAAAICEAVTRPNMRFVPVKSLEQQGQLLVHRARQGFVEQRTATLNRIRGLLSELGIVLPLKAAVVRREALARLEDLPGWANTVIGDLLSEVSRLDERIGQYDQHIRNMAGQSTEAQRLMQLSGIGETTATALLSTIGNGRDFKCGRQLCAWLGLVPGQYSSGGKQRLGRITKAGDPYLRSLLVLGARSVLAAAKNKSDPISRWATALAQRRGYWKAVVAIAAKNARLCWAVLSRGEAFRLQA

SEQ ID NO: 129642 - protein, 368 aa, unidentified
MVPSLLTGIECQTGIGVPVKRQEGTEMKITRVGLDLAKDVFQVHGVDAEECVMVRRQLKRRQVLAFFARLDRVEGCVVGMESCCGSDYWARELIKLGYDARIMNPAFVKPYVKANKNDARDAEAICEAVGRPTMRFVAVKSLEQHDLMLLHRQREQYVKRRTALANQIRGTLGQYGIVVSKGLGLLRRALPRLLEDAGNSLSATAREAYAESYQELCELDEKVARLDGKLEHLAHQDPRCVRLMSIPGIGPLTATAWVALLGDGAQFEKGRQCAAFLGLVPRQHSSGGKERLLGISKRGDRYLRTLLVHGARAALRTAGTKEDRRSRWVREVAATHHANVAAVALANRNVRTAWALLRSGETYQMVAA

SEQ ID NO: 129643 - protein, 342 aa, unidentified
MDVKIIGVDIAKRYFQIHGVGASGLVTIRRKISRDGFLKLLAELSPCLIGLEAGSGAHHWAREIARLGHDVRLMPPQFVRPYVKTNKNDAADAEACCEAVQRPGMRFVPVKSIEQQAAMALHRVRDHLVRQRTGTINALRGHLAEYGFVAAALRGGLYQLFSIVEAESDDEHLPGSLKQLLRMLVAEIRTADAHIAELDRKLKDNAKTDEACRRLIEVPGIGPVIATVVVATVPDEQRFSSGRHFAAWLGLTPKQHSSGGKERLLGISKRGDAYIRRQFINGARSLVRIASGRTGGYWDWINALLARRTFNVVTVAVANKLARVAWALQAHGSRWQAARNPI

SEQ ID NO: 129644 - protein, 414 aa, unidentified
MDVKYERCCGIDVHKKTVVACVIVPGAQKGAVEKETQTYATMADDLGALAQWLQAKGVTQVAMESTGVYWKPVFNLLEGQFAVIVVNAERSKALRGRKTDVADAEWIADLLRHGLLQGSFIPSAQQRALRDLTRFRTSLVNDRIRAVNRLQKTLEDANLKLASVVTDITGVSGRAILQALVAGQTDPQLLADLAKGQLRKKSAQLQQALAGTLKPHHQVIVMELLSQIDYLEEAIGRLDAQLQELMTPYIAQIAALDSIPGVSRRIAEVLIAEIGVDMTPFASAQRLASWAGMCPGNHESAGKRQSGRTRKGSPWLRRALTEAAHGAARTKNKYLSAQYHRLAARRGSKRAILAVGHSILTISYYLLTRHTTYQELGHNYFDERDREGVKRRAVRRLEQLGFQVTLAPPMHTLT

SEQ ID NO: 129645 - protein, 316 aa, unidentified
MVPSPLFVGIDVAKATLDIAVRPTAETWSVSNDATGIDALVLRLGALAPTLIVLEATGGYQGPLVAALVAAALPVVVVNPRHIRAFAQAVGILAKTDRIDARVIAHFAEAVKPAPRPLPDAETQELRALLVRRRQLVEMVSAERARLDTVPSSIQDAIQAHIAWLTTQIAGLADALTRASQTHPVWQAKDDVLQSIPGVGPVLARTMLGQVPELGTLGPKPLAALIGVAPFNRDSGTLRGRRTVYGGRAEVRAVLYMGALVATRHNPVIKTFYERLLAAGKAKKVALTACMHKLLTIMNAMVRDLKPWQPQEVPSA

SEQ ID NO: 129646 - protein, 397 aa, unidentified
MCCVRLPGPGGSRRRLQEVITYSTMTPSLQVMAERLLDLGVTRVVMEATSDYWKPPFYLLEAHGLETWLVNAKDVKHLPGRPKTDRLDAVWLCKVAERQMIRPSFVPPPPIRRLRDLTRYRAALVSDCTGEKNRVEKLLEDAQIKLSVVASDIFGVSGRDMMAALIGGQRDPKVLAQLARSRMRVKIPQLEEAFVGRFGEHHRFLLAKMLQRVDAISADIAEVDARIDAEIAPFADTVARLDQIPGVGVTAARVIIAEVGLDMSRFPTSSHLTSWAKFAPGVKESAGRKKGRGSTGHGNRYLASALGEAAVGSARTDTFLGERYRRLARRRGSKKAMVAVGRSILVIVWQLLSDPNAHFHDLGPDFYANRLGADRTKRNHIRQLEALGYKVTLEPAA

SEQ ID NO: 129647 - protein, 407 aa, unidentified
MMDQLFVGIDVGSRGNVAYIMRPDGDLFSTFAIENTLGGYRDVSKRIVAAMDKLGLDAVQIGMEATSIYGEGLVHAIREDGSLGRFQRKIHVLNPKQVSKFAESYNDLPKTDWVDAFIIADALRFGRIKNEVYCDDYRYEALKTLTRARFYAVQNLAREKQRFGNLLFKKCSGLAQSGDVKNTASSTFALMENFETVDDLANAELEELSAFLRSASRGRFANPDETAKIIQAAARGSYRLPKTINDSVNQAMSVSIAGIRALESQIKDLETAIQNQFEIIPNTIISVPGIGKVYSAGIIAEIGDIRRFQSHASVAKYAGLVWKKHQSGEFEAEDTQLIKSGNRFLRYYLLEAANSVRGCDSEFQRYYNLKYKEVRHHQHKRALALTARKLVRLLFRLMKDNRLYIPA

SEQ ID NO: 129648 - protein, 313 aa, unidentified
MPVSLSKPIVGVDVAKNELVIYQADGDLLEAIPNTKTSIKQWLKALLGPVSIAIEATNIYHLDFADLAYEAGCTIYMVGGYELKHYREGVKIRAKTDALDAKLLARYLKNEAEELRPWTPPSPMYRQLLSLFRRRAALVQARVGLVQSWSNEPLLKAAFAEQIKSMQRLETMIEKTINDQLKEAGLLGQLKRCLKVEGIGFLTGARLLTAFQRGEFSNADAFIAFLGMDLRVSKSGQKDGRRSLTKRGDPEARRLLHNAAMSASRTKAWKGFYDEQRARGFSTTQALVILARKLARVVFALLKGQSEYQPKVS

SEQ ID NO: 129649 - protein, 377 aa, unidentified
MIAMTRSEVSVNEAVLFVAFELGKKTWKLAATTGLGVAPWLRTVASGDLGAVAAVITAARARFAVPETARVLSCYEAGRDGFWIHRALGARGIENRVVDSSSIEVNRRHRRAKSDRLDARKLVLLLVRVCCGDRHAWREVRVPPAAVEAARHRSRERTALTQEQTRLRNQIGSWLATAGCVVSRRRRQPPQWWTTVRDWAGEPLPAPVQARIARAEMRLALVAEQVALIDAAQAETTAAAAPTSPHGRLVQLKGIATTSASVLIDEGLVWRAFQNRRQLGGLLGFAPVKYESGELSRDQGISRAGNDRLPSTMVQLAWGWVHWQPASALTQWYLARFGTGKRTRKVGIVALARKLFIALWRWATAGVLPMGAILRRA

SEQ ID NO: 129650 - protein, 455 aa, unidentified
MPSKTKKKKQAVLPVLNADAAGIDIGATEIFVAVPNDRDAEPVRSFQTFTEDLRTLCRWLQACHIRTVAMESTGVYWIPLLQMLEAAGMEVLLVNARYVKNVPGRKTDVADCQWIQYLHSVGLLKASFRPAQEVCAIRSVLRHRDNLVGLASQHVLHMQKALDQMNLQLHHVISDITGTTGLAIIDAVLAGERDAERLAALRDPRIRTAKETIAKALIGDYRPEHLFTLQQSVSLFRVYQSQIRACEAEIERLISRLMTKTDATSQPLPLAKDSVKKCKVMTPARAITLREEGYRVLGVDLTSIPGISVLTVQTILAELGPDLSKFRSAAAFSSWMGLCPNNEISGGKVLRAGTRRVKNRVAVALRMAAQSLQGSQSALGAFYRRMRTRLGAPKAITAAAHKLARIIYHLLATRQAYEDTVFSRLETQHARSVENRLRAQARVLGFDLVVAERVP

SEQ ID NO: 129651 - protein, 352 aa, unidentified
MAKNDFDELMSVGVDIGKDVFHLVGFDKDGQLVLRKKIKRMALIATFEGLPKCVVGMEACLSAHFVSRTLRNMGFEPRIIPAIYVKPFNKGQKNDYNDAEAIAEAALRPNLKTVSEKTQDQLDLQALHRVRSRLVSRRTATMNQIRAFLIEQGITVRKSVAALRTSLQAILDNRSDEISLRMRKLILGLQQDWIWTDKRIEMTTSEIKSVSESEASCQRLMTIPGIGPIISTAVVAAVGTGEAYDRGRDFAAWLGLVPRQHSTGGRTILGRITKRGSRYLRMLFVQAAQVIMMRPKNWHKFSFGAWLEAAATRMQHNKLGVALANKLARIAWSVLNSGKNFDWKEKELATAI

SEQ ID NO: 129652 - protein, 364 aa, unidentified
MEVYVGMDVHCKESVFVAEDGEGKVVCEGRVPTTAEGFRLLRTKYGLEPGTSVALETGTSAFFAVRHLARLEFEPVVVNAHEVRKQASRPNQKSDRRDAIELCEGLRRGSYRSIIHVPDANVQRLRQTLSRRRHFIRLMTRETNAVKHLLRSEGLGDLARSLKTEVAWDRLHKRLAFAPELQGLLSCHHEVWSCCRKQVEHLDGELEELAKFFPEAMRHLRTIPGVGTIVGLTLIAVLSDVERFPSAKHVASYAGLIPSTYQTGERNYQGRITKKGSGELRAMLCEAAHQAAKARSPLHPYFAKLCAKRGYKMAVVAIAHRLLRISWAMLRHGTEFQVERLGVEEGPFEVKSTRYYRFKETSAA

SEQ ID NO: 129653 - protein, 383 aa, unidentified
MKKESNETGKPQQTFPTKRKTAQVTIGMDLGDKTSRYCLLDYDGKVVKEGKVATTKKGMGQTFGGMARCRIALEVGTHSPWTSRLLKSFGHEVIVANARQVKLISASSRKDDKLDAQMLARLARVDPQLLRPIQHRSEEAQQDLMLIRIRAGLLDARTDLVNTARGLTKAVGERLASCDADQMGVEKLADLPVGMQETMKPLLSEVESLTRKIKECDVKIEQIARTKYPETTLLKQVKGVGTLIALTFILTVEDKERFAKSRDVGCYVGLRPRRSDSGESQPQLRITKEGDKYLRKLLVQGGHYILGQQGPDTDLRRWGLELCGRGAKNAKKRAVVGVARKLAVLLHRLWVTGEVYEPLRNSRLKEEAAKLKKSAAKVKRAAA

SEQ ID NO: 129654 - protein, 343 aa, unidentified
MEEYIGLDVSLKETAISIRRDGKRIWRGKCKSDPDSIATLIQKHAPCAERVVFETGPLSTWFYHALSAAGVPAICIDARHAKAALDMAANKTDANDADGLAHLAEVGFYREVRVKGYDSMLTRTLVAARTRLVAICTELSNQIRGLMKTFGLVVPAGKGATFGSNVRMLLEGQEALSQIILPILKAWYGIREQAAALSRQLIAVARESQSCRLLMSIPGVGVVTATSFVTAIEDPENFKKSRSVGAWLGLTTRRYQSGEVDYDGHISRRGDAHLRSLLFEAATVILTRTSADSGLRRWGLKLRERLGFKRAAVAVARKLSVTMHAMLTSGQLFDRAVGLADNG

SEQ ID NO: 129655 - protein, 337 aa, unidentified
MNHMYCGVDIAKDTAVFCLLADNGELIEGSTTFNNNAHGFKAGLRWLCKLARPFKPFHIHLVMEATGVYYLTLAKFFNGQTGITVSVVNPAQVKSYAQAELVRTKTDAVDAAVIARFAMAVKPRPWSPPAPHEEELLGILHHVEAIKDMIQAERNRLHALEATGPSTINVQRAVKKHIRFLEKQIDDLTDRLRRVVKEHPDIDENIKLLCSIPGVGEITAHTLLSEIGDIGRFDGVKQLVAYAGIAPSERQSGTSVRGKVMINKRGSRRLRKALYMPAVVASQHNPAVKALYQRLLEDGKNPLCAIVACMRKLLHIAYGVLKNRKQFDPDWNSALLT

SEQ ID NO: 129656 - protein, 349 aa, unidentified
MSMLSDLVDIVIGVDTHKHTHTAGVIDAGTGGQLGDRTVPTDPSGFDELIEFADARDGVRVWAIEGTGGYGAGLTRHLQARGEWVIELDRPDRPARRHGAKSDPLDAYRAAREALSRVTLASPRAPGSRAALSVRLAARRSAIEAATVAQRQLNALVIAAPESLRCRLRGLSIRSMIPIAARLRGHDSWDTETIETAHVLRALAKRIIALENEAAEHERALATTIKTWRPDLLELCGVGPINAAIVLCAWSHPGRIHSDAAFAMLAGAAPIPASSGQTVRYRLNRAGDRQLNRALHNIAVCRLRYDPTTRAYAERRRNDGKTDREIRRCLKRYIARQLFRQLERPLDNP

SEQ ID NO: 129657 - protein, 361 aa, unidentified
MAKARTLVGLDVHAAKIVAAILDSETGELRFARLGGQSAAVVELCRALPGPVRATYEAGPTGYGLARGLASAEVECLVAAPGKIPRGATDRVKTDRRDAEHLVRLLLAGKLSPVRVPGPPEEAMRDLVRAREDLRIDLMRARHRLSKLLLRHEISFEGPGRNWTERHLAWLAKLEFSDPAAQATFCDYRGGVEALLHRRGELERRIEGLISTSPWTTEVGRLRCLRGIDTLTAIGLCVEVGDFARFARAGQLMSYLGLVPSEHSSGESRRLGSITKSGSRHARRLLVEAAWHYRNPPRVGREIERRQQGQPAAAVAVAWSAQRRLHRTYSQMRKRNKRATVTTVAVARELAGFCWAITQIE

SEQ ID NO: 129658 - protein, 393 aa, unidentified
MYLVGIDIGKLKHSFCLLEKETGEILVEPVFFENNRDGFNVLLSSFKHLPQKDILIGMEDTGHYNLALLKFLLERNYQVALINPVATDLTRKMQGGISKNDKLDTLTICDVLASNQRVKSYRISKYSSFDLYEQKQLTREHHNLKEELNQYTNRLQKSIDIVFPEFNSLFKSKYGNVYMNILKEFGSADVIAHADIRTLRKYFDTGRGKHISLTAEELKEAARNSIGFPSTAEVIQIKHLVAQIELIKEQIAEIDKKIEEFSIQNNSPILSIPGISHFSGTSILAELGDIHNYSKPSQIIKYAGVAPLTYESSQFTAQHTAITKKGCKYLRKTLYQIITPVIQYNPVFRKFYQLKIAQGKGHRWAQGHCVRKLMRVIYHLLSTGTQFDPALLR

SEQ ID NO: 129659 - protein, 344 aa, unidentified
MNLTRVGVDLAKQVFQVHGVDRHERVQVKRTLSRRQVRSYFAEQAPCLIGMEACASAHYWARELGQLGHTVKLIPPQFVKPYVKSQKNDANDAEAICEAVGRPSMRFVAVKSAAQQDVQALHRIRSELVRQRTAKANQIRGLLSEYGIVVPVGIGTLRRAIPEIQEDAENGLSGLFRRLLSGLRQDLETFDTRIAELDAEIVQAALSDETAQRLQSIPGIGPMTATALVAAVGDARQFARGRDLSASLGLTPGQHSSGGKERLLGITKHGDCYLRTLLVHGARAVLKGAARKDDPRSRWVMSVAHRRHKNVAAVALANKMARIAWALLTRGGTYDSRHGMTAAA

SEQ ID NO: 129660 - protein, 342 aa, unidentified
MDKMAACGMEVSAQELVIASSGKKGEAVLLRFANTAAGHGQLLRTLTRGGKRVRVCMEATGVYGLDVALLLSAQEGVELMVANPRAVRNFARAMMQRSKNDQLDAVVLREFAARMPFQAWARPTENTLALWAIARRLKALTKEGTAEKNRLHAARVSQAIPACVRRNIARTLRFHQREMQQLRGEALRCIAADARLRRRYQQPRSVTGIGEISAIQILAELALLPEDLDVRQWVAFAGLDPREYSSGTSVRKYTRISKVGNRHLRQALFMHALVASRREPHLRAFYEHLLASGKKKRQALVAVARKLLHAIYGMFRSDQPYDGARVFQLPASLATPLAAHAT

SEQ ID NO: 129661 - protein, 338 aa, unidentified
MKSYAGIDLHASNSYLGIIDNNDNRLFGKRLPNQLDTIRSALRPFGKSLNGVVVESTYNWYWLVDGLQSAGFKVHLANPSAIKQYEGLKHTDDQWDAFWLAHMLKLGILPEGYIYPRQHRPIRDLLRRRLLFVRQRSAQILSLQSMVTRNLGINIRSNEIKKMKEASVRDLFDDPDLAFTAVTNVSTINFLKTKIRDIEKRILAKTKLSPQFVILTTIPGVGNILALTIMLEADNIGRFAKAGNYSSYCRCVKSEKTSNNKKKGEGNRKNGNKYLSWAYVEAAHFAARYCPEAKRFYERKKAKTNGAVATKALANKLARASYYMMRDQVPFDKDKLFC

SEQ ID NO: 129662 - protein, 314 aa, unidentified
MTIQNDKYHIGIDVSKAILDVYILPEKKFLQFENNIAGIRKLVKKLKLFSEALIVMESTGGYEKSTAQALAKENFSVAVVNPRQIRDFAKALGRLAKTDRIDAQVIALFGEKIQPKENVSCDENQQKLAEKNARRRQLVDMIIMEKKRLDKASKEMKKSIQHVVKLLEKELEKINKSLEQYIKSDDEYARRNTLLQTIKGIGSVVAAGIIADLPELGKLSAKQVSSLAGLAPLNRDSGSLRGKRTIWGGRASVRRTLYMATLVATRYNNKIKTFYERLCAAGKQKKVAIIACMHKLLIIMNAMIKNDQPWRLEV

SEQ ID NO: 129663 - protein, 345 aa, unidentified
MPIVGGLDIHRKQITFDYLDTETGQVRRGQVSPADREHLRAWLARFAGRDDVAFAVEGCTGWRYVTEELAAAGVTAHLAEPADTAFARGRKRHAKTDKTDCRHLRLLLAEGRLPECWIPPGRILEARALLETYHDLRAEHTAWVQRIHAVLFHHGAPALGEGTLRTGPGLAALREVSAVHLSPAGQLQVATALEVLGALEARLHAVRHQLLQEARHLAGAKVLAARLYGAGPFAALAMTCWLGGAGRFSSSRQAVRFAGLDVTVWSSDRKGPPGRLSRQGPPVLRWAVYEAGKTHARASAPDHAYYAQVKDRCNGKRAALSEARKILRQACHILAELGDDAFAAA

SEQ ID NO: 129664 - protein, 339 aa, unidentified
MFYVGIDYHKESLAVCIMKQGGDVEKFVELDATPDGMDSLINMMNGRKYRVMGEAFTYAIDLHNYLIESGVDSYLTDAKDFKVITRSHKKTDKNDSETIAWYLRLRSRGEIDLSVAYIVRNDEMKLRDLCRLREDPARQKGQEMQRIKMHMRRNGEYIDEMKYPDLTRKKALKHVQESFPGDYALMERIKTYIYITGRCGAIDDSFDKLAVNSVDIKLLTSLGGIGNLTAVQLMSMIVSIDRFETADKMRSFYGMAPNVRDSGETVKHGHITKAGDPMMRTILNRVIHTHMRCGGDDIAAFYESHKDSMGKMKARTAACNKLPDRIFAVLKRRTPYVRR

SEQ ID NO: 129665 - protein, 394 aa, unidentified
MKLIGIDIGKNKHFFCIMDKDSGEIVSQPASFSNDKEGFDFLLQKIKSYPKDSVIIGMEDTGHYHFALLKYLLDLQYTVALINPKTTDLNRKMQGGITKNDKLDTINICDVLDTPERKKQYRITKVNKFDLYEQKQLTRQHHNLKEELNVYKNRLQKSIDIVFPEFNSLFKSKYGTVYMNILKTFGSAENIANTDIRTIRKCFEIDGRGNRISLTPERLKERARSSIGISSIAEVIQIKHLSAQIDLIEEQLSEIDKKIEEFSIQNNSPILSIPGISHFSGTSILAELGDISNYSKPSQIIKFAGVAPLHYESSQFNAQHTAITKKGSKYLRKTLYQIILPVIRHNPVFNKYYQLKISQGKGHRCAQGHCVRKLLRIIYHLLKTNQQFDSHLLR

SEQ ID NO: 129666 - protein, 384 aa, unidentified
MFKHNILFIGLDTHKVATEVAYIEDQRGAEAILLGRILSNKQSIKKLVRQMESKYPHATLHFVYEAGPCGYWIYRYITSLNHCCYVIAPSLIPKKPRDKIKTDERDALKLAKLLKSEDLTPIYVPEPEDEAVRDLSRLRQTAMEDLKDAKYQLKAFLLRNNILCKTKDNWSLKHLRWLTELILPTPCQQIVLQEAIQTISERTNPLKRLDNELEHNVKKWRYYPVVKAIQAMRGVKLLVATGVIAELGDLTRFDHPRKLMSYLGLVPSEHSSGSKRHLGAITKCGNGRARRLLVDGAHGYRYEANISKEMQLRQEGLSKEIIDIAWQAQLRLCRRYQKFMHRGKHRNVVVTAIAREMIAYIWAISREVVLSPVNKKLRIARMPS

SEQ ID NO: 129667 - protein, 388 aa, unidentified
MIYAGIDIAKLNHFASVVSSDGEVLVEPFQFSNDFEGFRSLSLVLDKYDRDQLLIGLESTAHYGNNLVEFLVAKGYRFCVLNPIQTSSTRKKNIRRVKTDKVDTFVIAKTLMQEEHRLFEKQDLDYLHLKNLGRSRQDLMKKRTTCKIKLTSYVDQAFPELQYFFNGVHHKAVYALLKEAQTPEQIASMHMTHLANLLRVASHGHFKKEKAQELRVLAQRSVGSNDSSISIQITQTIEQIELLDRQIDDDEAKIEEIVKAMGSVIMTIPGIRYVEAGMILGEIGDIHRFPSYSKLLAFAGLDPTVRQSGKFNASRTRMSKRGSRVLRYALVYSAHNVVKNNETFRKYYDLKCSQGRGHYAALGHCAGKLVRIIYKILSEDIAFDPNRL

SEQ ID NO: 129668 - protein, 363 aa, unidentified
MLAGIDSHKDTLAVAIIDDAGRPVVVRAVPNTELGFDALEDLLTDHQVSRVGIEGSDNYGRGAALRLVLAGQLEVVEVPPSLTSRERTARPGQGKTDPVDAVAIARITAREPLLPQVRLAAGAAADLRALVDYRAQLVEESTALANRVHAELHGLLPGYHATVPKLTSRAHLTSALALLEGDGRVRAELTRRRLARMLELDTEIGQLTKQLSQALTMTGTRLTQVYGIGPVIASTLIGEIVDVRRYRSRHAFAAANGTAPIPASSGRTSRHRLNRSGNRRINRALYMIAITQIRADTEGRAYYRRKLAEGKTEREALRCLKRRLSDLIYRHSTTMPPPCSPSPRRSWPQPPRTMGGPRQPGRV

SEQ ID NO: 129669 - protein, 368 aa, unidentified
MGEPITYVGIDAHQRALQLAMLIGESDEAITWTSPTEPAAMDRLCRKLERTAPGAIECCYEAGPTGYTLQRRLTSDRIHCRVIAPSLVPRKPGDHVKTNRRDARKLAEFLRAGLLTEVRVPTLAEEAVRDLCRARDDARTDLMRSRQRLGKLLLRRGLIYHGRNWTKRHSEWLDQIHWDLPVEHQVMMDYRLAVAHVGARMVEIDRRLEELAGGAPYDRRVAALRCFRGIDTISAMLLLAELHQVQRFPHPRALMAFVGLVPREHSTGDQRRRGTITKAGNSAVRRLLVQAAWHYHHYPRLGAPRQRRRCGQPVAVLAIADRAEQRLCLRYRRLAARLKPKPIVITAIARELVGFVWAVLQLPEVQVP

SEQ ID NO: 129670 - protein, 510 aa, unidentified
MSHKARTSRRPKQPQPILKPHGKIDHRVQQVGPERFGIVTVDCAKARSKWMLADFYANVLVPPTEVEHTRAGLENMLQHVRQAVQEHRLRDLLVAIERTGNYHTPIQRAFRRAQFETRIVHPFATKQFRQVDHPGVKTDDIDLAALHRATIVGFALAEQTLESPYRQLQLLVRHRRDLVDKRAALRCQIREHVHLNLPGYADLFGQHGSHFWDRPLPLTIARHFASAAQVAAVGFEGLAHLLTQHGIHFQRPTLLRILAWAQDADPPHEDALMRQRILADLDDDFTKKTQQILALERDIAGYLVQTPYMLLMAIPGINVVSAADLAGEMGPIEHYPNANAITGRAGLFPGRYQSDQVDQTTSLIRCGNKRLRDALMQIGDNLITCNDHFHGLAELWRARDVDPRLQRVRVVKQFSRLAFAMVAGRQVVPHRCCQTPDYLLHKLLQFELDHLTPLEDMRRHLFAAADLVPNNVRPQEAAALEEEKGSGLISMVKSPDPFSFSGKRAGSVGK

SEQ ID NO: 129671 - protein, 364 aa, unidentified
MKRKVYVGMDVHKETIQIAYFTSNSKEILKEQQIKHNEVQIKKFIKKLKTEWNEIHCCYEAGVTGYPLYRYLKSLGVNCILVAPGKIPRQNTDKIKTDKRDAIKLARLMRSGELESIHVPSEEDEAVRDYLRSRDSLRLDLGRNRQRLMKFLLRKDIKYSTTKYWTVSHYKWLNNLHFNNEILQETFNDYYSRVRVQEENLKSMDKKIQEIAESEPYREKVGILRCFRGVDYLTAMFLLCEVNDFKRFKTAGSFMSFLGLVPGEYSSGSKRKQTGITKTGSPRLRRILTEAAWQHRFPGTGSKIITARRSGQPALVVALAEKASLRLHKKFRNLQLRGKTPQVMITAVSRELSGFLWAAMNLVA

SEQ ID NO: 129672 - protein, 370 aa, unidentified
MKNRLLYVGLDVHKNTTDVAIANGRSNGKVRSYGKIDSTLDALNKLIKKLQDGDKELRFVYEAGPCGYQIYRYLDAKGIHCGVVAPSMIPRRSGNRIKTDRRDAINLARLFRAGELTSIYVPTPEDEAVRDLLRCRDDMKRFERKARQRLLSFLLRHGYQYSGKKNWTKGFYTWLATVRFSYSAQQVTLQEYIDVTNECSERIQRITQQIQVHVEEWNRAPFVKAYQALRGVSIIVATTVVAEIGDMNRFQSPKQLMAYLGLIPSEHSSGKTVRRGPITKTGNSHVRRVLIEAAWTYKMQARVSNILFKRQKGLPKSVCDISWKAQTRLCARYRRLYARGKSRQTVVTAIARELSAFIWAIDKEIQLAVL

SEQ ID NO: 129673 - protein, 350 aa, unidentified
MITIGCDYHPGFQQIAFVDTETGDCGEQRLEHSEAARRFYRDLATQGMKVRVGMEASGHARWFERLLAELNFELWIGDAAEIRARRVRKHKTDRQDAQHILQLLVEDRFPQIWVPSGENRDLRQLLWHRHRMVQARTRIMNQLQAVALNEGLRCKKRLWREHGREQLESFRLAPWASRRRQDLLLLLDRLNPMIAELSQAIEQEVEKCPEAQRLMTHPGVGPLTALAFVLIIGRADRFQCGKQIASYLGRVPLEDSSGNRRRLGHITKQGSSMLRFLMVEAAQVTVRSLPKWRSQYFHLMMRRGRKIAKVAMARRLAICLYWMWRKGWDYQQVVRFGWHAGKLGTGDGVQ

SEQ ID NO: 129674 - protein, 331 aa, unidentified
MKNSQIIGIDVSKSVLDVFIHSLNFHFIVENNPIGFAGLLEICCTRLSCKPDNLSLCFENTGRYSRSLAVFLFEANITFAMVPALDIKKSKGLTRGKSDKIDAKAIALYAWRKRDELVPTKLHSEQVAQLRQLISLRDKLIKHRTAYKNSLKDLKDCFFDGETIFIKESQLRLIDSLNHELGLLEKQIEDIIFSLADWKFNYNLIQTIKGIGPVLAKYLIIYTENFTRFTNPKSFACFAGIAPFEYNSGSSVKGKTRVHPCANKHLKSLLNIAAMCVVQLNGEYKKYYIRRTIEGKNKMSTLNIIRNKLVSRVFAIVKRQTPYVDLTNFAA

SEQ ID NO: 129675 - protein, 412 aa, unidentified
MDEVVEFCAGLDVHRDTVVATVRFPQGRHRGSETKTFGTDTAELVALGDWLISHRVTRVGLESTGVYWKPVFYLLEDRIEQLWLLNAQHLKNVPGRKTDVVDSAWIAQLVEHGLVRPSFVPSPPIRELRDFTRHRRVLSEERTRMVQRLEKVLQDAGIKLTSVASTVLSKSARAMLEAMLAGESDPVVLAELAKGRMRSKIPALTDALRGSFRVCHHGVLVRQILSHVDFLDAQLAEIDEQITTRVTTFEPIIERVQTIPGVARKCAIGMIAEIGVDMSVFATPAHLALWAGICPGNNASGGKARSGRTRHGPVALKTVLTEAAQAAARTKNTYLGARYHAIRGRRGTFKAVGAIRHDILIAYWHIVTADVGYQDLGVDWLARRHSREHQIAQLAKQIEKLGAAVEITMPAA

SEQ ID NO: 129676 - protein, 427 aa, unidentified
MVRSIGMDVHRDFCEVAIAEAGAVRAAGRILTTPAALELFARSLAPTDEVAIEATANALAIARIIEPHVARVVLANPKAVRDKSPRAKTDKVDAKTLARLLAVGFLDEVWTPDEAARARRRLISRRCALVRQRTREKNQVHAALQRNLIERPPMSDLFGVKGRAWLSVRLERLPLDERLSVEACLRQIDFVAGELAALDKIIAADALSDVDALRLMTLPGVSAVTAIALRGAIGDISRFRTPRHLVAYLGLDPRVRQSGNEPAKHGKISKQGPGEVRGLLVEAAWHAARTAGPLRAFHQRLAGRRGANIATVAVARKLVIIAWHLLSRGEKYAFMRPALYRQKIRRLGLMTGATRQQGKRLAEPSYLRASDPRRHAEDELVEAHEAAYRRLVADWQASRPSRKAGAGATPGRASQRPSKGKAARQAV

SEQ ID NO: 129677 - protein, 315 aa, unidentified
MAMSVSVSKPIVGVDVAKDELVIYQTELDLLETLPNNKPAIKKWLKTLPAPVDIAIESTNIYHLEFADLAHDAGCTIYMVGGYELSHYRKGVKVRAKTDALDAKLLARYLKNEYEELRPWTPPSPLYRQLLSLFRRRAALVQARVGLVQSWANEPLLKAAFAEQIASMQRLEVLVEKMINDLLKEAGLLVHLRRCMKVEGIGFLTGARLIAAFQRGEFKNADAFIAFLGMDLRVSQSGQKDGRRSLTKRGDPEARRLLHNAAMSASRTATWKGFYEEQRAKGFSTTQALVILARKLARVVFALLKGQSEYQPKAS

SEQ ID NO: 129678 - protein, 344 aa, unidentified
MFYAGLDLSRKRLDVHVLDEAGKAVAERAICPDADGLRSLATTLGLSPVRAAVESMTGARFIHDQLELHGWDVEVADAAKVKGLAPLACKTDKIDAWVLAELCRRDLVPSIWLPSPEVRAERERARFRLHLVRHRSSLKNRIHAILLTFGKPCPVSDLFGHAGRELLARMQIPEPWRGSIAASLELIDDIDRRIHDCERDLRSLGASHPYVSLLQTAPGIAWVLGYTIASEIGDISRFATARKLVGYTGLCPRVYQSGERDRRGPLAKNGPRYLRWALIEASTHAARHPCYRGRYERTSKRLGKQRGSRVARVEVARSLAEAIWHMRTRNQPFAPAGAFETSVA

SEQ ID NO: 129679 - protein, 344 aa, unidentified
MSNLDTCGIEVSAKELVVMLRRQEDLEPLRNFTNTPEGHTMVLRYLRRAGRVVRVCMESTGLYGLDLALALSTQEGIEVMVANPRAVRHFATALMQRSKNDQIDAGVLEQFAARMPFQPWQRPSVATLALHALARRLRELVEMQTAEKNRQHAAGLSQAIPTVVKRDLARSLRAQERAIERLTRQARKLIAQDPQLTERFELLDSVPGIGETSAVQLLGELGVLAPDLEARQWVAYAGLDPRQYTSGTSVHKKPRISKAGNKHLRHALFMPALVAVQHDPHLRAFYQHLLAQGKFKMQALVAVMRKLLHALHAMFKTHQPYEGSKLFRLNSAPAQEVTRALVAS

SEQ ID NO: 129680 - protein, 348 aa, unidentified
MRFYNQHHKFYCGIDLHARKMYLCIIDAQGKTKLHQNLDTDPVLLFDAIFPYLEDVVIGVECMFAWYWIADFCSEHKIPFVLGHALYMKAIHGGKTKNDKIDSYKIAKLLMGGNMPIAYPYPARMRATRDLLRRRTYLVRQRGLLLAHIQNTNTQYNLPSFEGKKISRKFNHEAVAGRFEDPSVNLAISADLTMIDAFNRLIKPLEDKIEKIACQHDPNNLYLLKTIPGVGQILALTILYEVHDIGRFKTVQRFCSYARLIRPEKESDGKWAGKSNKKIGNAHLKWAIRTAATISLRESEQAKKFVDRLSRKYNKGKALGIYTHKLGRSIFFMLKNKKAFDMKQFFSQ

SEQ ID NO: 129681 - protein, 482 aa, unidentified
MKKKAASARPKTSSARSSKTTRAWQVVHPRAAGIDVGAAEHFVAVPPDSAGADNRPVRKFKAFTAELDALVEWLKACQVDTVALESTGVYWIPLFQKLEMAGIEAVLVDARAVKHAPGRKSDVQDCQWLQQLHSYGLLRAAFRPDDAIYRLRTLVRHRGSLISSAAEHIQHMQKALVQMNIHLHQVVSHLNGETGLRILRAIIAGERDPEQLVKLRDPQISRSTPEEMKAALQGDWREEALFVLRQSLSLWDTYQERIGECDGAIKKQLEQIPTPASAPEPAARPKVDPLASQTPKRKRPQSIKRNEPRIDLRPQLARLCGLDLTAAHGMGVLSVLVILSEIGLDMNKWRSAKAFASWLGLCPNNKISGGRVLSSRTRQVKNRAAAAFRMAAVSLGPTETWLGSFHRRMKGRLGEAGAVTATAHKLAVVVYHLLKHKEAYLERDLVQYEARIYKHNVAYMKKKAKALGMKLVPLTNETSLTE

SEQ ID NO: 129682 - protein, 367 aa, unidentified
MKKVSTAAARQSRNFSEQKLTIGLDLGDRSSWYCVLDERGEVVLEQRLGTTPKAMREVFGAMPRSRIALETGMHSPWVSRCLSELGYEVIVAHARNVRLIGESRKKDDRLDAQTLARLARIDPQLLSPVKHRSAKAQADLTVIRARAGLVRARTALVNTARGLAKSYGERLRGCNVRNMNPEKAEGLSPELQTALEPLLTAIESLSERIGEYNEGIEKLAQESYPQVALLKQIKGVGTLIALTFLLTLEDPHRFRKSRDVGCYLGLQPGRRNSGQSEPQMHISKEGDPYLRTLLVQGAQHILGPFGADCDLRRWGLKLAERGGRNGKKRAIIATARKLAVLLHRLWVSGEVYEPLRNSHQRATPAAA

SEQ ID NO: 129683 - protein, 377 aa, unidentified
MKRIKFVGLDVHAETIAVAVAEQEGEVRSLGVIPNREESIRKLVKKLGPVEQLRFCYEAGPTGYVVYWQVSALGAKCEVIAPTLVPVKSGERVKTDRRDALKLARNYRAGELTAVWVPDAAHEALRDLVRAREAAKKDQLRAKHRLSKFLLRHGRRPASGVKPWTLNYMAWVKKEVHFEQAAQEATLLDYLHEVEHAETRITRLDQAIDEAVKSTTPKMRAVIEGLQALRGLAQVAAVTIVAELGEISRFSEPRQLMGYGGIVASEHSSGESTRRGGITKTGNAHLRRVVVEAAWAYRHRPNVGAALRKRQELVSEEVREIAWKAQHRLHARYRKLTARGKEKGKVVTAIGRELLGFIWAIGVKVEAAQKETERQAA

SEQ ID NO: 129684 - protein, 424 aa, unidentified
MSKKKSSLAGLGALYARACGLDVHKKLVVACVRILDSKDGTVQSTLRKFGTMTADLLELRQWLAELRVTHVAMESTGVYWQPVFNLLEGHFKVWVVNAQHIKKVPGRKTDMKDAEWIAQLLQCGLLRPSFVPERQQRELRDLTRQQTKLVQQRNAVDNRIQKVLETANIKLGSVASDVLGVSGRKMIEALMAGEKDVTVLAELAQRKLREKIPQLQRALEGELTEHHRFLLRQLLRQYDFLEKEIASVSERLGAVAPPSFRAAVEQLDAIAGVGARGARALLAETGTDMSRFPTHKHFASWAGRCPGNHESAGKRRSGKTPAANRHLDAVLTEMAHAAVRTKNSYFKAQYHRLAGRRGKKRAIGAVKHSLLITVYFMLRDNRPYKDLGVDYFDKLNPQQRIRYHVRRLRELGQGVELSPIADAA

SEQ ID NO: 129685 - protein, 319 aa, unidentified
MAQKTRIVGLDVAKNKVDACIRSAGVRLMTPSTPEGQAELVAWLRAHRVRRAVMEASGGYERSWAEALRAAGFEVLIVDPRQVRCFAKAAGRLAKNDPIDAETIAWFAETFSDREAQPADPARQEIDRLVQARTALKDLEERIAQQGEHGPPDIVAKALGAIAKAMRAELRKLEAAIAAKIKANAVFARRAEIIDSVPGLGDQAIAGLIAWAPELGRITNQAAAALIGAAPYDDDSGERKGVRHIKGGRRKLRNLLYMPVMGAATQHNPVLKAYYQRLRARGKEAKVALIACMRKLIVILNTMLARDQTWSPPPAKAAG

SEQ ID NO: 129686 - protein, 326 aa, unidentified
MAKRITICAGIDTGKRKLDVAIDGSSLQLQVENTAEGHEVLLVWLRRHKVKRIGIEASGGYELPVVTELRRKRFVVVVFQPAQVRAYAKFHLRLAKNDKIDAALIAACTAAVKKIHAAPDPRLQPFAEHLTLIDQIGEDIQLHKNRLETCRDPRIQKLWEEEISRLAKRQRVELKALAAAIRQHPDLAQRLNLIYSVSGAGMSTAVAILVRMPELGTLNREQVAALAGLAPYDDDSGERSGARHIDGGRKRLRRALYTAALPASFFWNPHLVALYQRLRSAGKVHKCALIACARKLLIFVNTVVARGTPWQTKPPLVATTGALPAT

SEQ ID NO: 129687 - protein, 315 aa, unidentified
MERSPAAPSFVGIDVSKDRLDVHVLPSGQIFTVQRDDTGLESLVRELRQSAPTLIVLEATGGFEVTVAATLAGAHLPIAVVNPRQIRGFARAIGRLAKTDALDAKIIALFAERIRPDACPLADADSQALAELVARRRQVVEMIGMETNRLHQVRNPHVQRMLRATLKTLTNQLAELDRDIDDTIKRSPIWRAADDLLTSVPGVGDVTAHTLIADLPELGQLDRRRIAALVGVAPLNRDSGQMRGKRTIAGGRAEVRRALYMATLSAIRWNPVISKHYQSLVDRGRPKKVALVACMRRLLGILNAIMRTKTPWQCA

SEQ ID NO: 129688 - protein, 291 aa, unidentified
MKQNILHIGLDVDDTQYHGAAFNKDTGEVCDFKCRPTLKGLLNQLDKLAGYFPGCVIRLCYEASYVGYCLQRDLISHGVHCDVVSPSSIPSPRGKAVKTDRIDAGYLAQFYANDLLTIVQPPDAEQEQDRDFLRSRQKLMQQQTQLRKHMQAVLRRSGLHYKAETGNKSPWTKHHYCWLARTIDGLSGSLKVNLELLLRQLKGLNQILTEYGHQIEELANSPRYQKAVQSLTCYKGIKNIFALTMITEIGDVKRFPHPRKRVSWIGMDIREYSSGGKYNRFGITKHGTVRI

SEQ ID NO: 129689 - protein, 349 aa, unidentified
MGMLADRVDHVIGVDTHRDSHSAAVCNPSGAVTGETTVAADAFGYKRLLRFAGEQARGRRVWAIEGTGSFGAGLTSFLLEQGEWVVEVDRPARPARRNGAKSDELDAARAACEALSRQHLAQPRRRGEREALRVLLAIREGAIVSRTKAIGQLKALIVNAPEQLRQHFRKLTTDEQLTRCARLRTNPTQSVEHRATIVALRSCARRALALEAEAADLESQLELLVRELAPTLLTEPGVGVISAAQLLNAWSHQGRFRSEAAFASLAGAAPIPASSGQVVRHRLNRGGDRQLNRTLHTIVLSRLAHHAETKHYAARRTAEGKTPREIKRCLKRHLARRLFRLLETNAEAA

SEQ ID NO: 129690 - protein, 343 aa, unidentified
MSTIVSLGIDLAKNVFALHGVDAAGKPVLVRPNVARSALVELIARLPPCLIGMEACSGAHHWARLFAQHGHTVRLMAPKFVAPYRLSGKRGKNDAADAQAICEAVTRPQMRFVPIKSIEQQGALMVHRARQGFVQQRTATINRIRGLLSEVGIVLPLKAATVRHEACRHLESLPAWANTVVADLLTEVERLDERIAQYDRHIHAIAGQSPQAQQLMALPGIGETTATALVSTIGNGHDFTCGRTLSAWLGLVPGQYSSGGKARLGRITKAGDPYLRSLLVLGARAVLAAAMRKDNPKQDAISRWARTLHERRGYWRTVIAIAAKNARMSWAVLHHGEAFKLPT

SEQ ID NO: 129691 - protein, 464 aa, unidentified
MSRYVGLDVHRMTIEACMINESGHVLGRASLACTRDALEQFAHQQLMPSDRVALEATTNTWSVADLLRPHVAAVVIGNPLRTRIIAEARIKTDKVDAEVLAQLLRCDFLPSVWQPDPAIRQLRELSGHRSAVVRQQTRLKNRIHSILAQRLIHPPFADLFCKQGRQWLTAVVLDPADRLVVDGHRQLLVHLEAEEAKITTALAKVSYPREDVRLIMTLPGVGAAVAQAVIAALGDCSRFRDADHAASYLGLVPSIRQSAAHCHYGSVTKAGNSHARWLLTQAAQQVGRHPGPLGVFFRRLARRKPRNVAVVATARKLVTVAYYMLKNREPYRYALPERTQFKLSALRVDATGERRPKSKVGRPLEPQPAGRRTRRTPDLNSVYAAEGLPPVRVEPATPGEQRVLNACGGIELMKRIHQPRVRYSFRKPKPELTAAPGAATITLPTKTEPGRENGLPAFLPGSSG

SEQ ID NO: 129692 - protein, 407 aa, unidentified
MRLFVGDDWAEDHHDVEVMDASGRRLAKARLPEGVTGMARLHALVGEHAGDEPDDVQVLVGIETDRGPWVQALLAAGYTVFAINPLQASHYRARHAVSGAKSDAADAHVLADMVRTDAHQLRPVAGDSAAVEAVKVVTRTHKTLIWERTRHTQRLRHALRDYFPAALVAFEDLDAADTLELLAKAPTPAAAARLTLSQISAALRRARRRDVATKAAAIQAALRAAHLGQPDVVAGAYAASVRALIAVLTVLNEQVKELQGQVAEHFGQHPAAEIVLSQPGLGQVLGARVLAEFGDDPDRYTTAKARKNYAGTSPITRASGKKRTVSARFVHNDRLIDALMTQAFSSLQASPGARAYYDRQRERGANHNAALRQLANRLVGILHGCLKTGSLYDETTAWPHHVEQVAA

SEQ ID NO: 129693 - protein, 422 aa, unidentified
MTTTKQQFAAYIGIDWADQKHDICLSTSIDGKAEYKKISSTPEALTEWLSQLRQRFPKGNIAVCLEQSRGALIYHLMTYDFLVLFPVNPMTLAKYRQAFSTSGAKDDRPDADFLRELICVHRKHLRPWYPDDETSRSLALLAEARRKAVNDRTKHTNRLQAVLKNFFPQALELTGAHLYDKVSLAFLEKWERLEDIQRAQDKTIRKFYTSLGSRSTRRINERLQLIRSAVPLTKDNAIIKSSTITVRMLVRQLLSLNESISEYDQALAEMFDQHPDKDIFSSFPGVGDVLKPRLLAAFGTDRNRFEKAENIQEYSGIAPVTRRSGKTSIVHRRLACSKFLLQTFHEFASCSRKKSIWAKAFYDMQRDKGKGHHTAIRSLAFKWIRIIHRCWRDRVCYDEIMYLKSLQRNQSPLLKYIANEIT

SEQ ID NO: 129694 - protein, 353 aa, unidentified
MEYIAFDAHKHYTLASVARPDGGLVREQRIPHASGALQQFLQRCERGSPVAVETVGNWYWIIDEIEAAGCVPQLVHARKAKLMMGMINKTDKLDARGLNRLQRAGTLPTVWIPPGELRDQRDLPRTRMVLVRQRTQLKNRIHATLAKYALHDREVSDLFGARGRDLLRQRLALLPPHTAYATQHLLEQVEALDRHVCDFEDRIQAVFKLTPAIQLLMTLPGVGLVLAVVIALEVGDVTRFATAEKLAAYAGSTPRVHASGGKTRFGRLRPDVNRYLKWAFVEAANAICLNRGRAPRRHVSRLYERVARRKGHPKAIGAVARHLAEATYWILSKQEPYREPKASAVSPTGDQRG

SEQ ID NO: 129695 - protein, 339 aa, unidentified
MKTYAGIDLHSSNNFTAVINEQDQRLYRKRLPNRLDAVLSALEPFKDTLEGIVVESTYNWYWLVDGLKEKGYRLHLANPSAIKQYEGLKHTDDQWDSFWLAHMLRLNMLPEGYIYPKEERSVRDLLRRRLLFVKHRTAHILSLQSMISRNLGTQISGNAIKRLEQGDAEILFNHPHLVLAAQNSIAVIRFLTKRIKLIENAVKTHITLREEFSYLLTIPGIGDILTLTIMLEVGDISRFPTVGDYSSYCRCVRSERLSNGKKKDENNRRNGNRYLSWAYVEAANFSNRFCPHAQRFYQRKMAKTNGIVAIKALSNKLARASYYIMRDKVPYDVDKLFRK

SEQ ID NO: 129696 - protein, 342 aa, unidentified
MQNMMIGVDLAKNVFQVHGASQTGEVLYRKKLSRKQFSAFMALQEPSLVIFEACGSAHYWAREMEALDHEVRLIAPQYVRPFVKRQKNDAADAEAIVIAARQPEMRFVEPKTIEQQSRAAVFRGRERLVHQRTADVNALRALLYEHGHVFPAGIRHLNRMTALIEDEISGLPMLIREECKDLLAQIAEKTARIIERTVKLKTLAAQSDKARRLQTMPGVGPLTAVAVEAFGPDMAQFKTGRDFAAWLGLVPKQHSSGGKERLGRMTKAGQADIRRLLIIGAMSRLTWLGRRTIPAGSWLSRMLARKPKMLVAIALANKIARQIWAMLTKNENYRDPALAVVA

SEQ ID NO: 129697 - protein, 422 aa, unidentified
MSWMAPGCLMSEEDARRRDEGKPAARRPATIGGKVFYVGIDLAKRKHSASVVRDDGKRLVPGFAFPNSSEGFAALLARLAKAGATGDSSKVCLEATGHYGRNLIAFLEGHGYEVFEVNPLLTANWRRATSVRKVKNDAVDAEALALWLLAGNPTARRRAKDESDDLRALARSRTSLSHMIGDCKRRAVAILDVTFPELHGFFSDDFCVAATAVLMRWQSAEALSHARLDSIRKEVREAGGRLSGARVADLRELARASVGTASAPLAFQLRQLLAQIEFTRGQMAELDAELARMVEGSPVLTVPGIGTVLGAGILGEVGDVSRFASAKQLLAFAGCDPSVFESGEFVGSRAHMSKRGSPYLRWYLWLAAERARVHDPALGAYYAKKRSEGKCHKVAVSAVVRKLVSIVYAVLRDGTAYVCPAA

SEQ ID NO: 129698 - protein, 367 aa, unidentified
MLEKIVSALHSMRLNDVVIGLEATSIYGDSLVYALREDGSLGRFQRKIHILNPKQVRKFKEAYPDLPKNDWVDAFVIADHLRFGRIAKEVYMDDYRYQALKTLTRARFDIIQNLTREKQRFANYLFLKCSGIAQAKDIQNTSATTIALMEHFETVDDLANADLDELTAFLSEAGRGRFVAPDAAAKAVQTAARGSYRLPKTVNDTVNQAMAVSIASMRALKEQVKVLDKAIEQQFEIIPNTLTSVPGIGKVYSAGIIAEIGDIHRFESQASVAKYAGLVWNRNQSGDFEAEHSRMIKSGNRYLRYYLLEAANSVRRCDSEFRRYYDLKFKEVNKYQHKRALALTARKLVRLVFRLQKDNRLYIPPEG

SEQ ID NO: 129699 - protein, 315 aa, unidentified
MVDVPCFVGIDVAKAQLDIAIRPAGERWAVPNDASGIAPLVDRLQALHPTLIVLEATGGLERAATAALAAAGLPVVVVNPRQARDFARATGQLAKTDALDARALAHFADVIRPTPRSLPDAQTQELRALLGRRQQLIVIRTAEQNRLAGTSVRLTKDIAAHITWLNAGIATLDDDLETLLRASPLWRENDDLLQSAKGIGPVCARTLLLELPELGTLTRQQIAALVGVAPLNGDSGTLRGRRTIWGGRAHVRTVLYMGTLVATRYNPQIKAFYERLLAAGKVKKVALTACMHKFLTILNAMLKHRTPWQPQEVQS

SEQ ID NO: 129700 - protein, 404 aa, unidentified
MRSNEMKSSTILYVGIDVSKDKSDICIKDNSGNDLIQRFKITNTKADLGKLYETIERIKCKTPGNSDVVFGMEATGIYSLPLYSALKRDGHKVKLYNPIQTNGFRKINIRKTKTDPIDSAVIADMLRLSEPPQVIGIKDLNLIQLRELVRIRHRLIEKQSICKIQLIRNIDTIWPDYESVMPTVFGATSIAILKKYSVPSKVRAKSIEQFYELVKKASRSKISRTKAEEIYAHAGNILTIPEIESIITIEIKTLITQLELYDEQIESVEIKINEMMKSIESKIMSIPGIGEILGPIILGEIGNVDRFSNAKKLIAFAGLDPGVSQSGRFQNTTGPISKRGSPLLRQALFLAANVARQNDENLKRFYDKKISEGKHHFSALNAVAAKLLRIVYWVLRITRSIKHK

SEQ ID NO: 129701 - protein, 394 aa, unidentified
MIIIGIDIGKNKHEATLIDEKGNIIGKSIKFENSTAGFNKLISNINNYNISNDKFVFSMEATGHYWLALFSKLVESDYNVQVINPIQTDACRKFYIRETKNDSKDSFLIAQVTRFNGYSKTTLPDEVMISLKELTRFRTFLVDDISDYKRKATVVLDKIFPEYTQIFSDTFGKTSKEILTKYPLPKDILDEDLESLAKVLSTSSKGRLGYSKAEQLQNLAKESFGIKFATEALVMEIKSILSTIEHLQNQVSKLDEKIAVLLRSLGTTIETIPGIGPILGAIIVSEIGDINRFSHASKLVAYAGIDPTVKQSGEFNATKNRMSKRGTPYLRRALWTASIVAAFNDPNLHEYYLKKKNEGKHHGTIIGAIARKLIYRIFIVLKDNIPYQCNKCEA

SEQ ID NO: 129702 - protein, 453 aa, unidentified
MAKKAKKAQTDKGLKLKIVNPNAAGIDIASGEMQVCVPQDRDGDNNRTFGSFTNDLKAICKWLKLCQIDTVAMESTGIYWIPLYFMLQQEGFDVILCDAKSVKNYSGRKTDESDAEWIMLLHSYGLLKACFQPENTAHMMRNLTRHRNNLLKSCSKETEHMQKSLDQMNIKLCNVISDLLGKSGQSIISAIINGNHDARSLSTLADSRCKASPEIIEASLNGTWDEDHLFTLRQSYELYQYIQEQIKECDNKIEALMSQYKAAVSTETPVKFIKNNKRIAKKNAISFDVQTYAFSLWGINPLDIPGMSNGAIMQLIGELGHDFTEKFETATKFCSWCNLVPNNKISGGKLLSSKVPKHKNHVGQIFRLCANSLKSEKTTMGFYFRRIQSKSGYLQAIVATAHKLAKVFYTMVKNKTSYDEKKVGLDEAELLKRKIQRTQLMLDRLNRKINGAA

SEQ ID NO: 129703 - protein, 418 aa, unidentified
MSEEFVWFVGIDWATMRHQACLVDREGGGREQREIPHTPAGVEGFVDWLCERTSSELHRVAVGIEAPRGALVDTLIELGLAVFAINPKQLDRFRDRHTVGGAKDDRLDALVLADSLRTDRPAFRRVQVDHPLIVQIRALSRVEDDLQVDLGRLCNRVREQVYRLAPALLTLCAAADEPWFWTLLELVISPSRVTRTRIDRLLRNHRIRRLTPDEVLAQLHAPTLATPAGVVEAVRTHLSLLLPQIRVLADQRKRCADHVESLLQELETQPAADGDSREHRDVTILRSLPGIGRKVLATMLAEAARPLADRDYRTLRLWAGTAPVTSWSGKRRTRPFVTMRRACNPRLRQAAYHWSRVSLQHDPPSRAYYDRLRQRGHRHGRALRSVADRLFRILIAMLKAGTLYEPRDPHREETVALA

SEQ ID NO: 129704 - protein, 408 aa, unidentified
MNAVGIDVSKGKSMVAALRPMGEVALLPQEFLHTEVGLEQMAYAIVALGEDTRVIMEATGRYHEPIAAALHEYGIYVCVLNPLFIKQSGGGSIRKVKTDKADAMKIAKYGLDNWVELREYTPMDTVRQQLKLCSRQYNLYMKTVVSLQNNLISLTDKTFPGVNELFSSPERADGHQKWVDFVMTFWHCDCICRVSEKAFTDRYQKWCKRKGYHFSTEKALDLYAGSCGHFTTLPKNDNTKLLITTAAQQLLAGKTTLAALRTEMTRLAKQLPEYDTVRAMYGVGETTAAQLMAEIGDVRRFPRRSSIVGFAGVDPAVDQSGKHSAKSVPTTKRGSPHLRKTLYQIVCTSLKRSPADEPVYQFLDKKRAEGKPYFVYMTAAQNKFLRIYYARVKECLEAFDERQDTVQN

SEQ ID NO: 129705 - protein, 344 aa, unidentified
MEHYAGIDVSLEASSVCVVDGSGRILREAKVASEPDALALFFRELNCAVTRIGIEACPLSQWLHAGLSAAGFAVVLLEVRHVKAAISAMAVKTDRNDARGIAQLLRMGWYRPVHCKSQPSQDVRALLTARKQLLVKAIDVELCLRGLLRGYGLKMGVTTAPRFAGRVRELTAGHPVLEPLGETMLRARDVLRREIAVLHRQLLTIARSDGVCRHLMTVPGVGALTALTFKTAVDDPTRFTSSKRLGAHFGLTPRKYQSGTVDVTGRITKAGDAMVRSALYEAAHCMLTRAKSFSSLKRWAMAIAKRRGMGRATVALARKLAIVLHRMWINGTDFRFGKEQAATA

SEQ ID NO: 129706 - protein, 328 aa, unidentified
MIMLGIDVSKTKIDCCIFPQGLTGKRKNKIFTNTESGFGSLLKWLITLKIEPDQVTAIMEATSVYHENLGYYLYDAGVKVCVANPSRVRAFAKGMSMLNKTDKADSEALSRYGYTAKLIIWQPEPENVRLLKALLGRRDVYLGSLLQEKNRLEKAQSTHTSVVVIKLLEENIEYLNQQLEHIDKLINNHIDQDPTLKQDLKLLQTIPSIGERSGLLLLGLFHSHKFEKASQAAAYVGLVPVHQLSGSSVNKQSHLSKAGDSKIRSVLYMSALTAIKYNPHIEALYQRLLSQVKNKMCALGAAMRKLIHLCYGVLKHQTAYQRDYLLVE

SEQ ID NO: 129707 - protein, 436 aa, unidentified
MKVNTTTPVVSIGIDAAVVAAHQIAIRGEVREDFRASPTLAGLAKLTKRLEPYGGSLVVAEPTAGTWLPLAHAVTAAGCEIGFVANRDSARLRKAITGASKTDLIDADMLAHCAEVLGVSATAIPPPGQIALRRAIRRRHVCTVDAHRVECRLWALAAWAFPDLWRATGGHTVAQPLLQHWPDLQRLSRARVGSIADIVAAHSRDARPEQRAERIRDAARGWASFWTGRLDLDALSWELTAMIDDIDTADRRHQDATDQALGLWQRHWPGDVLTSIPGLGPICASTIRGWWGDATHLDTAKAATAHAGLNPSMWSSGLTEAPSRRITKQGPAELRLALYQAANVARRRDPQLAAHYRRLMVERGHNHISANTAVARKLACRAWAIATSGRPYQPRDLDGNPLNLSDAADLAVELAVPDDVRSRTRGHTRKGRLNPT

SEQ ID NO: 129708 - protein, 354 aa, unidentified
MTRTDKYVALDVHQATTLASVRAETGRVIARTILPTEAPPLVEFFRGMRGTVHVAFEEGTQAQWLHDLLVPLVHRVVVCDRHGEPRRGNKGDLVDADQLSARLWRGELRAVYHGSPARAALKELTRAYRNLVEDATRVMLRLKALFRARAIPVRGTRVYQVRERASWLAKLPERGVRFRAEALYAELDVLRELRPKAKAAMLAEARRDPAWRVLRTIPFLGPIRVALLLATMQTPWRFRTKRHLWAYTGLAVVTRSSADHEIQDGRPVRRRRAPLTRGLNPNHNRVLKDVFKGAATAATARPGPLQAFYHGMLARGMREELARVTLTRKLAALTLRLWKKGARYDPTQLTQQAQ

SEQ ID NO: 129709 - protein, 386 aa, unidentified
MHASNVCTPISGHCGTIFVAIELSQRNWLVVIHSPDRDRISHHRLEGGDHAGLLALIASVRARAARRLGSVPAVVSCYEAGYDGFWLHRLLTAAGITNFVFDPASIAVEQRRRRAKTDRIDGEVELRTLMAHCRGEPRAVRIVRVPSREQEDARRASRERQRLITEQTAHTNRIKALLRLLGMAVGNPRRRDWLTWLAGQRDWQGQAVPPGLKAELEREHARLMLVGEQLAALAAAPAAAETSVAAARMAERKELLLRLKGLGPVFAATLVNEVFYKDFRNRREVAGYCGLVPSPWRSGGIEREQGISKAGNPRARHKAIELAWLWLLHQPDSALSQWFRARTAGASGRIKRITIVALARQLIVALWRYLTTGLVPEHAVLKPRQA

SEQ ID NO: 129710 - protein, 342 aa, unidentified
MVTTIGIDPHKATHTAVAIDETEQVVGELTVPADRYQTNRLVEWASHLDGDGRIWAVEAAGGLGYLLSQQLITRGEQVVDVPAVLASRVRVLGSGRSDKNDPNDARSVAIAALRQPSLTRVRREDYAQVLRMLSKRHHELTSLRTQAVCRLHAVLMQLRPGGIPKRLSTIKATRMLQGIRTLDPVGEQRRLMARTHLGDIRRLDREIKANKTLIRQAVAASGSSVTDVYGVGPIVAAFLIGYTGDPTRFATPDHYAAYNGTAPIEVSSGGKTRHRLSMRGNRKLNHAIHMAAVTQIRFQTPGRVYYDRKITEGKTKKEALRALKRRISDAIYQRLQADQQTR

SEQ ID NO: 129711 - protein, 421 aa, unidentified
MQVLYERCAAVDIGKDVIAVAVRLPAGGPEGRATHKRTFKTFYGVLGEAARWLNSLGVTHVAMEATGIYSMPVYHALIEHGKFEQVLVCNAGHVKNVPGRKTDLADAEWLVHLLECGLLRGSFVPPAEIKAARDVIRYRTKVVQSRTAEVQRLGNVLQDAGIKIDSVASSIATKSGRAMIEALIDGERRPRVLADLAKGKMRVKIPDLTLALEGRFGDHHALMCRLHLDHIGHLDAMIARLDTQTETMMAPFGPERDLLTTIPGIGMLAAAAVLSEIGANVTEYFPDAAHLASWAGLCPGNHESAGRRHSGKRRHGNKHLQHILVEATWAAVRHDGYLKALYHRHVMKWGGYRSPTAKKKAIIVAAHAILVIIWHVLAAGKPYDELGTDFFTRRLDPERETHRLIAKLEALGHQVSLQPAA

SEQ ID NO: 129712 - protein, 377 aa, unidentified
MHSENIAAYVGLDVHKETLAVAIAAPERLGEVRYYGTINNEAQAVRRLFQKLQGLYGNILSCYEAGPCGFGLYHQLTAMNIKCQVIAPSRIPKSPTDRIKNDHRDAISLARLLRAGELTPVWIPDLTHEAMRDLIRARAAAKRDSRVARQRILSMLLRTDKHYAGKHWTGKHRTWLANQSFSQPSQQIAFQHYCQSLEQIEDRILQLDQEISRLLPEWSLCNLVCQLQALKGVGQLIAITLVAEPGDFSRFSNPKQLMAFLGLVPGEYSSGNSIRPRGITKVGNSELRRLLYEAAWSYRTPAKVGAWLIYYRPDSVTQYSKDIAWKAQQRLCSRYRTLTAKGKKSQVAITAVARELTGFMWDIALAAQSSFSQQKQN

SEQ ID NO: 129713 - protein, 367 aa, unidentified
MGDHSAFVGLDVHKDTIAVAVAEAGRSGEVRFLGEIRNDTAAVVRLTRKIARAYPHTLYAYEAGGCGYGLHRQLAGLGHECVVAAPSKIPRMVNDRVKNDRRDAVSLARLLRADELSPVWVPDEGHEAMRDLVRARHAAAEDLRKVRQRIQSFLLRHERHYQGSPWKKMHAVWLGRQQFEHPAQQIAFQGYLSSAAHALARRDELEAQIRELLPNWSLRPVVDALQSLRGIALITAVTLVAEIGDIRRFRKPGELMAYLGLIPRERSSGPTIRRGSITKAGNSFARRMLVESAWSYRRPARIGVEMGARMPQVADPVREIAWKAQVRLCGRFRRLAARGKKSQVVVTAIARELVGFIWAVSQAATAG

SEQ ID NO: 129714 - protein, 343 aa, unidentified
MEHYAGIDVSLESSSVCVVDATGRIVREAKVTSDPEVLTAWFKGLGVDLSRIGLEAGPLSQWLYAAMREAGLAVELLETRHVRTAFKIMPVKTDRKDARGIAQLIRLGWFRPVHCKSLPAQETRSLLGARKLLQGKLHDIELSLRGTLRGFGLKMGKTTPKTFESRVRTLVADHPTLTMIADALLRAREVLLEQFIKLDKKVHAVARHDARALLLTTAPGVGSIVALTYASAIDDPGRFKSSKTVGALFGLTPKKYQSGETDVTGRISKIGDASVRTALYEAANAILERPGNGGWLKQWAISVARRTGMRKAKVALARKLAVVLHRMLVDGTPFDMEKAAAAA

SEQ ID NO: 129715 - protein, 309 aa, unidentified
MDVFAGIDISKERLDVHVLPSGEAFGVVHDAEGLAWLCERLSALVPVTVALEATGGFETVAAGALAASGLPVVVVNPAQVRAFAKALGQRAKTDPIDALVIARFAEAARPEVRPLPDAAQRLLSDLVARRRQILQMLGAERQRLGRTAEPRLKKSLGRLIRALEKELVEIDGEIDQAVRASPVWRRKEALLQSVPGVGPITARTLLAEMPELGSLDRRQAAALAGLAPFTRQSGQWRGKSFIGGGRTAVRTALFMAALSAARFNPALKAFHRRLIDAGKPKMVALIAVARKLLILLNAVLRDQKPWQIA

SEQ ID NO: 129716 - protein, 326 aa, unidentified
MATIGIDVSKKKLDLCWLRDAQAGKVKTRVFPNAHDHYPALLAWLLKQTNEEAGDLQVYLEATGIYHEPLAYWLHQAGVTVYVLNPARVRYYARSLGDQGKSDKKDSKRIAYFAQANPELTPWQPEPEEVRTLRQLAKRLETVQKDIQREQNRLEKAQFNRDTQAEHSITHVLALLRREAKRLVKEVDDHIDRHDGLKRDRRLLESIPGIGEVLSVHLLVTLRSRRFKSGRQVAAFMGLVPVEWTSGSSVRHAPRLSKNGDPALRQKLYMGAVVAMQHNPSIRRQYQRLCAAGKRKMSALGAAMRKLVHIAYGVLAHQKEYEPQPT

SEQ ID NO: 129717 - protein, 322 aa, unidentified
MQGKMTSVRATLAVYAGIDVCKAQLDVYLHPTGQSFRVPNSMEGLKRLALELTSANAVLIVMEATGKLHRLAHRKLSAAGFAVAIVNPYRSRKLADAFGQLAKTDAIDARMLALYGEAIGPGATPVPAKTLAELQELVLARQAAKAGETALKNQYGAAESPALKRLLKAQLDAQARLIQGLKAAIEAILSKDAALKRRFEILASIKGVGPVVAATLVACLSELGVLSGGKIALLAGVAPINCDSGEMRGQRHIKGGRAHVRSALYMAAVSAIRCNPDLKAFNSRLRAAGKAPKVALTAVMRKLVRLANTLIREDRLWTPKHA

SEQ ID NO: 129718 - protein, 331 aa, unidentified
MGIDLHRRRSVIVRMAADTGERLGTVRIDNDSMALVAEIAKAGEHPEVVLEATYGWYWAVDVLRGEGAQVHLAHPLGVKGFAYRRVKNDERDAADLADLLRMGRLPEAWIAPPATRELRELVRHRAKLVALRSGLKAQIHAVLAKEGLREPMRDLFGAAGQSLLNEVRLGAAYAARVVSLRRLIDAFTFEIDTVGRRVTAQLAADPGYRAVQALDGVGPVLAAVFVAEIGDVTRFSGPAQLGAWAGMTPRHRESDTKVHRGRITKQGNRLVRWAAVEAVQRVHRGGIGAARARIGERRGANIAKVAAGRKLLTLVYYGLRDGHLRCLSRPA

SEQ ID NO: 129719 - protein, 373 aa, unidentified
MPRYSTAFGMDVHLRSTTVCALDAETGEAVTRRFRGNPWGEVAEWMSGFPGPSLAAYESGYLGFAPQRELSGLGVDCVVAAVSRVPRSAADLSSKNDRNDAARMAKAILSHDISPVWVPSPEIEGLRDLAGAHDAATARLAAAKQRLLAFLARRGYAYGGTTPAGNPRRYWTYDFLRWLDKVRPADDGGIRALAALRSEVEAASETRDDLLAEYRAAVAAGPLSAEVEALQSIKGCGFALAAAFASEVGDFSRFRSGRQVTAYFGLAPKQRSSADSVRLGGISGAGNALVRRLAVEGSWSYVQASHQPKLMPKGSGVPLEVRMHGRKGSERLLRRREEMLARGMPQAKANAATAAELVRWLWALGAMCREATE

SEQ ID NO: 129720 - protein, 346 aa, unidentified
MMMIGCDYHPSWQQICWLETTTGETGEGKLDHGSGEAERFYRQLAGPALIGMESTGNCQWFVEMATTAGHQVWIGDAARIRASEVRQQKHDRRDAALILKLLREGRFPRIWTPSGEEKDLRQLLIHRHKLVRIGATVKNELQHLAMNQGVTKKRKLWSKAGEKVLRELPLKPWASRRREDLLKVRELLRGQIAQLDRAVVEAAEKNDRARLLMTQPGVGPITSMAFVLTMGDVNRFQRGKQVASYLGLIPREYSSGGHQRLGSISKQGNRFMRMLLVEAAQNAVRYDPGMRSEYLHRCHHKAKGVAKVAAARKLAIRLYWMLRTNTGYPGVVRVESSPRVPLVSAS

SEQ ID NO: 129721 - protein, 420 aa, unidentified
MSKHRYGSVEFKRVDWSGLAEELGGGRGVLAVDVAKQDFVAAVLGPDAVVRVTFRWQHPEQTAEVLGYLGQLAGAVALEAVLEPSGTYGDALIGQLRRIGIAVYRVSPKRVHDAAEVYDGVPSLHDAKAAELIGRLHLQGVSHVWEVLGEERRELNAWLTRLEVSKARHQAEINRLEAHLSRHWPELLNLLELGSATLGELVAAYGDPAAVAADPAGAEALMHRVGRAGLSAESIAAVLASAGTSLGLPCLADERGLLQWLAANSNATRQELHAIEQEIARRVAASAGPARLAGVIGKVSAAVLVAAVGEPQDYPDAASYTKAIGLNLKERSSGKHKGQLKITKRGPSVARFYLYFAALRLIARDPEVRRWYDRQSARPGALKGKTIVALMRKLAQALWHVGRGATFEVKRLFAPAPLPA

SEQ ID NO: 129722 - protein, 343 aa, unidentified
MQTVTTIGLDIAKSVFQVHGVDAAGQVVIRRQIKRRQVSAFFQKLPPCLVGIEACASAHHWSRELQALGHSVRLMPPAYVKPYVKRHKNDATDAEAICEAVTRPNMRFVATKTPEQQSCLTLHRTRHLFIRQQISVINVIRALLAEFGIVASVGRNGVEQLLGVAADASDPRLPEVARACVAALGAQLQTLKAQILKFDRMISAWHRSSEASRRLDDIPGVGPALATALVASVADPKVFRSGRDFSAWIGLVPKQNSSGGKDRLGNISKRGDRYLRSLFTTGALAVIRYAKIHGAKHRPWLTALLTRRPTKVAAIALANKIARMAWAIMAKGERYKEPAALAA

SEQ ID NO: 129723 - protein, 379 aa, unidentified
MLDYTGKTIFIGLDVHKKTYAVTAICDGVVVKRDSIKAYPTVLISYLKKRFGTGTIKSAYEAGFSGFYLHRELVAAGIINIVVHAASIEVSNDRVKTDKRDSLKIATHLSQGRLKGIHVPTVEREDYRAVTRLRDAFVREKLRLGNQIKALLHQHGLIAPDNKKKVCLSWIKDLSKLEMTPGIKLAVEMHAKMWLEFDAKIKAIEIEIKAQAIKDKVVDQVYRGLRGIGTITARILSNELGDMLHFNNERKIFKYVGFTPCEHSSGEHTRQGHITRQGKPILRKILIQAAWTAIRYDKELQEIYERIGKKSGAKRAIVAVARRIIGRLRACFRTGTPYEMQMVERPTIKLSKQKSDQEKRPRKGGKKEISPVEQLKLAA

SEQ ID NO: 129724 - protein, 440 aa, unidentified
MAKPKNQISVVNNNTAGIDIGSRKIFIGIAEKPVVSFDTFTDDFLTAVTYLKKNNITSVAMEATGVYWISLYDLLDQSGFDVVLVKADQAKNIPGRKTDVADCQWIQQLHSYGLLRSSFIPPQHIRTLRTFVRQRRTNLQIASDHIRRAHKALELMNIKLQNVITQINGKSGLAILTAIINGNHNPENLAVLCEDSILKKKKEAVIKSLKGNFSEEHIFLLKQAVEAYLFYLKQVDDCDKQIENHLSLITQELPQPEKLNKPKPIRHHKPNINDLHVKLMQLTGGKDASRITGLTDSTLLQIISEVGTDLSRFPTEKHFTSWLGLAPNSHQSGLTNKKKKFKRHTSAGQIFRLAAQAIAQSKHLALTSFYHRIKARKGSLGAIKATARKIAVIFYNVMIMGIEFVEQGIIQYEQKIKERQMKYLQKQAKRFGYTLTPQLV

SEQ ID NO: 129725 - protein, 346 aa, unidentified
MIVIGIDPHKQTHTAVAVNGSTGEVLGELTVRARRQGFEQLVSWARRLGDERVFAVEDCRHVSGGLERHLIARGERALRVAPKLMAAQRRTDRTFGKSDPIDAKAVAIAALRHPGLPEARLAGPEREIGLLAAHREDLVAERTRACNRLRWLLHDLDPDLVPSKGVLDRDVAIRKLHVVLAGLDRSIEASICSELLERIDQINARERELARELDRLVRGVAPALLQIPGCAALTAAKLVAEIANVDRFATEARFAMHAGVAPLQASSGASNRHRLNRRGNRQLNAALHRIAITQLRMHDPAKTFVARKRAEGMSNREALRCLKRQLARRVFNTMRTIQSPAAEAAA

SEQ ID NO: 129726 - protein, 346 aa, unidentified
MKKVLKQVLGVDVAQKELVVTLGRTMDDFSIELYAHKVFRNSETGIKALLDWAVKLTDSSIKVRYVMEATGVYHQKFAYHLDENGYDVSIILPNKISNYMRTLDNKTITDKTCSMAIAQFGLERKLDNWHRPKNIYRSLQQLTRERDQIVNERSMVKNQLHAEQSEAHPHANSVNRLKARISFLNGQEKEIKGDITEIIRQDSELHAQIRNMATLTGIGELTAVIVLAETNGFELIRSKKQLTSYAGLDVREKQSGTSVKGKPCISKKGNRSLRKAMYLPALSAVKWDERFKGIYMRIVSKHGIKMKGLVAVQRKLLEMMYTLNKNKTAYDNQYLLKENSVQTQIA

SEQ ID NO: 129727 - protein, 428 aa, unidentified
MTVDKKLWRNRKERKEWARRLQSEDPGLEVVHPHAAGIDVGNSAHYVAVRPERDLQPVRRFECFTADLRRLADWLRSCGVKTVAMQSTGVYWIPLYEILEERGFEVYLVNARHTRNLPGRKSDVQESQWLLKLHTYGLLNNSFQPPAEIRALRTYWRQRGEHVAGAATCIQRIQKALTQMNLQLANVIAKSLEGNWRPELLFVLQQELEMYDTYQRRIAECDLQLQKHLASLANNVPPRPPEVEPDGKKRKRAKPAKNAPRFDLSCELQRITGVDLTRIDGIDVMIAQTLLSEVGVDMSRWKTEAHFASWLGLCPDNRVSGDKVLRRGTRHVVNRAANALRQAANALIRSRSYLGAQYRRLRTKLGAPKAITAMAHRLARLVYRMLKYGQRYVDKGTEYYEQRYRNQQIQLLRKNATKLEFHITEARA

SEQ ID NO: 129728 - protein, 326 aa, unidentified
MQGKEASEQETKAKSNVGIDVSKDWLDVHVLPGGEQLRVPNTCEGIRRLKRWLTRFELALVVVEATGKWHRHVQRSLAASGIPVAVTDPFRVRMFAKARGILAKTDQLDAHVLAQFAAVMAPPARAPEPENLQELRELVVGRAKAVEHQTQLKNERSAATVKFLQRQLDRRIERGDEDIAALDAAILKGVKADADLARRYAILTSIAGVGLVTAVTLLASLPELGRCTVKQIAMLAGLAPIADQSGKREGIRVVCGGRANVRRILYLAALAATRFNADLKVFYQRMTAAGKPPKLALIAVARKLAVLANILISQDRMWLPQAPKHA

SEQ ID NO: 129729 - protein, 336 aa, unidentified
MKKYQFILGIDVSKKTLDLCLILTDHPLEKKAFNTTNTEKGYQAMLNWFKKQKLNIDTGLVVLEHTGIYSLVLCEFLDQQQISYSLVSGLEVKRASGISRGKDDKKDAFMLAMYGYRHQDELKPGMTKQAELLQLQMLQAQRKRLVNNKKSLLLPVKELYQMNMEDKAIVLETNQCNVIEEINNSIKAIEQQIMEIIQNNEQLKKQYGLCTSIPGVGMQLTVSLIVTTGAFTLFKNSRQLACFAGVAPFPYQSGTSIRGRNKVSHLADKELKSLHMASLKNAVRADNQLKLYYQRKKAEGKNALLVLNTVRNKLLQRIMAVVDRGTPYVQLAQHAA

SEQ ID NO: 129730 - protein, 355 aa, unidentified
MEIVYLGIDVGNTFSEILSVNEECEPTYSDRIGTLDEREWSALLGLYEGCEIHAAFEVCTNYGWLYDLLKKYCVEVVVIDPGSFSPRKSHKKTDKVDVAKITAGLWRGDLPAITVPDERVRTDRLLVAHLHKLSGSITRVKTRVRTILLRGRLVCPFTDIVGTAAQKWMKEEALSKLDDQEKMIMTQLLDQLELLLKQQKECMALAAVRVEAYEERELAQSIPGFGKLVTLAMLSAIAGIARFETADQLASYLGVCGRVDQSGESLHLGPITRRGNKHARWLLGQAVTHLLRKDPKARKRFLKLRRKKKANVARVALMRWLVTVLWRMLTNQEKYRLNGKRGEYLQRKVTKPKAA

SEQ ID NO: 129731 - protein, 387 aa, unidentified
MSQVSDLSRSLAPFDQNTTLTVVVELSEASWLVAGMIPGIERQPVKKQDPDPVALLRLLERWRLEAIKAGKTIGQIALAFEAGRDGFWLARWLQARDIAAHVIHSTSVAVSREHRRAKTDRLDTAMLMRVFVGWLRGERGHCRMVAIPTLEQEDAKRPSRERESLVGERTRIINRMKAALARLGIRGFNPALRKAPQRLAALRTPEGVPIPPNTLDEFRRDMDRLAVVRKQIDGIERARLARLEHAPAAGPHAMVRLLARVVGVGVETADMLVQEVLSRNLRDRRAVARYVGLTGSPDESGKRRREKGLAKAGNPRARRGLIQLAWRFLRFQSGSALAQWYRARTDGPKGARKTTMIVALARKLLIALWRMVTIGDIPAGVALRPTI

SEQ ID NO: 129732 - protein, 392 aa, unidentified
MINIGIDVGKFKHCACIMDDKTGEILKDSFFFDNNKEGFQLLYSNIKPYLKRKHKAGMEDTGHYGNNLINFLLDNNVSVALINPRATNLRRKQLGQNAKNDRKDAQLIAQMLTDTQLWRSVSKNSLAYRELRDITRLYHQLKEQMNEFQNRLQKALDIVFPEVNSLPWTPYSHRYMNMILAYPSAASIASADIRSLRKILDGKGRGRKSKLTAENLKMAAKASVGDGQNPAAELEVKAMINIITSMDSQINILEKKIEDFSSKLNSPITSIPGIGPITGMTILAEIGDIQNFSSAAGIVSYAGMDPGRRQSGTYDAKHLPISKHGSRYLRKALYQAAFTVTSYEPIFHLYYKHKMDQGKIYRCAQGHAARKLIRVIYKLLSTNTSYNPALIN

SEQ ID NO: 129733 - protein, 348 aa, unidentified
METIGLDLHKRESQLAIQAEDGTITEQRIVTSRERFTAVLGHRPRARILLEASTESEWVACHLEALGHEVIVADPNYAPMYATRSRRVKTDKRDARTLMDACGQGTYRRAHRLSEPRRHLRAELAVRDALVRTRTRYVALAKALVRRDGLRVPSSTAERVGDRVQALALPAPLAAELAPLLTLLPPLNATIAAADHQLRAREQTDPIVALLMTAPGVGAVTASALVATLDDITRFPSAHQCEAYLGLVPGERSSGEQRRIGPITKAGNRRTRGLLVEAAWRILRAQDPESAALRAWTLRIAARRGKRIAVVALARRLAGIVYAMWRDGVPYDGRKIRAPHPARGAQAG

SEQ ID NO: 129734 - protein, 314 aa, unidentified
MNNITTVGVDIAKNYFDVCILPTKQTFNFINNDIGFKKLLKILKEHPDVFRVVIEHTGGYQKPLVAFLQKHGLPVSVINPLRSKYFAKANGTIAKTDKIDAENLALFGAVQKPAITPVADENLAKIRGLVQRKMSLIKMRTSEKAKLDKNPSLFLKQSVNRMIRRLESEILLIGEEIEKRIKDDENLSRKNELLRSVSGVGRETAAVLITMMPELGTIGRREIAALAGLAPINRDSGAKKGRAFIQAGRSGVRTALYMPTISATIYNPVVRLQYQKLKNRGKPGKVAITACMRKMLVYLNSHMAQNFYNLKLDL

SEQ ID NO: 129735 - protein, 394 aa, unidentified
MKLVGIDIGKNSHHFCVMDKETGEFNVTPSSFSNNKEGFDFLINSLKPYSKKSILIGMEDTGHYHVALLKFLLSNGYTVALINPKTTDLTRKMEGGITKNDKLDTITICDVLDTPERKKQYRITKVDRFDLYEQRQLTRHHHNLKEELNVYCNRLQKSIDLVFPEFNTLFSSKYSIVYMNLLKTFGSAEAIASTDIRTIRKCFEIKGRGNRISLTPEKLKECAKNSIGISSEVETIQIKHLVSQITLIKEQIAEIDKKIEEFSITNNSPILSIPGISHFSGTSILAELGDIGNYSKPSQIIKFAGVAPYHYESSQYNAQHTGITKKGSKYLRKTLYQIILTVINNNPVFKKYYLLKISQGKGHRCAQGHCIRKLLRIIYHLLETGQSFDPALLR

SEQ ID NO: 129736 - protein, 365 aa, unidentified
MKKNSRNEKATERSRAQARLTVGVDVGDKRSWFCILDEEGEIVVKGSLPTTPNGFKKQFELLGPSRIALEVGAHSRWISEQLKRYGHEVIVANARQLPLIYASDRKRDPVDAEKLARVARLDPKMLCPIEHRSVKAQRDLAILRARDLLVGMRTKLINAVRGLVKNEGVRIAACSSEKFPAKASEIAPGELMAALAALLEQIDSLNQRIGEYDQMIVHKAQTDYPETARLDQVSGVGALTALGFVLTVEDKHRFAKSRDAGCFVGLRPKQSESGESAPQLGISKAGDGYLRRLLVNCAQYILGRFGPDTDLRRWGLKLAERGGKNAKKRAVVAVARKLAVLLHRLWVTGEIYEPLRNNRSTVKAA

SEQ ID NO: 129737 - protein, 347 aa, unidentified
MNFYTQQHKHYCGIDLHANAMYVCILDQQGNKLVHKNLPTTPDAFLRVIAPYREDLVVGVESMFTWYWLADLCQKEGIAFVLGHALYMKAIHGGKAKNDKIDAHKIAVLLRGGMMPQAYVYPAEMRATHDLLRRRCHLARKRAELFAHIHNTNSQYNLPEIGKRLANKANREDVAEHFPDPRVRKTIEVDVSLIDHYDQVLGEVELYLTRSAKTDDVQTFARLQSVPGIGEILALVLLYEIHDIHRFPRVQDFVSYWRLVKCAKESNGKRLGISGKKTGNVHLRWAFAEAAVLFIRQSKPGKEYFAKLEHKHGKAKALTVLAHKLGRAVYYMLTREQAFDLNRFVTA

SEQ ID NO: 129738 - protein, 431 aa, unidentified
MNNRMNQRLEEITVTTLIVGVDIAKITHWVRFTDYRGVEVGKAVKFKNNRDGFESIVMRIEQIRNNKQARNAFTEVIVGMEPTGHYWKAFAHYLMKAGYRVVGVNPYHTKRAKEFDDNSPTASDKKDAITIARLVKNGSYFDPYLPTDIYADLRVLANSRENTMRRNNAVKNQITAILDEYFPEMKEAFKEPLRGKASRQVLKNCPFPSLILELGEVGVLEEIRRTVKKTVGMQKVQKLIEAAKTSVGVGYGITSSKIRLCQLIEELEMVEKQLAEIEIAMEDLLYKTGYAESLLSIKGVGIVTAARFLGEVGDPLRFKDARQIANYAGYNLIEDSSGNSKSGTVISKRGRNRLRALLYQMAFTMVSKNSELKALHQHLTTRTKNPLKKKQSLVVVSKKIITVIYSLLKNQTTYDPARVLGAVRLEIMQAA

SEQ ID NO: 129739 - protein, 387 aa, unidentified
MPQLNDLSRSLVALDQDSTIIAVVELSQSSWLVGGVLSGIERQPRKKLEPSPERLLGLLHRWRDEAVRAGKEVTRIALAFEAGRDGFWLARWLEARGVEAHVIHPSSVAVSREHRRAKTDRLDTELLKRGFLGWLRGERGHCTMARVPTIAEEDAKRPNRERECLVAERTRIVNRMKATLARLGVRNFKPTLRKAAERLATIHTPEGMPLPPNVLAELQRDMARLGFVVSQIRDIEKARQKRLEQEPETGSHAMVRQLARVVGVGIETADMLVHEVLSRPMRDRKAVARYAGLTGSPDESGAKRREQGLARAGNARVRRGMVQLAWRFLLFQKESALALWYRARTADSRVGPRKTMIVALARKLLIALWRFVTTGEALEGVILRPAG

SEQ ID NO: 129740 - protein, 365 aa, unidentified
MNFYHSTHRHYCGIDLHARSLYVCIINQQGEVLLHKEIKARPEPLLALLEPFRDDLIIGVECMHCWYWVSDLCEAHGINFILGHALYMKAIHGGKTKNDRIDSFKIAMLMKGGNFPLAYVYPKDMRATRDLLRRRTRIVQHGAMLKAHVGNTTSQYNLPPNKVNLKNVGARAQVHAAFAERDVQRNIDLDLAILECYHRELSKLEWHLEQQAKQHDPTALSVLRTIPGIGRILALTILYEIGDIQRFETVQKFASYARLIKCKAESAGKVYGTQGNKIGNAHLKWAFSEAAVLFIRNNDKAKRYVDKLQKRMNKPKALSALAHKLGRGFYPVAADIPKKRHTVPKECSCPDAENIAQSSNAKPLP

SEQ ID NO: 129741 - protein, 342 aa, unidentified
MIYVGMDVSGKSFEIYAVNAKGKKIFKGPVEASRQGIKDLAKELGQEKKVFIFEAGNQMKWIAETVAKIDEIAHVVHPNEVKWIVQSNGKTDRVDAKKLAELGRIDGLPRPVVVAEGKERRLRELISARDNLMNKRVAFINSIKGYVRQEGRRIPKGFFNGAEWTVLLDTMKISSTLKDIMASVMNAVEALKKSEDELTEKIKAVDDKKIELIKTVPAIGDFSARVLFSALITAKRFENKKKVANYGALTPTIYQSGGVTNLGHINRDGRGEIRRVLLQCAHTVARMKSAESRPLREFFERIEKKRGKKVAVIALARKLLTTVYGVWKSGEVYDPRKLLSHA

SEQ ID NO: 129742 - protein, 336 aa, unidentified
MPREYVGIDLHRRRSVIIRKNADGELISKVHIDNDPVAMADAVAAAGPNPDVVLEATFGWYWCADLLTEMGATVHLAHPLGNNWGNRRVKNERDATDLVDLLRLGRLAEAWIAPPEIRELREIVRYRAKLVRLRSGLKAQVHAVMGKHGVLPARVDMFGPGGTAQLDALELPDGYAWRLESLRELIGVYDRAVVDLDRRIAARLANHQGYRAIQALSGVGPVLAAVLVAEIGDVTRFKSPDQLCSWAGMTPRHRESDTKVHRGRITKQGSRLIRWAAVEAVSKNHGDDRIKCDYQRIAARRGRNIARVAAARKLLTLVFYGLRDGEIRCLAQADEG

SEQ ID NO: 129743 - protein, 316 aa, unidentified
MAEPHCSVGIDVSKDSLEVALHPSEEGTSFSHTPEGVQQLVDRLCAAAPNRVILEATGGLERFLTAALLAAGLPVVVVNPRQVRDFAKATGRLAKNDRVDAKVLARFGAVIAPEIRPLPDTQQQLFRALVVRRRQLVEMIVMEKNHRASAVRPLHPRINRHLKQLEKALAELDAEIDDQVKGSLIWRAREALLLTVPGVGPQTCRALLAELPELGRLGRKQIAALAGLAPFACDSGLRKGHRQIWGGRVGARNALYMSTLVATRHNPALRAYYQRLLQTGKLKKVALVACMHKLLLILNAMLRDQKPWDLIRYQNA

SEQ ID NO: 129744 - protein, 348 aa, unidentified
MRFYTRQHKFYCGIDLHARTMYLCILDQEGKIVLHRDIKTDPDIFLKTIAPYREDIVVAVECIFTWYWLADLCSDENIPFVLGHALYMKAIHGGKAKNDKMDAYKIAALLRGGMMPMAYVYPSDMRSTRDLLRRRTHLARKRAELIAHIQNTNHQYNFADMGRIARKCDRIKIGIADRFTDPSVQKSIELDIALIEHYDKLLNHLEHELSLIAKVHDADSYFRLRSIPGVGRVLGLTILYEIHDINRFPSVQDFVSYCRLVKSAKESAGKIIGSSGKKIGNAHLKWAFSEAAVLFLRRNPEAVKYRAKLERKHGKAKSLTILAHKLARAVYNILKKKEVFHPKVFFAK

SEQ ID NO: 129745 - protein, 405 aa, unidentified
MEVIIERVCGMDVHKDNITACIMTPEGKEIQTFSTKTIFLIKLMDWIRSHGCTHVAMESTGVYWKPIVNLIEAEEMEFFVVNAQHMKAVPGRKTDVKDAEWIAQLLRHGLLTASFVPDRNQRELRELVRYRRSIIEERSRQLNRIQKVLEGANIKLGSVVSDIMGVSAKEMLNAIADGEEDPTKLAGMARRSLKRKKDELELALRGYVNPHQRMMLKTILTHIDFLTEQIEKLDLEVAQRVSSYQEDIERLDSIPGIATRMAEQILAEIGTDVENQFGSAPRLCSWAAIVPGHNESAGKRKSTKSKKGNKYLKSALTEAAHSVGASKNYLGAMYRRTAARKGRKRAGIVVAHAMLRIAYYLLTRKEMYRDLGEDYYDKQKEVSIVRHSVRRLEKLGYSVSIEEVS

SEQ ID NO: 129746 - protein, 354 aa, unidentified
MKRATKYVALDVHQATTLSSVREESGRVIARTILPTEAPALVEFFRGMRGSIHVAFEEGTQAQWLHDLLLPLVDRVVVCDRRGESQQGNKGDQTDADRLSELLRRGGLRAVYHGSPHRETLKELARSYENLVEDSTRVMLRLKALFRARGIRTPGKRVYHRQGRTEWLARLPGRGVQFRAETLYAELDVLHALRPKAKAAMLVEAKRDPAWSVLRTIPFLGPVRVALLLATMQTPWRFRTKRNLWGYAGLAVVSRSSADYGFINGRPVRRRRAPMTRGLNRNHNRVLKDVLKSAATAATARPGALQDLYLGMIARGMRAELARVTLTRKLAAITLRLWKTGERYDPAKLTLQAR

SEQ ID NO: 129747 - protein, 341 aa, unidentified
MQQHITTIGLDLAKSVFQVHGIDHEGQAVLRKKLRRGQMLKFFTTLSPCLIGMEACGSAHHWARELQAQGHDVRLIPPQYVRPFLKTNKHDAADAEAIAEALVRPSMRFVPIKSTAQQAVLMLHRSRELLVKQRTMFINAIRGHCSELGMVASQGASRVKDLITIIEDPEDPRLPAVAREALSVLIAQLAVVKEAIRTLESKLQAWHRSQQASQRLTTIPGVGVITATALVATIGDGTQFKSGRHLSAWLGLVPRQHSSGGKSRLGRISKRGDGYLRRLLVHGARAVLRWQKGAPKQPSPWIGELLTRRPTNVVLVAMANKTARTVWAMMRDQQVFAAVVR

SEQ ID NO: 129748 - protein, 355 aa, unidentified
MSQEKYIGMDVHQATISVAVMDAGGKLIMECLLETKAATIVEFIQGLHGTLSLTFEEGTSAAWLHDLLKPHVSRLVVCDPRKAALLKEGNKSDRIDARKLAEMLRTNQLKPVYHGEHGIRTLKELGRSYLTITKDVTRVMNRIKALFRSWAIPCAGTSVYAPRHRAEWLAKIEQLGVRVRAEHLYQQLDGLQPLRLEARRELLRESQKHPAVKLLRQIPSIGPIRAALLVALLQTPHRFRTKRQLWAYSGFAVETHDSGEYRNVRGKLQRNRERITVRGLNDNHNKDLKNLFKSAAISASTLPGPLHDFYVARVEKGMRPTMARLTLARKIATITLTMWKKGVSFDPKHLPRQAA

SEQ ID NO: 129749 - protein, 330 aa, unidentified
MKQYNYFFGVDISKKTVDISLLHLQSLTHKKFSNDSSGMSELQAWLKELQIVFDQTIFCMEATGLYCYTLTHFLAMKEIDVWVEHAINIKKATALARGKNDKVDSQRIAIYCSKNLDRLRLWKPMDSTIDKIKHLASLRERLVETQKRLISPINEFEDTGNIEMANLLRKTIKKSIQAIETDLKSVEAKIIDIVNADDNLRKLYKIITSVIGIGFVTAINLIIHTNGFAILNDSRKLACYCGVAPFEYSSGTSIRGKTKVHYMANKKLKCNLHMASLSAIKLDIDLKIYYERKVAEGKNKMSILNAVKNKLLARVVACVNNQREYVKKVA

SEQ ID NO: 129750 - protein, 359 aa, unidentified
MLGTMTYVGLDVHARSTHAAAIDVASGELRRARFGGGSGEVVEWLQTLPLPLKGCYEAGPTGYGLYRAAAAVGLALDVVAPSKTPRAPGDRVKNDRKDAELLARLLLAGQLKPVAVPPPPFEAARHLARAREQVRADLMRCRHRVSKLLLLHGRVYEGGAWTKTHRRWLAQQRFDEPAAELAYLDCLAAVDGLAARKQALDERLSRLAFEGDWSQTVARLRCFRGIDTLTAFVLCLEIGRFDRFPRPAKLTGWLGLVPSLDQSGESRRQGAITKTGSGYARRLLVEAAWHYLPRPSEGPAIAARRAGQPDHLLQIAWRAQHRLYHLHTRLRARGKPGNVSTVAVARELACFLWAAAVAE

SEQ ID NO: 129751 - protein, 343 aa, unidentified
MKLIRVGVDLAKNVFQVHGVDRNEKAVWRRKLTRESWLKVLLETVEPGCEIGMESCGGAHHWARRLQAHGFKVKLIAPQFVKPYVKSNKNDANDAEAICEAMSRSHMRFVSVKTVEQQDIQAVHRIRAELTKQRTAKANQIRGLVAEYGLVAPKEIVHLRRALPCWLEDAENGLSDRFRRLLNGLWGDLRALDDRMTELDRDIAVIAQSDPVAKRLQQLRGVGPIIATALVAAVGNGEQFANGRQMSAAFGLTPRQHSSGGKERLLGISKRGDVYLRALLIHGARAVIRTAKDKDDRLSQWVTRLAARSHPNVAAAALANKTTRMAWAMLKNGTDYHPDRITS

SEQ ID NO: 129752 - protein, 349 aa, unidentified
MATDEVGRQLGEKTVKATTAGHATAIMWAREQFGLELIWGIEDCRNMSARLERDLLAAGQQVVRVPTKLMAQTRKSARSRGKSDPIDALAVARAVMRETDLPLATHDETSRELKLLTDRRDVLVAQRTSAINRLRWLVHELDPERAPAARSLDAAKHQQALRTWLDTQPGLVAELARAELTDIIRLTGEINTLAQRISARVHQVAPALLEIPGCAELTAAKIVGEAAGVTRFKSEAAFACHAAVAPIPVWSGNTAGQMRLSRSGNRQLNAALHRIALTQIRMTDSRGQAYYQRLQDAGKTKRAALRCLKRRLARTVFQALRTVHQPSSEHTQPAAACHRSYCSRSCLSG

SEQ ID NO: 129753 - protein, 475 aa, unidentified
MNLKGTKKKNQVSNANIFEQQELLKKIEVVRENLTASTWHELETKGKFDKNAKLSFICDDMLILGCDVGNETHYLRAIDTRGRELSKSAFSFSNNVDGFSKAKEWAVKIAAEYDKKQIVLGLEPTGHYWFCLATWMISNGISVVQVNPYAVNQTKELEDNSQMKDDTKDPKLIANLVKDGNFGMPYLPEQLYADLRRLSMFRDQLNEDRIRSINRLHRELKIYFPEYKEALGKTEGTFSLELLKQAPFPDDLAALKEDGIRQIWHNAKLRGRGYSRAGEIFEYAKASVGIREGKETGKLVVQWFVQKILELDEELALIETQINQKCLEIPHTDKVLEICGIGENTLSGMMAEMGDISRFDDVKETQKLSGLGLVASSSGKHKGETRISHRGRKRLRYWLFQAAKSAVAHAEEFKELHVYYTTREQNPLKKMQSLIAIACKLLRIIFTILKKGIKYDPQKMLKDIRRKSRQESLAA

SEQ ID NO: 129754 - protein, 311 aa, unidentified
MIIGIDVSKDKLDIHLLPENKHLVIKNTKASVASFFKNKLDVQDCELVVFEATGGYERLLQHYLIEQKTPYHRAHPSRVHKFAGAKGYFAKTDCIDARILALYGKQEEIEADTTTTKSQLEIHDYSARRSQLKGMISSEKQRLNTVSFNKYIMRSIRRNIKQLERELALVTKKLDELIVADEALESRYKLLQTTKGIGPEVAKILITDLPELGRLNREEISHLVGVAPQTNDSGKKRGYRAISRGRFYVRRALYMAALVAARFNPRMKKIYEKLLAKGKLKKVALVAIMRKMIIMLNAMVKKGTPWECERI

SEQ ID NO: 129755 - protein, 360 aa, unidentified
MRYVGIDYHKRYSVLCATDERGQELKRRRINGNSASGFAQFFSELGEENKVVMEACWNWGWLYDLLGEIEAVGEVVLAHPYKTRLIAEAQIKTDQLDAQNLANLLRADLIAQSHAPSAATRARKHLLRQRLFWVRLRTMLRNRMHAILDRQHGLERPQLKNFFSRRGQSWIEKVKLPCAEDRPLLEQDLEVAELLDQKIKQLDRQIGRTQSAEEKLLESIPGIGPLFSSVIATEIDGITRFNSAAKLAAYAGVVPTTHASGGRVFNGRLLWQCNKWLRWALIEASWSAIQFSGYFGGIYRNARARGKNKNVAITVVAHRMAKIIWLLLNEQRPYTETLPDRSADGVTAAPSRKPALACAS

SEQ ID NO: 129756 - protein, 367 aa, unidentified
MKKVSTVGAKPSKKISQQKLTVGLDLGDRNSWYCVLDESGQIQLEQRVRSNAKALREVFGQLPHSRIALEVGTHSPWISRLLSELGHEVIVANARKVRLIGESRKKDDRLDAQTLARLARIDPGFLSPVKHRSAQAQADLMMIRARAGLVRARTALVNTVRGLAKSYGERLRGCNVRNMNPEKAEGLSPELQSALEPLLAGIEELSEQIREYNQRIEKLAQESYPQVALLRQIKGVGTLIALTFLLTLEDPHRFRRSRDVGCYLGLQPGRRNSGQSEPQLHISKEGDPYLRTLLVQGAQHILGPFGVDCDLRRWGLKLAERGGRSGKKRAIVATARKLAVLLHHLWVSGEVYEPLHNSRRTAVAAAA

SEQ ID NO: 129757 - protein, 344 aa, unidentified
MKKNLSFIGLDISKADFAASIYQTPDKPIVTKEVIPNNPEGFNLLLLWLKDHRINKANSHICMEATGVYSQAIAYYLLFAGFPVSVEPPLKVKRAFDPVGHKTDPVDSKQIAEYAYRFQDELTSWQPKDEILEKIRQLLSVREQFTKQKVALKNAIQAYSRQRVQVVLIKKAQKETLAQLEKQIARIDKELAKLIKQDPEILQKANHLKSIPGYGMLLAAHLLVITENFTKIQQSKRLASFVGIVPYQHQSGTSVFKRAKIRHFGPGASRKLLRLAAQSVATHDVTFRRYYLRKLAQGKAKALVLNNIANKLLKVACAMIRNNTRYIKEHRSIHPMYLKSLKSA

SEQ ID NO: 129758 - protein, 345 aa, unidentified
MKHYAGLDVSVKESAICIMDETGKVCREVKVVSHPEDLIEVLKDPAWRLVCVGLEAGPLSQWLFSGLVEADLPVVCIETRHTKAFLKAQVNKSDRNDARGIAQMMRVNLFRPVHVKTLVSQKRRALLTARKLLQEKAIAGENDIRGLLRNFGLKVGVVGVIKFEERIFELVDGMTDLAEIMTSLLEARRTLREQVGKLHQRLLSIVRENDACRRLMTIPGVGPIVSLAFTATIEIPARFKSSKAVGPALGLTPILNQSGESNRVGRISQCGDGMMRTLLYEAAQVMLTRTIKWSWLKAWAMNIAKRRGKQKAIVALARRLAVIMHRMWCDGTEFRWTKETVPAAA

SEQ ID NO: 129759 - protein, 378 aa, unidentified
MQALLTCCCGVDVHDEMIETCVLKGAGEEPEIIRKQFGTLPSDLEEFAGYLEEHGCSSVAMESTGVFWRPVYEIIEDSCNHVVDIVVTNAAHMSNVPGRKNDEDDALWIATLLRHGLLDASFVPGRVFRDLREASRLYKKFVGERSRYTNRIMKLLQAHGFKLSNVLSDILGASGRNILTILADRGSLSAHEVATCIRGNTKHSYKEIHAAVSGSLNPDEQKLLSILLDKIYTAERDMSIIVGLMTDMSYEFARQLEIADSVPGIDRLAALLILAEISATPHLSFDSAPKLCKWAGLSPRNDMSAGKTKSKKILPGNPYVKSILCQAAWAAVKSRNNPFRDWFWSHRHRGDKKAIIAVARKILTTLYALLRDDAIFCH

SEQ ID NO: 129760 - protein, 415 aa, unidentified
MLKIIYPICCGIDVHKKFIVACIASTNDKGITTYKSSRFSTFTKGLRELSEWLHSNSCKDVCMESTGKYWIPVFNILEATCKITLAHPKYVKAIRGKKTDKKDAKWIADIFKHDLVTGSFMPPLAIRQLRDLMRYRVKLTNFRTSEKNRTQNCLTVSNIQLANVVSDTFGKSSMAIIERILENPLDTNFDVTSLIHGSLLAKASDLQLAIDGLITPEQAQKLVIIRQHYDSLELCKLNLESVILSITAPFQKEINLVATVPGIKTFSAIAIISEIGADMSVFPTAKQLCSWAGLTPQNNESAGKKKSVRISRAGVYIKPLLAQCANAVVSSEKHPEFRNRYLSIKRRRGHKRAIIAVARMMLTAIYQILKKSEPYNAEFYKKADVIPLHREVTVEQAVFILQRQGYTISRADNSA

SEQ ID NO: 129761 - protein, 354 aa, unidentified
MSQTPNTAIAVIGIDIGKNSFHVVGHDARGAIVLRQKWSRGQVEARLANIPPCLIGMEACVGAHHLSRKLASLGHDARLMPAKYVRPYSKGQKNDFNDAEAIAEAVQRPTMKFVATKTAEQLDLQALHRVRERLVSQRTGIINQIRAFMLERGIAVRQGIGFLRTELPTILATRTDALSPRMLRVIEELAGDWRRLDQRIDGLSGEIEALARQDQACSQLMTVPGIGPIISSAMVAAIGTGDVFSKGRDFGAWLGLVPKQISTGDRTILGKISRRGNRYLRVLFVQAAWVVLVRIKDWERYGLKSWIEAAKRRLHHNVLAIALANKLARIAWAVLAKGRAFELTRTDDAGVRPA

SEQ ID NO: 129762 - protein, 374 aa, unidentified
MKKHTNKQTNTPSVVPTPTPAPAAPGGFTLGLDLGDRSHYVCVLAAAGQILHEGPLPNDRVALTLLLTQYPAATVALEAGTHSPWISRYLTDLGATVIIANPRKLHAISRHERKCDRRDAVMLARLARADAALLHPLQHGSAQAQHDLLGLKLRDSLVRTRVNLINTVRFTLKSLGHAVRNPSSEAFHKSILPAVPAECLPVVQPVLTVLALLTKQIKLLERDLVRRSKRDYPVTQRLQQIAGVGPLTALCFVLKIGEPTRFGRSRDVGPYLGLCPGRDQSGGTDKQLRISKCGDGLLRRLLVSAAHYILGPFGPACALRAYGQHLVGTSVREKKRAVVAVARKLAVLLVSLWKHGTDYEPRVPAAPALVLVPA

SEQ ID NO: 129763 - protein, 379 aa, unidentified
MYRILKIGMDVHTTNFTLCALESKFGEEDQILANITVGPDHKNVLDFIRRIKEKMDPKGQDEIDVECGYEAGCLGYSLFHTLTACKLKCRILAPTTMLSEQGPRIKTDRRDAKLIAQCLSNGGYHAVHIPTAEDNAVKEYVRMRDDHKLALKKVKQQTNALCLRFGFFYDGTHWTGKHLQWLRALKLPELIRETLNEYIATYDELTAKIDRYDKRIQEIAAQSEYQEKVKKLECFLGIKTHTALSLIVETGDFIRFRKGNVYAAYLGLAPGEHSSAESGGRLGITKAGNSHLRRLLIEAAGGICKGQIGKKSKDLISRQKGNSADVIAYADKANVRLRSKYYRLTRHGKKRNVAVAAVARELACFVWGMMTENIHGNAA

SEQ ID NO: 129764 - protein, 412 aa, unidentified
MQVIIERCAGFDVHQETVVACVLIGAPGAWPRKQVRTFRTMTRDLEALRNWLQELGVTQVGMESTGVYWRPVYAVLEGHFDLIVGNARHIRNVPGRKTDVKDAEWIADLVRHGLIAKSFVPPAPQRELRELLRYRRKLVESQAAERNRLLKLLETANIKLASVASDVFGVSGRAMLKALIEGSASAEAMADLARGQLRRKRDDLVLALEGRMEEHHRFLLATQLRRLEAAEQDIAALDDRIEAKLESYRVQHGLLMQIPGVDWVVAAVLIAEIGVDMSVFLSVHHLAAWAGVCPGNHESAGKQKSGRARKGNVHLRTMLVGAATSAARTKGAYLKDKFHRLKARRGAMRAALAIAHKILVAAYHMLAKGLPYRELGEAYLDQIAQIRTVANLKRRIERLGYNVTLEPKAEPA

SEQ ID NO: 129765 - protein, 354 aa, unidentified
MTTPSIQNDFTPASVGIDIGKDVFHLVGFDLDGNIVLRRKIRRSALVSEFEKLPPCIVGMEACLSAHFVSRTLRKLGFEPRIIPAIYVKPFIKGQKNDYNDAEAIAEAALRPNLKFVQEKTQDQLDLQALHRVRSRLVSRRTATINQIRAFLIEQGITVRTGAHALRNSLFAILENRKDEISPRMNDLIVGLNADWQELDERIGTITGEIEMISKSEENCQRLMSVPGIGPIISTAVVAAIGTGDAFGRGRDFGAWLGLVPRQYSTGGKTVLGRISKRGSKYLRTLFIQAAHVILMRPNNWRKFSFGPWLTEAETRLHRNKLATALANKLARIAWSVLANQKAFDANRKEAAAI

SEQ ID NO: 129766 - protein, 345 aa, unidentified
MKITTVGIDLAKNVFQVHAVNERGAVVLRKQLRRDQVTAFFANLPPCVIGMEACGSAHHWARTLKSLGHDARLMSPQFVKPYVKSNKNDVADAEAICEAVARPNMRFVPVKSVEQQAVLSLHRVRQGFVKARTAQANQIRSLLGEFGLILPAGISHVAKRVPSLLEDASNQLPGSVRRMIARLTEHLKDLDLLVDEFEAKIKAWHRSSELSMKLEKIPGIGPLGASALVASIADANSFANGRQLSAWLGLVPRQHSSGGKPALLGISKRGDVYLRTLLIHGARSAILAAQRKAVNSNVWLAGLLGRRHPNVAAVALANKNVRTVWALLAHGREFRADYAAQQLAA

SEQ ID NO: 129767 - protein, 321 aa, unidentified
MSKYSETYGVDISKDVFDVANTTGFYRQYPNTVTGFKKFIKELEKSAIVVMEATGYYHYCLAQFLFESGQPVSVVNPLSVKRFIQMRLSKVKTDKSDAKAICDYALINPVPLYTGKDQNQAESLQLLRLLELYLKQRTQLKNKIHGEQALGIPSKAVFRSLNRSKRTLDKEIKSLETRLLSLVKEEHQQQLTNLKSIPGLGDKTAALLIVLTDGFTKFETASQLCSFAGTTPTIRQSGSSVRGKSRISKMGNQKLRNLLFLCAFSASKYNTACRKIYERIIAKGKSKKLALIAVINKLIKQAFAIAKSGLPYDPNYATKLN

SEQ ID NO: 129768 - protein, 338 aa, unidentified
MEQITTIGLDLAKNVFQVHGVDAAGKVLVRKQLRRAEVLRFFAPLPPCLVGMEACGTAHHWARELTKLGHTVRLMPPAYVKPYVKRGKTDAADAAAIAEAVTRPTMRFVAVKTVDQQSVLMLHKVRDLLVRQRTMLINALRGHLAEFGIVAARGPGGVSAAIAALHQAQDDLPELARQVLHGLIGQMRVIGAEITKAEKRIMAWHRASEASRRLATIPGIGPITASAIAAAVPDATLFRSGRQFAAWLGLTPRAHSSGGKPRLGGISKQGDGYIRRLLVIGATAVIRFARQDNASKTWAARLLERKPARLVSVALANKTARIAWAVLARNQSYTAAAL

SEQ ID NO: 129769 - protein, 350 aa, unidentified
MDTTTPPLASIGIDIGKDVFHGVGFGTNGKIAFRRKIKRLALVEIFKKLPPSIVGMEACLSAHFVSRALRQLGHQPRIIPAIYVKPFVKGQKNDYNDAEAIAEAALRPNLRVVREKTQDQFDLQALHRVRSRLVSQRTATINQIRAFLIEQGITVRTEARALRNSLLAILENRQDEISSRMRGLITDLYEDWTFLDERIETIAGEIDQIGEKEANCRRLMSVPGIGPLISTAVVSAIGTGEAFERGRDFGAWLGLVPRQYSTGGRSILGRISKRGSKYLRTLFIQAANVILMRPHNWERFSFGAWLRNAAPRLHRNKLATALANKLARIAWSILRNEKTFDVPRHEAMAI

SEQ ID NO: 129770 - protein, 342 aa, unidentified
MSIVGAFDVHRRQLTFEYLDTVTGELRRGRVVPADREHLREWLARFTGQPDVAFALEGCTGWGRLSEELLAAGIEPHLAEPADTAALRGKKRHAKTDKTDTRHLRVHLLAGDLPESWIPPQHVLEARAVVRLYKDLLDERGGWHQRIAATLFHQGAPAGIGSMCAAAGRAAAAEADLSPAGRQAVETGLRQIDRLSDELDPLRRQLNMLSRRQPGCRALRAACFGIGAVTSVAIWAELGDVRRFASSDNVIRHTGLDITVYSSDTKRPAGHLSRQGPPLLRWALYEAAKCAARPAAPDYGYYTAARDRRTAGLATLSVARKLARRCYHTLRELGEEALQPAA

SEQ ID NO: 129771 - protein, 409 aa, unidentified
MDVFHERCAGLDVHKEKIFVCVLIGRGSGYQKITFQYGTFHHQLVEMRQKLVELGVTHVLMESTGVYWMPVYDVLEGFVEVVVGNAQHIMNVPGRKTDESDAEWLAKLLRFGLVKPSFVPAREFRELRQLTRYRRAVVQTRASEQNRVEKHLQISGVKLSSVASRVFGVSGTDMLNRIAEGTTDPGELAGLARGRLRKKMPQLRDAFAGSISEHTQHLISLQMEQMNRLESTIAQAELKIDEKVKPYEELLARLDDMPGLNLRTSIDVLAEIGTDMSPWATHRQIAAMAGLCPGNYISAGKRLKNRSRQGNPYLKSILVQAACSAINVDGSYYQAKFKGLKKRRGHKRALVAIAHAMLVAIYHMIKKGEPYRELGAKVVSDHELSRKKEYLVKQFQNLGFAVSLTPLTA

SEQ ID NO: 129772 - protein, 338 aa, unidentified
MSKYSGIDLHANNCVVVVSDEEDRVCCERRVANELSKVLALLEPFRADLVSIAVESTFNWYWLVDGLRAAGFDVKLVNTAAIAQYDGLKYSGDEHDARHLAHLLRLKLLHFGFAFEPEWRAVRDLARKRAQLVRTRTIHVLALETIYARQTGGRLSGNAAKLLGIEDVARWGWSDDVTLAAQANVLAVQAMTRGIEIIERRLHERVKLAPEYLVLKTVPGIGEILSTVIMLETGPIERFTSAGNYASYARCVGSGRFSNSKKKGEGNRKNGNTYLAWAFVEAAHYALRYSEAAKRFYERKRARSNTALATKALAHKLARACFHMLKGQIVFDEKRCFA

SEQ ID NO: 129773 - protein, 332 aa, unidentified
MNMHPQGGVASRDQRPNVGVDVCKQHLDVCLGTLEQRVANDASGWNVLTAKCKDARVDLVVLEATGGYERGLVYALQEAGITVARVNPRQARDFAKSMGVLAKTDQVDARTLRDFADVLARHPDRAKYITPMLDEHRQTLAELMTRRRQLVDMRVAENNHLEHAGKRSVRSITSVLRTLDKQLAAIDREIDDHIDRHFKDQRTLLDSVKGVGPVTILTLTAALPELGRLGRRQIAKLVGVAPLADDSGPRKGKRRIWGGRADVRAVVYMAAVVAMKHNPAIRAFHSRLIAAGKPKKVAIVACMRKLLTILNAMLRDHELWDAAKHVHNPNTA

SEQ ID NO: 129774 - protein, 347 aa, unidentified
MNFSTRQHNHYCGIDLHARAMYVCILDQSGTKLVHKNLPTTPEAFLHVIAPYREDVVVAVECIFTWYWLADLCQKEGIAFVLGHALYMKAIHGGKAKNDKIDAHKIAVLLRGGMIPQAYVYPAEMRATRDLLRRRCHLVQKRAELLAHIQNTNSQYNLPEIGKKLAYKANREGVEEHFPDPSVRKTIEVDLALLDHYDQILREMELYITRSAKVHDGQTYARLQSVPGIGQILALVILYEIQDITRFPRVQDFVSYCRLVKCAKESNGKRLGTSGKKIGNSHLRGAFAEAALLFLRQNQLGKEYFTKLEHKHGKAKALTVLGHKLARAVYYLLTREQPFDLQRFVSA

SEQ ID NO: 129775 - protein, 414 aa, unidentified
MEVIHTRCAGMDVSKRDAKVCVRVAAAGRRKTVETVRTWGATTNQVLALRDHLVAEQVSLVVMEATSDYWKPFYYLLEDAGFELMLVNARHVKNMPGRKTDVTDAAWLAQLGAHGLVRASFVPPAPIRELRDLTRARVMLTRERGREIQRLEKLLEDAGIKLSSVATDITGVSGRLMLQALIDGSRDPAALAELAQRRLRHKIPELTEALTGRFTEHHAFLAGLHLETIDQRTRQIEELNQRIGRAMAPFRVFCDLICTIPGVGRRTAEVVVAETGADMSVFPSPKHLASWAGVCPGSNESAGRVKSTQTRPGNPYLKAALGTAALSIAASHGTFLAAKYRRLAARRGGKKALVAIKHTVLTAIWSMGTTGAEYDDPGPDYYIRHNPERVLRNATRQLERLGYSVTLSPTTQTA

SEQ ID NO: 129776 - protein, 329 aa, unidentified
MKKTNIIGADLSKKTIDLHCHDTKTHFVISNNLIGFKSMVKWIVQRSILLNDVVIVMEHTGLYSYCFEEFLHANDVKFTKVTALEIKLSMGVVRGKSDKIDAKKIAHFGNEKITKLKLSQPVEKDVKRLQMLMSSKNLLVKQRAALLCSTKEYQNIGLSDKDLILKAQLVVIKELTKQIDLLEAEIDLIIKTNLSLNNSYQLLTSIKGVGPVIAITTIIKTHNFQRFENARKFACFCGTAPFPNESGSSIKKKTKISHLADKQMKALLDQGAKSALLYDKELKNYYESRLAKGKSKMSTINIIRNKIIARMFAVIKRQKPFVENYLAAA

SEQ ID NO: 129777 - protein, 367 aa, unidentified
MIIIGCDYHPGFQQIAFVDTETGEYEGRRLQHREEAEKFYRNLAAQGMKVRVGMEASGHARWLERLLAELNFELWIGDAAEIETKRVRKAKTDREDARLRLRLLMEDRFPRIWVPSWDNRDLRQLLWHRHRMVQARTRIMNQLQAVALNEGFRFKKRLWREAGRQQLESFPLAPWASRRRHDLLELLDRLNPTLAELNQAVDVEVEKCPAARRLMTHPGVGPLTALAFVLIIGEAERFRCGKQIASYLGLVPLEKSSGNRRRLGQITKQGNSRLRFLLVEAAQVTVRSLPERRGKYFHLMMRRGRKIAKVAMARRLAVRLFWMWRKEWDYEQLKKFGSHAGQPGSGDGVLLDTEKLIGRPAPLSRGV

SEQ ID NO: 129778 - protein, 382 aa, unidentified
MDLLYPRCAGLDVHPRSVSACTRIVVDGQVVHEVRTFGTSTRELSEMAEWLAAAGCTHVAMESTGVYWKPVWHVLEGRFELVLANAMYVRNIPGRKSDVKDAVWIADLLAHGLLRGSFVPPERIQELRDLTRTRKQLVREMTRHTQRIQKTLEDANVKLTEVITNVVGTSGRAILRALIAGETDVDRLVDLTDGRLKASRATLKDALQGQVTEHHRFMLKMHLQQLEHLEAAVRELEARADQQPFRAAIELLTTIPGVSNTTARVIVAEIGDDMSRFPTAGHLVSWAGLCPRLDESAGKRRSTRTRQGAPWLKTVLVQAARAAANKRESYPRAQYLRLKARRGANKAVLAVAASRAIVKCCGSATHDQAAFPFRSLPLISRS

SEQ ID NO: 129779 - protein, 382 aa, unidentified
MQTIDTINPTILLAIELSASTWLVAARVPGLEKPHLHRIDGGDTAALLALISSLQARAARGLDATIGVVCCFEAGRDGFWLHRLLAAHGVVCHVLEPTSILVNRRARRAKTDRLDAEGMLRVLAAYLRGDHQACSMVRVPTPEEEDAKRTHREREKLVQERLRIENRIEALLFTQGIRKRPSLRSWEHDLAVLRTGDGREIPRHLRAELDRLRRRLVMTLELIREVEAERDQAAKTKPQDRACHKIAALSRIRGIGENFAAVLTREVFYRSFDNRRQIASYVGITPMPYQSGGMDRDRRISRAGNPRARTTMIQLAWLWLRYQPGSELAEWFRERVGTLAGRTRRIAIVAMARKLLIALWRYAETGVIPAGAEIRAETTVAA

SEQ ID NO: 129780 - protein, 339 aa, unidentified
MAHLSQSQPMPLRFQGIDVSKATFDVAWWGDQPFQGMAVHAFSRTPAGVQAWLARFKPDEFQGMAVVMESTGGYCKELAGWILEAHPGLHVAIANPFRVKSYGRSLGLRNKTDRVDARLLAKFGQERQPGAWAPLSPSQEALRELTRTRSKLKATMVVYRNRLKGHTVVSPLVRQCQEELLEFLDQQVKALEKGILDLCRKDPSLRGDLELLMSIGGVGLITAAIVLGAAGDLRRFSKRGELCAFLGASPRQFQSGSSVQGKTHMCLMGGKHVRSALYMGAMSICRSKGPLGDFYRRLVAAGKPRKAALGALMRKLIVVMRAVLIQGKPYQAPNAPSAA

SEQ ID NO: 129781 - protein, 411 aa, unidentified
MEVIYKRCCGLDVHKETVVACLLIREGGKVLKEIQTFLTMTVDLVVLHDWLKAHQVTHVAMESTGIYWRPVFNLLEEDFTVLLVNAAHIKTVPGRKTDVKDCEWIADLLSHGLLRGSFIPPEPIRDLRDLTRYRKSLSDERVREVNRLQKFLEAANIKLSSVATDVMGASGRAMLEALVSGGTDPQALSELAKGRLRKKLPELKKALEGRFRPHHRFMVAEILSHLDFLDESIERVSQEVSSRIVPFSTKLDLLDLIPGIDQRVAEGVLSEMGKDMSCFPTDGHAASWAGLCPGNNESAGKRKSGKTRKGDRWLRRYLIEAAWAATRKKGSYLSALYHRLVVRRGKKKAIVAVAHRLLVIIYHMLKDHGTYRELGSDHFNKLNAAYVQRHHVKRLESLGFKVILEPLSQTA

SEQ ID NO: 129782 - protein, 403 aa, unidentified
MNSVGIDISKGRSTIAVMRPFGEVVISPFEVRHTGSELSKLAKQLKSLDGETRVVMEATGNYHASVAKLLHNAGLYVSVINAKLVHGYGNNELRRVKTDRKDAVKLANYGLDRWLTLPRYIPEEDTRLLLKNCYRQYRQYSKVQTVLKNNLISLLDTVFPNANRLFSSPIRGDGSEKWVDFVAEFWHCRCASEKSERAFTSKYLRWCRKHGYNFREAKAHTIYAEASGHIGVMPKSETTKLLVEQAVAQLRATSAALAALKHEMQSLASQLPEYPVVMDLFGVGPTLGPQLIAEIGDVRRFYSKKALVAYAGLDAPPNDSGDVTGRHKSMSKIGASSLRRTLFLVMSVYLQTAPLDEPVCQFMDRKRAEGKPYRVYMMASANKFLRIYYATVKAYLESLEHTV

SEQ ID NO: 129783 - protein, 444 aa, unidentified
MEQMMAMRKRTDTVFPNAAGIDVGASSHWVAVPPDAAEESVREFGVMTDDLRALADWLMACKVEIVALESTGVYWIPLFEILEQRGLQVWLVDARQMKYVPGRKSDVQDCQWLQRLMSYGLLRAAWRPAGEVCELRAIARLRETLLAEQASWVQRMQKALVQMNIQLTEVLTDVMGMSGQAIIRDIVAGERNPEVLARHRHRRVKASTEEVIRALTGNWRQEHLFVLGQALSMYDDIARHLRECDAQMQVLLGQRAQCAINVGAVPRAGSKARAAFDVRQMLANWAGVDLTRINGLEVSSVMKILTEIGPDLSRFANVKHFCSWLGLCPGTKVSGGKVLSAGTKRSANRVRQALKMAAMTLSHSNSALGAFYRRLCSRMDKPKANTATAHKLARMVYFMLTRGEAFVDQGQQRYEELQRERSIAALKRRATALGFQINPIGAAA

SEQ ID NO: 129784 - protein, 410 aa, unidentified
MDTLIERCAGLDVHKDSVTACVRLPAAGGGREQVLATFATTTADLLALRDWLGALGVTVVGMEATGVYWKPVYYVLEERVQCWLLNARHLHNVPGKKTDTLDAVWICQLVEHGLVRPSFVPPPAIRELRNLTRYRKAQIEERTREAQRLDKVLQDAGVKLSSVASHLLGVSGRAMLQALVEGTRDPATLAELARGTLRKKLPALREALHGRFSRHHALLVGAILTKLDFLDEVISDLSAEIEQVIAPFAAEVALLDTIPGVDRRTAEAIVAEIGVDMSRFGSAARLASWSGFCPGNNESAGRRGPGTTRKGSKWLRTHVVEAAKAASRTKQTYLAAQYARLRPRRGTARATVAVGHSILVAAFYILDRHQPYRDLGPDYFRRRHSREHHARRLARQLQALGYRVTLEEAA

SEQ ID NO: 129785 - protein, 342 aa, unidentified
MTEYKRIGIDTSKAVFTLHGIDHAERPALRLNLRRGQMIGFFRKLPPTEIAMEACGGTHHWARELTTLGHKVHRIPPQYVTPYVKRGKNDDNDAAATCEAGGRPGMHFVPVKSIEQQAQGMVLKVRETLVDQRTQLCNTVRGHAAEFGAVIGKGRGQVSALLTAVEQDTTIPREAKEMFVVLGHQIATLDARIKHIDGQLASAHKANPVSQRLATIPGVGPITALTLAIEIDPEVFASGRHLAAWAGLTPKEHSTGGKQRMGGISRAGNERLRVLLVSGAMAVINAAVRPGGRQMTEWLRALLLRKPRKLAAVALANKTARIAWAILAKGGTYRAPALAEHA

SEQ ID NO: 129786 - protein, 364 aa, unidentified
MRLYAGIDLHATNHYLGIIDEQNKVYFKYKIPNDLRKTLSYLEPFRKEIEGVVVESTFNWYWLVDGLMDQGYRVHLANPAAIRQYEGLKHLDDEREALWLANLLRLGILPEGYIYPKEERPLRDLLRKRLQLVRHRTSHILSIQNIMSRSLGLKMRAQEVKKLDDDGLRGLFKEEHLYLSAHTSVGVMKYLGEKIKRIEGVVKNRVKLQKEFEGLLSLPGVGEILGLTIMLEVGDIGRFPEVGNYASYCRCVRSTRLSNGKSKGEGNRKNGNKYLAWAYVEAANYALRFYPEVSRYYHRKAAETNSIVAIKAVSHKLARASYYIMRDQVVYDSRKLFAEGGGSETGCGVGSKPQSLIGQLLPPS

SEQ ID NO: 129787 - protein, 343 aa, unidentified
MNEISMIGLDLAKNVFQVHGVDASGKVVLQRRLGRKAVEKLFAKLPPCAVGMEACGSSHHWARVIGRYGHDVKLMPPAYVKPYVKRNKNDSRDAEAICEAMSRPTMRFVAVKSVEQQAMLSVHTTRALLVKQRTMVANALRAQLSELGLVAAQGHEGLHELMARLEVPSEEIPEMMRSALLMLVEQWQALDGKERMLEKQIVKAVRCDQEARRLMAVPGVGPIIASAVLAKVPDARLFRSGRDFAAWVGLTGRDHGTGGKHRPGRISKQGDRALRTLLINGASAHLRQQKRHGVSDPWLRELLARRPYKVTMVAFAAKTARIIWAMLAKGEDYRDRTSAPAAA

SEQ ID NO: 129788 - protein, 337 aa, unidentified
MKPKKQALPSLFWAGFDLAKETFQMAVWGHQDFQAMELGSSPRVRKAMPEVLAWLRDHAPKGMSLAVVMEATATFAEDVGSWLLDLDPTLRVAIVNPCQTSAFVKSLGFRNKTDDLDAKALAKYGQERNPVAWERPTPAMAILKDLVRTRADLVRARTAMSNRLKDHKRSAETATAALKKVIQNLANQIKALDKAIKAHLKAQTVMHHQVKRCQSIKGIGIVTATTVLAELGDLTRFPRSRMLTAFAGVSPRKKESGTSVHGKTRMCKQGSGRVRAELFMAASNAARFNPDMKATYQNLLKRGKEPREALGAIMRKLLVLMRAVLKADRDWVPRLSA

SEQ ID NO: 129789 - protein, 453 aa, unidentified
MPKTRSSAPQNLTRVNPGAAAIDIGSTMHMAAVNPDSDDMPIRAFGTFTHDLHDLATWFRSCGVTSVAMESTGVYWIPAFEILEQHGFEVILVNARYAKNVPGRKTDVNDAAWLRQLHSYGLLRGSFRPTEQVATLRAYLRQRERLVEYAAAHIQHMQKALMEMNLQLHHVVSDITGVTGMKIIREIVSGERDPDVLASLRDVRCHASVETIKASLIGNDRDEHVFALSQSLELYDFYQLKMLECDRKLETAIATMTAKVEVPLAPLPKIRTKTKQTNAPSFDVRAALYGLTGTDLTQIHGLGSSLVLKLIGECGTDLRAWPTAKHFTSWLCLAPGNKISGGKVLSSRTRRSSSRAAALLRLAATTIGRSDTALGAFYRRLSGRIGKQKAVTATARKIAVLFYNALRFGMIYRNPGAAAYDERHRDRVLANLQRRARSLGFQLKPMIAETSVS

SEQ ID NO: 129790 - protein, 440 aa, unidentified
METTERPEMVLAIDFSLDRLDVALRGPAPPWIWGHRAYANNWAGYQQLKQDLLAELQRVSPVQFTAVGESTGPYWWHAFYQFSHDAELAPFDPQLALLNPAHVKGYRKALAEQDKTDPDDARLIERYYRSVGIEHPYQFADRYLRLRTFSRAYARVLHTLAAEKAYFVAVLYLWGSEYQRRAVRPFSDLLGVTSQFIVDEYADPQQLSAIPEAELAALLEQHSHHTLRQPQETAQKLHQVAQNSYPLPAPLGQALHQVLQLTLELIRVLSDNQNAYRQLLEAELATLPEAQRALAYKGLGPVLVAGCLAEIQDTTRFTTGTKFDRRTQTDRPRTYRDGQAAVAKLAGLWWPKQDSGHVQGVQPRLARERNPYLRFWLVQAAYTLQRYQPEYQQFYWQKYREAHDHHHRRALILTARKATRLIFALLHKGRLACLEEGTLT

SEQ ID NO: 129791 - protein, 401 aa, unidentified
MTSGYQVFLGLDVGKGEHHAVGLDPAGKRLHDAPLPNSEPKLRALFDKLAAHGPLLVVVDQPATIGALPVAVARAAGHRVAYLPGLAMRRIADLYPGRAKTDARDAFVIADAARSLPHTLRPVDVGDDALAELDVLVGFDDDLAGEATRIGNRIRGLLTGVHPALERAIGPRISHPAVLEILSRCGGPTGIRAAGRRKLTAIATAHAPRMGDKLVTAILAALDEQTVVVPGTTAADTVLPRLADSLKTVLQQRKQVATEVEGILDAHPLAGVLTSMPGVGVRTAARILLEIGDATAFKSSGHLAAYAGIAPVTRSSGSSIKGEHPARTGNRKLKRAFFLAAFAALSDPTSRAYYQRKRDEGKKHNAALICLARRRCDVLFAMLRNKTYYRHPETTPAPAAA

SEQ ID NO: 129792 - protein, 335 aa, unidentified
MKHYEHYIGVDVSKKTLDVSVLKGREHFFQLHISNDEKGLQTLNKQLKQKGISPQKSILCLENTGLYGSKLTYWAESNKYDVWVENAIAIKRSLGLVRGKNDQVDAKRIALYAMRFQDKCILWKPKREVIIRLKHVLTLRDRLVIAKKRLLTPLQESTSFIAKKHQKGLQTICKSALQGIQKSIKNVDKEINQLIKSDSKLSHMTDIMTSIDGVGRQIATAFIVATNEFKQVKKGRPLACYAGVAPFAHQSGTSVRGKTRVSHLANKNLKAIMHMGALSAIQHSQEFKMYYERKVKAGKPKMAVINAIKNKQILRMYACIRDDRKYEKNYTRKVA

SEQ ID NO: 129793 - protein, 346 aa, unidentified
MKILAIDLGKFKSVSCLLDTENNQTEFQTISTLRWAIEQLLHTTQPQQVVFETSTVSGWIHDLCQSLGYPVLVANPSADAWKWKNVKRKTDKDDALKLAKLTALEQIESVYMPSLESRQYKRLVKFRKDIVWRINKLQSGIRNLLCAQGMNMLTRGKAWNIEGLATLEKHRKPLSECSMEELWRGELDVDLTLLDTLSEQLHKIEKHLTQLAKQEEKVQLLMTVPGVGRRTAEVIVTSLDDPHRFKNARQVSSYAGLVPSQRQSGQTNRLGRISKRGSRLLRTALVQAAWLSLQYNPWAVEIFNRISGGQKTRRKTAIVAVARKLLVRCWAMLRHNQPWNPDLVPQ

SEQ ID NO: 129794 - protein, 324 aa, unidentified
MIEGILGIDVSKDTLDASMSSCNKVRVKSFANSPDGWRHLLDWLVSQKTRRVHACLESTGRYSLGIAGTLNEAGHIVSIVNPAQIRDFARTKLGRNKTDGVDASHIREYCELFKPQPWVPPSEAHRRLGELQTIRAGIVAGLTEWKNRKNSGMIDAVAQSLADETISHFTSQLGAVEKAIAQTIDNDPELRRKRDLVLSISGVGHALAGVVLTELPGPDVLRSSAAAVAYAGLNPRRHQSGTSIDRVTRISKIGNAVLRAALYMPALSAMQHNPAIVALVTRLKSRGRLNPKQIVVAAMRKLLVLCFGVLKTGKSFDPALAMGC

SEQ ID NO: 129795 - protein, 390 aa, unidentified
MSQHSHFDASRSLTALEQDNTIIAVIEMSQSKWLVAALVPGVERQPLKKLDAQEEALLKLLHRWRNEAGQAGREIKRIVVAYEAGRDGFWLARWLRARDVEAYVIHPTSIAVSREHRRAKTDRLDTELLMRAVLGWLRGEMRHCSMVAIPTIEEEDARRPNRERQNLVTEQTRIVNQMKAIFARFGIRSFRPTLRKAEEKLKGLRTAEGTPLPESTHAELRRHLARLCVVREQIRAVEQERLRKLAAAPVAHNGSHAMVRLIARVIGVGIETADMLVNEVLSRHWRDRKAVARYAGLTGSPDESGRRRRERGLARAGNARVRCGMIQFAWRFLRFQKDSALAQWFAARTADRRASTRKTMIVALARKLLIALWRLVTTGQVSDGMVLRAA

SEQ ID NO: 129796 - protein, 372 aa, unidentified
MSKVVVPQTILKGAHSFMASSKYIGMDVHKESISIAVRNAAGKIVMESVIETKASMIVQFIDGLRGEVHVTFEEGTWSAWLYDLLKPHVSKLVVCDPRRNALLQEGNQNDRVDARKLAELLQNNQLRPVYHGDHGLRTQKELVRSYLTITKDLSRVMTRVKAIYRSWGIACSGTQVYTARHRAEWLEKIREPGVRRRAEIYYLELDGLRLLRQEARKDLLAESKKHQVWKRLHQIPSIGPIRAAVLLGIIQTPHRFRTKRQLWTYSGFGVEGHSSADHQVVKGQLQRKKKPIEIRGLNKNCNHHLKNLFKSAAVNASTKRGPFQEFYAALVAKGMRPEMARLTLARKIATIVLIVWKRGVCFDANHLKPQTA

SEQ ID NO: 129797 - protein, 344 aa, unidentified
MNYYAALDVSLRSIHICVMDQDGKIKSEGQVPSEVEDILAFVQALDVEVTSIGFEAGTLTQYLAYGLQAAGHEVICMEARQVKAALSAMRNKTDKNDARGIAHVLRSGWYSRVHVKSLQSHHVRALLSSRKAVLSKCVDLENEIRGLFKVFGIKLPPKLGHGSFDRHVRNTIESDPALAHALLPMLDVRLQLYHAFRELDNRTRKMAHQDPVCQRLMSVPGVGFVTSLTFKAAVDDPARFKRSRTVAAHFGLTPRRFQSGEMDNPGRISRAGDPDVRATLYVAANSMMTRSSKWSSLKVWGMQLAKQRGHRRAVVAVARKLAVILHRIWIDDTQFRWGSEGATQ

SEQ ID NO: 129798 - protein, 343 aa, unidentified
MKHIGLDVHSTTTDISVFSDRGREILHSKIPTREAELVAFMKSIAGSKQVALEESQMADMVTRIIEPFAAKVIRCLPQHNRLISQSENKCDREDARNLAELLYLNKLKAVHHAPWAYRQLREGVRAYWTASRDLTQAKNRLKAFLLFNGVTYEGERVYSQRYRQDYIQAAEKISANRHLLGQRYQHLDFCRTGKATHIKILKELVQFSKQEMHCLMTHPGIGFIGACTLIAYLENGWRIRNKRKLWQYCGVGVRKRESSTKGHRGASRKGNRYLKNVLMTAAAAISARRKPDNALTRMWRSEVEAGIEVERAKRNLARKVAVLAQRSLRFKEEYHDDRVVTTQ

SEQ ID NO: 129799 - protein, 380 aa, unidentified
MDRVFLGKNLTIGVTDRSPLGTIDPVLEHGSSHHSLKSPNSCEGHRARISQGRDLENTYEEVQMSFVGIDVSKSQLDIAVRPDNKRWSAVNTEADIAKVVEKLNEFSPQVIVIEATGGMEMPLVAALSQARLPVVVVNPRQVRDFAKAVGRMAKTDRIDAEILAHFGEAVKPDVRLLKDEDTQMLTALVTRRRQVIEMLTAEKNRLGISPKVVHKDIKKHIDWLQARLEDMDRHLDSAIRKSPVWRGKNDLLRSVPGVGHVLSVSLITGLPELGILSRRQIAALVGVAPLNRDSGLFRGKRTVWGGRAHLRAVLYMAALSASRVNPAISLFYRRLVEAGKKPKVALTACMRKLLGILNAIIKNRVPWQADHSTCPTPNIP

SEQ ID NO: 129800 - protein, 362 aa, unidentified
MEDTRRNVTAPSMTQPIAGVTVGIDTHAEVHVAAAFDQMGRPLGHLEIPTTPAGYRRLLAWARGLGPVVAFGVEGTGSYGAGLARHLADAGCQVVEINRPNRQTRRRLGKSDPIDAEAAARAVLAGEAHGIAKADTETVGMVRVLRVARRSALKARSQAVNQVHAILVCAPASLREELRTLSMDELVRRAAAFRPGPVITPAAANKLALRSLALRHLALTDEIGVLDTELRRLTEAALPSLCHLKGVGPDVAGALLVAAGDNPERLRSEASFASLCGVSPIPASSGKTTRHRLNRGGDRIANNALWRIVMTRLSSDERTQAYLARRTQEGRSKREIIRCLKRYVAREVYRALLAPAALVVAA

SEQ ID NO: 129801 - protein, 355 aa, unidentified
MQPMNYYTGCDAHKKYSVFTTISEAGEIFPAKRVEHDRQKFRSFLETLPTGSCIAIESAGNWYWLVDEMEKAGHKPSLVHAGKAKLMMGNINKTDKLDARGLAILARNGTLPVVWIPPGELRDQRELPRMRLALGGIRTKLKNRIHATFAKYGITFEEVSDIFGRRGRRLLEQAMDELPPETRHSVEEQLQLIDQVEQSIKQAEKRICSVIKEDHAMQILKTLPGVGPILAITIALEMGNVERFPTGEKFASYSGKVPRVSSSGGKTYYGKVRPDVNRYLKWAFTEAANAIVLQQHRLGDCHVLRLYWRIRNHKGHAKAITAVGRHLAEAAYWMLKNDEPYREPGIKKMISSIRG

SEQ ID NO: 129802 - protein, 419 aa, unidentified
MSSLTQEFTAFIGIDWADTKHDICLQPANSQQREFDQLPHQIPAIEQWAYSLQKRFGGTIAVVLELSKGPIVYALQKYDFFVLFPVNPSTLAKYREAFKPSRAKDDPTDAELALDLLLCHGDRFKPIKPQSVEMRTLTYLVEQRRQLVGDKTRFVNRLCDTLKQYFPQTLDWFEHRDTVLFCDFMTRWPTLTQVKRARKASLETFFKTHNVRFDTVIATRISGIRAATPLTLDVAVLTAHQLQAMAQVNQLRTTLQAIDQFDDAIAKLAPTLPDYALFNALPGAGPHLAPRLLVAFGEQRERFTSAAQFQQYSGVAPVTERSGKKCWVHWRWQCPTFLRQTMVEWAAQTINKSFWAGAYYRQQRDKGCSHQTAVRALAFKWIRILYRCWQNRTPYDESKYLNALKRRDSPLLKQVTTTS

SEQ ID NO: 129803 - protein, 348 aa, unidentified
MLADELDYVIGVDTHRDEHAMAVVTAPSGAVIAAAVAAADVHGYRELLRVAGRHAPGRRVWAIEGTGSYGAGLSRYLHAEGENVLEVSRIRRGERRLRGKDDALDAARMARAALASDTLALPRTGERREALRLLLIARRSAVDVRREALTQLRAVIVTAPEHLRQELRRLPEGKLLDRCSRLRRTQASADELATRIVLRSLARRVRTATSEADQLEREILTHVRVLAPALLDEPGVGPIVAAQLLVSWSHQGRLRSEACFARLAGVAPVPASSGQTIRHRLSRGGDRQLNQALHTIVLHRRQHDPTTKAYIEQRITEGKTRRDATRLLKRYLARHLYRLLQQQEPNMA

SEQ ID NO: 129804 - protein, 596 aa, unidentified
MLAFTRRKKCKKTAHRILLSLDNRGPHKCFGGCAATHLKGTVPAQPFFAILPSTPWVVVTVPALVLCARLLGWSREVATTSLATGLGLIPFGRLHVAPSLLPPTAFLYPLLTHVETAMTPYKDAFPEPCPPAPTIPEPTVLLPSSALHIHNPHAAGIDIGEAEHWVAVPPDRAPQPVRRFGTFTADLDTLADWLLDCGITTVAMESTGVYWIPLFELLEARGVQVFLIDPRQAKRAPGRPKTDRLDCQWLQRLHAYGLLAAAFRPDAQVCVLRAYLRHRQMLLTYGAHHIQHMHKALQQMNLKLSQVVSDLTGATGMAILKAIIAGERDPLTLAKLRNPHCQHSEDEIAKALQGTWRAEHLFALQQAVELYQFYHQQLTVCDQQLQAHLGTFADKSAGQPLPPKPRRHKKANEPRFDARTPLYRLAGVDLTTIEGIEEGTALVILAEIGTDMSRWPSVKHFCSWLGLSPQHKISGGKVLSRRVRPGAHRVAVALRLAARTVQQARTALGAFYRRLRSRLGAPKAVTATAHKLARLVYSLLKHGSAYVKQGLDDYESQYRERTVKAMARQAKALGYTLVELTVPATPRNDAVAPATP

SEQ ID NO: 129805 - protein, 342 aa, unidentified
MAHFVGLDVSVAETSICIVDEHGKMARERKVPTEPEAIIEALNGSGQVCERIGLEAGPLSQWLYGELAEAGLPVICIETRHIRAVLAAQVNKTDRNDVRGIAQMMRVGLFRPVHVKTLQSQQRRMLLTTRKLLQSKMLDLENDLRGTLKNFGFKVGKIGAARFEARVRELVNGHPALRAMVIPVLVARAALREQFKVLHALLLRLVRHDRACRLLMTAPGVGPVTAMTFRATVDVPARFKKSKAVGAHFGLTPRKHQSGEMDRTGRISKRGDRMVRTALFEAAQAVMIRLTRWCTLKAWGMKIARKRGLRRAIVAVARRLGVILHRMWASGTAYRWEQPATA

SEQ ID NO: 129806 - protein, 356 aa, unidentified
MEITIIGVDPHKRSHTAVVLDDEEQIAAELRVTAGPKQLEKLLRWAPAGRRLWAVENANGLGRLLSRQLVGHGEQVVDVPASLAARGRRLSGHSGRKTDAFDARSVVIAARHHGGLRRVTIDEDAEVLGLLLARRDRLIETRTRIVNQLHALLSEMQAGGAKRDLTPAAAARVLARHRPATAAEDTRKQLARELLAEWRRTDRQIKTATDDLADAVTATGTTLTDIPGIATIGAARIIAIVGDIDRFPTPGHFASFTGTAPLEASSGEVTRHRLSRRGNRQLNTVLHIAARTQTRTGGPGRPYYDRKIAEGKSDREALRCLKRQLSNVVYRRLHADRQALVAAARDGHPGTNPKAA

SEQ ID NO: 129807 - protein, 414 aa, unidentified
MTATHSTASTVLVAIDISKHRHEVLIGIPGKKRRRRITITNTLEDFQRLAIALASYELPVRIGFEATGNYHRALAHHLGQAGFDLKLVSSVGLARTREALHNSWDKNDPKDAQVILHMMEIGAVQFFHDPLVTGTADIQELSKTHEIVSRSKTELWHRILTHYLPLYFPEAERFHRSSRTDWFLAFLEKYPSPHMITVMSQEAFIADAWEVVGRKVSKERLLSDIYATAVSSVGLPVHSDSDAIRMFRLVLAEGRSLIRQRDVIEARAVELLSNLPDYQLLTTIPGIGPINAMTILAEAGDLRRFRHHRQFLKFCGMDLATMQSGMFRGQSRITKYGNARLRRTLWMAGQTAVLKRTNSFRDKFERYISKDRHNAHLRRKAYTAIAAKMARTVHAVVKHGAPYRPFFEGVSPGG

SEQ ID NO: 129808 - protein, 426 aa, unidentified
MSYTIAGIDVHKKVLAVVVAEVIEQEEWSYERGTFGATAYELQRLADWFQQRGVQEVVMESTAQYWRPVWGALEQYWTPVMRQREGAGPMAGKLHLAQAQSNRGPRGRKNDHRDAERLVHRLVAHELVLSYVPDPEQRLWRALTHRKQQFAEDRTRCQNRLEALLEQMHLKLSSCVSDLLGVSGLRMLGAVAEGATHPVAVGALADANLRATPEQLRDALAACAHLSPVYRRLLKMELKQLQFLEQQRHELEQEIAQLLQPHAGAVERLAEVPGLGVESAHQIIAEIGPTAEVFPSEKALSSWVGVCPGEEVSAGETHSSRSPKGNRALRRLLNEAAHAAVKTKGSIFEVVFKRLQPRLKYKEAIWAIAHRLCRLIWKILHQGVRYEERGPAVSAKSQRARLVKMVKALTKAGYQVTPALPTPKTT

SEQ ID NO: 129809 - protein, 394 aa, unidentified
MILVGIDIGKNKHTFSIIDKNSGEILLSPSDFSNNLKGFLFLIPKLSSYTKSKLLIGMEDTGHYHFALLKYLLDRRYTVALINPTTTDLTRKLQGGITKNDHLDSLTICDVISSNHRNKPYRVTTLNRFDLYEQKQLTRHHHNLKEELNTYKNRLQKCIDIVFPEFNSLFHSKYGIVYMNILKIFSSAKAIANADIRSIRKCFEFKGKGKRISLSAEQLKLIAKSSIGIPSVAEEIQIRHLVSQIELLEKQLSEIDKRIEEFSLKNNSPILTITGISHFSGTSIISELGEICNYTKASQIIKFAGVAPYHYESSQFTAHHTAITKKGSKYLRKTLYQIILPVISNNEVFYAYYTKKLNEGKGHRCAQGHCIRKLLRVIYHILSTGQPFNPELLV

SEQ ID NO: 129810 - protein, 444 aa, unidentified
MVPQIKPDLTVKNILRLERHNWVTGTGMARISREEKEIIMKVYIGIDWSENKHDICFLHETGEVLLVQEIAHTIAGFRQLDQARQSLRVERQEVIIGLETAHNLLVDYLWEQGYEQIYVLPPAAVKSAQKRYRQSGAKDDRWDARLIANLLRTDQRCYTAWQPDQPLTRQIRAEVRFAQQLGQEVVRDGNRLRCILLRYYPAALDAFPHLDSVVFLAFLQAYPTLRQAQALSFDQLKVFLRQHHHTQVRFWPTIYAGLHSDQPRSDPALDATYAPLAQAQARILETLIRRRNAGLARLDQLFPLHPDHEIYDSLPKAGTLLAPALLAKLGDDRARYPTPAVLQAVAGTCPLTKRSGKHSYVLFRKACDRDFRHIVQQWARLTLDVSPWAVTYYRTVRPHCQTDNDAVRRLANRWLEILWRVWVDRKPYDEALHLKQHALRNQID

SEQ ID NO: 129811 - protein, 337 aa, unidentified
MKLYGGIDLHSTNNYHVLIDETGKTVYDKRLPNDIEHVLQELQSFQEIDSLVVESTYNWYWLVDGLMDAGYKLKLANPNAIQQYNGIKQTNDKSDARWLAELNRLDILNQGYIYPKEDRGTRDLMRKRMQLVQQRTTQILSIKNIIERNTSLRLSANTVMKLTKSELKKYLDDETIVLAVNSNVIIMQCLNNQIKEVEKMLVKAAKLSPEYKSLLTIDGIGKILAMTIMLETGNISRFNNVGNYSSYCRCVDSSRMSNGKKKGVNNKKNGNKYLSWAFIEAAHFAIRYNEQIKRYYQRKMSKTNRIVSLKTVAHKLARASYYIIRDKEEFDVNKSFT

SEQ ID NO: 129812 - protein, 310 aa, unidentified
MSEFVGIDVSKLQLDVCLHSAGTAFSVPNAEAGLKELCNHLCALAPQLVVLEATGGCERLCAAALAQGGVPVVIVNARQVRAFAIATGVLAKSDRVDARVLAHFAAAVQPQVRALPDEQRQALDELLGRRRQLVAMLVQEKNRLMQTHLVKKDIKSHITILEKRIRGCDGELQQVIHASPVWKAQEDLLLSFKGIGPVNARTLVAELPELGQLNRKQIAALVGLAPFPRESGAWRGRRTIHGGRGQIRHTLYMATLAAVRFNACIRAFYQRLCAAGKPAKVALVACMRKVLTILNAMMRTNTPWQDPIAG

SEQ ID NO: 129813 - protein, 345 aa, unidentified
MKHYAGLDVSVKETSVCVIDEAGKICREVKVPSHPEDLAAALNDPAWRLERIGLEAGPLSQWLFSGLVEAGLPAVCIETRHTKAFLKAQVNKSDRNDARGIAQMMRVNLFRPVHVKTLTSQKRRALLTARKILQDKAVAIENDIRGLLRNFGLKVGAVGVGKFDERIRELVEGMPELVEIMEPLLTARQKLREMFTTLHRKLLSIVRDDGVCRRLMTIPGVGPVVSLAFSATIDVPARFKNSKAVGPSLGLTPVLNQSGESLRVGRVSLCGDEMMRALLYEAAQVMITRVQKWSWLKAWAVNLAKRRGLKKAIVALARRLAVIMHRIWVDGTVFRWTKEAAPATA

SEQ ID NO: 129814 - protein, 457 aa, unidentified
MKKEDLKKAKEKEFVAMAVVHPHAAGIDIGDTIHAVAVPAGRDEQSVRTFGAMSCDLEEIVAWLEKCGVDTVAMESTGVYWKPLATLLIQHDFEVYLVNARHVRNVSGRKTDQGDAEWLQQLHSCGLLKSSYLPDDIQESLRVLVRHRRTLTQESSRFVLRMQKALELMNIKLHTEISDLTGKTGSAIVEAIISGERNAANFLPLVDRRIKADREDLVKSLQGNWREEQLFTLEENYSCYKFFLERIKKCDWAIEAKLQEFAAAENEGELPAPKPEKSDEKAPFKKKNKNAPKFNVRSYLKGIHRVDVLAIYGMNDVGAMEILAETGTDMSKWETVEHFRSWLNLCPNNKITGGKLVSSKLMRKKANPASQAFRKAANACQRSDHWLGDYFRRMKAKGGNKYAIVATANKIATIYYKMISEKIEFNPPDLTEYQEKRKNAKIAYLERALKSLKKECA

SEQ ID NO: 129815 - protein, 343 aa, unidentified
MTRYIGVDLHRNCFTVCVIAENGREYASEYRLSQLPQFVRKLRPTDELAVEVTGNTRLFYDAVAPHIQNVVVVNPAQFRVIRDSVKKTDSHDARTLAFYLSKGMLPEVRMKDKLQAQLASLTQTRDALVKQRTALKNKVNNILSAHGINLRREALSSDAALEQVLGMTFEPIVSSELRVIVSQIRALNQSVAELEKTIKTEGPKLAGHKNLRSIKGIGDLGATILLSVIGDIEDFAHPGKLAAYFGIVPRVRNSNETERSGRITKRGAKLGRTALVQCALIAMRYSPYLAKFYHKIARKRGAGKAIIALARKFLGVIYHTLKNNWVFADFPNFVLAEPSETAA

SEQ ID NO: 129816 - protein, 330 aa, unidentified
MKFKHVIGMDMAKETYVVHVHHSDYTQEFINAPKHICKMLKTLEGKLKCSLDQCLFCLEHTGLYSLDMIMILDSQSLNYSVIPGLEIKKSLGITRGKSDVIDAFKISEFGYLRQDKLTLHQMPSKALIKLKNLLSLRSMHVRHKASYQARMKEQFTVLKKTHFPDLYQSQRRMIDHLSKEIERIENAIKEIVNQDLTMKKCNDLLISIKGIGEIVAAHMIVKTQCFLNFNDWRKFSCYCGTAPFPNESGSMVKARRISKIGDSEMKTLLTLSARSAMMHDPEIKLFCKRKLDLGKSKKNITNCVRNKLIARMFAVVKRGTPYVTMKKFAS

SEQ ID NO: 129817 - protein, 318 aa, unidentified
MTHPESFAGIDVSKARLDGHCRPDGTAFAEPNDHAGIAAVVERMRALSPTLVVIEATGGLETPLAAALAVAEVPVAVINPRQARDFAKATGKLAKTDTIDAAVLAHFAEAIRPEARPLPDADTRRLDALIARRRQLVEMGTAERNRLQATADPAVKADIEAHIAYLKGRLGGVDEDLQAAVEASPAWKAKDDLLRGVPGVGPVVSRTLMATLPELGTLSRKKIAALVGLAPVARDSGAAHGRRCIAGGRGPVRSILYMAALTAARYNPVLKPFYERLLAAGKPTKVAQVAVMRKLLTILNAMIHNNQPWDAAAALVAD

SEQ ID NO: 129818 - protein, 362 aa, unidentified
MVGFDGETREVHMTNITTIGIDIAKRIFQFHGVDKNGKTVLKKKLMRDQVLTFIANLPKCLVGMEACGGANYWAREISKLGHEVKLMAPQFVKPYVKTNKNDQADAEAICEAVSRPNMRFVPIKSIEQQDILSIHRVRARLVKNRTALANEIRGLLHEFGMIIPQGINKITSKLTEVLDSGKLSPISQQTFSDLKEEFIENDKKIKCLESRLKIMASELDKYQQIIAIPGIGLITSTALIASIGNGNCFENGRQLSAWLGLVPRQASSGGKEKLLGISKRGDIYLRTLLIQGARAVLNTKLRFTTESQKAKKDYSKFTQWMFNLHDRSGHNKTIVAVANKLARVVFAVLSSGNDYIENKVCS

SEQ ID NO: 129819 - protein, 426 aa, unidentified
MRSVGLDIHKRVVQAVILDDQGHLSSRDRFPCDQDALLSFARNRLDKDTRVAMEATTNTWAIVDLLEPFVAEVVVSNPMCTKAIASAKVKTDKVDATTLAQLLRCDYLPRVWQPGPPLRQLRSLTSRRASLTHHQTAIKNRIHSVLHQRLMAGPERLFDSKGLDWLRKVELDPPGRAAIDSDLRLLEAHEAELEALDKDIAQRGCQDHRVKLLLTLPGVGIAVAQTLLAALGDPSRFPDGDHAASYIGLVPSTRQSADHCYHGPITKHGCAHARWVMVEAAQHLDDHPGPLGGFFRRISAKKGRNKAVVATARKLVVIAWHMLMNNEPYRYAKPATTKAKLVQLRTTGGGGRRRGGVPPGSLKSQPTGQGSTRLIPSLAEVYASEGIPMPTMAPGEQRTIKQAGAEGFVETIQTSRRVPRKSSTAS

SEQ ID NO: 129820 - protein, 389 aa, unidentified
MIYVGIDVAKDKHDCCILGSEADNLYPVFTIPNNKTGFDELYEKIFSVTDDRTEIKVGLEATGHYSLNLLGSLIDKGLPTCVINPLHTNLYRKGLSLRKTKTDKVDAGSIAMMLMTDKTLKPYSDTSYHSEELKSLTRYRFDKVQERAKLKSSVARLINILFPELEKLVPNLHMASVYALLSEFPGASYIAESHLTHLRNVLETASKGRYGRDMAVTIRNAAKDSIGSVMPAKSMELKHTIHLIEVMTDEIDEIEASIKSIMDTCDSPIMTIPGISYRMGAMILAEIGDFTRFNNADQILAFAGLSPSTYQSGQLDSSYSHMEKRGSRYLRYALFNATKFVCKWDENFGAYLSKKISEGKHYNVAVGHATKKLVRTIYRMELTGETYRK

SEQ ID NO: 129821 - protein, 343 aa, unidentified
MQIHSVGIDLGKTTFHLVALGAAGKVLVKKKFTQRQLLTYTANMQTSLIGLEACSGAHFLGRVLRKQGHDVRLIAAQFVKPFVKSNKNDFVDAEAIAEAVERKNMRFVPIKTDDQLDLQAIHRVRDRLISRRTAVINQLRAFLLERGMVFAQTPAKLKAAMADILENAETDLTPQMRNLIDMLWSEWKTVEQQVEELTTQLERICATDAGCTRIRQIPGIGPIVATAIVAAIGNGAAFRKGRDFAAWLGVVPRQYSTGGKAKLLGISKRGNVYLRKVLIHGARAAVLRIKRDRVPIGPWLDRLDARAPKNVVVVAMANKLARISWAVLSSGDDYRPLPSISAA

SEQ ID NO: 129822 - protein, 351 aa, unidentified
MKKLSKPGKQMPEETIGIDLGDKMSRYCIVNREGEVIEEGSFRNQASSLAKHFSGEPRRIALEAGAQSAWISRELKGLGHEVIVANTRELKWITASDTKNDSADARKLALLARADVQLLAPVEHRTAEQQAQLAVIRARDAILRARTLLINSARGIAKGFGVRLPKSITSTFGERALADLPAMLRTALEGLLRQIDALSQHIGNYDQRIGELAEQRHPEVKRLTSIPGVGTLTALTFTLTLGRPERFAHSRDVAGFLGLRPRQNQSGARDPQLGIAKSGDPYLRKLLVQCAHHVLGHWGKDSALRRWGLTKTEGGKKATLRGIVAVARKLSVLLHRLWVSGEFYQPFPKMV

SEQ ID NO: 129823 - protein, 410 aa, unidentified
MEILYQRCCGLDVHKETVVACLRIMSGGEVLREVRTFETTTASLMALSEWLAEKGCTHVAMEATGVYWKPVWHILDDGDFQLILANAAHVKNVPGRKTDVNDATWLADLVAHGLIRASFVPDAQTQEMRNLLRTRKQLVREKSSHILRVQKTLEDANIKLDSVVTDVMGMSGRAMIEALVAGESDPAKLARLANYRLKASQETLREALRGRVTKHHRFLLRLHLNQIDALDASIATIDEQVEAGIAPFRAAVGQVMTIPGIREIGAQVIVSEIGTDMSRFPSEGHLISWVGLCPRNDESAGKRRSNRLRKGAPWLKTTLVQCAWAAVRKKDSYLKAQFLRIKARRGPKKAIMAVAASILTAIYHMLKDGTLYQDLGPNHFQTRSKGQQTKRLVKRLADLGYDVALTPLTG

SEQ ID NO: 129824 - protein, 394 aa, unidentified
METLLDCCCGIDVHRDILQVCILKGSSDNPEIIRCEFKTIQSDLQNLIQWLISHDCYHIAMESTGVYWRPVYEAIERYHLDCKTLMVVNAYHMRNVPGRKSDVKDAEWIASLLRCGLLKPSFVPDKLTRSLREYARLYKAFTWEKTRYMNRLEKFLQTHGFKLSSVLSSIYTISGRNLLNKLAEKGYLLSKDVIEALDKRVKKSSEEIHAAIKGQLDLFERTLLKKLLKKVDQIQEEIEDMLEIMHEVSQTYEMQISQLDSIPGIDTLSATTIIAEISGHPDNYFSSSEKICSWAGLSPRNDESAGKIKSKKILHGNSYLKSILCQVAWASTRVRKSPFSAWFWSHQGKLGKKKAIIAVARKILTLAYKLLKSGEFYDPNITFKVQSSPPLNNS

SEQ ID NO: 129825 - protein, 404 aa, unidentified
MERVYVGIDWADDHHDVHVTDEGATPLDNFTIAHSYSGMQQLKMHLAKFSVAPENILVAVECHQGLLIYSLLEAGCQVYLINPKAADRYRDRYRMSSSKSDPKDAMVLANILRTDLHLHKPLPRESLADASLKQLTRAHKSLVQQKVKLVNQLTVQLKSYYPVVLQIFSRPDQEITLAFLEQFPTPEKAKAVSLEELQNFFRRHHYTRPSKLLFIYESLQKPALRAPQELEEAHQIVTLSLLPVLRSLLTQIEKLENEIALAFKENPAHKIFSSLPAGGITTARLNGEVGSNRSRYPTAGYLQTDAGAAPVTRRSGKTIVVYFRWQCNKHLRDALQSLARESVSKCPWAREYFVRQMKLGHKASRAYRALANRWAAIVWKMLQEGQTFSQARLDKRLANVLTAT

SEQ ID NO: 129826 - protein, 409 aa, unidentified
MERVIERGAGLDVHKKTVTACVRVPGPAGGRRQEVQTFGTTAAALLALRDWLHAHGVTHVAMESTGVYWKPVYYVLEELFTCLLVNAAHVSKVPGRKTDVRDCEWLAQLLAHGLLRGSFVPPVAIRELRDLTRYRAVLVQDRSREANRLHKVLTDAGIQLASVATNVLGKSGRAMLAALVEGTTDPGVLADLAQGKLRRKLPALREALVGRFRKHHSLLVSHLLAHLDYLDEALEDLTAQIEEALRPFAAEAARLDTIPGIGPRTAEVVIAELGVDMRQFPTARHLASWAGLCPGTHESAGKRRAVRTTKGHRWLRATLIQAALAAVNVRDSALAGRYRRLVPRCGPKKAIVAIAHKLLTTAYLLLADERTYHDLGAGYYDARRKDRDVRRALHALERHGYRVSLEPAA

SEQ ID NO: 129827 - protein, 345 aa, unidentified
MKLHTIGIDLGKTVFHLVGLNLRGEVVVRKKFSRKQLLHYTANLHVELIGMEACGGAHFLGRALREQGHEVRLMPAQYVKPYVKTNKSDFIDAEAIAEAVARPTMRFVPIKTDDQLDMQSLHRVRERWVMRRTAIVNQIRGLLLERGITLRKGRRYVDAALPGILEDATATLSYALRTLLAQLKLELDQMAARIDEADVVLNKTARESAACQRLLAIPGIGPVTSTALIAAIGNGAAFHKGREFAAWMGIVPREHSTGGKQKLLGISKRGNTYLRTLFIHGARAVLQQRAKQTSGLRAWLAQLSARTHPNVAVVALANKLARIAWAVLANNEVYRPLALIGPATA

SEQ ID NO: 129828 - protein, 318 aa, unidentified
MGIDVCAQRLDWHRLPDFSSGTFANTPAGIRALVAEVQNLGVDIVVIEATGGLQRQAAVALAGVGIAVAVANPRQVRDFARAAGQLAKPVLSVAEGTDQIDAKVLALFGLRLQPQPRTLPDATALALADKLARRGQLVEMRAAEKNRHHRASTAMKKSIDRHLAFLDQAIKVLDKDLDNTLRGSPAWADKVALIEAVTGVGPQTVRRLLIELPELGKLDRHGIAKLVGVAPLNRDSGTRRGKRMIWGGRVNVGNTLYMAALSASRFNAPLKAFFERLRAAGKPHKVALVAVARKLLTILNAMLRDRSAWNPKRLEKRA

SEQ ID NO: 129829 - protein, 337 aa, unidentified
MDTSKHFFQLHGVNAAEKVVLRKKLRRKEMVTFFKALAPTVIGIEACGAAHYLARLLRSFGHEVKLIAPQLVKPYVKRGKNDGADAEALCEAMSRPSMRFVPVKTAEQQAALMMVGLRDRLIRNCTQLSNAIRGYAAEFGFSAAKGKAHLVPLLERIQADESVPVLARELFAAQAEEYARLQAQIDAVDAKLLAWHKADESSRRLVKIPGVGPIGAVLLMLKTPAPELFRSGRQFAAWIGLTPKDHSTAGKVRLGGITRAGDEALRSVLVVGATSVIQHVRRGGRGSPWIVNLLKRKPPKVAAVALANKMARVAWKLMVTGERYAAKSAPAALANAT

SEQ ID NO: 129830 - protein, 392 aa, unidentified
MVCVGIDVAKDKHDCFIISSEGEVLADVFTVANNRDGFETLLWKIHTCTNPADEIKVGLEATGHYSYNILGFLLEKGLHTFLLNPLHTNLYRKSLSLRKTKTDRIDARTIASMLMSDVELKSYTNTAYHNEELKSLTRYRFDRIQMRAELKRSVSRLITILFPELESLVPTLHMASVYAVLSEFPGASQIASSNLTRLKTVLLSASRNHYDREKAVEIREAARRSIGSVIPAKSLELQHTLRLIRELDKEINEIEAEIKAIIDDMAPPILTIPGIGYRMGAMILAEIGDFSRFDSPDKLLAYAGFSPSTYQSGKLNATGTHAHMEKRGSRYLRYALFNAAQCVCKWEPSFKAYLNKKRAEGKHYFVAVSHAVRKLVRLVFALQTSGRVFQPV

SEQ ID NO: 129831 - protein, 437 aa, unidentified
MIYAGVDIAKTDHVIGAVDERGAEMRPPMPFKNTEAGLERAVAWLEGLAGSPSDVVVGMEATGHYWMARCSFLVARGYSVAVINPMQVKAARKLKGLDKVKNDRVDAGLIAEALRIGQCDETRLATGEVASPRSLSRCLQSPRGMVAELKTQCICLMDAHFPEYAGIFSDMFGAGSRAVLSKPPLPFELARRRADSLARDIAEASRRGGKSSGYAAKIKAAAKSSIGVRLGQEAASFQVKSLIRQIEFADSECAGVEARLRSLLDEVEPLVLTIPGVSCVTGAQMVSEIGDVSRFRNAPALVSYAGLNSSVSQSGQFDSGGGPITKHGSPYLRRALWLAANRARRHDPGLRAFYDGKRAEGKPHRVAVTAVARKLCHIVFAVMRDRVPYDPGREWGDPSKGHRRRPRRLLRHARKAFDIRFSSCNVRTIDCSRKPTV

SEQ ID NO: 129832 - protein, 350 aa, unidentified
MLIIGCDYHPAFQQIAFVDTDTGDYGEQRLAHSEGAEKSYRDLAGQGKKVRVGMEASGHARWFERLMAELNFELWIGDATEIARKRERKQKTDRQDAQHILQLLMENRFPKIWVPSGENRDLRQLLWHRHRMVQARTRIMNQLQAVAINEGLRSKKRLWRESGREQLEAFRLAPWASRRREDLLKLLDGLNPTIAELTQAIQQEVEKCPAAQRLRTHPGVGPLTALAFVLIIGKADRFQCGKQIASYLGLVPLEDSSGNRRRLGHITKQGNSLLRFLLVEAAQVTVRSLPEWRSHYVHLTMRRGRKIAKVAMARKLAVRLYWMMRKEWDFGTLTKFGSHAGKPGPGDGVK

SEQ ID NO: 129833 - protein, 336 aa, unidentified
MNGSIGCWVGVDVAKSKLDVALLDEHGKLKSRVFANEAKGHAALMAWLGQRGCSRQHIRVCMEATGCYSEALAISLVDAGWCVSVVNPARIKGFGQGELLRNKTDRADAALLARFGQAMRPEPWVAPSLEVRQLRALVDRLHNLKEMHQQEANRLEAAMNQTGMRESIESHMQWLQAGIKQLERQIDDHIDGHPQLRADAKLISSIPGVGNTTAAKVMAYLGDVRRFKNAKALAAFIGVTPRLRLSGSSVRGRSMISRSGHAAMRHALYMPALVALKHNPIIKTFAERLKTGGMAPKAVVTACMHKLAHLIYGILKSGTAFDANFMVARLDSQDGI

SEQ ID NO: 129834 - protein, 351 aa, unidentified
MTKVVPRPEPGQSVFVGLDLSRSTWSFNLRWGGRERRRWSTSGDVRHVEALATEYAACALHVAYEACGFGYEIAWLLRARGVAVTVVAPSTIERAPGLRVKTDRVDARLLAEHLEQGRLKGIAIPTRADHEARQLSRAYAQAAQDRKRAQSRLRALLQEHGRLGPLPRCGWTAYTQWLATQELAAPVRLCVDELMAARHESEQRARRLRLALLRVARDTAYAPLIAAVTQQPGIGRFTAIRLRLELGELPRFRTAGSFTHYLGLTPSEYSSGDNIQRGHLTQCGPAAVRAWLVQCAWASIREPQGDAARRATFLRLCPRAGKKRAIIAVTRRLALRLRARWLACVNAPAAA

SEQ ID NO: 129835 - protein, 343 aa, unidentified
MQVIIGVDPHKASHTAVAIDTTEHQLDHKKVRAARTQVDHLLAWAQPYPARVWAIEGANGMGYLLAQQLVAAGEHVVNVPATLASRTRLLGTGRTNKNDPNDALSVAISALRSTTLHAVEPVGHSEVLRLLAKRNRDIGAHRTRQVCRMHALLVELDPGGISKEINASDVDRFLAGLCPATPAEQVRYDLAVELLADIRRLDEQLKASHKRIRTAVAASGTTLTDVFGIGPIVAAMLIGFSGDMSRFANRDRYAAYNGTAPVEFSSGGRTVHRLSTRGNRNVNNALHIAAICQLRQPHSEGRAYFDRRVTEGKTKKEALRALKRQISNTVYRHLVADAARARG

SEQ ID NO: 129836 - protein, 433 aa, unidentified
MQDAEDEPLFAERVAGLDIAKAEVEVTIRVPSDTTPGHRQQETRTFGATRKELLSLADWLRCWGVTKAGMEATGDYWKPVFFVLESRGFDCELYNAAQVKALPGRPKTDRADSIWIARITERGMISSSFVPPEPIRRLRTHTRYRRHLTQARTAEKQRVEKLLEDGHLKLSSVISDIHGVSGRDMLNALAAGERDPRALAQLARGTMRGKIRRLEEALECSFFTGEHAAVLAMMLVTIDHYTAQIDQLTAKIENLAGPYLHQVAQLDAVPGIGVVCAQDIIAEIGADMSVFPTAAHLVSWARWSPQVKQSAGKRKGSNATGRGNPYLGAALGEAAISTGRTQTFLGARYRRLSKRMPKKKALVATGNSMLTSVHALLSDPSACYQDLGADYYEQRMHTRRQARNHVKSLERLGYKVTIQALNPDTGHPLTATS

SEQ ID NO: 129837 - protein, 338 aa, unidentified
MKLYAGIDLHSTNNYVVLLNELGETKYKKRLPNDMGTILHELKCHDHIESVVVESTYNWYWLVDGLQEGGYAVRLANTTAIQQYSGLKHTNDQTDARWLAELNRLNILPEGYIYPKDERGTRDLLRKRMQLVQQQTANILSMQTIIERSTSKRISGNMIHKITEEELRGYLSSDDVFLAASSNLVILNSLQKQINVLEKAISSKIKSNLYFKQLQSVPGIGITLASTILLETGEISRFKNVGNYASYCRCVGSEKISNEKKKGINNRKNGNKYLAWAYLEAANFAIRYNDTIKKYYQRKTSKKNRTVAIKTVAHKLARACFYIIRDGVKFDVNLAFIK

SEQ ID NO: 129838 - protein, 679 aa, unidentified
MAKNRRYRQVDVKSVDVEKIAELGSKLLVGIDVAKTNQVATFEDPETHRRLTVKWAHPAQTRDFFALLEGLRARKRTVEIVMEPSGTYGDPFLHWFHTHDFPVRRVLGIQVHAGAAMLDGVRSGHDAKSAGLMVAIDQLEGSRDWLARAESTRDLRSLVTLYRWHDDQRRKLFGMAEAHLARWWPELSTLLSARSKIYWRLLAEYSGPEGVAADLSGAAHFMRRVGRAFLMDEKITAVCASAASTLGVPMNALERRELAFIGSEFLRCADECSTLGADIEGRVRILAAPELVRLLGAATTGTLIAHNLDPLRFDNPRAFVKALGLNLKVRSSGKHQGKLRLTKRGAPRARWMLVLAAARLIPREPVVKAWHQAKRARDGAQGGARNGMISVVAIARKLAAAAWHVARGAEFDAERLFDASRLGRYLHAPVMSRTNGAIAGAPASDELGADEALADEALADELLADEVLADAVLAALEDGGEEAMSESLSEALEDGGEEAIAETLSEALEGGEEAIDEAMASVDVTVHDAIAPPPSPAPASSGVQRAPEPRRRARRGDPRPVLQAAICAAGAEVVLAEEAALAAEDHPAVPPQTPTTERHPPSAHRPVPRRGTAAPASRGCPHQARAVLDGAGAQAGGAGTADPPAKPKDALADPPPPAPMHLLSLAGRLTRGISRLMPR

SEQ ID NO: 129839 - protein, 432 aa, unidentified
MSQFLNDFVVGIDVSSEFSLVAMLAPNGELIRKPFRIDHNPAGFHKLLDILKKEEERLKRKPIYFVESTGIFHLPLFFFLRSNDLKGFVLNPLCVHSTKNFDLRKVKNDKKDAEAIARLAKYQDVKVSMVPEPQILALRMMTREYYALSDMLTEMKNRLCTDLYLLFPGFLNAFSGTLGKTALAVLKSYPSPRAIQKADLETLTLLISKTSRKSSAWASNKVKQLQECAQLASSMPQEFSLLDAKIKVHIDGIENMQTSLNGIEAQIHTMIESDQFPASARRNIELLDEIPGIGFLTAATLIAEIGDFTLFKSPKAFTAFFGIDPSVNQSGKFNGDRNKISKRGTRFGRRVLFTAAMASIRTTRKGEEINPVMRDFYTSKCVNKKKKVALVAVMHKLLHYIFAVLRDQKSFEIRKPEDHQSWRTTKLQPVAA

SEQ ID NO: 129840 - protein, 338 aa, unidentified
MALYGGIDLHSRMSWLVILDGALKLVRQVKLTNDLREFLRVLEPYRAELAGLAVESTPNWYWLVDGLHDAGYRMHLANTYAAQQYSGLKYTDDRHDARWLAHMLALGILPEGYIYPAHERPLRDLLRRRGFLVQKRTSMVLSLQGAFGCHTGHRVSSDTVKKWTAAQIEEQLDNPLVARGLTCLLEPINVMSSQIRTLEKEVLAQAKLRDEFALLKTVWGIGPILALTVMLEVGDIKRFETVGNFASYCRLVKTDRFSAGKRKGAGNAKNGNPYLSWAFSEAAHFAIRYHDAARRFYQRKRSQTNGIVAVRALAHKLARASFHVMRNQVEFNPQRLFA

SEQ ID NO: 129841 - protein, 372 aa, unidentified
MGRTSHQLSIGVDLHKTQFTVCGLKADGEILHEGIYPCTHEGYDAFASWIHEAQEKHGLSAVLAVEATGNARYFKNFMENEGFRGKIINTLKFKVVVESVNKTDKRDARVIATFLAKDFIPESHLCSQYEEDLRRLLKTRSQLVKTIVGLKNNIHGMMLSYGIVTKPSQFQSKKGRQQLRNELEAHTEFNVAAAGVLDCILKVLEDTSASLKEVEQELERYVEKDDAVAILRTIPGVGLVTSSTIRAWTADIDRFDRYKEYASYCGLVPYLKESNDVTYLGHITKRGPKELRTAMVQVVMGMLRMREKNPNWIFYQRYGYWKSTKGSGKAIVACARKMSRVIYCMLKNKEGFNPENMNPERNYSSERLSKVS

SEQ ID NO: 129842 - protein, 368 aa, unidentified
MTERTTTSPTAVTSTTIGIDIGDRTSHICVLDGAGNVIETGTVATTPGAFAKRFERVDATRIAIEVGGQSAWIDETLSALGHDVIVANARRLRMIYENESKSDEVDAEQLARVARVDVMLLHPIQHRQRSTRTDLAKARSRDMLIATRTSLINHVRGMLKSFGTKLGSRGAAYFHGWVRDQIPDEFHCALDPIVDTLEEIAVQIAALDKELERLANEVYPETMLLRQVNRVGVHTALRFVLTVEDPDRIKCSRNTGAYFGLRPRRHQSGARDPEMRITKAGDRDVRRLLVQCAQQMLGPFGTDSDLRRWGLDLAGRGGKSAKKKAVIAVARKLAVLLHVLWKTGQVYEPLKNANAKDTAQAAKTQVPA

SEQ ID NO: 129843 - protein, 356 aa, unidentified
MRKTDPAEIIIGIDTHKEAHAAVAINGLGARLGAMNLLASSRGYHEMESWAQSLGPVRAFGIEGTGSYGAGLARFLHERGHNVIEVNRPNRQIRHQHGKNDPLDAENAARAVLSGQARAAPKSGTSSVEMIRHLKVARDTAVKSRTQAMVTLKTIIVNAPAALRESLDGLTGKMTLIRHLAALRPGAMTSPTASAKATLRALTRRWLMLDAEIKSHDADLDALTTACAPTLKEAHGMSTGTAAEMLILVGDNPERIRSEAAFAKLCGACPIPASSGKTSRHRLNRGGHRQANAALYRVVIVRMRSHPPTLDYVRRRTTEGKGKMEIIRCLKRFVAREIFGYICRASRDPTTVPSTS

SEQ ID NO: 129844 - protein, 315 aa, unidentified
MSESQGPYVGIDVSKASLEVAVRPAGDSWSAANTPQGIARLIQRLAQVCPGLVVVESTGGLERPLLAELCFAHLPVALVNPGRVRDFAKSTGTLAKTDKLDAGVLAHFAEAVKPAVVVLPSEQEQLLSALMTRRRQLVEMLTAEKNHLLSTPGAIRNWVERNIASLEQQLAELNREIDDFIKHDPAFRDKEQILRSAPGVGPITAAILLSDLPELGKLDRKKIAALVGVAPFNRDSGPRSGKRQVKGGRAAVRTVLYMATVCAVRFNPVLKAFYSRLLQNGKLKKVALVACMRKLLTFLNAMVRDSRAWTSGSVT

SEQ ID NO: 129845 - protein, 405 aa, unidentified
MFCGIDWAADTHAVCVLDQTGRKTTAFQVAHTADGFTQLVTRLGRLGDPATLPVAIERPDGRLVDRLLEAGHPVVPVQPNAIKAWRDAEILSGAKNDPGDAELIAEYLRLRRHRLRELTPFSAHTRALRAVVRTRDDLVDQRVAATNQLAACLDAFWPGAKGVFADLESPIALDFLTRYPTPEAAASLGEQRMAAFCTKHGYSGRRPASELLARLRAAPAGLTGTVEVEARRDAVLALVKVLRALISAIRDLDRSVVAHLGEHPDAEIFTSLPRSGRVNAAQVLAEWGDCRQAYDAPDAVACLAGATPVTRQSGKHTAVTFRWACNKRFRTAVTTFADNSRHASPWAAKVYADAIARGCDHPHAIRVLARAWIRVIWRCWMDGVPYDPAKHGAARKLTEMAASTT

SEQ ID NO: 129846 - protein, 341 aa, unidentified
MHYVGLDVHKKVIAYCVKTAEGTVVEEGSLAATRSELSAWAGRQGTHWIGAMEATLFTGWIYDFLKPHAQELKVAHPAMLKAISASKKKNDRVDARKIADLLRCDLLPECHMATAEIRTLRRCLRFRSLMVREAVRMKNKTSGLLMECGVEYVKSKLHYQGYFKELMGSLKDVPPEIVPLLQHSRAAADMFQSVQKMLIKALREDKRLKERVDRLMTIPCVGEVTALTWALEVGDPRRFGSVGRAISYCGLCSAQVSSAGKEQRSPISKQRNKHLQRTLIEAAKLAPRFNKELAAVHDRELARGNRNRATLAVARKLAAYLLAVDKGGKNFERRGATAETP

SEQ ID NO: 129847 - protein, 455 aa, unidentified
MAKQKTRKTPAIETVNIGAAAVDIGSREHMAAVNPDVTDASVRAFGTFTHDLHDLADWFKTHGVTSIAMESTGVYWIPAYEILEQHGFEVILVNARYAKNVPGRKTDVSDASWLRQLHSYGLLRGSFRPSAEIATLRAYLRQRERLVEYAAAHIQHMQKALMEMNLQLHHVVSDITGVTGMRIIRAIVEGERDLDVLASYRDVRCRASTETIKAALNGNDRPEHVFALTQSLELYDFYQAKMLVCDRHLERVLETLANEQDNDPSQMPKIRSKTKKAGAPSFDVRAALFGVLGVDLTQIHGMGPSLSLKLVGECGTDLRAWPSAKHFTSWLCLAPGNKISGGKVLSSRTRRSSSRAAALLRLAAVTIGRSDTALGAFYRRLAARAGKAKAVTATARKIAVLFYNTLRHGMTYKDPGASHYEERYRNRVLGNLKRRAKSFGYDLHELPAEADMAVS

SEQ ID NO: 129848 - protein, 324 aa, unidentified
MYLGLDVSKNTLDCCLNKDGFFYACKISNNEKGFQKLKAWLDGHGCDETLHCCCEATGNYYEAAAEYLAAHYKMSVENPRKIKAYAVSELKRSKNDKQDAKTIAEFCEEKSRKLKTWKPKNQTEKELQSITRYIARLKQQKASEIVKRQTASDNIKDLIDETIDYLGRKIKEAEGRLKTYISQNSELKQKADNLTTIPGIGIQTVAIIMAALSGNNDFKTAKQFTAYLGLDPAEYKSGTSVKGKDRISKVGDCITRAALFSPALVAYRIGTFPRLVANMRQNGKHIMQILTAIMRKLAVVAYTLHKTDTTFEKQRHTKIQQKAA

SEQ ID NO: 129849 - protein, 311 aa, unidentified
MTHPCVPIEPVLGLDVARNSVTLHDLISRQTLTADNNRTALMAALAPFRERQLAVCEATGGHEAVLLDVLVALGIPAHRADGGKINAFARSLHLAKSDRLDARTLALYGRERGAMLERWSPPIPSQQELASLVRRRANLVAARKAERTRAKAPGAAAMAASLARMLAFLDAEIGEIETAISNLIATTPELARRNAVLTDLPGIGSTVAASLLALLPEMGRLSRRQAAALAGVAPHPDQTGTTRNRGRTRGGRRTLRPILFIAALTAVRANNHLQHFYKRLVDAGKSKRLALVAVMRKLVVIANARIAELDR

SEQ ID NO: 129850 - protein, 407 aa, unidentified
MEVLYPRCAGLDVHAGSVTACVRLTSGSDVTYQHRIVSATTQGLLELADWLADSGCTHVAMEATGVYWKPVWHVLEERFTLVLANAMHIRNVPGRKSDMNDATWIADLLAHGLIRGSFVPPAPIQDLRDLTRTRKQLVGEIARHTLRIQKTLEDANVKLTQVVSDILGTSGRAILKALIAGETDPARLADLTTGRLKASRAQLMAALHGRVTAHHRFMIELHLTQIEALDSAVRKLEGHLGEALAPFRAAAGRLTTMPGLSDTAARVLIAEIGVDMTRFPSAGHLVSWAGLCPRLDESAGKRRSTRIRHATPWLKTTLIQGAWAATRKKGSYLQAQFLRVKNRRGPKKAIVAVAASMLTAAYFILRDGVEYHDLGGRYFGDRDKAHLTKGLLRRLRDLGVVVEVKAA

SEQ ID NO: 129851 - protein, 316 aa, unidentified
MEQSPIAPSFVGIDVSKDRLDVHLRPSGRAFAVTRDGKGLEQLVDDLRTLAPALIVLEATGGFEIVVAAALAGAALPLAVVNPRQIRDFARATGRLAKTDALDAQVIALFAERIHPEPRPIANADSQTLAELIARRRQVVEMIGMETNRLHQARNPRVQRMLRATLKTLKAQLAELDRDIDDTIKRSPVWQAADDLLTSVPGVGDVTSHTLIADLPELGQLDRRRIAALVGVAPINRDSGQMRGRRTIAGGRIDVRNVLFMATLTAIRWNPVISRHYQALVDRGRPKKVALVACMRRLLGILNAMIRSSTPWQCAA

SEQ ID NO: 129852 - protein, 346 aa, unidentified
MTIVENTRPITGGVDTHADVHVAAAVDANGGVLGVCSFVTTPAGYRQLHDWLAGFGPVDRVGVEGTGAYGAGLARYLRGRGLVVIEVDRPNRQERRRNGKSDELDAIEAARAALSGRASGIAKSADGDVEAIRALLVARRSGRNVRIKYLNQIRHLGFTAPDELRERLRDVHRDRLARTAAALRPTAGSDSVMYATKLAIATLGRRVLALEADGDRLDRELETLVRRTAPSLLEVYGVGINTAAILLVAAGDNPHRLKSEAAFAHLCGVAPLLASSGKIDRHRLNPGGNRQANHALWRIVITRMSGDERTRKYVARHVAEGKTIREVMRVLKRYVARELYPHLVRD

SEQ ID NO: 129853 - protein, 413 aa, unidentified
MDWVACVGIDWGDKQHACTIQTRQGSKQPMTLGSSPEEVHRWVRELRERFPDGTIVVGVEQGQWSLIYELMAYDFLALVPINPRASKAYRTSLRLSGASDDPADAALICDFVLKHLGELRVWRPDDVRTRKMRLLCEQRRSLVDQRTALTHALAATLKEYFPQVLQWFGETSTYLRAFLTHWPTLDQARQANVDDVTKMLKARGRRKASAAAEELIEKIRLAVPLTQDAAILEARSLYALSLVALIDPLDQQIADHDQAIAAVWAHHPDRKTFGSLPGAGAVLGPRLAVAFGLDRSRYDDARQVQQYSGIAPVIERSGRQFWVHSRWGFPTFLHQTFHEFAAASLPHSQWARAFYHQQRERGAGHHQAIRALAFRWIRILFRLWKTGEEYDENRYLEALKKKGSPVVSRLAAA

SEQ ID NO: 129854 - protein, 411 aa, unidentified
MDVVHERCAGIDISKADAKVCVRVQGRGRRRTEQSVRTWGATTGQILALRDELLELRVGLVVMEATGDYWKPFYYLLEDAGFEVVLANPRRVRAIPGRKSDVSDAAWLADLGAHGLVAGSLVPPPPIRELRDLTRTRTAIIRERSREYQRLEKVLEDAGLKLSTQTSSLTLVSVRRMLEALVAGERDPRVLAEMAQGQLRNKIPALAEALVGRFTEHHAFLVRLHLDLIDRHAEAIEELTGRIDAQMEPFRGFHTLICTIPGVSTLVADVVVAETGGDMSRFPTAQHLASWAGTSPGSNESAGKVKSSATRPGSPHLKGALGVAARAAARSKGTFLSARYKRIAARRGPMRALVATERSILVTIWTMAHTGELYADLGADYYRRRNPERSKQRALAQLRALGYQVTLSAVS

SEQ ID NO: 129855 - protein, 333 aa, unidentified
MYAAIDIHKHAFQVAVLDPESGELVEERFAADRESLARWAEQWRGRVEAVAIEATTGWRWVWRELVERGFEVRLAEPVQTRALLGRRRSAKTDRLDARWLARLLAKEMLPQSWIPPEQIQELRDRTRLRKALAEDRRRWGQRLHAYLLHEGWPCSRSNLLRPPGLRWAAALQLSEHARLQVDSLLAVMAALEAQLETVDAELRRFARNDQRCQALQSIYGIGPILACHLLAEIGEARRFRRAEQITRLAGLDPVVEESGESRRRGHLAKAGSRHLRWALVEAAVHAHRPTAPDLELYRATRARRDPSVARLTVARKIGKRAFHVLRELELASA

SEQ ID NO: 129856 - protein, 346 aa, unidentified
MMIIGCDFHPSWQQIAWLDSETGETGEQKLVHAGGEARQFYQQLAAPVLIGMEATGSSQWFIELVEDWGHEIWIRDAAQIRASYVRKQKTDKRDAAHILKLLLERRFPRLWTADREQRDLRQLVLHRHKLVLIRSRVKNELQHLSLNKGMQRKRTLWSQAGQQLLRELPLKRWAACRREDLLGLLTTLDEQIGKLDGAVEHAAEENPQSKLLMTQPGVGPITALAFVLTIGDVGRFRRGKQVASYLGLIPREESSGGRQKLGAITKQGNRMLRSLLVEAAQNAVRYDPGFRREYLHRCHQKPKAVAKVAAARKLAVRLYWMLRTQKPYPEVVRIESSSGLALVGRS

SEQ ID NO: 129857 - protein, 372 aa, unidentified
MTQSNILFIGMDVHKESIVISLADDDRNEVRRYGSIGGTLDDFKKMLRKLMSTGKNLFFCYEAGPCGYDLYRYITSQGHQCIVVAPSLIPKKPGDKVKTDKRDADNLTRLLRSGDLTPVYVPDAEDEAIRDLSRAREDAVLVLKSAKQRLKSFLLRHNIRFNGTANWSEKHLRWLAEDVNMPYPAQKIVFQEYVNSVTEGNERVKRLEKEILYHTKQWRLYPVVECLMALRGVRMVVAVTIMAELGDLTRFNNPKQLMSFLGLTPSEHSSGDKKKKGAITKTGNQHARRVLVEAGWAYRFPAKVSKEMQKRQEHIPLPIRDIAWKAQLRLTRRFRTMADNGKIRNVIVVAMAREIAAFMWAIAQEVPILTRD

SEQ ID NO: 129858 - protein, 412 aa, unidentified
MNIRVEKACGIDIHQAFLVATMLDLAGTKDTRRFSTCIEDLLNLREWLLDSKCQRVAIESTGVYWIPTYTLLEGKVETIVANPLQIKNIPGRKNDDIDSEWIAEVCLNGQIKPSYIPPKEIREIRELTRSHVKLTQAKTSFKNRVHKVLSRAGIHVSGVLSDIFGKSGIIILNGILNGKTIDQTLAEIKDKRIKIKKMEIKDSLKGELSQNDIFVIKECIDSIKFLDQKIKEFDSKINQNLNGLQKEMEIVMSIPGVGFTTAAAVMAEIGNIEEFSKPKQLVGWSGLAPAINESAGKSSNGHITKRGNKFLRTILVLAANSIAIGRPNKLRFFYERIKAKKGHKKAIVALARKLVSIIHHLLMFKEMYSEEEMKQKNFKVPKFIPVPDFSIDDMIGILCEAGYSVNKTAVKT

SEQ ID NO: 129859 - protein, 394 aa, unidentified
MILVGIDIGKNKHTFSIIDKNSGEILLSPSDFSNNLKGFLFLIQKLSSYTKSELLIGMEDTGHYHFALLKYLLDRRYTVALINPTTTDLARKLQGGITKNDPLDSLTICDVISSNHRNKPYRVTTLNRFDLYEQKQLTRHHHNLKEELNTYKNRLQKCIDIVFPEFNSLFHSKYGIVYMNILKTFSSAKAIANADIRSIRKCFEFKGQGKRISLSAEQLKLTAKSSIGIPSVAEEIQIRHLVSQIELLEKQLSEIDKRIEEFSLKNNSPILTIPGISHFSGTSIISELGDICNYTKASQIIKFAGVAPYHYESSQFTAQHTAITKKGSKYLRKTLYQIILPVISNNEVFYAYYTKKLNEGKGHRCAQGHCIRKLLRVIYHLLSTRQPFNPKLLV

SEQ ID NO: 129860 - protein, 317 aa, unidentified
MSKHSMICAGIDTGKRKLDVAIKGQADELQVDNSPDGHRALSGWLRQRRVKRVGIEASGGYEQAVVAHLRRDKFVVVVFQPAQVRAYAQFHLQRAKNDKIDAALIADCTAAVQQIHAPPDPRLAPFAKHQTLIEQITEDISRFKNRHESCREQRIGRLWSEEIARLKGILRSERKQLVAAIRQYPDLAERLALIASVDGVGLATAVTILVRMPEIGRVTREQAAALVGLAPYDDDSGDHVGARCIDGGRERLRKSLYNATLAACFRWNAQLIAMYERLIAAGKPHKVARIACARKLLIYVNTVVERGTPWVQNPTTA

SEQ ID NO: 129861 - protein, 370 aa, unidentified
MTQSSTLYIGMDVHKDTIAVAYVAKAHDAEVVFLGTMGTRHCDLDQLIRKMQSKANQLIFVYEAGPCGSWLYRYLMKKGYDCWVVAPSLIPKKPGDRVKTDRRDAMQLARLARAGDLTVVYVPKVADEAIRDLTRAREDTLRDLTSAKFRLKAFLLRHDIRYTGRATWGPAHLRWLAEVVCPTPAQQIVFQEYVRAINEHTERLQRLDQELHDQVTSWRLQPVVEALQALRGVQFIAAVTMVAEIGDLTRFETPRELMKFLGLIPSEYSTGERRRQGSITKAGNTHARRALVEGAWAYRYPAKVSRHLQLRLETQPKVIQDISWKAQVRRCKRYRQLIARGKHANVVTVAIARELAGFMWAIATQVPVTP

SEQ ID NO: 129862 - protein, 352 aa, unidentified
MLPGKEESVSETTIIAVDLAKSVFEVAVSARPGQVRLRRRLSREALLEFFAQQPAAIVLLEACGTAHFWAREIGQLGHQVRLLPAQHVRRYRIGNKTDRADAKALLEAFRNGEIRPVPVKTLAQQELTALHRARSAWHATRTARINTLRGLLREQGIALPTGASGFVSSALELAGDAESSLAPCLRWIAFEVVHEIREAERRIREVELRLDALAKESALVERLRSIPGIGLLTSTAIAGFVGDLGRFPSGRHFASYLGLTPRERSTGGIRRLGAITKRGDVYLRMLLIHGARAVLAAAHQQREPDAVRAWALATSARLGHNKAAVALANRLARYAWAVATRDAHFEVRPMAA

SEQ ID NO: 129863 - protein, 367 aa, unidentified
MTTIGNEKYCNESSGTVAEVVLGVDTHLDVHLAVALDHLGRRLSTFSVPTTQQGYESLLTWAAGFGPVRCAGVEGTSSYGAGLARHLRAMGIAVVEVERPKRRHLRRKGKSDPIDAEAAARAVLSGEAAGVPKSADGRVEMIRTLRSARCSAVKARSQAANQLQGFVVTAPEEIRHRLRELTTKKLVRVAARMRPGKDPDDVEAATKFALRSVARRYQALSREIADLDAQLDRLVAEAAPELISLPAIGTDHAATLLLTVGDNPERLKSEASFASLCGVSPVEASSGKVVRHRLNRGGNRDANRALHLICVVRMRIDERTRRYVARRTAEGKSRREIMRCLKRYIAREVYRVVLSAASPPPIGVSTT

SEQ ID NO: 129864 - protein, 349 aa, unidentified
MVIVGIDAHKRTHTAVAIDEAGRKLGEKTTHATTTEANLELVRWAGGFDPERRFAVEDCRHLSRRLEADLLAGGEELVRVPPKMMAHARDSARTYGKSDPIDALAVARAALREPKLPIARLDGPSRDLRLLVDHREDLVRDRTAQINRLRWHLHELDPSWDPAPRALVRFKHLDGLAARLVGLEGTVAFVARDLVARIRELTVAANDLQRLIVEKVARLAPALLEIAGVGALTAAKIVAEVADVRRFRSKDAFARHNGTAPLPVWSSNRVRHRLSRTGNRQLNAAIHRIAITQMRIHDDAKVYLERRIGMGNTKMEALRALKRQLSDVVYRALMTDAVSTQAACFGEAA

SEQ ID NO: 129865 - protein, 339 aa, unidentified
MQLYAGLDLHSRNTYIGILDHEFKRIFKKRVPNDLNLILNTFKPFGDQLKGIVVESTYNWYWLIDGLMDNGYQCVHLANPAAIKQYEGLKHADDQHDAFFLAQLLILGILPQGYIYPKTDRPVRDLARKRMFLVQHRTAHILSLQSLIARCCAVKVRANDMRHLTVQDLQDLLKEEHLVLSAQANLDTIGFLAQQIKRIEKTIHKKIKLDKAFQNLLTVPGIGNILAMTIMLEVGDISRFAKVGNFASYCRCVSTQRLSNGKSKGHGNRKNGNRYLSWAFIEAAHLTRRHCQYFRRYYNRKLAQANTSLATKALSNKLARICYYIIRDNVAFREELLSQ

SEQ ID NO: 129866 - protein, 394 aa, unidentified
MMICVGIDVAKDKHDCFILSSEGEVLADVFTIANNAEGFETLLQTIRRCARPEDKIKVGLEATGHYSYNILGFLLDKGLPTYVINPLHTNLYRKSLSLRKTKTDRVDARTIAAMLMSDVDLKSYTDTAYHNEELKSLTRYRFDKVRERAKLKQSVSRLVTILFPELEKLVSSLHMASVYAVLGEFPGAKQIAGAHLTHLKTLLNDASKGHYGRDMATELRNAARCSVGSVMPAKSLELQHTIRLIRELDTEINDIETAIQAIMEEMQSPITTIPGIGIRMGAMILAEIGDFSRFDSPDKILAYAGMSPSTYQSGQLSLSGAYSHMEKRGSRYLRYALYNATKYVCLWDPTFEAYLAKKRAEGKHYNVALSHAAKKLVRLIYAMEKSRRPYNRAA

SEQ ID NO: 129867 - protein, 453 aa, unidentified
MSQHRGKGRGLSLECIEPNAAGIDVGATEIYVAVPPDRDVEPVRCFKTFTGELQAMAAWLVRCRISTVAMESTGVYWIPPYEILEEAGIRVCLVNSHYVRNVPGRKSDVNDCQWLQYLHSVGLLKPSFRPHASICALRPLSRHRASLVESAAVHIQHMHKALTQMNLQIHHVLSDITGVSGMAIIEAIVAGQRDPLLLANLCNSKVRADQQTVVASLTGHYRVEHLFTLKQSLTAYRNYQQLLAECDGEIQRLISAMPSNSDGSNPPSSSSRQKRRKNQFHFDMRSELHRIFGVDLTSVPGISALTAHVLLAEIGPDLSRFPSAAAFANWLALCPGNKKSGGKVLSSKTRPTNSRASHALRLAAQTLARCHSHLGSFYRSMRARLGGPQAITAAAHKLARIVYHLLTTRAHYDETVFAVEQQKQKLRLHKRLSKQAQLLGFQLIPITSEEHCS

SEQ ID NO: 129868 - protein, 330 aa, unidentified
MNSICLSTDQLTTALPVLGLDVAKKSVQAELRTNGKRVRFGFENNAKGFAQLARMLKEQGAPKVWAGLEATGPYSHALALWLHGQSHRVSLLNPRRVKQYARSAGNRNKTDLLDAAIIADFVCAHLPAAWQPPTLEVAQLQALVRRREELSLMLQAEKNRLEGVASHVRCSLERIIDTLSAEKTRLEKLITQQIRSHQQLSRDHQLLCTIKGIGSLTAAILLAEVARPGQVERARQAAAHAGLAPRREQSGTSVRRNRGLGKEGNRYLRKALYMPALVAIKYNAPLRHFASRLRTAGKPKMSIVCAVMRKLIHIAFGVLKHQKPFNPSLA

SEQ ID NO: 129869 - protein, 311 aa, unidentified
MKKVYIGIDVSKSTLEVDLLDGSTRTFANDKAGHRLLARALSALGGKGAVAVYEPSGGYERAMALSLSCSGVALCMASSSRVRQFARSQGIAAKTDALDAQVITRFAQASRLEPKALSGSALSAVRELLRRRESLVEMVKAETCRGSQQAQRVCLSQGKRMVALLKRQIAELEKEIRRIVAEDADLANKVGRLESVKGIGWLTAATALAELPDLGTMGPRQAAAMAGLAPFARDSGKSFGKRHVSGGNFHLRKALYMPAQCAKTHNAHLRAFYLRLRENGKPFKVAITAVMRKMIVLMNRLLADPNFQPSL

SEQ ID NO: 129870 - protein, 411 aa, unidentified
MHNRQNYLYVGVDLHKEQHTAVIINCWQEKLGEIQFDNKPSAFSKFLLEVETYVSDGLSVVFGLEDVGGYGRALAKYLVDHEQVVKEVNPALSFLERKSQVMIQKNDSWDAECVARILVNKFNQLPDVKPNDLFWSIQQLVSRRNALVKAQSALKNQLHIQLNHHYPSYKKFFSELDGKTALAFWEKYPSPSCLEGANIKQLTAFLLDVSNNTCSVKKASNILKLVKEDGHTMKEYQETRDFLVRSIVRDIEFKKKEMKYIERELKRLVNLIDYQLETMPGIELVTASALIAEIGDVRRFPNANQLARFAGIAPVYFGSGGKGKTHKSKQGNRALHALFYNLAVQQVQVAKRSKLPRNPVFHAYYQKKLKEGKTKGQALVCIMRRLVNIVYGMMKCKTAYELPVVEEKEVV

SEQ ID NO: 129871 - protein, 408 aa, unidentified
MKRYYLGVDWAEQFHQVWVSDCEGKKVVEMKVVQQPEAMSEFGAWLHQRKAEGVELWAAIEKPHGRMVDFLLDHAVVVYPVNPKAVDRARDRFRMSQSKSDSFDAHVVAEFLRTDHGHLRALEPDSVQAQELKMLTRDHERLVRQKTRLLNQIKITLKEYYPRPVEVFGDLESKIARDFLKAYSTPQALAELNRRGWKRFAKRHPQLSEARLQELWDKLSQAQLPIPEYVIRAKAKLLLALLLQLEALLPEVESHSKEIERFFASMPAAELVKTLPGAKSGTTIAKLWAELGDAKTRWQSFGHLQAEAGTVPVTQSSGKSRVVMFRFACGKPLRHAIYWFSFNSLRRCEWANNYYREQRKKGHSHPRALRALGAKWLKIIFVMWKDHKPYDENYHLANIARQRMRQAV

SEQ ID NO: 129872 - protein, 416 aa, unidentified
MNAVGIDISSRKSTVAVLRPLGEVVRLPFDVTHDTEGLASLAEQLKALDGETRIVMEHTGRYYETVAKALHEAGLYVSAVNPLLIKEYGANSLRRVKTDKADAVKIARYALDNWADLRDYTPMDTTRYDLKTLNRQFQLASKQRTASANNLIALLEQSFPGIRKCFDSPVRSDGTQKWVDFAHTFWHVDCVRKQSLNAFSERYRKWCRHHGYFFKQSNAEEVYTLAKNAVVLTPKSQVIKVLVQEAANQLTSISRSVETYRTEMERLASMLPEYPVVMKMYGVGKSFGPQLMAEIGDVRRFERKQALVAFAGIDPMPNQSDDKNVRSNKSSKRGSPYLRKTLFNIMGIYLKCAPKDEPVFQFLDRKRSEGKPFYVYMIAASNKFLRRYYAKVRDYLSILENLPPVDMDSTRLKAND

SEQ ID NO: 129873 - protein, 372 aa, unidentified
MNNTTVYVGMDVHKESFTLCAYTLEKEKGSYSRRTPADYKEVLKYLEFLRTVYGNDTIFVCGYEAGCLGYTLYHQLTDHHVDCVILAPTTMLEQRGKKRIKTDKRDAEIIGKCLAQHNYSPVHVPTASDEEVKEFLRMRDDHKLALKKVKQQILAFCLRHNYRFDGNSHWTAAHINWIKSLTPEALYKEILDEYLLTYTILSDKLERLDKRIEELAAKAEYKEAVKKLCCFIGVKTHTALSVIVEVGDFKRFASAEKFASYIGLVPGEDSSGDGQTRLGITKAGNRHVRMLLTEASQCYSRGQIGYKSKALKARQDGNTPQVIAYADKANERLRRRYYKMVLSKCKKHNVAKTAIARELACFMWGMMTDNIA

SEQ ID NO: 129874 - protein, 355 aa, unidentified
MSGLKHQKEKRSMDHFAGLDVSVKETNVCIVDDTGRIVREVKVASEPEALLAVLKNPAYCFKRIGLEAGPLSQWLYSALAEAGLPVICVETRHMRAVLKAQINKTDRNDARGMAQMMRVGLYRPVHVKTLRSQKLRMLLTHRKLLQAKAIALENDLRSTLRNFGLKVGMVGTVKFEGRIKELVENLPDLAILVESLLIVRRVLREQLGILHRRLLDIVRNDDVCRRLMTVPGVGPVVALTYRATVDVPARFKNSKAVGASFGLTPSRHQSGESDRPGAISRCGDEMMRMMLYEAAQVMLTRTNKWSWLKAWAMKIARHRGMKKAIVALARRLAVIMHRMWVDGTEFRWTQDVAAA

SEQ ID NO: 129875 - protein, 327 aa, unidentified
MEQSVIGIDVAKDSLDVFLLSGSQQAYKQFANDLDGYRHLLAWLKHKRADRVHACLEATGQYSDGVAAYLYEQGLAISVINPARIKAYGRSKLQRNKTDKADAELIARFCAEQNPALWTPPPACFKELQALVRRLDDLQINLTQEQNRLHSGTQSETVIAGLKTHIAFLEEQIKQVQRAIQDHINQCPELKQQQELLISIPGVGKLTAAKLLGEVRHITEFEDARQLAAYAGLTPRNFFSGSSVRKKSILTKTGNANLRKILYMPAISAKRWNPIIKAFCQRLLASGHSPMQVIAAAMRKLLHLAYGILKSGRPFDPNYLVKVQAFS

SEQ ID NO: 129876 - protein, 351 aa, unidentified
MPRTTTLHAVTAIGIDMGKNTLHLIGLDARGAIVLREKVARGRIALRLANLPPCLIGIEAGMATHYVARELAALGHDVKQVPATYAKPFRQGHKNDFRDAHAVAEAVQRPTTRFVPAKTNEQLDLQALHRVRSRLVSERTAVINQIRGFLLERGIVVRQGLRFLRQQLPDILAKRTDVLSPRMARIVADLANDWRRLDERIETVTDEIEALAKSDDSCRRVMTVPGIGPIISSAMVAAIGNGAAFARGRDFSAWLGLVPKQMSTGDRTILGRISKRGNGYLRTLFMQAARVILLRSANWPKHSFGLWLVRAAQRLHPNVLAAALANKLARIAWTVLAQERSYEARVTKAAA

SEQ ID NO: 129877 - protein, 337 aa, unidentified
MHYIGLDVHSKHFTAAVVDEQGRLLFRSTHPTSEHNLIEVVTSLQGRKRVAFEETTVAGWVYRTLRSVTEDVIVTDPRLNQWISRDADMDDDKAALRLANLARGNFVQRVHHTDDQTQAVFKELVLGHKKVSKELARAKNQLKAKFRQHGIVCDGDGVYSPAHAEDWLAKLKDEDSRFQARRYMRRIGHLTEEKQAYARRIAKRARAFPQIAAFEALPGIGIIRAATFFAIIDTPHRFANKRKLWTYCGLGLAHFSSDQMRGPVKLNPNGNRMLKELAKNAAQDAVRQGNNPFARHYQRLLANGVKSSCAMLTVARAIVATMWAMWRKDETYIPRAD

SEQ ID NO: 129878 - protein, 346 aa, unidentified
MEVTYYTGIDVSLRSVSICVVDDKGEVCLEAKVAAEIDAIVDRLRQFSSDVKSVGFEAGTLTQYLTYGLQAAGFEVICLEARQVSVTLAAMRNKTDRNDVRGLAQILRTGWYSRVHVKSLHSHQVRALLASRKAILKKCVDLENELRGLLKVFGIRLPSRVGHGSFDAELRDTVSSDEMLACALVPLLDARTVLYKTYLKLDNAVKGLVRADPVCRRLMSIPGVGPVTALTFKAAVDDPSRFKSSRTVAAHFGLTPRRFQSGELDNPGHISRAGDADVRSALYVAAHSLLTRNAQWSTLKAWGVGLAKIRGHRRAVVAVARKLAVILHRMWIDGSEFRWGPVAAFA

SEQ ID NO: 129879 - protein, 386 aa, unidentified
MKTVAGLDVHKDSVYLCILRENGEKIERVYGVLTPQLDSMRDFMAENKVSEVAMESTSVYWIPIWRVLVDSFELKLVNPYFIRQLPGRKSDVKDAQWIAECVMKELIRGSFIPSPLVQRLRLYDRRIFEINAELVRKYSKIDAILQRCNIRLSNYVSNTDCKSYKAVVKQISEGVTSPQELLRHVHKRIINKHGEDTILAALTGVVSDSEIDMLAQYVAESAILEDNKNKCIEKMREICNSEFKEQMKNLQEIPGVSERSALTVLAEIGPDINAFPSAKHLVSWCGFNPRNDESNKKIKSNKITHGNRFIRIASVQCAWAASRTKDCYFSKFYAFHTQVRKKFKLKVVVAVARKVLVCIWHILKFNVPYKDFEPQKSVTKDCTQFA

SEQ ID NO: 129880 - protein, 355 aa, unidentified
METQTNLEKSFFENKELFVGMDVHKAKWVVTVRSYDLELKTFSMQPLAEMLEKFLLSTYPKAKYKIVYECCFSGFWIYDYFFEKKYSIIVTPTNRIYKDGNTIKTDKIDSRKLAFQLSRGLLREVMVPAKKIREYKYIFRIYDKQKMRKGQILRQVKAFLEQKNHPLKWEKWNKGLIEKLKLLTFEDKLFDLKFGNLLKEYEYVVSQIKDSEEIIERIKEDEVLGPRITRIEKINGIGIISSVRMSVYLFDRKDRFESSEKLNHHLGLTPSERSSGDKVNRGRSGMCGNRQLRSIIIQLAWKSVRKDGALLDKFERVYKKSGSKQKAIVAVARKLMSKLYAIIIKEEAYRVNLAA

SEQ ID NO: 129881 - protein, 411 aa, unidentified
MAQERRLVIGGIDTHKDVHVGAVIDDRGKILDTAEFKTTAKGYRLLVEWMVGFGELQRVGVEGTGAYGAGLARYLAEAGVAVVEVNRPNRQMRRRRGKCDTVDAEAAARAALNGEATVTPKAEDGIVESIRILRVAFTSARNSRTRVALQIRDLIITAPDQLREALGSLTTAQRVARCVRFRLGGDTAEPTAATRLALRTLARRYEALSAELAELNATLDELTARANPALRGSKGVGADVAAILLVAAGDNPDRLRGEASFAAMCGVNPIEASSGKTVRHRLNRSGNRQANHALWRIVMNRLNTDPTTKAYAARRTAEGKTKREIVRCLKRYVAREIYRLIVNPGAVPAGADLRVVRVGAGLRLHHAATALGTTVVSISRLELGHTHDTGLAQRYERWLGEITTSADFQAA

SEQ ID NO: 129882 - protein, 357 aa, unidentified
MPSITHEHAMSSEVAGGVDTHRDTHTAAVLDTVGRVLGTAVFTADAAGYGALLDWMRGFGHLIRVGVEGTGAYGAGLTRVLHEHNIPVVEVDRPDRKIRRFQGKSDPIDAIQAARTALSENRTGTPKQRDGRIEALRNLRIARRSAVDQRADAQRRIKTLIVTASEELRRQLRGLPVSKLIATCAGFDPDHTDAASPLTATMIALRCLARRHQQLSAEITELDELLAPLVAAISPDLVAANGVGTDTAGQLLVTAGENHHRIRSEAAFAMLCGVAPIPASSGKTNRHRLNRGGDRHANAALYRVVLCRLRWDPRTRAYVERRTKESMSKKEIIRCLKRYAARELYQLITTDNPKPAP

SEQ ID NO: 129883 - protein, 342 aa, unidentified
MFVGIDVAKAEMVVGVRPTGTGWTAMGVRDFVTRMQALGPTLSVLEATGGDELLCVAALAAAGLPVVVVNPRKVWDFARATGQLAKTDRIDAEILARFADTVRPEIRTLPTVEAQAPDALLTRRRQLLEMLGAERNRLGQVCGSGKKPVKKSLTKHIVFLEKALARADAELDAAIAQSAIWKAQDALLRSVPGVGPILSRTLHADVPKPDRLSRREIAKFAGVAPVSRDGGTMRARRFCARRPRAGARGTLHGGDGGCAAQSGDQGILCAARGRREAEKTRLGGLHAEAADPAQCDGAHHHTVEPRIRDDECRDRLILKALRVFVWVIFADFMSGGAAERYS

SEQ ID NO: 129884 - protein, 298 aa, unidentified
MSQNDFKTSETMQPQEASPVKHQMSVLGIAIAKRLFHIVGMHERGQIVLRKRLARNALMPFIAALPPVLIGLEACGGAHYWARRFREHHHDVKLMAPQFVKPSSKSNKNDMRDAEGIGEAVTRPTRRFVPTKEVAQHDIQALHRVRERLRGARTALVHERHGLLYAYGMVVPTGVSKFRQTVVGKLETDKAKRTPLSQEMFGKLMDEFAAVEKQLAYDQEQLDALATMHPACQRLLTMPGIGPFTATALVAAVSDARAFKNGRQCAAWLGLVPRQHSTGGRNAYSASANAGRSISHTL

SEQ ID NO: 129885 - protein, 350 aa, unidentified
MPCSTIRAVATIGIDMGKNTLHMIGLDSRGAIVLREKVSRGRISSRLANLPPCLIGIEAGMATHYVARELAALGHDVKQVPPTYAKPFRQGHKNDFRDAHAVAEAVQRPTTRFVPAKTDEQLDLQALHRVRSRLVSERTAVINQIRGFLLERGIIVRQGLRFLRQALPDILAKRTDVLSPRMMRIVADLASDWRQLDERIEVVTDEIETLAKSDSSCRRVMTVPGIGPIISSAMIAAIGSGAAFARGRDFSAWIGLVPKQMSTGDRTILGRISKRGNGYLRMLFMQAARVILLRPASWPKHGFGIWLARAAQRLHPNVLASALANKLARIAWTVLAQERSYETRLTKAVA

SEQ ID NO: 129886 - protein, 420 aa, unidentified
MNEFEQWQHHRAFGAVDWASKKHSVIVVNEVGQVIEQFEIEHSALGWKKFREKLQPYGSIPFAIETSQGTAVEQLLEAGMMVYPLNPKSAQAYRERKAPSGAKDDWLDAWSFADALRVDGQGWKALQPEGPLIKELRLLCRDEVTLIEQRTAFIQQLRHALAEYYPAALEAFEDWTSVSAWMFLQRFATPDALAQAGKRQWQKFLHSRRLWGSDEGLRRMEIFAHASEFAGTPPTVKAKSLLALSLVQMLFAIEKQLALYRQQIEALFARHPDHDLFGSLPGAGPKIAPRLLSEIGDDRQRFGGDPQALQCLAGSAPVTKRSGKRRKFWHVHQRRACDKHLRHALHLFADQSLSRCVWAELYYQHHRQKNQSHANALRRLAHRWLKIIYKMWIDRTPYNAELHHRNQLQHGSWIFQLNQS

SEQ ID NO: 129887 - protein, 408 aa, unidentified
MISQPLHLPVRAGGRAIVGIDIGKQHHAAFAINSQGDKIASIASFKNTREGVDILQVRVLDQAGTPPQVLFAMEATGHYWMPLYHELVRRGYQGAVLNPIQTNGEARTRIRKTKTDKRDAEGIARFILTGKAKAARIPDEATLELRILTRRHLQLMQMKGDAERAAQSLSDRIFPEYADCLSKPFLLSGRALIKEIGLVPTRIAEQPDAVRNTLRRASRGRLSAATIDGLLQKASESIGIGYAETVINEELHSSMELIEDIEKQICSLDTLIADLMEERNSPLPSLGIGTSLAAAIHAESDPASDFPSARQYAAYAGLEPTTFKSGNMEGTRAHISKRGSPQLRRALYFAAFNCYKRHEYFARIYSRFRKKGYTHNSALIVVARHLALVIWRLLVENRPFTKKPPKKK

SEQ ID NO: 129888 - protein, 471 aa, unidentified
MVKRNQSSIGIDLSDKTANFCAFDAEHGIVAEGRIALTVPKLAELWRLHGPVDIVVIEAGTPANWVRELFEGLGARVITADPRKLQAVTANVRKCDERDARMLARLGLADEELLSPTYARAPEHRRAMALLKICDHQVRVRTSVILEVRSQVKLVGGRMPPCDAAHFHEHQESLPDDVRDILDALFDTLRAIDLTIETLDEKIKTEGLKFPIVQRLAKIDGIGPITALAFVALIGDPARFSRTRDVGAYLGLVPRRDQSGGSDPARRITKAGSGFLRRLLGQCAHNVCRAKGKDTKMRRWALGHLERLGKTGKRKVIIAVARRLAVLMLSLWKSGQDWIPLHRVPADNADDAPNPVVLDECALTLAHQGVFKNAPSAATRTHACTGDPVPTKSANGSKGRSGASSTSADAPTRASRTQRVADASSATRPATPSAPATPACAGDPASPAAAARARPRNARGRDAATGVSALT

SEQ ID NO: 129889 - protein, 333 aa, unidentified
MNKITLIGIDTAKQTFHLVGVDAHGHYVWRKQVSRRRLLSSLAQIEPCEVVLEACGASHHWARSIQALGHTVRLIAPQHVKPYRRGQKNDYRDAEAIISAALSPGMRFVGVKRVDQQAEQALHRVRSRLMSHRNAAANELRGLLGEYGVVFRCGLKPLRDGARCFAETEEARTLGLVELVNDVLEEIGVLQARMDHYKHLIDQRVEADETSRRLREELNGVGKLSASALRVKVADVRDFGNGRHFAAYIGLAPGHSGTGGTVHIGHLKRGHDRYLRQLLIHGARSALCHLGDKQDAQSRWLRGLLERRGFNIASVALAHKNARQAWAIMAREQ

SEQ ID NO: 129890 - protein, 402 aa, unidentified
MNAVGIDVSKGKSMVAIMRPFGEIVSTPFEIKHTSSDINSLVKLIKSIEGESRIVMEHTGRYYEVLAHQLSEANLFVSAINPKLIKDFDNDSLRKVKTDKADSVKIARYALDKWQNLKQYSVMDELRNQLKTMNRQFGFYMKHKTAMKNNLIGILDQTYPGVNTYFDSPVRSDGSQKWVDFASTYWHVDCVRKMSINAFIDHYENWCKRKKYNFSKSKAEEIYGKAKELVPVLPKDDITKLIIKQAVDQLNSASITVESLRTLMNETASKLPEYPVVMAMKGVGTSLGPQLMAEIGDVSRFTHKGAITAFAGVDPGVNESGSYEQKSVPTSKRGSSDLRKTLFQVMDVLIKTHPQDDPVYQFLDKKRAQKKPYYVYMTAGANKFLRIYYGRVKEYLASLPES

SEQ ID NO: 129891 - protein, 356 aa, unidentified
MKNSSTARALDSGLTVGIDLADRYSQICILDAEGEIAEEGRVRTTEAALSSRFDALGRCRVVIEVSGHSPWVSRLLERLGHECIVANPRRVRLIADSLKKNDRVDAETLARLGRADPVLLSRVEHRSEQAQADLALIHSRRSLVAARTSMINRARCLAKAFGTRLPGCDARSFPLKVAAHVPRKLGPAITPLLKMITSLNIEIAVMDRALEELIAQRYPQARVMQQVPGVGPLISLTFALTIDNPWRFRASRQVGAYLGLVSRQRSTGESSPELGITKAGNVYLRQLLVNGAHYVLGQHGADSDLRRWGLRKAEGGKNAKKRAIVAVARKLAVLLHHLWLTGEVYSPVRGEEVMVA

SEQ ID NO: 129892 - protein, 422 aa, unidentified
MLKEQPIEQQDKPTGNLNQEKEKYLPVGIDPGKDICGVVMLHPDSGNDTVLSSFFMDNCSFEDAEALIKRAEEVSRPFGLKPIFVIEATNILWRPLFSYLKSKGCLVHTVCATQTKSSRGTKMRKTKTDLIDAKHIARIYKQGESHPTKFPEGIHMDLRELVRLHSFLADMKGRILNRVYGYLFQVFPEFVSFFDSDSFLGTMWTLLKEGLVHPDCLKKVRIDKLTSILRKASMGRFKREKAIMLKEKARNSFGISEGREGFSSCLKLLANTYEFVEKSIACLEEDEIKPIVDQIPNNLNTIKGLGIAQAYFLAESRKPEEYENVDDVLAWFGLDPRMDESAGKKKKNRHISKCGTKYGREGMFLGAGKAILFIPELKAKYKRLRKNKRTHIEAQTIIAADLVKVCYAMQRDNVPFNPSLIH

SEQ ID NO: 129893 - protein, 373 aa, unidentified
MPRYSTAFGMDVHLRSTTVCALDAETGEAVTRRFRGNPWGEVAEWMSGFPGPSLAAYESGYLGFAPQRELSRLGVDCVVAAVSKVPRSAADFSSKNDRNDAARMAKAILSHDISPVWVPSPEIEGLRDLAGAHDAATARLAAAKQRLLAFLARRGYAYGGTTPAGNPRRYWTYDFLRWLDKVRPADDGGIRALAALRNEVEAAAETRDDLLAEYRAAVAAGPLSAEVEALQSIKGCGFALAAAFASEVGDFSRFRSGRQVTSYFGLAPKQRSSADSVRLGGISGAGDALVRRLAVEGSWSYVQASHQPKLMPKGSGVPLEVRMHGRKGSERLLRRREEMLARGMPQAKANAATAAELVRWLWALGAMCREATE

SEQ ID NO: 129894 - protein, 391 aa, unidentified
MFYLGVDIGKLHHAAGLIDPQGKTIAVLSSFAATAHGFSQLAAFLQRHAPDTADLHIGMEATGPYWISLAQWLTARGFQPVVFNPLKVSSLRNYGVRGSKTDRIDAVLIAQALRWEASRPCSVSGSTNAAELRCLTRLRFHLAKERARVTLRVGSFLSMVFPEFSSLFPKLASPSALAILQAAPSPAQVIALGEERLGEILRSASRGKLGIPRAQQLVALAKTSVGTTSSALTQALELLLAQIQLLCEQIHTLDEQIARLYENANVPLESLPGNGPVLAATCYSEIGSLDRFANASQIVAFAGIDPKLRQSGTFVGQVRMSKRGSPYLRRAIYLACQTAVRIDPYFQAIYQRQLQRGKPKRKALGAVMNRFIHVLYAVWRDNRAYSPLTPA

SEQ ID NO: 129895 - protein, 343 aa, unidentified
MAYFAGLDVSVKETSVCIVDDAGRIVREARVASEPEALLQVLTNTIYRFKRIGLEAGPLSQWLYSVLAEAGLPVICVETRHMRAMLKAQINKTDRNDARGIAQMMRVGLYRPVHVKTLRSQKLRVLLTHRKLLQSKAIAIENDLRATLRNFGLKVGMIGAVKYETRIRELVENLPDLAVLVEPLLTVRRVLREQLGILHRRVLAVVRDDDVCRRLMTIPGVGPVVALTFRATVDVPARFRNSKAVGAVFGLTPAKYQSGENDRTGAISRCGDDMMRMMLYEAAQSMLVRSTKWSWLKAWAMKVARHRGMKKAIVALARRLAVIMHRVWVDGTEFRWTREVAAA

SEQ ID NO: 129896 - protein, 340 aa, unidentified
MDNNQMEACGIEVSAKELVVALSGKKAEAVLRRFANTAVGHRQLLHTVTRGGRRVRVCMEATGVYGLDVALLLSAHAGIELMVANPRAVRHFAQATMRRSKNDQLDAVMLREFAMRMEFMAWTRPDENTLALWSIARRLEALTKQCAAEKNRQHAAAVSQAIPACVRASVARTLRWLQREIQKLREMARQYIAGDARLQRHYQLLRTMPGIGEISAIQILAELALLPTDRDVRQWVAYAGLDPREYSSGSSVNKRTRISKVGNRHLRCALFMPALVASRCEPHLRGFYEHLVAAGKKKKQALTAVARKMLHAIFGMFRSDRPYDGNRVYPLPLSESPLQA

SEQ ID NO: 129897 - protein, 379 aa, unidentified
MQTTIKQCVGIDISKGSFTACVCRKLLSGEALLSSVESFENNKTGFNQFVKWSRKITNPSLEVLFLMEATGIYYEGIAYHLDKLRQSICVILPNKVKHYAKSLNVKTKTDIVDARIIAQMGAERDLPHWHPPLAILKQLRDLTRLYTDLKKERTVYLNRLESEKAAADALPFVIKSNRLILKELEKQIRQCEKEIEKTLMSEEWLAEKVNKIITINGVGLITLAIVIAETQGFTLVSSRKQLASYAGYDVVQVESGTSVKGKTHISKKGNSRIRAALYFPALAASRYNQELKEDYQRINIAKPSKMVGATALQRKLLLLIYTLWKNDDVFRTSGDQEIKLLLRRDEVPKKVGNPKELPTQDELPYDQSTEVLLRQLQSS

SEQ ID NO: 129898 - protein, 326 aa, unidentified
MTSLPSPTRDARITVGVDVSKATLEVAISEGARSLVLPNDEAGCAALLSELRELDVALVLFEATGGFELACATALQLAGLAVAVINPRQARDFARAMGYLAKTDRIDAAVLADMARTLLARSDLSKLVKPLPDAQQLELQGLVTRRRQLIAMKLAEDHRMKMPGVRQRRSLNTIIKALDREIARVDKDLQAFVGANHAELAALLDSVKGVGKATISTLLAEVPELGKLSGREVSALVGVAPINRDSGTMRGKRSIFGGRPDVRRVLFMAALVASRHNPVIKAFYQRLLAAGKPKKVALVACMRKLLTILNAMVRSRKPWDQALHLG

SEQ ID NO: 129899 - protein, 328 aa, unidentified
MGKTSFYVGIDVGKDELWVAVEGSKPRMFTHSVSGIRLLYQWVRRLSDGLEVHICMEATGVYSLSVAYQLDNYSDILISIINPVQIANYGKAQLRRSKTDRIDAQIILSFAQSQHPPLWSPDSEALRKLYHLVTQADLIREDLSRWNNRGHAQKYTPDVPNEVKKAQRAIRRSLKNQLAKIEQAIVQLCKNNKELREQVDLLCTIVGIAQLTAVRVLAYGRKALTERSRSQLTAHAGLAPRHHQSGTSIHGKSYIAKQGDKRLRKALFMPTLTAITHNSIIKQFYQRLLENGKSKMAAVVASMKKLLHIIRAMLIKKKAFNPQILTLT

SEQ ID NO: 129900 - protein, 383 aa, unidentified
MKQSFSEPLNRTIFMMGWTPRTASMCQSGVFEQHLREASVSGVITVGLDIAKHVFHAHGVDDRGRPIFSKRISRGKLLDFFAAQPSCMVALEACGGAHHWARQLIQLGHQVRLIPPAYVKPFVKRQKNDAIDAEAICEAALRPNMRFVAVKSEQQQAAGLVFRTRDLLVRQRTQLINAIRGHLTEYGWIAPKGPSHVAMLADLIEREAIASSLPEAARAMFRCMLDQLAGLNGKIADLDKEIARRAREDEVSRRLMTIPGIGPISATAIAALAPPAETFAKGRDFAAWLGLTPLQRSTGGKQKLGATSKMGERTLRRLLIIGSSAVVQQASRRGAPKGSWLEQMLARKPRMLVTVALANKMARIVWALLVKRENYKAPVAAKA

SEQ ID NO: 129901 - protein, 395 aa, unidentified
MFIVGIDVAKRSHEVCMITSDGRTVQRPFSIRNNCTGYNLMLEKIRKHTNIKSQIVFAMESTAHYWLALFTRLRKDGYHVILLNPIQTSAMRDMFIRKIKTDAKDSFIIAELIRFGRYAESNVAQDRLLALKELCRNRFYLVDMAGDLKRKLIALIDRVFPEYEAQFDTIFCKSSVAVLKKYPTPQKLSNAHLDKLTELLWNSSNGHFGEWKARELRELARNSFGVEDCDGAYSTLILLMLDQIQSLSGKADALEKEISRLFQSFDTTVTTIPGVGPIIGAVILSEVGDISRFSSADKLAAYIGVDPSVNQSGEFQAAHAHMSKRGSPYLRRCIWMASQVAVQRDPMFRAYYEKKAAEGLKYMTIIGHVTRKMTAVIFAILRDHKVYEPVLPTAA

SEQ ID NO: 129902 - protein, 400 aa, unidentified
MTSTDSIDVYLGLDVGKGEHHATALTPAGKKVFDKALPNNEPRLRELFTKLQAKHGTVLVVVDQPATIGALPLAVARDTGCRTAYLPGLTMRRIADLYPGEAKTDARDAHVIADAARAMPHTLRDLVPADETVAELEMIAGFDDDLAGESTRIKNRLRGLLTQIHPSLERVLGPRLDHPAVLSLLERHGSPAQLRKAGRRRLTALLRSKAPRMAERLVEDIFAALDEQTVVVPGTEAAALIVPSLATSLTAVLDQRRLLAARIEELLEAHPLSPVLTSMPGIGVRTAARILVDVGDARAFPSAAHLAAYAGLAPVTRASGSSVRGEHPSRRGNKQLKRAFYLAAFASLSQPESRAYYDRKRREGKHHVAALVALARRRIDVLFAMLRDGTLYQPPATATA

SEQ ID NO: 129903 - protein, 340 aa, unidentified
MHATIIGLDLAKNVFQLHAEDRSGKVLWKRRLRREELEAFLRKQPPALIGMEACGSAHHWARVFTAMGHEVRLMHAKYVKAYVKRGKSDVRDAEAICEAVQRSSMRFVPIKSVEQQIDRSLERARDLLVKQRTQLMNATRALLAELGIVARAGLRGFTTLADKITAGDAVIPRPSLTALKPLVEQWRALHASIDELEARLVARAGSDERMRRLMQIPGVGPLTAHAVVTAIGDPKRFSTGRDFAAWAGLTPLTDSSAEKTRIGHISRQGDHSLRRLMVLGAVNMARHARAKPCEANAWLNGVIARRPVKVAMVAQAAKTARIAWALLCSGENYRGRTAAA

SEQ ID NO: 129904 - protein, 359 aa, unidentified
MAETANGEAPLLWIGVDVSKKTFTASAWLPWEEKAAYPKDSGGFENNRSGARKLCAWLGELEKIHGGPFGLAMEATGAYSLRLYDNLKKCRPGLHVAICNPLSVSYYMLSLGTNKTDKADAAVIARFAAHRRPARYVELSKDQAELRRLARDRAFLVDSRTEYRNRLESERNSSSRSRMNKVIETINEQIGDIDAEIEKYLSEEASSECQDELKLMQTVPGVGRLSAAIIYGELGTLAGYTRKQLSAMSGVCPTTRQSGTSLHKGGLSRRGSKWLRRILYLDSQQTILRSPAMAAFHEKMLKKPDSSKMSARVACMRKLLLILRGIVVSGKEFDKDHVSVKPDFLEKKQNNPEKSGMTA

SEQ ID NO: 129905 - protein, 385 aa, unidentified
MEAVGGKAAERSEAGFPPTAGDRSMVSGSFEAVTKRDRRQSRGTSPNSRQSRRLPSSSHLQDGDHSMDGSITLFAGIDVSKRSLDLCLLPEERRQSFAYDEQGLAELSKALPAPGTCRIVVEATGGYQRILVAELVNAGHQVAVVNPRQVRDFARGLGILAKTDRIDAYVLARYAQQAELRTVAHVSEKAAELEQLVIRRRQLIQLRTAETNRKHTIASKAVRQSIQQMIVVLRKQIDRVEQEILALVESDDDWKNKMDRLGSVPGVGPVTAASLLAELPELGQVNRQEIAALVGVAPFNRDSGRFRGKRSIWGGRASVRSVLYMAALTARTHNPILRAFAQRLEAAGKPFKVVITACMRKLLTILNTILKDGTSWRLEKSLVNP

SEQ ID NO: 129906 - protein, 427 aa, unidentified
MNYTQNRKIMQVTETTLVVGVDIGSQWHYARAFDWRGIELTRKVFRFSNDLDGYIAFEEWVQNVSEKSAKMDILIGCEPTGHYWFTFAKYVKERGMKLAFVNPYHVKQSKEMDDNSPRKTDQKDPKTIAKLVTEGRYSFPYIPEGIYAELREAISVRDQIVKALNATSNRIQRWLKIYFPEYLEVYKVFDSVSGLAVLKKAPLPKDVIELGVDGIVNLWREKKLRAVGKKRALTLVVAAKRSIGLTGGNCARLDLQLLLEDYSEKKEQLDRITAALQEETLKVPNVEKLLAVKGVGIITVAGFLAEVGDIGRFTSPKQIQKLAGLEPKENSSGKHKGRSSISKRGRRKLRRLLFQVVLPLIRSNEDFREVYTYYTTRKDNPLKGMQAMIAVSCKVIRIFYALLTHGMDYSSTRFRADITRPEPAKAA

SEQ ID NO: 129907 - protein, 380 aa, unidentified
MQSIKTWVGVDVSAKTLAAERWRKNEEKARREFANDAAGHRELFKWTGKGARVCMEATGVYHLQLALMLVAAGVEVMVINPRVAKDFGRALMNRSKTDRVDASTLLEYVRRMEFVAWKAPRAAVLELRELGRRLSELVHTGAEEKNRFHAKNVAAISRTVISDVEAHVAQIEKRVKQIEKAAAVIIRGDAGLSEQFAILTKIPGVARRSAILLLTELAVLDPTMTVKQIVGHAGLDPREYESGSSVQKPPRISKLGNARLRAILYMPALTAIRHDRGARLFYAQLMARGKKKMQAIVAVMRKLLHGIWIVLQRRMTFDSSVLFAASLAKAESSDSAVAANQPEPSQDHPKGRSEAEELRQQLDPGSAQATRSRKKRSKAA

SEQ ID NO: 129908 - protein, 467 aa, unidentified
MSHRRLVGIDLGIATAHTVRVLDGEGIVVAKRRAWPTADSLAAVEAAALAGCPEDTRLEVVIEPTGPAWLPIAVFFCARGHQVFRVSSQKAADLRRFLSRHAKSNGIDADTLARLPLFDPAGLRPLQLPGAERAALDRRVRAADRLTQAGADHKRRIKDLVRQLLPASPLTGELGMADLAVLERYADPHALIRLGMTRLTALITKASHHQQGAERALQWQQAAQASLALYDSHPAIDFAGLAAEVATEVRLLRATCAELAAHAAEREARYQAVDPAGLARSLPGIAEVGGPALAACMGDPARFATGKKFRSFTGLTPKASETGQTDRKGQPMSKAGSSLLRTTLVRAADTARKQDPQLARIYYLQMTERGKDHLGALCVVAAALAERAWTVMRRGTPYVICDTGGQPVTPQQASTIIARDWTVPPEVRARRRSKKTGKAPRKSSKDSANGAASPAAPLHLVTGGPSS

SEQ ID NO: 129909 - protein, 326 aa, unidentified
MGIDVSKASLEIALIGSEEDVSASQTVPNTKDGFDQLLSWIKTQADVQLEESPEQIHVCLEASGGYQRPVARFLHERGLTVSIVNPLRTSAYAESQLSRSKTDKVDARLLARFCQREEPNPWEPSSSEQKSLKEMTRGLEQLKKERDRLKNQIRQSENPTVTGSLESVLESINEQIDHLEDQVDKHVESTDTLARNRDLLETIPGVGSTTAALVLAELGDPERFESARQAAAYAGLTPSHHTSGSSVHRKPRLSKVGSSRLRRALYFPAIAALRFNAAVEALGDRLAERGKEKMVIIGAAMRKLLHICYGVLKNQTPFDASLHPGT

SEQ ID NO: 129910 - protein, 341 aa, unidentified
MDHYAGIDVSLECSSVCVVEASGKIVREARVATAPEALIAWFGSLGFAVMRIGLEAGPLSQWLFAAMREGGLAVELLETRHVRDAFRAMPVKTDRNDARGIAQLMRLGWFRPVHCKSLAAQETRALLTARKLLQSKLHDVEMSLRGILRGFGLKVGKTTPKEFEGRIRELVAGHPNLEVIAAALLAVRAVLRREFNAFEKRVRTTARGDARARLLMSTPGVGPIVALTFASAIDDPARFKSSKRVGCHFGMTPRRYKSGETDISGRISKSGDGGVRWVLYEAAHVILTKPVKGGGVKSWAMRLAKRAGMRKAKVALARKLAVIMHRMLADGKPFDFAAAAA

SEQ ID NO: 129911 - protein, 328 aa, unidentified
MKNYIIGVDISKNTLDFHCHGHFLTPDPVANDAKGFREFEKWIKMKVSKAKEEVLIVMEYTGIYTYNIECFLSDRGWSYVKRPALDIKRSVGIQRGKSDSADARMISKYGWMHREILKPMKPLCDNHLQLQQLMAYRDKLVADKASHQARLTELRGQMGKKLSDTILQSAELIIDILTEEIKQMEKAIKACLAQEESLQHNFNLLTSISGIGFATAVTVLIATENFTRFDNHRKFACYCGIAPFTHTSGSSIRGKTRVSQLANKKIKSLLTMCALTAIQNDAEMKAKYEQKCKEGKAKWSVINIIRAKLVERIFTVIHRQTPYIKMAA

SEQ ID NO: 129912 - protein, 421 aa, unidentified
MQVLYQRCAAIDIGKDVIAVAVRLPGGGPDGRQTIKETFKTFYGVLRHAARWLTEQGVTHVALEATGVYSMPVYHALLEHGDFEQVLVCNAGHVKNVPGRKTDMSDADWLVHLLECGLLRASFIPPAEIKAARDVIRYRRKLMESRTSELQRLGNVLQDAGIKLDSVASSVSTKSARSMIEALIDGERRPTVLAELAQGRMRAKIPELGRALEGRFDDHHALMCRLHLHHLDQLDEMITRLDEQIEQLMQPFHPQRELLMTIPGIGPLCATAIIAEIGVELGTYFPTADQLAAWSGLCPANHESAGKRRRAPRRKGNPHLQSALAEAAWAAVRADGYLRSYYRRSVMKFGGFRSNAAKNKAIVAVAHKLLIIAWHVLTTSTPYQDLGADYYTRHLDPEIETRRLVAKLQAHGYTVTLEPAA

SEQ ID NO: 129913 - protein, 481 aa, unidentified
MKAKTPEKIQKATDPSTRGHWNEMNRKQRREMMRKIQSEDLSLEVVHPQAAGIDIGNESHYVAVPPTRDSQPVRHFGCTTVELKAMAEWLKQCGIRTVAMQSTGVYWIAVYDILEAAGLDVYIVNARDTKNLPGRKSDVQESQWLMKLHTYGLLRNSFRPSQEIRTMRTYWRQRNDLIRTAVSHIQRIQKALTQMNIQLANVLSDVSGVTGQAILKAILAGERDPHKLAALRDPRVKASEEQIARYLEGNWQEDLLFVLKQEQEGYEFCQQQMAECDRQLEQYLQQREDRSQGASLPKEVRKGRLVRRKGNKPAFALRAELFRITGTDLTQVDGIDVVTATTILSEAGWDMSPWKDEDHFVSWLRLCPDNRISGNKVLGKGRLPTNNRASIALKMAASTLRVSNTYLGAQFRRFRTKLGAPVAIKAMAAKLARLVYRMLRYGMKYVDQGAKFYEAQHRQRQITQLKWKAAKLGFHVVEAAA

SEQ ID NO: 129914 - protein, 435 aa, unidentified
MEEVEDEPLFCDRVAGIDIGKATVMVTIRVPSEARAKGRQQETREFGTTRRELLALADWLRGWQVERAGMEATSDYWKPVLFTLEQEGFDCLLYQASQVKALPGRPKTDKLDSVWLARITGQGSLAGSFVPPEEIRRLRTHTRYRRKLVQMRTAQKERCEKLLEDAHLKLSSVISDIHGVSGRDMLRAIAAGERNPKVLAQMARGVMRSKIARLEQALDCSFFTGEHAFILTMMLDSIDSLTAQAGVLDARIADMCQPYQRQLEQLDEIPGFGTTTAQDLIAEIGTDMNVFPTAGHLASYARQAPRVKESAGKRKGKNATGRGNPYIGGALGEASISAGRTQTFIGEKYRRLTRRMPKRKAQVAIMRSQLVIAHALLSDPDARYQDLGPDYYERKADIRRRARNHARALERLGYKVTLEAIDPGTGELHLVATAG

SEQ ID NO: 129915 - protein, 406 aa, unidentified
MDGPIITVDVSKGNCHYQPWLTSGHSLRKPKVLKDTKEGFEALSKTIEMVKKNSGADSVPVVFEATGIYHRCLQKYLDDIGNPYIIVPPLVSAAYRKTNIHGNKTDNADCGHIAKVYYQEEHLKFHYDEPEIYTRMREENRMYEREVGFLRKRKCAFRAALDVIYPCLDKCFKGHASLYDPVPMEVLKKYPHPALLLKHKEETIVNAIKKPAHHTSKFIESIVHKIYECAKECYSGVAPDSIQVEEFPDMIDELQKQEERCNKYLDKLISDASTLPSFEILYSIPGIGRNIAARIIAELGDISRFKNERAIVAYAGLNPKINQSGSKDGTHLAISKKGNRHLRCLLYLAASCNYRLKKGDAIYLFNKKKRQQAESALKPKAATIAAADKLLVVIYSLIKNGTQFRF

SEQ ID NO: 129916 - protein, 416 aa, unidentified
MTFKVVRFICGGMDVHKNLIVATIGTTDRQTLITEYIQQSFSTFYSDLIRLKEWFISHDCYDVCMESTGKYWIPIYNVLETELNICLTHPKYVKAIKGKKTDKRDSKWICDLYKCDLVKHSFIPKKEIREMREIARYRCKLVYMRSSERNRYQNCLTVSNISLASAVSDPFGKTATNIMKELMQSEVIEDDKILKLIHKNCKDKDKILDSLHGYHIESDQRFKMDTVMNHIEYLDKQIQACEAELIKRAYPLRDYFQHITHIKGISALSAILIVSEIGTDMNQFESDKQLVNWAGLSPANNESANKKKSVRISKAGQYLKPLLVQCALSSIKDKNSYFGIKYCRIKKRRGHKKAIIAIARMMLVCIYHMILTGEEFNPCDYESLTNPKPKKEPIMTVESALQFLKDSNFDFSSIQL

SEQ ID NO: 129917 - protein, 374 aa, unidentified
MSSMPQPTPPEQDATATATDEVILGVDTHKDVHVAAVITALGRLVASRSFPTTAAGYRRLLEWAGSFGTLRRAGVECTGSYGAALARHLQAAGIEVVEVNQPDKAVRRRRGKSDPIDAQAAAQAVLSGRATATAKTGDGPVEMLRMFKLAKGSAIKSRTQAINQLKAVLVAADPALREALSGLSTPILIRRCTQLPLQAGLPTDPASAAAYTLRLLAGRIVALTAEIHDLEQVITRAINQQAPKLLARRGVGPDCAAALLIAAGDNPDRLGSEASYAALCGASPVEASSGKTQRLRLNRGGDRQANAALYRIALSRLRWDQRTRDYLARRISQGKTRREAIRCLKRYIARELYQIITKPNPDPTPGPAAPSTAA

SEQ ID NO: 129918 - protein, 354 aa, unidentified
MKKLSRMSSTLTIGLDLADMWSDWAAIDAEGGVVARERVRTSEPQLRKVFGHVAASVIALEVGTHSAWVSRLLESCGHTVIVANARRVALIHRNKRKNNRIDAELLARLARADRKLLFPITHRSKRSQTDLALLRTRDVLVRTRTLLINHVRGASKSFGVALPKCSSESFATRARASVPKVAAALAMVLDQISTLTEQVRELDRSIDAMLKRHPAARRLTQITGVGALTALAYVLTIEDPARIVRSRSAGAFFGLVPGSADSGEKHEPMKITKEGDGFCRRLLVNAAHYIVGHFGPDSDLRRHGEAIAARGGKNARKRAVVAVARKLAVLMHHLWSTGADYIALYHSADQPAAA

SEQ ID NO: 129919 - protein, 299 aa, unidentified
MEKYIGLDVHAASTTFAVIGESGKRLGSYVVETNGQALVEQIKTIPGNKHVCLEEGTQSAWIYEILSPHATEVVVTMVPESRGQRDDQRDAFALAERLRTGAIERKVFKEAGEYKALRELGRTHAMVVQDVVRVQIRRQAEKDLVAEAHRHPLSRVLETCPGLGPIRVAQLISIVVSPGRFRTKRQFWSYCGLGLVMRSSSDWVRKPDGGWARADVQKTCGLNLNHNHTLKWIFKGAATAVISQHEGDPLHQDYQRLISAGTKPNLAKLTIARKLAAIALSMWKSKEKYDPTKHRKQGP

SEQ ID NO: 129920 - protein, 352 aa, unidentified
MQQFWAGLDIGEGKTAICVTSDAGEVLLEQMARSDIPGVAEVLEPFTQIGGVRVSIEAGMGNQLARKLRKLGYPVVVFDTITSNKFLTIRRNKTDANDARGLADLGRMRRTAAVSVHVKSVEIQRLRSHLVFRDQLLRQRTALDSAVRALLRENGGDTKAAPPNKGWRVRLEQELIRLRHDEEVDLTAQVGPMVEVREALDRYVKSADKQVLQTAESNPVTKRFLQIPGVGPISALSFYSAIENPIRFATSADVGAYLGLVPRVKQSGTICQRSRITKAGNKLTRGHLVMAAGVLISRTKTECAIKDWGRQLAARAGHGKAKVAVARKLATLMLSLWKSGRDFQPFPIPSRT

SEQ ID NO: 129921 - protein, 323 aa, unidentified
MKEDCLLEVSLIFVGIDVSKAQLDVSIRPTAQTLSVTNDKAGIKVLIKHFKKLQPHLVVLESTGGLERQVITALVGAEIPVFMANPRQVRDFAKSTGQLAKTDRIDAAVLAHYAEAIRPKPRPLPDELTLELRALTARRRQVIDMIVAEKNRLATASKAIQKRITAHIAYLEQDLDDADHDLDRFIEKNPLWKENQEILCSTPSIGPVSSRTLIAELPELGTLGRKQISALVGLAPFPRDSGTLKGRRTIWGGRASVRSALFMATLAATRFNPVIGAFYKRLKAKGKLPKVCLVACMHKLLIILNAMLKNKIRWSENFSHHTT

SEQ ID NO: 129922 - protein, 424 aa, unidentified
MLHPKMRYVYVGIDSHKETHCAVILNCFFEKLGEIGFRNAPSEYEGFFAQIQQYGTDGADLAFGLEDVSAYGRALAVFLSRKGKVVKHVNAALVASERKSLNTLHKTDPFDAECAARVLLSRFDNLPDAEPQDKCWVLKNLVARRKMVVRMNTALKSQLHSFLASHYPSYHKFFVHIDGVTSLVFFDRYPSPSALRDVTEEELAVLLESHSNKRLRLAKARQILEFVANDGDTTSEHQEMRDFAIKSIIRQMRENIREMSLIDGMLETFLGHFDFDLTSMKGVDTVLAAYLMAEIGDISRFPSPAKLARYSGVAPVTYSSGKTDMQYANQRGNRALNSLFYRLAVMVTMTAGPAKKVLNPFFYDYCHRKMSEGKTKHQALICVMRRLVNIIWGMMKHGADYINPPTYDLPNEEAQSLDTATDKS

SEQ ID NO: 129923 - protein, 391 aa, unidentified
MICVGIDVSKDKHDCCIFSSDGQLLLKPFSVPNNRDGFDSLYSAVRSFENDPDKVKVGLEATGHYSFNILGYLLEKGIHCFVFNPLHTNLYRKSLTLRKTKTDKVDSKIIAKMLLSEVDLKPYSKTLYHNEQLKSLSRYRFSKIRERGNLKQQLARLVNILFPELEALAPSLHLSSVYALLEEFPGASYVAKAHITRLSNLLCASSKGHYKKDKAVEIRNAASSSVGSVIPAKSLELKHTIQLIRILSEEIDEIETQIQEIMEKIHSPITSIPGLGFRMAAMILSEIGDFSKFDSPDKILAFAGISPSTYQSGKLDNAYAHMEKRGSRYLRYALYNAAVYVCHWDKTFSAYLQKKRAEGKHYYVALSHAIKKLVRVIYRLQLTGEPYRPAV

SEQ ID NO: 129924 - protein, 346 aa, unidentified
MLHVGMDLCRTRLDICVMDEEGEILEESAWPPDADGLAKMVRHLRKSKQPVAAVIESMNGARFVHDTLELGGWAVEIADAQRVKGIAPLACKTDRIDARVLAELSRRDLVPAIWLPSPGVRAERELARWRLHLVRHRSALKNRVHSILLAFGQPCPVSDLFGLEGRKLLENLGLAEPWRGHVEAALRLIDHLDDQIAELEEELRADGAEHPYVPLLMTVPGIGWVLAYTIAAELGDISRFPSPKKLAGYTGLCPRVYQSGGTDHRGPLRKNGPRYLRWALIEAAGHACRHPAYRDHYQATARRLGRNRGRRVARVELARKLAEAIWHMLTNGEAFNPYREPAKAAA

SEQ ID NO: 129925 - protein, 307 aa, unidentified
MDIIGIDISKAKFDAALLLGERLRHAAFSNTEAGFEQLRAWLAKHRPDPAAPMHACMEATGNWGLELADFLHAQQVRVSIVNPARIKAYGDSELARNKTDKLDAGLIARFCRAHVPPAWVPAAAHLRELRELVRRCDALKSARVQELNRQKSGFASPAVAHSIVAHLEWLNNQIEAVMGEVRHLIAADPDLSRNLALVRSITGFGEVSATILLAELPNIADFTPKALAAFVGLSPGEHSSGTSVRRPGKISRIGTERLRSTLYMCALSAKRNNKPLAAFVARMSAAGKPPKVILIAAPASCWSMRMP

SEQ ID NO: 129926 - protein, 351 aa, unidentified
MEHDITRVVGMDVSDRYCHLCVLGLDGEVEEESKVSTTPKGIRRRFSQMDRIRVALEVGTHSPWIGRLLKELGHDVILANPRRVRSIYQNNNKSDRVDAEMLARLARMDPKLLYPVEIRSEERQACLVVIRSRRVLVETRTKLVNHVRGVCKSLGVRLPKCTAASFHRRVVLLVPEEIFPSLEPVLRQLDGIEGSIRDCDRRIKEMSNEIEGVDVLTSVTGVGNLTAVAFVLTVGDPTRFRKSREIGSYLGLRPRRDQSGEVDKQLRVTRAGDVYLRNLLVGCAQYILGPFGPDTALRRWGLGLTERGGRGAKKRAVVAVARKLSVILHRLWVTGEMYRPFPEGKPEEKAA

SEQ ID NO: 129927 - protein, 360 aa, unidentified
MGNERTFVGLDVHAWSVTGHAVDTVTGEVWQRKLTPDPADVCGWVVSLPGPAKVVYEAGPTGYGLFRHLNDHGVACVVAAPSKLQRPAGDRVKTDAKDAALLARLLKLDEIVEVTVPSVEQEAARDLVRAREDVRGDLMRARHRLSKMLLRQGIVYTGGKAWTGAHDRWLRSQRFGLPGQQLAYDAGYETVALTLDRRDRLDAAIVEMAGDSSYTAITRRLGCLRGISTLTGFGLAVEIGDWTRFSGSSIGAFVGLVPTEHSSGGNRSQGSITKTGNTHARRLLVEAAWQHAKTYRSPGKTLRDRWELAPAAARLRGHQGNQRLHQRWQTFTARKKKPVIANVAVARELAGWVWSLAVLE

SEQ ID NO: 129928 - protein, 407 aa, unidentified
MELMALYKRVIGLDIHQAQITACALIEEPDGNSRIEQRQFGGYKRDRRELADWVASLKPDEVVMENTGIYWKSPYAALEVAGIRAKVVNARHVKNVPGRKTDVGDAHWLATLARAGLLRGSFVPPAKLRELRLIARQRQKLVGQLASEKNRLHKVPTDAGVRLGVVVSDLPGQSARAMVKAIIAGQPPHAVLKLASTRLKASRAEIFDALQGDLSASHRFVLDELMRHIAEIEARIARFDARLLAELESERNTLALLQTIPGVDLIGAAMLLIEIGTDMDAFGSADRLASWVGICPGNNESAGKRKSGHLRKGNLYVRRLLCEFAHAASRTTSVFKSKFQSLVVRRGYKRAIIAIGHKILRTIFFMLKRREHYRDSATDYEALSVQRNAPRWIKALTKFGFIAQARA

SEQ ID NO: 129929 - protein, 370 aa, unidentified
MTTSNILFIGMDVHKESIEIAIADGANQEVRRYGKIGGARDAMRKTLRKLVSLGKTLHFCYEAGPCGYELYRYLVSEGHDCWVVAPSLIPKRAGDKVKTDKRDAVQLARLFRAGELTPVYVPDREDEAIRDLSRAREDTMLVQKSARQRLKSFLLRHDIRYQGKTAWTEAHLRWLADEVRCPSAAQQIVFQEYVNSVTEAQHRLQRLNEQIEHFVKQWRLYPAVEALMSLRGVKMVVAVTVVSELGDLSRFNNPKQLMSFLGLTPSEYSSGERQSRGRITKTGNGHVRRILIEAAWCYRYPAKVSPEIQKRQERLPLTIRDIAWRAQLRLTQRYQHLQRKGKPHNVTVVALARELVGFMWAIANEITYPR

SEQ ID NO: 129930 - protein, 400 aa, unidentified
MPMLSIGIDVSKGKSTVCGMKPGGEIVYTPFEIQHTREGMSELVSLLRSSGEEVRAVLESTGSYHCPVVAALLENGIFVSVINSLRMKRFCSQSIRRVKTDQIDAMQIALYGLAYWQELQPTRLPENTYRELQLLARQYYQMTSILIKAKVDFNALCDQVLPGMQELMNDHAGRHKLSDFVLRYRHTTHILEMGETRFRKDYCKWAEKKGYRNRERMAALIFATAQNGIPVLPNAPSTQIVITEAIRVLHTVEASRDAILTQMQALAKTLPEYSLVREMPCIGDTLAPRLIAGIGDVRRFHSKRALIAYAGIDAPPYQSGKFSANNRHISKRGNRYLRKTGYEVMQSYVMHKPANDPIFTFIEKKRSEGKSGKLAMVAGLNKFLRVYYGKVTELYRSLPQ

SEQ ID NO: 129931 - protein, 344 aa, unidentified
MKIKLIGIDLAKNVFQLCALNQANKVLFNRSIRRARLHSTIARLEPTTIAMEACSSAHYWGRTFETVGHQVLLVPAQHVTPFVRGGKNDARDALAICEAAQRPGLHLVPIKSIEQQDIQLLHRLRQRQVQHSTALANQIRSLGREYGVIFPAGIKSLIKRLPEVLEDGSNELSPVARYALADQHQCLIDVRKAMLTFHQQIVQLAEHHPAYVNLLVLPGIGPLVAFAYIAAIGNGHQFKCGRQVSAWLGLVPRQYGTGGQIQLKGVTKNGDRYLRTLMIHGARAVIALGLKNRPELAQWVQPIIDRQGFNKAVVALANKLTRIAWVIVTTGEPFDMKQAFKPAA

SEQ ID NO: 129932 - protein, 373 aa, unidentified
MATISTKKFKFYIGIDVSKSFFDYVITQGKTILHHKQILNESDEIESFLRELKEIAGFKLSNAVFGMEHTGLYCNALLNTLHKRKASIVHENANLIRNSLGNLRGKTDKIDSKRIAEYLYKCRDELRLWEPKRPIINHLATLSTLRDRLISTKNSLDIPLKELSKFSTKEIIQQTRNHCQASLAALSVNIIDIDKSIKAIWSDDEYLRLKMEQMMSVPYIGKTTALQILIKTNEFIDINDPRKFAAFCGVAPYPHKSGTTVNKKTRVSPMADKKMKALIHICALGSVKKMGEFRTYYDRKTGGEGKNGMLVLNAIRFKLLLRIFACVRDNRMYQINFKPTLNVIYKLIDHVDPCKKTPLSKRFHIPYAYNTRK

SEQ ID NO: 129933 - protein, 347 aa, unidentified
MRFYNQQHPFYCGVDLHAKTLHLCVLDQAGEIVRHRGIRARPEDFLRTIEPYQKEVVVGAECMFAWYWLSDLCLEREIPFVLGHALYMRAIHGSKTKNDKIDSEKIARLLRGGTFPMSYVYPRQMRSTRDLLRRRCFLVRRRGELLAHLNNTFSQYNVTPPPGKFSYAANRVDLTKCFDDASVRRMVQTDVALAADFDKELTSVELYLKRNAKVHDPDTFHRLKTVPGIGEILAMVLLYEIHDIRRFADVGDFVSYARLVRGSHESAGKSKGSPHKKIGNAHLKWAFSEATTLLMRECEAAKRFVERKTKKHNKPKAMSVLAAKLGRAVYWMLRRKTAFDVNKLFAC

SEQ ID NO: 129934 - protein, 330 aa, unidentified
MIKYIGLDAHSSTCTFNVTDERGREVDNTTIETNGRLLVKYLREIEGIKKLTFEECELSSWLYEILRSEVEKLIVCNPVANSDYKKIKTDKMDARKLAKLLRGGFLVSVYHDGSKRERFRSLMSGYQDLVEEGVRLKNRYKSLFRKGGKKVKGESLYRDESFLEGLSRPDFKFIGTQIYQLLEKMEESRQEYLKEIIRYSKGFKEMKYLKSIPGIGSIQAAKIVSQVIDPYRFASKYKYYSYCGLVRHKRISDGKGYGSEKIWGNRILKCVYKMAGHSVLKGNSGLRKYYDYLRSKGISHDNAYNAVCRKIAAISLIVYGGRARNIMTDL

SEQ ID NO: 129935 - protein, 451 aa, unidentified
MKKGNIKMNIVNPNAAGIDIGSRSHFVAVGQGDNEIEEFGVYAEDLTAICNYLTEHDVKTVALESTGDYWQNLFTELIKHEFEVILVNGKFTKNAKGKKTDVKDARWIQQLHSLGLLSSSFLPDHQTEIIRTFYRQRSNIIRQISGASRKMQKYLKFLNFRLDVVVKDVCGLTGLKIIEDICKGNLNPNELAKHRHYNCRKPEQEIAKALHGNNRADFLFGLKQEFEAYKFMQKQLKQCDKEIEKALKLFLKNNPENKKLKFNSNPYKRKNKNAPLVKDFEKKAFQFFGGVDFMAIEGVSHATVLSIMSEIGRSGFEKFQSAKHFASWLRLAPNNKISGGKVLSNKLPKGSNRLKIALRQAANAIGNLKDTHLSDFFKRVAYRRGRQAAVSATARKLAVIIWNMVTKNEPYNPPSIYMFRDEKRKLGLIKRIRKQITKFDINLADVGFSTA

SEQ ID NO: 129936 - protein, 312 aa, unidentified
MNDKITSVYAGLDIAKTSLQLHLQSKSFDLPNTTEGHAQLIKRLAAFPSIHVICEATGGYERAVVAALHATALPLSVINPARVRQFARASGELAKTDPIDAAVLTAFGLAFTPEPTPPRTLTELKLAALVTRRVQLLELRVAEAQRADTCADLDLRKLFTPWLAQIEKQIAKVEALIEVLLKAQAPLADQVRRLDDIMGVGRLTAVMVLATMPELGQLNRRQAAALAGLCPYNRDSGQWAGKRCISGGRAEVRRALYMAALSASRSNHLLKPFYDRLIAAGKPAKVALTAVMRKLIVLMNHVLKNPNFSLAH

SEQ ID NO: 129937 - protein, 310 aa, unidentified
MEQTFVGIDVSKDRLDVHVRPSGAAFAVPRDGKGVEELLDRLRTVAPTLIAVEATGGFETIVAAAIGAAQLPLVVVNPAQVRHYAQAVGKRAKTDPIDAEMIARFAEAVKPEPRQVPDAAARLLGELVARRRQIVEMLVAERQREKRADNVRVRKSLARHIKVLERELQDLTDDISGLIRGSPAWRETEDLLVSVPGVADKTSSSLLAEVPELGRLTRRQIASLVGVAPFTRESGRWKGKSMIAGGRAPARAAIYMAALSASHHNPVLRAFYRRLLAAGKPKMVALIAVARKLLVILNAMIRDKKPWQYA

SEQ ID NO: 129938 - protein, 449 aa, unidentified
MAKRSGLTRGDRRRNERIAAVRAVVRTDRAVLAIDLGEDRQVAALLDHDGRVLGRRSVRAKAHGLGGLLGWAQAQAAGQGFAGVVVGCEPTGHRWRAVMALADAAGMGFVCVQALRVHLAREADDYTRDKTDHKDAVVIGKLVARLDCYLPERADADWARLRHLGQRRFRLVGQAVAYRLQVADLLACCWPAALSAAAKPLGSTTWLACLAVAVAGDGDPANWHRVGRETFVAAVRRQLPRLGGKRVCRRILEAFFDALADRAGAVEQRRGGLERIGFLLDDWCATSQRLSEVQTRMVGVLDALRLTGLVTSIPGVSALGAAVILAETGDPSRFATGRSVVKHAGLNPAENTSAASRGVTKVSRRGRPALRVAAWPAVWATLPANPVLAAKFTHLTGRDRHRLSAGQARVACAAALLRWLHAIVTSGQAWDPDIATGAARACRPATAAA

SEQ ID NO: 129939 - protein, 449 aa, unidentified
MAKAKKRKHRKLDRSLPVMRPNAGGIDIGATEVFVGVPADRDADSVRSFPTFTQDLHELADWLQRCRVDTVAMESTGVYWIPLFQILEARGIEVHLVNAQHVHHVPGRKSDVLDCQWLQYLHSVGLLRPSFRPEQAVCEIRSLMRHRESLVQMACVHVQHMHKSLDQMNLQIHHVISDITGVTGLAIVDAIVAGATDPKELAKLRNHRIKASIETVRKSLVGDYRPEHIFTLKQSLTAYRHYQQLIVDCDQEIQQRVQTFQSKDDGPTATADSSATPTTGSSFDLHSHLERIFGVDLTLIPGFDVLRIQTIFSELGADLSKFSADDAFSSWLNVCPKDGFSAGRRIRSPKIKTKNRVAHVFRMAALSLHSNKSYLGDYYRSQRARHGAPKAIKNTAHKLARIFYHLVTTRQPYDETVFAKLEARNQERRFRKLQSLARQMGYSIVEATM

SEQ ID NO: 129940 - protein, 406 aa, unidentified
MLVYLGIDWSEQKHDLSFQNELGAEILHLRIPHSENGFLTLNQSVANLGASPAECMVGLETAHNLLIDFLWAHGYTQIYVLPPNLVKSNQGRHRQSGAKDDRCDAALIAELVRTDRSHLYPWRPGSLLLQQMRAKVSYLYFLTRDIVQHTNRLRSILLRYYPAATQVFSALDTKICLDFIQAFPTPQQAAQLDFETFSAFARSHHYPQPKRLLLNYARLQQPQPIPAAETVQAFQDEAVQLCQLVKMLVQRKEETLQELDRLYQQHPDHVIFASLPGLGARLAPAMLVKFGEDRQRFPQPELVQALAGTCPITVQSGKSKYVRFRQSCDHEFRHYVQQWAWHSLQHSSWAEAYYLRVRPNCRSDSHALRCLGNRWLAIAWKLWVSETPYDETYHLRQHALRLRPRA

SEQ ID NO: 129941 - protein, 355 aa, unidentified
MDNKKYIGMDVHKESISIAVVNGAGKIVMECVIETKASMILQFIDGLRGDLHVTFEEGTWAAWLYDLLKPHVTRLVVCDPRKNASMKEGNKSDKIDARRLAELLRLDHLSAVYHGEHGLRTLKELVRSYLTITKDVGRVMSRVKAIYRSWGIACTGKQVYSPQHRAQWLAKITEPGVRRRAEFYYQQLDALRSLRREVRRELLEESKKHQAWKLLCQIPSIGPIRAAVLLGILQTPHRFRAKRQLWTFGGLGIETYSSADHRYVEGQLQRSKKPVLIRGLNKNCNHDLKNLFKGAAIIAATKPGPFQELYTALLAKGIRPEMARLTLARKIATIVLIVWKKGVCFDAQHLKPQTA

SEQ ID NO: 129942 - protein, 424 aa, unidentified
MKNCNKQNEKIELVDEKTLVIGIDVGSYDEYARAFTCRKQELSKKPLHFHNTAEGFKTFKYWAVNIMKTNGLEKIIVGMEPTSIYWEALATYCKDNGMILVHVNPAAVHKSKELDDNDPSKNDRKDPKVIAGLVTDGRYSFPYMPEEEYAQLRELSNLRIRTQESLTQCKNRLARWYSRYFPEFKEAYKNVVSKTAMMILDLYPLPEDIVTLGVEGILQIWRSKKVRGAGERKARKLYEAARNSIGRKEAASIARIEFKSIKEDLDRYQERLDEIEKKADEILPKIKNVDKLFEIKGVGKATVLTFLSEVGEISRFDNPKEIQKLAGYAIVTNESCKHQGEKRISYRGRKRLRWVLYQTALSVIAKNAEFRQIHAYYTTRTNNPLKGIQSVVAVACKMIRIFYKILTDGVSYDGTKMTQDIVHA

SEQ ID NO: 129943 - protein, 344 aa, unidentified
MQNDTLVAVDLAKTVFQVAVSHHPGQVSKNRRLSRTQFAEFLAQLPKATIVMEACGSAHFWARRMQALHHTPVLLSPHTVTPYVGRNKTDRNDTKGMLEAHRNEEIRPVPVKTLAQQALCSLHRIRAGWIAERTACINTLRGLLREFGIAIPVGAQHAVPNAWLHIEDAESELPDSIRPALAEICTEIRELERRIKMIETQLAALAAQTPAVARLMTIPGIGLIIATALVAFVGDIHRFPSARHFASYLGLTPKEHSTGSRRRLGAISKQGDVFLRTLLIHGARSVLNAATRHKTPDRLHAWALSRHAARGHNKAATAVANKIARIVWAVWKRDQPFHSVPVAA

SEQ ID NO: 129944 - protein, 361 aa, unidentified
MKKTTQHLIAEVPSKHSPTELTVGVDLGDVWSHYCTISQNGDVVDRGRFRTNPQGVEKWFKNLAPVRVAMEAGTHSIWISEQLQLLGHEVIVANVRELRAISHSDRKSDQVDAEKLARFARLDPKILRPIAHRTLQQQQALTLIRARDLMVRLRTAAVNAVRGLTKSCGHRMPASTTACFARRGLAMLPAELAPALGPVLEQIAEMTTKIKQYDRQIRQLTQTEYVETQALLKVYGVGPITALTYVLTLGDKQRFQRSRDVGCYLGLRPRRSQSGDRDPQLGITKAGNGYLRMLLIECANHILRHPGKDSSLRRWGLALAARGGKKAKNKAVVAVARKLAVLLHRIWVTQEPYIPFYAEAA

SEQ ID NO: 129945 - protein, 338 aa, unidentified
MSLYAGIDLHSNNSVLAVMDEDGRALLQCRRPNELSRILADFEPFRSELASVAVESTYNWYWLVDGLMEHGFDVRLMHTTAVPQYDGLKHGNDDTDALHLAQLLRLGLLPEGYIYPREKRATRDLLRRRFMLVRQAVQLMLAIQSSFSRSTGKRLSANALRRIAPSELEALFPDVSTRYGVLLQYKLWLTLQEQITNLEQWVRKDLARPGDLMRLRSVPGIGPILGMTIALETGPIERFASVGDYASYCRMVESVRLSNGKKKGRGNRKSGNRYLCWAYMEAANYATRFNPQIKRWYERKKGNKHRVVAIKAVAHKLARACYHLLRDGTEFDPKRAFG

SEQ ID NO: 129946 - protein, 404 aa, unidentified
MNIIGIDVSKGKLDCALIDNLTHRKLKFKVVSNSEEGFVTLIDWLAKRTKSSISAYHFIMEATGVYHEKCAYWLFDSGARVSVVNPARVKYYGQSLGVRSKNDKKDSVVLARYGLTQTPMVWQPEALEIRILKALASRLDAIEKDILREKNRHEKSSINPSSQTILNAIETILFTLNKEKLHLEKLIHSHINQYEYLKNNNALLQTIPGVGPVLSRYMLIVLGGRTFQSASQCAAYLGLVPIQNESGSSLRGRSRISKAGSPVIRAKLYMATISALQHNPDIKIQNQRLLKNGKSKMSALCAAMRKLVQICFGVIKHQQPYHVQVLRDGICVRVTASHHCKFDADSVTLPQMTRRRFGCNSRPPLALRTAGAQNYLRLSRTTSPRFAFHSWQRQPHYQCWSGCR

SEQ ID NO: 129947 - protein, 340 aa, unidentified
MSIVCGFDVHRAQITFDLVDQRSGEVRVGRIEPATREGLRSWLAGLDASRLRVALEATTGWRFVVEELERAGARAQLAEPAETRALRGPKRRAKTDRADARHLRELLAREAIPESWIPPEHLQELRALVRLRHSLAAERRVWLQRVQAQIFHQGAPPVRGRLLGPGGAASTAPLSPAGRDLVACAERVCATLERELAELDGRLRVWARAHPACRALRKLYGVGPIIAVTLYAEIGDPRRLGSSRKLVRLAGLDVTVSESADKRSPGRLSRQGAPVLRWAAYEAALSASRAASPDRRDYQLLRERMGHGRATLTIARKILRRAHHLLVSVGDDLLRPLPEH

SEQ ID NO: 129948 - protein, 403 aa, unidentified
MPTYYVGIDVSKFKHTCCIISGDGEIIKKSFDFSNSKEGFDSLIEIFKSIDQSSSFQIVMEATGHYHECLFRYLVANNYLAQIKNPVVITRFKQSEYLDKAKTDNLDALLIAQYASKHPFSPSMLKSYNIERIRRISRAKYFLYQDKERTINHLHRYLDESFPELIPFLRKRGDIKRYQGRNFFDSKTTLWFLENFPSAKKFSNARSETAEKLRRMSKGAFSLVKFNKLRKIAKESIGVAYQETEEIIIQLVQELRNIQERNDKLDELLIPLIDETSPNLLTVPGIGYRLAGLLISEIGDASQFPTADKIIKFAGLDVRVYQSGTIEKHGAIRKRGSPLLRYALFQAAEKARIHCPEIAEFYSKKKSEGKHPICALTHTARKILRIVWALLKTGQNYSQSISD

SEQ ID NO: 129949 - protein, 427 aa, unidentified
MSNRKTNKKTKKQTPLEEGGLGAVEIYSAPPPPLRGRIIGLDCHPDTYTAAVFQGTTPHNARKVCARENLSLQRLLDWAAREFTREDLFLMEAGGNSFEIHRRLLALGLRGVVLESCHVGKHAKTYADNDRMAAARIALVYLAGNAPCVWVPDALSCERRQLLHAHQSAVVDHTAATNALKGYLNQFAIRPGSRSLKLERTRAWLLKERDWSPLQQQLLAEYFAQLDSHAQRRQRLTRLIAQEVCAQPLMLRCMKLLGIGMINAFALLAVIGDVRRFDRPEKLVAYIGLNPGQRQSGRGKDLKLGLGKRGRGDIRHLLIQGAQAVLRMGRGTPLGQWGWKLFARKGERNIAVIAVARKLLVQVWHLLIGNAPTALEADKSFSIKMQKLTVTLGRQLRTQLGLPPNLRECVRELQRRMLHPPPCDEPV

SEQ ID NO: 129950 - protein, 423 aa, unidentified
MDILYEQVARLDVHKDTVVACVRIVAEGKTKRECRTFSTTTDQLVELRAWLEECRCTQVAMEATGVYWMPVFRILGEGLFELIVANAAHIKNVPGRKTDVNDATWIADLLACGLIKASFVPNEEIQELRSLTRTRKQLVREQTRHVQRIEKTLAEANIKLDSVISDIMGASGRRMIEAMIKGVRQPRQLAELAGKQIKATPKELYDALHGRLTDHHRFLLDLHLKQWDGLDKTIREIDREIDQRIGRLRTKGESGEVPFRTLIELLSTVPGISTVSASAIVSEIGCDMSRFPTAGHLVSWSGLCPGKNESAGKRKPSRLRKGAPWLKTMLVQCAWAAKRKKDSYYRAQFFRLQSKRGPQKAICAVAASILTAVYHILKNGIEHHDLGGTYFDRRPVELKAGRLVARLKKLGFNVQLQPIAEAA

SEQ ID NO: 129951 - protein, 423 aa, unidentified
MSKKKQTVAGLGAIYARVCGMDVHKEVVVACVRILDMKDGTVQSTLRRFGTMTADLLELRQWLAQEQVTHAAMESTGVYWQPVFNILEGHFEVWVVNAQHIKKVPGRKTDMKDAEWIAQLLQCGLLKPSFIPDRQQRELRDLTRQQTKLVQQRNAVANRIQKVLETANIKLGSVATDVLGVSGRNMIEALIAGERDASKLADLAEKRLRHKIPQLQRALQGEVGEHHRFLLRRLLDQYDFFEKEIARISERLAAIAPPSFRAAVKQLDEVAGVAERGAQALLAETGTDMTRFPSHKHFASWAGRCPGNRESAGKRKSGKTPAANRHLDAVLTEIAHAAVRKKDSYFKSQYHHLAGRRGKKRAIGAVKHSILVTIYFMLRDNKSYMDLGTDHFDKLNPQQQIRYHVRKLNELGQNVELSLRPAA

SEQ ID NO: 129952 - protein, 341 aa, unidentified
MNHTTVGIDLAKNVFHIVCLDEKGREQMKKRLSRSQVVKHFANRPRCLIGMEACASSHHFAREITKLGHEVKLIPPQYVKAYLRGQKNDTNDARAIAEAVRAPSMRFVAVKTPAQQDLQALARLREGVLRSRTALVNRLRGLLSEYGIVAAKGVGTLRRALPVLLEDAENGLSERFRRLLRQGQQQLIELDAHIEALTTELKAAAKTDDRAKRLQSIPGFGPIVAAVFAASLGDGGQYRNGRQASAAVGLVPRQHSSGGKERLLGISKRGDRYLRSLLVHGARAVVRTAPDKDDPLSRWINRLRETRGMNKATVALANKLTRIGWAVLRNNTVYQPACRAS

SEQ ID NO: 129953 - protein, 410 aa, unidentified
MAIPNSLSAASALVAIDIASRRHHVLIQPVGKKRYRLSITNDKTDHDRLAQHLRELGSDVIVAFEATGNYHRAIAWRMCEEGFDVRLISSVALARTREALQNGWDKNDPRDAQVILHMLSNGLTQRYYDPLVEGINDWQELSKTHEAVSSMKTETLHRLKTHYYPLYFPEVDRFRHNSRSEWFFRWLHAFPTPGSITALSQQDFLEAAWPLLGRKVSKRALLSDIYETARSSVALPVDVDSAAVQMYRLVIQQMCELIRHRDAIERQAQELLGNHPDYQRLRQLPGVGPIHALTILAEAGDLRRFAHYRQFLKFCGFDLATHQSGRFRGQSKLSKYGNARLRRTFWLAGQVAVRQRENDFRDKFVRYIARDPFNRDLRRKALTAVAAKMARVAHALIKHGTDYRPFYGRR

SEQ ID NO: 129954 - protein, 467 aa, unidentified
MRKTKRKVKSAAAAGKERLTLLERINFNAAGIDVGSREHWVAVPAERDPRPVRCFGTFTSDLHALADWLLQCGVQSVAMESTGVYWIPVFQILESRGLEVLLVNARQVKHVSGRKSDVSDCQWLQQLHSYGLLAGSFRPEAQVCVLRSYLRHREHLVEQASTQIQLMQKALTEMNVQLHHVLSDVTGVTGMAILDAILAGERDPLQLAQLKDPRVRSSLETIAKALTGDYRPEHLFILQQARESYRFLQAQIAACDVEVDQVLSGWEAKVDLGQQPLPPTGKKNRSKSKHKPLPFNLREQLYRVTGLDLTEVDGLDVLSVQALISEIGLNMHRWPSQKHFASWLGLCPDHRISGGQVLHNRTRPVLNRAADVLRMAAQSLKDSQSALGAFFRRLKARLGPAKAITATAHKLARIVYLLLKYGKHYVDPGAQYYEQRYRENILKTLKKRAASLGYTLVENSALNLQVS

SEQ ID NO: 129955 - protein, 361 aa, unidentified
MTKVTKFVGLDVHAVQTHAGVLDLDTGELARCRLNGDPLVGLAFIEGLGGDVVAVYEAGPTGFGLARAAADRGLDVRVCAPGLIPRKPSDRVKTDARDAERLARLLAAGELSFVRIPAVDEEQLRDLVRAREDLRGDLNRARQRLSHFLRRRSLRFEGPGRSWTLAHRNWLRGLSFDDRASEVTFADYLAAVDAIEQRRDAIDQTLEDLAPESPWAQTIARLRCFRGIDTLAATGLCAEIGDFDRFEHPRQLGAFLGLVPCERTSAEKRRLGHITKAGPKHSRRLLVEAAKHSRLKPAISEKLRQRQHAQDPRVVAVAWRAQRRLHRQWHKLATERQRPANIATVACARELSQFIWEAATI

SEQ ID NO: 129956 - protein, 468 aa, unidentified
MKRKSRHAKQQKASLLSEDLQLIEPDAAAIDIGSRSHWVAVNPQRASEPVREFGTFTTDLNRLADWLTECRASSVVMEATGVYWVTLYELLEERGFKVYLVDAHTVRHLPGRKKSDVVDCQWIRRLQSYGLLQGSFCPPQQVRRLRTYLRSRSKVLECAAQQQLRMQKALTLMNIQLHHVISDLDGVTGMGIVRAIVAGERDAKQLARLRDPRIRASRETIEKSLQGNWQEELLFDLKIALESYDHFQTQIAAYDEQIRQELKALPSKVDLQKQPLGAPRPKSCRTRHGTTQQQQVDLRQELYRISGVDLTRIDGVSLQTAQKVLFEIGTDVSAWSDERKFSSWLGLSPNHHISGGKVLKRKSRKVINPLSIALRLAARTLRNSKSALGANFRRLIAKIGMPKAITAMARKLAVLIYRMLKYGSDYVDKGMQHYERKYQETKLQYLRRQAARLGMQLVPNQGVATSVH

SEQ ID NO: 129957 - protein, 338 aa, unidentified
MVYGAIDLHMRYSQIRIVDADGAVLREQRVSTTPARLVETFGGHGAMRILLETGTESEWVAQTLEAAGHEVIVADPNYAPMYGEIRRKVKTDRRDVAALSEANRRGWYRATHRVSAAQRSLRQVLRSRRQLVRMRSGTIALVRALLRQRGSRLATGSAAGVPMRLARLTLPADLADTIAPLRRMVETLSDEIDLVDARLQTVAAADPLVTRLRSVPGVGLIVALTFRAVVDDVGRFTSAGQVSAAIGLVPREDSSAERRHRGHITKAGPSELRSLLIQAAWACWRSKGSGTLRAWVERLAARRGRRIAVVALARRLSRILYALWRDQSVFDAATLAAA

SEQ ID NO: 129958 - protein, 350 aa, unidentified
MQTIYIGVDFHARQQTICYLTTDSGELLFHQLKHEDKALVRAFYAQFRGHVIVGLEASGYSPWFERLLEELGCEVWLGHATEIRRRARWRHKNDRRDAELILDLMVHNEFPRLYLPPLQSREVLRMLRYRQKLIKMRTIGKNSLQALALQSGLAKGPHLFTKTGLQELRSATMSPAMQWQREQWLQLLEPLNERLLETMRWLQQQSQADQRISRLRTHPGVGLLTALCLVHSLEPVRRFANTRKVTAYAGLDPVERSSAERQRFLGISKGGSRVLRFLLVEAAHTALRKDADLKRFYQRLAQRHGRPKAKVAVSRKLLIRAYIMLRDEIDYAEFQRRAVAARPVLPAHGL

SEQ ID NO: 129959 - protein, 404 aa, unidentified
MLTSLSVERFVALDVHKHYVVAGAVTAGQQVVLAPRRVDLDDLPDWSQRHLRPTDAVVLEATTNAWHLCDQLCPLVASVTVAHPLLVKLITAARVKTDARDTLHLARLLAAGLIPAVWIPPQDVRELRALVAHHTRLIRQRTQAKNRLRSTLHRYNIVPPEGGLFAPAQRSWWEALALSAVEKLRIRQDLSILTSLELLIAEVEEELTRLSGTEPWLSQVVFLLQVPGIGVINALVLLAAIGDITRFPTAKQLVGYAGLGASVHASGETYQTGHITRQGRKEMRAALVESAWMAVEHHPYWKAQFERLSARIGKKKAIVAIARKLLVVVWHVLSKQEADRHADQAMVTRTIMEWARNKSTATRQDLTRVEFVRRELDRLGIGAEMDSFVFDGRVYHLPASASAR

SEQ ID NO: 129960 - protein, 462 aa, unidentified
MTGRDEIASLGKSRGQLAGLPIIRQNVAGIDLGSERHWVCAPTRDRSGREVASFGATTAELLRMAEWLKARQVESVAMESTGVYWIAPHEVLEAQGLQVLLVDTRQLAQVPGRDKKSDPTDCEWIQRLHSCGLLRGSFRPEEAVCMLRTLVRDKANLVAESGDWLRRMQKSLDQMNVRVHRAVSDLDGATGMAILRAIAGGERDAQKLAKLRDRRCSKTEQEIAEQLNGHWREDHVFSLQQALKIYDAVQERIAAYEQEILRKLGEMEREEQRGQTASPLNNTNKAKAIKKRGQEPSRQALYRMSGVDMTQIDAIGVETVEVLVSEYGPDLSRFPTEKQFVSHVTLAPRVPKSGGKPIRKKKRNSASTRVAAALRMAALSLRHSQTALGAYYRRIAQRRGADIAVFATARKLATLIYRLLRWGQPYVDEGAAAFENRYRQHRIGRLAATAKELGYQLTPVSA

SEQ ID NO: 129961 - protein, 388 aa, unidentified
MLLDHLADGPATIRTQFGAIFVSLELSRSNWLVTSLSPGTGEKLSKHGLPAGDVAGLLKLFAELKRKAQARTGESYPIVTIQEAGLDGFWLHRVLEQEGIESHVVDPASIATPRRRRRAKTDRLDGETLLRALLAYKRGEPRVCAMVVAPSPEEEDRRRLCRERRTLIDERIVHVNRIKGLLFAQGIAGYAPLRRDRRSQLEALRTGDGRALPSHLKTQISRELDRLELLIEQIKAVEAEQDALLAEASKPAGKAAAADPVTMLLALKGMGPNFAAVLWSEAFYRQFANRRQLAAYAGLAPTPWRSGSIEHEQGVSKAGNPRLRTTMIQLAWLWRRHQGQSALARWFEAHSQRSRKSAIVALARKLLVALWKYVTAGVVIEGAAMKSA

SEQ ID NO: 129962 - protein, 387 aa, unidentified
MPQVDDLSRSLVAFDQDATQIVVVEMSEASWLVAGMAPGVDRQALKKLGPDPDALLRLVERWRDEAVKAGKMIERTALAFEAGRDGFWLARWLQARGIEVHVIHSTSVAVSREHRRAKTDRLDTAMLMRVFLGWLRSERGHCGMVAIPTLEDEDARRPSRERESLVGERTRIINRMKAILAWLGVRGFNPKLRKAPQRLDELRTPEDLPLPPNTVDELRRDMARLAMLCEQIKALEQARLANLEQAPGTGPHAMVRLIANVIGVGIETADMLVQEVLSRNLRDRRAVARFAGLTGAPNESGSRRRERGLAKSGNARVRRGLIQLAWRFLRFQKDSALAQWYRVRTEGPAAARRTKMIVALARKLLIAFWRMVTVGEIPAGFALRQPA

SEQ ID NO: 129963 - protein, 331 aa, unidentified
MNIHVGIDIGAKTSAMGWRQNGKTVGQWEIQQTAKGRKAAVNKMLGLKPLSVVMEATGIYYLDLALELHAAGLPVSVINPKSFHNFAKLMLQTSKTDPIDAQLLAEYGERMTPRLWVPPTADQLTLRAIGRHINRLIGHRTRAKNELHALQATGTSFKLLIEDEEEAIAALDIRIDRLKKAARDAIAKCPNLTLQFHCMMAAPGVGEASAITALAELTVLPLTLKSPQVSRYAGLDVRLTQSGTSINRPGRMSKCGNAYLRAAMFMPALTAVRCDENVKAFYEALVARGKKKMQAIGAVMRKYLIGLWACMRSGEEFDTAKLFSEKDRAKA

SEQ ID NO: 129964 - protein, 351 aa, unidentified
MGVDIGKRNCVVCIMHSDGSIIEETKYDNTLDQAESFASYIKKKHGGSGKSSITAVCESTGNLWLKTYQAFEKYNIDVKLANPLKTKAIAEARIKTDKIDAKTLAHLLRSDLVAECYIANKKTREERSLLRLRTNLVQDRTRVVNRTHSLLDKYDMNFGYSKIFGIKGLQWLRDLRVTGNDQILLQEYVSQIDFLTTEIKNIESKIKIEASNNESVKILMSMTGIDYFSAMMISSEIGDINRFGSPQKLVSWAGLCPSVHQSGNSLYMGRMKEGNKKVRWILIEAANTASRTDDRLRKFYIRMVKRHGRHIAITHVANKMCTIIWHMLKYKKLYNERKPNLYKTKLKRIQN

SEQ ID NO: 129965 - protein, 431 aa, unidentified
MAVVMIGVDPHKASHTAVAINAAEEPLGQVRVRASAVQAERLLAWAQAWPDRSWAVEGAGGAGHLLAQQLLSAGERVLDVPPKLAARVRLLATGDINKNDPNDARSVAVAALRSAGVREARRDDHAAVLKVWSKRYGDLGRVRTQVACRLHQVLCELTPGGVRGEITAGQAARILASITPAGAVEAARCQLAADLVEDLRGVDARIRETRKKAGAAVRASGTSLTGLFGVGPVVAAAVIGDVCHVSRVPSRDHFASYNGTAPIEVSSGGRKVYRLSRRGNRRLNHAIHMAAVTQIRYQHSPGRAYYDKKLADGKTRKEALRRLKRQISDAIFACLQADARRTAACAKSPGGQPGNHSSSRAAGSHPDHRRFGQATPGPATHPTTPAGADTAAPFPALLPSRASRRTGQGPGTARPRSGARRASSTRPPASR

SEQ ID NO: 129966 - protein, 312 aa, unidentified
MSNLTLYVGLDVHKDSITAAVFEGMASEPASVDRLPSDFRKLRPYFERLRARGMVNACYEASGAGYVLHRMLTEWGVHCEVIAPSLTPVRPGQQRKHDRRDALNLARFYRAGELTPVRIPTEREEQVRDLVRCRETFQREILRSRHYVLKFLARRGFIFQGGGHWTRRHRRWLEQVLREAELSPQDRIVFGEYLSLLDYKIQRRNELDRRIEELALSPAYADAVGRLKCFRGIETLAAMTLATEIGDWRRFQSPRHLMAYLGLVPSEHSSGERQSLGPITKAGNSRCRHVHSCRSASADRRLPGPRNPDVLS

SEQ ID NO: 129967 - protein, 345 aa, unidentified
MEITTIGLDLAKRVFQVHGVDAGGAVVVRKALRRAQVLPFFVKLPSCLVGIEACGTSHHWARELIRLGHQVRLMPPAYVKAYVKRGKNDASDAEAICEAVTRPTMRFVAVKSPEQQAALSIHRTRDLLVRQRTQLINMMRGLLAEFGIDIPVGLERALLLARQIVDGEAPDVPAEAIRIVGVLSRQALETHAQLREIDRSLVALQNRDDVARRLATIPGIGPVGATALAASVTDPSQFRSGRQFAAWLGLTPLQNSSGGKERLGRITKMGDRYLRKLLVVGATSLVRRIKHKPETVDPRLVDLLARKPVRVATVAMANKMARTVWAIMTRGETYQARHQPAVAAE

SEQ ID NO: 129968 - protein, 394 aa, unidentified
MILVGIDIGKNKHTFSIIDKNSGEILLSPSDFSNNLKGFLFLIQKLSSYTKSELLIGMEDTGHYHFALLKYLLDRRYTVALINPTTTDLTRKLQGGITKNAPLDSLTICDVISSNHRNKPYRVTTLNRFDLYEQKQLTRHHHNLKEELNTYKNRLQKCIDIVFPEFNSLFHSKYGIVYMNILKTFSSAKAIANADIRSIRKCFEFKGQGKRISLSAKQLKLTAKSSIGIPSVAEEIQIRHLVSQIELLEKQLSEIDKRIEEFSLKNNSPILTIPGISHFSGTSIISELGDICNYTKASQIIKFAGVAPYHYESSQFTAQHTAITKKGSKYLRKTLYQIILPVISNNEVFYAYYTKKLNEGKGHRCAQGHCIRKLLRVIYHLLSTRQPFNSKLLV

SEQ ID NO: 129969 - protein, 340 aa, unidentified
MSLVLQPLLPFPDGCQGMSPHQQGRGTKMTEHCYGGIDVSKDRLDVMVLPDRKSFSVDNNAAGYSELVKRLRGLSIAAIGIEPSGGYERAVIRALLAADLSVRRINPNKLRQFGRARGVLAKNDRLDARLIAEYVAIMPTRVVQRDPATEQLAEVVTMRRQLCDEHVAVENQTAHLEDAMLRRLNKRRLARLAADILLLDRRMAQIVASNANLTRRYELLTSMQGVGPTLAFTLVALLPELGQMSRKQIAALVGLAPYDFDSGRLKGHRCIYGGRLPVRNVLYMAALSACRYNPALKVFHHRLAATNKKPKVIIVAVMRKMITTLNAMLRDNVAWQPKSA

SEQ ID NO: 129970 - protein, 348 aa, unidentified
MTLVGCDLHSRKQQVAVLVTDTGEVLEQELLHEGDAVERFYRALPRPVTVGIEATGYTLWFHAVMQKLGHTLLVGEAAKIRAMVVRKTKTDRRDAQHLLDLLKHERFPTVWMPDPTTRDLRALIAHRVRLVRMRTMVKNGLHAIALNQRVALGPSLWTKRGLAQLRALSLPPHTANRRADSLELLTWLTTHIDQLDAQSAEAAAADARAQRLLTHPGVGPLTALITVLVLGPAARFPTSKHVGLAPAIHSSADKYHLGKITKQGNALLRWILGQAAPLAARADGELRRAYFAVLHRRGRPKAKVALARKLLVRLYIMLRDQIDYEEFRRRGRVRRSRIAVNPVSATTM

SEQ ID NO: 129971 - protein, 446 aa, unidentified
MSLDCCYEHAGLCPGRGPSGPAPSGDGRLTEDGRDAMEVMFDRVAGLAVGKETVTVCLRRPGPRGGRRSETRTFRTMTGSLQVMRDWLVEAGVTIAAMESTSAYWKPPFYCLEEQMTVWLLNAAHMKAVPGRKSDVRDAEWIAQLLEHGLLRPSFVPPPEIRRLRMLTRYRVQLMGDRLRDTVRLELMLEDASIKLSTVASSLTTVSARAMLTAMIEGETDPLRLADMAKGKMRRKIPDLAQALTGNFDANHARLAHSMLRRLDLVEHAMAELDQVIVDACRPWQHQIELLQTIPGVGPKVAEVIIAETGGDMSRFPTAAHLAAWAGLAPAMNESAGKQSPAGKRHGNKWLAAMLVEAAGSVGRMHNKNYLAAQHARLLKRRGMGRAQVAVARTILVSAYWMLKRDEPYHDLGADWHTRRNDQAHTRRLVAQLERLGHTVIIDPAA

SEQ ID NO: 129972 - protein, 351 aa, unidentified
MSYKLDSGIAVIGIDIGKNSFHVVGHDKRGAIMLRQKWSRGQIEARLANLPPCLIGMEACVGAHHLSRKLQMLGHDARLMPAKYVRPYSKGQKNDFRDAEAITEAVQRPTMKFVATKTAEQLDLQALHRVRERLVSQRTGIINQIRAFLLERGVAVRQGLRFLRAELPRILAAPCDALSPRMLRVIEDLAGDWRRLDERIEILSSEIEALARQDKNCERLMTVPGIGPIVSSAMVAAIGTGDAFSKGRDFGAWLGLVPKQTSTGDRTILGSISKRGNRYLRTLFVQAAWVVLVRIGPKHWHRYGLKSWIEAAKKRLHHNVLAIALANKLARIAWSVLACGRAFEASKIQAA

SEQ ID NO: 129973 - protein, 403 aa, unidentified
MIFVGIDWAEAHHDVCLVDEAGQVLAKRRVAEGLEGVSKLHALIAEHAEAPASVVVGIETDRGLLVGSLLAAGYLVFAINPLASSRYRERHAISGAKSDPGDARVLADLVRNDRHKHRPVTGDSELAEAVKVLARAHQRLIWTRQRQLNQLRNALREFYPGALAAFDDLDSSDAIAILALAPTPSQGRSLSRAKIASALRRAGRERNLEAKAAQIQSQLRLPQLEAPMLVAQAYGHSVAASVDLIRQLNLQIAVLEKELAASFEMHPDAEIYLSLPGLGRVLGARALAEFGDDRTRFAHPKARKNYAGTAPITKASGTRKVVLARVARNRRLSDACYLWAFAALTTSPGARHRYDSLRARGQTHHQALRALANRLVGILHGCLAHRQTYREDAAWRPAFGVAA

SEQ ID NO: 129974 - protein, 359 aa, unidentified
MLSQSNKIDFNGQHFYVGLDVHLKSWKVSIMAEKLTLKTFSQDPKPELLYHYLVKNFPNGTYHSAYEAGFCGYWIHNKLKALGIDSIVVNPADIPTTDKEKVSKSDKRDSKKIAKCLRNGELKGIHVSSLKTLEDRCLVRTRGTLVKDLTRNKNRIKSFLYFHGIEMPERFKQSSTHWSNRFLNWLRSIELAEYSAKKSLALIIDESEHLRLIILEATNGIKELSQSETYVNHVQLLRSIPGIGILTAMIILTEIEAINRFDNFDKLCSFIGLVPTTHSSGEKEIIGEITIRGNNFLRSAIVECAWIAARKDMALNKSYHDYCRRMEPNKAIIRIARKLLNRIRYVLKNNQPYEYSVVK

SEQ ID NO: 129975 - protein, 347 aa, unidentified
MFVGIDVHKDTHTAVGISPFGEKLFEITVGNYKEDFETLNEKVKEHSDVLSPYIGLEDVRGYGERLAGYLYQKYPVYHVPSILVDRQRQNATHPEKSDSLDALGVAKVMIQSIDTLLPYTISHESEKAKQLKEISIDREDLVLERTRLKNQAHTLLYRIYNTEYEQKFKDPFSLKALRFWRNTKPKCDPFLLRSMKRKVRRLLGIHVEVTDLEKDMEILLRDNYTIQTASGCGVVLASTIVGEIGDINRFHSPGALSKYAGCSPRERSSGKKVRHVKSRSGNRRLNCAFHRMALSQISRMGNDRAQAYFKRKISEGKSKSQALVCLRRQMVNIVWMMMKHKTIYRNA

SEQ ID NO: 129976 - protein, 333 aa, unidentified
MNITCGIDWAEGHHDVAPMDDRGTILAHARIDTGPGGFAALLRMIAQQGGCAQSTPIGIETDKNLLVVALACVGFSVYPINPRAVARYRERFGQAGGKSDAADAAILADILRTDRHQHRQLPAVSESAAAVKALARQHQEAVWALHQTTSRLRSVLLEFYPQALVAFPHLTQRAALTVLAAAPTPGKGRRLTRARIVALLRKCGRRNDPSLVEHIHVTLRQPALRQPEPVEAALGITVMSEVAIIMSMLDAVALLEDAMTAEFEQPPLAPILRSVPGLGPVLAARVLAEVGDDPLRFPTAAGLRAYAGTAPVTRASGRSSYVKARKVGNKPAG

SEQ ID NO: 129977 - protein, 344 aa, unidentified
MGQYVGLNVSLDETKVHVLDEQGKRVWRGACASHPAMIEATIRQHAPEAVRIGLETGPLTTWLWQALTEVGLPMACLDARQAQAALNMRINKTDDNDAEGLAHLVRSGWYREVRVKSRAAMITRSLLGARTQLLGIVTELSNQIRGLMKTFGLVVPKGAGKIFEANVRRLLEGEPAVAAIILPLLESWRAVRVRAAELDRQLLAAAREDRACRRLMTAPGVGAVVAASFVAAIETPEAFRRSRDVGAWIGLTPRRYQSGEVDYDGHISRRGDARLRSLLYEAATSILTHVHADSTLRSWGLALKKRLGFKRAAVALARKLAVILHAMWKTGTNFDARASASAAP

SEQ ID NO: 129978 - protein, 346 aa, unidentified
MDVYIGLDVSLASTAICVVCAQGKIIKETTAASEPECLIEVLKGVPGTVVAVGLEAGPLSQWLHRHLMEADLEAVLMETRQVKGALKAMPIKTDRRDAEGIARLLQMGWFRPVHCKSVSAQEMRGLLSARKAIKQAAINLELSIRGVLRNFGLKMGRIAKGRFEARVQELVNGNPMLEAAAHPILAARRALRQELAGLEKVLRDHAKQDPVCRRLMTMPGVGTVVALTVKAAVDDPERFRSSKDIGPWVGLTPRREQSGERDIVGQISRAGDVGLRTALYQAATVMLHRGRSNWLTAWALNVAKRRGMKRATVALARRIGVVLHRMWKDGTDFSFTRTLSGVIAAA

SEQ ID NO: 129979 - protein, 423 aa, unidentified
MMKLKYSICCGLDVHKNVIVATIVTTNKDGISEYKQKSFSTINSDIQKFHNWLIENNCYHVCMESTGKYWIPIFNYLENDIDVCLTHPKYVKAIKGKKTDKKDSKWIADLYKFDLVRCSFIPPKDFRQLRELSRYRFKLVCMKSSEKNRIQNCMTVSNVGIASVLSDPFGKTATEIISYLLEHTADSMDEKAVRKLIKKGAKSKSDEIIEAIKGYTIETDQAKKLELARGHLEYLDDMITQTEVELYVRFKPYYEFVEFVSTMPGMTELSSTIVLAETGVDMDIFDDAKHLCSWCGLSPANNESAGKKKSVRIAKAGDYLKPMMVQCALAAIKSKKNPYFAIKYGRIKKRRGHKKAIIAIARMMMVCIYHMVSEKKPFTPTDYEELINPQNHVERVVLNENNVFAYLESLGYDSSKLVKRNDN

SEQ ID NO: 129980 - protein, 384 aa, unidentified
MTKHTITFIGLDTHKEFSEVVTINDHRDEGHIALGRIPSTRQAFTKLTRRLQSQHPNSTLHFVYEAGPCGFWIYRLLTSLGHVCYVVAPSLIPKKPGERIKTDKRDAIKLARLMRTNELSPIYVPEAEDEAVRDLSRAREAACHDRKRAKHQIKSFLLRNFIMYQGSANWGPKHRRWLAEIMLPHPAQQIVLQEMIHTLNERTQRLNNLDNELVHIGSQWRFYPVVKAIQAMRGVSLIVAMGLICELGDLTRFDHPSKLMAYIGLVPSEHTSSDKRRLGSITKMGNTRARRLLVEGAHSYRYQPKVSIEMEKRQEGLPQEIIDIAWQAQLRLCRRYQRLMYRGKHRNIVVVATAREMVGYLWEIIQLVPLEPVKPAERVTRVPR

SEQ ID NO: 129981 - protein, 352 aa, unidentified
MEMIALDCHKHYSVASVQTPEGQCLAEGRIEHRRGSIRAFLAPYSAGCPVAVETIGNWYWIIDEIEQAGKVPRLVHARKAKLMLGSLNKTDKLDVRGLNRLQQTGTLPTVWIPPATLRDQRELPRTRMVFAATRTRLKNRIHSVLDKYGFQDQFAGVSDIFGVGVRPHLEGCLAQLPPQAAYTSGLLLEQLEAVQETISALEKRMAAVFAPTPEIERLDTLPGVALILAVVLGLEIGDVQRFRSPEHLASYAGTVPRVHASGGKTYYGRTRPDVNHYLKWAYVEAANAVALNRVRFPQRHVSQMYHRIRSRRGHASAIGAVARHLAEATYWMLTKQEPYHERGIAEVSPQGV

SEQ ID NO: 129982 - protein, 384 aa, unidentified
MYIGIDVDKNFLTIKEIDEEGNPIGKDKISNSIQALERFSQKHEKHSKIALEASSYSMFGYRYLAKQGFEVHMAHPGALHKIIQSNNKTDEHDALDLAQLLRTGYLPESWVPDEELESLRSLINRRVELGKRSTQVKNRIHGLLALNGVKEPRATDLFGKAGIHFLEHLQLPAEFKQVLESLLRELAYLKEEIGLLESKLAKQGKEGRFKKEVKRLMEIRGVDFYSALADMAVIGTVERFPDDRKISSWVGIVPRVRQSGSKEYHGHITKAGSGLLRWILISNANVAVKYPGKLRRYYLRLKARVGHGRAIVATAHKLLKIIYHMLKEDKHYEERDDDLFYRKLSRMNQKANCKKTPRLDSLERKGREIFIKEGRIMNTDKSFS

SEQ ID NO: 129983 - protein, 405 aa, unidentified
MEPSATPEIIIGLDVGKTGHHACALTNTGERIYDKPLPQDEAARREIFASMQAHGSVLMVVDQPNTIGALPIAVARDCGCTVGDLPDLAMRKAADLYPGRSKTVRRAAFIIADTARTMLHTLRAVDRDDETLAALEMLAGFHDDIAKDATRTKNRLRSVLTQIHPALERVFAGEILSRTLVLDSLIHYEGPTKLAAAGRGRVLKWMRNRAKKDPAALVDAISAALAEQTVTVPGTAAAELVIPQLAANIKALQAQRDTIAGQVEEMCESFPLAQVLMSIPGVGITTASNILVSIGDCQDFADAAHLAAYAGIAPTTRRSGTSVRGEFPTRAGNKQLKNAMFRSAWIASNCHPASRDYYPRKRAEGQKHNAAVMWLARSRCNVIYALLTRCEFFREIPARTIAAAA

SEQ ID NO: 129984 - protein, 365 aa, unidentified
MGVPTMAQAKTFVALDVHVSGTVAAVIDGASGELRRRRLSGGAADVAEFVAGLPGPVRATYEAGPTGFALARRLEAAGVSCLVCAPGMVPRGPSDRVKTDRRDAERLARLLIAGELHAVAVPSVEAEGLRDLVRAREDLRGDLMSARHRVSKLLLRHDVRFAGTERNWTQPHLRWLATVRFAQPGTQAAFDDYRGAVEALIIRRTELERLISEQLPASPWAQTARRLMCLRGVDTLTAAGLCAEIGDFDRFAHPEQLMSYLGVVPSEHSSGTRRRQGSITKSGSQHARRLLVEAAWHYRQPPRVSEPLRRRQAGADPAIVALSWKTQRRLHRVWSRMEQRGKRRTIIAVAAARELAGFCWAVATA

SEQ ID NO: 129985 - protein, 301 aa, unidentified
MNATTVAVDLAKNVFELAVADEQWRVAERHRLTRTQFERWFNNREVKLVVMEACGSAHHWGRVLRARGIEVRLLPPQYVRAYVKRNKTDAADAAALLEAARAADIKPVAVKSVEQQALQALHRTRSGWMASRTGRINMLRGFCREFGLVVPEGAARGLAQIARFLADERSGLPGMLRGSMRLLLEEIRLMEARIQQLELDLVELAQQSPACQVLQSVPGIGLLTSTAMVAAVGDPRSFDSGRRYASFLGLTPGSSPPAGTATSGASPSAGTATSGCCSPTGHARCCAQLPWRAGAAGSSTA

SEQ ID NO: 129986 - protein, 465 aa, unidentified
MTTAKLWRNRKERKDWARRLRSEDPGLEVVHPHAAGIDVGNSAHYVAVRPDRDPEPVRRFECFTADLYRLAEWLESCGVKTVAMQSTGVYWIPLYEILEDRGFEVYLVNARHTKNLPGRKSDVQESQWLLKLHTYGLLNNSFQPPAEIRVLRTYWRQRAEHVSGAATCIQRMQKALTQMNLQLANVISDLSGVTGQAIVRAIVAGERNPQKLAELGDPRIEASREEVAKSLEGNWRPELVFVLRQEVEMYDAYQRRIAECDQQLQKHLASFADTELPQSPKAESKEKRAKSTKNAPRFDLSSELKRITGVDLTRIDGIDVMVAQTLLSEVGMDMSRWNTEAHFSSWLGLCPDNRISDDKLLGKGTRHVVNRAATALRLAARNLIRSRSYLGAQYRRLRTKLGAPKAITAMAHRLARLVYRMLKYGQQYVDKGTEYYENRYRQPQIHLLQKNAAKLGLQITVAAQS

SEQ ID NO: 129987 - protein, 447 aa, unidentified
MATRKRATTEAAISLTHPNAAGIDIGSASHFVAVPPDRDDEPVREFHSFTADLHRLADWLDACGVDTVAMESTGVYWIALYELLESRGFTVLLVNARHVKNVSGRKSDVLDCQWLQQLMSYGLLHGAFRPAEQVCVLRALTRQRAMILRSQGRFVQHMQKALTQMNIQLANVISDVVGETGQRILRAIVTGERDGMALARLKNSRIHASEDEIAKSLQGNWRDEHLFALKQALDAFDFCGRQLAECDAQIEAQLQTLQSCEGEPPKGKKRGRARNAPRFDLRTQLYQMCGVDLTRIDGIDVTTALVVVSEVGADMGRFASDKHFASWLGLCPGTKITGGKVMSGKTRRCANRAAQALRLAAAALRSSKSALGAYYRRMCARMDRPKAVTAAAHKLARLIYAMLTKGEEYTDRGQDYFEERYRQRVLHNLTQRAKAMGMQLVPCESVV

SEQ ID NO: 129988 - protein, 344 aa, unidentified
MGQHYVGLDVSLEMTSVCVLDEAGAIVWRGKVASTPEAIAAAIRAHAPQVARIGLETGPLCTWHWHRLRALGLPVVCLDARHAKAALSLQLNKTDANDAHGLAQIVRMGWYKEVAVKSLDSHRLRTLLSSRAQLVNMRRDLATKIRGVLKTFGKVVGKIGDRGFAARVSELAAGEAGLEEAVTALLAVRERLEQQIEALETRILRFAKHSDPCRRLMTIPGVGVLTAVSFVAAVDDPARFGRSSGVGAYFGLTPRRYQSGEVDRDGKVSKCGDALTRTYLFEAAGTLLFRVAKWSALKAWGTRLARRVGSKKARVALARKLAVLMHRVWTDGTEFRWSKEAATA

SEQ ID NO: 129989 - protein, 354 aa, unidentified
MKYIAFDSHKRYTYAVVEEKEKGRVMEKRIEHRRGEIEAFLSQCEVGSPVALETIGSWYWIVDEIEAAGMLPKLVNARKAKMMIASSKKTDRLDAKGLNTLQRTGTLPTVWIPSSELRDIRELYRTRMMLTQMVIRLKNRILSCFSKYGISFDETSDAFNIKGRASLEAALEILPTQTCFALKELLRQLDLLQEAVKEFEARMLQVQSNDPEIKLLQTIPGVGPILSYVIAYETGDIHRFPSASCFASYAGTTPSVHASGGKVRYGHTPSSVNHYLHWAFIEAANVISMRHEVLRFRHTARLYERLRQAKGHDIAVGAVARHLAEATYWILTTKIAYREPNQNKQVVVVSSKEG

SEQ ID NO: 129990 - protein, 355 aa, unidentified
MTSSKYIGMDVHKESISIAVRNAAGKIVMESVIQTKASMILQFMEGLRGEVHVTFEEGTWSAWLYDLLKPHVTKLVVCDPRRNALLKEGNQNDRVDARKLAELLQNNQLRPVYHGDHGLRALKELVRSYLTITKDLSRVMTRVKAIYRSWAIPCSGAQIYSPRHRAEWLAKIREPGVRRRAEHYYQELDGLRSLRQAVRKDLLVESKKHKIWERLRGIPSIGPIRAAVLLGIMQTGHRFRTKRQLWTYSGFGVEGHSSADHQMVNGQLQRRKKPIEVRGLNKNCNHHLKNLFKSAAILASSKPGPFKDFYAALVAKGMRPEMARLTLARKIATIVLIVWKKGVCFDANHLKPQTA

SEQ ID NO: 129991 - protein, 327 aa, unidentified
MKKTSAPVYVGMDVAKATLQVHLQGRQIQFNNDPTGHTQLCKRLGALAAVHVICEATGGYEDAVTRAFESAQIPVSVVNPAQVRHSAQAQGKRAKTDPLDAALLTDYGQRFHPKATVPPTAVQRQLEELTLWLTQTIQARAVAKAQAEHQTNAFVCAQHQQRLDHYTAQIKAVEAQIRALLEQDRTLAQRVECLDRIVGVGPRSAWLVLAHLPELGALNRQQVAALAGLAPWPTDSGEVKGARHIRGGRHEVRRALYMPALCAARTNPVLKEFYHRLMARNKPAKVALTAVMRKLLVHMNAELKKLAAQPVEAKTDKCKRTKKPLAK

SEQ ID NO: 129992 - protein, 405 aa, unidentified
MNAVGIDVSKGKSTVTIRRPGDIVIMPPCDIRHTQSSINALIGQIKALDGETKVCMEHTGRYYEPVATWLSDAGIFVSAVNPILIKEFGDDSLRTPKTDKADSRKIARYTLDRWANLKQYGSMDKTRNQLKTMNRQFGFYMAQKTAMKNNLISLLDQTYPGVNDLFDSPARPDGSQKWVDFIYTYWHVDCVRSRSLPAFTEHYQNWCKRKGYNFSAEKAEKIYRASCDLIAVFPKDDNTKMLIRQAAAILNTVSETVEALRLKMDDAASTLPEYPVVMAMNGVGPTLGPQLMAEIGDVTRFTHRGALTAFAGVDPGKNDSGKHIQKSVPTTKKGSPYLRKTLFQIMDGLIKRSPIDDPVYAFMDKKRAQGKPYYVYMTAGANKFLRIYYGRVKEYLVSLSEEEET

SEQ ID NO: 129993 - protein, 367 aa, unidentified
MEKSSKVFVGMDVHKESIDITLAEVGGEVRRLGQIGGDRGSLLKMVRKQQSQGGERVFVYEAGPCGFWIHRELAALGERCMVVSPALVPKRAGDHVKTDRRDSERLASLARAGELEAIHVPDIRDEAIRDLVRGRDDAVIAQRRVRQQLKALLLRNDIRYVGKTSWSGAHRRWLSELKLPEPAQQIVFEEYVDAIAVATARIERLTRAIESEVTTWRFAPVVAALQAMRGIQFVHAVTLIAELGDLTRFGSARQLMGYLGLVPREDSSGEHRRQGSITKAGNSYARRVLIEAAWAYRHPARVTRIIATRQTGLPKAACDIAWRAQLRLSAKYRRMNARHLHHNKIVVALARELSGFVWAIGHSVRPQ

SEQ ID NO: 129994 - protein, 481 aa, unidentified
MIRSVGIDLAGNGEHKVRCLDEKAELCDGFGFETTPEGLEKLEERIFRDGANPVVVFEPTGLAWVAVAVYLRARHPDCRLVRTQSRNVAALRRYLRRSSKSDKIDAITLAKMPFIDAERLNEVYLPPAKIYAIQRLARQRRRLESDMAARKTRIISIVDGYLPGVRQVFSNLWSLQAKAFLNSRLNPLAVVRDGEKALHLFLARTKPRCKEDGADSHMVYLACKGVATIYEQPRSAGTMNDDFFAALQEEISRELRLMDAEEAESQSITKRLKELYQELHPSDNLCTIPGVGEQTAPVFLAVVGDPARFHSQSAFANFNGVVPNSKQSADMETKGLRMTKAGPAIMKWALYQSGQIGRRYDPQLAWLYYREMVHNGKNHKQAMGAVMSHIGARILAVLRENKPYELRDVEGKPISWEDAKRLILLNYQVPEEIKRDRRRRKTLGDSANRLPRKRREMVTSRVHEAAGAPQPAVANISQKPV

SEQ ID NO: 129995 - protein, 374 aa, unidentified
MSDHNEAYVAFDTSKLRNAVAIAEAGRSGEVRFLGEIDNTPAATAKLVKKLSGKYDRLTFCYEAGPTGYGLYRQIKSLGHECLVVAPSLILKKPGERVKTNRRDAVSLVKQLRGGDLTAVWVPDPQHEAMRELTRAREVAVEDLRRKRQQVSAFLLRQGLHYPGERAWTKAHRAWLVSQKLEYAEHRIAFEEMLLAMRQAQERIERLEQAIRVAVPDWSLAEVVTALMALRGIDFISATAFLAEIGDLSRFRTPRELMAYLGLVPSEASTGDTVKRGPITKTGNRRARRILVECSWSYQHPPRVGKEKQERVAAAPPAVREIAWKAQCRLSARYRALTRKGKLKTVAVTAVARELSAFIWAINRQVANPGVAAR

SEQ ID NO: 129996 - protein, 347 aa, unidentified
MKKIVKQVLGIDVARKELVVCLASMQDDWTSELISHRTFANSEKGFEAMILWVKKLSTESIPVRYVMEATGVYHEALAYFLEEKGHAVSVVLPNKISSYFKSLDVKTVTDKTASDAIAQFGLERNLDNWRRPKEIFRDLKQLTRERDQTVDERTVAKNQLHAEETQAYPNKKSVTRIKARIKLLNKQVTEIKEEIAALVMKEKDVSKSVDRICSIPGVGLLTAATVLGETNGFELIRNKRQLTSYAGFDVQEKQSGTSVKGKPRISKKGNKHLRKAMHLPALSAIRHEERFKAIFVRLVSKHGVKMKAAVAVQRKLLEMIYTVYKTNTLFDKDYLTKHGNQQQNEVA

SEQ ID NO: 129997 - protein, 361 aa, unidentified
MIIKERMSVGLDVHAHSIVGAGIDTGTGELFRKRLGPDSLGVILWLRSLPGPVAVTYEAGPTGFVLARALIKEGIHCVVAAPSKIRRAPGDKVKTDKRDAELLARLLLNGDITEVTVPSVEQEAARDLVRAREDVRTDLMTARHRVSKLLLRQGIVYDRSTWSKVHLQWIRQQKFTQPALQTALDAGYESIMAILERRDDLDKAIASLAADSEFTKVTNNLACLRGINTLTAFSLAVEIGDWTRLTGRNIGAYLGLVPSEYSTGKSRTLGGITRTGNSHARRLLTEASWHHKKPYDPRSRTMQARWDLVDREVRNRGHAGNRRLHERWQVYKRKGKRNVVANTAIARELSAWCWSLAVMTG

SEQ ID NO: 129998 - protein, 413 aa, unidentified
MKVFCGIDWAEDHHDVALVNADGVLIAKQRISDDAAGFAALLHLLAEAGDSADDTIQVAIETSRGLLVACLRATGRKVFAINPMAVSRYRDRHSVARKKSDAGDALVLAHILRTDMAAHRPLPADSELAQAIAVLARAQQDAVWERTCAHNKLRSLLREYYPAILAAFADKRGGLLRPEARAVLAAAPTPAAGAALTKTQLRALLKRAGRQRGIQLEADRIQAALRAPQLRQLPKVETAFGRQALALLRLLDAACTNAEELATDATNHFEQHPDAEIITSLPGLGSLTGARVLAEIGDDRSRFANTRALKAYAGAAPVTRASGKSLTVMHRRVKNQRLASVGYLWAFAALTASPGARAHYDRRKAAGDRHVAAQRNLFNRMIGILHHCLATQAKYDEHTAFPALESNPSAAAA

SEQ ID NO: 129999 - protein, 346 aa, unidentified
MRVLIGIDPHKATNAVAAIDERGELLEYAVFSTNRAGLRSLARWGKRFPKRRWAVEGAGGLGRFVALCLVAAGELVMDVPAKLSSRARLLATGNARKNDRVDAIHVALAALRRGERLAEVGEEEQAEVLRMLSERREDLIKERTRTLNRLHGLLRDLLPGGAPKNLSAEKAARVLRGVRPRSGPARTRRRLAADLLRDIRRLERQLYELECRIREAVKEASTGLTLMFGVGPILAAEIIGRVGNVARFPTKAHFASYTGTAPIEASSGEVVRHRLSRAGNRKLNHVVHMIAICQARHDTKGRTYYRRKFAEGKSEKEALRCLKRRISDAVYKQLRADLPAANLTAA

SEQ ID NO: 130000 - protein, 367 aa, unidentified
MKESMFIGLDVHKATISVPVADGERGGEVRDWGKLPNRPDRVRKLAEQLGAKGHQLYFCYEAGPCGYGLYRQLVELGHDCLVVAPSLIPMKAGDRVKTDRRDARMLAKLHRANELTAVWVPDVEHEAMRDLVRARATAVRVANQARQHLQSFLLRHGRQYPGKKSWTKAYRRWLSTNRFEHSAQQIVFQDYIHAVTDAEARVVRLEAQIAELLPDWSLAPVVQAIQAMRGVAFIVAVTVVAEVGDVRRFPTPRQLMAYLGLTPTEHSSGNTVRRGGITKVGSSLACRVLIEGAWSYRMQPRVGRKQVDRMEALPQAVRDIAWKGQLRMCQRYKHLVGSGKPPVVANTAIAREMIGFIWAIAQEVTPA

SEQ ID NO: 130001 - protein, 583 aa, unidentified
MLHLGVGIDTARYGHHVTFLREDKQPACPPLPITESRGGYEQLQKRIEQLHQRFPRAHIHLRIDAAGQYAANLERFVRSLTHLPMTVSVGEPKRNKDYHRAHSPKRKNDATESHAMARYAVVERPDETYGKPAEYAVLRRVASRLQSQTKQSTRLANQLHETLSAGFPELATLINDLSAGWVLQLLEKYPTAQRIAAARIGSLENIPFIPKEMAEKLHKAAKHSVATLSGDVAEALSKELVSELRHSLAEEKRWRELLTKAFDALPDGPHHQIATIKGIGKQTAAAIVATAVDIDRFETDKLLVGYYGVFPEELQSGVDKFGRPLPPGKKIMCRKGNDLVRGLLWQCAKCASGVKGGNPAVRALYLRRLAAGDTPQIAWGYCMTKLLRQVFGVWSTGTAFDPEYEAKKPETLGPKDVSETLEQPACEEVTKAPASMEPVAQGASAASPHSAQPRSHKQANQPIDYAALREQIPLQRVLEHINQLPIISAVYRGPCPLHEPSATTGRKFSANLDRQVFRCFHRECGAQGNVLDFWQAYRNMQLYAAAEDLAQTFGVAIPYLESPRPTGPKIKQKIGSGHHPPSP

SEQ ID NO: 130002 - protein, 371 aa, unidentified
MEHTRFVGLDIHKERISIAVAESGRSCAVEYLGEISNDPVAIGKLCDRLERSSKTLAFCYEAGPCGYGVHRQLISLGHRCDVVAPSLIPTRPGDRVKTNRRDATMLARLHRAGELTPVWVPDADHEAMRDLIRLRSVVRQIVSRARQHLQGFLLRHGRKHGRGTAWRMAYRRWLSTLAFEHPAQQIAFQDYVDAVMDAERRLQRVEEQISGLLPEWNLRPVVDALQAMRGIALITAVVLVAEVGDFTRFANPRQLMAYFGLIPGEQSSGETIRRGGITKTGNAHARRALVEGAWAYRMKARIGRHKVDRIEALPKVVRDIAWRAQLRLCTRYRRLSARGKTANVVNVAIAREMVGFIWSIACTVQSAPKTA

SEQ ID NO: 130003 - protein, 469 aa, unidentified
MDHCSKTVSVGLDVQEDSIAVADAPEDRGAEVVSLGVIGTRQSDSDTLIRRLESKGATLLFGSEAGPCGSWLYRDLTGTGLACQVVAPSLIPRNGGDRVKTDRRDQITLARLMRSGDLSALSVPGIEDEALRDLSRGRDDARQDLTRRTRRLTSFLLRPDVRSEGRASWNPAPLRWLPEVVCPTPPQQTVVQESVRAVSEQQERLQPLEHERHRTVTGWRPAPVVEAIQALQGVELTGAVIVLAKLGDLTRFDRPRQLMSDLGLTPSESSSGARRHHGGITRAGNSRARRALGDKAWASRYPAKVSRHLQLRLETLPTEVQPIGWKAPVRLCRRYRQLTAHGKPVTQVVGAIAREMAAFAWASARLVPLASGRAAPSRQTGPRASDPDLEPSAEAQARYRRNLRSRDAATPSPRERRRRRDGHLGGGSHPTDHSMITRRRDRLRLFRWLEHPPPVKARTRTAPAIRGSP

SEQ ID NO: 130004 - protein, 401 aa, unidentified
MTSVGIDVSKGKSTVCILKPYGEVIVSPYEVQHTEPDLRVLISRIKSIEGEVRIVMEATGAYHLPLLSGFKDAGFFVSVINPLAMKRYASTAIRKGKTDKMDAVRIANYGIDNWFKLVDYTLPDEVYAQLRLLGRQYAHYITIRIESKLALTDLLDRTMPGIKSLLSGKRSEEPTKDKLSDFVAEYWHFDNITKKSESQFIRSYCTWAKKKGYHASESKAKSIYALACNGIPTLPASTASTKMLILEAVRVLKEVNKTLESILTQMQKLATTLPEYNTVRAMNGVGDVLAPRLIVEIGDVRRFHSGSALIAFAGIDSPPFQSGSFTGTQRKISKRGSSLLRKTGYEVMKCLKTVKPSQDNAVYLYMLKKEAEGKPKKVAKIAALNKFLRIYYARVSEVYSG

SEQ ID NO: 130005 - protein, 348 aa, unidentified
MAHFVGLDVSVKETSVCVVDDTGKVILEQKVPTEPADIITLLSSLGVSYGRIGIEAGPLSQWLVNALTVAELPVICVETRHMKALLTAQQINKTDRNDARGIAQMMRVGLFKPVHVKTLVAQEQRMLLTSRKLLQRKLLDLESDLRGTLRNFGLKVGVVSGGRYEVRVRELIAGFPRLAAIAEPLLNVRRVMRQQFAVLHKMLLDTVRDDPVCRRLMTAPGVGAVVALTYRATVDQPQRSVHSRAVGAHAGLTPKRYQSGEIDYDGGVSKCGDALLRTMLYEAAQVLLTHGSKWSWLKAWGVRVVQRRGMRRAIVAVARRLAVVLHRMWVDGSEFRWSKDSAAVPTAA

SEQ ID NO: 130006 - protein, 379 aa, unidentified
MSSATAVVAVARTIIYLGMDVHKESITIALLPSDAKTPTRVDRLPNDLVKVKRWLDRAAIQGEIRACYEASGAGYVIHRAMREWGYACDVIAPSLIPKRPGVQRKHDRYDAAELARLYRSGELTAVRIPSEAEERVRDVVRCRETFQREILKSRHYVLKFLARRGFVYREGTNWCTPHLKWLQHLTTEHSPLAPADRLVFREYHALLLYKLQRRDDLDREIVRLAELPTFKLAVQALQCFRGISLHSAMVLATEISDWRRFARPGQLASYVGLVMRESSSGERQRLGSITKAGNSHCRHVLVQAAWSYRHRPATSMDLKRRQSGQPPAIIAHAWKAQHRLHQRFNHLSYRKRPQIAVVAVARELIGFLWAVMQEVRVSA

SEQ ID NO: 130007 - protein, 314 aa, unidentified
MAMHATRPVIGIDTAKEELVIQHDDEKRHLAIDNTPAAIRQWLAGLPKGCDIAIEATSTYHMEITERAHAKGHHVYVVDGYRLKNYREGVGGRAKTDLTDAQLLARYLRKEKDELRRWMPPPKAYRTLQSLLRRRAALVKARTALRQSLSAEPLLKTALATLLKQIDRIDQLIQKRLREAVHAAGLRDQVQRCQAIDGIGELTATALVMAFLRGDFQNSDAFVAFLGLDVRVRDSGKLKGKRRLTKQGDTEVRRLLHCSAMSGARHPTWKAFYQRYRDRGLKTTQALVILARKLARVAFALMKHQENYCAPRPS

SEQ ID NO: 130008 - protein, 484 aa, unidentified
MAKRRKSTFHRLSSSRLNRNQRRELSRRIAAGDPGLSIVNPHAGGIDVGNESHFAAVPADRDPNPVQEFGCWTADLNRMAEWFVSCGLDTVAVQATGVYWVALHDVLTEHGIRVVLVNARNTKNVPGRKSDVQECQWLMKLHTYGLLRDSFHLAKEMESVRTLWRLRERHVAEAGRAVQHMQKALTRMNIQLANALSDITGVSGMKIISAILHGERDPYQLADLRDKRVKASREEVARSLEGNWREDVLFELRQALHSYRFIHEQMQECDQQLEGYLSKLPNAPAIPVPTVSPGEGKVTKKRKTRKARDNEPRILNLEAELTRICGVNLCSIDGISVITAQTIVAEIGTDMSAFPSEKDFASWLGLTPGKDVSGGKVVAEGRRKVKNRVAAALRMAATTLLKSESCLGARYRHLRRELPSKKAAVKAMARHLAVLVYRLFTRGQAWVDRGAAHYEQRRRELDLAKLESIARARGFQLIPMTQAS

SEQ ID NO: 130009 - protein, 349 aa, unidentified
MLADELDYVLGVDTHRDEHVMAVVTAPAGAVVAGAAAPANAHGYRELLRVAEQHAPGRRAWAIEGTGSYGAGLSRYLHARGESVLEVSRIPRGEPQLRGKDDALDAARTARAALASNTLALPRRGERREALRLLLVARRSAVDVRREALTQLRAIIVTAPELLRQELCRLPEGKLLDRCSRFRRTNSAGADELATRIVLRSLARRVRTATVEADELEREILAHVRALAPTLLDEPGVGPIVAAQLIVAWSHRGRLRSEACFARLAGVAPVPASSGQTTRHRLSRGGDRQLNRALHTIVLHRRQHDPTTRDYIARRIAEGKSRRDATRLLKRYLARHLYRLLQQQEPMMP

SEQ ID NO: 130010 - protein, 408 aa, unidentified
MKALHRRCAGLDVHQAEIVACRRIVVRSRVQSEVQRFATTTQGLIELLEWLVEGKVTHVAMEATGVYWKPVWNILVGEFELVLANAGQVRNVPGRKSDVNDATWLADLLAHGLIRASFVPPRPIQELRDLTRTRRELTREIVRHKQRILATLEEANIKLASVVSDVFGLSGRRIVKAMIAGESDAQRLADLGSPRLSCKRSELVAALTGRVRDHHRFILGQHMKTIEQIEATIEEFDARVEAALAPFRDAIERLTRIPGYGVGVVQTVIAETGGDMSQFETAEHLISWAGLCPRLDESAGKRRSTKVRKGAPWLKPVLAQAAKAGAKTKGSSFKARYWNVASRAGRKKATIAVAAAQLRVAYHMLKDGTCYQEMGENYRRPKNPARAAQNLAKRIRALGYQVDIKVAA

SEQ ID NO: 130011 - protein, 360 aa, unidentified
MKTLRNSEAKTIPSRTTVGLDVGDRHSWFCILDEAGEVVAEGRVRTTSEALNEHFTRWARSRLVLEAGTSSAWISRLAMTAGHEVIVANPRELRKIHQSDRKNDRSDALVLARMARFDPQLLAPITHRSAAMQNDLAVVRARDVLVRARTQCVNAVRGLVKTAGGRLTTCGTECFARKAVAQLPSGLESALGPMLKTIESLTEQIRAYDRVIDELASRYPVTEVLRQVTGVGALTAVTYALTLGDSSRFGSSRDIGAYLGLVPRQHDSGNHVSQLSITKAGNTLLRRLLVGSAHYILGVHGPDCDLRRYGERLMTRGGKNAKKRALVAVARKLAVLLHRLWVNGEVYEPLHSEQKSRQAA

SEQ ID NO: 130012 - protein, 377 aa, unidentified
MPDVISHAPADVRLWVALDVHKFSIVAAVLPPQGGKPELSRIETTDKAIRRFIAKLGGPDGLAVAYEAGPGGFALWRMLCSMGVACDVIVPSLVPTRAGDRVKTDRRDAKKLVTLFRGGLLRFCQPPTPETEGLRDLLRCRDDIRCARTAARHRVVKQLGRYHRIYRDGVKAWTKTHIAWVHAQRLDDPLAQLALEQMLIHLDTIDTQLAVLDARLEEIAREDRWTGQVQALCGFRGIRTLTALGLIAEIGDFARFSHPRELASWLGIVPSEYSSGDQQHRGHITKTGNRHARRLLIEAAWHYRHAPRRPTSGPEPSPRAWQAQIRLYHRHRHLTQAGKRPTVVTVAIARELVAFLWAELTDQPARAEPQLLEAATA

SEQ ID NO: 130013 - protein, 370 aa, unidentified
MSVRRILAKTINTDLEYEAIGIDLAKNCVSVALLTTDGEVVCIDRLDYSELEKSAQVLCPTTFAMEPCTEMNYLVQKLGAWGHRCLVIGGKNVQNYVENHYSGQKTDLNDAQALAFLAQDTQLRTIKAKDMEQRKYASLTTLREQYIKQYRQTIVSLKGICQAWGLNISKGISGKARLKDLIENHAAFPEELKESLVDMVTHAQTAQKALNKITKTLEELAKNDKLCQLIRTIPGLGLICSCRLRATIGDIKRFKNPKDFPAYYGLVPRSIATGHNEKKGRITHRGDKTMRSLMVQGAGSVINMATRGKLKSKQLTKWILKKQKEKMPWGKLVCAVAAKLLRIVRAVLISSKPYNPQIAGVAKCSLPKGT

SEQ ID NO: 130014 - protein, 411 aa, unidentified
MRIVGLDVSRSVAEIAYLEDGTLHAGGRTGLRRDELERFAAKLRATDHVVLEATGNTTAIVNVLRAHVARVAIANPLQVRLIAEARVKTDKIDAAVLAQLYASGFLPEVWMPDEHTLALRRQIARRSQLVRQRTRLKNEIHAVLIAHLIERCPATDLFGKKGRAWLGVQPLPLDERLGVEQRLRELDRLGDDLREVEQALAQATIDDARLRVMLTITGVNTTVAIGLLSAIGDIARFPNPEKLVSYFGLNPSVYQSGLAPARHGHITKRGRSYARAMLVEPAWGAMQAPGPLRAFFLRVRDRRGQQIAAVATARKLAVIVWYVLTRGEPFAWDRPALTAHKLRGLELQAGMPTQHGSRKGSAAAYSLKSVRQQDRAVAEQSERTYQRLFNRWKQSRPKSDSAPIRWPGART

SEQ ID NO: 130015 - protein, 435 aa, unidentified
MEEVTDEPLYRDRVCGIDIGKAGLVATIRVPSDRDPARRAAETRSFGTTRREVLALADWLRSWQVPAVVMEATSDYWKGPFYRLEAEGFECVLADAKQVKNLPGRPKRDPADSRWLAACFERGAVTACFVATPEFRIIRLHTRYRRDLTEERTREKQRAEKLLESAAIKISSVLTDLHGVTGRDIMDHLIAGERNPKVLAQLARAAARRKISQLEEALEGAEFFTPAHAALLAKVLARIDRLSADIEDLSQVIEQLLAPYEEQLQQAGSMPGWARRAAQDAVAETGVDMTRFRTGPHLVSWGGRAPQDHQSGTRKGRAKAKKGNRYLGAVLGETAVAAGRTQTREGVRHRRLARRRGATKACVATGNTQLKVYHKLLSNPGMRYQDLGPDYYERQRDVRRQVAHHVGKLGALGFEVTLCRTPEPSPDETGPIQAA

SEQ ID NO: 130016 - protein, 369 aa, unidentified
MKKHITFVGLDVHKNSINVALADGDRNGDVRYYGAIGGTLDDLDRVVKKLASSTRELHFVYEAGPCGYDIFRSLTDKGYTCAVASPSHIGKKPSERIKTDRRDAMMLARLHRAGELTYVFVPHAEDEAMRDLTRAREDALKAQRVARQQLGGLLLRLGFRYQGRTAWNPAHFRWLADQKMPTPSQQVVFQEYINAIDETTKRVERHTQQIENLVPSWRLAPVVKALHALRGVSLIVAATMIAELGDLTRFENPGKLMAFLGLVPSEHTSGQKRRQGAITKCGNGHARRVLVEAGQAYSYPARITPPLLKRQEGVSKEVKDISWKCQVRLCARFRRLSATGKNRNTVVTAIARELAAFMWSIAKQVPISV

SEQ ID NO: 130017 - protein, 410 aa, unidentified
MNVIYERCCGMDVHKNTIVACVFSGNKKEIRSFSTMTASLLSLVDWLKSVNCQCVAMEATGSYWKPIYNLLEMEEIPALVVNAQHIKAVPGRKTDVKDSEWIADLLRHGLLNGSFIPKREQREIKELVRYRRSMVQERARELNRIQKVLEGANIKLASVISEIDGKSSRQMLDMLVAGCNDVQAMADKACRQMRKKIPQIEEALHGFMGEHQRLMLRLMLKHIDILDEQILALDQEILNNMKPVYEQVCLVDSIPGIGERSAQVIIAEIGINMSQFPSAAHLASWAGLCPGNNESAGKRKSGKTRKGSDILKSTLIECAKVAGHLKDTYFSAQYSRLAARRGKNRATVAVAHTILTIVYHMLNDNVPYQELGPDFFDQRRKTEIVKKSIQRLEALGYTVNIEQQAEISTA

SEQ ID NO: 130018 - protein, 397 aa, unidentified
MYIVGIDIAKRKHEAAVIDGEGAVIIKPFSFTNNCSGYNRLLAMLTKAKLPLDEVSFAMEATGHYWLALFTRLQKEGFRVQVINPVQTNSIRSFYIRQAKTDPRDALLIAEVIRFGHFSESTLHPENIYELRELCRGRHAIVSMQADVKRKVVALLDQVFPEYETAFTNLFSDTSMAILQTCPTPKELSEMPLEELCHLIEVSSRKRFRMVKAQELQELARNSFGFAMAGDVFSTMIRLYAKHLVFLKQQVQEMDRKIAEIMDTLDTPITTITGIGPTLGAYILSEIGDISRFSSAAKLAAYAGIDPTMRQSGEYNGVRNRMSKRGSPYLRHAIWLATSSAVLHDPALKFYFQKKRDEGKPYMASVGHACRKMVSIIYAVMRDNKAYTPCIPNEISA

SEQ ID NO: 130019 - protein, 340 aa, unidentified
MGEVSTVGIDLAKSVFQVHGADTSGAVVFRKKLRRDQVLTFFSTLPRCMVAMEACASAHYWAREIALAGHETRLIPPAYVKPFVKRQKNDMADAEAICEAAQRPTMRFVQGKSAQAQASAVVFRTRDLLVRQRTQLINALRGHLTEFGYVVRHGVGHVGKLVAIVRDPTSDVPAEARPVLAIIAGSLEALQAQIALLDREIAQRAKDDAVAKRLMTIPGVGPVIATALVALAPAASTFRRGRDFAAWLGLVPRQHSSGGKERLGRTTKMGERSLRRLLILGASSATKVAARDPDKARAWLAGMLSRKPRMLITVALANKMARIVWALMAHGGSYRAPAKA

SEQ ID NO: 130020 - protein, 413 aa, unidentified
MEPIHERVAGMDVHRMEHVVTILVEQEDGTLLKDTRKFGGFKRDMRALIDWLRSHRIQQVVMESTGIYWKSVFSHLEAAGIAALVVNAFHVKSVPGRKTDVTDSEWLAQLARFGLLRGSFIPPKDLRELRVVSRYRRKLGQSLAGEKNRLHKLLDDAGIKLGGVVSDINGVCARKMVEGLLAGGTPAELAALGRGKLKRPSEVLEAAMDGDLSPRHRLVLSTVLNHLHYLEREVARLDRYLIEAMKPYAWAWRLLQTIPGIDEISAALILIEIGDDMQRFASPSRLASWTALCPGNHESAGKRKSGKIRHGNPIVRYMLCEAANAARKTKTVFRAKYNSLVIRRGHKKTIIALAHKLIRTIYFVLARRKPYHDTTVDYEAAIVAKSAPRWIRALKKYGYWPKPPSTKTQPATA

SEQ ID NO: 130021 - protein, 420 aa, unidentified
MTVYLERGYNHKEFLWSKNSIIFYERGIRMILVGIDVAKDKHDCFIMSSEGEVLYKSFTIANNMEGFNELYQKISSTSDDLSKIKVGLEATGHYSYNILGYLLDKGLTTFVVNPLHTSLYRKSLSLRKTKTDKVDSHTIASMLMSDVNLKSYSETLYHNEELKSLTRYRFDKVKERAKLKQSISRLVTILFPELEKLVSTLHMVSIYALLSEFPSAKAIANAHLTKLTNLLYEVSKGRYTRETAIMFRESARNSIGSYMPAKSLELKHTIKLIGELDNEIEEIEAEIKRIMDEINSPIRSIPGIGLAMGAMIVAEIGDFSNFDSPDKILAYAGLSPSTYQSGQLYSTHAKMEKRGSRYLRYALFNATKFVCNWDPTFSAYLAKKRAEGKHYNVAISHAAKKLVRVIYQLQKSGQSYIKAA

SEQ ID NO: 130022 - protein, 377 aa, unidentified
MHSENIAAYIGLDVHKETLAVAIAAPERLGEVRYYGTINNEAQAVRRLFQKLQGLYGNILSCYEAGPCGFGLYHQLTAMNIKCQVIAPSRIPKSPTDRIKNDHRDAISLARLLRVGELTPVWIPDLTHEAMRDLIRARAAAKRDSRVARQRILSMLLRTDKRYAGKHWTGKHRTWLANQSFSQPSQQIAFQHYCQSLEQIEDRILQLDQEISRLLPEWSLCNLVCQLQALKGVGQLTAITLVAELGDFSRFSSPKQLMAFLGLVPGEYSSGNSIRPRGITKVGNSELRRLLYEAAWSYRTPAKVGAWLIYYRPDSVTQYSKDIAWKAQQRLCSRYRSLTAKGKKSQVAITAVARELTGFMWDIALAAQSPFSQQKQN

SEQ ID NO: 130023 - protein, 348 aa, unidentified
MTHSTITTVGLDIAKNVIQVHAVDAKGTPIIRKSLKRHQVLPCFANLPPCLIGIEACGGAHDGARRLMALGHTVKLMAPQFVKPYVKANKHDAADAEAICEAVTRPTMRFVPVKTPEQQALLALHRARQGFVTARTAQANQIRGLLAEFGLVIPKGMAALKQRLPDILEDAENGLPDACRELMQTLSAHLNELHRQVEAITQRIAMAHQANPLSRRLAQIPGIGPVIATALLAAIGDIREFASGRQLAAWLGLVPKQSSTGGKTRLLGISKRGDTYLRTRLIHGARSALSAAQRSKEPGATWVTRLADRRHPNIAAVALANKNARIAFALLAHDRDYQPGHSPVRATA

SEQ ID NO: 130024 - protein, 432 aa, unidentified
MGADGCEEVSVTEVEPEMVSRVAALDIGKAKLTACVRVPVEGRDSPGRRLQQVREYSTLTRDLLGLADWLRVEGVELVAMEATGAYWKPVFYLLEAEGLRCWLLNPRHVKNVPGRPKTDRLDAVWLAKVVERGMCGPSLVHPKPIRQLRDLTRYRRSLVREQTREKQRLEKLLEDSQIKLSSVISDVFGVSGRQMLEALIAGQRNPRVLAQMAHGSMRGKIGILEEALTGHFEDHHARIARRMLHRIDDLALDIAGWDIEIELLVAPFQDLIGLLDQIPGVNARSAEELIGEIGIDMSRFPTAAHLVSWAKFAPIAKTSAGRGTPGGKTGKGNPWLAGTLGEVVAGAGRTHTFLGERYRRLARRRGKDRAMVAVGNSVLKIVWHLLTDPDQPYIELGEGWYENHRNPAHRKSELIRQLQALTGQRVILEPAA

SEQ ID NO: 130025 - protein, 254 aa, unidentified
MERLFIGLDVAKDRLDVHIRPTDERTSFPYDEAGLGALVKRLQSLAPTLVVLEATGGYEIAVAAALATGGVTVAVVNPRQIRDFARATGQLAKTDALDARALALFAEAVQPPARPLPTEQAQVLGELIARRRQLVEMLGAESNRRLQVRDPQVQRRIDEHITWLRKALEKLEEDLGNTIRSSPLWRERENLLTSVPGIGPITAYTLIAELPELGQLDRRAIAALAGLAPMNRDSGMLRGRRMITGGRPTVRRVL

SEQ ID NO: 130026 - protein, 412 aa, unidentified
MEVVYPCCCGLDVHKKSITACVLWAEAKGKSRKEKRRFGTFTHDLLQLADWLGESGVTHVAMESTGVYWKPVWNILAEQFKVLLVNAQHIKAVPGRKTDQKDSEWIADLLQHGLLRGSFVPPQPTRELRDLTRYRVSLAQEINRIANRIQKVLEDANIKLASVATDALGASGRAILEAMLAGEQDAARLAELSKGLLRNKIPELKLALEGRMTEHHRFLLRQLFDHLRFTESKLSQIEQEIDRRMRPFQDEVIRLCTIPGVDQVTAWGILSEIGLDMNQFPSAEHLSSWASLCPGNFESAGKRLSGKMRKGNVSLRRCLSQAAWAISMTKNNYLSALYRRIAARRGAKRAIMAVAHALLVIAYHMLKRKEDYRELGADHFDRIDVNRTRHSLVRRLERLGHKVTLEPLAQTA

SEQ ID NO: 130027 - protein, 274 aa, unidentified
MNKQVCSPHATVFCGIDVSAASLAVALIAPDGSLARREFCNNASGHEALSVWLKKHDSQVRVSLEATGIYSLDLALALDAEAGIELAVLNPKLVNRFAQTVCRSKTDAADAMVLAEYSQRMPFCRWQRPAASHLALRTVSRYVGSLVVEQAGLKTRLRSAESTATTPRALLVDLRRALAAVERRVERLRAEALKLVEAEVELRQRYQLLTTVPGIGAVSALTILSELILLAPAMTVRQWVASSGLDPVHQQSGTSLNKPSRISRAGNRRLRAAL

SEQ ID NO: 130028 - protein, 350 aa, unidentified
MAIIGCDLHTRYQQIALLETATGEIVRRRLEHEDGEAKDFYAKLPQPSLIGIEATGYTQWFERMLAELGHELWVGDPAEIRARAVRRQKTDSRDAEHLLDLLLTRRFPRVWVPSAEERDLRQLLKHRDKLVRMRTSVKNQLHFLAMSQGMCRKRKLWSARGRQELEKLALGPWASRRRQELVEMLDRLGPQIKDLEEAVRTEAERRPEVLRLMKRKGVGSVVALAFVLTLGPIERFPNSRKMVSYLGLNPSEDSSGGHQRLGAISKQGNEMMRWLLVEAGQSAAQFDPELRRKYQRLKFRRGGKVAKVALARQLAVRLYWTLRHASPATPPLRMPGSPAEPMVDVSPSTV

SEQ ID NO: 130029 - protein, 389 aa, unidentified
MLEPFNPSRSLAALEQDSTVIAVIEMSQSRWLVAAVIPGIERQPLKKIDPDEELLLKLLHRWQNEAGRAGREIKRIVAAYEAGRDGFWLARWLRARGIEAYVIHPTSVAVSREHRRAKTDRLDTELLKRAFLGWLRGEKRHCSMAAIPTLEEEDTRRPNRERVNLVTERTRLINQMKAILVRFGIRTFKPTLRKAEEKLEGLRTAEGTPLPQNTRAEMRRQLARLRVVREQISAIERERLRKLAAAPAEERGPHAMVRLLARVLGVGVETADMLVNEVFSRQFRDRRAVARYAGLTGSPDESGKRRREKGLARAGNARVRTGMIQLAWRFLRFQKDSALAQWFRARTTDGRSATRKIMIVALARKLLIALWRLVTMGEVPRGIILRAAS

SEQ ID NO: 130030 - protein, 482 aa, unidentified
MAMRKLSTFERLQPGRLNRQQRRELGQRIAAADPGLAVVHPDAAGIDIGNQSHFVAIPPDRDPVPIREFGAWTAALQELAQWLTAHGIRTVALQATGVYWIAVQDVLEQAGLEVYLVNARGTKNLPGRKSDVQECEWLRKLHTYGLLRNSFRPPEVIRAVRTIWRQRDRWVQEAARAVQHMQKALTTMNVQLANTISDLSGVTGQAILRAIVAGTRDPWALAQLRDRRIAASEEEIAHSLQGTWREEVLFELRQALEAYDFYQGQLAACDRELAKYTAAVPSRERPAPPEGPAGAAPRLPAKPARRAKSRRQGHPGFDLAGELHRTLGVDLTRIDGIDVLTAQVVFSEIGPDFSAFPDENHFASWLTLAPQRDISGGKVIRHVPAAGRNRVANALRMAAQSLCRSDSYLGARYRRLRARLDGPVAVKAMARYLACLVYRLVTKGQAYVDRGAAHYEAKRQERERRALERRAATLGLTLVPAA

SEQ ID NO: 130031 - protein, 391 aa, unidentified
MIYIGIDVAKDKHDCFITNSDSEVLFKAFTIFNNLDGFNDLYQKIESVMDDVTKVKVGLEATGHYSYNLLGYLIDKGLPTYVINPLHTNLYRKSLSLRQTKTDKVDARTIASMLISDVNLKSYSDTSYHNEELKSLTRYRFDKVKERAKLKTSVSRLVCILFPELEKLVPTLHMASVYALLSEFPSAKHVATAHLTRLTNLLSESSKGRYGKDTAITFRDSARASIGSNMPAKSLELKHTIKLIQELDSEIDEIENEIKIIMDEINSPILSIPGINYRMGAMIIAEIGDFNRFDSPDKILAYAGFSPSTYQSGQLDGAYAHMEKRGSRYLRYALYNATKYVCHWDPTFAAYLAKKRAEGKHYNVAISHAVKKLVRVIYHLEKTKQQYIKAA

SEQ ID NO: 130032 - protein, 319 aa, unidentified
MFPIVVGVDIAKHKFDVARLETHKYKHKKFDNTPDGFAAFIDWLAIFGDNKILICMEATGAYSIPLAEFLVQSGYPVAVVNPARIKGFAKSELSRVKTDKADAKLIARYALEKQPSLWTPPPANMRELQALLRRVEDLLEMRQMEKNRLDTADASIAESIKTVLTPLEKELKATRKRIQRLIDQDPDLKRRRDLLETIPGIAEASSAHLLVALSEHYRFTNAKQAVAFAGLNPALNESGTWKGRTRISKMGDPLLRAKLYMPAVVAGQHNPIIRAFRLRLETNRKNGMAIVCASMRKLVHIAFAILKSGKPFDPHFSLA

SEQ ID NO: 130033 - protein, 338 aa, unidentified
MELYAGIDLHSNNNVLVVLDESDRVIYQKRLHNVLADILAALASCGGKIKGVAVESTYNWYWLVDGLQAAGYTVHLVNTAAVKQYDGLKYSGDFSDARHLAHLLRLGILPEGYIYPREERAVRDLLRKRSQLVRTRTTQILSIQNLLARNLAIQASGNLIKSWQDTHIDALELLPEQKLALKSNLALMHCVDEQITLLEKAILAKGKLKPEYQSLRTVSGIGEVLALTIALETGELTRFAEPGNFASYARTVNSRRESNGKKKGEGNTKCGNKFLAWAFVEAAHFAVRYDPVIARFYQKKCAKSLSVVAIKAVAHKLARACYHVMKKGEAFDVKRAFG

SEQ ID NO: 130034 - protein, 391 aa, unidentified
MIYIGIDVAKDKHDCFITNSDGEVLFKAFTITNNLDGFNELHQKIASVMDDVTKVKVGLEATGHYSYNLLGYLIDKGLPTYVINPLHTNLYRKSLSLRQTKTDKVDARTIASMLMSDVNLKSYSDISYHNEELKSLTRYRFDKVKERAKLKTSVSRLVCILFPELEKLVPTLHITSVYALLSEFPGAKHIATAHLTRLTNLLSEASKGRYGKDTAITFRDAARASIGSNMPAKSLELKHTIKLIQELDSEIDEIEKEIKIIMDEINSPILSIPGINYRMGAMIIAEIGDFNRFDSPDKILAYAGFSPSTYQSGQLDGAYAHMEKRGSRYLRYALYNATKYVCHWDPTFAAYLAKKRAEGKHYNVAISHAVKKLVRVIYHLEKTKQQYIKAA

SEQ ID NO: 130035 - protein, 356 aa, unidentified
MTNTIPMDVIIGVDTHKDVHAAAAISGAGVHLATITVPASSKGYGALEAWAKSMGAVQAFGIEGTGSYGAGLSRFLRERGHTVVEVNRPNRQLRYQQGKSDAVDAESAARAVLAGQAAGQPKSGTGTVEMIRHLKIARDTAVKARTQAMQTLKAIIVCSPDALREQLDQVSGKMTLLRRLVALRPGPLTSTLASAKASLRAIARRWLLLDAEIKQHDAHLETLTAARAPELLEAHGVASGTAAEMLLLVGDNPERIHSEAAFAKLCGACPIPASSGKTIRHRLNRGGNRQANAALYRVVIIRMRGHRPTLDYVRRRTAEGKSKPEIIRCLKRYVAREIFGYLCPKPALADVAATSS

SEQ ID NO: 130036 - protein, 393 aa, unidentified
MDKKVWAGIDAGKEIHWAHVLDASGAPLLSRRVENDEADLSELIEEVLALAEEVLWAVDQPGGSAALLLALLWEREQKVVYLPGLAVDRARDAYPGESKTDARDAHVIADQARMRANLGELAPTEGDLAEMQLLLARRRDLITDQTRSISRLRDALLSLFPALERALDFNNKGALTLVARYQTPAAIRRVGLSRLTTFLKNRSVKGAEGIASKALSAAKAQRATLPAQSVAASIVAELAGEVLALKERIGTLDRELQQRFFARPEARILASLPGMGPVLGSEFLVSVGDLCAFESADRLAAYAGLVPAAHDSGKRVGNDRRMRGGNKVLKRVFYQSAFASLRSSPESRAFYDRKRREGKRHTQSLIALARRRVNVLWAMLRDGTTFKSPPLRG

SEQ ID NO: 130037 - protein, 386 aa, unidentified
MQKLNDLSRSLTALEPDGTLIAVIEMSLSSWLVAGIVPGVERQPLKKLSVDESALLKLLHRWREEAEKAGRRIERIAVAFEAGRDGFWLARWLKARGIEAHVIHASSVAVSREHRRAKTDRLDTELLKRSFLGWLRGERDHCKMVAIPTMKDEDAKRPNREHDSLIGERSRIVNRMKAALVRLGIRGFNPKLKRATTRLDGLLTPEGEPIPPNALAELRRDMERRRLVNNQIRQIEEERLERIEQAPSDGPHVMVRLLARVMGIGIETADMLVHEVLSRNMRDRRAVARYAGLTGSPDESGRKRREKGLARSGNARVRRGMIQLAWRFLLHQKNSALTKWFRSRTENARGTRKPMIVALARKLLIALWRLVREGIVPDGVVLRAAQ

SEQ ID NO: 130038 - protein, 390 aa, unidentified
MSTKGAAKRTLIQVAVTTRDFMMGWTPPTALMCQGGGVEHHLREGSVSEAIIIGLDIAKYVFHAHGVDGRGRAIFSKRITRRKLLDFFVAQPSCTVALEACGGAHHWARLLTQLGHEVRLIPPAYVKPFVKRQKNDAIDAEAICEAAQRPSMRFVAVKSEQQQAAGLVFRTRDLLVRQRTQLINAIRGHLTEYGWIAPKGPSHVAMLAELLEEEEMASSLPEAARAMFRLMLDTLAGLGSKIADLDKEIARRAREDEVSRRLMTVPGIGPISATAIAALAPPAETFAKGRDFAAWLGLTPLQRSTGGKQKLGATSKMGERTLRRLLIIGSSAIVLQASKRGAPKGSWLEQMLARKPRMLVTVALANKMARIVWALLVKQENYRALVAAKA

SEQ ID NO: 130039 - protein, 371 aa, unidentified
MSANQNTIFVGMDVHKAAINVAVAASGRREPEAEWQLANEPRAVKKLMKKLKEMTHGTVMAAYEAGPCGYTLQRQMCEQGIDCIVVAPSLIPVKPGEHVKTDRRDARRLASLLQAGLLTEVCPPTPEDESVRDLTRAREDVKQDQMRARHRLGKMLLRHGFVFRDGKNWTKRHREWLRQVRLGDGTSQLVFEGYVLTLEQVEERLKRVDEQLEEVAQSERYRKQVGWLRCLRGIDTVTAMALLAELHDFRRFTNPRELMSFLGMTPSEHTSSSRVRRGSITKAGNTHVRRVLIEAAHHYRHRPSVNSYVRQRRNGQPAWVLAIADRAQERLHSRYFKLKEGYKKPHNVAVVAVARELVGFVWAVLRHGESA

SEQ ID NO: 130040 - protein, 445 aa, unidentified
MKDHSEAFIGIDTSKLRNAIAIAEGGRGGEVRYFGEIDSADAATRKLVSKLAVKYRSLTFCYEAGPTGYGLYRLIRSLGHECVVAAPSLIPKKPGVRVKTNRRDAVELAKLSRAGELTAVWVPDERHEAMRDLSRARQAAKKHLTSKRQQILSLMLRLGRHYPGKKTWGTAHMNWLTQQKLEHREQRIALEELLEGMRQEAERVERLEQAIREAVPEWSLAEVATALQAMRGIDLVAAVTVLAEIGDLSRFQSPRELMGYLGLVPSESSTGDKVKRGGITKAGNGRARRILVEAAWSYRHPARVSREKQPKVAAAPRRVREIAWKAQMRLCGRFRSLTRKGKLPSIVATAIARELSAFIWAINREVMAPGEGLEIRNVPIARSVTPCSPPSRRGLATADEVAGAPRRPALTAAARGVPATARVGTKKRAPRSNKETGSEAESTGL

SEQ ID NO: 130041 - protein, 427 aa, unidentified
MKKIKIDYLSTLFVGIDIGSRTNVISALNFDQDFLIRMIPVANAQGGAEQMEEMIAQVLSQHHEFRAVIIGLESTGFYGVHIANYLSTSEKLAPFSTKVYCLNPNEVKQYKKSFNSLDKNDGIDSFVIADFARVGRIHTEPWRGAQYLALQRLTRHRLHITECIAREKTYMLNNIFLKFSEFAMLNKGEHPFSDKYGATAEAVLTDYLSTEDIVGASVDELVAFISSKSRGRIADPEQTTYLLQKAAQDSYRLDQCLYEPLTVSIGCSFNCISAFEKELKAINAAIQRAVKGLNPTEYQILASVPGIGPVYASGILAELGTIKCFKSNDALAKYCGIVWKENQSGEFEAEDTPMNKAGNRYLRYYMIEAAGSVMQHCPEYKAFYDKKFAEVRTHQHKRALALTSRKLIRMLFGLLANGKLYSVEKSR

SEQ ID NO: 130042 - protein, 318 aa, unidentified
MTQSVGIDVGKEELVACIRDTDGKTAMPAPFPNTSIGLKKLIVHIKTEGIGTDDPILLESTGPYHWQAARTLADSGFFVKVANPLHTKQIARLSIRKRKTDNVDASHLAFLASQQYGYRFIETEEMAKKKALVRHFWKLRRTATNLMIHERYLKEYRHISRASISALLVKRCEKLKKDIVQEWSVGNDVKYLDSIPGITPFLAATILAELMPLERFQRIDQIIAFAGLDPSVKQTGGKRGTHGPISKRGSPTLREALFLAAFGSFSKGLMRGVYKRYKDRGLHHNAILCILARKILRIAVALLKKRRVFDPARLLTGT

SEQ ID NO: 130043 - protein, 335 aa, unidentified
MQYTCFIGVDVSKRQLDIACLQNEKPVHFYACKNDEASVTTAFKKMFAELHLEIEQTLICAEHTGHYSNILTNCMVKYGYQFWLESPYQISKSQGIQRGKSDQVDAERIAIYARRFSDKASLVRPSNTCVEGLSYLASERSLLMADLAKYKSQITDHKMFINKLLFKEREKRLNALIKLLHKQIKAIEQQMDLLVLQDETLKKQLSLLLSIDGIGKQVAFNMLIATKAFTKFETARKFACYIGVAPFQYSSGTSIRSAKRVSKQANQKLKSLVHMAALSVIQKQGELRDYYTRKVSEGKNKMSVINAVRAKLISRMFAVINSNKEYEKKYSIALV

SEQ ID NO: 130044 - protein, 425 aa, unidentified
MANRIAGIDVHKRVLAVVVADVSIEGEYQFERRRIGTRPSELRAMAEWLVAEEVEEVVMESTAQYWRPVWAALEAIWRPSRRNREDAGPMAGALHLAQAQSNRGAAGRKKDFPDAERLVKRLAAHELTLSFVPDGEQRLWRTITRTKFQLTCNRIQLRNRIECLLEEAEVKLSSWVSDLLGLSGRRMLDALANGETNPTTLAALGSPRLRATPEQLADALGACREMHSTHRRLLKMMLQQLRLLDEQITELDQEMAKLLSAHEQAVKRLAEIPGLGVDSAQQIIAEVGPQAATFPSAKHLASWVGACPGEEESAGVNYSHRSPKGNRQMRRLLNQAANAAAKTKGSIFEVVYRRLVVRLGHAQAIGAIAHRLCRLVWLILHKGVRYEEHGPAVVRSRAQARAAKMIRDLRKLGYHVQIVQAPSET

SEQ ID NO: 130045 - protein, 356 aa, unidentified
MSRDVKYIGMDVHKEAVVIAVLNSSGKLEMESIVETKASSILQFIHGLRGELHVTWEEGTWAAWLYDLLQPQVAQVLVCDPRRNALLKEGNKSDKVDARKLADLLRTGMLRPVYHGEHGLRTLRELARGYQTISKDLNRVMNRVKALYRSWSIPCAGTQVYAPRYREQWLQKIEHAGVRRRAELLYQQLDGLQALRRTLRPELLAESRKHKAAKLLRQIPCIGPIRAARLIALMQTPHRFRSKRQLWTYSGLGIETRDSAQYCYVHGQLQRTKKPQQIRGLNQNHNHEMKEIFKGAATRASCGVGPLRDFYVALLAKGMKPEMARLTLARKIAAIALTLWKKEERFDAEQLKPQAA

SEQ ID NO: 130046 - protein, 482 aa, unidentified
MKKKNIYVNQSQELLSMFEEAGNNEKIMCVPIDYAKKDHIVMFCNGYGHILRKPFSIKNSPEGIAYLTEQVTRSCSHRCIDPKHVFFGGEDVGSYAENFANTLRSGGWIVAGVNAHDAKEQRANIQASTDRLDLMGIATMLLNRRANCSPAQSGIYRNLRTLVRHRRKLVSMSTEERNRIHTVVDRLLPGFLDEKNSGIPPFSESSLYLMENRFSPLQIRRRKRHKLIEVLHRYGTSKPEDTSARLQEYAACVLNTPDEYIFTLQLSLVQHVKHFRCLQDSINQLENEIAVWLAQTQGAFLTTVRGIGIVLAAGVSAETGDPYKQKPLNNLVSYSGIIPRVKQTGGSEGKTRTGKVAKRCNRILKDYVVQSALHMGLHGPEDLMADYKRREAAGQHADFGIGRRYLRMAMCLMRTSQIYMPQQLRNTKVKPEERAGYYLMTWPYLRNKWNKAGALEAAFKNDRPLGQWRNMVQELYEIKLKL

SEQ ID NO: 130047 - protein, 426 aa, unidentified
MAKVEHTADARVLVGIDISKHRHEVLIAAPGKQRRRKLTITNTIEDFRRLISILSEFGLPVRVGFEATGNYHRALMHHLGDAGFDLKLVSSVALARTREALHNSWDKNDPKDAQVILHMLEIGAVQVFHDPMVAGTNDIQELSKTHEVVSRAKTELWHRILTHYLPLYFPEAERFHRSSRTDWFLAFLEAFPSPHMITALPKESFVEAAWPVLGRRVGKSELLSDIYETSKASVALPVLPDSEAIRMFRLVLAEGRSLTRQRNEIEDRAVSLLSDLPDFRLLTTIPGIGPINAMTILAEAGDLRRFRHHRQFLKFCGMDLATVQSGMFRGQSKISKYGNARLRRVLWMAGQTAVLQRANSFRDKFERYISQDRHNPHLRRKACTAVAAKMARTIHAVVKYGEPYRPFFEGASSGGRTSLSKGRGGA

SEQ ID NO: 130048 - protein, 374 aa, unidentified
MTQIMRIGMDTSKSVFQLHGVDAAERPVLRKKLRRNQVLEFFGKLPPTRVGMEACGAAHHWAREIGALGHEAVLLPPQLVKPYIPRNKNDAADADGICEAMSRPRMRSVPVKTAEQQAALMLVGVRDQLVARRTQLSNTIRGYAAEFGLVAAKGLDKIEPLLARIAAARLPDLAKEMFATLGADYAELGMRLSRLEGRLRAWQRQDETSQRLMEVPGVGPIAAALLVMKVANPRAFRSGRDFAAWLGLTPKDHSTAGKQRLGVITRAGDEALRRTLVVGATAVIQQIRRGRGRGSPWLTALLARKPPKLAAVALANKTARIVWKLMVSGEHYDRERAAAARAERSAALAEGFALRSALAVATVRGDAAATPRET

SEQ ID NO: 130049 - protein, 313 aa, unidentified
MMIDRTVLGIDISGAHLDVFAHPEGRARRLTNDADGIAAVTALAARRQAFVVIEATAPFDQPLIRALEAAGLVFHRANPRRARDFARSAGLLAKTDAVDARMLALYGTALALRPTEKVAPARLALQGLVSRRDQLVAMRKAERVRLRTMSEPCIAESHLAVIALLDAQIRTIERRIEATVAADAALARQRRVLRAAPGIGPVAASVLLASLPELGRVSRRAIAALAGLAPIARDSGLLHGRRCVQGGRKRVRDALYMAALAAVRTTPWKALFATMTTAGKPAKLSLIAIARKLLVTLNVAIRTGEYQPRPATP

SEQ ID NO: 130050 - protein, 340 aa, unidentified
MEHIAAVDLHSDNGYYGIIEPDGKRVYQKRLPNDLSIVLHELEPYRETIRCIVIESTYNWYWLGDGLREQGYRVKLANPAKFEKYNDLKYTDDKTDTFFLTEMERLNILPTGHIYPREERGIRDLLRRRMLLVQQKTSHILSFQSLISRQTGGSITSNEIKKLETEDVEKLLAGQEKHVVFAGQSNLSVIGFLQERIRLLEKMVLASARLRTEYEKLQSIPGIGKILALVIMYETGAIGRFKAAGNYVSYCRCVKSNHLSNGKKKGSGNRKNGNKYLSWAYVEAANYSRRYCEEAKKYYQRKLAKGNSAIATKALAAKLCRAAYFIMRDQVEFDVTRMFG

SEQ ID NO: 130051 - protein, 357 aa, unidentified
MKIVGCDLHARQQTIAMVDAETGEFTEKTLLHEGNVIREFYAALEGPVVVGIEATGAMQWFLELLEELGIECRVGHPAKIRAKETRKQKHDRRDARLILELLMEGRFPEIWMPSIEQRDLRTLLRDRHQWVKMRARLQHTLQAIALNHALRQGHTLWSIAGQGALQALALPPYTSQRRTELLSLYVQLQKRIQELDQIVEAQARQRPQARRLLTHPGVGAVTALATEVFLGDPSRFATGNEVASYIGMIPCERSSGKRQRLGKLTKEGNSLLRYLWTEATLHAVQKDPELKRFYRRKLIQKGMGKARIAAARKLGIRLWIMMRDRIDYEEFCRRGKLRQKGEAPAGMPDFNSGPARQ

SEQ ID NO: 130052 - protein, 342 aa, unidentified
MRIIRIGLDTSKHVFQVHGVDENETPVLRRQLRRSEVEKFFAKLAPTRIGIEACGASHHWARRLRGWGHEVLLMPPQYIKPYVKRGKNDAIDAEAICEAMSRPTMRFVTVKSAENQAALMMLGVRDLLVKQRTMLINAIRGHAAEFGVTAAKGSKQVVELLQRLADDAEVPALAREMIGVMAAQLDAVEAKLKAIEARLMAWHRQNQTSQCLATIPGIGPIGGVSFALRVSDPKAFRSARHFAAWVGITPRENSTGGKQRLGKISREGDEGLRRLLVLGATAVIQQADKGRQGKKGRARPWLSKLLARKPKKVAAVALANKMARIIWAMMVSGETYRQPQEA

SEQ ID NO: 130053 - protein, 357 aa, unidentified
MSKQVQYIGMDVHKAMTVIAVLDSAGKTRAEATIETKTATMVQFLRGLEGVLHVTLEESPYSAWLYDVLSPHAAQVVVCDPRKNAAYIKSGNKSDQIDAHKLADLLRTNMLSAVYHGNRSVQALKELARGYLCLVEDATRVMNRLKAIYRGRGIACGGTRVYSRNHRGEWLEQLREAGVRRRAELLYQQLDLLLALRRQAKDALLAESRKHAAQKLLCTIPGIGPLRAALLIALLQTPHRFRSKRQLWAYAGLAVVTQASAEYDLAGGRIQRSKKRALVRGLNRNHNPKLKEVFKGAAATVSARSAVWQEFYSQRLAQGMKPELALLTVARKMATIVLELWKKGERFDAQHLNAQAA

SEQ ID NO: 130054 - protein, 345 aa, unidentified
MNISRVGVDIAKSVFHIHGVDRHDQVQWRGKYSRDKWLDAISKRVPVGAEIAMEACASAHHWARELQARGYHVKLIAAQFVKPYVKSNKNDRVDAEAICEAMDRPTMRFVAVKSVAQQDVQAAHRIRSELVQQRTAKANQIRGLVGEYGLVAPVGIGQLRAALPRWLEDAENGLTDDFRILLAGLAEDLRHLDDRIATVTARIERHAQTDPVAKRLLSLRGVGTLTASALVGALGDAKAFQRGRDFAASLGLTPRQHSTGGRDRLLGISKRGDSYLRTLLIHGARAVLRGSDSKSDNLSHWVRQLAERKHANVAVVALANKTARIAWAITCHDSDYDPELSARAA

SEQ ID NO: 130055 - protein, 320 aa, unidentified
MSAFSVTVGIDVAKAHVDVCVLGAASGVQRFSNDADGHSALAAALQPLSPALVAMEATGGYEAALACALQACSLPVAVLNPRQARDFARSMGRLAKTDAVDARMLAELAAVLLRRGDLTRFVRPVADQCQQWLAALVTRRRQLLAMLGSERQRLQITPKKLHPSIEAIVAAIKAQLDDLEAQMVGHVREHFGQLNELLQSTSGIGPVASATLIAQLPELGRLNRREIAALVGVAPMSNDSGNRKGRRRVQGGRFEIRRVLYMATLSAARYNPAIRAFYERLKATGKLPKVALVACMRKLLTMLNAMVRTGKPWDPSLHRA

SEQ ID NO: 130056 - protein, 405 aa, unidentified
MSVVAAPVSSSTVVVAVDVGKNCVALSVTDANRHRLFGPVEFAMTRPALERIVARIGDVLPPAGLVKVGVEAAGHYHLPMITGSAWPAGWEVLELNPAHVGEQRRVAGRRRVKTDAIDLEAITDLVLAGRGMPVTAREEVMSELTAWAAHRSRRVGTRTATKNQLLGQLDRSFPGLTLALPDVLGTKVGRLVAAEFADPARLAALGVTRFVRFAAHRELRVTRPVAERLVTAARDALPARDAVIARRVLAADLALLADLDQQISQAEAELTELVPASPFRTLTSVPGWGVVRTATYGAAVGDPTRWPGPRQLYRASGLSPMQYESAGHRRDGAISREGSVELRRALIDLGIGLWHSDPPARAYAAGLKARGKHGGIIACALAHRANRIAFALTRDQVRYDPTRWV

SEQ ID NO: 130057 - protein, 338 aa, unidentified
MTQHKIIGIDLAKNIFFLFEINHKGKNLSRKKLQRSKLLNYVVSQSPCVIAMEACSGAHYWAREFVKFGHEVLLYPPQHVKSQRRKQKNDYNDAEAIAELALYQRHPAVPHKSIEQQDIQSLIRMRRLCVTERTRLINQVRGFIAEYGIVLPKGKTSFRKAIPEVLEDVENQLSPILRELLSRQYERYLYIDEQISWFEDKLNQTIKQFDNAKRLMSIPGFGPLTSQAVAVWLGSGKQFKTGRDASAAMGLVPRQDTTGGNVVLLGITKQGNTYIRSLLVHGARAALRRAKFKSDKLSKWMLDLQERRGPNRAAVALANKLMRIAWAVIAKNEEYQPA

SEQ ID NO: 130058 - protein, 338 aa, unidentified
MTIIATGIDLAKNIFAVHGVNLGGSVVLRQPKVARAKLGAMIAALPPSVIGMEACSGAHYWARQFQAHGHTVRLMAPKLVTPYRMTGKRGKNDAADAAAICEAMQRPNMRFVPVKSEDQQARLMVHRARQGFVVARTACINRIRGLLSELGIVLPLKAEVVRHEARNHLEKLPGFANLVIGDLLSEVAHLDERIKQYDVHIRTMARDCNAAQQLMQLMGIGEVTATAIVAMVGNAAEFSCGRQFSAWIGLVPGQYSSGGKARLGRITKAGDAYLRGLLVMGARAVLNAAKTKNDSLSRWAVALEQRRGYWKAVVAIAAKNARMAWAVLTKGESFKRPA

SEQ ID NO: 130059 - protein, 347 aa, unidentified
MSFIGVDLHQNSFTVCRRKTDGAESFETLTLSAADLERFCLSLDADDELAVEATGNSAWFRDCVRPCVGRVVVVNPSQFKVIRKSVKKTDRNDAAALALFLAKDMLPETRARTQGENELASLTQTRDLLVKQRTRLLNKIHALHVRKGLKLRKESLGSKRALASIDLALFSACEVIEIEVLREQALSLTASLARLDREIEGVASTFKGYAGLTSIKGVGPRSAAVLLSTIGNVHDFESADKLAAYFGIVPRVSQSNETDNRGRITKRGNKLARTTLVQCSLIAMRYSSYLKTYYDRIRQRRGTGKAIIATARKLLAIIYDTLKNGWVFDDFTRFSRRDPLIPAGQTS

SEQ ID NO: 130060 - protein, 439 aa, unidentified
MEEVTDEPLYRDRVCGIDIGKAGLVATIRVPSDKNPARRARETRSFGTTKREVLALADWLRCWQVPAVVMEATGDYWKGPFYRLEAEGFDCVLADARQVKHLPGRPKHDPGDSKWLAACFERGAVTACFVATEEFRIIRLHTRYRRDLTEERTREKQRAEKLLESAAIKLSSVVTDLHGVTGRDIMNHLIAGERNPKVLAQLARARARRKIAELEAALEGAEFFSAEHAALLAAMLGRIDRLNADIARLTEVIERLLAPHEEQLQQAESMPGWGRRTAQDAIAETGVDMTRFPTGGHLASWAGRTPLDNSSGKRTGKAKAKKGNRYLSGLLGETAVAAGKTQTREGARYRRLARRRGKAKAQVALGNTQLKVYHKLLSSPGTRYTDLGPDYYERQASTRRQIAHHVGKLGALGFEVTLCRIPEPEPDPDPGQADSTQAA

SEQ ID NO: 130061 - protein, 373 aa, unidentified
MKKTTRWVGLDVHAETIAIAVAEKDGTVHSVGTIPNRADAVRRAVKKLESGGKLQVCYEAGPCGYGIYWQLAEMGIECDVVAPTLIPVKTGDRVKTDRRDAEKLARLLRGGDLTAVWVPDPEQQALRDLVRARHAAKRDQLRHRNRLGKFLLQLDVRRPDMIVAWGTKHMVWLEGQQLKHPSHQEVLVDYLNEVKRAKERIERLERSIDAGIERAPKHLQELIAALQTLRGVAKIGAATLATEVGRFSRFESASQLMAYVGVVPSEHSSGGSTHRGSISKTGNARMRHVVGEAAWSYRHRPSNGPALKKRQQGQSEDVIAIAWKAQHRLHQRFQKLSAKGKHHGRVVTAISRELLGFVWAIGRKIESELDAAA

SEQ ID NO: 130062 - protein, 347 aa, unidentified
MNFYNNTHPYYCGIDLHARTLYVCIIDQDGNICVHKEISADPNKLKQLLEPYIGNIVVGVECMHCWYWVADFCDDIGVDFILGHALYMKAIHGGKAKNDRIDSFKIANLIRGGNFPVAYVYPKDMRATRDLLRRRMKIVRHGADLKAHIVNTTSQYNLPTNKVNLKNIAAREQLKSTFPETPVQKNIDLDLVILDCYAEQLSKVEWYIETQARQHKPIHLHLLKSINGIGRILSLTIIYEIGHIERFDSVQNFASYARLVKCKAESAGKSYGTQGNKIGNAHLKWAFSEAAVLYLRGNDKAKNYILKLQKRMSKGKALSALAHKLGRCVYFMLKNETVFNEDKFLKG

SEQ ID NO: 130063 - protein, 353 aa, unidentified
MMIYGGLDLHCSNTYVCLIDEKDRPLVRRKFPNDLGLLLKELEPYREYIDGLVVESTFNWYWLVDGLIESGYNVHLANPSGNKSYEGLKHTTDSDDAYWLSHLLRLGILQEGHIYPREERFIRDLLRKRLFLVRQRTANILSFQSLYNRHTGQSISGNAIKKLTPDDIENLFSNEHVILSARANISTVVFLDEQIRLIEKEVLKVTKLKPEFQKLLTVPGIGKILALTISLETGDIGRFNKVGNYASYCRCVGSRRESNGKKKGENNRKNGNKYLSWAFVEAANFCNRYEPLAKAFYQKKASKTKKVVAIKALAHKLARACFYIMRDQVDYDPLKIFGKDKNGCGSEPVEGLE

SEQ ID NO: 130064 - protein, 412 aa, unidentified
MEVVYPCCCGLDVHKKSITACVLWAEAKGKSRKEKKRFGTFTHDLLQLADWLEQCGVTHVAMESTGVYWKPVWNILAERFEVLLVNAQHIKAVPGRKTDQKDSEWIADLLQHGLLRGSFVPPQPTRELRDLTRYRVSLVQEINRIANRIQKVLEDANIKLASVATDALGASGRAILEAMLAGEQDSARLAEMSKGLLRNKIPELKLALEGRMTEHHRFLLRQLFEHLRFTESKRSEIEQEIDKRMLPFEDKVTRLCTIPGVDRVTAWGMLAEIGLDMNQFPSSGHLASWACLCPGNFESAGKRLSGKMRKGNVSLRRCLSQAAWAVSMTKNNYLSALYRRIAARRGAKRAVMAVAHALLVIGYHMLKRKEDYRELGADHFDRIDANRIRRSLVRRLERLGHKVTLEPLAQTA

SEQ ID NO: 130065 - protein, 355 aa, unidentified
MPTQMNNLNFEGQNIYAGFDVHLKDWKVTILSEEMMLKSFTMPPKPEVFSDYLLRNYPGASYHSAYEAGFCGLWAHYQLCELGIKNIVVNPADVPGTQKDKLQKEDKRDSRKIAYALRSGNLTAIYTPTESTLNDRSLVRSRKNLVNDMVRFKNRIKGFLHFYGIDMPEEFANSRKHWNRRFMVWLESIHMKELSREMALKHQINEVRYMKELLKCILLDIKHLSQTDKYRENVSLLRSIPGIALLTAMVILTEVEDINRFPNSERFASFIGLIPMTKSSGEKQKVGEITFRAHDFLRSIIIESSWVAIRYDPALLMAYQKLIKRMEHNNALIEKQTTYKTISISGSDRCPRPAA

SEQ ID NO: 130066 - protein, 563 aa, unidentified
MLGVANTRAEAQTTTKDHQGNLLTLVRKLWVLAVAAFFASCESWEDNKTYSGDNSPGYEPDQPYYKPLGETRATPVRKLGGQVTTPTKAKDRRIRMIMQVQTNHAGIAERYYVGIDIGYREHVAAAISKSTFLQGAVRWKKAKAIHFASSRGGLDKLHQYLLGFSNDPKAFLILCEPTGGHYGVSLYQDLLKSKYCPMLVDNSTTRHMREKIFGSLPKTDEMDARVMARIAYLHDVVGEEFTLKVLRLPNPDQEELLALCRNNWKLNGMVTRVRNQFAQLMAVVFPELKFFFEGSVSSPTPIRLMASYPSPAEIANAVPEELYNFLWKARSYQHAKRVQELQDLARNSSGSLPDPGRAWRLAWMSQFLLSNFELLSQLDKQIEQVCSNHPNYTLLMDIPYSGPNTLGTILSITGNCTRFRNYRQYVAYTGYFAGLERSQTIDHTRMSRRGNRNLKRAYFQIVAPMVWFDHGDNFYKNLYKRKMAEGRAWYVAMPFACAALARHIYHCLKFQEPYQLEKAFGRVLTSHVEDLAKSKFQDDLEGTFEVMDAHLSQQVELQPPLRK

SEQ ID NO: 130067 - protein, 367 aa, unidentified
MQNTIVHYEGAASLEAAATKVKPGGAQIKIGLDVHARLYVAVAQYDHLLPKAAQRLSPCEFVPSVEALLARGHSVHVVYEACGFGFGLYRQLIAAGAHCYVVAPRKLDEECARVKTDPRDATTLCQRLSRYLEGNTRELALIRVPSEEEEQARHMSRQRGQLVHHRQKLEAQGRSLLISHALPAPAHWWKEQSWTRLGRHLPAWITIRLQTARPALLSLQQQVNALTSELEASAPSILPRGVGKLTSVVLTREICDWHRFNNRRAISSYTGLCPGERSSGSKRVPGSVTKRGNPRVRAALVECAWRMVRFQPQYPPVQKRLAILSKGSRALGAVRKKAIVAVARRLAVDLWRLHTGRCTAEQLGFTI

SEQ ID NO: 130068 - protein, 326 aa, unidentified
MITIGIDVSKAKIDCLWLRDVTTAKVKSKVFKNCADGHSELRQWATKNTKTTLENIHFIMEATGIYHEALAYSLYDAGAKVSVANPAQISSYAKSFGVRSKTDKKDSMVIARFGVTQQPRLWQPEPSEIRTLKALISRYEAVSKDIQREENRLEKATVGLVSDEILISIETILIQLKIEKKRLEDLINKHLNKHPNLKKDQALLESIPGIGPIVSRLMISVIRSREFVAAPQCAAFLGLVPVQYESGSSVRGRSRLSKAGNASIRAKLYMAAIVAIQHNPDIKQQYERLLKNGKSKMSALGAAMRKLVQICFGVLKHQTPYQSQVN

SEQ ID NO: 130069 - protein, 364 aa, unidentified
MKKSSKTQRGATVGESRPTQVVGLDLGDRHSHYCMLTGTGEAVEEGRIQTTAAAMEKHFASESRMRIALEAGTHSPWVSRLLKSYGHQVIVANPRKIPTLTKSESKNDRNDAEQLARMAAFDPKLLHPIEHRSPERQQDLNLIHTRSVLVRARTMLINSARGLVKSAGQRLPACSSEAFPEKAPAAVPPSLKAACTPLLEQITQMNQTITAMDKQIDQLDKKYPEITILRTVPGVGPVVAACYVLTLDSPQAMETNRQAGAYLGLRPRQQKSGDSDPQCNITRMGNTYLRSLLVQSAQYILGRCGPDSELRRWGLKLAASGGKRGKKRAVVAVARKLAVVLLSMWRNRKKFEPFPQSVAQLTTA

SEQ ID NO: 130070 - protein, 344 aa, unidentified
MDQIIRIGMDTSKQFFQLHGVDSAERPVLRRQLRRSQVLGFFAKLPPTVIGMEACGAAHYWARELRKLGHEVKLMAPQHVKAYVKRNKNDGRDAEGLCEAMSRPTMQFVPVKTEEQQAALMLAGVRQQLIARRTQLSNTIRGYAAEFGLTMAKGLDKIEPLLARIAQDAGLPMLARDLLAIQGREYARLQVELKVIEAKLMAWHRGNADSRRLAQIPGIGPIGATALVMKTPDPRAFASGRHFAAWLGLTPKDHSTAGKTRLGKITRAGDEMLRSVLVAGATAVIQQAMRGRGHPSPWLIALLKRKPPKLAAVALANKIARIAWKLMVTGESYDGARMLGAIAA

SEQ ID NO: 130071 - protein, 429 aa, unidentified
MEEVDEVELMVQRVAALDLGKATLEACMRVPHPGKPGRRMQEIRGYATTTAALLEMAIWLRQWGIERVVMESTSDYWKGVYYLLEAEGFDCWLVNAREVKNVPGRAKTDRADAVWLAKVAERGMCRPSLVHPPPIRRLRDLTRYRRALVSDRSREMQRVEKLLEDAQIKISSVLSDIHGVSGRAMMEALIAGQRDPWSLARLAKGNARKKTDRLEEALRGFFTDHHATILQMMLDNIDRISAQIAALDARIAETIGPFSRQAAQLADIPGIDTVAAAELIAEIGVDMTRFPTAAHLVSWAKFCPQTHQSAGKSRSKARGKGNPWLAGTLGRIVFSASHTDTFLGARYRRLARRRSKPKAIVAVGNSVLTVVYHLLSDADLSFFELGPAHYESRINKHRRARDLATQLQALTGQHIVIRDGKAIITDAAA

SEQ ID NO: 130072 - protein, 344 aa, unidentified
MQIKSIGIDLGKTTFHLVALGSRSQVVVRKKFSRQQLLLYTANLPASLIGMEACVGSHFLGRALREQGHEVRLIPAQFVRPFVKSNKNDYRDAEAIAEAVERENMRFVPIKTEDQLDLQALHRVRERLVSRRTSVINQIRAFLLERGISFAKGPASLRRQMPEILENADEKLTARMRRLLDFLWQEWKHLQLQIESLSEDLEKIANSDAACTRLQQIPGVGPLVATALVSAIGNGAAFHKGREFAAWLGLVPGQWSTGGKTKLLGISKRGNPYLRKMFIHGARAAVLRVKREGSYLGQWMSGLESRAARNVVIVATANKLARISWAVLSSGENYRPMPAVAIAS

SEQ ID NO: 130073 - protein, 339 aa, unidentified
MTVKTVGLDLAKDVFQVHGISENGRVVFNKAIKRAKLLRFFETLPPCTVGMEACGSSHHWGRQLRKLGHDVKLMPAGYVKPYVKRGKNDAVDAEAICEAVRRPTMRFVEIKTEEQQAILSIHRTRDLAVRQRTQMANMIRSLLREFGHILPIGIEAVTAFAKRHLDGDQPEMPEIANGMLGMQCYQFIGLNARIDGYSKMIEQHVLLNADARRLTRMPGIGPITASAIVATIGDAKQFRTGRDLAAWLGLTPLNKSSGGKERLGKITKQGDRYIRKLLVVGMTSRAVMAKRSPEKVDLWTAKIIADKPFRLATTAMANKAARAIWAMLTKKQEYRQPAF

SEQ ID NO: 130074 - protein, 343 aa, unidentified
MGEVSTIGLDIAKSVFQIHGVDVDGAVVIRRRVSRAKVSEFFAALPPCLIGIEACPTAHHWSRKLQALGHTVRLMPPNYVKAYLKRSKNDANDAAAICEAVTRPSMRFVPTKSEQQQSGLMLHRGRQLLVRQRTMLSNAIRGHLAELGIISAKGRNGTVELLEVIANQEDDRIPAVARFSLEVLARQYAAIAAEIGVIEKRIHAWHRSCEESRRLEEIPGVGPIVATALVAEVGDWRAFASGRSLAAWIGLVPRQHSTGGKERLGGISKQGNRHLRWLLVAGAMAVIRYARQHGTKRPWLARLMATRPIKVAAVALANKIARMAWAMMVRGERYKEPTLMIAA

SEQ ID NO: 130075 - protein, 349 aa, unidentified
MIRTPPRDAAVFGVDLGKNVFHVVSLDARGAVVQRVKFRRDTLLKFFERAAQTIVGMEACPGSQWLARKLQAMGHQVRIVPAQFVKPYVKSQKNDTVDAEAIAEAVTRPTMRFTQVRTVEQVDLQALHRIRDQLVSSRTRLINQVRAFCLEYGIAICQGAGVFRLDLPRVLADETNDLSPAMRRMLTELFADVARLDQRIAGVAREIEDLAARDDRARRLMTIPGIGPLGATALLAAIGDGRQFRRARDLAAWLGLVPREHSTGGKTTLLGISKRGNRYVRRLLIHGARSCVTHLDRARDRLGGWLDALQSRMHVNKVTVALAAKIARTAWVIITKPGALYERRDPAVA

SEQ ID NO: 130076 - protein, 351 aa, unidentified
MQKILYVGLDVHKTSISVTSAEEGRDGAVRFIGAIPNTPADVIKLAKRLAREGHRLEFCYEAGGCGYGIYRQLLDLGHGCTVAAPTLIARKPGERIKTDRRDSQKLALQHRFGDLTAVWVPDPVHEAIRDLVRARMDAVMQLMRARQQCLAFLLRHGRHYGPGKKNWTLRHRRWLATQLFEQTTHQIVFQDYVESVWSAQDRRDQLESRITTMLPEWAMAPLVEALRTIRGIDLISSVIFMAAVGDLGRFETPRQLMAYLGLVPSEQSSGNRVRRGGITRAGNGEARRMLVEAAWSYRYQPRLVGQDGSGRAPAKTSAGHCLEGTGPSLRSLSQACSRRKEAHCGRHRDRP

SEQ ID NO: 130077 - protein, 342 aa, unidentified
MAEITTVGLDLAKNVFQAHGADASGRAVLRKKLRRDQVLAFFSQLPRCLVAMEACGGAHFWARELARLGHDVRLIPPAYVKPFVKRQKNDAADAEAICEAALRPTMRFVPVKSEEVQGATMVFRVRELLIRQRTQAINALRGHLTEFGLVVPQGAAKAARLIALVEDPDSGLPAEAIATLTVLVTSVTHLEEEIGRLDAEIARRAKENEVARRLMTVPGIGPLIATAIAVLAPPPETFRCARDFAAWLGLTPRQHSTGGKQRLGATTKMGERSLRRLLILGANSVIIKRHVHAAAKPGTWLGRMLSRKPPLLVRVALANKMARIAWALMARGGVYRAPAVAV

SEQ ID NO: 130078 - protein, 338 aa, unidentified
MGKITTIGLDLAKNVFHAIGCDEHGKVIKKKMLRRSGLLAWFATLPPSLVGMEACASAHYWARELKALGHQVKLIPPQYVKPFVRGNKNDYNDALAIAEAVTRPEMRFVSIKTPEQQDIQALHRLRERRLRDRTALCNQLRGLLGEYGLVFSRGVNTLRQRIPEILEDSENGLSDFFRGLLSQGYQQLTELDAHIDAYTQTLEAHSKRNDACQRLRTIPGYGPIVSSAFYSVVGNGEAYRRGRDVSASLGIVPKQHSSGGKEVLLGISKRGDRYLRSLLIHGARAVVIQAINKEDALSRWINKTRAARGFNKAVVALANKLARIGWAILANNTVYQAR

SEQ ID NO: 130079 - protein, 387 aa, unidentified
MNHLYSNVACGGMDVHYKFSNVTFRDKDGCVVRRERLSHPRRDQLRERLSRWPRGIPITLEASFGWGWLSDLLSEAGLDPHLSNCYKLEQMRKARGWVKTNKKDADMLSLLPFETTNWWEVWRAPPEVRDRREQMRFRADLVGSQTAVKSRIHAIFHRHGLFHEFSDLFGAQGRRFLGELCIGGSEYLSPQALQVLRGQIRLLDHLRSQLADIAHILHRQLLNTPLIRLLKKIDGFGLILSNVLEAEIGRIERFRNHKALASYSLLAPRSNDTGQDDPDHSPRGRHLGRRGNRTLKWAFIEAAHGAVRSGGRWREMFDRVTCGGRKDRNRGYIKVARELVKVVYVVWSKGLDYQQNPPAQPGSGKNKKKSRSGTGQLCHPMVHASTA

SEQ ID NO: 130080 - protein, 343 aa, unidentified
MQTVTTVGFDLAKSVFQVHGVDAAGQVVIRRQLKRRQVLAFFQKLPSCLIGIEACASSHHWSRQLQELGHTVRLMPPAYVKPYVKRQKNDMADAEAICEAVTRANMRFVPTKTPEQQSCLMLHHTRHLFIRQQTAVINSIRAHFAEFGIVAPVGRKGVTELLGVVADPNDRRVPEIARACLAALGTQLLSLKEQILEFDRMIMAWHRSNQTSQRLHYIPGVGPMLATALVASVADPSTFRSGRNFSAWIGLVPKQHSSGGRERLGSISKQGDRYLRSLFVAGALSVIRYAKIHGTGHRPWLTALLRRRPTKVAAIALANKIARMAWAMMAKGERYKQPAALAR

SEQ ID NO: 130081 - protein, 356 aa, unidentified
MRREDKLKGFENQVFYIGIDVHKRQWHVTIRNNNISVITKVMEPSAEKLSSYLNRTYPEGSYYSVYEAGFSGYWIDRELKSCGIKNIIVAPTNIPTSTSEKLRKTDAVDSRKLARELEKGNLVSNYSPTISEQELRSYIRLRYQLVKDQTVLKNRIKGYLNFYGHKFPEDYQNRHWSKIFIEKLRILEFSTLLGKKQMNMYLDSLQSKRTQLLEITREIKNYIKEGGLTEKISLLRTVPGIGLTTAVTLLSEIIDINRFGNFNKLSSYLGLIPAVRSSDQKEFVLGLKIHHNKLLRQLLVEAAWMAIRKDPALLKAYGNYKKRMSPQEAIIRIAKKLTSRIYYVLRTGNSYEISKG

SEQ ID NO: 130082 - protein, 409 aa, unidentified
MNKVDIAPFEVFCGIDVGKSLNHIVALDRYDDKPLINRKVPQEEAEIRAALEEAGDFGLALVIVDQFGAFGRLVVGVAKSMDIPVAHMSPRRFRQVAETYGEDKFDEKDAYILADASRTTPRNIEFVGNRAESMAEIKVLSSRRDDIVEERTRCYNRLHDFIHQVSPPLEELFSKRKLHNDLEIRLIARYGGPIGFRQAGRARASTWAAELKYHCVDGPKKVEQVFDVLDRQTVMLPGAAVIEEQIRSIASRIIELLAEEKRLNLMIEQRAKMIPEVDLLQSIPGVGQVYAALIAVEIGDIGRFRDSNHLASYAGVAPRKEESGTSVHKRRKRKGGNRRLKNALMQSSQRSVQCDPLARAYYERKRAEGKKHLQALRALARHRVTVIFAMLNEGTFYEPPVEVDENGRG

SEQ ID NO: 130083 - protein, 340 aa, unidentified
MTEPIAMVGLDIAKSVFQVHAADQYGQPVLRRRLRREDVEPFFRALPNCQIGLEACPSSHYWARTLREQGHDVRLLPAQYVRPYVKTNKNDAADAEAICEAMTRPTMRFVPIKEEDQQEILVLHRVREILMRQRTQLINGIRGHLTEFGIVGPQRAHRVQLLVDIIRDDSDRRLPQAARLALLHLVEQLEQVAEKLGAIDKDLVQLARENDTCRRLMTIPGVGVVIATAMVAATRDPEDFKSGRHFAAWLGLVPRQHSTGGVDRMGGISKRGNGYLRRLLIHGSRSIMRWRSKSWVWLAKLRARRPANVATVAVANKTARVIWAIMRFGGVYGAPMRQAA

SEQ ID NO: 130084 - protein, 467 aa, unidentified
MTPRAGKRFRTSPPSDDLTVQHPHAAGIDVHAAVHFVAVPPEDVPAGLVNPEPKLPAGVRKFGTNTGDLEALADWLTACRVTTVAMESTGVFWIPLFDLLASRGFQVLLVDPRQTAHAPGRPKSDVLDCQGIRRLHSYGLLTGAFRPADQIVRWRGFQRQREMLIRYAAQHLQHLQKVLEEMNVKLTEVVSDIVGQTGMKIMRDIVRGVRDPVKLAKHRHERCKATEEQIAAALCGNWRPELLFALRQALKLYDFYQEQLHECEGRIEECLRALEDKSKGAPLPPCPRQRKPEKNEVRFGARVLLFKMAGVDLTQIEGISETTALVILSELGADLSAFPHEKNFVSWLGLCPQHRGSGGKIRKRRTRRGSNRVARALRMAAQGCHHAQNARGAFYRRIRARCGGAKAVVATARKLAERVYRMLRYGQEYVRQSQEAYQEAYQLRLVKSLAKKAASLGYKLVPETMTP

SEQ ID NO: 130085 - protein, 390 aa, unidentified
MNEQKGKRIIGLDMHPDVFAAAALSADQSRQIADWVQDRMPTAGLEAWAKKQLRKEDVVVLEASGNSFAVATRLHAIGFTTLVLESAQAGKIRDNFCNDDRHSAVKLAKVYRSGLAKVVWQPDAKTREYREVLFAHRNAVKDATRCRNRIHSFLNEHCVRLKPGVRLTAPSGEATAKAAKDWTILQFELLSQKFSQLREVESRRNQLERIMVRELVGAPHWARLWRLMGVRHRVAFALMAMIGDVHRFATAKKLVGYIGLAPRRDQSGNNKKGYDKGVGKFGRGDLRGLLLQSAQNALIQRDSPLHKWGWKLLMKKHRNEAAVAVARKLTVSIWHLLMGHFTPLVEATEHLHAKLLKLATVIGKDGLATLGFANREAFVTAQIKSIQLST

SEQ ID NO: 130086 - protein, 354 aa, unidentified
MEYLGIDLGKERSDICILDESGEPRERLRVVTSQLPAWLSKRPRSRLVMETSTQSRLVSMEARKTGHDVTVLPGQVLRALGIGWRGLKTDRKDAEILARAAFRNETLPDVHLRSDDAVEATKLILARTFYKRACTKLINQIKAELRAHLLPTPPSRSTKFEEHCRAEFASADVGVSLPLEIAFEALRENRAKVSKLEKALEAEAERPEVRLLRSIPGIGVLTGVYLWALIDDPTRFASADRVGSYLGLVAGEATTGGKIQRTRMIKAGPKQLRPLLVQSAWTCLRHRPHDPLTQWALRIAKRRGKKVAVCALVRKLGVIAWAVLRSKRPYDPTKAARRLPELSLEEELAQAITV

SEQ ID NO: 130087 - protein, 335 aa, unidentified
MALYCGIDLHSNNHYVVVIDDNDRRLVERKLSNDVALTLKLLEPYRAELHAVVVESTFNWYWLVDGLMAAGLAVKLANTAAMSKYDELKHTDDRHDAFWLAKQLRLGILPTGYIYPREARSLRDLLRKRMSLVQTRAKALTSLQNLYHRESGGRQRTDRLQRKEYSPAFADPYVQRAAEASTRVVRVLSQEINALERDILAALKENDAFKRLCKIPGIGRILAFTVLLEVGDIRRFPSAGDFASYCRCVSSTRLSNGKKKGEGNSKSGNKWLSWAFSEAAHFFYRYEPRARQFVERKKRKTNGIVAIRALAHKLARAVYHVLHDGVEFDASRMFR

SEQ ID NO: 130088 - protein, 343 aa, unidentified
MYYIGMDVHKKTISYCVKDAAGRVHQEGKIGSTRRELDAWLGTVPQPRTIAMEATIFTGWIYDHLLPHAAAVKVAHPLMLRAIAAAKKKNDRIDAGKIADCLRCDFLPECHMAPTAIRERRRILRYRTLVMRQAVQMKNRISGLLMETGVSYNKLRLHRMGYFEQLLETSDEISDSIRPLLKLSREHIDRSIRLDTALLRSLEHDPLLKERLRRLRTVPGVGPITALTWALEIGDTSRFRSIKQAISYCGLCSAEKSSADKVMRTPISKQRNKHIQQVLVEAARLAPRYSEELALLYERERQRGNTNRATLAVARKLVTFMLAVERRQTDFVAGGEFRRTTAA

SEQ ID NO: 130089 - protein, 349 aa, unidentified
MDRYIGIDAHLTSCTVATMGPSGKKLNCNVVETSGKALVSAIKLIPGKRHVCIEEGGFSEWLYEILRPHAEQVVVVQPKRHRGSKSDSIDAFARADELRRGDYQPIFKDPGTMSRIRAATKSYLMIRDDVARAKHQLKATFRLRGIRVGSEVFDPLARRALVEQLPAELAHQALLLGDKLDYLGDKRDEALDWINEELDHIPDARVLMSIPGIAAVRAATLLATVISPDRFRSKRQFWAYCGLAVVTRSSSDWKQDSGRWARKPCVQTRGLNKDFQPQVKDVFKGAAYIVSKRCSSDHPWRRAYQRQLDNGIKPNLAELTLARRIAATTLALWKRKELYDPQKTRCATN

SEQ ID NO: 130090 - protein, 355 aa, unidentified
MLFLGIDQHARQLTISLRDQSGDVLLARQVSTQPEKVLEFFDQLTRRCAQSEEQFIAVVEVCGFNDWLIRMLQDYRCHKVILIQPEERKRCKTDRRDAAALSELLWVNRDRFLEGKPVRGLRQVTICSSTQQENRKLSTLRKEAGQTQTQLVNKIKHILRRHNLQWELPTKTFPTAKAIAWLREIALPQIDRLEMNFLLADLKQIQERLLELEKLIAQRGRDNPDAQLLKTMPGIGAFTAISLAAGIGDVQRFPRARSLANYWGLTPGCRNSGENNQRLGRITKAGNNTARWLLAQVTYQVLRKDGRLREWYKKIKRRRGSGVARVAVMRKLTTVIWHILSKQQSYFECRAIAAA

SEQ ID NO: 130091 - protein, 411 aa, unidentified
MHDLQEGQFFVGLDWAAETHAVCVVDAAGKTKAVFTVEHTADGIAALIGKLARFGEPGDMPVGIERPNGRLVDLLLEAGHPVVPVSPNAIKTWRDGEVLSGAKSDAGDAAVIAEYLRLRSHRLRTVQPYSAETKALRTVVRTRDDLVEMRIAATNQLAALLDAHWPGAKAIFADIESPIALAFLTRYPTAASARHLGEKRLAAFLIKHGYSGRRPAGELLQRLRSAPTGTLDDTLTEAVRDAVLAMVTVLTAVGSALKNLDRSVAAHLGEHPDGPIFTSLPRSGQINAAQVLAEWGDVRQAYEHPDSVAALAGITPVTKESGKHRAVHFRWACNKRFRRAITTFADNSRHSSPWAAKIYNDARAAGKDHPHAVRILARAWVRIIWRCWQDGAPYDPAKHGNAIKINQPLAA

SEQ ID NO: 130092 - protein, 346 aa, unidentified
MILIGCDFHPSWQQVCWLNMASGETDNQKLVHASGDAEKFYRRLTVPVRVGIEATGNCQWFLELLGKLGHEVWVGDAAKIRACDPRQQKHDPRDARLLLQLLVENRFPRIWTPSSEEKDLRQLLLHRYKLVRMRVQVKNELQHLAMNKGITKGRRLWSAAGEKVLCELPLAPWASRRREDLFKLRSMLNEQVAALDEAVKHVAEENDRARLLMTQPGVGPITSMAFVLTMGDVSRFPRGKQVASYLGLIPREYSSGGHQRFGSISKQGNRFMRMLLVEAAQCVVRYDEGFRNEYLHRCHTKPRGVAKVAAARKLAVRLYWMLRTNTAYPEIARVGSSSRVPLAGAS

SEQ ID NO: 130093 - protein, 342 aa, unidentified
MEQVSVAGLDLAKSVFQVHGVNAQGEAVLRRRLTRGQLLKLFEKLPPCLVGMEACASAHHWARELTALGHEVKLMPPQYVKPYVKRGKNDAADAEAICEAVTRPTMRFVGAKSPDQQATMMLHRVRQILTRQRTQISNALRAHMAEFGITAAIGRGGLERLIAVIADQEDARLPDEARACLAVLSTQLEMIKEQILDNDRRILADARRTEAGRRLMKIPGIGPLLASAIVACVPDPATFGGGRSLSAWIGLTPRQNSSGGKERLGSITKAGNTYLRELLVVGAMAVVRRAKQGSTKRPWVTQLLSRKKPKVAAVALANKNARIIWAMLATGEAYREAEMAAA

SEQ ID NO: 130094 - protein, 362 aa, unidentified
MGKQFHGIDLHKRYATINVRDSEGKEIQYISRCSDFRGYVEKLTCEDVVVVESINNAFYWVEQIEKRGACCYIVDPHKFKIIKDSWNKTDKRDAANLSLALWMAETRQEFKMPTVYKPSLEIRELRRLFSQYQLITEQITQYKNSIQAIFMENGISLTKEEKIGLFKAEGDLSYPENYSLTRASLHCIEISRSMIRCLLEQKEKVKNSILKMGVFFEREIRICATIKGVSPFLVLAFLADVGDITRFKNVRGFNAYLGVVPTVKSSGGKTQMGHITRQSRKLARTLFTQPLNHIIHSSDMMDTFYNGIKERRGSGRSRIAVIRKIFNIMRRMILTGEEYRWKDEDNYQKKMKEFEKIVRKAA

SEQ ID NO: 130095 - protein, 392 aa, unidentified
MYIIGIDIGKNHHEASIIDYSGKLIGRSCRFSNTHKGADTLMEHIHKNIGNSHVIFGMEATGHYWYAIYSFLKSKGYTVYVINPIQSDSLRSMYIRQTKNDSKDSFLIAEVIRFGQFTTTTLADENLLAMRQLCRYRDSVISDRTQIKLRINTILEQIFPEYEKHFSDLWGNTSMSILETYITPDKIANAPIDELFSLIKDKSHNKLTLKKAISIKEAATDTFGIKIAQNAFAFQLNQLFERLNFLNSQIEQLDAEITMYYETFDCYLHTIPGIGIIAAATILSEIGDIKRFRSSSALVAYAGIDPSVKQSGEFNSTHNHMSKRGSPYLRHAIFLAASCCSFHDNPLNDYYKKKRSQGKHHLSAVGAVSNKLTTVIYAVLRDGKPYEPVKFV

SEQ ID NO: 130096 - protein, 426 aa, unidentified
MKSTQNEKISQIKFSTLVVGIDVAKETHYARAFDFRGIELSKLLKFSNTAEGYEKLEEWMQNICQQHNKTEIIVGLEPTGHYWFTLGDYLKSQGHKLAMVNPFHVKRTKELDDNSPSKNDRKDPKTIAMLVKDGRYREVYIPEDVYQELREAVTERERLVQRMNTISNQVTRWLDIHFPEFNTIFKDWRGQAAIQVLRNYPTPDKIVAAGAEKIEETWKSTMKRTAGLKRAQELVRAAGKSIGRRTGLIAAEASLQNLLNEYDLYSQQYQQLEQLMLELLQQVPHGEKLLEIKGVGLVTAATFVGEVGDIRRFQDPRQIQKLAGLNLVENSSGKHKGKSKISRRGRKRLRHSLFMAMITILATNPEFRQLHQRNLKRETNPLNKMQSIVALCGKLIRVFYALLRTGNDYSAEKMLGDIKQSMKTAA

SEQ ID NO: 130097 - protein, 376 aa, unidentified
MRTMITYVALDTHKKQHSVAVVYPRTGELAEWTVQNTQKDVVQMVRKIKRQSPGEVRFCYEAGVCGFVLKRWIEAHGCSCSVIAPSLIPVKPGQRIKTDRRDTRKLLDLFVDGRLTEVHAPTLQQEAARDLTRCRQAASEDLQRNRHRLVKFLIRHGYLYGQGSYWTNGHAQWLKSLVFEEALLKEVFDEYLTELEHSQERLACLDKQVLQLAQSPTYRPLVGLLCCFRGIDTLTAITLVTELFEFGRFASAQALISYLGLIPSESSSGDKRHRGPITKTGNRRVRRLLVQSAWHQRHGYTISKTLRKRRQGQPLWAIDLADKAGRRLRRRYHALTERGKEPCKAVVAIARELAGFIWAMLREYQRRQPHPLRKTG

SEQ ID NO: 130098 - protein, 356 aa, unidentified
MKENTKICFTNQTFFIGIDVHKRSWTVTIRTNQMELKTFSMDPCPKTLFQYMTSHYTGGSYHSVYEAGYCGFWIHDKLTEIGFNNIVINPADVPTTNKEKYSKTDPVDSRKLARELEKGSLKGIYVPDLFHQQFRNLCRLRAQTVQNQTRTKNRIKSFISLYGIKMPARSELCHWSKSFINWLESLEFACSPGQTTLRLLIQDLQNQRHQLLQITKEIRKQVKDPHIQPFIGYLRSVFGIGFVSAVTLYSELIDIHRFPDFDHLASYVGLIPSVKASGEQSTTRGMTKRQSSYLRSLLIEAAWIAVRRDPALTLKYSELSRRMPKNKAIIRIAKKLLSRIRYVWINQSPYIPAIVE

SEQ ID NO: 130099 - protein, 391 aa, unidentified
MIYVGIDVAKDKHDCFITNSDGEVLFKSFTIANNREGFETLFQRIQSVSDDLTKVKVGLEATGHYSYNLLGFLLDNGLPTFVINPLHTNLYRKSLSLRKTKTDKVDSHTIASMIMSDVNLKSYSDTSYHNEELKSLTRYRFDKVKERAKLKSSVSRLVCILFPELEKLVPQLHIASVYALLSEFPSAHAVASAHLTRLTHLLSESSKGRYGKDMAIIFREAARNSIGSNMPAKSLELKHTIKLIRELTSEIDEIEIEIKSIMDEINSPILTIPGISYRMGAMIIAEIGDFNRFNSADKILAYAGMSPSTYQSGQLDNCYSHMEKRGSRYLRYALYNATKYVCHWDPTFAEYLAKKRAEGKHYNVAISHAVKKLVRVIYAMEKSGQVYNKAS

SEQ ID NO: 130100 - protein, 325 aa, unidentified
MIVRTTASGDPLETVRISNDVDSLIKVMAGAGVSPEVVLEATYGWYWAADTLADLGAVVHLAHPLGVKGFSYRRVKNDVRDATDLADLLRMGRLPEAWIAPPVTRELRELVRHRAKLVAIRSGCKCEIHAVLAKCGIQVLMSDLFADAGTALLERLDAPAPYLARVGSLRRLIDDLDVEIDLFARLIRGRLAADDGYRAVQTIPGIGPTLGAVFVAEIGGVHRFPGPTQLASWAGLTPKHHESDTHVHRGRITKQGSRLVRWAAIESVQALGPGTGAGRLKHRVGDRRGRNIGKTAAARQQLGYVYYALRDGHVRSLTRRPRVAA

SEQ ID NO: 130101 - protein, 347 aa, unidentified
MIIIGCDFHARMQQIAMADTETGELTESQLEHEDEQVRSFYAGLKEPALVGIESTSYPRWFAELLSELGHELVVGDAAKIRAKETRKQKHDRRDAELILNLLVKGDFPKIWLPSAEERDVRVLIEHRHQLVQMRTRAMNGLQAVALNYGLRLRRRLWSKAGKEKLQKLPLREGPGRRRADLLALVAQLDHWVNELDQRVAQEVARRPDAQLLLTHPGVGDLTALTTVLVLGPVERFPGTGQVTSYVGMIPEEVSTGGRQRFGHLTKQGNRLLRFLLVEAGQTACRRDPGLQRFYRRLVFRKGTAIAKVAVARKLLIRLYIMLRDKIDYQEFCRRGSHAGMLGDLALV

SEQ ID NO: 130102 - protein, 423 aa, unidentified
MYIIDNQRRIFMKQQVIEDVNIMPQLDKACGLDMHKDKIVGFISCKDGSNQEFREFGTYTCELKEIRDWLQENDIHHCLMESTGIYWMSLYAILTEVGIEVIVANPVHIKQMPKRKTDRKDAKWLCTLLLHGLVRPSFMPDNTQRIIRDYCRNRLFYTWQLNRIRNRLLKILESNNIKLRSVISSIHTLSAMDMIRLLAKGVTDQEQLLNCARGKVKAKKEQLIKALDGTLQNYHHTQLQMLLEDYDHVQKQVDFLDKSITGIITEHYAQAFECLDSISGIGVKSAEIIISEAGKDMTRFPSADHFTAWCGIAPGNNESAGKRKNTSIKKGNSYLRVAIVGAAWAAVRTKDSYWHALFDKLRKRMKAQKAIVAVARRLLKVVYNTLETLTIYKEKGIAHFVDLQAKAALYHNAKLPWPQNNID

SEQ ID NO: 130103 - protein, 342 aa, unidentified
MQVTTIGLDIAKNVFQVHGIDANEKVVVRKQLRRGKLIAFFEALSPCLIGIEACATAHHWARELTKLGHEVRLMPAKDVKAYVKRNKNDAADAAAICEAVRRPTMRFVRIKSPEQQGQLMQHRTRDLLMRQRTQLINALRAHLAELGIVAAKGDSGVKELRAIVADEEDTRLPIDVRASVIVLAAQLGAVQTLIGSIEKRIKTQHRANEASRRLETIPGIGVIGATAIAATVADPTVFRSGRDFAAWIGLVPRQDSTGGKQKLGPISKQGDRYVRRILIVGAHSVLRRAQENPEKYPWLTQLLARRPFKVVAVALANKMARMAWALLAHGGTYRAPELAQAA

SEQ ID NO: 130104 - protein, 451 aa, unidentified
MSPRKSDATLSLAHPDAAGIDIGSASHFVAVPHDRDDQPVREFKSFTADLYRLAQWLKDCGVTAVAMESTGVYWIPLYELLDSQGFTVYLVNARHVKNVSGRKSDVLDCQWLQQLMSYGLLAGAFRPSDEICVLREFSRQREMLLASQVRHVQHMQKALAQMNIQLTQVLSDVVGVTGQAIIRAIVGGERDPHALARLKKRQVKASEDDIAAALQGNWRHEHLFALRQALALYDTYQQLLNDCDQHIQAELHKLHRHDGDPGKSQRRWPKKAMAFDLRTHLFAMCGVDLTRINGIDEMTAFTVLAEVGPDMNRFPSAKHFASWLGLCPGTRISGGKVLNAATKRSPNRAAQALRLAAMALRHSQSALGAYYRRLCARLDKRRAITAAAHKLARLIYTLLTKGSEYVDQGELYYEERHRQRVLHHLTKRAETMGYSLVPLTASGETNEVSMT

SEQ ID NO: 130105 - protein, 333 aa, unidentified
MLYVGVDAHKVKSHLTVMDEAGRVIARKRVSSSPDALRETLGHYDEPMKAVLEAGYSWGPIFDWLGDIADEVVLAHPLKLRAIADARIKTDRIDSETLAHLLRADLIPPAYAPSKETRACKRVLRQRMFLVRIGTMFKNRIRALLSQHAITLPDVSDLYGRAGLEWLGNLNLPDPDGHLLTSDLALLQAVKDHIASTEALVKELTAEDPAIHWLRSVPGIGSFLAVLIRYEIDTIDRFTTAKRFVSHTGLVPSTYASGQRLTHGRITKHGNKWLRWAYIEAVTPAIRCSATLRTHYEGIKARRGAKDARTSTARKIAELTWIVWTQCRCYEER

SEQ ID NO: 130106 - protein, 363 aa, unidentified
MKIMTGIDLHSNNALCGLMDENGQRLVHKQLPCDLSSILQLLAPYKERIATVAIESTYNWYWLADGLRDHGYNVVLANPARMKPYDGLKHTDDVSDAFFLTELLRLNILPTGHLYDRQTRPVRDLLRRRLLLVHQRTSLILSFKSLNERTLGQRVALARVKALKPDEARARFTAPADQLLSGTEIELMGHLTQAINKIEAHVLHVAGKWPTYQRLQELPGIGKILGLTIALETGEVKRFAAAGNFASYCRCVKSLRTSNGKKKGENNRKCGNRYLAWAFVEAAHFACRFDDQCRHFYDRKKQQTNPVIATKALACKLAKAAWHVMAEDAPYDAARVFGPGKKTDLGEPRREPAKGSGHKSQLN

SEQ ID NO: 130107 - protein, 326 aa, unidentified
MEHELHYIGIDTAKEKLDVDVLRPDGRHRTKKFANTTKGHDELVSWLKGHKIDHAHICIEATGTYMEPVPECLYDAGYIVSVINPALGKAFAQSEGLRNKTDTVDARMLAEFCRQKRPAAWEAPHPLERALRALVVRHQALTDMHTQELNRTETAREVQRPSIDAHLLWLEAELKRLEKQIKDLTDDDPDMKHRRKLLESIPGIGEKTSAVLLAYIGLKDRFAHARQFAAFAGLTPRRYESGSSVRGASRMSKAGHVSLRRALYMPAMVATSKTEWGRAFRDRLAANGKKGKVILGAMMRKLAQVAYGVLKSGVPFDASRHNPVAA

SEQ ID NO: 130108 - protein, 359 aa, unidentified
MKTQRNEISFKGQSIYVGIDVHLKSWSVAVLSQTSVMKKFRMDPNPEGLKTYLSNNFPEADYYSVYEAGFCGFWIHDRLTSLGINNIVVNPSDVPTTGGERLRKTDAVDSVKLARSLRANELKGIYTPDAASLEIRSLIRLKNSITKDMTRQKNRIKSTLRYLGVEIPKEYTEPFSNWSKRFILWLREVQMNTSSGRDALNLQIEQYEALRKQKLMMTRKLRALGRSDRFKNDLDLIMSVPGIGMTTGMALLAEICDVRRFTDGAHLAAYIGMTPMCHSSGEKDGTGDITLRKNAIMRCNLVEAAWVAIRQDAAMNLFYTECCRRMVASKAIVKVARKLVNRIYYVLKRRKKYVNNVVS

SEQ ID NO: 130109 - protein, 349 aa, unidentified
MNFYNNTHSYYCGIDLHARLLYVCVIDQEGNTLVHKEISDDPQKLLTILEPYIGNIVVGVECMHCWYWVSDFCDDIGVDFILGHALYMKAIHGGKAKNDRIDSFKIAKLMRGGNFPLAYVYPKEMRATRDLLRRRMKIVRHGADLKGHITNTTSQYNLPPHRVTLKNSDARQLIQTHFCTSDPVVKRTVDLDMALIDFYQAELSKIEWFIEQQALTHNPVHLNLLKTVNGIGRILALTIIYEIGDINRFPSVQKFASYARLVKCKAQSAGKTYGTSGNKIGNAHFKWAFSEAIILHLRGNQRAQEYLKKLQRRMSKAKALSAFAHKLGRCIFYMLKNEKIFDENKFLKG

SEQ ID NO: 130110 - protein, 415 aa, unidentified
MKRHSELSHFGGLDWAKHHHHVCILDHPGQVVERFCFEHSGPGWEKFRQQIQKYPALGIAIETSQGAVVEQLLGSGVTVYPIHPKAAKEYRQRQAPGGTKDDELDSWSLGDALRMDGRQWRALSPQDPMIEELRLLCRDEEELIGQRTALVNQLQAALQEYYPAALEAFEDWTAPYTWEFIARFPTPQQLAGATVHRRRVFLHTHKLWRPGSAERRLEIFGRADRFCGGEALTRAKSRLALSLVKLLQALQQQLDNYRAAIEKLFAGHPDHDLFGSLPGVGEKLGPRLLGSIGANRGQYPEVQGLQCVAGSAPVSFKSGQMRRVKIRWHCDRFLRHTVHLWADCSRKTCAWAAAYYQAKRAQGKSHACALRCLAQRWLKILWKMWQTHTPYDPEYHARNQQRHGSWVLQLNPKKV

SEQ ID NO: 130111 - protein, 319 aa, unidentified
MAQNDLVVVGIDVAKDKVDACIRVLALRQTCPATAQGHRKLVAWLRKHQVGMAVMEASGGYEREWRKVLYKAGIEARIVDPKRVRNFALSAGRLAKYDAIDAEMIAWFAETFNEAPSQTHDTAHEELVALVKARIGLVELKTRLQSQDVHAGPGQVRKAHARILKSLAAEIEKLEAAIAAKIKATADFAERAEIIESVPGFAETTSANLVAAMPELGHVSDRIAAALIGLAPYDDDSGQRRGERHIKGGRRWIRNAIYMPCLGAATQNNPVIKAFYDRLIAKGKAPKVALVACMRKLIIILNTLIARRQKWDPGRHVLA

SEQ ID NO: 130112 - protein, 339 aa, unidentified
MNVVIGVDPHKASHTAVAIDEAEDEVSSVKVRATNRQVEQLVRWAEPFEKRRWAIESAGGMGYLLAQQLVAQGEEVLDVPATLASRIRVLATGRSNKNDPNDAHSIAVAAFRAPSLRTVEPADHSQVLRILAKRNIDLGSHRTRVVCRLHALLAELVPGGIAKELYVSDAERFLANITPSTPVEQVRYDMALELLDDVRRLDEQTKASHRRIRLVIKASGTSLTEIYGVGPIVAAQLIGYAGDVRRFANRDAFASYNGTAPVEFASGGRVVHRVSQRGNRRLNHGLHMVAVTQIRNPGTAGRIYFERKVAEGKTKKEVLRSLKRQISNAVYRQLLLDAR

SEQ ID NO: 130113 - protein, 391 aa, unidentified
MIYVGIDVAKDKHDCFITNSDGEVLFKVFTITNNLDGFNNLYQKIESVMEDVTKVKVGLEATGHYSYNLLGYLIDKGLPTYVINPLHTNLYRKSLSLRQTKTDKVDARTICMMLSSGMDLSSYSESSYHMEELKSLTRYRFGKVGERAQLKQSLSRLVTILFPELETLVPTLHMKSVYALLSEFPGAIYVANAHLTRLKHLLADSSKGRYGKEFAETIRDTARKSIGSDMPAKSLELKHTIALIHVLTEEIDEIEFSIQKIMDTLDAPILGIPGINYRMGSMILAELGDLRRFSSPDKILAYAGMSPSTYQSGQLISSYAHMEKRGSRYLRYALFNATRYVCMWDPTFKSYLAKKRAEGKHYYVAISHAAKKLVRLIYHLQMTGEAYCPQT

SEQ ID NO: 130114 - protein, 314 aa, unidentified
MKDITTFVGIDVAKKSLDVATLPATTPRTFFHDTKGRKELLNNLPQPETCLVVIEATGGYERLLVAELLTAGHLVAVVNPRQVRDFAKALGILAKTDRIDAAVIARFGQQVTPRPLAEVHEKQSELDQLVTRRRQLVDLRTAEKNRMGMAHSKSVKRSLQLVIDTINKEMKRIEKNILALVESDDEWKGKSDIMNSVPGVGPVTTTTLIAEFPELGKINRSQAAALAGLAPFNRDSGALKGKRTISGGRRTVRNALYMAALSARKHNPVIRQFADRLEDQGKAPKVILTACMRKLLVTLNTMLKNNTLWNPQII

SEQ ID NO: 130115 - protein, 418 aa, unidentified
MTTRVLVGDDWAEDHHDLEFQAPDGRVLARGRVPEGPGGIARFHEMTAQAVAALDPDDTGDPEVAVGIETDRGLWVQALLAAGCEVFAINPLQAARFRERHGVSGAKADRTDAHALADMVRTDAHQLRQVAGDTPLVEAIKVVSRAHKTLIAERTRQVQRLRFALRDYFPAALDAFADLDAADTLELLAKAPDPASASKLTTAQITAALRHAHRKHVDLKAAQIRQALRAAHLTQPDPVVEAYAAVTRAAVAVLTVLNQQIAELHKAVDAHFGMHPAAPILLSQPGMGTILGARVLAEFGDDPDRYTTAKARKNYAGTSPITRQSGRKKTVTARHVRNDRLINALASQAFTAIKTSPGARAYYDALRARGAWHQQAIRQLANRLVGILHGCLKTSTLYDEATAWPATHPAEHVTQLAA

SEQ ID NO: 130116 - protein, 327 aa, unidentified
MQHDSAQRDPNLSAVIGIDVAKATLDCFFDLSGQHFQLANDDNGIAQLLSHLRPLQVQLVVIEATGRLHRQVAAELLQAGIPVALVNPQRAREYAHSIGKLEKTDRVDAKVLAGFGRAAQHHILQKPSEKQVELNDLISRRRALVQMRVAEKNRLAESQQPKLAKTQAKQLLRLIDQQVQDIDRAIAELIDSDDHWKRKSEIITSIPGVSTGTANQLLADLPELGELNRQRIAKLSGVAPLANDSGPRRGQRSIKGGRQPVRNALYMAAFNAIRYCDRFKQFAKRLTDAGKPFKVVVTATMRKLLITLNQMVKTNSVYTPKLIASLP

SEQ ID NO: 130117 - protein, 417 aa, unidentified
MNAVGIDVSKGKSTVAIYRPGDQVILRPRDFRHTQTGINSLIEIIKGLDGETKVCMEHTGRYYEPVATWLSKADIFVSAVNPMLIRAFGDDSLRAPKTDKADAKKIARYTLDRWTKLKQYGRMDETRNALKTMNRQFGFYMDQKTAMKNNLIALLDQTYPGANTFFDIPARSDGSQKWVDFVYTYWHVDCVRGKSLNAFTEHYKNWCKRKGYNFCAAKAEQIYHGSADLIAVFPKDANTKMLVHQAVEMLNTASKTVETLRTEMDRTAATLPEYPVVMAMNGVGPTLGPQLMAEIGDVTRFEKRGSLTAFAGVDPGKNDSGQHSQKSVKTSKKGSPHLRKTLFQIMDSLIQRSPEDDPVYAFMAKKRAQGKPYHVYMTAGANKFLRIYYGRVNEYLSGLSDVGEQPDQPAIEGESCS

SEQ ID NO: 130118 - protein, 370 aa, unidentified
MLNTTTFVGLDVHARSIKAVALDAMTGEVRSATFAYDAAAVAEWVGSLDPAAKCVYESGVTGFDLQKKLTALGVDCVVGAVSKMIKPSADRKRKNDRNDAEFLARMLSVGNVVEVWVPDDECEAARDLVRALDDAREDLKRCKQRLSKFLMRHGYAFSETTPTGRRKGNWTAAHWAWIRSIEFPEKADDEVLAYYIDAVRQAMENKRRLEKLVEAEASKPRWKKRVDSLRCLKGVDAMTAADIVFEAGEFSRFKNARSFAAWLGLTPSEHSSGESVRQGGITKAGNKHLRRVLVEAAWHYISASPHPKDLAKGQAPDPAARRHAAKGIRRLVKRREEMLGRGVHKNKANVATARELACWCWAVGRMIENG

SEQ ID NO: 130119 - protein, 394 aa, unidentified
MNRIVYIGMDVHTSNYTLCSLDPGYGVEKDNYFAEVQFTNDFIKNVVNYVSNLKKKLKDCEFVCGYEAGCLGYSTYKDLTKVGIKCVIMAPSTMAVQKGGKKVKNDRRDARVIAQCLAYQTYKEVYVLSEHDEAVRGYLRMRDSHNKALKRIKQQIIAFCTGHGLFSPTKSNWTVAHLKWLKDLKFNDPVEQEILNEYLSSLTFLSDKIKAMDVRIEELASEKQYCENVKKLRCIKGIETNVALTLLAEIGDFNRFSKPTDFASYLGLIPGEQSSGDKVRGTGITKAGNSTLRRKLTESAKGYWRGRIGIKSATFKKLEKELPKEVTEYALKANTRLQRKFFNMTHVKGKNMNVAASACAREMACFVWGLIMNHYEKAPAVPKTDEELLDLNLG

SEQ ID NO: 130120 - protein, 338 aa, unidentified
MTVVTVGIDLAKNVFAVHGVNAAGKAVLVKPLVRRAKLLELIATLPACLIGIEACTGAHYWAREFQKMGHTVRIMAPQLVSPYRMSGRHGKNDAADAAAICEAVTRPNMRFVPIKSVEQQGQLFVHRAHQGYVSERTALINRIRGLLSELGIILPQAFKAFLSGVAQVLEDLPGYCNQVIGDLLNELYHIEEKIKNSEKLIQQLARDNSAAKLLMQFRGIGPMTATAIVASIGNGHDFKNGRQFSAWLGLTPRQQSSGGKARLGRITKAGDSYLRTLLVLGARSVLLGAAKNDDPVSRWALQLKERRGYGRALVAIAAKNARMCWAMLHLRDEFRFPV

SEQ ID NO: 130121 - protein, 345 aa, unidentified
MQIATIGLDIAKNVFQVHGVDASERVVVRRQLRRGQVLGFFKALPPCLVGMEACATAHYWARELTELGHQVRLMPAKDVKAYVKRNKNDAADAEAICEAVRRPTMRFVSVKTAEQQSRLMLHRARDLLMRQRTQLINALRAHLAELGIVAAQGREGVRELLRIIASERDARLPIDAHASLVVLAAGVQAVQTMIGSIEKRIVAQHRSDEASKRLRSVPGIGIVGATAIAATIPDPKIFRSGRDFAAWIGLVPRQDSTGGKQKLGPISKQGDQYLRRILVVGAHAMLKRARHQPEKYPWITRLLGRKPFGVVAVALANKMARVAWALLARGGTYRAPALAVAAQGL

SEQ ID NO: 130122 - protein, 360 aa, unidentified
MTTSSPSKTTVSYDSVKLGIDAHAKYYWVSRQLDGATPQPVQKMTYDELLLFVVKQQKLTPNLVTCYEAGAFGFHLHRKFEQLGIKNYVVQPQDWDERGKGVKNDRLDAAALCQRLDRYQRGNTKAFSTVRVPSEDQERERAISRQRQQLMRERQRISAMGRSLLATHNIHVTGKWWKGKTWTVVQKLAPAWVVERLEVFIIILKPLEEQELKLMHQLQEAAQEQKIPRGVGPLTFEILRREVGDWGRFNNRRQVSSYTGLCPREHSSGGKRRSGSVSKSGNPRVRAMLVEMVWRMMRWQPEYKPLRKWAHVLYSLTPNAAAKKKAVVAIARQLAVDLWRIFTGQCKAETYGLIYLPEAA

SEQ ID NO: 130123 - protein, 295 aa, unidentified
MEKGTTFVGLDVHKEAINVAMLLPGETRPVEWQTSNDPAAVRRLVRKLQRSAVGDLQLCYEAGPCGYAVQRTIRALGVSCVVVAPSLVPRKPGERVKTDRRDARKLAELLRAGLLTEVHPPTEADEAVRDLCRAREDAHGDLVRGRHRVSKLLLRHGWTGNGGKKMWGQGHRLWLRSLRFEHKEDQWVLEDYLLALEHIEERLRALDAQIEQTSLDPRYASVVAALRCFRGIDTLTAMCLVAELHDFMRFESARGLMAYLGLVPSEHSPGGKEHRGEITKAGNGSLLGDVVNPAP

SEQ ID NO: 130124 - protein, 370 aa, unidentified
MSQSSTLFIGMDVHKDSIAVAYVAQDHGAEVASLGTIGTRQCDIDQLIRKMQSKAQHLIFVYEAGPCGYWLYRYLQKKDYDCWVVAPSLIPKKAGDRVKTDRRDAVQLARLARSGDLTPVYVPKVDDEAIRDLTRAREDTISDLKDAKFRLKAFLLRQDIRYAGRANWGPAHLRWLAEVVCPTPAQQIVFQEYVRTVTEHTERLGRLDQELREQVTTWRLHPVVDALQALRGVQFTVAVTMVAEIGDLTRFEHPSELMKFLGLVPSEYSSGQRRQQGGITKTGNTHARRVLVEGAWAYRYPAKVSRQLQLRLEHQPKSIQDISWKAQVRLCKRYRRLVAKGKHANVVTVAIARELVGFVWAIAQEVPITL

SEQ ID NO: 130125 - protein, 454 aa, unidentified
MRKPQVVPDEDHEVVYERVAAVDVAKASGVVCMRTPDPARPGRFVNRIWDNVPATRARIAELGGELLRCQVQMVTLESTSDYWRIWHYVLESIGLAVQLVSASQAKNLKGRPKTDKLDAMWLARLTQWGMLRPSFVPEAAIRRVRDFARARTDLVRERTRCLQRVEKLLEDAMVKITSVARDGLKAKSVVAMVQALIAGERDPRKIADLAKGPLRGKRDQLAEALDGMFDSHHGVIAQMLLDQVAFLDQRITAMENQAIAALAQVEESWGVDTTGETGPGCGTTPDSQVLAAAHRLAEIPGISVWLAIVIIAEIGLNMALFPTPAHLVSWIGLCRSAAQSGTRHGKGKQKKGNSYARAAAGQAALGASGTATFLGERYRRIARRRGKAIAQVAVARSIMIIVWHLLNDPVARYRDLGPDWHARRTNRDKKIRTHIQGLKALGVTVAITDDEQAA

SEQ ID NO: 130126 - protein, 348 aa, unidentified
MRFYTQQHPFYCGIDLHARSMYLCILDRDGQTVLHRNMPAAPEPFLAAVAPYREELVVGAECIFCWYWLADLCARESIAFVLGHALYMKAIHGGKAKNDKIDSYKIAGLLRGGMFPQAYVYPAQMRSTRDLLRRRMYLMRERADLLSHVQNTNSQYNLPEIGKKIAYKSNRAGVAERFLDPAVQQSVAVDLSLIGTLDTTLNELELSITKLAKVHDGQTFYLLRSVPGIGKILALVILYEIHDIHRFPSVQDFASYCRLVKCAKESAGKHYGYSGKKIGNAFLKWAFSEAAVLYLRGNPEGQRYLDRLARKHGKSKALTILAHRLGRAVYHMLRRKEPFDSQRFLATT

SEQ ID NO: 130127 - protein, 344 aa, unidentified
MQHYVGLDVSVKETSVCIIDKAGKVIREVKVATKPVPILAVLTEEALAIERIGLEAGPLSQWLYSALAEAGLPVICVETRHMKAALSAQINKSDRNDARGIAQMMRVGLYRPVHVKTLASQKRRMLLTSRQLLQAKALDIENDLRGTLRNFGLKVGMVGTVKFEARIRELVADHPDLAAIVEPLLIARRVLREQLDVLHHQLLEIVRHDEVCRRLMTTPGVGPVVALTFRATVDVPSRFSNSKAVGAAFGLTPCRQQSGEIDRMGGISKCGDALMRETLFEAALVLMTHSRKWSWLKAWGMKIARHRGMKRAIVAVARRLAVIMHRMWMDGTEFRWTREEAAAA

SEQ ID NO: 130128 - protein, 574 aa, unidentified
MGVIIGMDPHKRPATIEVIDEQARVLAAGRYGTDKAGYAEMLAAMRKFADRVWAVEGCNGIGRHLAHRLVHDGEVVFDVPPKLSAQVRVFATGNGRKTDPVDAHSVALAALRAPGLVQVQVEEDLVVMGMLADRRDELGRARTQVINRLHRLLLELLPGGAKKFLSARQARALIATVRPRDLAGKTRRRLAAELAGELEAIDKKTRALDKELTELVTARGSTLMDLHGIGPSGAARLLADVGDIHRFASRDRFASWNGTAPLDASSGSQARHRLSRAGNRRINRVLHIMAVVQLRNQTRGRACYDARRAGGMPSMMAMRALKRRLSNVVFARMLADQKRREASPGGQPGTHADSSVTGQDPETGPSDKPHPGPATPQPKRSPQQGLDIKECHERKPPSSARSLVSWRTSCRMLSNRAVVAQGCIWMGAGVREPLHQAHRRDHPPKDGDLGPCPRPGTGPTVVAGYSPREGHHGTHASGAPSIRRRTAGWLRRGHLVQHGAADHPQRLARVAGDTVPDQRHRPSAVAGQPLPGGRDRSQPGVPGLRSAVAEIARRPGHDRDRAGGGDPDLAGVPV

SEQ ID NO: 130129 - protein, 346 aa, unidentified
MINVGVDLHKTQMTVCFLADNEEVSQKVYRTDQEGYEDFCADLKTLAVPRKKIRVGVETTGNVWFFVKKVEGHIGEIRVVNTMKFKVIVSSTSKTDRRDARTIAEYLRRDMLPTVSLPDAESRMIAKYIKVRDRYVKLTTRLKNQLHALFAEEGICLKAADVSSAIRLRALKAREISDDVRFLVEGLVEEVIRLKGRIRELESKLDEMTREDKVVRLLRSIPGTGIVNASAVRGIIADVDRFDDPKKMAAYAGLVPWVSNSNEIVRHGHITKRGSTILRNALVQMAMGMIRYWASDAENKNMPLYNWYHHIAARTSGGKSKIALARKIVHIVWAMLKNEREFSCSF

SEQ ID NO: 130130 - protein, 394 aa, unidentified
MKLIGIDIGKNKHFFCIMDKDSGEIVSQPASFSNDKEGFDFLLQKIKSYPKDSVIIGMEDTGHYHFALLKYLLDLQYTVALINPKTTDFNRKMQGGITKNDKLDTINICDVLDTPERKKQYRITKVNSFDLYEQKQLTRHHHNLKEEENVYKNRLQKCIDIVFPEFNKLFNSKYGIVYMNILKMFGSAENIANTDIRTIRKCFEIEGRGNRISLTPERLKECARSSIGISSSAEVIQIKHLTAQIEPIEEQLTEIDKKIEEFSIQNNSPILSIPGISHFSSTSILAELGDISNYSKPSQIIKFAGVAPLHYESSQFNAQHTAITKKGSKYLRKTLYQIILPVIRHNPVFNKYYQLKISQGKGHRCAQGHCVRKLLRIIYHLLKTNQQFDPQLLR

SEQ ID NO: 130131 - protein, 397 aa, unidentified
MIAVGIDISKAKSTVAVIDSDGTVLASPFTMAHTQPEMEAFVTYLKGLGEPTTILMEYTGHYHYPVLKKLQDEGFPVCIVNPYQMKKYGDVEIHKAKTDKKDALRIAAYALEKSYKLVPYSSMEQKYEDLKFLSRQYSQRITYVAKLKVQLIALLDQTMPGITRILPLNSRNPEKCALLLFIKRFKSFDEIQRIGKARFLASYDVLAKKASERSASSKGLSIYELAVDSITTRGEDPYIWLSQNQCVDLLSATQNAADEIISQMRNIAETIPEYKVLRAMHGVGDRLGPIILAEIGDIRRFHSGKALNSYAGNDAPPYQSGQFESRNRHISKRGSSALRKACYEVMQALKLTKPQDDPVYLFMLKKEQEGKPFNVAKMAGVNKFLRIYYARAMELYK

SEQ ID NO: 130132 - protein, 388 aa, unidentified
MNITTDQLEAPTAIRTDLGAIFVSLELSRLSWLITSLSPGGGEKMSKHAVRGGDVSRLLERFLQLREKARARTGKVFPLIVIQEAGLDGFWIDRVLQNEGIESHVVDPASIATSRRRRRAKTDKIDGETLVRSLLAYKRGEPRVCSMVKAPTPEEEDQRRLCRERKVLTAERVLHVNRIKGLLFCQGICGYEPLRRDRRERLEELQTGDGRPLPPHLKAQVERELDRLELLLKQIKTVEGERDALLAAAKTAMPAPAAMLLDIKGIGPEFAAVLWSEGLFRHFDNRRQVAAYAGLAPTPWQSGAVDREQGVSKAGNPRLRTTLIQLAWLWLRNQPQSALTIWFHERVQRNGGRLRKTTIVALARKLLVALWKYVTTGVVIEGATMKAT

SEQ ID NO: 130133 - protein, 345 aa, unidentified
MHIASIGIDLGKTTFHLVALGERNKVLVRKKFSRAQLLTYYTANLPSSLIGLEACAGAHFMGAALREQGHEVRLIPAQFVKPYRKSNKNDFIDAESIAEAVTKENMRFVQIKTQEQLDVQAMHRVRDRLVQRRTALINEIRGFLLERGITFAAQPIYLRKNLPTVIEDAEQNLSPRLRWLLQRMWQEWKQVEIDIKAMTDEIERISNENALCRRLRQIPGFGPLVSTATVAAIGNGAAFRRGRDFAAWVGVVPRQYSTGGKQKLFGISKRGNVYLRRMLIHGARAVLLRVKYDTEGFGQWVHRLAQRAPRNKVVVAIANKLARIAWAVLSSGKDYQHQPLQITAA

SEQ ID NO: 130134 - protein, 482 aa, unidentified
MKPKPQKEPEKVTERRRPSRWHEMNRKQRREMMRKMQSEDLSLDVVHPNAAGIDIGNESHYVAVPPDRDSQPVRCFGCTTAELRAMGDWLNQCGIQTVAMQSTGVYWIAVYDLLEAAGLEVYLVNARDTKNLPGRKSDVQESQWLMKLHTYGLLRNSFRPPQEVRTLRTYWRQRHDLVQSAGRHIQRIQKVLTQMNIQLANVLSDVSGVTGQAIIKAILAGERDPHELAAFRDSRVKASQEEIARSLEGNWQEDLLFVLRQEQESYEFCQKQMAECDRQLKRYLQDREDQSQGADLPEEKRKGRRQSKKGNAPRFDLRGELFRMTGTDLTQIDGIDGMTAMTILSEAGWDMSRWKDESHFVSWLRLCPDNRISGNKIIGKGRLPTNNRASIALRMAASTLWRSNTYLGAQFRRLKTKLGAPVATKAMAAKLARLVYRMLRYGMRYVDRGAALYEVQQRNRQIRYLKHKAAQLGLQILEAPAA

SEQ ID NO: 130135 - protein, 420 aa, unidentified
MFKIIRNNCCGLDVHKTWIYACIGITDAASRTEYYEARFSSFPKDLRRLSLWLQEHGCVEVCMESSGKYWIPVFNVLEKTCKVTLAHPKYTKPQKGNKTDRKDARWICDLFMCNMIKPSFIPPPAIRHLRDLIRYRFKLTNMLTGEKNRVLNCLTVSNLKLDDVFTDVFGKSARSITEHILAHPGEKFDVAPFVDRRCKTPVEVIQAAVDGAISPEQAIKLRECLDHIDELNAHKSRIEKEILFVAESFAPQLALIRTVPGLNGDPMTAIAILSEIGGDMSVFPSAKHLVSWAGCCPRNDQSAKHVKSTRISRAGSYLKPLLVQIANALIHSKKYPEFAERYRRIKASRGHRKAVIALCKMLLTAIWNMLSTGEIYNPSGYFLMTPQNTGKKELTAKQAIQLLRMRGYVITDTLPDSAVV

SEQ ID NO: 130136 - protein, 408 aa, unidentified
MRSIGLDVHRDFCEVAICEQGRVSFGGKIRTLVGPLEEFARGLHQEDQVAVESTQGAAAIKQLLEPHVARVVVVDSRKAAALAQARAKTDRLDARTLARLLEAGVLDEVWAPDDQSAALRRLLSRRQALVRARTRAKNEVHAGLARSLCPRPPVKDLFGRSGRRWLEAQPLSQEERLTTDGCLRQIDLLAGEVAALDRVLAVRAVAMPEVRQLLAVPGINLISAVTFMAWVGDIARFPSPRHLVGYLGLDPRVRQSGVGSARHGHISKEGARLVRHVLGEAAWTVIRSPGPLRAFFARIAARKGPQVAATATARKLVVLFWHLLTSGEEYAFAQPSRTRLKVRQLELAAGDPPHKGRIGPDGPCKVPAAHRIAERSIGEQAEAAYQRLTADWQRQQRQGAGAATGERR

SEQ ID NO: 130137 - protein, 364 aa, unidentified
MLIIGCDYHPGFQQIACVDTNRGELSERRLAHREQAEQFYRELKQQNVSARVGIESSGHSRWFERLLHELGFELWIGDPAQIQTKRVRKQKTDRQDAQLLLGLLIEDRFPRIWVPDAANRDLRQLLWHRHRLVQMRTRVMNQLHVVPLNEGLRRKKALWRPEGRKELESIALPPWASRRRQDLLDLLDQLTPKIQELTRALEEEVERRPVTRLLMTHPGVGPLTALAYALVIGTPQRFHCGKQIASYIGLVPEEKSSGDRRRLGHISKQGNVLLRFLLVEAAQVTVRSQQEWRSKFFHLAMRRGRKIAKVAMARKLAVHLYWMWRQGWDYGQFEKFGSHAGEPGNPDGVQSITDVMIGHPAPSK

SEQ ID NO: 130138 - protein, 366 aa, unidentified
MRKISTVTTRGNEIFKEPKLTIGLDLGDRSSHYCILDEAGNVILEHNLPTTPKGIQQVFRRIPRSRIAFETGTHSPWVSRQLTELGHEVIVAHARNVRLIGESSRKDDQLDARTLARLARIDPDLLGPVRHRSAKAQIHLTVIRARAVLVSTRTALVNAARGLTKSYGERLKKCGTEQMNRDSSQGLSQELRDALDPLLREIESLNERIAECDGRIEQIAKEVHPEVTLLKQVKGVGTLIALTYVLTLDDPHRFRRSRDAGCFLGLRPGRRNSGNSEPQLHISKEGDRYLRTLMVQGAHYILGPFGQDSDLRRWGLKLAERGGKNAKKRAVIAVARKLAVLLHKLWVSGEVYEPLRNNHPVVSAVA

SEQ ID NO: 130139 - protein, 355 aa, unidentified
MEKPQITIGLDLGDRFSHYCMLNEDGDAIESGRIQSTEQALRRHFEGEPTMRFALECGTHSPWISRLLEQLGHQVIVANTRKIRAITASESKNDKNDAEKLARFAFCDPRLLSPIRHRSPQRQQDLNLIQARSTLVRARTMIVNALRGLVKSAGGRLPACSPQGFEARVEASIPPALVEAARPLLEQIATLNASIQQMDRGIEQLAERYAEIKTLRTVPGIGPLIAAAYVLTLDRPDAIRHSRQAGAFLGLRPRQSQSGDSDPQHRISKTGNVYLRSLLVQAAHYVLGRFGPDSELRRWGLKLAASGGKRGKKRAGVAVARKLAVILHRIWQTGHPWQAFPQSAPTTAGKNICVA

SEQ ID NO: 130140 - protein, 343 aa, unidentified
MYYIGLDVHKKTISYCVKDVSGHVHREGKIGSTRRELDAWINTLPQPRTIAMEATIFTGWIYDHLLPHAERVKVAHPLMLRAIAAAKKKNDKIDAAKIADCLRCDFLPECHMASTEIRDRRRVLRYRNLVVKQMVQMKNRVSGLLMETGVSYNKQRLHKVGYFGELMSTNEDISQAVRPLLNLSRGMIRRSGKLEYDLVSSLERDPLLRERLRRLRTVPGVGSITALTWALEIGDYTRFSSNKQAISYCGLCADEKSSADKVMRMPLSKQRNKHIQRVLIEAAKLAPRESPELAMIRERELQRGNPNRATLAVARKMVCYMMAVERRQQDFVTAGETVPTEAA

SEQ ID NO: 130141 - protein, 345 aa, unidentified
MLNCNVIAIDLAKNLFQVCKTDKNGKVIFNKLFTRAKLKELLTKEKKSLVAMESCGGTHYWARMAKNAGHQVKSIHARKVKAFRQGQKTDANDALAISVAARQPHIKESRLLSTQEQCLQSIESMRDLLVKQKVSLGNQLRGLLLELGHAIAQSDAKLRQAIPEILEDAENELTHSFRFSIEIIYQRFIDTIDEVKLIEDKLAEVIKQDKTCQRFQALEGVGPVCAILMKVALGNATHFKNGREAAACFGLTPVQHSSGGKEKIGSISKVVGNKKLRSALYKGALAVVSQLEKREVRSQKEVWLKGLTARRGKKVAAIALANKTVRTAFALLKHDQVYKPQLLVA

SEQ ID NO: 130142 - protein, 346 aa, unidentified
MSITMIGVDTAKSVFQVHAVNEAGEVVVRRKLQRSELIAFFEKQASCTVIMEACGAAHHWARALTGLGHEAKLIAPEAVRPFVKRGKKNDAADAAAICEAASRPGARFVPVKGLEQQGVLALHSARSLLVKQQTMLANAIRGLATEFGLTVALGMGKLGELMALVDADEAVPEKVRQALSALFGQCRALDESIEAFEAEIVAHARHDDTARRLATIPGIGPITSSLIAATVADIGVFQSARSFAAWLGLVPRQHSTGGKTRLGRITKAGNREIRKLLVLGATSMVRRAAGWNSAAGAWTRGVLERRPVRLVTVALANKMARIAWAVMTRKEVYHARGRSAAADVAA

SEQ ID NO: 130143 - protein, 430 aa, unidentified
MEIVYPRSCGVDVHKSFIVAVICISESVKPKYIKKRFSTFNNQLIQFRDWLVENNCQNVCMESTGKYYIPVYNALEGHISNVVVANPKWVKAIKGEKDDNKDAKWIADLFKFGIVRSSYIPEKDIRVLREFTRYQYKLVNMRSSEKNRFQNALTTGNCKLDIVFSDIFGKSASAIVDTILSNDPYTSEDILSKVHAGCKASHEDILSAVEGIQLNQFQKARIRIVQKHMEYLDSLLDEIQHHIDLMVANYEEYIHILCTIPGINRKSAITIISEIGTDMSQWSSHRKLAAWAGLAPGCNESAGKKKSVKVSKAGVYLKPCLVQVAHAAVKDKECEYYADKFNKISKRRGKKRAIIAIARKILIAVYHLLKTGEVFNPTDMTDVETTKKQRIEYVKNNLRNAFNQLSRTGLSEAEILQLIRKESTNSPQIE

SEQ ID NO: 130144 - protein, 402 aa, unidentified
MFFLGIDIGKQHHEVGVIDQHGKSIGKTIRISNTKFGSEQLLAFFNKHALLPENTMVGMEATGHYWLSIYTFVHKLGFHTTVFNPIQSDVLRDFYIRKTKTDTIDALLIAQVIRLDLPDKTELPAEDIFRLKQLERFRYGLVDRCSDLKRKILACLDQVFPEYDQIFSDVFGCSSTQVLLNSPIPEDLLEIDAERLSETINTASEKRLGIARSEEKVMKLKEAAAHSFGISIASDVFKLEIQIMLEQIQLLDSQIKIIEAEIQEIVSKQENYLTTITGIGDITAAVLMAEVGDIKRFERPNQLLAFAGLDASVHQSGDFTGTKNRLSKRGSPYLRRAIWQAAFVAAFKDPALSLYYQKLRKRGKSHGTAIGAVARKLVNIIFAVWTQNKPYEVHFPEDISEK

SEQ ID NO: 130145 - protein, 422 aa, unidentified
MQTLLSQRFTAYVGIDWADTKHDVCLQVEGETRRHFSVIGHTPQSIDRWAKTLFERYGAPIAIALELNKGPLVAALQKYEFFCLFPINPSTLATHRKSFVGSGAKDDPSDAQWALELLLTYPQRFPQLMPQSPAMRILASLTEHRRALVDERVKVSNRLICTLKQYYPLALELFSNHDTVVFCDFLMRWPTLEQIKRSRQSNFLKFFNEHNVRHPQLNQARWEIITKAMPLTQDPGVIRPSQLYATALASQLKGLISTLKDFDREIEETANTLADYPIFKALPGAGQHLAPRLMVAFGEQRDRFGDANAMQKYAGIAPVTQRSGKKKVVHWRYQCSTFLRQTFVEWAAHSITQSTWAEAYYRQQRAKGCSYQAALRALAFKWIRIVYRCWKTGTAYDEIAYLRALTRRGSTLIEAPMEVVTG

SEQ ID NO: 130146 - protein, 402 aa, unidentified
MNAVGIDVSKGKSMVAIMRPFGEIVSAPFEIKHTASDIHSLVELINSVEGESRIVMEHTGRYYEVLAHQLSKANLFVSAINPKLIKDFDNDSLRKVKSDKADAVKIARYALDKWQNLKQYNVMDELRNQLKTMNRQFGFYMKHKTAMKNNLIGILDQTYPGVNTYFDSPARSDGSQKWVDFASTYWHVDCVRKMSLNSFIDHYQNWCKRKKYNFSQSKAEEIYGKAKELVPVLSKDAITKLIIKQAVDQLNSASTTVESLRTLMNETASKLPEYPVVMAMKGVGTSLGPQLMAEIGDVSRFTHKSAITAFAGVDPGVNESGSYEQKSVPTSKRGSSDLRKTLFQVMDVLIKTHPQDDPVYQFLDKKRAQGKPYYVYMTAGANKFLRIYYGRVKEYLSSLPES

SEQ ID NO: 130147 - protein, 389 aa, unidentified
MEVRTVNNLPPAAAHDDAVRCLLAIELSKKSWIVAVNTPLSDKISRYTLKPGDGRELLDLCERIRTRVARETKKRVEIVSCYEAGYDGFWLHRLLEAHGIRNYVIDPASLQVDRRTRRTKTDRVDVERMLRSLMAYLRGEPKVWSVVRVPSVAEEDDRRLHRERDRLINERIQHVNRIKGLLAIHGIYDYQPLRRDRVQRLERLHTTDDRPLPPRLKAEILRELQRLELAIEMIKAIEGERNAIASAKAETEHTSAKKIQDLAKIKSVGPQFATTLVGEVFYRSFDNRKQLASYVGLTPAHFQSGSMSRDQGISKAGNAKARTAMIELAWMWLRHQPDSLLSVWFRDRVGKLKGRIRRITIVAVARKLLIALWRYLETGLVPEGAALKV

SEQ ID NO: 130148 - protein, 335 aa, unidentified
MEFEFFIGIDVSKNELDFSVQQGKTFLFHKEIINDPDVIYALLKELCKLKGFSMNKAVFCLEHTGIYSNHLLSCLYKKKANICLESASQIKKSLGNLRGKNDKVDAMRIATYAYKNRDELRLWSPRRDEVEQLAHLSSTRSRLIKTKKILKTPLKEYGSFVKKKAVKQNTSLCNKALNGIEASLEGVEKEIMNIVNADPELKRLFTLITSVVGIGKVTAIQLIVTTNEFKDINNASSYACYAGLVPYLEESGMFKGKGRVSHMANKKVKTLLHMAAMVAIQYNDELKAYYERKVNIEKKNKMSVLNAVRNKLVQRIFSCVNQNRKYEKNYLKLVA

SEQ ID NO: 130149 - protein, 412 aa, unidentified
MNPVVGLDVSKGESQVQAFLDKGKPYRKSFSIKHTLDGLDRLLEFLREIEKLADGKQPSVILESTGQYHMPVIQFLEEQQYVYIIVNPLISHRARSTNLRKVKIDAIDAYQLCELYYKEELEPYKKRGIHLLNLRNLTRQQETVSSTAVQTKLQLQSILDQIFPEYRGVFGDLYSKISLQILSIFPTSKEVLSVSESDLTNKIAELCTTRSEKWAKEKAIKLREAALRNPFQNNLYQSHIFNLRMFINIVLQYQEHLSKLAAEIDALAKEIEEYEIIQSIPGVGEKIAATIISEIGEIERFNHPKKLVAFAGIDPSVYSSGRFTASINRITKRGSSRLRQALFMAVQCGIRDARKQKTSEEIIPRNKKLRKFYDKKREEGKPFRVAIIACANKLLHWIYALLKRKEAFQNAV

SEQ ID NO: 130150 - protein, 340 aa, unidentified
MEVDVLGIDLAKQVFQLHGASRSGLVVHRSKVSRQGLLTAVRNLKPRLVVMEACSSAHYWARRLQAMGIEAKLISPQYVAPFVKTNKNDRNDAEAIVEAASRPTMRFVPVKTVEQQDMTALHRIRQLLVQQATAVINQVRGILGERGIVIAKSPAAFYRAMPDVLASDDAELTQFCRGLLVSLLEHLRSIEERITEADGKIKGFMRSSALCQKISAIDGVGAVTATAIVAAVGDASKFRNGRHLAAWLGLVPRQHSSGGKSRLSGISKRGDVYLRTLLIHGARSVLRFVADKTDAQSKWLRELIGRRGFSRAAVALANKNARVIQALLSSDRDYVRPGAA

SEQ ID NO: 130151 - protein, 326 aa, unidentified
MEHELHYIGIDTAKEKLDVDVLRPDGRHRTKKFANTTKGHDELVSWLKGHKIDHAHICIEATGTYMEPVAECLYDAGYIVSVSNPALGKAFAQSEGLRNKTDTVDARMLAEFCRQKRPAAWEAPPPLERALRALVVRHQALTDMHTQELNRTETAREVQRPSIDAHLLWLEAELKRLEKQIKDLTDDDPDMKHRRKLLESIPGIGEKTSAVLLAYIGLKDRFAHARQFAAFAGLTPRRYESGSSVRGASRMSKAGHVSLRRALYMPAMVATSKTEWGRAFRDRLAANGKKGKVILGAMMRKLAQVAYGVLKSGVPFDASRHNPVAA

SEQ ID NO: 130152 - protein, 480 aa, unidentified
MAKRAVQHADLKAVPMLLNESLYVGIDIGKAKHVAGFLSKTLLERHERFEACPALVFENSREGFRLLIERIRSLAPLEHIFVLMERTGHYHRTLEQYLQELDITVYVMHVQSRSTGMLKTDKRDALTLANQLYNQLELGVQVPNKLQLIRRVVPPTQAAAELRGLIRHRYELIHESTRRKNKLTAICDELFPELVRVVKDPNGQVALALRERFPTPAALATVSLTTLQQIRGGARSFSDAKLLELQRQAAQSIGIKEVARLRGLVLEQTQLIKELQMLQEHIQQLDKEIGGIVEHAREGQILLSFPGIGPIMAATSIAAIGSIHNFPSAAALKSYFGWAPVVAQSGSTLDHTRLTHGGARTMKHMLFLAVFQAIRLKDNEWARLYERLVKTKCPFDERTQSYLGKTRVIGRVAGQMTEAIYALLKRDAELLSKVPPSQDPPPPLLYDPEVHRQHHLGHYRPLKSTPPPNTITLLHPFPAE

SEQ ID NO: 130153 - protein, 354 aa, unidentified
MKSDKYIGMDVHQATTVIMVLDAEGKLVLDTIVATEAAALIRLVQSLSGPLHVTFEETTQAEWLHDVIRHFVKEVVVCDPRRNKLLGEGSKADKPDARKLAELLRAGLLRPVHHGHQGTRTLKELVRAYETLSEDSQRTMLRIKALYRSRGIRTPGRSVYQASQREQWLKQLTEPGFRQRVSLLYEELDQLRPLRKQAKPAMLAESHKHRAVTLLRTIPQLGPIRCAQIVATVDTPHRFRTKHQFWSYLGLAVVTHMSSEYEIRDGRVVRSRKPLATRGLNRNCNRRLKDVFISAATRGSQTEPYRTYSEGLYKTGMRPEMARLTLARKIAAIALRIWKKGETFDPKKLNWATT

SEQ ID NO: 130154 - protein, 356 aa, unidentified
MNHVNKLDFTGQQIYVGMDVHKKSWSISILSDQFEHKTFSQPPEVGVLVNYLKRNFPGAAYRSVYEAGFSGFWIHDQLQEQGVQCLVVNPADVPTKDKERAGKTDRVDCRKLARSLRNGDIEGIYVPSRPKAEDRGLLRTRHSMVRKQTRCKNQIKSILCFYGIHIPDEVANSHWSKRFIAWIESIRMERASGSTALKVHLAELTNIRQIIAELNRAIRALSITDGYLNNVRILKTVPGISTLTAMTLLTELYDINRFKTLDKLCGYVGLIPNTDSSGEMDRKTGITGRRNAHLRRIVIESAWTAVRKDPALMMAFNELYKHMTKTKAIVRIARKLLNRIRYVLRNQREYVPAIIQ

SEQ ID NO: 130155 - protein, 352 aa, unidentified
MKPQVKGLDSAEALFVGIDLHKVSWHVTIRTADVELFSGSVPGKWEMLRMLLQRYRGSCVQVVYEAGCFGFWLHDRLIEYGVDCIITPPSLIPQESGNRVKTDRKDSRKLAHLLAKGLLKRIFVPNRQECYHRQVVRRRRQLIGDRIRVQNRVKSELRFYDIDLLNPVGKWTKRYVENLSRFRFEDRFMQESFNRLLEQYTFLSGQIEKQNVLVRELSEMDLYRERVEILKSVPGIGTLAAMELLLELQDVVRFRHADQLAAYVGLTPSQYSSADKIRMGRITKVGKHSLRALLVQAAWQLIRKDLAMKEKYERIKIRAGGKRAIVAIARTLLLRVRRIWLDATPYRLALSA

SEQ ID NO: 130156 - protein, 330 aa, unidentified
MKKWNVILGVDVSKLTLDICWAEQNQHIKIDNCSQGFNVFKMWCKTLDIDLKETLMIMEFTGGYEYRFIQFCESKSISYLRVPGLEIKQSMGMVRGKNDQDDSYRIGRYGEQRNNELEASKPLDNNILALKQLMAFRKRLVRERAGLESTLKEREHMYGTKNKDTITRIIRSRIKTNTQHIEQVEQEITAVIKSNESMMLNYRIITSIKGIGCVNGWMTIAYTENFTSFTDARTYGVYVGVIPFGHTSGTSIKRRSKVSYLAHKELKQELSQAARSAMTHDPEMRAYAERKLKNKDYKLVQNNVKFKLILRMFSLVKRGERYVENYNRAA

SEQ ID NO: 130157 - protein, 364 aa, unidentified
MRIIGVDLHTRQQSLAMLNTETGELIEKTLEHDGDEVRKFYSTLPGQVLLGIEATRSMHWFLKLLEDLEIDCQVGHPSKVRAAEPRKQKHDRRDAALLLKLQVENRFPSIWMPSTALRDLRALLMHRHQWVRMRTRVQNGLQAIALSHGLRRGKALWSQVGQHAIESLPLPPHTAYRRAELQDLYRKLQGQIDVLDKHVNDQALQRPGAKLLMTHPGVGPVTALATDVFLGDPARFEAGKAVVSYVGMIPSEYSSGGQQRLGGLSKQGNPFLRFLWCEAAVHAVRRDPELQRFYRRKLAQKGLGKARVAAARKLGIRLWIMLRDRIDYEEFCRRGQMRQKSGDARAGMPEVGHSPAKCSDCETD

SEQ ID NO: 130158 - protein, 430 aa, unidentified
MNHMTDTNTTHAPEQFAAFIAVDWADEKHAFCLQAAGQKQKESGTLQQKPELIGAWVAALRERFGGRAVAVALEQSRGALIHALLGYDFLVVYPIHPTTVAKFREAFKFSGVKSDPLDTDQILEILTKHLDLLKPLRPDTQETRLLARLVEDRRKAVELRASHIQALKASLKEYFPQALEILSGNVTSRLAYDFLKKWPTFENFQQAKPSTVKRFFYGHNVRSPQRIEQVLQVALKSRALTTDTPVVESGVRLSQMHGEVIHTLNPLIEQYDRKIEAAFNDHPEAKLFTGVPGAGPALAPRLLAAFGTDRSRYDAADNVQSFSGVGPVTKSSGKTRVVYARSACPKFLRQTFHEFARLSVAQCQWARNYVDYYTGQGKKYQTVIRALAFKWIRILFRCWKDRTPYDDQKHMKRLKQRGSIFATLHLQKTS

SEQ ID NO: 130159 - protein, 457 aa, unidentified
MNKIRKAETDPFEKMPIINSAAAGIDVGSRSHFVAIGQSKEDVREFGVYTEDLHELCKHLVAAGRTTVALESTGSYWQQLFVLLQQYDLNPILVNGKFTKNVKGRKTDVQDCQWIQKLHLMGMLEGSFIPDLFTEKVRQYYRHRQTLVNNAASYINKMQKSLRMINIRLDAVLRDVMGRSGKDIIEAVLKGERNAAVLASLAQPTVKAPKTEIIAALTGDWREEYIFELKQCYEIYQHYHKKIDECDETIEKLLTEEIARRQKEENLSKALVKIKKKKVRKNEAKINVQQLAVDLTGGVDISSIEGVGLGLVLCIISETGLNLEAFPTAKHFSSWLSVAPDIKKTGGKVMKNRTRKGKSRLAKAFMQSANAIGNMKTGGYLVHFFKRIQRRGDRKKAIIATANKLSKIIWNMLVKKEPYNPIMPKEYLDKIRKKEVKNIQRKIRQLNITEEELLFAI

SEQ ID NO: 130160 - protein, 359 aa, unidentified
MTNLTKLKTFFNTVHLTADDDLFVGIDVHKKSYHVALFLNDAPAVDFVMPANKQQLTDKLKTTTAALKRVVYEAGPTGFGLARHLENQNMPVSVIATSKIPRNSAGDDKTDKLDSKKLSQYAAKGLLTPVKVPTLKQEADRQLFRMRHRQARNLARVKTQIKSFLLMHDIEQPDGLERWTKGSVEHLRSLPLRQTLRLSLDELLNDLDHYDLRVKEMNKMLAEHLNKGQLARRIELLKTHPGVGTVVACQFATELFHYRDFTNTRYLFKYLGLSPKIRQSGERSKRGSINKVSNSRLRTNLIQAAWQWIRLDIDARKTYLRILTNCGGIKQKAIVAMARKLSGHLWTMLMKNQPYDKSK

SEQ ID NO: 130161 - protein, 387 aa, unidentified
MARKRILSTLDTSIAYEAVGLDLAKTDVALAAFDSDHKEPYFIDRIPYDKLYELLANMAPTLVAMEPCSGAHQIAEQIQALGHEVMMISGRHVQAWVKDHCNGQKTDLNDAFAILNLAYDRWLTPIRGKTREECRLLALQASYRQLKGQRTKTMVHVKATLHAWGFPIRTGSFNQKALRELIDANREAFGGEMAETLHLMIDRVRDLDHDIATVLKLLTEATKRDPRASLLRSIPGFGVLTTSRWCAVMGDIARFDSPKQTMAFIGLVPNNRITGHHTETSSGREARGQGRMSKRGDKMLRSLCILGAASLCMLVRKDRLPDCPFVASIKARLASPRPWFKVLVYVAAKLVRIATALLKYGEKFSFEKAGISKAVLKQWELEQAKAA

SEQ ID NO: 130162 - protein, 319 aa, unidentified
MKTFSQTPSVKGLVGHLKKNYPGALYKCVYEAGFSGFWLQRELTKFGIECLVVHPADIPTMDKEKKQKSDTIDSRKLSRSLKNNEIEGIYIPSVELQESKSLLRSRVRIVTDLVRVKNRIKFFLMHYGISLETYSDRHWSKKYITELKQVKLKTTAGQYSLEAYIKELEFLDQQKKELDKAIEELAEDPFFKNNVGLLLKIPSIGINTAMTFLTEIGEIKRFRTIDQLCCYFGLIPNTHSSGEKENVGRNTKRGNKFLKHKIIECAWVAIRKDPGLLMYYKNQIARMESNKAIIKVARKLLNRIKLVLTERIVYQIGLA

SEQ ID NO: 130163 - protein, 349 aa, unidentified
MYPFYLGIDLHLKRTYAVLMDSTGKVIDERRIRNLDMKAYLQGKVPRETYAVLEATRNWAFMYDLLAEHVERVELAHPKELKAIASAAVTPAPVGGAGETDQIDAKVLANLARLNFLPTSYAAPKEIRDLRMYIRHRDWLVGQRTQAKNRIHAVLASYNLVSPSKDLFGVSGREFLAQQMDSIRPLARRVVRDHLTLIEGLDQQIEALEADLQLSEEHQQTLKLLKSMPGVGQITGTVILAEIGDIERFNSPKALCHWAGLTPRVRKSDQVVRHGRITKQGSPYLRAAMTRSATVASRSSKRWYHIHEKLLPRCGRTGAKVAVARRLLTVIYFMLKRQQPYLENYPPDR

SEQ ID NO: 130164 - protein, 375 aa, unidentified
MITTTRPVMSVSEPVLFVAFELGKNDWKLAMTSGFGVAPWLRTVASGDWAAVERAIAQGRARFAIPAAAPVVSCYEAGRDGFWIHRALIQRGIQNHVVDSASIEVNRRARRAKTDRIDALKLVQMLVRAWHGERRVWSEVHVPSVVAEAARHVSRERTALTQEQTRLVNQMRGWLATCGSALPRRRSGQWWRTVLDWAGATLPVELQARLARTAARLALVAEQIAALDTQQTSAVRAAAPTSAVSQLVRLKGVATTSASVLLDEGLMWRDFRNRRQIGGFLGFAPTPYNSGESERDQGISRAGNNRLQVISIQLAWSWVHWQPHSSLTRWYRANFGTGKRARRIGIVAVARKLLIALWRYVTTGVVPTGAVVKVA

SEQ ID NO: 130165 - protein, 391 aa, unidentified
MVCVGIDVAKDKHDCCILDSDGTIRADCITIPNNMDGFKQLLQTIRDCTKKSDKIKVGLEATGHYSYNILGFLLDNDLAVYVMNPLHTNLYRKSLSLRKTKTDRVDARTIATMLLSDVDLKSYTDIAYHNEELKSLTRYRFDKVQECAKLKQSVSRLATILFPELEGLVSSIHGTSIYALLSEYPGTKQISEVHLTKLTNLLTTASKGRYGKEKAIQIREAARASIGSVMPAKSLELKHTIKLIQELASEINEIEDSIQKIIDELNPPILSIPGMGVNSAAVILAEIGDFSNFSSPDKILAYAGCSPSTYQSGKLTNCYAHMEKRGSRYLRHALYNATKYVCYWNPVFAEYLAKKRAEGKHYNVALSHAMKKLVRLIYALQKSGKAYLAAA

SEQ ID NO: 130166 - protein, 345 aa, unidentified
MKKIFIGIDFSKEKFDATLIKAEGLEECGPNVHEVFDNKTSGYRRLIRWVKSNSDDMPVDSWLYCGENTGGYSIGLSNYLYASGYDMWLECAFKIKRSSGMQRVKNDRHDSWLIADYAMRNHDKAILYRPQSTALNSLREVFLYRHSLVKQRVALSVRRDEKRLTQEKSDAKTFMSLTSKHLVTEVNKAIAKCDQKIREIIASDDELCKVFEIITSMPGIGPQNASCLMVYTDNFTRFDTSRKIACYYGIAPFGANSGKTVKEKPRVSPFANRMIKSLLSQAALAAIKADANICCYYQRLIERGKHPLLAQNNVKNKMLHTLVAMVRNKQKYNPDYIYNTVSGVA

SEQ ID NO: 130167 - protein, 345 aa, unidentified
MEITTVGLDLAKNVFQVHGISSTGEVVVRRALRRAQMIPFFSKLEPCLVGLEACGTSHYWARELTGLGHEVRLMPPAYVKPYVKRGKTDAGDAEAICEAVRRPTMRFVPVKSVDQQAALALHRTRDLLVRQRTQLVNMIRGVLAEFGIEIPKGITYALAFVRRVVAGEAQDIPSLAGKVIGALAEHALEGQARIRQLERELLAWHRASELSQRIATVPGVGLLGATALAATVTDPAQFRSGRQFAAWLGLTPQQNCSGGKERQGRISKMGDQYLRRLLVNGMTSLVARNVRRPDVADGRVAALLARKPLRVATVAMANHAARAIWAIMARGETYRAPKPFEAAAA

SEQ ID NO: 130168 - protein, 461 aa, unidentified
MRAKKPTGKQKRSVQKKVDWKALEIVHPDAAGIDVVGSEHWVAISPDRDPEPVRRFGCFTADLRKMGRWLVEKGVRSVAMQSTGVYWMPVFEVLEQQGLEVYLVNAQHTKNVPGRKSDVQECQWLLKLHAFGLLNNSFQPSDEIRVARTLWRHRGDLVAEAGSSVQRMQKVLTEMNVQLSHVLSDLSGVSGMNIIKAILEGERDPQVLAAMVMPGVKATPEDIIKSLEGNWRDELLFVLRQHLELYRLYQEKITDCDRQLRKHLESLGSKVDPQMQPLGPRPKGKKIARNAPEFDLRSELYRISGIDWAQINGIDVLTAQTVIAEVGADLSAFPSEKQFTSWLGLCPTNEQSGGKILNRRTRKVVNRATVALRNAARTLLRSQSYLGAQYRRLRTRLGAPKAITAMARKLACLFYRLIKHGHQYVDKGTEYYEARYREQQIRSLTKRAQKLGLQLVIPKTA

SEQ ID NO: 130169 - protein, 344 aa, unidentified
MATYYIGADVHSNNTDLAIEQGGRIVARYSVPTSIPSISAVLNSIQGKKILAMEEGPMAGWLYRNLHEKVNKLVVSEPRRNKLITCEGDKDDKIDSGKIAVLLRGNYLKAVHHTCDSHRAHLKHWVNLYHDRVRDAVRDINKIRACCRMHGVRIPRKVVRNPVRRRAWLSELDNSVLKTQLHMLWIGYDATKEQVKIAKKQFSSYARKYPIIKSWSALPGIGIIRAATIFAYLDTPWRFKNRAKLHRYCGVGLMRITSGKDKKGRPKSPRLKLPWSVNGRLKNAVMGAAITAIERGDNAFKDYYKRMVSNGITPANARHSVARKLVSTMSAMWKTGNEYDEKLV

SEQ ID NO: 130170 - protein, 312 aa, unidentified
MPAKLPPSYIGLDISKDQLDYCLSDTVEGHCAYTPEGCTELIKKLRPIKHARVICEASGGYEKLIVAELLHAGLEVCVVQPGRVRALAYAEGLMAKTDRIDARLLRRFGEKVEVRVAPPTDPALSTLRELLEHRRQLTMQLVEVNGRMALAGRTLRKFLEEQKGFLENQIQKVDKMIDEHIDQNPDLKNKSERLQQVKGVGRILAATVLAYVPELGRIEDNQLSALIGVAPYPKDSGKTIAPRHVRGGRAQVRHVLYMAAVCAARSNPILAAFYQHLRAKGKPAKVCLVAVMRKLACLMNKLIQNPNFALAQ

SEQ ID NO: 130171 - protein, 449 aa, unidentified
MSDRSGVSRGDRNRNARLARLREAVPLSNAIAGIDLADSKQMVVVTDHESRVLARRTFRRRAWELGMALDWAAARAAAAGFAGVTVAVEPTGHRWRVVGQLAGERRMPFVCVQPLMSAWARRAEDLTFDKTDDKDAVLIARLAGQLRCYLPEPADAIWGRLRQLGIRRARLVADQVAQVQQMRDLLECAWPAVLDAARQPFKSTTWHAALTVALARADGGDLARVTWLGRRRFDTAVRRQVARWDAVHPWQKIIDAVLAACADPAGVTELRHGALERVQLLLADWRDTRARLADTEQRMVTVLDELGLTSLVTSITGLSAVGAASILAETGDPARFTTGRALVKHAGLAPRQKSSGNYTGRTRTTGQGRPALRLAAWRAVWGALKSNPVYATRFAYLTSREHNKLSTGQAHAAIAAALLRHLHAVITTGQRWDPAIASGGRPNQTLIAA

SEQ ID NO: 130172 - protein, 343 aa, unidentified
MEQVSMIGLDLAKGSFHVVGRDASGRRVLSRALRRGQLEAFFAKLAPCVVAMEACSSAHDWARRLMALGHEVRLIPPIYVKPYVVRNKNDMRDADGLSQAGQRPDIRTVAVKSAEQQARASLHRVRELLIRQRTACINQIRGLAAEFGLVARGGRMGLKDLIDQVASSTLPAQLRLAIALQARHFAQLSDEIDELTGQIARQARACEAARRLMSIPGVGEIAADALMARLPDPAAFSSGRDLAAWLGLTRLDNSTGGKPKTTGPISKKGDRALRRLLVLGATAVIARQQRDKRLDPWIDGLIKKRCFRVAAVALAAKNARIVWALLTRDQSYKPGHQPTLTAA

SEQ ID NO: 130173 - protein, 425 aa, unidentified
MPYRIAGIDVHKKMLAVVVADVEIDGDFHFDRQKVGTTPADLRGLADWLVAQDVEEVVMESTAQYWRPVWEALEQHWRPRRRARDGAPPLAGTLHLAQAQSNRGPGGRKRDFPDAERLVKRLVAQELTLSFVPDTEQRLWRTVMRRKYQITRNRVQLHNRLEALLEEAHIKVSSIVSDLLGISARRMLQALADGQTDPTALAALAAPRLRATPSQLCDAFQACPTLHPVYRRLLKLTLEELRLIEDHLGQLDQQMADLLAAHHDAVQRLAEVPGLGVDSAQQIIAEVGATAATFPSPKHLASWMGACPGNEESAGVNYSHRCPKGNRQMRRVLNQAANAAVKAKGTIFAVVYRRLVPRLGHAQAIGAITHRLCRLIWKILHERVRYEERGPAVSVEAKKVRARKMIRELRGLGYRVEIVAPSSTV

SEQ ID NO: 130174 - protein, 346 aa, unidentified
MTKQTSQATISTIGIDIGKNSFHVIGFDERGAIVLRQKLSRSQVAVRFVNFPRCLIGMEACVGSHHLSRRLQALGHDVRIMPAIYVKPYLKGQKNDFRDAEAIAEAVQRPTMRFVQTKTLEQLDLQALHRLRTRLVRQRTAVINQIRAFLLERGFAVRQGLNPLRQALPEILAKPGDELSPRMIHMIEGLSDDWRHFDHRIDDLTGEIEALVKADDNCQRLMTIPGVGPLTASAMVSAIGDGSAFRRGRDFGAWLGLVPRQMSTGDRTILGGISKRGNKHLRTLFIQGAWVVLMRSKNWHKYSFGNWLEAASKRLHRCVLVVALANKLARIAWSVLNRGRAYDASL

SEQ ID NO: 130175 - protein, 382 aa, unidentified
MRNDLSRSRTLFEQDGTLIAVVELSLSSWVVAGIVPGMDRHPLKKLGADHDALLQLMERWRDEAIKAGRTISRIVLAFEAGRDGFWLARWLKARGIEAFVIHSTSVAVPRDHRRAKTDRLDTELLKRAFLGWLRGEPEHCHMAAIPTPGEEDARRPNRERENLIGQQTRIVNRMKACLVRWGIRNFKPTLRQAAERLETLRTPEGAALPPNTLAEMRRDMARLREQIREIEASRERRLDQASENEPHAMIRLLARVVGVGIETADMLVHEILSRQLRDRRAVARYAGLTGSPDESGQRRKEKGLARAGNARVRRGMIQLAWRFLLFQKDSELAKWFHARTVDGRGGTRNTMIVALARKLLIMLWRMAMTGEVPPGVILRSAA

SEQ ID NO: 130176 - protein, 438 aa, unidentified
MSNKVIFNLDELFISVGIDVGADFSWMSIALPNQQFVGKPYKILHNSIDSLTTAVSKIKEAEELYSLESRIFLESTGIYHYPLFCYLRDKGFNCSVINPIITKNSTNINIRKVHNDRFDSKKAALVGLKPDLKVSLMPSDLALNCRNLCREYYDLMDNRSAYVNKLQGELRMAFPQYLGIFSKVTINTSLTLLETYTSPSAFLKADKQEIIDIIKSTARFGLTYAQNKYNAIIQAATDANQFGYIIDSNIKRIRLYISFIRKYDEEINSILESLHELVDANEDSDFVKQIHLIETFKGAGFLSAVSIMGEIGDFSAFSKPKQLFAYFGLDPAVKQSGKFEGTKVQMSKRGSAIARRVIHTLTLQSISISRNREAKNPVLREYYLKKCDSKPKLVAMGAVSHKVCNMIFAILRDNKPFKIIVPQEHIKQYNSAKCDIAA

SEQ ID NO: 130177 - protein, 351 aa, unidentified
MSWVTNTGVGLDVGEASTGVWVLGADEAPLLERTSTSDASEIAQCLSPFPRDGIAAVAMEAGAAHSLVRKLAALGLPIVLLDAGKVSRFLSIRHHKTDRNDARGIAEIARQDRHAHLRSYIRDVECQRIRDQLIIRNQLVHQRTASRNALRSMLRNQGSATRQLKSGKRLRKRVEAELQIIERVAGQDAASATRSLLELHEAQSRFVEQSDKRLARVAADIPEVQRFLKIPGVGPICAISFYSTIGDPHRFSNTASVGPYLGMVPKLKQSGLELRRSGITKAGDTLARGHLVLSAGVMISRAAGDSAVRDWGRTLVGKKGYGKARLAVARKLAVIMLSIWKSGDDFRPYPT

SEQ ID NO: 130178 - protein, 388 aa, unidentified
MQVIADRPEAPSAIRSDLGAIFVSMELSRSTWLITSLSPGGGEKMSKHSVPAGDVCTLLTRFSVLKQKAFARTGKSFPIIVIQEAGLDGFWIHRVLQNEGIESHVVDPASIATSRRRRRAKTDRIDGEALLRTLLAYKRGEPRVCAMVKAPAPEEEDRRRLCRERKVLIAERVEHINRIKGLLFSQGVSGYEPLRRDRRRRLDELRTGDGRPLPMHLKVQISRELDRLELLLEQIKAVEAERDALLAEQQVAAPGPVAMLLDIKGVGPEFAAILWLEGLFRHFDNRRQIASYAGLAPTPWQSGSVDREQGVSKTGNPRLRTTLIQLAWLWLRHQPQSALALWFEERVRRNGGRLKKTTIVALARKLLIALWKYVTAGVVIEGAVMKAA

SEQ ID NO: 130179 - protein, 355 aa, unidentified
MVMVLGVDVHKDTHTTVVVDYAGREQALRTVRAIDSGHEQLVAWARREYPCERKWAVEDCRHVSTRLERALLAAGETVVRVPPKLMADARSGARTRGKSDPIDALAIARAALREPDLPEAVHDETSRELKLLVDHREDLLGERTRMINRLRWHLHELDPELELPARSLSRLRRLDGLAAWLVEQPPTATTGLITRLATELVADIRALSVRINALEREIAQRVEKVAPQLLELPGCAALTTAKIVGETANMARFRSEACFAMHAGVAPIPASSGRTQRHRLARGGNRQLNAALHRIALTQVRMSGSLGHAYHQRRRTAGDTSKEALRALKRRLARVVYGRLTNTATPAADGHPIAA

SEQ ID NO: 130180 - protein, 548 aa, unidentified
MAARQSKTASPKPLPDPSSRPRAQRHKQPSPQAKAYSKRKTKAHAKAQAAQAAEAAQVIALPITQAHAAGVDIGSASHWVCVGFTSQPDDDSLVREFPAHTEGLHALVAFLQEHQVSTVAMESTGVYWIPLYELLDQQGFEVYLVDPSYTKQVKGRPKTDRLDSQWIYRLHSVGLLAAAFRPDEKTCQLRSYLRQRGNLIRYGGQHIQHMQKALEQMNLKLSLVLNDVAGLTGRKIIQAILRGTRDPAKLAALRHPHCKARPEQIAQALTGSYREEHLFSLRQAYEGWQFYQKQLDHVDEQIQRQLQRMKTDRALPPLPAKAPQRGRRPNDPRFDVRTALYYVVGLDLTEIEGINEITALTVISELGTDLSKFATVKHFASWLGLCPQLRKTGGRVKSSRTRPGVNRVAAALRLAANSLYQSKSALGAFYRRMKSRLGAASAVTATAHKLARIVYMALRHGMAYVKQSQEEYEKQMRAKLIGSLKKRARQLGLEVKEKSEEGQTPGDGEEGSKNEQKKSKGKAKRHADPKSKGKAKSKSKPSKSSNRE

SEQ ID NO: 130181 - protein, 346 aa, unidentified
MNQSTLIAVDLAKEVFQVALARAHGKAHAHHRLSRARFEAFLANADPSIVLFEACGSAHFWCRQARELGHQPIMLPAQFVRKYRLRNKTDQTDTEALLDAYRSGRVHPVPIRSVDQQQIQQLHRVREQWKSTRVARINGLRGCLRELGHAIPAGPSAAKRHAVAIIDQHDFPAALRIVFSELLQEITDLEDKITLAEQQIAALTRNNDDVALLQQVPGIGLLTSTAIVACAGSPDHFKSGRHFASWLGITPLECSSGHKRWLGRITKRGDKYLRMLIIHGARSALCRAKTLAKSGKPLNRIQRWALRLEQRVGFNKATVALANKMARICWAVWKHRQPFNPGPALG

SEQ ID NO: 130182 - protein, 407 aa, unidentified
MEKRVKKSNELAIQPQLEKGGGIDIHKTKMVGFIYDQKGQKNEWQEFPTYTKDLKRLRDWLLENHIQDVLMESTGVYWISLYNILTSSGIRVVVANPQSIKQIPKRKTDKKDAKWLCKLLINGLVRPSFIPPIEQQELRELCRNRLFYTQQIAKIRNKIVKILEGNNIKIRSVVSIISTKSSMEIIKKLSEGITDISELLSSCYGTVKKKAAAMADALDGTLSQHSRDLLKMLLSDIAHNTQQKNELDQRIKKIVEDRYNDTVGRLQNISGVGEQSSQIIVSEIGDNMGVFPNADHLTSWTGFAPGNNESAGKRKPVSVKKGNKYLRVALIAVAWAAVRTKDSYWRALFENLKKRMKSQKAIVAIARRLLKVIYKIIETKEEYIEKGLIHFFELKNKREEYLRKVMA

SEQ ID NO: 130183 - protein, 364 aa, unidentified
MEQITRGERGRVVVRVGVDLAKRVIQVHAVDAAGQLVLGRALARDRFIAWCAQLPGGCVVAMEASSSAHHWARKLCSLGLDARIIAAHLVKPYRKQGSSGKNDANDAAAICEAASRPSMHFVPIKSVEQQSMLCVHRLREGIKEERTACINRIRGLLAEFGLVFAQSPKVLRLALADTIEDASNEMGTLTRLTLQRAHAQWRELDEHLAWCDERIAEHTRTNEQVKTATTLLGVGPLIASPVVATVGDFRQFRKAAQFGAWIGLTPKQHSSGGKTRLGKITKRGDTYLRTLLIQAAKSAVLTAHRRSDRISNWLCTLRERSGWQIAAVALANKNARILWALMTKGEAFDANHLSIKPGMSSQQT

SEQ ID NO: 130184 - protein, 310 aa, unidentified
MEHRRIAGIDVSKDRLDVHVLPSQEAFAVSRDVTGFVELCRRLGDTVDLVAVEATGGYETLVAATLSDHGLPVVIVNPAQVRAFARALGQRAKTDPIDAAVIARFAEATRPQIRPLPDGAARLLADLMARRRQIVEMIASERQRLHRTEPPRVRKSIERLLKALERELGTIDHDVDGAVRGSPLWREKEDLLASVPGIGRIIARTLLADLPELGRLDHKQIAALAGLAPHTRQSGLWKGKARIGGGRAVVRTALFIGAQVAKRWNPPLKAFYERLIGAGKTRMVATIAVARKLLVILNAILRDRTSWQNA

SEQ ID NO: 130185 - protein, 306 aa, unidentified
MSNHSNIILGIDVAKLKIDVVLLFENKSLAKQFENSLTGFKLLSAWFKSLHLKQVHACLEATGSYGDAVAQFLFENGHLVSVVNPFIIKGYAQAKLQRNKTDKADARLIAAYCAKENPPLWSPPKPEIAELQAFTRRIETLTEMLQMEKNRLETAPSKTKPSILRIIKTLEKEIENLRKNIKQHIDQNPDLKEQDQLLQTIPGISQKTSSLLLSEIEFSRYNSARQVAAFAGVTPQKAQSGTSLKQTSLSKLGNSRIRKGLYFPAVVAKNHNRIINDFAARLEKNGKTAMQIICASMRKRISLLEF

SEQ ID NO: 130186 - protein, 345 aa, unidentified
MQLHTIGIDLGKTVFHLVGLNLRGEVVVRKKFSRKQLLHFTANLQVELIGMEACGGSHFLGRALREQGHEVRLMPAQYVKPYVKTNKSDYIDAEAIAEAVGRPKMRFVPIKSDEQLDLQSPHRVRERWVMRRTAVINQIRGLLLERGITVRQGRCHIDAALPGILEDACAKLSGALRVLLVQLKLELDHLQMRIDEADAMINKAAGENEACRRLVAIPGIGPVTATAIIAAIGNGAAFKKGRGFSAWLGIVPGEYTTGGKQKLLGISKRGNSYLRRLFVQGARAVLQQKAKQSSGLSAWLAQLTTRTHSNGAAVALANKLARMAWAVLAKNEPYRPPMLVGAATA

SEQ ID NO: 130187 - protein, 363 aa, unidentified
MKIIGCDFHPSFQQIAMLDIETGELIERKLLHPEEATRFYEALAGEEVLVGLESMGNTLWFERLLKRLGLDLWIGDAMAIRVSNPRKQKTDKRDAWHILKLLQEGRFPRIWVPSLEERDLRQLLKHRHTLVQMRTRIKNQLQHIALNQGWQKKRRLWTQSGQEWLRQLELQPWTSRRRDDLLQMLEEMNRRIAQLNLAAEQAAAQRPEAVLLMSHPGVGPILALATVLTLGDVSRFPRGKQVASYLGLIPKEASSGQRRRLGAISKQGNSFMRFLLVQAGMSAARGDAGLGRVYKRLLAQRKHHGVAKVAVARQLVVRLYWMLREKKQYPAVVRMQSSPSHPVVAVMTVALNGRSASRPRQQG

SEQ ID NO: 130188 - protein, 465 aa, unidentified
MKRQTRRRPPTPRQSPAALDRLHPDAAGIDCGSAEHFVAVPPDRDTTPVRSFPTFTGDLHRLAEWLTACRITHVAMEATGVYWIPIFEILDARGFQVILVNARHVKNLPGRKSDVSDCEWLRDLHILGLLRGSFRPADGIVALRGYLRHRTTLIESAGALVQRMQKALVQMNVQLPLVVSDITGVTGLRILRDIVAGQRDPQQLARHRDYRCHASEAEIVAALTGNYRPEHLFALQQNLELFDIYQRQLTACDVAVEAHLAQLAAITTPPAAPLPAARRRQKPRDNEPRFDVRTPLYQLPGVDVSQIDGIGPYNALRLLSEIGTDMARWPTEKHFTAWLTLAPQNKISGGRLLSSRTQPSANRAAAIFRLGAMNLGRTQTALGAFYRRVAFRIGKAKAITATARKLAVLVYRTLKDHLVYVDPGADAYDAHHRIRVVRRLKQRAEHLGFGLVNLSTGEVVEGAVS

SEQ ID NO: 130189 - protein, 430 aa, unidentified
MTLRKSTPTDTVLVAIDVSKQRNDVLIEVPGKRRRRRLVVLNTRAEHDRFIDLLQGFERTVVAGFEATGNYHRPLAWRLMDANLDARLISSVALARTREALHNSWDKNDPKDAQVILHMLRIGATQVYNDPIVSGINDIQELSKTHEIVSKAKTELWHRLLTHYLPLYFPEVARFAGNSRSDWFLAFLERFPTPASITEHDKEAFIDAAWDVVGKKVSKAHLLGDIYETARSSIGLPAAMDGAAVAMFRMVIGEGRNLIRQRNEIERQAHNILCDIGDYHRLRQIPGIGPIHAMTILAEAGDLRRFRHHRQFLKFCGLDLATHQSGQFRGQTKLSKYGNARLRRTFWMAAQVAIRQRDNSLRSKFERYIAKDRDNPDLKRKALTAVAAKMARTAHALIKTGSDYRPFIEEPIPSGRTTIRMGREGTSVTL

SEQ ID NO: 130190 - protein, 343 aa, unidentified
MKLTRVGVDLAKHVFQVHGVDRAERLVWSKRLKRNHWIEEIEQNVEAGTEIGMEACGGAHHWARVLQSKGYRVRLIAPQFVKPYVKSNKTDANDAQAVCEAMSRPSMRYVAVKTIEQQDIQAVHRVRASLISERGAKANQLRGLAYEYGLVAPREIAVLRRAVPAWLEDACNGLTVRMRALLAGLYADLQALDERVSELDKEIRAIGRENEAVGRVQQLRGIGPLIASALVAMIGDARQFKNGRHVAVALGLTPRQHSSGSKERILGISKRGDSYVRTLLIHGARSALRTAAGKNDRMSRWALALAQRSHVNVAVTALANKMARVAWAMLKHGTHYEPNGLAA

SEQ ID NO: 130191 - protein, 370 aa, unidentified
MNYAALDLHERTVQCVLKDQDGRIVKESKTVKDEGRILAFLDGTDASVVMESGRNHQHIYDVLKERGYDVTVAHPLMVKAIAYAKVKTDKVDARVLADLLRADMIPESYVPGRDIREIRDLVRRRHYMVKLRTMQKNKVHAELATRWLKYEGDPFTEDGKNYLRSLAIDAVNDYLETIEFLNRKIHQLDEKVRRVVESDKYAKLLMTVPGISYYSALLISSEIADIRRFPDHEHLCSYAKLSPGVRQSGETQHTSKSMGNSMMNWIMIQCTRIHVRRYDSAITRFYQQVSKRRGEKVAIVAAARKLMRAIYIMLKEEGACAVERDFKVGPQANAKATVLHRERMGECPSSNANRTRSQRHGSPHDHRPAS

SEQ ID NO: 130192 - protein, 463 aa, unidentified
MKKIKSGSKRKARNLSLSIVNPNAAGIDIGDTVHAVAVPPSRSQVPVRTFGTMSCDLDEIADWLEECGIDSVAMESTGVYWKPLFSVLVGRGIAVYLVNSAHVRNVTGRKTDMGDAAWIQQLHSCGLLRSSYLPSERQESLRTFVRMRRTLMEDSSRCVLRMEKAMELMNLKLHTVISDITGVTGTAIVTAIISGERDARNFLPMVHHRVKASPEMIEKSLQGQWREDQLYALAQSYRCYCFFQAEIAKLDEEIQKELKTYAASLNEGEIPQSETEVSPEGKNKVAKKKNKNAPRINIRNNLTAILGTDVLGIYGLSELSALSILAEAGTDMCKWPTHKHFVSWLNLCPNNKMSGGKLLSSKVRRKSNSAGQAFRIAANSVQRSDHWLGDYFRRMKSRGGNRYAIVATANKMATIYYKMVKDKIEFTPFDQKEYQQKRLAGKIAHMERRLAELKKTTIKCADG

SEQ ID NO: 130193 - protein, 355 aa, unidentified
MTQVSYSATNFDTFIGIDVDKKSYVFTVGDHNIMSRAKKIPANPEQLYNFIQNNLKGKKVICAYEAGPTGFHLHDYLTQKQVTCLVIPPTSIPKAPNEKVKTNNIDATKVTEELRASKAKSIRVPQGAYRELRYLIKTRENYARNRKTAKQRIKGLLLYTNLYPFLKDPDIRWSSRYIKELKQLQCSSPLRKSLDMLLMDFEYARKQTLFILRELKAFCDNSIEIKKNIEYLQSIPGIGFITAATFLGRIGDPQYLKNERELGAFIGVVPRENSTGDKINRGSITHLGNQTLRFLLIESAWVAIRKDKELEQYYHRILKRNNPKAASKIAITAVAHKLTHRIYRVLKDQRKYQIH

SEQ ID NO: 130194 - protein, 309 aa, unidentified
MHGVGIDVGKYWLDVALHSDPHIHRFSNDPVGIAQLIEYLSSEANLFVVLEATGGYELPALRAVVHAGHAVSRVNPRQSRSFARASGQLAKTDALDAIGLADMAHCMYQRLPRYVEPESWQITLAAYVTRRAQLVIAVQQQQQQIAALTVLALRKSAQRSLRALEKERSELDKQITSLTTPRLTPAWRSIKGLGPVAHATLLSMLPELGSLSRQQIAKLVGVAPLNRDSGTLRGHRGIFGGRARVRAVLYMAALVAVRWQPEFKAFYQQLRVRGKLAKVALVACMRKVLVVLNARIRDERRNTFEVVVA

SEQ ID NO: 130195 - protein, 451 aa, unidentified
MSKDKRKKEKKKAIQGMPVLQYYAAGADIGDTKHDIAINDGLGGQIVRTFKTFTADVQEAVNWLKDEGVTTVAMESTGVYYLTFYLMLEEAGIEPYLVNARHVKNVTGRKKDDTDAMWIQRLHSCGLLQNCFQPDNDFRTLRTYVRQRKGLVTRCSDEVRRMQKALELMNIKIHVVISDLLGKTGMQIIKAIIDGNYDPSELAKLRDPRIKATEQEIIKSLQGVWKEEYLFTLKQAYDMYFFYQQQIGECDEKIHEQLLKQIGKANQGDITVEKTIDKKKGKPGKNQFSFPVAPLLIKLTGVDLCKIPGISEVSALEFISETGIDTTKWKSSKHFAAWLNTVPNTKITGGKIISSKMMKKKNRAGQTLRMGASSLYRNKTPLGDYHRRMSAKYGGKGASLATGHKIARIIYKMLENKEEFNPQMLIESQQKYRESRIKQLEKQLARLKKAA

SEQ ID NO: 130196 - protein, 356 aa, unidentified
MPKIKQPDFSGQTIFCGIDVHKNSWRVNVRDDQFELENYSQDPNEELLLKHLQKRYPGANFQVAYEAGFSGFGLQRSLKSSGISCMVVNPADVPLTDKDKKRKSDRIDARKICRHLSHNSLRPIYVPSIKMEHARALVRQRSKLVSDQTRCKSRIWGFLMVHGLALKMGKPNDYWSRRFIESLKTLAGLTPLLRHSLDVKLEEYLFIRKLVGNMTKQIRILSIQKSFASLQSLIQGIPGIGLLNSMVIITELQDMKRFKTLDRLCSYAGIVPDTSSSADRTTVKGITHRSNDYLRKALVESSWVIIRKDMAMLQLYKKYCRRMVPNKAIIKIARHLLSRIRYVWTNRIEYEVGLVG

SEQ ID NO: 130197 - protein, 346 aa, unidentified
MKNYAGLDVSLKEISICVVDQDGKVVAHGTTPADPEGVAGWLKNRSLRPETIVHESGQLSTWLQRGLVGLDLPAVCIDARKAHKSLSARLNKSDASDAEGLAQLARTGWFTPVHVRSQESDRLRALVAARERLVRLRKDLEGHVRGVLKTFGIRMSAVSQGQQRQDFRDQLAAAGETDPVLRAIADGFIAAHSTLCKAMAEMERALKAMSKSHPVARRLMTIPGVGPIVSLSFVAFVDDPRRFGSTSDVGAFLGLTPRRHQSGEMDWSGRVSKCGDAAMRSLLFEAATSVIRQVKRFSALKSWAVRLVARRGFRKAAVATARKIAVLMLTLWKSETDFQWTKEATV

SEQ ID NO: 130198 - protein, 371 aa, unidentified
MKESSKPLYVGLDVHKDSIAVAYAPEDRGAEVVSLGAIGPRQCDIDKLIRKLQAKGATLVFVYEAGPCGYWLYRYLTRIGLVCHVVAPSLIPRKAGDRVKTDRRDAITLARLMRSGDLSSIYVPQVEDEALRDLSRGRDDAMQDLKRSKRRLKSFLLRQDIRYEGRANWNAAHLRWLSEVVCPTPPQQIVFQEYVRAVTEQQERLQRLERELHEAVKGWRLYPVVEAIQALRGVELTGAVILMAELGDLTRFDTPRQLMSYLGLTPSEYSSGERRRQGGITKAGNSHARRALVEGAWAYRYPAKVSRHLQLRLEKLPAEVQAISWKAQVRLCKRYRQLTARGKHVNQVVVAIAREMAAFAWAIARLVPLAS

SEQ ID NO: 130199 - protein, 426 aa, unidentified
MNPSDNFAATIGLDWADRKHDLWLRPIDGSKAEHLQLEQTPEALHEWVAKMRERFGNHRIAIAVETSRGPVISALMAYDFIVLFPINPRALKSYREAFAVSGAKDDRTDAQLLEEFVHLHPEKLRALEPDTELTRRLGGLTQNRRHLVDQRTRLVNQLHATLKTYYPLAETLLHGQMNTPLAAEFLLRWPDLASLQQAKPKQLRSFFYKQNSRNANTIEERLSAIQQAKALTTDPAIILPARELVLALAGMLRPLHQAVARLEKQIQQAMDEHPDAPIFRSFPAAGLALAPRLLVAFGTNRDRFSHSDDVAEFYGIAPVVVQSGNSKTVHVRYRCPKFGRQTFHENAACALKKELWAKCYYNQQKQRNKGKHHQACRALAYKLIRIYFACWKQRTPYDTNRYVKALEQHASPLHGKLQNLPVAHCE

SEQ ID NO: 130200 - protein, 360 aa, unidentified
MAKARTLVGLDVHATKIVAAVLGAESGELRTFRMNGDVGDAAGFCAGLPRPVRVAYEAGPTGYGLARELAKRRVECVVAAPSKIPRASGDRVKTDRRDAELLVRLLLAGKLHAVRVPGLEEEALRDLVRAREAVRVDLMRCRHRLSKLLLRHGIRFDDGPAWTQRHRDWLARIALPWPAAQATMLDAQGAIDALAHRRDQLEREIVALVPDSPWVVHVGRLRCLRGVDTLTAVGLCAEVGDFERFARAEQLMSYVGLVPCESTTGQQRQLGSITKTGSGHARRLLVEAAWHYRPRPRIGKALTDRQSGQPAEAIAIAWSAQQRLHRTWARLEKRAKRRTIIAVAAARELTGFAWALTQIE

SEQ ID NO: 130201 - protein, 315 aa, unidentified
MAGPVVCVGIDVSKATLDLALRPTGEQWTVPNDEAAIPALVHTLRTHAPSLIVLEATGGFEHAVVAALAAAGLPVVVANPRQVRDFARATGQLAKTDAIDAQVLALFAERVRPEPRPLPTEAAQALDALLTRRRQLLDMLVAEKNRLGFARAVVRRGITQHIRWLERRLGDVDHELGQMIEHSPIWRAKDDLLRSAPGVGPVISRTLLGELPELGQLNRKQIAALVGVAPLARDSGTLRGKRLVWGGRAPIRTVLYMSTLAAARCNPVIRAFYRRLRAAGKPAKVALTACMRKLLVILNAMVRSNTPWQQAPAVV

SEQ ID NO: 130202 - protein, 521 aa, unidentified
MLRARRSAFRFPTEAPGQPATYPLPGEESSSGDDEPQEIDDEEHEQIFQRVAAIDVAKASGHVCTRVPHETRPGKRRTRVWKVGATTKAILELADHLVCEGIEMVSVESTSDYWRPFYYLLQARGLSVQLVNARDVKNVPGRPKTDKLDSVWQAKLTERGMLRPSFVPPPEIRRLRDYTRLRTDLTGERGRHWQRLEKLLEDALIKVSSVASTMDTLSVRDMLEALIAGERNPRVLAGLARGRMRAKHAALVEALTGQFDDHHAELARLLLDQIDALAGQIDKLTGRIEELIAATPAAQPPTDPPHGDSTDSTDSTDSTDSTDSTDSTDSTDSADTAHAAHSAHADPELPEIPEIPGTALPAVDRLDEIPGIGRLTAQAMIAEVGLNMAQFPTAAHLVSWTKFCPQTFQSGPKTRSGKTGKGNPYLRAALGEAAAAAAKTDTFLGERYRRLVKRCGKRKALVAVGRSILVIVWHLLADPTARFHDLGPDFYDSRIDKNKKARNHIRQLQALGYRVTLEPAA

SEQ ID NO: 130203 - protein, 357 aa, unidentified
MNRDTNTNANALKNAPSDPSSTPAATATAVPAPAPARAVGIDVSRDKLDVALPGTDAVQSFANDAAGVTRVVGLLSALSPALAPSYVVVESTGGLERPLVGALLEAGLPVALVHPGRVRYFAKGLGVLAKTDRIDALVLRRFGELAAPRLLEKRSRSEAELRDLVACRRQLCQTRAQQLNRRATTASKAALRSIDAVIAALDKQVESLERRVRELLDADDDFKHLDGLLRSVPGVGPALSATIAAELREAGHTDRRRVCALAGVAPFADDSGNTRGRRRIRGGRTAVRCVLYMGTLAAMRFNPVIRAFAARLKAAGKPGKVVVVACMRKLLTLINAMLRDGLRWDQLDVVKKLAPTG

SEQ ID NO: 130204 - protein, 379 aa, unidentified
METLYKRCAGLDVHSETIVACILVGDTESNMVKEIETFPTLTKDLFRLLKWLEEKEITHIAMESTGIYWKPIYNILEDFFDITLANAQRIKNVPGRKTDVSDAEWIAKLLRHGLIDKSFVPPEDFRNLRDLTRLRKKWIGHMTSEKNRIQKVLESSNIKLSTVISDIFGVSGRKLLEQLMSNGYIDQEDVEKKIHGRMAHKKQLITDSLFGTLNEHQLFLIKQAWKHIVYLEELISDIDKKIDEILIKYQEELQILITMPGIKKDTAAVILAEIGVDMGQFPTSKHLASWAGLSPGNHESAGKRKSTRTVKGNPHIKSALCEAAWAASRSRNKRLSNKFWSLAARRGKKKALVAIGHRMLTIVYHMLLNKEPYHELPAN

SEQ ID NO: 130205 - protein, 339 aa, unidentified
MNVVIGVDPHKASHTAVAIDEAEDQISSVKVRATRRQVEQLVRWAEPFEKRRWAIESAGGTGYLLAQQLVACGEEVLDVPATLASRIRVLATGRCNKSDPNDAHSIAVAAFRAPGLRSVEPADHSQVLRILAKRNVDLGSHRTRVVCRLHALLAELAPGGIAKEMYVSDAERFLANVTPQNPTEWVRYDMALELLDDVRRLDEQTKESHRRIHTAVKASGTSLTEVYGVGPIVAAQLIGYAGDVHRFANRDAFASYNGTAPVEFASGGRVVHRVSQRGNRRLNHALHMAAVTQIRNPGTMGRIYFERKVAEGKTKKEALRSLKRQVSNAVYRQLLLDAR

SEQ ID NO: 130206 - protein, 313 aa, unidentified
MTGVGIDVGKDKVDVAIGDVYIGEFPTTEQGLDEMVTRLAKLDMPRAVVEASGGYEAPVLYALHDGSIDVVLVQPRRARQFAKAMGMLAKTDEIDAVVLAKMAQAPLPDPSWTAPAEHVADLRALVAARRQLVGERDALTLRLRRAREVVRKSLERLRKAVTKEIGVLETRIQAHIRAHDDLRRDAQVLHETKGVGPVATSTLLARVPELGTLNRRQIAALVGAAPMNNDSGKRKGHRSIRGGRSDVRTVLYMATLVATRHNEHIKAFYTRLLARGKQKKVAIVAAMRKLLIHLNSQLKRARSAPTDAALTTT

SEQ ID NO: 130207 - protein, 391 aa, unidentified
MIYAGIDVAKDKHDCFITNSDGEVLFKSFTIPNNREGFETLFQKILSVSDDLTKVKVGLEATGHYSYNLLGFLLNKGLTTFVINPLHTNLYRKSLSLRQTKTDKVDARTIASMLMSDVNLKSYSDTSYHNEELKSLTRYRFDKVKERAKLKTSVSRLVCILFPELEKLVPTLHMASVYALLSEFPSAKHVATAHLTRLTNLLSKSSKGRYGKDTAITFRDSARASIGSNMPAKSLELKHTIKLIQELDSEIDEIENEIKIIMDEINSPILSIPGINYRMGAMIIAEIGDFNRFDSPDKILAYAGFSPSTYQSGQLDGAYAHMEKRGSRYLRYALYNATKYVCHWDPTFAAYLAKKRAEGKHYNVAISHAVKKLVRVIYHLEKTKQQYIKAA

SEQ ID NO: 130208 - protein, 427 aa, unidentified
MEVIHPRCAGIDVSKKDAKVCIRVQGRGRKATSTTVTTWGSMTSDVLALREHLIAEQVSCVVIESTSVYWKPFYYLLEDAVNVMLVNAAAARNVPGRKTDVSDAAWLADLGAHGLLRASFVPPEPIRVLRDLTRTRATIARERVREIQRLQAVLEDAGIKLSSVATETTGVSGRSMLEALIAGQRDPAELADMAKKALRNKIPLLTEALRGRFSDHHGFMVRLHLDRIDAHEADIARLDTRIEEVIAPFQGTRDLLVTIPGFSTTVANVFIAETGGDMTVFPTPGQLASWAGLTPGCHQSAGRVTSAKTQPGNRHLKAALGIAALSACRSPNTYYGARYRRIAGRKPPRGNNSKTRRQSLAAQIAVVALEHKMITDAWHMLTNGEPYRDPGPDYYTRYRAGNAKAKAVHQLQTLGYTVTLEPRTDAA

SEQ ID NO: 130209 - protein, 344 aa, unidentified
MSEQYVGHQIVGMDLHRRRSVLVRMTDCGEQLETVRISNDPEYLQAVMARAGEHPDVVLEATYGWYWAADTLAELGATVHLAHPLGVKMFSLRRVKNDQHDAADLADLLRMGRLPEAWIAPPPTRELRGWVRHRAKLVGLRSNLKCQVHAVLAAAGVQVPMADLFGPSGQQLLATVRLAVESRSRIDSLQRLITGLDFEIDTFARLVAGRLREDPGYRAIQQIPGVGPTLGAVFVAEIGDIGRFRRPAQLACWAGLTPTHHESDTTVHRGRISKQGSRLVRWAAVEAVQRVPAHTRLGQTRDRVGDRRGRNIGVVAAARELTGLVFYGLRDHRIRCLATPASAA

SEQ ID NO: 130210 - protein, 389 aa, unidentified
MLYVGIDIAKEKHFASAMTTDGEILFKPFGFSNNREGFESLNSKLIQLEKSDIIIGLESTAHYCENLICYLFDQGYNIAVINPIQTSSLRNTGIRKTKTDKIDTSLIIKSLIVNAYRLYSKTDIDALRLKSLCRFRQNLKKSKARLKIQLVSYVDVLFPELQYFFKSGLHINTCYQLLKNYPAPDDIAALHLTTLSNLLRKSSRGHFGKEDAIALKSLAKSSVGTKDTNLSTQITLTLSQIELLERQLTHVESLIESTMVSMDSVILSVPGIGFNNGAMILGEIGDINRFSHHSKLLAFAGLDPTINQSGKFNAKRTKMSKRGSKILRYALINAAWNVSLNDPTFKRYFDLKVSQGNSHYSALGHVAHKLVRVLFKMLKEDIPFERQPL

SEQ ID NO: 130211 - protein, 416 aa, unidentified
MKSWNEITHYAGFDWARDHHDVVIVDRQGQIVAEFRIAHSLEGWQEFGRQLKNHPAVAVAIETSQGAAIDQLLQLDCAVYPVNPHSAKSYRERKVPSGNKTDHVDAWSLGEALRMDGQHWKNLQPLDPLTQQLQLLCRDEIGLIEQRTALVNQLQQALCEYYPAALEAFDDWTHPSCWDFVLQFPTPEKLAAAGPRRWEKFLHSQRLWRAETAGKRLEIFKNARQFCGSPPVVSAKSLLAVSLAHLLNALETQLDHYRQQIETLFKQHPDSGLFGSLPGVARTLAPRLLGEIGGDPQRFEDTENLQCVAGTAPVSFQSGQIHKVRIRFQCNKVLRHTVHLWAGCCLRVCPWAEVYYRQKRAEGKSHACALRCLGQRLLKILWRMIQTRTPYDPDLHAKNQQAHGSWVLQLIRQKPA

SEQ ID NO: 130212 - protein, 405 aa, unidentified
MDIQPIFRCSVGIDVHLALLCVCVIVAEPGCEPAVQRREFGGFKRDRHAMAEWIAGFKPDIVVMESTGIYWKSPYAALEKAGIRAMVVNAQHVKKVPGRKTDTGDAEWLAMLARAGLLRGSFIPPEELRTLRQVSRHHQKLTAMRAMEKNRLVKVLGDAGIRITAVASDAHGVAASAMIDCLLGGGTPEQALAHAGQLRAKREDLLASLQGELSEEHIFVAKVIRDHLAFLNTQLADLECHLLDALQPHEAALQLLMTLPGVDRLSAAKLAVEIGLDMAAFGTSGRLCKWAGVCPGNDESAGKRKRGDTAPGNRYVRAVLCEIAWAAVRTASQFKGRYQSLVSRRGTKKAIVAIGHKLLRIVFVLLSRKVPYKDPTVDYGALLVKRNAPRWIRQLKKFGYLPQAA

SEQ ID NO: 130213 - protein, 384 aa, unidentified
MKKNSSRSVEMKATDVERKGRMKNAPGRRASRRPDYQAVVGLDVGDRQIHYCVLDLAGGLTAEGAVATREASLRLQFEGKARMRIALEAGAHSPWISRLFVEWGHDVIVANPRNVRMISESNSKNDPADARLLARLAHVGPELLSPVHQRSEKTQLDLALIRARDVAVQSRTKIVNAVRGIVKSTGVRLPKSSTLTFARKAKDACPEALKPALLPLLRVIEELTREIELYEKVVLKKAETEYPETNAIRTIHGVGPLTALAFVLVLNNDRSRFRRSRDVGCFIGLRPKQRESGQRAPQLGITKAGDPLLRRLATQCAQYVLGPFGKDSALRRWGMSLALRGGKNAKKRAVIAVARKLVILMHRIWITQEIYEPLRGVVEKSTAA

SEQ ID NO: 130214 - protein, 343 aa, unidentified
MDHFAGLDVSVKKTSVCIVDDTGKIVREVKVASEPEALLAVLKNPAYQFKRIGLEAGPLSQWLYSALAEAGLPVICVETRHMRAVLKAQINKTDRNDARGMAQMMRVGLYRPVHVKTLRSQKLRMLLTHRQLLLSKAIALENDLRGTLRNFGLKVGMVGKVKFEARIRELVETLPDLAVLVEPMLIVRRVLREQIVILHRRLLAVVRDDEVCQRLMTTPGVGPVVSLTYRATVDIPARFRKSKSVGAVFGLTCAKYQSGEVDWDGRISRCGDEMMRTMLYEAAQAMMRSKKWSWLKAWAMQIARRRGIKKAIVALARRLAVILHRIWVDGTEFRWTREQAVAP

SEQ ID NO: 130215 - protein, 355 aa, unidentified
MNSVKYIGMDVHKEAISIAVLNSSGKLVMECTIETKAITILEFLKGLRGSLHVTLEEGTWAAWLYDVIKPHVTELVVCNPRRNALLKEGSKSDRIDARKLAELLRANLVRSVYHGENGVRTLKELARSYLAISADVIRVMSRVKAIYRSWGIPCAGKQVYAPRYRSEWLGKIREAGVHRRAEFYYQQLDALRPLRQEVRRELLTEARKHDAWKLLRAIPFIGPIRAALIIAFLQTPHRFRTKRQLWTYIGFGIETYSSAEHRCVNGELRRAKKPVSIRGLNRNHNHDLKNLFKSAATVAAAKPGPFQEFYDARVAKGMRPEMARLTLARKIAAITLIVWKKGVHFDVQHLKPQTA

SEQ ID NO: 130216 - protein, 376 aa, unidentified
MTLGVSGLEKLPVSIRHAHKVGQYPKPLPREAELASASLTRAAFDYKGGIPIMTLPVLGIDIAKLKFNLCLINTNGKLKHKVLPNTTTGFEQLLDWLSKQGIERVHACLEATGTYGEALSLFLHEAGHTVSVVNPAAIKAFAGSRLSRTKTDKVDAELIARFCQAQQPPAWTPLALEVRELQALVRRLEALIGMRVAEENRLSSIITVEMVRHSVEEHLAYLNQEIKRTEELIRTHINSHPTLKQQSQLLDSIPGIAETTAALLLSEMTDIRQYRSARQVAAYAGLVPRERQSGSSVRGRTRLSKIGNARLRRALYFPAITALRCSPFFQQWAKGLQERGKSKMSVICAVMRKLVHVAYGVLKSGKEFDPEWAKTA

SEQ ID NO: 130217 - protein, 341 aa, unidentified
MNHYAGIDVSLECSSVCVVDASGKILRETRVASEPEALIGWFQLQGFCLERIGLEAGPLSQWLFAAMRQAGLAVELLETRHVRKAFEAMPVKSDRNDARGIAQLMRLGWFRPVHCKSISAQETRSLLTARKLVQSKLRDVENSLRGILRGFGLKVGKTTEQSFAARIEELVAGHPQLQTIAKALLSVRAALRTEFAAFQKQSRKMAQSDPRTRLLMSTPAVGPIVALTYASAIDDPRRFSSSKQAGAHFGLTPKRHQSGETDYTGRISKIGDGSVRTALYEAAHVMLTRPVKGCSQLKSWAMRIARRAGMSKAKVALARRLAVIMHRMLADGTAFNTRAVA

SEQ ID NO: 130218 - protein, 370 aa, unidentified
MLYLAIDQHAKQITVVARNSDGEDVLRRQVSTRPEKIKTFFEQLLTMDEQFMAILESCGFNDWLLDELANRDCREIVLIHPERPSKKKTDRRDARKLADLLWLNRERLLAGKPVHGLRRIYMATKAEKDDRQLTAMRQGLGRRRTRVVNKIQRILHRHNLRWQYPTAEFQTKTGRKWLNHVSLPDMDRFELDLLLEEWDSIEVQMARVDAKIVGRASRREKGKILNATQILMTAPGVGHYTGLGLSSRIGSIDRFPRPRSLANYFGLTPSSRNSGETKDRLGSITKEGSKFARFLLGQLVLHILRTDPRMREWYRRIKLRRGAKIARVAVMRRITTIFWHMLKHQEPYTIGGPPPRLRKQQTMGDESAAV

SEQ ID NO: 130219 - protein, 312 aa, unidentified
MAPTIFVGIDVSKDTLDIAVRPSALRWQVANDDAGIRDLVSRLAELSATLVVLEATGGYEHPAAAALASAGAGVVIANPRQIRDFARATGQLAKTDAIDAGILALFAERVRPEPRALPDEARQGLEALVTRRRQVTEMLVAEKNRLGHARRPIRRGITAHIRWLERQLSDIDRDLDEVIRQSPLWRSQDDLLQSVPGVGPITSRTLLAQLPELGHLDRKKIAALVGVAPLARDSGTLRGRRTIWGGRATIRAVLYMATVAAARCNPLIRIFYQRLRAAGKPAKVALIACMRKLLTILNAMARTHTPWRPAHA

SEQ ID NO: 130220 - protein, 361 aa, unidentified
MVLATPFALSERKGQLMSIVRSVVGGVDTHADTHVAAAVDHNGGLLGIESFPVDLAGFEDLVGWLAGFGPVERIGVEGTGSWGVGLSRFLHHAGVETVEVDRPNRQKRRKVGKSDPTDAVAAARAALSGEAAVTPKSRNGPVEQMRVLLVARRSARQQRIQTLNQLRHVVFCAPEPIRARFKDRYKTGLVSEAAKMRPRAGSDPVSFTTNTVIRDLARRIKSLNTEMQTIDQALVALLEGAAPSLLALYGLGPDTAASLLVTAGDNPERVHTERAWARLCGVAPLPAGSGKTSGRFRLNRGGDRHANAALYRIVLTRMSSHQETRTYVARRRAEGRNTTEIMRSLKRYVARQVYKHLPTES

SEQ ID NO: 130221 - protein, 391 aa, unidentified
MVYVGIDVAKDKHDCYITNAEGKILAEVFTIANNLEGFEKLFQRIKSAARDLTKVKVGLEATGHYSYNILGYLVDKGLATYVINPLHVNLFRKSTSLRRTKTDRVDARTIAAMMMSGVVFKSYTNISYHNEELKSLTRYRFDKVRQRAQLKQSVSRLVTILFPELEKLVPTLHGAAVYAMLSEMPGARQIAQSHLTHLSSLLEKASRGRWRRDKAEQIRNAARRSVGSVMPAKSMELKHTIRLIRELDAEISEVDSEIKNIMDELQPPILSIPGISYHTGSVILAEIGDFSAFSSPDKILAFAGCSPSTYQSGQMTGSYSHMEKRGSHYLRCALYNAAKYVCLWEPSFAAYFAKKRSEGKHYNVALSHVIKKLVRLIFALQRSGQSYIPAS

SEQ ID NO: 130222 - protein, 422 aa, unidentified
MSYCPVAGIDVSKRFSDMCILSPDNKIFAQEKIYHDETSINRANALLQKAERLFFSKPVIVMESTSHYHLILFQFFSEHGYDVIVVNPLQSNSMKDFSIRKRKTDRVDAFKLAMMYRTKTLRPSQIPQTATRALRQLCRHRAELLNDVSSYKNRLTALLDQTFPGYDKVFSDVGGVTSCAVLVRFPTLTILLVEEESELVEVIAAASKSGYSFAKKKAGLLISAAQKAQTLGIHSCADETLIVCTIQMLRTLSENVLQIETAIDNLLAQIKEMRNNVSLLQSIPGVGSHSAALLLGEIGDISLFKKPKQLAAYFGLDPTERQSGSFRGTKNKLSKRGSPYARAALHMGVVNSICKRGKDSAVNPVLLSYYEKKCKNKPAKVAQAASMHKLVFIIFAVLRDQKPFELKTPEQHAVEQGFVKAA

SEQ ID NO: 130223 - protein, 434 aa, unidentified
MSSLEKIIKNCAGIDIGSEKVFVAIEAAEVRSFRTFTRSYRELGIYLQEHSITHVAMEATGVYWITLYDILEEMGFDVTLVNPADSKNLPGRKTDVQDCQWIQQLFSYGLLRKSFVPDDIVRKLRVYTRMREDKLQMASSHILHMHKALVQMNIRLKDVLSQTHGSSGMKMIEAILEGERDAQVLLSYCTKDLRKRKSADILLALEGNYKEEYIFELQQSYDGYMFYLKQVQLCDKEIEKILIQFKDKTNNDYQDDNRIKPIRHNKPDIENLHNLLMGIHGANPTVLPGLTDYSLMRLTAELGNNIQQWPNVKAFVSWLGLAPGKHQSGKMNKRSKKKAMTRSGQIFKQAAQSLLVSKQPGLGAFARKLKARRGAAIAIKATARKIAELYYKTFDNGMQYVEKGVEIYLQHQKDQQFRFLTKKAKELNMQLIDI

SEQ ID NO: 130224 - protein, 411 aa, unidentified
MRRVIGMDIHRTFAEVVFWEDGKLRHFGRVDMTRAALDRFGKTLRRDDEVVVEATGNSLAVVRVLTPFVARAVIADPLQVKAIAYAQVKTDKIDAGVLASLHAAGFLPEIWVPTPQTERRRRLVARRNQIVRHRTRIKNEVHSILHAHLIARCPHAELFTRPGRAWLNRQALPDDELAAIERHLRELDHLGEDLAALDKTIAVEVLHDAAVKRLLTITGVNLTVAVGLMAAIGDISRFASPQKLVSYVGLNPRVRQSGLGFAQHGRISKAGRSHARAMLVEAAWAAAKAPGPLHAFFVRVRARRGHQVAAVATARKLIVICWHVLSKDADYLWMRPALVATKVRAMELQAGAAAKKGARGPAYAYNIKALRDQEAAIAAQAERAYEHMVAHWQPKKPTDNARGRLKSAEHK

SEQ ID NO: 130225 - protein, 365 aa, unidentified
MQKISTMRASGKKIFKGQLTIGLDLGDRSSSYCILDEAGKILLEQKLPTTPEAMKQTFAKMPRSRIAMETGTHSPWISRLLKALGHEVIVAHAQNVHLIVKSRRKDDRIDARTLARLARIDPELLSPVQHRSAQAQLHLTEIRARAGLVSARTALVNAARGLVKSHGERLRKCGTFQVSREITSDLSTELREALQPLLREVESLNERIQEYDRRIEKMAKEKYPETALLKQVKGVGDLIATTYVLTLEDAKRFRKSRDAGCFVGLQPGRRNSGESEPQMHISKEGDEYLRTLLVQGAHYILGPFGEDSDLRRWGQRLAARGGKNAKKRAVVAVARKLAVLLHRLWVSGEPYEPLRNSQKAISAAA

SEQ ID NO: 130226 - protein, 345 aa, unidentified
MKHYAGLDVSLKETAVCIVDETGKVCREAKVPSHPEDLVGILSDPAWRLSRIGLEAGPLSQWLFSGLVEAGLPAVCIETRHANAFLKAQVNKSDRNDARGIAQMMRVNLFRPVHVKSLKSQKRRALLNARAILKQKALAVENDIRGLLRNFGLKVGSTGPVGFETRIRELVADEPDLAEIMDALLAARSSLRAQCAALHARLLAIVREDEVCRRLMTVPGVGPVVSLTFTSTIDVPARFRNSRAVGPALGLTPALHQSGETAFSGRISRCGDAMMRSLLYEAAQNVLTRVKKWSWLKAWGMAVARRRGKGKAIIAIARRIAVILHRMWTDGTEFRWSREDAMAVA

SEQ ID NO: 130227 - protein, 346 aa, unidentified
MGQNQIQENEHIWQWFGLDVSKKSFTASFYHGIPSEAKPEVLTFESDKKGVKRFLSWQKKQIKRDFPFGIVMESTGYFSRNLADLLLEIDSSLHVSVCNARSVAYYIRSHVQHKTDKTDAIYIARYGYDAQPPKMREKTQDEKMLKEFVSERMKLVNMKTMLSNKNNSLVFQETVKINKSVLKELQKQIDVLDKKIEEVSKRSPEMNAEIELMDSVPGVGRLSASVIYAELGSLKQYNCQELSALSGLYPRIMQSGSSLKKSKLAKTGSSYLRQILYMDATQAMSKIPKLKALRKRLLARDNTCKKTARCAVMRQHLLLIKGVVDSGVPYDPNYKQKKQEKSLITA

SEQ ID NO: 130228 - protein, 453 aa, unidentified
MASTKRRTKRSRGMTVVHPHAAGVDIGSRFHVAAVSSQGVDEPVRTFQTFTNDLQRLADWFEEAGVETVAMESTGVYWIPLFEILQERGLEVIVVNAREVKTVPGRKSDVNDAQWLQQLHQYGLLRASFHPTREIAGLRSYLRQRERLLDYAAAHIQHMQKALTQMNVQLHHVVSDITGVTGLGIIRAIVSGVVDPNELAKWRDRRCKASPEMIREALVGHYQREHVFALRQALELYDVYQGQVAGCDEEIEAVLARLGDGVDAPSEALPAARHTARQPNRLNFDVRAALYALLGVDLTQIHGVGPYVALKIVAECGTDMSRWPSAKHFTSWLALAPANKVSGGRVLSSRTRRSSNRAAAVLRLSAVTVGRTNTALGAFYRRLSSRVGKAKAVTATARKIAVLLYNTLRYGQKYEDPGALYYEERYRQRVMKNLRRRAASLGYVLQESAEAVS

SEQ ID NO: 130229 - protein, 347 aa, unidentified
MRFYNQQHKFYCGIDLHARKMYVCILDAQGKTKVHQNLDTDAELLFDVIFPFLEDVVICVECMFSWYWISDFCTEHKIPFVLGHALYMKAIHGGKTKNDKIDSYKIAKLLMGGNLPIAYAYPAKMRATRDLLRRRSYMVRQCGLLLAHIQNTNTQYNLPSFNKNISRKFNHEGVAERFDDPSVRAAVQADLTMIEAFNRLIRPLEWQIEKTACQHDHNGLYLLRTIPGVGQILALTILYEVNDIKRFASVQRFCSYARLIRPEKESDGKRAGRSNKKIGNAHLKWAIRTAAMISLRESEQAKKMVDRLSSKYSKGKALGIYTHKLGRAIYFILKNKRAFDMQQFFSH

SEQ ID NO: 130230 - protein, 315 aa, unidentified
MSESKVETFVGIDVCKATLEVRIEPLGESFQVANDDEGIKALRSRLSKLDVTLIVMEATGGLEMRAASELGARGLPLAVVNPRQVRDFAKASGQLAKTDRIDTQVLCGFGRAIRPAVRPIKDELTQQLDDLVTRRRQLVDMRVQETTRLHSASKIQAKSLKAHIGWLDKRIKQIEGDLGSCLRNSDAWRVKDDLLQSIPGVGQITSQSVLSRCPEIGKLNRRQIAKLVGIAPLNNDSGKHRGERHIWGGRTDVRSVIYMATVSAKRCNPPIRAFAEKLQRAGKPYKVIMVACMRKLLTIMNAMIKNNMPWDPKIV

SEQ ID NO: 130231 - protein, 351 aa, unidentified
MYTLGIDLHKKSSVWVLIDEHRTELWKETVPCHPEYISIAVKKIPVPPKEIQVAIEPVAGWRWVSKQLEESGMKVHIAHPRKIHLIAKSTNKNDVEDSRTLANLLHSGFFPEAHRSSEEMYQLRLLLRERNFIVRQRTSVKNQLHGIATTQGLHLVKSGNPLHKKGKEGIMAGNNFVLKELHHLEEDLGKRIVPFDKKLQEEVFKYPIASILRTIPGVGIITALTVIAEVDDFTRFKSAKHLTSFAGLVPRQRSSGETVRYGAITHAGSAPLRTTLVETAMRIRESNAPELFAFVKRLTPICGAKKARVALARKLLAIMWKLATTNTAYNPKLLFSSCATKVSNLDTASGA

SEQ ID NO: 130232 - protein, 409 aa, unidentified
MQQPKLLIGDDWSQDHHTLCFMNPQTGGVIATFDVQQSLTGFAQICSQREKLGFHPRDCWVGIETSYNLIVDYYLDHHYPVFVIAPSIAKSSQNRFGNSGAYTDQSAAHLLADILRTDRKRLTPWRPHSPLVMQMLAKMRLARTLTQEITCWTNRLHALLQRANPVPLGLFSELTVQINLHFLIRYPTYHLATKLTLDELQTFCREHGYTHPDRVFDLFAHLQRQVPPPNSSVSLAYADQIQFMSRTLLPLIHQRHQVLHKLGSLFRQHPDYLIFNSLPQTGKLLGPGLLAKFGDDRERFPTPASVQSLAGTCPVTQRSGKRTTIRFRRACDKEFRWISTQLALLSLRKSAWAIAYHNQLLQRGMGGSHAIRCLANRWLAIIWKIWQTWQPYDESYHMKQRYQRHQPRH

SEQ ID NO: 130233 - protein, 360 aa, unidentified
MTTMTETRCRVTGGVDTHKDAHLATALDEVGRVLGTEAFPATLAGYRQLSRWLRSFGEVVAVGVEGTGSWGAGLARFLTAAGVAVIEVTRPNRQHRRRHGKSDPADAIGAARAVLSGEATRTPKAQTGTVEAMRMLRVARRSAVKARTQAANQLHAVIDTAPADLRQRLGSVNTEQFVAVAARFHRRHPGTPAEAARLALRTLARRWEVLDDEITMLDAHLDELTAAVAPALRAINGVGPQNAAALLAAAGDNPDRLRSAASFAALCGTSPIDASSGRQQRHRLNRGGDRQANCALYYIVMSRLRWHQPTKNYMARRIAEGRTPKEVIRCLKRYVAIEVHRAITTDLGTRATSKPSRIAA

SEQ ID NO: 130234 - protein, 345 aa, unidentified
MKFKFTLGVDMSKEWFNFCLMDAEFQTLWQGQVDNNEESIFKFLTQLSHQEEVTKAQAVLADIVLIMEHTGIYVQHLVKCYLSKAGRVSLVHASKVSDLLAGKQKWDEKTDAMDARRLAEYGLRYKDKLELWQAKEPTLIKLRVLQRQRRRLKDAMNLLEVPVNESVQFDSVAVSELLKTNQQATIQALKNDLKNIEKQLQQLMESDVELTQLFNLITSVPGVGAVTAREVIITTSAFKDFTPKQAKQFARYAGVTPKDKQSGKMKKRKRTSKRGNKKLKSLLTMGATSLIGTNSELGFYYLKKIEEGKRHFSVINAMRNKLILRIFAVVRNQVTYKKNMNMSLD

SEQ ID NO: 130235 - protein, 371 aa, unidentified
MKNIIVRQSPKRKKKRKQSRNRQPELTIGLDLGDKKSRYCILDSYGEIVKEDSVSTTQSGMRELFSRVPRCRLALEVGTHSRWVSRLLASFGHEVLVANARQVKLISESNRKCDRIDAEMLARMARADPKLLRPIRHRGEGAQADLVNIRVRAQLVEARTGLANSARGLAKSFGERMPACDTDQLGTEHLEGLSERLRQALKPLLESVEALTEKIQALDEQLEQIAREQYPETELLTQVYGVGTLIALTFVLTIDDKDRFQKSRDVGCYVGLRPKRSDSSKSEPQLPITKEGDVYLRKMLVQAAHCILRERAPDSDLKRAGERVAGKNSKNAKKRAVVAVARKLAVLLHKLWVTGEVYEPLHNSQPRRAAA

SEQ ID NO: 130236 - protein, 342 aa, unidentified
MKFYCGIDLSARDCQVCVIDEQLKVMVQQKLGNELPRICQLLTPYKANLKIVVESTFNWYWLIDGLQAAGFEVMLAHTLGLYLITGAKVKTDRRDAYSLAKLLLAGVVPAAYIYPVETRPVRDLLRRRTRLVQVRAGEYGSLRRLLLRQGILSSKQQELKTATETELEQWFEHPLVRLHASQELRRIELYSQQIAELEKTILGLAQTDQSYELLLQLPGVGQTIALTILYEVGELTRFANVKVFSSYCRVVPGIAQSGNVTRRGWASKQGNHYLKAAFSQAAVHAVRCYPKVRRYYERQLKRHQGRGRQMICYNIIAHKLAQAAFHVLKEQTEYREELLFGR

SEQ ID NO: 130237 - protein, 406 aa, unidentified
MDKPSVETAVLKTDRGGKRLYFVGIDISKFKHDCAIVDELGDVITPSWSFQNDREGFSLLKELLDALDGEKKIGLEATGHYGQNLKMFLENNDFSFMEFNPLLINRFVRSKSLRKTKTDSIDALMIAQYLMTVEYKPYPPSFYTLEKLKSLTRFRDSLIRQRSKQLVELTNILDKVFPEFKPFFKGRFSATALYILSHYASPEKISNMNSKSYEPLRRLSRGRFSMVDFVELKTLARNTVGSAHDYLLQEMEITIDIYDQLQSKVEEIELQIHDCVLGLAPPMLTIPGIGVASAAVILSEFGDLSKFNSPSKLLSFAGMEPGYFQSGTSESTGKMVKHGSSHLRYAMMNCAQTVINNEPTFAAYYAKKRAEGKEHRVALTHVAKKLLRVIYTLQTKELSYNPDLVR

SEQ ID NO: 130238 - protein, 374 aa, unidentified
MTYIGVDLHKANMAVVCCDAKGEIICKERIPCKCIGKIEEFFAQPHLHPCNVVIESVGFYHWLFDLLEGKVENLVLANPVETKKYSWNEPKTDFRDARKLALLLAGGEFERNRSLSCFVPDKTLRTFRELTRYRHNLVCRHTSLVNSAHRILLKNNLAGPKILNGQSLELFLSRFGDKFSLYHKDFLMQISENLFYNERQLKEAEEKIQPFLHMDRFKQLYEILTSIPGIGDTVSATLISEIGDFSRFDHPDKLASYAGLCPRVFASDATVRYGRITKKGSGFLRRALINAAWVSIREDMKPRRIFNRVCKRAGRKKAVVAIARKLLVWIWYLVAEGEKWEAVSTRPDSLTNNKSGVTLIGLLKRTPYRVNSVA

SEQ ID NO: 130239 - protein, 429 aa, unidentified
MRTESTPGARGPVFCGVDTHADSHWLCVLDWRGRKVLSRQFPADAAGYEALAGAIAAAGEPACVAMEGTSSYGAGLTRHLASLGMPVREALSPARMQRRRPGQGKCDEADAERAARAAMSGSKLGTPKSQDGWVDGVRCMLAARSGAVKARTSAINTARSLLTTAPEGLRSRFRGMAGPRLMEELPSVRAEGALGAALGALADLWSAARDAALDMERAIEASLEENCPALLAMYGCGPVSAAKLAVAAGDNPGRLRSEASFAAICGACPVPASSGKTVRHRLNRGGDRQANSALYEIARQRVMRDPETAEYAERARGRGKSDREVMRCLKRYVAREAYRALMHPHDIRRPEDASELVAARRAAKVSQVRAATILGTSERCISMLERGQRELKPIRRAYEAWVEAGLPLDWDRQAFEAERKMDSKKGLAK

SEQ ID NO: 130240 - protein, 352 aa, unidentified
MASVMIGIDPHKASHTAVAISGSEEPLGQLRVRASAVQAERLLAWAAAWPQRTWAVEGAGGLGHLLAQQLLSAGERVLDVQPKLDARVRLLAAGNVNKNDPNDARSVAVAALRSPGVRDARPDDHAAVLKVWSKRHRDLGSARTQMACRLHAVLCELVPGGVAKKIIAAHAARLLESITPPDAVAAARWELAAALIEDLRRIDGQLRETKGKLATAVRASGTGLTGLFGVGPVIAAAIIGKVRDVSRFRNRDHFTSYNGTAPIEVSSGGRKVHRLSRRGNRRINHAIHMAAITQIRQPHSEGRAYYDKKLAEGKTHREALRSLKRHISDAVFTRLRTDAQHAPAQVRDPGGQ

SEQ ID NO: 130241 - protein, 374 aa, unidentified
MANIIEAFVAFDTSKLRNAVAIAEAGRAGEVRFLGEIENTEAAITKVVRKAAGKYGRLTFCYEAGPTGYGLYRQIKRLGHECMVVAPSLILKKPGERVKTNRRDAVSLVKQLRAGDLTAVWVPDPRHEAMRDLTRAREVAVEDLRCKRQQISAFLLRQGLHYPGERTWTKVHRNWLMSQKLEYAEHRIAFEEMLLAMRQAQERIERLEQAIRVAVPHWSLAEVVTALMAMRGIDFISATAFLAEIGDLSRFPTPRELMGYLGLVPSESSTGDTIKRGPITKAGNRRARRILVECSWSYQHPPRVGKEKQERVAAAPQAVREIAWKAQCRLSARYRALTRKGKLKTVAVTAVARELSAFIWAINRQIINPRAAAR

SEQ ID NO: 130242 - protein, 410 aa, unidentified
MERQVERCCGLDVHKDTVAACVRIGGGSGQRAQQHVQTFRTTAGDLVVLRDWLAAHEVTHVAMESTGVYWKPVYYALESDFTCLLVNAAHIKQLPGRKTDVKDCAWIAQLLEHGLLRGSFVPPAPIRELRDLTRYRKAVIQDRTRVVNRLHKTLEDAGIKLASVASDVLGISGRAMLEALVQGTTDPAMLAELARGRLRGKLPALRQALAGRFRGHHAFLIGQLLAHLDYLDEAIGILSGQVETAIAPFADALTRLDSIPGINQRTAEVIIAEIGVDMSAFPSAGHLASWAALCPGNHESAGKHQSGKMRKGNRWLRTALIEAAAGASRVKNSALQARFRRVLRHRGPKKAVAAVAHALLRAAYHVLADHSVYRELGADYCDRQHSQRVTRRAIQLLERQGYRVTLEPAA

SEQ ID NO: 130243 - protein, 400 aa, unidentified
MKNRTNQRIEEITVGTMIVGVDIAKSVHWARFVDYRGMELGKAMSFKNDRQGFEDIVTRIREINNMKILKYPIEQVLIGMEPTGHYWKALAHYLMNKGYRVVGINPYHTKRSKELDDNSPTKSDKKDAITIARLVKDGRFFEPYLPEEEYGELRSLTNMRISVMKRSNNIKNTVTAILDEYFPEIKMVFKHPMKGKACRQILRSCPFPTLIMEMGKDGVLAEIKKAVKKTVGMKKVELIEKQLDEVEQAMEKEIKRTGYAEQLLGIKGIGIVSAASFLGEVGDPLRFQNERQIMKYAGYNLTEDSSGKNKSGTCISKRGRKQLRSILYNMALVMVARNPEMKKLYNYLIARKDNPLKKKQALVVISKKIITVIYSLLKKREAYNPTKVLGTTRMDMIEAA

SEQ ID NO: 130244 - protein, 315 aa, unidentified
MAQAQRTVGVDCGKHFLDAAVFPSGESIHVPTTAAGIEALREWVVSHQVQVVGMEASGGYERPLRDVSCAAGLTVHVFNPARVRYFAKAKGRFAKNDRIDARLIAEFTATLGQGLEPARPDPAREELAGLVRARRRMVDTRCDLCKAREAAPEAAKKAFSDVIDTLASAVKTLEAVIAEKREAYEAFDREVTDLCSAPGIGAITATTLAACVPELGHASNAKIAALLGVAPFDADSGDHHGLRHIMGGRAEARHALYMAALVAATRVPGVIAEFYANLVTRGKPRKVALTACMRKLIVRLNVMLSKGQTWQAKPA

SEQ ID NO: 130245 - protein, 420 aa, unidentified
MLFSGIDWADKEFVIVITDEQGKVIKSLIVKNNVKGFEDFIEKVRTVTSDLDEILFAIETPHSLLVDFLMETGYTVYAINPKSVDRYRDRYRTSGAKDDFFDANVLANILRTDRDRHQPIAVASDLARELKILTQDREKFVQTRTKLTNQLRACLKSYYPEACSLFGDFVSPSALTFLRLFPTWEDLNKMSEKEVIQRLKKRKVTTPSILKKIVEHRQRPPIPVDSVLKRAKKRQMVTLVEQLIHLCERIRQYDHEIEQLLEKHSDKDIFLSLPGAGTNLSSRILSQLGDDRSRFQCVSEVRPLAGVAPVTKQSGNYIHVIFRFGCRKAFRNALQLFAFCSLSRCKWAYRYYQTHRKMGKTHHHALRLLSDKWLKIIFAMWKNYREYDERIYLTDMVKHAMNQPNYSERILSGQNYLGNA

SEQ ID NO: 130246 - protein, 391 aa, unidentified
MEARTVNNLPPAGTHDDAVRCLLAIELSKKSWIVAVNTPLSDKISRHTLKPGDGKELLDLCERIRTRVARETKKRVEIVSCYEAGYDGFWLHRLLEAHGIRNYVIDPASLQVDRRARRAKTDRVDVERLLRSLMAYLRGEPKVWSVVRVPSVAEEDDRRLNRERGRLINERIQHVNRIKGLLAIHGIYDYQPLRRDRMQQLERLRTADGRTLPPRLKAEILRELQRLVLVVGMIKTIEAERDAIASAKIETEQQHSSAKRIQDLAKIKSIGPEFATTLVGEVFYRSFDNRKQLGSYVGLTPAHFQSGAMCRDQGISKAGNGKARTVMIELAWLWLRHQPDSPLSVWFRDRVGKLKGRIRRIAIVAVARKLLIALWRYLETGLVPKGAALKV

SEQ ID NO: 130247 - protein, 353 aa, unidentified
MTDIEGEIIGGVDAHTDTHVAAAMDRRGRLLGTESFATTRSGYRALRAWLESFGPIALIGVEGTGGYAAGLVRELRAAGIRVSEVNRPHAHTRRRRGKNDSIDAEMAARHALSDATHVEPKATDGIVEAIRQLRLARDSAVKARSAALCQLSEMTVTAPDELREQLRRRKTTKGRATLCRHLRPDTSRLNHPQQAAKLALRSIGRRVAELDQEIAQLDDALAPLVAAAAPRTSSLLAVSTGHAGQLLVTAGQNINRLRSEGAFAALCGASPIPASSGRTNRHRLNYGGDRDANRALHMIAVCRLRYCQRTRDYAARRTAEGKTKPEIIRCLKRYIAREIYHSLHADLADLTHP

SEQ ID NO: 130248 - protein, 392 aa, unidentified
MNPCALGWDNHRKFSKVSLMEQTPEGEIRVVERARLEHDDRQAMRAWLSHLDPEIPVALEATFGWPWVADLLQELGHPVHLAHPPVVRALAKHEAKTDRCDGDRLGKFQLRGILPESYLAPPEVRQRRERTRYRMALSALRTAVKNRAQAILHRHGILHDFSDLFGKAGRRFLDDLALPEGSRQALNGYLRLLDTLTLLIHEVEQWMVENLEADEIVRLLMTIPGIGLILAHVIRAEIGEIERFPTFRHLASYGGLAPMSDDTAGREGPRHCSSACNHILRWAFIEAVHGVQRTKGPRGFRLRRLCARLCGSGRPKGRKSSAKVAVAHQLSKLVYVVWTKRAPYTDTPPPRPGSRQGRRPHKESPTAKTTLRSDQPRHPMVRRRATVGQTRS

SEQ ID NO: 130249 - protein, 391 aa, unidentified
MLICGIDIGKNYHEACVIDETGRQLAKTLRFPNTTAGAGTLMDYFHGCNPDKQTIVVGMEATGHYWLALYCFLFDQGFQVNVINPLQSDAVRNLFLRKAKNDAKDSFLIAETIRIGRFSNTELADEDILALRQLCRHRMDLVDYIADQKRKIIGVMDRVFPEYQHFFTDMFGKTSKELLDVAVTPEELLAVPTEELCAILKKASRGRFGEAKAEEIRAAAQNSFGITIATSAFALQLRQLLEMIDLLERQLNELDFEIEQRMNKLNTCITTCPGVGKVLGAVILSEIGDISRFPEPKKLVAFVGIDPSVHQSGEFTGTQNKMSKRGSPHLRRAIWLAATVAAFHDPVLSAFYQKKRAEGKHHYTAIGAVARKLTLIIYAVLRDKKPYVPNC

SEQ ID NO: 130250 - protein, 322 aa, unidentified
MDKNTKIIGIDISKDTFDIWSESFGHKKFNNSPKGFKLFLKLLDNKTLCVMEYTASYYQKLALFLYEKQIQASVVNPLTIKRFIQMKLQRNKTDKSDSKMIALYASEQDVKLWKPAPDYIEQCGFIHTTISVYFKQTTALKNKLHSFNSIGVKGKVITSLKRQIRNINNEIKNLESILEELIKEYEPELLTNLMSIKGIGKKTAILLIVSTSGFSKFENARQLSSFFGLAPAEISSGSSVRGKNRITKKGNGMVRNHLFMCSFTASQTNLQCINLYNRIVTKGKSKKLALIAVCNKLLKQAFAVAKSGIPYDPYYKSCIPTI

SEQ ID NO: 130251 - protein, 382 aa, unidentified
MRFDTTPHPFYCGIDLHARTMYVCILDQAGETRLHRTMPAPPEALRKAIAPSHAQIVLAAACMFPWDWLADLCAAHGIPCVLGHALSMKAIHGGKAKNDKIDAQKIAALLRGGLLPQAYVYPAERRATRDLLRRRMHLARTRGALLAHVQHTNSQDTLPAIGKKIASKATRDGVAERWADPAVHKSIDVDLALITYDEALLRDVELSLVTTAKSHDAHTLYLLQTVPGIGKSLSLVLRYEIHDIARFPRGQDVASYCRLITGARASAGKRSGTSGAPIGNAHLKWAFSEAAVFFLRDNPAAPTLRSRLEQKHGKGKALTILAHTLARAVYDRWKRQTACALQQCLRAEGRGVGARNASLDNQGMHLIRNAQPTVKTGVVARP

SEQ ID NO: 130252 - protein, 342 aa, unidentified
MNKYNTIGVDLAKNVIQVCVVSPANKELQNKELTRKKFAEFLLKQKPALVAFEACATAHYWSRVARRHGHQTKIIPALAVAPFRQGHKTDQNDALAVAEAARRPNIKEAPIKTVEQQSMQAIQRSRELLIQNRTALSNHIRGLLMEFGLVIPRGFASLHENIPWILEDGENELPDSYRPTLNLLYQRLCVLRDDLAFLDKQIAGVVKENVACRRLTQLEGVGPISSILLFATLGTGEAFKNGREFSAYLGLTPKQYSSGGKTNMIGISRRIANKRLRAVLIQGARAYVHRIKEPKTVKDQWILALIQRAGYGRAAVALANKNVRTAWALLTKGSEYIKVQYA

SEQ ID NO: 130253 - protein, 373 aa, unidentified
MPRYSTAFGMDVHLRSTTVCALDAETGEAVTRRFRGNPWGEVAEWMSGFPGPSLAAYESGYLGFAPQRELSGLGVDCVVAAVSKVPRSAADLSSKNDRNDAARMAKAILSHDVTPVWVPSPEIEGLRDLAAAHDAATARLAAAKRRLLAFLARRGYAYGGTTPAGNPRRYWTYGFLRWLDGIHPADDGGIRALAALRSEVEAADETREALLAEYRAAVAAGPLSAEVEALQSIKGCGFALAAAFASEVGDFSRFRSGRQVTAYFGLAPKQRSSADSVRLGGISGAGNALVRKLAVEGSWCYAQAGHQPKLMPKGSGVPLEIRMHGRKGSERLLRRREEMLERGMPQAKANAATAAELVRWLWALGAMCREAGE

SEQ ID NO: 130254 - protein, 340 aa, unidentified
MDEYDGRQYVGIDLHRRRSVIVRMTPDGQRLGRTVRIDNDPFELAEQVALWGESPEVVLEATYGWYWAADVLADAGARVHLAHPLGVKGFAYRRVKNDELDAADLADLLRMGRLPEAWIAPPETRGRREVVRHRCKLVALRSGLKAQVHSVLAKQGVRVAASDLFGVGGQKLLDELRLDAPFNARVGSLRRLIDAFTFEIDILAKRTGAQLKAHPGFTAIQAIPGVGPVLAAVFVAEIGDVTRFTRPQQLCSWAGMTPRHRESDTTVRRGRITKQGSHLVRWAAVEAVQTLHSGPIGATRARIGARRGTNIGKVAAARKLLTLVFYGLRDGHIRCLARAA

SEQ ID NO: 130255 - protein, 416 aa, unidentified
MNELKCWFVGVDWASENHRVRITDGCGKRLGERDFAHGGAGLAEMAAWLTSVTGAEPSAIYIAIEIPHGPIVETLLERGFNVYSINPKQLDRFRDRFSPAGAKDDSRDAEVLADALRTDMRAFRRLALAEPLVVELREWSRMTDDLNGERNRLCNRLREQLWRYFPAMLELEQDLGAEWFLDLWELVPTPDKAMRIRDTSIARILKSRRIRRLTAAEVSAVLRKPPVTVAPGTIEAASAHIRVLTERLRVVNRQLKDAHRQLDRLCGLLAEPTESEPGQANEQRDAAILASLPGNGRIVLATLLAEGWEALQRRDYHALRTLCGAAPVTKRSGKTCIVTRRLACNPRLRNALYHWARVAVQHDPRSRAKYAALRLRGHGHARALRSVGDRLLNVACAMLRNGTQFNPSLESQKSAC

SEQ ID NO: 130256 - protein, 345 aa, unidentified
MDHYAGIDVSLESSSACEVEASGKIVREAKVASEPEALIGWCASLGLGLARIGLEAGPLSQWLYAAMKQAGLAVELLETRHVSDAFKAMPVKSDRNDARKIAQLMRLGWFRPVHCKSIAIQKIRAMLTARKLVQSKLLDLENSLRGISRGFGLKVGKTTRTNFAGRIEELVKRHPNLQTIGQALLRVRTVLLAEFNGFEKRVRAMSRLHEKARLLMSTPAVGPIISLTFACATDDPSRFTSSKQVGPYLGLTPKKYQSGETDYTGRISKHGDASAREALYEAAHLMLTKPIKGCSELKSWAMRIARRAGTNKAKVALARKLAVIMLRMLKDNAPFNPAAAKATTV

SEQ ID NO: 130257 - protein, 326 aa, unidentified
MTASQASDNSFIGIDVGGASFDVAWHRGDCAHYANRPDGIAALLAKLKAGPAISRIVVEPTGGYEKPLVKTLRRAGLPVEIVHTSRFSAYRTMVGARAKSDSSDARLLAAYAAAPDDVRGRKPHHVEVPEDAIREELAELASRRDQLKHMIHGETCRLTTVRSVKLRQAIIAHLDVLKAEDAQTHQTMLALVRARVDLKKAQGLLKTIKGLGDKSALACIALVPELGHVGNRAASALVGVAPFTRQSGTMTAPARIHGGRAAVRNILYMAAVSASRHNPVLRPFYQRLLAQGKKVKVALIAVLRRLVVFANAVLRSGQPWKGATAS

SEQ ID NO: 130258 - protein, 436 aa, unidentified
MTSPCRSCTYKISGGVLLAFKIFRFNFCGLDVHKTWIFACIGLTDANGRTEYKEKRFSSFSRGLRELAAWLASYNCTNVCMESTGKYWIPVFNILEKTCNVVLAHPKYTKPQKGNKTDRKDAKWICDLFMCDMIKPSFIPSTEIRHLRDLVRYRFKLTNMLTGEKNRAQNCLTVSNLKLDDVFSDVFGKSSRSITEYILAHPGEPFDVSPFVDKRCKTPIEEIQAAVDGAVSPEQAIKLRQCLDHIDELEKHKAEMEQEIFRVSAPYLDALDLIRTVPGFDKNPFTAIQILSEIGGDMSVFPTDKHLVSWAGCCPRNDQSNFKIKSTRISRAGSYLKPVLVQVANALIKSKKHPEITERYRRIKSHRGHKKAIIAVCRMLLTAIWHILTDLKPYTADGYLAPRPVKEEKILTTSQALNLLKLRGYVIKDDVPAAAP

SEQ ID NO: 130259 - protein, 333 aa, unidentified
MDEVKRFVGIDVAKLKLDVFIGSTGERFTVANGELGIRDLLRQLVPADFVIVEATGGLEMPVASALAAAGLAVAIVNPRQVRDFARATGRLAKTDALDAEVLARFGEAVRPQARPLAEEQAQALEALVTRRRQLVEMLTAEKNRRASAPKVLHRSIDEHIRWLEKRLSSFDDELGELIRDTPLWRERDELLRSVPGVGKVLSSTLLAHLPELGALNRKQIAALAGLAPFNRDSGTLHGSRCIWGGRAQVRRVLYMATVAGVRSNPVIKDFYTQLRARGKYPKSALTACMRKLLVILNAMLHNKTHWQTPALTSSTSSLSPFLGAVSEHGCCQE

SEQ ID NO: 130260 - protein, 414 aa, unidentified
MFAVGVDVSNGRSTVAVLQTKKKVILKPFEVPHTPEALGRLVDKLNSLNEETRVIMEHTGRYYESIAMFLNSKGFFVSALNPLLFKAYQEGISVHPVKTDKADAIMIAKFGLDKWDELRQYEPMDTIRYQLKTLNTQFQMASKSKTAFTNNLIALLEQNYPGIRKHFPSPARPDGSEKWVDYVGTFWHIDCVRKISLKAFVERYLKFCQKHGYNFSEEKAAELYCHAHSTIALVPKSDISRLMVREAVNQLSTISHTVETYRAEMNRLASQLPEYKTVMGMYGVGPSIGPQLMAEIGDIRRFPQRNSIIAFSGIDPEKDDSGDKVSKTGKSTKRGSPYLRKTLFVIMDILLRLQPADDPVYQFLDKKRSEGKPYYVYMTAGGTKFLRIYYGKVRDCLKEQGLWDQPMIESGNSD

SEQ ID NO: 130261 - protein, 355 aa, unidentified
MRIIGVDVHTRQQTVAMLDRETGELIEKTLQHDGDEVRKFYSALPGQVLVGIEATGSMYWFLQLLEELGIDHQVGHPPEIRKAETRKQKHDRRDAALLLKLQIENRFPSIWMPSTELRDLRTLLMHRHQWVRMRTRVQNTLQAIAISRGLRRGKARWSQTGHRIVALAPHAAYRRTELQDLDHKLHAQIDELDQRVGDQALQRPGAKLLMSPPGVGPVTALATDVFWGDPTRFADGKAVVSYVGMIPSEYSSGGQQRLGGLSKQGNPFLRFLWCEAAVHAVRRDPELQRFYRRKLAQKGLGKARVAAARKLGIRLWIMLRDPIDYQEFCRRGQMRQKNGGACAGMPEVGHSPAMQ

SEQ ID NO: 130262 - protein, 414 aa, unidentified
MLKIVYPICCGMDVHKSFVVACIASTNIQGVTTYKSHRFSTFTKGLRELSQWLLQNDCRDVCMESTGKYWIPIYNILEPACKIVLAHPKYVKAIRGKKTDKKDAQWIADIFKHDLVSGSFIPPADIRQLRDLVRYRFKLTNYITGEKNRAQNCLTVSNIKLDDVFTDVFGKAASAITTRLLENTEPFDVTPFLTKNHKASAEEIQMSVDGVICPEQAEKLRIIRSHMDALTLAKLNLESLILSVAEKYLPQLNLVLTVPGIQSFSAIAIIGEIGVDMSVFPTSKQLCSWAGLTPQNNESAGKKKTTRINRAGSYIKPLLVQCANAAIKGTHHPEVKNRYLALKKRRGHKKAIIAISRMLLTAIYNILKKNEPYNPALYRDLDRPPVHREVSVDEAVYILQRQGYLISAPRSTAT

SEQ ID NO: 130263 - protein, 355 aa, unidentified
MEHYAGIDVSLELSSVCVVDAQGKIVRETKVASEPEALVAFFASLGFAVKRIGLEAGPLSAWLHAGLKRAGFDTVLLETRHVKAALSAMMVKTDRKDARGLAQLIRMGWFRPVHAKSMGSQEVRALLVARKQLLGRLIDVELSIRGILRGFGLKVGVVTRKGFEGRIRELVTGHITLERIAGAMLSARAALKVEYEKLHKIVLTIVREDAVCRRLMTVPSVGPLVAITYKSAMDDPNRIAKSKAAGALFGLTPKKYQSGEKDVTGGITRAGDEMVRTALYEAANVLLARITRFSKLKRWGMDVAKRRGSKRAKVALARKIAVILHRMWVDGTTYRWTDGPADRGAGMTRRNTRCE

SEQ ID NO: 130264 - protein, 324 aa, unidentified
MTSSASSPLFVGIDVSKARLDIATRPQSARWQAENREPGITSLVDKLQQLKPTLIVLEATGGYETAITAALAAAGLPVAVINPRQVRDFAKSVGRLAKTDKIDAVVLAHFADAVRPELRQLPDEQTQELQGLLVRRRQLIEMLVAEKNRLPMTHKALKAGVKEHIQYLEHQLEDLDAEIQDRLRQSPLWREQEDLLRSVPGVGKVLSVTLLAELPELGKLNRKQIAALVGVAPYNCDSGQMRGKRAIWGGRATVRSALYMAALSAKRFNPVIRSFFEKLVAAGKPKKVALTACMRKLLTILNAMVHSGSRWQPQKAAPKSLATA

SEQ ID NO: 130265 - protein, 379 aa, unidentified
MDCTSTAAPAGSILHCALELSKNTWLLGIQFSDRPQPSLYPIRGGDTEDLMAKLAAARDRCVKVSGRAPSIVLCYEAGYDAFWLARFLNARDIECLVIDSASMQVNRRARRSKTDRIDVGKLLRGLIAWLRGDRHVWSVVRTPSVDEEDLRRSHRERDFLIHERTAHINRIKGLLFAQGIRGINVKRQYKTLHVDKLVTGEGHPIPPRLASEIVREIARLTLVQEQIAILERERDERPTPCTATEKKRTQLMYLNGIGPAISAVMTREVYYRQFDNRRQVAGFLGLAPSPYDSGEVERSQGISRAGRGQVRGTMMQAAWLWIKHQPKSTLTRWFLERTMGQGGRIKRIMIVAVARKLAIALWRFLEHGLVPQGAIMRSK

SEQ ID NO: 130266 - protein, 364 aa, unidentified
MDPALGLGWDVEVSTTEQETSMNIVRIGLDLAKYVFHLHGVDARGKVVLRKTLRRLGVAPFFANLPRCVVGMEASNGAHYWAKTLSEFGHDVRLISPQFVTPYVKSNKNDRNDAEAICEAVGRPNMRFVSVKSAEQLAIQAVHRIRSRLVASRVRLVNQIRGLLGEHGVVVAQAIGNLRRALPRIIDDEANGLNSIVRALIGELREELSDLDGRITIYDRKIINLYRMSEACQRLGEVEGIGPITATALVAAAGDGKCFKNGRQFAAWIGLVPKQRSSGGRSRLLGISKRGDRYLRTLLIHGARAALGRTRGKQDPRSLWLLKMRERRHANVVAVALANKNARIAWGLLASGMNYDQHLTVSSA

SEQ ID NO: 130267 - protein, 465 aa, unidentified
MKHHPRYSRRTPRVSPSVLERININVAGIDCGSADHFVAVPPDRDPLPVQSFKTFTGDLQRLADWLSACRVTSVAMEATGVYWIPVYEILEARGLEVLLVNARHVKHVPGRKSDVLDCEWLRELHSVGLLRGSFRPVDAIVALRAYLRHRETLIQSAAAHIQRMQKALLQMNVQLPLVVSDITGVTGLRILRDIVAGRTDPHALAQHRDRRCRASVTEIVAALTGNYRPEHVFVLTQNLQLFDAYQEQLAACDTAIEAHVQTLTVRVDLPAAPLPAARVTRKPRANEPRFEIRTPLHHLTGVDLTQIDGIAPYTALKLISEIGTDMRRWPSEKQFTSWLTLAPNNRISGGRLLSSHTQPSANRAAAILRMVAMSLGRTHTALGAFYRRLAFRVGKAKAITATARKVAVLVYRTLNGDLVYHDAGADAYDAHQRTRVLRRLRQRAATLGFALVNRETGEVLEAAVS

SEQ ID NO: 130268 - protein, 404 aa, unidentified
MTYRYVIGVDVGKYFHHACVLDEHGTQVLSKQVNQHETSLRDLFASFIGKVDQSHDVLVVVDQPNNIGRLTVAIAQSMGTTVRYLPGLAMRQLSRIHVGNAKTDVRDAYVIAHAGLTLPESLRMVDRVDEVFLKLKILNGIDEDLARAYTRLINQMRSALVGTYPEFERVLRGQVIHRTWILQLLAKYGGPTKIRRLGKARVNVFTRRHRARNPETIVEAMFAAFTSQTVQIPGSEYAELGVAMSAADALAKKEHRKEIEDQVLALIQDIPHTEILLSMPGIGPKSAGQILMAVGDMSDFPSAAHVASYAGLSPRTNQSGTSIMSNSLNRAGNKKLKNALWQSSFASIRFHERSRQFYERKRKEGKRHNAAVVALSRRRLNVLFAMMRNGELYRENAPEVIAAA

SEQ ID NO: 130269 - protein, 329 aa, unidentified
MEPKLLIDDDWSKDHHTICFMNPQTGGALASFDVPQSSTGFARICAERENLGHPPQSCWVGIETAHNLIVDYYLARNYHVFVIAPSVTKATQKRYGNSGAYTDQSAAFLLADLLRTDRVRFTPWRPHGELVEYMQAKVRLLKTLNQDIVRGTNRLQAVLLRVNPQPIDLFSKLTTEICLHFLICYPTYRAVQALTLDDLKAFCAEYGYTHPQRIPKLYAHLQTQTPTPSQAVSLAYADQIRFIAQTVLALVQHRQLLLRELLELFGQHPDRIAFGSLPGAGDLLAPALLVKFGEDRDRFPSPASVQALAGTCPVTKRSGKRKSLLSHRL

SEQ ID NO: 130270 - protein, 354 aa, unidentified
MNSVKYIGLDVHLSAISAAVLDGEGKLVMESVLATHSAAILDFIHGLRGALHLTFEEGTQSAWLYDLLVRQVDELVVCNPRKNALLKAGNKSDAVDARKLAELLRAGLLSPVYHGETSTVTVKHLGRSYEALTEDSTRVMSRLKALYRGQAIPSAGKRPYGGQREEWLGKLGGAGLQGRAQRLYQQLDALQALRREARQELIRECRKHAAAPLLRTIPFLGPIRAGLLMGRVQTPHRFRSKRQFWAYCGLALETRSSADYRFVNGQLERTRKPVWIRGLNLNHNHDLKNLFKSAATTASVRPGPFCTFYQGLLAKGMLPAMARLTLARKIAAITLSVWKKGERFDAQKLKPPAA

SEQ ID NO: 130271 - protein, 346 aa, unidentified
MLIIGNDFHARYQRIAMLDTSTGEVEERRLDHTNGEVRAFYAQLPERALVGIETTGYTLWFAELMSERGHELAVGDAAKIRASETRKQKYDRRDAWHILELLAEGRFPRIWLPSAEDRDVRVLLHHRHSLVQMRTRAKNGVQALALSHNLYRGSKLWSEDGQQALQALPLREAAARKRQDWLQGVAQLNGWVEQIEQRLEQEAAQRPDVLRLRTHPGVGLLTALATVVVLGPVERFAHGRKVASYLGLIPSEHSSGGRQHFGHLTKQGNRLLRFLLVEAAQSACRHDPELKQDYKRLAFRQGWAKARVAVARKLAIRLYILLRDQIDYEEFVRRGSPAGRPGVALV

SEQ ID NO: 130272 - protein, 450 aa, unidentified
MSKKTAASAVFNVIHPHAAGIDVGNSKHYVAVSPDSCAEGESCVRHFDTFTCDLLQIADWLAAHHVTTVALESTGIYWIPLFEVLESRGFEVCLVDTRRLKSVPGRKSDVKDCQWLQQLHTFGLLHSAFRPNEEICVLRTYLRQREMLIANAGQHIQHMQKALQQMNIKLSNVLSDITGTSGMLIIQAILDGERNPVKLAKHRDRRCKNSEETIAKSLVGNWRADHLFELRQAVELVRFYQQKMADCDREIETWLQTITPKQVEQSPLPPKKAKKNPHSPDFDARSLLYRAIGVDLTLIPGIEANTAMKVIGEIGRDINRWPTVKHFASWLCLCPGNKTSGGRVLNSRTRSSNNRAATALRLAAQSLERTKTALGAFFRRIKIRKGAPKAVTATAHKLAQLIYFMLKKGETYVDIGQDAYEQRYQARVVESVRRRAAQLGYYLVPTSAGV

SEQ ID NO: 130273 - protein, 430 aa, unidentified
MSKLSRRNRARSSQGEIRPFEGMRHVNPHAAGVDIGAHESMAGVPDGDDQQLVRAFGTSPTALESLADWCIDRGIQTVAMASTGVEWMPLCETLEARGIQGCLRSAQAITPVPGRQSAVLDWQWIQTLHSSGFLSASCRPHADCVALRTLRRHRAQLLEHRAPPVLHMPQAFFQRNIHVSHALSDVTGPTGQRIIRAMVAGERDPSTLAALRNSRWKQDTDEIAKALTGPWRAEPLFVLKHALALCACSTAQLSECDTQSAGACSVLTPRVAPVPAAPVPAAAPVPPRRKPHAQRKNAPEVNTRAYILRLTGVDLVAVHGSSDALAQTMLSDIGTDLSTWPDDKHCCSWLGLAPQHDLSGGTVLKSRTMKNRHRAAQACRMAAPSVVRAAGAFGACSRRLKGRLGPAQALVATAHKIARTVSHMLQDRVQ

SEQ ID NO: 130274 - protein, 415 aa, unidentified
MCKVIMIGCDLHDATTVLKVADGPDATVRKGFATSNRSAMIEWVKDFASQRGAARIVFAYEASGQGFGLYDDLTDAGIECHVLAPTHLPHTTHSRKNKTDDKDALMILDEVRAHVLAGRTLPDVWVPNHQTRDDREIVRLRLEVATQRTRLKNQIRNLAKRSRLAFPDDFTSSGDWSKRSVAWLREVATGKTGALREGVRTALASLVELYQAMSVQIQALDQAIKRLSRTERYAQSSRKLKLLSGVGTLTAMVFLTELGDLARFANRRQLAAYLGLAPSAFESGERDDRKGHITKQGPARVRHVLCQAAWAALRVSPEWKAKYDRIRRGSKSRGRIAIVAIMRQLGVEMWQTARSPELDAMLDERDALASQKTKKTTSARAPQKGAAPSTPPSPRPRRGEAEATATRKGLARHPE

SEQ ID NO: 130275 - protein, 373 aa, unidentified
MMISLAPILFAREDATRAAFIKPLKPLFMSTIIKQSAGIDCGSEELVVSLNQMFASGDLVCVGTKSFANSHSGFDKLLKWISKISAPDIKCRYVVEATGIYHERLAYFLFEQDQEISIILPNKINAYGKTCSSKQQDDYQASKVIAEFGCVKKLEIWQPPSPVYRSLKQLSRERDQLQKEHSAISTQLHAEVNQAFPYLESIKRMKARIKLIEKQIEDIENEVGELVNENKELKERVLNVCTIPGVGVQTVITIVAETNGFNLIRNYKQLVSYAGYDVIQKKSGTSVRGKARISKKGNTHIRKALHFPAFSAVRYNQPLKKLHERIMERQDVKMKGYVAVQRKLLVLIYTLWKKNEPYKLLEQPVEAALTELD

SEQ ID NO: 130276 - protein, 344 aa, unidentified
MNIASIGIDLGKTTFHLVALGERNKILLRRKFSRSQLLTYTANLPVSLIGLEACAGSHFIGAVLREQGHQVRLIPAQFVKPYRKSNKNDFIDAEAIAEAVTKQNMRFVQIKTQEQLDWQAMHRVRDRLMQRRTALINEIRGFLLERGVTFAARPIYLRKNLPTVIEDAEQNLTPRLRWLLDRLWQEWKQTEMDIKTITDEIESISNEDARCRQLRQIPGFGPLVSTATVAAIGNGAAFRRGRDFAAWVGVVPRQFSTGGKQKLYGISKRGNVYLRRMLIHGARAVLLRVKYDTGGFGQWVHRLAQRAPRNKVVVAIANKLARMAWAVLSSGKDYRHQPLQPAAA

SEQ ID NO: 130277 - protein, 410 aa, unidentified
MRLCVGDDWAQDHHDIEVMDEAGQVLARRRLPEGVAGIGQLHELIGRFLPADGDAQVQVGIETDRGPWVTALIAAGYVVFAVNPLQASRYRGRHGVSGAKSDSGDAHMLADVVRTDAHQLRPAAGDSAEAEGIKVLARTHKTLIWERTAVTQRLRAQLLEYFPAAVAAFEDLDAPDALELLGRAPDPARAARMTRAQVSAVLKRAGRYKIKERTDAILAALRSPQLGQPPALTAAYAATVRSLIAVITTLNEQVSSLQGQVEANFGQHPDAEIYLSQPGLGAITGARVLGEFGDDPHRYTCAKARRNYAGTSPITRASGKKKIIAARFVRNDRLTGALMIQAFAALRVSPGARAFYDAQRAKGLEHNDALRRLASRLVGILHGCLKTRTCYNEATAWGHRENIPQSEAAA

SEQ ID NO: 130278 - protein, 339 aa, unidentified
MTNITTIGLDLAKSVFQVHGADRHGSPVLLTKLRRSQVLGFFANLPPCVIGIEACASAHYWARELQELGHSVRLIPPQYVKPFVKTNKNDASDAEAICEALSRPTMRYAAVKSGEQQSVLTLHRARELLVRQRTMLINALRGHCAEFGIVAGQGASKVTALIGIIEDHQDERLPALARQALGSLIRQYQIVQEQILGLEKTLMSWHRATEASRRLATIPGVGVITATALVATIGDASQFHSGRQLAAWLGLVPKQNSSAGKDRLGRISKRGDGYLRKLLVHGARTVLLWSRRKKEERSRWQEALLARRPTNVVLVAMANKTARVVWALLSRREVFCAKA

SEQ ID NO: 130279 - protein, 330 aa, unidentified
MKNYEETVGIDVSKKTLDVSCHLCSKHKVFGNDIKGYRSMLKWVKNQTGGVSVFYCFENTGNYSLKLSTYLSSSGVDYVEESPIKIKRSSGLVREKTDKVDSEIIARYAWLYREELSSSKSKPVVYQELGRLIGLRDQLVRGRAGLLGTLKEIEHLLNSPSTDTSCMVLRRSIDNLSKQIKHIELRMEDIVKAEPAMSATYELLLSLRGIGFVVACQLLYHTENFKRFDTWRQFSSYCGLAPYEYSSGTSIHRRKQCHYLGDRKMKSLLSMASISAIQHDPELRIYYKRKVEEGKPKMIALNNVRNKLLARVFSVVRRGTPYVVMNTYAA

SEQ ID NO: 130280 - protein, 423 aa, unidentified
MMKLKYSICCGLDVHKNVIVATIVTTNKDGISEYLQKSFSTINSDIQRFHNWLIENNCYHVCMESTGKYWIPIFNYLENDIDVCLTHPKYVKAIKGKKTDKKDSKWIADLYKFDLVRCSFIPPKDFRQLRELSRYRFKLVCMKSSEKNRIQNCMTISNVGIASVLSYPFGKTATEIISYLLEHTADSMDEKAVRKLIKKGAKAKSDEIIEAIKGYNIETDQAKKLELAQGHLEYLDDMITQTEVELYVRIKPYYEFVEFVSTMPGMTELSSTIVLAETGVDMDIFDDAKHLCSWCGLSPANNESAGKKKSVRIAKAGDYLKPMMVQCALAAIKSKKQPYFAIKYGRIKKRRGHKKAIIAIARMMMVCIYHMVSEKKPFTPTDYEELMDPQNHVESVVLNENNVFAYLESLGYDSSKLVKRNDN

SEQ ID NO: 130281 - protein, 347 aa, unidentified
MRYVGLDVHLRRSSFCILDEDGKIVKQEQVVGNHAAVITRLGREPGPMSICYEASCGYGYLYDRLSKLAGQVSVAHPGRLRLIYGDKKKHDRVDAKKLATLLYLDVVPLVHVPSEDVRAWRMLVEYRQKLARKRATVKSQIRALLRTQGVECRRRPWARQSRAELAALPMPAGVQVSLDLMLQELADLGPKLKRAEAQLGSIAREDARVPLLRTIPGVGPRTAEAFCAYVDRVERFRRTSEVGSYFGLVPCEDSSAGRSRLGHITRDGPSTMRKLLCEAAWVAIRRDATLRAYYQRICRDDPDRKKIALVATAHHLTRVMAAMLRSGEVWRSDAALGMNGGRPSAGG

SEQ ID NO: 130282 - protein, 337 aa, unidentified
MKSPSNSTPNATPNSPCVHVGVDVAKDTLQVDAGNAFKGPVPNVPKDIQKLLATLLKNTRGQGELRLCIESTGPYGRPLLAACFKRGVIVSQVNPKFIKAHAESKGILHKTDAQDARVIRDFAEHNTPPPAQPLDPTRTRLRELHLLRDGFDKDLSRQKSLLASITLPDIRKRLHASIRALERRVEALEEEIRQAALEQDAAFAALIHALCVIKGVGLLTASKVAAHVPELGSLGRRGSAFLAGLAPMAKDSGNTSGPRVIKGGRWHVRRGLYMAAQCAALHNDVLRELYQRLRARGKKHSVALVAVMRKLLAHMDRVAREHLRPPVVPSPTCPPAE

SEQ ID NO: 130283 - protein, 322 aa, unidentified
MAMLSFGGIDVSKDRLDITVLPDEQCSSVSNDAAGWAELVEQLRGSSITAIGVEASGGYERGVVRALLAAGMSVRQINPFKLRQFAKASGILAKNDRLDARMIASFVAIMPTRPAQRQAPMIEQLAAMLTVRRQLSDHKVATENASRLLEGAMLQRLSRRRVAGLTADIDLLNQRLVEIVTADAALAHRFRLLTSMPGVGAVLACTLIALLPELGQMSRKQVAALVGLAPYDFDSGKLKGRRCIWGGRARVRHVLYMAALSASNWNPALKAFHDRLAATGKKPKVVIVAVMRKMITTLNAMLRDGTAWVDRYSGRRSASTAR

SEQ ID NO: 130284 - protein, 409 aa, unidentified
MIYCGIDWAERTHDVALVDDSGQLVAKRHITDDAAGYQVLLDLLAEYGDTEESPIPVAIETSRGLLVAVLRTGRRKIYAINPMAAARYRDRHAVSRKKSDPGDALVLANILRTDMHAHRPLPQDSELARAVAVLARAQQDAVWNRQQIANQLRSLLREYYPAALAAVESWKKGLCRPEARELLRLAPTPTRAAKLTRAQLQAALKRAGRQRGIEAEVERLRDILRADWAHQPRLVEDALGTQMLALLLQLEAASKAADDLEHAVEEAFPQHPDAEIILSFPGLGVQLGARVLAEIGDDRQRFVDARGLKAYAGASPITRASGKKSSVTRRWVKNDRLNHVGYLWAFSAPNASPGAKAHYRKRRDHGDWHASAQRNLFNRLLGQLYHCLQHGARFDEAIAFPAAAEALAA

SEQ ID NO: 130285 - protein, 415 aa, unidentified
MDVLYPRCAGLDVHKDTVVAAVRLAGDVPAKTEVRTFDTTTPGLLALSAWLAENGCTHVAMEATGVYWKPVWHILSDGDLTLILANGAHVKNVPGRKTDVADAIWLADLLAHGLIRASFVPEAPTQEMRALLRTRKQLVREQASHVQRIQKTLEDGNLKLTSVLTNIMGVSGRAILLALIDGESDPDTLLTLVRRGVKAPAEKLRAALQGRITDRHRFLLRLHLRQVDALDAATAEIDAEVDRELAPFRQAVRQLRTIPGVSDLTAQVIISEIGIDMSRFPTAGHLISWAGLCPRNDESAGKRRSTRLRKGATWLKTTLVQCAWAGSRKKDSYLQAQFQRLRHRRGPKKAICAVAASILTAAYHMLRDGTFYQDLGAKHFHRASPDEQANRLARQIAKLGFTCTMAPTQAKEVSI

SEQ ID NO: 130286 - protein, 337 aa, unidentified
MEHVAIDLGGSQSQVCVRAADGAIVEERQCRTTELATVLSKRPPSRVIVETCAEAFHVADALRASGHDVRVVAATLVRSLGVGARGLKTDRRDAQVLSEVSTRIDLRGVHIPSATSRERKAMCTSREALVSARTQLINCTRGWMRTRGIRVRSGWTRTFAKRVRATLGTDCPEHIAALLSVVEALDLQIVQLDVALKQLANEDPVCRQLMSAPGVGPLTAIRFTASVDQPERFPNAHRLESYFGLTPGEDSSGGRQRRTGISKAGSAPTRRVLVQAALTAKRCARNDPMVRWALEIEKRRGKQVATVALARKMAGVLFAMWRDGTLYQSRSAAAVTH

SEQ ID NO: 130287 - protein, 354 aa, unidentified
MSSTKYIGMDVHTESISIAVRNSLGKLVMECVIETKASTIVQFIDGLRGDLRVTFEEGTWAAWLYDLLKPHVTEVLVCNTRKNASRDSSKSDRIDARKLSEQLYMNNIKSVYHGEHGLRTLKELARSYLTISKDLTRVMNRLKALYRSWGIPCAGKEVYAPRHRAEWLAKISEAGVRRRAEHYYQQLDVLRPLHQETRRDLLLEAKKHKPWKLLRLIPGIGPIRAAIVIAVMQTPHRFRTKRHLWTYSGLALETYDSAQYRVAEGHLQRSKKPATVRGLNKDYNHDLKDIFKGAAMRASTAAGPMHDFYEALLAKGRKPTMARLTLARKIAAITLIVWKKEVRFDANYLKPQAA

SEQ ID NO: 130288 - protein, 401 aa, unidentified
MKKLSGGIDVGSESHHIIILDEEDNFLYNQKVAHKLNEFTESIKLFRKIEKKEGGMLSFALEGKNGYSTPLDRILLDRGFTLYNVDNFKLKRFREAFAGEWRDDERDSLMLSKMLKLKEHIDSKREKVFIKIEKPSPITESLKLLSRHQQTLIDERVRLTNRLRKKLLEVCPQILELGKVKNKKIIAILAKYPDFSKYKRITLCSLLKIKGIGKKGVPFLLKRLNNIEYMPGLTDIYKTIILSYAQRILELREEIKDIDKSLDEIGEKNREVNHLKTIPGVATKLASRLIGEIGDINRFPSEKQLAIYCGIACVNNDSGKVTKAKAVYKANKICKQTLITMAGGSIRLSSQCRAYYLKKRTEGKSHNHALRCLARQMIKVIHRMLTEDRDYIVRKELKKVA

SEQ ID NO: 130289 - protein, 339 aa, unidentified
MWNIGLDVHQRETQVCIRTPEGVVTEHRLPTTRARLTGYFAPLPPSRLLLESSTESEWVAQLLEGLGHTVLVADPSFAPMYGRRRRTKTDRRDARALAEACARGVYRLAHRLSARQREVRLALAVRQSLVRTRTRWINQMRGQLRSVGLRLARGTPTTFAPRVQALALPGPLAGQLAPLLALLTPLQAAIAAADQQLIRWAGQDPIATTLQSVPGIGPLTALAFVAALDDITRFPTAREVPAYLGLVPRERSSGDVVRRGGISKAGNTELRWLLVEAGWRVLRSPAPAHVALRAWGERVAQRRGRRIAVVAVARRLARILYALGRDAAVYGARPTRHAA

SEQ ID NO: 130290 - protein, 335 aa, unidentified
MIHVGVDLHKNFLEVAAIDDQGNILDQRRLLNDDPAAIVSYFRDLPGEVTVTVEATRNWYWLYELLETEVAKIKLADSRQVLWIAKARLKNDKIDALKLAELERANLLPEAYIPPRPIRDNRELLRYRICRVHDRTTTKNRIHGLLDKLGIAHGFTDLFGKAGMAFLKQVPMRDVYRIELDGYLRTLEHLVKEIDAITRRIEKAVRADRRCDLLVTIPGIGVLTANLLLNEIGDIKRFPSAQHLCSYGGIVPRLRQSADHIWHGHISKEGNRYIRWAIIESAQKAPSKDNELRKIYTRIAFRRGKQKARVAVARRLLVAVWHVLTYEEPYNLQVS

SEQ ID NO: 130291 - protein, 370 aa, unidentified
MEQDITYVGLDVHKQTISVGLAEPGRSGGVRSLGTIDNRPVLVGRLVKKLASAHGRLRFAYEAGPCGYGLYHQLAALKQECIVAAPALIPRRPGDRVKTDRRDALALARHDRAGELTAVWIPDAEHEAVRDLVRARYQAVVAMRRSRQHLQALLLRQGRIWNDGKSWTRAHRAWIVGLHWQHPVHQVLVSEHLAAIDQAAARRDRLMQEIEALVPQWRLAPVAGALQAMRGIAPISAITLVAAIGDITRFQTARQLMSYLGLVPSEHSSGPKVRRGAITKAGNGEARRVLVEGAWTYRSVPRLSPAMQARQAMLPKDVRDIAWKAQRRLCARYRTLLAKGKPKQVVATAIAREMVGFVWAIAHAAHPAIR

SEQ ID NO: 130292 - protein, 314 aa, unidentified
MNTLARSVTGGVDTHLEFHVAAALDERGGLLGIERFDTTTRGYKKLLAWLEAFGPVVLVGVEGTSSYGAGLTRHLHAEGIAVVEVDRPNRQRRRRQGKSDPKDAVSAARAALSGDADGAAKTQDGNVEAIRVLRVARTSARSARSQALNQMRSLVSTAPEPIRGELRGLSVHRLLARASTYRPGTKRDVISLTKLTLRGLARRAIELEEEIRAYDAILEPLVTETAPELVSALGVGPDSAGALLVAAGDNPERLRSEAAFAHLRGAAPLDASSGKQQRHRFDPGGDPQANSALWHIVITRMVYDLARPPTSSGE

SEQ ID NO: 130293 - protein, 391 aa, unidentified
MIFVGIDVAKDKHDCFILNSEGTVLADVFTIANNRIGFETLLSRIQSCSQGESKIKVGLEATGHYSYNLLGFLLDSGLATYVINPLHTNLYRKSLSLRRTKTDRIDARTIAMMLMSDVDLKSYSNTAYHNEELKSLTRYRFDKVKERAKLKSSVARLVNILFPELEKLVSSLHIAVVYALLSNYPGASDIANANTEELAETLCTASKGRYTKSKTAEIQVAAGVSIGSKMPAKSMELKHTIALIRELDKEISEVESAIDKITSQMDSPIFTIPGIGRHMGAMILAEVGDFSNFASADKLLAYAGLSPSTYQSGQLQNCYAHMEKRGSRYLRYALFNAAKYVCLWCPTFSAYLEKKRSEGKHYNVAISHAAKKLVRLIFAMQRSGKAFLADY

SEQ ID NO: 130294 - protein, 344 aa, unidentified
MMSYYVGLDVSVKLTAICIIDDAGKVVMERVVASDPDDIGRCIEEIDGAIGRIGLEAGPLAPWLFGGLAERGLPVVCIEVRQMKAFAKASPIKTDRRDARLIAQAMRTGLFKVAHVKTDYSQRVRLLLRHRQAMVRRNKDLINTVRGTLKAFGIRTGGGKNTLFARRVREAIDDKAILAMTGPLLAAYEDGLRMLAKLDEMVLAIAKKDAICRRLMTVPGVGPVVALTFRTGVDVAHRFDKSRLVAAVFGLTPRVHASGEVEQVGRITKCGDAMVRALLYEGADVTITRCRADNWLKSWALKVARRHGARKAKVALARRLAVVMHRMWVDGTDFSMERPTPMTA

SEQ ID NO: 130295 - protein, 396 aa, unidentified
MISVGIDVSKGKSTVCIMKPCGEILESPFDIGHTADELDSLISLIKSFDEETRVVMEDTGHYHLPVATYLSSHNVFVCCVNALRMKKFCSQSIRRAKTDKIDSIKIASFGITYWNELVKAYPSNVIYDELKFLARQYYQVTGMLVKSKVNFSNLLDQVMPKINDVLSNQGENHKLTEFVSRYIHFQNILDMGEMKFTSDYCKWAKKKGYRLNERKAAEILALAQNGIPTLPNSQSVKIAVSEAVKLIHSIEESRNTILAQMQDLCNTLPEYSVVKEMDCIGDTLAPRIIAEIGDVRRFKNKHSLIAYAGIDAPPYQSGAFHASERHISKRGNSYLRKTGYEIMQSLIKHKPADNAVYDFIQKKRSEGKCGKEAMIAGLNKFLRVYYGKVMEFYSEH

SEQ ID NO: 130296 - protein, 352 aa, unidentified
MIVLGADAHKRSHTIVALSATTGELVGEQTVQVGAKGFAALLAWARRLGGERVWAIEDCRHVSGSFERFLIARGERVLRVTTKLMAASRRGVRGRGKSDSIDAVSVARAALREGLDALPAAQLEGPELDLRLLVDHRERLVRQRVALNNSLQWHLHDLWPELELPGSSLFYGTWAPRVARRLARAEQTMRVRIARAELRRIRELSQTIKALQSEIAGLVAQTAPQLLSEPGFGPLTAAKLVGEIAGAGRFSTDAKLARAAGLAPIPVSSGKTNRHRLDRGGNRQINAAIHRVAVTRARCHPETRAYLERKRSEGKSTKEAIRCLKRHLARHVWQLLRTPHPDQGTPPSPSIS

SEQ ID NO: 130297 - protein, 385 aa, unidentified
MQMIMEQSRFAPLGLPFLGLEKLMEGRQNVTGLYDYHIGVDYHKSYSHLVVQDSTGKTLRSGRVKNDRQSVGLFLERYRENSHAVVEATRNWMVMYDWLDDICDDVVLAHPLKVKAIADAKIKTDKIDATVLAHLLRADLVPEAYAPSDKARELRLALRERMFYVRLRTMVKNRVVTAFDRYPEQTAQLKKLGDLFGKTGRQQLATLNVSEIDRIQIDRSLAFIGDIDGRIKQAEATIRVMTKANANVKLLKTIPGIGEFFARLIDAEIDDIGRFRHPKKLAAYAGLVPSTYSSGGKTYHGKIIKQGNKWLRWAFVEAVAPAVATDPQLRTQYEHLKFIGSNKARVAIGRKLLTIAFQILRDQRPYERRDANGEEGASSTISRLS

SEQ ID NO: 130298 - protein, 344 aa, unidentified
MPIVAPTTTAALVAESYDLLVGVDTHAATHTYAIVDAATGALVEHREFPTSPAGLRRAQDWINRRTDHGTVLVLVDGAGCYGAVLTEQLLAAGTDLAEAPDITRQVRHTSGKSDIIDAAELARAARGLQTSQLRRPRQGGDRTINALTALLRTVDLGVDAHRALSAATIATIAGWRTTTGTATARTVCRGEAIRLARRVRALDTELAANHAALTAAVSAQAPELLEVRGVGPVVAATVLQAWSHPGRVRSEAAFASLAGVAPLQASSGNTRRHRLNRGGDRRLNRALYTIALTRLGHDPRTRAYRARRAAEGATKREIIRILKRYISRELFRLLTATHTSPMTT

SEQ ID NO: 130299 - protein, 311 aa, unidentified
MILDPVSLGIDVSKHWLDIGFGSQGPVRRIANAAEAIEAFVEGLGEPPDLIVFEATGRYDRQLRLVLVRHGLRFARVAPGRARDFARALGLHAKTDAIDARMLAAMGERLDLQATVPVEASRDRLAMLLRRRDQLVAMRQQERLRLGEAEPEECDGLERHLAFLDGEICVIEARIRQALRDCDDLARQERLLRSVPGIGPVAATVLLALMPELGTLSSKAAAALAGLAPFNHDSGKKRGQRCIDGGRKRVRDALYMAAVTAARSSSRFAESATAMRARNKPFKLVMIAIARKILVTANAIIRHNTPFNHAR

SEQ ID NO: 130300 - protein, 320 aa, unidentified
MSGTLVVVGIDVAKAHVDVAVLGRAWPAQRFANDIDGHSALAAAMQPLAASLVVMEATGGYEAPVACALQATGLPVAVVNPKQARDFAKGIGRLAKTDRIDAEVLAELAAVLVRRDDLARFLRPLPDAQQQELAALVTRRRQLLTMLGSERLRLPLAVPKVRPSIEAMITAIRNQLDDVEGQMQTQVHEHYAALDALLRSTKGIGPIASATLIAALPELGRLNRREISALVGVAPMANDSGTVRGTRRIHGGRFDVRNVLYMATLSARTCNPAIRAHYERLRAAGKVPKVALVACMRKLLTILNAMVRTSTPWTNDLHRA

SEQ ID NO: 130301 - protein, 352 aa, unidentified
MSEDTTVFCGVDIADRASQMVVIDHDGQVLEQSRVRTTPEAMKRFFGARDPMRVAMEVGTHSPWLSRLVASCGHEVHVANARKLRFIFQNERKSDQNDAELLARVARFDPQLLCAISHVAQADQAARAVLRTRDVLVRSRVQLTNHVRGVVKAFGQQLPPCSTASFPRLWPVVPEALQPALAPLFSTLETINAGIVALEVQMEQLIQQQYPEAQHLQQIPGVGPVTSLAFVLAIGDPSRFRSCRAVGAYLGLVPRRSQTGECDPQLRISKTGSPAMRRLLVGCAHRILGRFGHDCALRRAGERISARGGKSAKKRAAVAVARRLAVVMLSLLRSGQDYEPFHGLMVAESAET

SEQ ID NO: 130302 - protein, 349 aa, unidentified
MRCFLPPADTRFYAGVDLHARSLFLAVLDRDGQTRFSRNLAAAPEPFLRAVQPFRDGLVVGCECLHCWYWLADACRDANIAFALGHAWAMRAVHGSKTKCDRHDAEAIARLLRGGNFPLAYAYPKERRGLRDLLRARLRLVRQRAELYGHVHTARRQANLPPVSNDVKYKSKRAAITADIADPFVRRRVETDLALLEPLDTTIRRLEAEIEQAARQHYPSELAVLQSTPGVGAVLSLTILLEIDTIHRFDTRQQFCSYARLCGAVQESAGQRSGAGNRKAGNAWLKWAFSEAAVLSAQKDERIGALLGRLASKLGKPKALSALAHKLGRAFYHMLHTKQVFDVSRFVRH

SEQ ID NO: 130303 - protein, 374 aa, unidentified
MLRPASKVSAQKAHSENPMTTLHYIGFDVHKKSISFCVKTAAGEIVEEGSLLAQRGALRQWASARPQSWRGALEATLFSGWIYDTLKPYGEQLEMAHPAKMKAISAGKKKSDTIDARTIADLVRCNLLPACYVAAPRIRELRRLLRYRSLVVSEAVRMKNKMAGLLMETGAVYVKEKLHGKKYFASLLEELEEVPESVIDLLRLSRGALEMFESTQKRLVRELLADPELTQRVERLMTIPAVGEITALTWALEVGDPHRFRSGAEAMSYCGLTAALKSSAGKQQHGPISKQRNHWLQSALIEAAKLAPRWNPQLAALQARELERGHRNRATLAVARKLVTYLLAVDKSGQSFQLRAPLPEDRTEQEMAQKIKSA

SEQ ID NO: 130304 - protein, 415 aa, unidentified
MSALFRWVGRAIGLDVHRDFCVIAICEDGVVRSAGRVASTPEAIKALAESLEPSDRVALEVTGSAWEVARILEPHVERVVVVSPDDTGIVQARAKTDRLDARALARLLWKGELESVWMPDERCGVLRRRLARREQLVHARTRAKQEVHAVLHRRLQGKPPSTDLFGAKGRQWLAGLELPLVERESVNAALRHVNFLDCEIGEVERLIAEQAVGWPEIRRLMTVPGVNLICAASFIAAIGDANRFMTSRKLVAYLGLDPKVRQSGEAPARSGRISKRGSASARWALVEAAWTTVRQPGPLHAFYERTRGRRGHGKAIVASARKLAVLFWCMLTRGEDYAHQQPSLTAKKLRKLELKAGAPRRTKAAAGISSVNRAMREAERELAEQAEISYKRLVQDQKAGAPARKVGASATPERA

SEQ ID NO: 130305 - protein, 349 aa, unidentified
MIIIRACNKFACVDTRTGELSERRLAHREQAEQFYRELGQQKVAVRVGMESSGHSRWFERLLHELGFELWIGDPAEIRTKRVRKQKTDRQDAQLILQLMLENRFPRIWVPDAENRDLRQLLWHRHRLVQMRTRVMNQLHVVPLNEGLRRKKALWRPAGRKEPESIALAPWASRRQQGLLNLLDQLTPKIQELTRALGEEVEKRPVTRRLMTHPGVGPLTAPAFELVIGTAERFPCGKQLASYVGLVPEEKSSGDRRRLGHISKQGNVLLRFLLVEAAQVTVRSQPEWRSKFFHLAMRRGRKIAKVAMARKLGVHLYWMWRQGLDYDQSRSSVRTRESPDISMVCSKSST

SEQ ID NO: 130306 - protein, 359 aa, unidentified
MEKVIRIGMDTSKSVFQLHGVNESERPVLRKRLRRHQVLAFFATLESTEVGLEACGGAHHWARELRALGHRVVLVPAQYAKIYVKRGKNDAADAEAICEAMSRPSMRFVPVKSVEQQAAQILIGTRESLVRRRTQLSNRIRGHAAEFGLIAAKGLGRIEPLLARIAMDAKVPALAKEMFALLARDYAELDSRLAEVEARLMAWHRENELSRRLAEVPCIGPIGATAMAIKVTHPKGFRCGRDFAAWIGLTPKDHSTAGKLRLGVITRAGDEMLRSVLVAGATAVIQQVRRGRGRPSPWLAALLQRKPPKLAAVALANKTARIAWKLMVSGERYAAAHAAPPQAHQARSVAAEVATALSA

SEQ ID NO: 130307 - protein, 347 aa, unidentified
MRFYTKQHQFYCGVDLHTRSMYVCILDQAGEILLHRNLPAEPEAFLSAIKAYREDIVVCAECMFSWYWLADLCQRENIPFVLGHALYMRAIHGGKAKNDRIDSHKIAALLKAGLIPQAYVYPREMRATRDLLRRRNYLMRRRADLLAHIQNTNGQYNLPPFGKKIAYRSHRSGVAEQFSDPDVSMSVSADLELIDHYDRLLQTIELHVLKSAKHHDPHALYLLQTVHGIGKVLSLVILYEVHDVSRFPTVGDFVSYCRLVACARESAGKQHGTSGRKIGNMHLKWAFSEAAVIFLRANPLGMKYKQRLEHRYGKSKALSILAHRLGRAVYFMLTRERAFDMKQFLNS

SEQ ID NO: 130308 - protein, 338 aa, unidentified
MTEFKLIAMDTSKHVFTLHGVDAQGKALLRRELRRQQLEAWFGKLATTEVVLEACGGSHHWGRVLTALGHQVRLIPPQYVKPFVKRGKNDRIDAEAISEAAQRPSMHFVPVKSAEAQAQAMILSVRELLVKQQTQLINALRGHAAEFGVIAAKGTPQVAALLERVAADPAVPAAAQAMFRELGSAIADISARIAELDRRLSEQHKTNPVSQQLAAVPGIGPISALTLALTVDAQRFRSGRHFAAWLGLTPKQNSTAGKHRQGRISHQGNERLRQLLVLGATSVVRQVRPEQGKGSAWLQALVQRRPRKLVAVALANKMARVVWAMMTSGEAYRRQPAG

SEQ ID NO: 130309 - protein, 344 aa, unidentified
MSHSTIAVDLAKSIFEIAVSNHPGHVSEHHRLSRPRFERFFAERQPSTVLFEACSSAHHWARELQRLGHSVILLPPHVTRPYAMRNKTDRADAKALLEAFRNQDIHPVPVKSLDQHVLATLHRYRSAYIANRTARINTTRGVLREIGIFIPMGASRVVSTVRSLIEDPDSTVPRALRPTLSEACSEINHLESRTHDIEHEIQSLARDNPIAERLQTIPGIGLLTSTALVAFVGDIHRFPSGRHFSSYLGITPREHSSGLIRRLGSISKRGDPYIRMLLVHGARSVLWAAKKREHPNRLEIWALNVERSRGHNKAAVALANKLARIAWAVWSKDRDFEITTEVIE

SEQ ID NO: 130310 - protein, 408 aa, unidentified
MQVLYPRCAGLDVHKDTVVACVRCVSEPEHHETRSFATTTRELLALGEWIASHGCSHVALEATGVYWRPVWHVLEGQVELVLANAHHIKNVPGRKTDVNDAMWIADLLAHGLIRSSFVPPQPIQELRDLTRTRKQVVREISQHSLRIQKVLEDANIKLGSVLSEVLGVSGRAMLGAIIEGERDPHKLADLAHGTARRKHDALVEALHGHIRPHHCTLLKLHLNLIIALEHTVAEVDAAVGKCLDPIHQRARLLTTMPGVRDTVAEVIVAEIGIDMTRFPTPGHLLSWATMCPRNDASAGKRRSTRLLKGNNWLKTALVTAAWAAVRTKTSYLRAQFLRLKARRGAKKAIIAVAASMLTAAYFILRDGVPYRDLGPNHFDRQQRGKTVRRLLRRLHDLGYNLPLQNQPV

SEQ ID NO: 130311 - protein, 370 aa, unidentified
MSQSSTLYIGMDVHKDSIAVAYVAQEHGAEVIYLGPIGTRQADIDQLTRKLQAKAKHLVFVYEAGPCGYWLYRYLTKKGYECWVVAPSLIPKKAGDRVKTNRRDAVKLARLMRSGDLTPVYVPKVEDEAIRDLSRAREDVIRDLKAAKFRLKAFLLRQDIRYTGRATWGPAHLRWLSEVVCPTPAQQIVFQEYVRAVNEHTERLQRLEQELQEQVKSWRLHPVVEALQALRGVQFTVAVIMVAELGDLTRFDNPRQLMKFLGLIPSEYSTGEKRRQGSITKTGNTHARRALVEGAWAYRYPAKVSRHLQLRLEKQPKIIQDISWKAQVRLCKRYRRLMARGKHANQVVVAVARELVGFLWAIAKEVAVTS

SEQ ID NO: 130312 - protein, 401 aa, unidentified
MANTTVTTPEPAWAAFLALDWGSQKHAWILQPADGGKRNEGFVDNTPEAIAVWAAGLYQRFGGRPVAVALEQKRGSVVNLLLPYAHLVLFPVPASMSASYRKTFVPSGAKDDPTDAGWILDLLLRHRDRLRRLAPDDANTRLLLMLVEDRRQLVDDKTSLTLRLQDCLKQYFPQLAQWFDVDTALVADLLQQWPDLQHLQRCHDGTLRRFFRKHHGGEKLTGERIEAIRAAVPATDDPSVLEAGSMKARHLTESIAALRGQITRLECRRDELVADHPDAPIFASFPGAGPATVPRLIAAFGTCRERYQCAFDVECDSGIAPVHIRSGKVDLVSMRRACQKFTRQTFHEFAGQSIPRCQWASAFYHAHCTKPEEHHAAVRALAFKWIRIMFRCWKDRKPYDE

SEQ ID NO: 130313 - protein, 360 aa, unidentified
MQGTSPSRNDTKVSGLSCVIDPFERGSPMNLVSTLGIDLAKNIFSVHGVDSNGIVVMRRTVARGKLVELIAQLPRCLIGMEACGGAHEWARRFSQFGHTVKLMAPKFVVPYRKSGKNDGNDAEAICEAVARPNMRFVPVKSAEQQADLSVHRVRQGFVEERTATLNRIRGLLAEFGYVLPTGAEQLRRQVSNLIDQLPVRVVRCVRDLLEHADRLAQKTLEYEREIKAGVTTNALARRALSRRGIGPITASALVATVGNGHDFKNGRQFAAWLGLVPRQYSTGGKTRLGHITKRGDPYLRTLLVMGARSVLQRAARETDPLSRWALSVRERRGYHRACVAVAAKNARVTWALLAKEAVAA

SEQ ID NO: 130314 - protein, 407 aa, unidentified
MDVLYPCCAGLDVHARQVTACVRQVADGVVTRQHQVFAATTDGLTRLATWLRDQGCTHVAMEATGVYWKPVWQQLDGTFALILANALHIKAVPGRKSDLNDAAWIADLLAHGLIRGSFVPPAAVQEWRDLTRTRKPLIREIRRHTLRIQKTLEAAQVKLTHVLTDILGTSGRAILHALVAGETDPARLAALPRGRVKASPAEFVDALHGHVTAHHRFVLQTHLVQIESLERAVVAIDARLAEQPAPFQAAVALLTTMPGLGDTAARAVVAEIGTDMTRFPTAGHLVSWAGLCPRLHESAGKRRSTRLRHGAPWLKTTLIQAAWAASRTKNTYLRSQFQRLKARRGPKKAMVAVAASMLTAVFYMLRNGVVYPDLGPRYLDEHDKTRLTTRLVRRLEALGNIVEIKAA

SEQ ID NO: 130315 - protein, 345 aa, unidentified
MNKLVSTFPSTVFCGIDVSANSLAVAVIEPDGAVSQREFANSASGHKALLVWLSKHDAKVRISLEATGIYSLDLALALDAAAYIELAVLNPKLVNRFAQTLCRSKTDKADAVVLAEYSQRMPFTVWQRPGVNQLRLRTLGRHIATLVLEQATLKNRLHNAESTATVPRAVTLDLKQAQAALLRRLARMRREAMKLVQAEDQLRQHFALLVSIPGIAEVSALHILSELVLLAPAMTVRQWVAYSGLDPAHHVSGTSVHKPSHISRAGNRHLRRALYMPTLSAVRYDPHMRAFYQALRERHKTGLQALMAVERKLLHAIYGIFKSGHPYDGKLLFPNIRLEVESIAG

SEQ ID NO: 130316 - protein, 343 aa, unidentified
MQAVTTIGLDIAKSVFQVPGVDAEGNVVIRRQLKRRYILAFFQKLPPCLVGIEACASAHHWSRELQALGHTVRLMPPAYVKPYVKRHKNDAIDAEAICEAVTRPNMRFVATKTREQQSCLTLHRTRHLLIRQQTSVINAIRAHLAEFGIVAPVGRNGVEQLLGVVADASDKRLPELARASVAALGDQLRALKAQILQFDRLIMAWHRSSEASRRLDDIPGVGPTLATALVATVADPRAFRSGRNFSAWIGLVPKQHSSGGKDRLGSISKRGDRYLRGLFVAGALAVIRYAKIHGTKHRPWLTALLARRPTKIAAIALANKIARMAWAMMARGERYKEPVALTA

SEQ ID NO: 130317 - protein, 387 aa, unidentified
MLSRADNTETETSIRTDLRAIFVSLELSRTTWLVTSLSPGTREKMSKHSVSAGDIGGLLARLRSLQERVRARGKQLPPLVVIQEAGLEGFWIHRVLIENGIESHVVDPASVATSRRRRRAKTDKLDGDTLVRTLLAYKRGEPRVCAMVRPPTPEEEDRRRLSRERRVLLKERVQHSNRIKGLLFGQGVTDYEPLGRDRRQQLIGLQTGDGRPLPPHLKAQIDRELDRLEIAIEQIKAIEDELRHAIVAADAVTPVPRMLIELKGIGNEFATVLWTECLYRRFDNRRQVAAYAGLAPTPWQSGSIDREQGVSKAGNPRLRAMLLQLAWLWLRHQPDSVLSQWFQDRVKANGGRLKKPTIVALARKLLVALWKFVTSGVVIEGAIVRAV

SEQ ID NO: 130318 - protein, 341 aa, unidentified
MKQTVIVGLDVAKHVFQVHGMDADGAKTFNKKLRREEVKAFFGDLPSCVIAMEAGSACHFWAREISALGHQTLIIPGQHVKPFVKRDKTDAADAQAIAIAAMRPDMQSVPAKSTEQQAMTVLIKTRALFIRQRTKAFQALRGHLAEFGIVTGTGTARLHRLVNELRAGAIDGIPSVVRDAILAVYEDIEALDTKIARFEKDLALLSRQEDDTRRLLTIPGIGPITASTIKAYVPDATIFKSSRQFASWLGLAPRAHNSGGKSRSGRISKRGNPIIRALLFVSGMTLVRQAKTKAPGTETWLTRLVGRRPYKVAAVAAANKIARVVWALLNSGDTFRAPAPA

SEQ ID NO: 130319 - protein, 355 aa, unidentified
MSSEAGTAIARTIGIDTGKNTLHVIGLDQRGAIVLREKVSRTRMTARFVNVPPCLIGIEAGMASHHIARELAALGHEVKQVPPAYSKPFRQAHKNDFRDAHAVAEAVERASTRCVPIKTDEQLDLQALHRVRSRLIGNRTAVTNQIRGFLLEHGIPVRQGHHFLRRQLPQLLATRADVLSPRMIRIIGDLMADWNYLDERIERVTDEIEALARADEACQQLITVPGIGPIISSAMVAAIGNGAAFCKGRDFAAWLGLVPKQMSTGDRTILGHITKRGNRYLRTLFIQGARAVLLRPTGWAKHSFGSWLAAAARRMHRNVLAVALANKLARIAWTILAQGRCYEARVEPRVEPAAA

SEQ ID NO: 130320 - protein, 355 aa, unidentified
MKQEKYIGMDVHQATISVAVMDSSGKLVMECILETKAATILEFVRGLRGSLSVTFEEGTSAAWLHDLLKPHVTELVVCDPRKNALLKDGSKSDRIDARKLAELLRGNQLHPVYHGEHGLRTLKELGRSYLTLTQDVSRVMTRIKALYRSWAIPCSGATVYAPRYRAEWLAKIPQPGVRLRAERLYQQLDLLQPVRQEARRDLLSESRKHPAVKLLRQIPAIGPIRAAMLVALLQTPHRFRTKRQLWAYSGFAIETHDSGEYRYVRGKLQRNRERVTVRGLNDNHNHDLKNLFKGAALSASTRPGPLYDFYVALLEKGMRPTMARLTLARKIAPITLTIWKKGVSFDAKQLHRQAA

SEQ ID NO: 130321 - protein, 427 aa, unidentified
MDNALTTTLFIGIDVSSKSNYVFALDFFGKKLLSFEARNNLPGSEEIVSKILTCLNENNLTHLTIAMESTSFYSWHIANTLATHDALIWFKPKIYCLNPRVICAYKKSFVDIDKTDPKDAFVIADFARVGKITTAPWSGGQYIALQRLTRCRLHLMENISREKSYIISNIFLKFSELAVLEKDQNPFSNTFGASSLAVLTEFMTIEDLANSSLENLITFLVKKGKNRFSNPQATAKLLQKAARDSYRLDKSLYDPLNATIAASLNCIKALEKEVKGLDKAIEKAIKRIDNHQFQCLLSISGIGPVFSAGIIAELGDITKFNGQSAIAKYAGLTWRKKQSGNFTADNTFLTKTGNKYLRYYLLEAAASIMRYNTEYCNFYHKKYDEALIHKHKRALALTGRKLVRLIFALLHNNQLYTSKEVVEKATI

SEQ ID NO: 130322 - protein, 313 aa, unidentified
MTAALAAGVDVGRDYLDVAFAPQGRAFRAPNTPGGVETIVARLRRAGVRKVVMESIGSFGARLVRALAGAGFEVGVVDPRRIKALRLAEGKRAKTDRLDAELIARFALAMQDAARPVPSAQAFQIRALSTRRRQLVELAAMEKTRLKQTLDPQITDSCRLIISALAQERARIEAELDTLLAAEPANPRRRQLLQTIPGVGPAVSATLLADLPELGSLDRRAIASLAGLAPHPSDSGTRSGHAHIQGGRPCVRTALYIAAVSAARSDNGFKAEYRALRAAGKPAKVALIAIARKLIVAANGMLKADRPWQPNQP

SEQ ID NO: 130323 - protein, 323 aa, unidentified
MQGKVLPEPNTMTAVYAGVDVCKEWLDADVPARATKLRVSNDRYGQRRLNRELARLGVTQVVMEATGKYHRAAQRSLHAAGLAVSIVDPLRARLFAKACGRLAKTDRIDARLLALMGEALEPTALPPPSEALSELQELVNARTAATAERTALTNRRSAAQTAFLRAELARRLTAVKSHLDRLDAEIEKRIQAEPTFASRYGILTSIPGVGAVTAAVLIANFAELGTCSGKQAAMLAGVAPVACESGERIGNRAIKGGRMSVRNALYMAALSAASHNPNLAAFAKQLRGAGKPAKVVLVAVMRKLVVLANTLINENRLWSPIAP

SEQ ID NO: 130324 - protein, 338 aa, unidentified
MTITTIGIDLAKNVFELCGLDDSGEIRLRRRVRRETLLRAVAEVPACVIGIEACTGAFYWQRQFEALGHEVRIIAPQHVKPFGRRQKNDRNDAEAIAIAVVQPRMRFVPKKSVAQQDVQTLHRARQRMVNHRTALVSQMRGILLDRGIAFGQSITRARAMIPRIIEDESNELTKLCRETLSSLLALMAEIDRRVREFDRRIDQVYRESEACRRVGKIRGVGPKTATAVVAAIGDGRDFDNGRHMAAWLGLVPRQHSSGNRTVLMGISKRGDQHLRTLLVHGARAVVRTAVGKTDRFSQWVNELRERRGTSRAIVAVANKNARIIWALLAKNEEYRPAT

SEQ ID NO: 130325 - protein, 462 aa, unidentified
MPRTSKTDSTVRDLDVDGLPVIRPDAAAIDLASEVHWVCAPNMDRTGRDVEKFGATTPELERMAEWLKERKVKSVAMESTGVYWIAPHEILERHGFEIVLTNTRELARVPGRKKSDNVDCRWAQRLHSCGLLTGCFRPNEQICMLRTLVRDRGNLVAAAADWLRRMQKALDQMNVRVHRAVKHIDGMTGMAILRAIVKGERDPVKLATLRHPHCQKSEKEMAGEWTGHWREDHLFSLRESLKMYDAVQAGIDDYDGEILRKLAEMEREECREQQAPKLMNAGKARAIRNRGEEPLRQALYRMSGVDATVIDAIGVGTVEVILSEYGPDLSRFPTEKQFVQHATLAPHKPTSGGKAVQNKRRNNASTRVAAALRMAATSLHHSETALGAYFRQIARRKGKDIAIFATARKLATLIYRLLRYGQPYVDEGAAAYEKRYRVERIKGLTAAAKALGLEVTPKACQA

SEQ ID NO: 130326 - protein, 340 aa, unidentified
MEVTTIGIDLAKNVFQVHGVDVQGKVELKKQLKRDQMASFFANLRPCLIGMEACGSAHHWARKLQALGHTVKLMAPQFVKPYVKTNKHDAADAEAICEAVRRPTMRFVPIKNVEQQALLALHRARQGMVKARTAQANQIRGLLSEFGLIVPQGIGNITKCVPALLDEAQTELPGMFRELVSRLLEHLKELDRQVGEMEVQIQAWHRANAWSRKLEKIPGIGPITASALIAAIGDAKNFANGRQLAAWLGLVPKQHSTGGKANLLGISKRGDTYLRTLLIHGARAVIRQAQRKVNAPGWLPQLLGRRNKNVAAVALANKNARIVWALLAHERDFRLDYAAT

SEQ ID NO: 130327 - protein, 339 aa, unidentified
MRLYVGIDLHSNNSVLVLLDEHDQVIYERRLANDLQVILAQLAPHRKRVHAIAVESTFNWYWLVDGLIEAGYTVKLVNTAAVKIYDGLKYTGDEHDARHLAHLLRLGVLPIGYIYPKEERSIRDLLRKRAQLVRCRTMQILSIQNLVSRNSGKGISTDAIRKFDDDAIMRTCGGDDVRALAIRTNLVVLRCLDDQIRVLERTVLMKARLKPEFKKLLTVDGIGDILGMTIMYEAGSMERFAKVGQFASYSRCVGSSRWSNGKKKGEGNRKNGNKYLALAFIEAAHYSVRFNERVRRFYQRKKAKTNGVIALKAIAHKLARACYHILKDQEPFDETRAFS

SEQ ID NO: 130328 - protein, 425 aa, unidentified
MMKSLTGCEFAAFIGIDWADAKHDICLQVANTEKREFALLPHRPDAIDQWACSLRQRFQGRPVAVCLELAKGPLVYALQKHEFLVLFPVNPATLAKYREAFTPSRAKDDPTDAEYQLELLVLHRDKLKALNPQSAPMRTLESLVEQRRRVVDDSKRITNRLTSALKQYYPQAVRWFEEKDTALFCDFLSRWPTLKQVKHARRATLEAFFREHNARSAKLVEERLAAIKSATPLTEDVAVITPYRLLAQALVDQLRVTLQAIERFDTEISAISRTLPDYPLFRDLPGAGAALAPRLLTAFGEQRERYHSAAEIQKYTGIAPVTERSGKQRWIHWRLRCPKFLRQTFVEWAAETITRSFWAGAYYRQQRAKGCSHPVAVRGLAFKWIRILYRCWKSRTPYDESKYLNALKRRGSPLLNWTAEAAKNT

SEQ ID NO: 130329 - protein, 475 aa, unidentified
MNNKGKKKKNQVVTSNLLEKQELLAKVDAIKENLKASTWRELETKGKFKKNEKLTFISDDMLILGCDIGSETHYMRAIDARGRELSKSAFAFSNSSEGFHSAKEWAIEIAATNDKTQIVLGLEPTGHYWFCLATWMIANGISVVQVNPYAVKQTKEIEDNSQLKDDRKDPKLIANLVKDGNYGMPYLPEKLYGDLRRLSMFRDQLVEDRIRALNRMHREMKIYFPEYKDAFGKINGSFCLEVLKQAPFPEDLKRLGVEGIREIWHVAKLRGRGYSRAGKIFNYANESVGLKDGADVSKEAVKWFVKKILELDEQILEVESQMEEKCLKIPHAEKILKISGIGENTLAGILAEMGDISRFDDVKEIQKLSGLSLVACSSGKHKGKTKISYRGRKRLRYWLFQAAKSLVAHSEAFKKLHVYYTTRAENPLKKMQSLIVIACKVLRVIYTILTKGVTYDPKKMLMDIKRPGKEELAVA

SEQ ID NO: 130330 - protein, 412 aa, unidentified
MEVVYPCCCGLDVHKKRITACVLWAEAKGKSRKEKKRFGTFTHDLLQLGDWLEQCGVTHVAMESTGVYWKPVWNILAEQFEVLLVNAQHIKAVPGRKTDQKDSEWIADLLQHGLLRGSFVPPQPIRELRDLTRYRVSLVQEINRIANRIQKVLEDANIKLASVATDALGASGRAILGAMLAGEQDAARLAEMSKGLLRNKIPELKLALEGRMTEHHRFLLRQLFEHLRFTESKLSEIEQEIDKRMRPFEDKVTRLCTIPGVDRVTAWGMLAEMGMNMNQFPSSGHLASWACLCPGSFESAGKRLSGKMRKGNVSLRRCLAQAAWAISMMKNNYLSALYRRIAARRGAKRAVMAVAHALLEIAYHMLKRKEDYRELGADHFDRIDVNRIRRSLVRRLERLGHKVTLEPLAQTA

SEQ ID NO: 130331 - protein, 353 aa, unidentified
MAIVADHHDFVIGVDTHAASHTLALITASTGAVQQQAQFPTSPAGLRRATAWIQRHTQDTTTLIVIDGAGSYGATFTEQLTAAGLTVAEAPDVPAINRRRHGKSDALDAIAMAQASRGLNINELRWPRATGARTALRVLTVAREQMSGERTRAVNALTALLRTVNLGIDARRALTTTTITTIATWRTRDENPTLAVCRAEAIRLARRIRALDAELAANHTTLYEAVTTQAPQLLDLPGVGTVVAATVLLAWSHPGRIRSEAAFAALAGASPLPASSGNTTRHRLNRGGDRRLNRALYTVALVRMGHDPRTRAYVTRRTAEGHTKREIMRNLKRYISRQLFRTLTAAHTTGTTP

SEQ ID NO: 130332 - protein, 426 aa, unidentified
MKEHIDYLSTLFVGIDIASRIHVISALDFNQDFYIKMESFENTKDGASIAEKMIADVLTEHHQFKYVIIGMESTGFYGVHLANYLSTSELLTPFSVRVYCLNPKEVKNYKKSFNDIGKNDGIDSFVIADFARVGRIAIKPWRGSQYLALQRLTRHRLHITECIAREKTYMLNNIYLKFSEYALLRDGQHPFSNKYSATAEAILTEFTTNEDIVNSSVEELVTFINSKSKGRIADPEETAKIIQAAARNSYRLDKCLYEPLTISIASSFNCISSFEKELKAIDKAILKTVQGLNPEEYIVLNSIPGIGKVYSAGILAEIGSIKAFQNANQLAKYCGIVWNDNESGDFESEDSRMSKAGNRYLRYYIIEATSSVINHCPEYKAFYQKKYAETRNHQHKRALALTSRKFIRLLFGLLDKGQLYSPEKSR

SEQ ID NO: 130333 - protein, 343 aa, unidentified
MCIKKTYAVTAICEGQVVKKDTLKADGSFLLSYCKKYFPEAQIQTAYEAGFSGFHLHRYLEENGIKNMVVHAAGIEIASGNRIKTDKRDSLRLATQLSVGRLKGIFVPSKEREDARAVTRLRESFVRKRSSVGSQIKALLFQHGLIPYYSEQKTSSKWIQSLAAREFPSGLRLAIHQYVDLWLEFDERIDKIEQQMACQAQQEGELELLYRSVPGIGPIAARTLANELGDMTQFKNEGQIFSYAGLTPSEYSSGEHIRQGHISRQGKPILRRILVQAAWVAIRKDNDLAQIYDRISAKAGCKKAIVAIARRLIGRIRACIRTGNLYTLRREIILDKTAPAVTS

SEQ ID NO: 130334 - protein, 397 aa, unidentified
MPFPSSFDDREVVVSAVVIGVDPAKRSHAIEVIDGRERTQAAGVFANDNVGYRQMREIARRYPQRVWAVEGAGGVGKQLAQRLVADGETVIDVPPKLSTRVRAMTTGHGRKTDPTDARAVAIVALRNTNLTRVVADDEMVALRLLSERRRDLVRSRTQAVSRLHQVLMELIPSGASRNLTAAKAKQLLATVRPRDIAGKARRQLAVDYIDDVVALDRKLKTVEARIKEAVDDTGTTLTQIVGVGHVTAAMILGEVGNVARFPSNDHFASYTGTAPLDASSGDVIRHRLSRAGNRQLNHALHMIAIAHRRFDPRGRDYYARKLAAGKGSKGALRCLKRRLSDVVFRHLVDDATTKSPGGQAGASLQSSAADPIPMADTSEQPLPGLPPDTTPAAAAVS

SEQ ID NO: 130335 - protein, 484 aa, unidentified
MAARKNTKKNTKKDAASGSLTASPRPGNDGAEVAEEHVEVVTYAAAIDVAKGSGMVCARVPGSRPDRRRQTVWQVDATYASVVALMDHLRCQGIQRLVLESTSDYWRIWYYLAEAAGLEVWLASARDVKHLPGRGKSDREDCVWLCKLNERGMLRRSFVPPQATRDLRSLTRTRSRLAQDQVRHQNRAEKILEDALLKISVVISDLFGASGRRFLDALVAGERSPAALAALGDRRLRATPAELAAALTGRFREVHAFEIATHLRLIDTINDEIARLDARIEQQLTSIPGVAPACTGCGLIGGGHAPGCASDAAPVLGLVARLDEITGVGVRNAQVLIAELGTDMSVFPTPGHAAAWARLTSRTLQSGTTTKNGRTGKGNPYLRAAPGQCVMATARTDTRLGEQYRRIARRRGKQKAIIAVSRVICEIACILIADPAARFAELGAGYYGSGNPQRQTRSRIRELERLNPGMKVTLTPIEPATAAA

SEQ ID NO: 130336 - protein, 346 aa, unidentified
MLYAGLDLARKRICFDARRPDGEIVDRGASPTDSEGLDRLAERLLAHDPHVLAVVESMNGARFVHDQLELHDIDVQICDAERAKGLAPLACKTDKIDAGVLAELARRDLVPEIWLPDPGTRADRERARFRLHLVRKRTALKNRVHSTLIAWGKPCPVSDLFGRRGRELLGRLSIPEPWRSTLQASLQLIDSIDGEITAQERELRLIGAAHPYVPQLTTVPGIAWVLGFTIACEIGDITRFPSPKKLTGYTGLCPKVNQSGEHDWRGPMKKNGPRYLRWALIEAAQHAGRSPHYRELYERTRKRHGPQRGAKVAAIVVARKLSGAIWHMLTNDEPFAPGSAAGTLAA

SEQ ID NO: 130337 - protein, 326 aa, unidentified
MQKSNENKFVGVDISKKTFDVYCLDAKGQAVQRQLPQSSKGYRALAGFIGPDAVCVMEATSTYHLPLAQWLYDHGIRVVVENPLKIKRFSQMHLQRHKTDKADAKMIYEYGTIIVTKNIVLWCPQSTRIQELQQCDSLSQRLNKELTAITNTHEALAQLSVVNAEVTRIVSSTIKQLKEALRQLDKQMQALIKEHYCENYKLLMSIPGVGSKTSVMLICQTDNFTKFDNVKKFLSYIGMSPRTYESGTSVKGKGHITKVGNGRLRSLLYMCSWTAKRTNLQCVAVYEKMHTKGKPEKVIKIAIAHKLLRQVFGVIKHQQPFSMQLA

SEQ ID NO: 130338 - protein, 421 aa, unidentified
MSNSTLSKKLASVKPGTLFVGIDLALDRNVAVVLSEQAEQLTRFGFPNGRDGYDYFYRRLEATQEQQQAPAVLVGMEPTNYFWKLLAADMEQQQPDYGYRLVNPYTVKKRREGDQLDRSKDDNRDAFTIGDLLRTGKYTKTQLLHGGYAALRQYVTLYARLRRDVRRQKTLIRNVAGQLFPELPRVFKDLAGLTALAMLRHHAAAAVVRKMSQDAFIAGVRSDLPGQRVQVAKLRRAHVLARRSVGLTEGVEALQLALRLHIEALEALEQQLEEVYKALVDAFLALPESAYLLSVHGLGIITAATILSEIGDPSHYTNARQLVKLAGTQPVPNTSGRKSRSKTPMSHKGRPRLRTALFFAVMRLVQVDQAFARDYLHLQTRAENPLAKMQALGVLMNKLLRILWALVRQRSFYDPELPLAV

SEQ ID NO: 130339 - protein, 434 aa, unidentified
MRIIGMDIHRTFAEVVILEGASCKAIGKIGLTRAQLSAFASSLEKTDHVIVEATGNATAVYEVILPHVARVAIANPLQVHLIARAKTKTDKIDARVLAQLYAAGFLPEVWVPDESTLSRRRQVTRRNQFVKQRVRLKAITQSILHAHLVPRCPHADLFGIKGRAWLRAQWLPEDEREAVERHIDEYDRLTEAQSGVEREIARAAIGDPHVKRLMTIPGFDVVVAVGLMAAIGRIERFAQPDKLVAYFGLNPSVHQSGEHRGYHGRITKQGRSNARHLLVEAAWQTVRSPGPMKAFYERVRGRRGNHVAAVAVARKLVVLVWHMLTKAEDYAWVRPTLMARKLRALELLAGMPARRGQKGLCYDYNLPERRYADRAAAEHAEARYRAATRGWRPKGLRTQNGAGAASEERLEIGCAPELAPRAPDFAARSPAEKS

SEQ ID NO: 130340 - protein, 349 aa, unidentified
MIGIDRHKRTHTAAAVEQATGELLGELTRPARERGQGELVRWGRSLGEERLWALEDCRHVSGRLERFLLACGERVVRVPARLMAGLRRSARSRGKSDAIDALAVARAALREPCLPAAQLEGRSREIRLLCDHRDHLVDERTRIQQRLRWHLHELCPELEVPAGALDRRVWLQRIARRLARAQQLTQVRIARELVRRIGELTRRADELERELEGLVRSEAAPLLELVGCGTLTAAKLIGETAGVARFASDARLAMHAGAAPLDASSGEQCRHRLNRSGNRQLNCALHRLAVNQGRWHPGAAAYLARKQAEGKSRREALRCLKRHLARVVYKILVNVTQPTAAPATTLALT

SEQ ID NO: 130341 - protein, 316 aa, unidentified
MTNPSPTAFIGCDVGKAEIVVFDSRTKRSRTIRNTPQALAEFAQSLDEHCLVICEATGGYEAELLDAVVTAGCAVHRADASRVKAFIRSFGTLGKTDQIDARGLTLYGEERHARLALWQPRDAERDRLHRLVMLRRDLVAQRTAWTNRAEAPGAAELGRYIQPVLACLAAEITAIDADIAGLIDRSPALRGDAKALCGIAGIGPRTAATLIALMPELGRLQRRQVAALAGLAPHPRQSGTSNAYRRVRGGRPEVKRSLFMAALVASRHNPHLRAFHQRLMEQGKKPLVALVAVMRKLIIMANAVLRDANARSLVRS

SEQ ID NO: 130342 - protein, 415 aa, unidentified
MALKIVYKICCGIDVHKTFVVACVASTSDKGITSYESHRFSTYTSGLKTLLQWLIDRNCKDVCMESTSKYWIPVYNILEKGCSIVLAHPKYVKAIRGKKTDKKDAKWIADLFKHDLVAGSFMPPADIRQLRDLMRYRFKLTCFKSSEKNRLQNCLTVSNIQLGNVVSDTFGKSAQAILDKLLENPADTSFDLEPLVYKSLKKKLPELRDAIDGFITPEQAGKLKIIKDHYDNLESRKAELEELILALAAPYQQELTILQTAPGISSNFTAIGIISEIGTNMEAFPSAKHLCSWAGLTPTNNESAGKKKSVRVSKAGCYIKPLLVQCANAVVKSTKHPEMRNRYLHLKKRRGHKKAIITIARMLLTALYHMLKNGENYNPELYQKTDLPPVDREITIEQALMLIRNQGYKIKSATT

SEQ ID NO: 130343 - protein, 412 aa, unidentified
MGKRKNRVCGADVHKDIIVATIQDSDDTEFQEKFGTTSIELGRFRDWLIAHNCEQVAFEATGVYWFPVYDALSPSIDTIVANPWMIKGIPRNKSDTLDSKWIAGNCLDGKIKRSRVLPKDGRDLRTLTRARSAYTKTRTQLRNRIHKYLALCGITLSSYISDIFGKSGRHILDGLIESKDIDTIMDGIPSGKVKNKREPIKASLGNGLDDVSRMLIKDTLELLDHLDEKVSDTSLEILGRLQERARDLAIVMSVPGIGFVSASIILAEIGDYHDFQKSEQLVKWCGLAPGLNESAGKKSPCGITKQGSKHLRTILVEIAQVVAKMSKNNLSSFFHRLRARKNYNVAITALARKLISIIFHLLINQELYQEDNCATVKTKPIKKDLLCLSKEEQFKDGEFVTLRTPYVLINII

SEQ ID NO: 130344 - protein, 316 aa, unidentified
MTEAGGFVGIDVAKAELEVVVRPSGARWTVTNNPVGLAQLQERLQASAPSLIVLEATGGYEVAVVAALATAALPVVVLNARQVRDFARATGRLAKTDAIDAGVLAHFAEVVRPPVRPLPDTMTQSLQAWLLRRRQLVEMLLAEEQRRSRAPRPIQRQIDQHVRWLRAQLGAVEKDLAQTLRESPVWREKDNLLRSVPGVGPVLTTTLLGDVPELGQLNRKQIAALIGVAPLNRDSGTYRGRRAVWGGRAHVRATLYMATLTAARYNPVIRAFYERLVAAGKPKKVALTACMRKLLTILNAMIARRTAWKPPAAVSA

SEQ ID NO: 130345 - protein, 445 aa, unidentified
MSERTIAREAPGIRATHDSATMHATQRKRMKIWQQLTHYAGFDWARDHHDIVIVDPQGQIAAEFRIPHTLAGWQDFRQKVSAYPALGIVIETNQGAAIDQLLQIDLTVYPIHPIAARRYRERKSPSGNKTDRLDAWAMADALRLDGSAWKALQPLDPLTQQLRLLCRDEISLIEERTALINQLRQALSEYYPAALEAFDDWTRPSTWKFVIEFPTPEILLKRKRSRWEKFLHKHKLWRPDTAEKRLEIFAGAQAFCGSPAVTAAKSLLAVSLARLLGTLQNQLDEFRSQIEKLFAQHPDSGLFGSLPGAARYLAPRLLGEITADPGRFDDPQALQCLAGTGPVSYQSGQIHKVRVRHQCHKLLRHIIHLWADCARHAAPWAQTYYKKKRQDGMSHACALRCLGQRLLKILWKMIQTHTPYNADLHTQNQLAHGSWALQLMPPKLA

SEQ ID NO: 130346 - protein, 476 aa, unidentified
MSRLGPDSLRTARITHEVLDQVLLTRIALDHGPATDQPSVGARRRPDKHFTPRTISMKKRRKPAKPVLAKGRAVVGIDVGKRKHAATALSPKADLIAQLASFANTREGIDLLEREVLLKAGGPGKVLVAMEATGHYWMCLYHELKRRGYESAVLNPVQTNAHSRAQIRKNRNDRIDSAGIARLVLAGDARATRVPDEKTLELRLWVRHRGRLLRAAGNMERYAHTLVDRIFPEYADVFSKPFLASGQELMRRVGLTPVGLVDQQAEVRAVLHSASRGRLTRETIDGLLQAAKNSIGTRQAESVANRQLILAFDYLETLRQQIAAIEDELERRVDELHSPLLSLGISAKLAAVIHAESDPITDFKSPDQYVAYTGLDPSSYRSGSTINRRGRISKRGSPTLRRALYLAAFVVYRKHACFHRIYRNHRRLGKGHREALVILARHLARVIWRLLKDGREFVKRPPKHTFPSHQGRQKPK

SEQ ID NO: 130347 - protein, 359 aa, unidentified
MASVSIAHDPAAGVTVGVDTHGEVHVAAAFTSDLGRPLGHLEIPTTPAGYGRLLRWAQAFGDETPCFGVEGTGAYGAGLARHLRRAGCTVIEINRPNRQTRHARGKSDPIDADAAARAVLSGEASSVPKSDEDRVSMIRTLRVARRSAVQSTTQISNQVKGLIVTAPAELREQLRLLSGHDLIETLAGLRPGSITTPTAAAKMALRVLARRHQHLGDEIATLNVELERLTQEVAPELCALKGVGPDVAGALLVAAGDNPERLRSEASFAHLCGVAPLPASSGKTTGRHRLNRGGNRQANNALWRIVIGRLRWHQPTKDYVARRTAEGLSKKEIIRCLKRYVAREVFRLIVAKPELARAA

SEQ ID NO: 130348 - protein, 331 aa, unidentified
MQYAEVKLGIDISKASFDGYVINKGQGKHKVFSNDPNGFEALKVWLNKLGVAQVHACMEATGRYGEALAEYLVCHGYQVSMVNAYLIKQYREGHLHLNKTDRGDAQLIAEYCLREEANMRLWAPLDEKQKHLRALVRRLDELKEERTREANRLESIIDDVFVDQNIKAHLDYLNVQIKLVRVEMDAFIEQDPDLRAKQKLLKSIPGVGEQSAQRFMAEIGDTSQYEESGQIVAHFGLNPRIFQSGTSVRKQSRISKQGQSQMRASLYMPAVVAIRCNPVIIDLSQRMTKTGHVKMEIIVAAMRKLLTLMYGVLKSGFPFDPDYGKKFNFAT

SEQ ID NO: 130349 - protein, 350 aa, unidentified
MNGLRYIGLDVHQETISAAVLDRAGKLIMQSVFATRAAAILDFLDGIKGTLHVTFEEGIHSAWLYDLLQRRVARVVVCDPRKNKLLKSGNKGDLIDARKLAELLRINSLSPVYHGEMSSLEVQHRTRYTMLTEDTTRVMNRLKAVFRSQAIACPGRKLFRPDQRDSFVAQLATPGLRQRAESLYRELDALHPLRLRAKREMLAECRKHPAMKWLRSVPFLGKVRTAVLIGRVQTPHRFRTKRHCGLALQTHDSAEYRVVHGQLQRKSRPAQVRGLNWNHNHELKSLFKSAATMAAFRKGIFREFYSGLLAKGMRPEMARLTLARKIAAITLKIWKEGETFNAEHVKTQAA

SEQ ID NO: 130350 - protein, 426 aa, unidentified
MNYNTQNKKIASITEKTLIVGIDVGSTTHYARAFDWRNYEYSKKPFAFSNNEEGFMAFKSWIEDIAKKHGKDKIIPGMEPTGHYWFNLGMFLQENDMRTVHVNPHHVKKSKELDDNNPNKNDRKDPKTIAALVNEGRFTYPYIPTGIYAEIRNLSNLRFQTQEEITRIKNRIARWFSIYFPEYKDVYGKVDSVSGMMVLKQAPLPEDIVKLGVEGVNRIWREAKLRAVGYKRAKTLVKLAEHSVGSHEAPNAARVELTNLICDYEMYIERMDLLMETIEQRLTEIPYIDKMLEIKGIGMITVCGFIAEVGDIRRFDNPKQLQKLAGYAIVNNSSGKHNGESHISYRGRKRLRYILYEAAISLVGKNVEFKEIHNYYLTRDNNPLKKMQSIIAVACKVIRIFYAILTKGIDYDGNKMLQDIVRPSVA

SEQ ID NO: 130351 - protein, 339 aa, unidentified
MKKYVLFIGIDISKKWIDVALTPDGQKDQMHHQRFSNKLKGFKKMMRWIMKFIRQQNLAPCFLFCMEHTGVYTFPLCYFLQEQGFDYVLDSALRIKRSLGIKRGKDDKADSMDIARYIYLHHKGLKASVLPTKVLMDLKNLLAYRNRLVKKCQAIKVAASETKAFMPDDSIMKWIMEDSAEIIGLLKSKIKKVESRINELVSQDREIKRIFDLATSVKGIGPINALQMIIHTNCFKAFDTARQFACYIGIAPFHKKSGTSLNIEAKVSPLGHKKLKAILTNGVMSAIQNDKELKAYYERKVAQGKIKYKVLNAVKNKLVSRVFATIKRGTPYVELSNYI

SEQ ID NO: 130352 - protein, 397 aa, unidentified
MYIVGIDIAKRKHEAAVIDGEGAVIIKPFSFTNNCSGYNRLLAMLTKAKLPLDEVSFAMEATGHYWLALFTRLQKEGFRVQVINPVQTNSIRSFYIRQAKTDPRDALLIAEVIRFGHFSESTLHPENIYELRELCRGRHAIVSMQADVKRKVVALLDQVFPEYETAFTNMFGDTSMAILQTCPTPKELSEMPLEELCHLIEVSSHKRFRMVKAQELQELARNSFGFAMAGDVFSTMIRLYAKHLDFLKQQVREMDRKIAEIMETLDTPITTITGIGPTLGAYILSEIGDISRFSSAAKLAAYAGIDPTMRQSGEYNGVRNRMSKRGSPYLRHAIWLAASSAVLHDPALKLYFQKKRDEGKPYMASVGHACRKMVSIIYAVMRDNKAYTPYIPNEISA

SEQ ID NO: 130353 - protein, 401 aa, unidentified
MTAQREKAWVGIDVGKTHHWACVVDADGRKLLSIKVGNDEADVVALIANASSQAKQLDWAVDIIGAPSALLLALLDRASQPVRYASGRVVAAMSAAYAGEGKTDAKDAYVIAETARLRRDLSVIDTGTDLIRNLAVLTGHRADLIADRVRMLNRLRDLMTSVFPSLERAFDYSSHKGALTLLTGYPTPDRIRRIGQTRLTSWLRNRHVRGSAEVAARAAAAAKAQTIMLPGQELTAKILTELATAILALDDRLKALDAQIQTTFAEHPHAAIIQSMPGFGPFLGASLLVGSNDLRAFPSAGHLAAAAGLVPVPNDSGRRTGNLHRPMRYSRSLRHVFYLSAQTSMMRAGPNRDYYLKKRAHGATHTQAVIALARRRIDVLWALIRENRTWTAAPPSPTQAA

SEQ ID NO: 130354 - protein, 408 aa, unidentified
MNAVGIDVSKGKSTVAALRPMGEVALLPQEFLHTEVGLEQMAYAIIALGEDTRVVMEATGRYHEPIAAALHEYGIYVCVLNPLYIKQSGGSSIRKVKSDKADAMKIAKYGLDNWVDLREYTPMDTVRQQLKLCSRQYNLYMKTVVSLQNNLISLTDKAFPSVNELFSSPERADGHQKWVDFVMTFWHCDCICHVSEKAFTERYQKWCKRKGYHFSVEKALDIYASSCGHFTTLPKNENTKLLIVTAAKQLLAGKTTLAALRAEMRRLASQLPEYETVCAMYGVGETTAAQLMAEIGDVRRFPRRSSIVGFAGVDPGVDESGKHSAKSVPTTKRGSPHLRKTLYQIVCTYLRKAPPDEPVYQFLDKKRAEGKPYFVYMTAAQNKFLRIYYARVRECLEAFDAQQSTSQG

SEQ ID NO: 130355 - protein, 401 aa, unidentified
MATQRDRAWVGIDVGKTHHWACVVDAEGKKLLSTKVANDEDAITALIANASSQAIQLVWAVDTIGSPSALLLALLARADETVRYASGRVVAAMSAAYSGEGKTDAKDAYAIAETARLRRDLSVIDTDTDLVCNLAVLTGHRVDLIADRVRMINRLRDLMTSVFPSLERAFDYSSHKGALVLLTGYATPDRIRRTGPARLTDWLRNRHVRGSADVAARAVAAAKAQTVALPGQDISAGIVTELATAILRLDDRLKALDSQIEATFTEHPKAAVIRSMPGFGPFLGAALLVGANDLRGFPSAGHLAAAAGLVPVPNDSGRRTGNLHRPLRYSRSLRHVFYLSAQTSMMRAGPNRDYYLKKRAHGATHSQAVIALARRRIDVLKALLRENRTWSPAPPTMIQAA

SEQ ID NO: 130356 - protein, 373 aa, unidentified
MPKYSTAFGMDVHLRSTTVCALDADTGEAVTRRFPGNPWGEIAGWMDGFPGPSLAAYESGYLGFAPQRELAGLGVECVVAAVSKIPRSAADSASKNDRNDAARMAKAILAHDISPVWIPSPEVEGIRDLAGAYDGATARLATAKQRLLAFLAKRGFVYGGTTPAGNPRKYWTHDFLRWLDKVRPEDDGGVRTLAALRNEVEAAAEARADLLSEYRAAVDASPIAAEVAALQSIKGCAFALAAAFSAEVGDFTRFRSGRQVTAYFGLAPSQRSSGDSVRLGGISGAGNALVRKLAVEGSWCYAAARHQPKLMPRDTGVPLEIRMHGRKGSERLLRRREEMLARGVPAAKANAATAAELVRWLWALGMMCREGAE

SEQ ID NO: 130357 - protein, 343 aa, unidentified
MTHYVGLDVSQKLTAICVVDDSGHRQWRGQCTSDPEPIERTVRRHGGEDARIGIETGPMTPWLVHELRGRGLAVTCLDARHARAALKMQINKTDQNDAEGLAQIMRTGWYRSVHVKSFASHRARALLGARAQLVGMTTRLSNHIRGVLKTFGMLPGAGRGLAFDRRVETLLADRAEVAPIVRPMLAAWRQLRQQTAAFDKAVRVLVKSNPICRHLMGVPGIGVLSVLAYVSMVEDPARFGRSRSVGAHLGLTPKQYQSGEIDRSGRISKCGDILARTLMYEAAVVLMTRVRRALGLKDWAQAIARRSGVGKARVALARKLAVILHSMWRSGEPFRWSEQPAAT

SEQ ID NO: 130358 - protein, 424 aa, unidentified
MQYAVIQVLPDVPAGGVCAGVDWAAADHVACVVDMAGRVADRFSAAHDRAGLGALITRLRRAGVSEVAIERGDGPLVDALLAAGLTVVVITSRQVRNLRSRYGSSGAKDDRFDSFVLADTLRTDRARLRPLVPDTAATAALRAAVRARRNLVAHRVAACNQLRAHLAVAFPAAAGLFYELDSPVSLAFLARFGSQDAVAGVDEQQMAAWLQTIPGRGNTAPASVLCARLRAAAPGATGAEGAAQATVTAALTAALAALAAQIKALETHIAAQLAAHPDGHIFTSLPRAGTLRAARLLAEIGDCRSRFPDPQSLAGLAGVAPVTRRSGKHISIGFRWGVSRQLRDALCDFADGSRHVSPWAASIYAGARARGKDHPHAVRITARAWSYVLWRCWQDSTAYDPAKHNALQRTLDQQAAGSGTRDDR

SEQ ID NO: 130359 - protein, 408 aa, unidentified
MTVVGIDVSKGKSMVAAMKSGGELVAAPYEVRHSDIELSRLALDVLCMEPDTRVVMEATGRYHEPVAALLHSEGIFVSILNPLLIKQSGAGSLRKVKSDPKDALKIAKYGLDNWSTLREYTPMEAIRQQLKLCARQCDLYNKSIVMLTNNLISLSDKTFPGVNELFSSPEKADGHLKWVDFYRTFWHCDCINRMSPDAFGERYKKWCKKKGYHFSADATDALYAASCGLYTTLPRDNNAKLLVTVAADQLIALRENQSKLEAEMLNLCKQLPEYETVMAMYGVGKSTGPHLMAELGDIRRFPHRSSIVAFAGVDPGVVGSGKMQLSSVATSKRGSPQLRKALFQVVSTYVKRKPENEAVYQFYAKKRDEGKPFFVCTTAAANKFLRIYYARVKECLNAAESAVQTEEG

SEQ ID NO: 130360 - protein, 425 aa, unidentified
MTPEPNPEFAAFIGIDWADAKHDICLQAAGSRQREFAVLSHRPDAIDEWAAALRQRFHGQAVAVCLEIARGPLVYALQKHDFFVLFPVNPATLAKYRQAFQPSHAKADPADAQIALEILLCHRDKLKALQPQSVGIRTLERLLEERREFVDEQTRITNRLTSALKEYFPLANAWFDEKASALFCDFLSHWPSLKQLQRARRTTLLTFFREHHCYQPRLIEERLAALQRAAPLTDDAAVIKPKALMVEGLVDQLRVTLKAIARFDAEIESVAPTLPDYALFQALPGAGPNLAPRLLVAFGERRERFASAADVQMFVGVAPVTESSGKQHWVHWRLQCPTFLRQTFVEWAAQTITRSFWAGAYYRQQRAKGCAHQTAVRALAFKWIRILFRCWQLRTPYDESAYLNALQRRGSPLLASLALPSPATH

SEQ ID NO: 130361 - protein, 408 aa, unidentified
MNHVVERVAGLDVHKKTVTACVRVPHGPGGRRQEIRTFDTTAAGLLALRDWLVSHGVTDVAMESTGVYWKPVYYVLEDAFRCVVVNAAHIKQVPGRKTDATDCAWIAELLEHGLLRGSFVPPPPLRELRDLTRYRQTLLEDRTRQINRVHKVLHDAGIKLASVASDIMGKSGRAMLQALVTGTTDPAQLAGFAVGQLRKKRAALQDALAGRFRAHHALLLSHLLAHIDYLDETVGALSVQIDELMRPFAEAASRLDAIPGINQRTIERVVAEIGADMSVFPSVGHLASWTGLCPGNDESAGKRRSGRTRHGNRFLRAALTEAAWAATRTKGSPFGARYRRLRHRGHKKAILAVAHALLRVIYYMLLRGTAYHDIGAEYYDRRYAERVTHRAVRALQRQGYRVVLEAAA

SEQ ID NO: 130362 - protein, 337 aa, unidentified
MIVMGLDQHRGQVTAEWIETDTGEVSRARVAPAHREPVRRFLGRFRGAELEVALEATTGWRFVVEELRAIGAGVHLAEPAETAARRGNKKRAKSDRADARHLRELLMIARLPESWIPPDHILDLRARVRLRHTLSDQRGEWQQRIQAVLYHHGCPQRRDLMTREGRAWLQAQALPETAREQVTVAIAMVDALEVQLAPITKELRAYARRQVGCRALMAHYGIGELTAVTILAELGDCRRFSCSRHAVRYSGLDITVHQSDQRRAPGHLSRQGPPALRWALFEAAQVARRTGSPDREYYTQAAERLGPNRACLSIARKLLKRSYHTLSELGEEALAPA

SEQ ID NO: 130363 - protein, 423 aa, unidentified
MKLTYPICCGVDVHKTFLVATIITSEYVMPHYRQKRFSTFYSGLVAFKKWLLENNCKDVCMESTGKYWVPVWNVLEDSVHVVIANPKWVSAVKGNKDDKKDSKWIGDLFRMGLVPSSYIPSKDIRILREFTRYRSKLVSMRSSEKNRFQNAFTVCNLTLDAVVSDMFGKSATDIENYLLDTDIVDPAQCVSLLRGSLKKNSSDVVEAVSGFNMTPEQKERVRIVQGHFADIDRRIAQLDGVIGNLVAVYEGQISLLCTIPGVDRRIAITILSEIGTDMTKFGSSKRLCNWAGLTPASNQSAGKKKSVRISRAGVYLKPALVEAAHAAVKATEKHPYYRIKFERLMKRRGKKRAIIAIARMILTAIYAMLSTGEVFNPCDLDKFDMPEELKKKRTLASAKEAVRLLVSLGVVPAGSISLDALAG

SEQ ID NO: 130364 - protein, 458 aa, unidentified
MSRNKSTDRVRRTMAVVHPNAAAIDVGATMHMAAVNADRTTEPVRSFGTFTTDLHRLVDWFAECGVDTVVMESTSVYWIPIFELLDARGFAVFLVNARDAKHVPGRKTDVSDAQWLQRLHSFGLLRASFRPKGQIAELRAYLRQRERLLEYGASHIQHMQKALTEMNVQLHHVVTDITGATGLRIIRAILGGERNPAVLARMRDRRCHATVETIEKALAGNYRAEHLFALEQALALYDTYQQKASACDARIEAVLKELSARRGRKAGPLPSPRQNRSRQQNSLLFDVRTALFALLGKDLTQINGLGPYLALKLIAECGDDLSAWPSAKHFTSWLCLAPSNKISGGKVLSSRTRRSGSRAASLLRLAAVTVGRTDTALGAFYRRLSARIGKAKAVTATARKIAVLFYNALRHGMDYVDPGASSYEIRYRARVIDNLHRRAKAFGFMLQPMAPTPEMAVS

SEQ ID NO: 130365 - protein, 450 aa, unidentified
MSQPTSATSATSANVIPSTASAANDGAFAQLTHFGGFDWAQSEHQFVLVDARGQIVLSLRFANDAEGWVLFRQKVAALVPAAFVDGHLGVAIETSCGPAVERLLDMSLKVYPMNPKAAERYRDRKAPAGAKSDELDAWSFADALRTDGHAWRALLAQDPLTAELRLLCRDEIKLIEQRTALINQLRAALCEYYQAALDAFDNWTVEGPWRFVIAFPDPQALAKAGKRKWEKFLHAHKLYRPQTADERLKIFAGAMTFANPNAAVTRAKSLLAVTIARQLCLLESQLDEYRKRIVGLFGDHPDHDCFGSLPGAGPKIAPRLLSELGANREVFQTAESLQNYAGTSPVTKQSGRSRIVILRRACNKTLRATVHLWADLSRRACVWAEAYYQKKKADGMNHTAALRCLGQRWVKILWKMWQTGTPYNEALHLKNQTRHGSWLIQLLPATPAKT

SEQ ID NO: 130366 - protein, 426 aa, unidentified
MKEHIDYLSTLFVGIDIASRIHVISALDFNQDFYIKMKPFENTKGGAGIVEKLIADVLADNHQFKYVVIGMESTGFYGVHLANYLSTSELLAPFSVRVYCLNPKEVKNYKKSFNDIGKNDGIDSFVIADFARVGRIAIKPWRGSQYLALQRLTRHRMHITECITREKTYMLNNIYLKFSQYALLRNGEHPFSNKYGATAEAILTEFTTNEDIVNSSIEELVEFINSKSKERIADPEETAKIVQAAARNSYRLDKCLYEPLTISIASSFNCISSFEKELKAIDKAILQTVQGLNPEEYTVLNSILGIGKVYSAGILAEIGSIKAFQNANQLAKYCGIVWNDNDSGDFESEDSRMSKAGNRYLRYYIIEATGSVINHCPEYKAFYQKKYAETRNHQHKRALALTSRKFIRLLFGLLDKGQLYSPEKSR

SEQ ID NO: 130367 - protein, 372 aa, unidentified
MNNTTIFVGMDVHKESFSLCAYQIETEKASHFRRTPADYKEVLKYLEFLRTIYGRDTIFVCGYEAGCLGYTLYHQLTEHNVDCVILAPTTMLEKRSGQRVKTDKRDAELIAKCLAQHNYSPVHVPTATDEETKEFLRMRDDHKLALKKIKQQILSFCLRHNYRYEGKSNWTAAHIKWLKNLNPESLYKEILDEYLLTYATLSDKLERLDKRIEELASRDEYKESVKKLCCFIGVRTHTALSVLVEVGDFKRFPSAEKFAGYLGLVPGEDSSGDNTTRLGITKAGNRHVRVLLTEAAQCYTRGNIGHKSKALKARQSGNTPMVIAYADKANERLRRRFYKMVLGKSKKHNVAKTAIARELACFMWGMMTDNIA

SEQ ID NO: 130368 - protein, 450 aa, unidentified
MSSPQEIEDEEHEQVIERVAAIDVAKASGMVCVRVPHETRPGRRVSRVWEVPAITRAVTELGDYLAGQGIEKVTVESTSDYWRIWYYLLEAAGLDIQLVSARQARNLPGRPKTDKLDSVWQAKCTERGMLRPSFVPPAEIRELRDYTRLRSDLTQERTRHWARLEKLLEDALIKVTAVASTIDTLSVRAMIEALIAGERSPRVLADLAIGKMRAKRAALIEALTGRFDQHHAELARMLLDQIDALAAHIGTLDGRIEELIAAIPAARGVDADGTTGPGAGLGPDAALRPAIDRLDEIPGIARHTAQVVLAEIGFDMTRFPTAGHLASWAKLSPRTIQSGPGSRSGKTGKGNPYLKGVLGQAAAAAAKTGTFLGERYRRLVKRIGKLKALVAVARSILVIIWHLLSDPAARYGDLGAGYHDSRTDTGRKTRSHIRQLEALGFTVTLTPAAA

SEQ ID NO: 130369 - protein, 455 aa, unidentified
MTRTTTCDRPELKPVNVGAAAIDIGSTMHMAAVDPACADTPVRAFGTFTQDLHELADWFKVCGVTSVAMESTGVYWIPAYEILEQHGFEVILVNARYAKNVPGRKTDVSDAAWLCQLHSYGLLRGSFRPDAEIATLRAYLRQRERLVEYAAAHIQHMQKALMEMNLQLHHVVSDITGATGMRIIRAIVAGERNPDVLATYRDVRCHASIETIRAALVGNDRDEHVFALTQSLELYDTYQAKMLDCDRKLESLITALTNKGAKPAGKLLGPRVKTKQVNTPSFDVRAALYGVLGVDLTEIHGLGPSLALKLIGECGTDLRAWPSAKHFTSWLCLAPGNKISGGKVLSSRTRRSSSRAAALLRLAATSIGRSDTALGAFYRRLSSRVGKAKAVTATARKIAVHFYNTLRHGMTYRDPGADHYEEQYRSRVLANLKRRAKSLGFVLQAVPCDAEVAVS

SEQ ID NO: 130370 - protein, 318 aa, unidentified
MSTASFVGLDVAKAQLDVAVRPSGEHWSATNDEAGIAQLVARLRALRPTLIVAEATGGFEHAAIVALAALGLPVVVANPRQVRDFARATGQLAKTDQLDAGILALFAERVRPAPRPLPDAAAQLLDALLTRRRQLLEMLVAKQNRLGFAAKPLHRSIRQHIHWLERQLDDVTTELAHQIEQSPVWRAKDDLLQSVPGIGPIVSATLLGELPELGTLSHKQIAALVGVAPLARDSGTLRGKRMVWGGRGSVRTALYLAALCGRRWNPQLRVFYERLRAAGKPTKVALVACARKLLTILNAMVRSNTRWAVPAPSAQHSC

SEQ ID NO: 130371 - protein, 449 aa, unidentified
MAKNKRTSKGMPVIHPSAAGIDIGSRFHVAAVPPDLLKQPVKTFQAFTSDLHAMADWLIQAGITTVAMESTGVYWVPVYEILEDRGLEVILANARDARGVPGRKTDVNDSQWLQKLHACGLLKASFRPDRQISALRSYLRQRERHLDYCAAHIQHMQKSLTFMNLQLHHVITDITGVTGMKIIRSIVQGQQNPLILAKHRDGRCKATEKTIAASLTGNYQPEHLFALEQALLLYDFYQLRVHDCDEHINAALKTLNQSTSVPDTPLPKPRHKTRQPNALNFDVRAPLYQLVGSDLTQIHGIGPYLALRLVSECGTDLSRWPSAKHFTSWLTLSPGSKVSGGKVLSSHSRKTNNRITAHLRLAATTVGRTNTALGAFYRRLSARIGKAKAVTATARKMAVLFYNAMRYGMSYQDPGSDHYERQYRKRVVKGLHRRAAEFGFTLNEIECVS

SEQ ID NO: 130372 - protein, 350 aa, unidentified
MKDTMIGVDLAKSIFQVHGALMSGKEQFRKRLTRPQFWKFMSGHSPAVVVMEACGSAHFWAREMIKLGHEVKLIAPQYVKPFVKRQKNDAADAEAIVIAAQRPEMRFVEPKTEGQQARAVLFRGRERLVRQRTELVNALRAVLYEFGHTAPIGIRQLKRIEAIVEEPNSDLPTLVHEECHDLIEQIAEKTVRIDAKTKRAVKLAAQTDTARRLQTMPGVGPLTALAIEAFAPEMESFGCGRDFAAWLGLVPRQHSSGGKERLGRVSKAGQADIRRLLIIGAMSRLNWMGRQSILEGSWLARLSARKPKMLVAIALANKMARGIWAMLTKNENYRDPAQAVAALSTCAATT

SEQ ID NO: 130373 - protein, 350 aa, unidentified
MNKFYKSKTDGSVFKNMFVGMDVHKSYLQVAVLDERGKVLNNSRVDNNLIKVNEFFDTLHPGNNTKVVMESSGMWYNIYKILREKNLDVRLSNPTKTRAIASAKIKTDKLDAVKLADLLRGGYIAECYIPTRETMDLRELVRHRAALVRMRTKLKNKIHSIIAMNGTSISYAGTTFTKGHIEKLKELNDYRINGYLRIIEPLNDEINAVSKKILLLAQEDEMAKLLMTVPGIGYYSALLIVSEVGDINRFPDSYHLCSYAGLIPSTHSSGGITYHGSITKTGSKYLRWIMLECLHAHIRNDKNSNITQFYHRISKKKGNSKAAVAAASKLLKIVYWVMKENRTYYNNKSK

SEQ ID NO: 130374 - protein, 315 aa, unidentified
MTKILSQAAGIDISKATLDVAFSAIALFKQFHNTPKGCSELVAFIKAQGADRVCFEATGAYHRDLEYALSRSGMSFVKANPRRVRRFADVIGVSAKTDKVDAKVLAKFISLIAPNQTLVKSETLLSLSELLGAKEALIKDRTAILNRSKIQRLPLLQRHNAARLKQIEGQLAAIDIQAKALVDADALLKKRFDILQSIPAIGAATALVLLAEMPELGTLDQRQVASLAGLAPLARESGKWAGKRFIQGGRAKIRRTLFMPILVAIRYNPNLKEKYQALIKAGKPPKIALVAVMRKLLILANALIRDDRMWSEIRT

SEQ ID NO: 130375 - protein, 359 aa, unidentified
MQDGQQDGARVVGGVDTHKDLHVASVVDEHDRVLGNQCFATTRQGYRQMLQWMRSFGTLERVEVESTGTYGAGLLRHLQAAGVKVLEVTAPDKQDRRRRGKDDDIDAQNAAHAAFAGRRTVAPKTRDGMIESLRVLKACRKTAVAARRVALQLIHNTIVCAPDELRDVLRKLTRMQLIRTLAGWRPDLSDYRNVSSAYRIALKSLARRYLELHDEIADLDSMIGAIVEELAPELVARNSIGHESAAQLLLTAGDNVDRIGSEASFAALCGVSPVPASSGQVTRHRLNRGGDRAANSALHIIAIGRLRTDPRTKDYVARRIAEGHSKLEAIRCLKRYIAREVYTLLQRRNLEINRTRISA

SEQ ID NO: 130376 - protein, 466 aa, unidentified
MPRHSPPRPVKPRPSRAVLEHLNPNAAGIDCGAAEHYAAVPPDRDATAVRSFRTFTGELHALADWLAGCGVTHVAMEATGVYWIPVLEILEARGFVVSLVNARHVKNVPGRKSDVSDCEWLRDLHTMGLLRGSFRPADAVVALRAYLRHRAGLVECAGEQVQRMQKALVQMNVQLPLVVSDITGATGQRILRDIVAGARDPRQLARHRDYRCHASEAEIVAALTGNYRPEHVFVLQQHLALFDMYQTQLAACDAAIAAHLATLVAHAPPREQPLPAPRARPKARENEPRVALREPLYELTGVDLSQIEGIGPYTALRLIAEIGTDMTRWPSAAHFTSWLTLAPRNKISGGRLLSSGTQPSANRAAALLRLAAMSVGRTQSALGAFYRRLAYRVGKAKAITATARKLAIVVYRVLKGELVYDDPGAAAYEAQQRTQALRRLRHRAAHLGFGLLDLSTGEVIATNAVS

SEQ ID NO: 130377 - protein, 339 aa, unidentified
MKVSTLGIDLAKNIFVIHGVDHNGKTTIRKKLKRPDFVAFIVNMEPCLIGMEACSSSHHYARVFSKAGHQVKLIPPQYVKPYVKTNKTDAADAEAICEAVTRPNMRFVQIKTADQQAVLSLHTERFFIIRERTGCANSLRAVLAEFGLVMPVGFHALYEAVPDILEDGGNGLPPYVRSSVQRQLMHLKALEEQIALIEQELRSWAKTQPACKRVEKVPGVGLMTSTYLVASVGNGQQFITAKQFCSWLGLTPREHSSGGKQRLGGIRKRGDCYFRYLLVNGARAVASTIKQNADKMPWLDRLLKTKHFNVAVVAQASRTARILWSMLVHETEYRAPSVF

SEQ ID NO: 130378 - protein, 317 aa, unidentified
MQTPLNIGVDVAKDAVVVACANRSFATQTVPNQRTALLAWLHTVPTGSRIGLEATGGYHEQLADLAQASGLTVFVLNPRDTRHYARAIGRRAKTDRVDAALIARLIAHEHMHLRPYVPPTPAQRQTDRLLKRRAKLTTVKTTLTLTLRGVPGFGADLKDLLARLDAVITNIDQTLVNLMAQSPRRQETLRRLQTIVGVGPLVGMSLANTLGRIPFRCADAFVAYVGYDPKPKDSGQKCGRRRLSKRGPAELRRLLFNAAMSAAKTTTWKPLYDAYRQRGLATTAALVIIARKIARTAWSIHHHGTVFVPERLNRCLT

SEQ ID NO: 130379 - protein, 415 aa, unidentified
MALKIVYKICCGIDVHKTFVVACIASTDKHGVTSYERHRFSTYTKGLKNLLQWLLEHNCKDVCMESTGKYWIPVYNILEKDCSIVLAHPKYVKAIRGKKTDKKDAKWIADLFKHDLVAGSFMPPADIRQLRDLMRYRFKLTCFKSSEKNRLQNCLTVSNIQLGNVVSDTFGKSAQAILDKLLENPADTSFDLEPLVYKSLKKKLPELRDAIDGYITPEQAGKLKVIKAHYENLESRKAELEELILALAAPYQQELAILQTAPGISSDFTAIGIISEIGTNMEAFPSAKHLCSWAGLAPTNNESAGKKKSVRVSKAGCYIKPLLVQCANAVVKSNKHPEIRNRYLRIKKRRGHKKAIIAIARMLLTALYYMLKNGENYNAELYRKSDLPPVDREITVEQALMIARNQGYKIKSATA

SEQ ID NO: 130380 - protein, 346 aa, unidentified
MIIVGCDFHPSWQQVAVLDAETGEVTERKLVNGDGEAERFYRQLPVPSLIGLEACGNSQWLIESLQHLGHEVWIGDAAQIRASYVRKQKTDRRDAAHILKLLVEGRFPRLWMPSAEQRDLRQLLVHRHKLVEIRTRVKNGLQHLALNRGMQKKSKLWTQSGQKALRELPLDSWAACRREDLLGLLASLDKQIERLDVAVKQAADQHPQARLLMTQPGVGPITGLAFVLTLGDVSRFKRGKQVASYLGLIPREHSSGGKQRLGAINKQGNTFMRTLLVESAQTVTRLDEGFRKQYLHRCHRMAKGVAKVAAARRLAVRLFWMLRTNTGYPEIVRIESSPAMAVVGES

SEQ ID NO: 130381 - protein, 403 aa, unidentified
MTVRPVVWVGIDVGKTSHHACAVDETGKVLWNQKVSNEQRAIEQLITRAHKGADEARWAIDLTSPMALMLITVLLGAEQSVVYVPGHVVNTMTGAFRGEGKTDAKDARVIAETARMRSDLSEVAMPDELVVELAQLTGYRTDVMADWVRGVNRLRSLLGSIFPGLEAAFDYSNRTPLILVAHLCTPAEIRAAGIKGVTAYLGDNGGWPTAIAKTAATAVAAAKQQPLALPGEAGTAALVKRLAGKLLDLDHEIKDIDKTITERFRDHPFAHIIESLPGFGPGLGAEFVVVTGGDLASFATAGRLASYAGLVPVPRDSGRISGNLHRPKRYNRRLRRVFYMAALSSIRGDGPSRQFYDRKRGERLIHSQALLALARRLVDVLWALLRDGREFTPHKPTPATAAA

SEQ ID NO: 130382 - protein, 349 aa, unidentified
MPKSNTAVVTIGIDPGKNTLHLVGLDARGAIVLRERVARARIVSRLANVPPCLIGIEVGMGTHYVTRELLALGHDVRQVPPVYAKPFRQTHKNDFRDSHAIAEAVQRPTTRCVPPKTDEQLDLQALHRVRYRLVGQRTAIINQIRCFLLEHGIAVRQRLHWLRQALPDILAQRADVLSPRMVRILEDLAQDWRRLDDRIQAVSGEIEALSKTTEPCRHLMTIPGIGPIISSAVVAAIGDGTAFTRGRDFAAWLGLVPKQISTGDRTILGRITKRGNRYLRMLFMQAARVVLLRPRNWMKHSYGPWLAAAAQRLHHNVLATALANKLARIAWSVLAQHRVYEARLSLAAV

SEQ ID NO: 130383 - protein, 355 aa, unidentified
MNSEKYIGLDVHQATISVAVLDSTGKLVMESILETKAATILEFLAGLRGTLSVTFEQGTWAAWLYDLLKPHVAKLVVCNPRKNALLKDGNKSDRIDAHKLAELLYLNKLSSVYHGETGVRMLRELARSYLTMVKDLTRVMCRLKSVYRSWAIPCAGRDVYYTRHRTEWLGKIKEAGVRRRAERLYQQLDMLQYLRQQARRELLAESRKHAITVKLRQIPSLGPIRSALAVALIQTPHRFRTKRQLWAYSGLALETRTSAEYCYVKGGLRRSKKQISIRGLNKDHNRDLKGLFKGAATRASLLPGPFQDFYQRSLAKGIKPTMARLTLARKIAAITLTLWKKGENFDADKLKSQAA

SEQ ID NO: 130384 - protein, 320 aa, unidentified
MHAAGKRTYLRQWPMRELKLFAAQLRKEDELAVEATGNTRLFHDAVVKHVARVAVVNPSQFKVISQSVKKTDKNDAELLALYLAKDLLPEVRMKEPNQRNMTHLAQTRDLLVKQRSALKAKINNLLSAEGTNLKKEALSSNKALDRVLALPLSPIVAAEARVLVGQIRSLTGSIAELEELIEEEGPRLAGHENLMSIKGIGPVSAAVLLSAIGRIEDFDDPGKLAAYFGLVPRVQNSNETEHSGRITKQGNKLARTALVQCALIAKRYSPFLQQFYLRIQRRRGGGKANIALARKFLGVIYHTLKNNWVFEDFPNFVLAS

SEQ ID NO: 130385 - protein, 523 aa, unidentified
MATTRSHKRSRSRSQQVLHKPRGVIHPRVQKVGPEHFGIVSVDCAKARSKWMLADFYGKVFVPPTIVEHDRLGLSAAVAQVRQALRKHGVRDLLVAVERTGRYHRPVQRAFAAAGFEVRIVHPFATKQFRQPSDPGYKTDDADLAAIHRAAVNGFALIETALDETARTLQLLIRHRRDLVFKTSLVCCQIREHLEAAFPGYAACFDKLWDSACAWHLVQHLASPQEIAAGGLAGLCHSLDEANVRYHRPTVQRVLDWATAAAAPDLAAAQHRLIALALNDDRTRKTQEILGLERHIAARLVRTPYILLLSFPGINVVSAADYAGEMGPIEDYANHRCITGRAGLRPCRYQSDQVDHANGPLVHNCNRKLRAAILGIADNLVCCNHHFNVLAHHWKIAGRDPRDIRIRVANRFCRISFHMVAGRQVFRHPGLQGRHYILDKLIAFQRDHETSAADMLRDLEAAIAQVPRKEYQAEAAPLHEELQKIDAGRRRGPQLLATILPIVLARLGVGAVQSTASGEQYPH

SEQ ID NO: 130386 - protein, 342 aa, unidentified
MKITTVGIDLAKNVIQVHGINEQGKKVFNKPLQRKHVLTHFAQLPPCLIGMEACSSAHFWARKLQSQGHTVKLMAPQFVKPYVKTNKNDAADAEAICEAVTRPTMRFVPIKNGEQQAVLSLHRARQGFVKARTAQANQIRGLLMEYGITIPQGISHITKRLPELLEDGENELPGVFRQLLQRLGDHLKALDRQATELEEQIQTWHRESEASKTLARIPGIGPLTASALVASIGDASSFKNGRQLAAWLGLVPRQHSSGGKPRLQGISKRGDTYLRTLLIHGARSVIRVATGKTTPMHCWAVNLVERRNKNVAAVALANKNARIVWALMTQNREYQSDFVQTV

SEQ ID NO: 130387 - protein, 355 aa, unidentified
MTVTIVGEARPVTCRTAITGGVDTHADTHVAAALDPVGGLLGVREFPATAAGYAGLLGWLAGFGTVCLVGIEGTGSYGAGLARYVTAAGIRVVEVDRSDRQDRRRQGKSDPLDAVSAARAAQSGRASGAPKGRDGAVEAIRTLMVARRSAAGERTRTINQARALVLTGPDDLRARFAKHKPAALVTGLAALRPRPGDVAGHATRIALRELGRRAQFLDGQLVRLDELIIPLVTARAPGLLAIYGAGPRTAALLLIAAGDHPERLRSEAAWAHLCGAAPIPASSGKVTRHRLNPGGDRQANHALWRIVFTRLGSDPATRAYAERRTAEGKSKAEIIRCLKRYVAREACRHLRPADG

SEQ ID NO: 130388 - protein, 344 aa, unidentified
MEITTIGLDLAKSVFQVHGVDASGQVVVRRSLRRAQMLPFFARLPSCLVGMEACGTSHHWARELIKLGHQVRLMPPAYVKPYVKRGKTDAADAEAICEAVARPTMRFVPVKSPEQQAALSMHRTRDLLVKQRTQLVNMIRGLLAEFGIDIPKGLERALLMARRIVDGEAPDVPMEAAKIVSTLSQQALDIHIRLREIDRDLLVWQRGNDVARRLLTIPGIGPVGATALAASITDAHQFRSGRQFAAWLGLTPLQKSSGGKERLGRISKMGDKYLRKLLIVGMTSLVRGAKYNPKTVDPRLADLLARKPVRVATVAMANKTARIVWAVMTRGETYRAGHRPALAT

SEQ ID NO: 130389 - protein, 400 aa, unidentified
MNDNDDIGVFLGLDVGKTNHHGHGLTPAGKKVFDKQLPNTEPKLREVFEKLKAKFGTVLVIVDQPASIGALPLTVARDAGCKVAYLPGLSMRRIADLYPGEAKTDARDAAVIADAARTLPHTLRSLETTDEITAELTVLVGFDQDLAAEATRTSNRIRGLLTQFHPSLERVLGPRLDHTAVTWLLESYGSPAALRKAGRRKLVEVIRPKAPRMAQRLIDDVFDALDEQTVVVPGTGTLDIVIPPLARSLGSVHEQRRATEAQITLLLEDHPLSKVLTSLPGVGVRTAATLLVTVGDGTSFPTAAHLASYAGLAPTTKSSGTSIHGEHAPRGGNRQLKRAMFLSAFAALHDPASRTYYDKCRARGKTHTQALLRLARQRINVLFAMLRDGTFYEPRTPRLA

SEQ ID NO: 130390 - protein, 369 aa, unidentified
MGDVIDIFVGIDVAKVRNAIAIADGERGGEVRFLGEVDASEEGMRRVVKRIAAKHSRVQFCYEAGPTGYGLHRLITSLGHSCIVVAPSLVPRRPGDQVKTNRRDAISLAKLLRAGELTAVWVPDEGHEAMRDLVRGRAAAVETLRVHRQQVSAFMLKHGRIFPRKKGWTMRYLRWLQEQQFDHPAHQIVLQEMVEAVRLSKERVDRLEQTIEEFVTNWSLAPMVRALQALRGIDLIVAVTFVTEIGDVRRFESPRQLMGYLGLVPSERSTGATVRRGGITKAGNGRVRHMLVESAWTYRHPPRIGTKKLYLLQQVTPRVRDIAWKAQTRLTGRYRALSGRGKKTTVVCTAIARELVGFMWSVAREAQSD

SEQ ID NO: 130391 - protein, 403 aa, unidentified
MNNVAGIDVSKGKSMVSVLRPFGEVVAKPFSIGHTGSELKELADYLKSLDGETRVVMEHTGRYYEPVARFLHEEGVFVSAVNPKLIKDYGNNTLRKVKTDKADARKIARYGLDNWAELRQHTPMDTIRMQLKTLNRQQSLYTKTKTMMKNNLIALLDQTYPGVNALFDSPVREDGSQKWVDFATAFWHVDCVRSMSLTAFAERYRKWCKRHGYNFSQSKAVEVHAGAQDLIVMLPKDALTKTMVRQAIDALNAVSASLERLKAEMQALAAQLPEYPVVMAMHGVGDSLGPQLMAELGDVARFTHRNAITAFAGVDPGADQSGTHEAKSTRVSKSGPPELRRALFLVMDCLLKTQPQDDPVYRFMDKKRAEGKPYLVYMTAGANKFLRIYYGRVKEYLASLEEN

SEQ ID NO: 130392 - protein, 337 aa, unidentified
MEQITTIGLDLAKRVFQVHGVDAAGKVVLRRQLTRRQVVPFFAKLARCLIGMEACGTAHHWGRTLQALGHDARLIPPAYAKAYVRRNKTDPADAEAICEAVSRPWMRFVPIKSEAEQAMASVHRVRERLIGQRTMVQNMLRGQMAEFGIVVSKGAWHVKKLLAELGDPSRLPEPLGQALRGLGQLLAELDRQIAALDNQILTWHKASPRSCDLATIPGFGPILSSAMTVRVARPERFASGRDLAAWIGLVPKQASSGDTLRLGRISKQGDVYLRRLLVNGAQSVLNSKRAKTDPWIRRLLASKPRLVVAVALANKMARIAWAVMVRQTGFRPVPATA

SEQ ID NO: 130393 - protein, 275 aa, unidentified
MSITMIGLDTAKSAFQIHAVNATGKTEVKRKLSRNDLLPFFQKQELCTVVLEACGAAHYWARVLLGLGHDVKLIAPEAVKPFVKKGKKNDAADAAALCAAASRPDMKFVPAKSLEQQGILALHSARSLLVKQQTMLANAMRGLATEFGLTVPKGIGKLAELAVLVGADEAFPVKARQAFTGLFDQCKALTESIMTFEAEIVAHARHDETARRLATIPGIGPITASLIAATVGDISLFASARHFAAWLGLVPRQHSTGGKTRLGRITKTGNRELRK

SEQ ID NO: 130394 - protein, 312 aa, unidentified
MTIICGVDVSKAKLDACIEPGGIFASFDNDAAGIAELAAFCRQHAASLVVMEASGGYERRPFLELCQLGVSCALTNPRSVRRYAEAMGFLEKTDRIDASVIARFAMAKNLSPTPLPSPAQQRLKALVTRLRQLTDDLTVQKQRRTNLLDNPEMLASIDEVIALLKRQSRSLEGEIASMIDDDPLWALLAEAWRSIKGVAGRTVGRLHAELPEIGTRSNRAIAKLVGLAPLADDSGKRKGKRSIRGGRAGVRSILFLVAGIAARYDQSLAAFKARLIAAGKEKMVIRIALARKLLVRLNAKARDARAAYANAT

SEQ ID NO: 130395 - protein, 465 aa, unidentified
MAKKNNKSAAKSAKKRKTAKLKPADGTQGMEVIHSHAAGIDVGNEEHYVAVPPGLDENSVRTFGCFTEDLKAMAGWLSKIGVTTVALQSTGVYWIPLYDVLTERGIHVFVVNARDTRNVPGRKTDVLECQWIQKLHAHGLLQSSFRPGQEVCNMRTLWRQRQQHVADAARCTQRMQKALTQMNVQLHNVISDITGVSGMTILEAILQGERNPERLAELCQPEIKASRATVTKSLEGNWREEHLFVLRQEVQTYQHFQRMIEDCDAQLHQHFRSMEPKADPQALPKVERHKRPRGNAVESFDLRKELFRVVGVDLTRIDGINIMTAQTVLSEIGYDVSAWQTEGQFVSWLNLAPRDKISGGRVIGRDGRKVINRAGQALRLAANSLRQSDSYLGAQYRRLRGRLETSRANKAMGAKLARVIYRMLKYGQEYVDKGAEYYERNRKEQQFRNLTKQAAKLGYTITKAA

SEQ ID NO: 130396 - protein, 321 aa, unidentified
MPTAPVTVYAGVDVAKASLQLHLQGRQAEFPNQPAGLVQLCRQLQAIPHVHVVCEATGGYERSLVQAMHQAQIPVSVTNPAQVRAAAQAQGQRAKTDRIDAALLTDYGQRYQPKPTPPTTSSQDQLVALTQWLTQLVQAQALAKTQAEHHQAAFVCGRHAKLMAHFRSQIAAVEKQIRALLAKDAQLQQRVDCLDEIKGVGHRTAWLVLAHMPELGQLNRQEVAALAGLAPWTRESGTMKGMRCIGGGRPEVRLALYMAALCAARCNPVLQPFYQRLRAKEKPAKVALTAVMRRLLVYMNYQIKALQAEQPAMQIDHAKIP

SEQ ID NO: 130397 - protein, 403 aa, unidentified
MNSVGIDISKGRSTIAVMRPFGEVVISPFEVRHTDSELSELARQLKSLDGETRVVMEATGNYHAPVAKLLHDAGLYVSVVNAKLVHGYGNNDLRRVKTDRKDAVKLANYGLDRWLTLPRYIPEEDTRLLLKNCYRQYRQYSKVQTILKNNLISLLDTVFPNVNRLFSSPARADGSEKWVDFVAEFWHCRCVSEKSEKVFTNKYQRWCRKHGYNFSEEKAHTIYVEASGHIGVMPKSETTKLLVEQAVAQLRATSAALAALKHEMQSLASMLPEYPVVMDMFGVGPTLGPQLIAEIGDVRRFYSKKALVAYAGLDAPPNDSGDVTGRHKSMSKVGASSLRRTLFLVMGVYLQKSPLDEPVYLFMDRKRAEGKPYRVYMMASANKFLRIYYATVKAYLESLELTA

SEQ ID NO: 130398 - protein, 420 aa, unidentified
MSFKIFRKNCCGLDVHKTWIYACIGITDTNGRTDYKQTRFSSFSKGLKELSDWLAKYHCTEVCMESTGKYWIPVFNVLEKAYVSVILSHPKYTKPQKGNKTDRKDAKWICDLFMCDMVKPSFIPPADIRHLRDLVRYRFKLICMITGEKNRAQNCLTVSNLKLDDVFSDVFGKSSRSITEYILEHPGDLFDVTPFVDRRCKTPIEEIQAAVDGAISPEQAVKLRQCLNHIDELEKHLEEIEQEILRLSDKYQAALDLIRTVPGFDKNPMTAIQVLSEIGGDMSVFPSAKHLVSWAGCCPRNDQSNKKIKSTRISRAGSYFKPVLVQVANGLLRSKKHPEITDRYKRIKARSGHKKAIIAICRMLLTAIWHILSDLKPYTAEGFRESRPVNESKVLTTSQALNLLKQRGYIIKDDLTPAMN

SEQ ID NO: 130399 - protein, 300 aa, unidentified
MIGMDIHRTFAEVVVWEDGRLRHHGRVDMTRSGLEGFGRSLRRTDEIVVEATGNAMAVVRVLSPYVGRVIVANPMQVKAIAHASIKTDKIDAGVLAQLHASGFLPEVWVPDERTERLRRLVARCNQVVRHRTRVKNEVHGILQAHLVPKCPHADVFNRRGRAWLEQQVLPDDERTAIARHIREIDRLAEDLADLDRDIAREAVDDVQVRRLQTITGVNAIVASGIIAAVGDIRRFREPQRLVSYFGPNPRVRQSGLGLEQYGRISKHGRSHARHAGRGRLGGGEGARTTQGLLPTHPQQA

SEQ ID NO: 130400 - protein, 328 aa, unidentified
MTKQKFYVGLDVGQSEVVMAISGQKPRSFAFTKPGIKSLIQKAQAAAADNILHFCMEATGAYSEALAVQLVMVPEVVISIVNPAQIAAYAKAQLRRTKTDQVDAQVILSFAQSQHPHPWESTAKPLRQLRQLVAQRDTLKDMLQQWRNRRHAQQYVPDLPAEVKKSQVRMEKKLETEIATIDRAIDALCQQEPEIQDPIQLLCSICGVGMVSATHVLAYGHSWLTDRTTRQLTAHAGLAPRHKQSGTSIHGKSHIAKQGNSRLRKALYMPTLVAVHYNPVFIAKYRSLLAAGKPKKVALVACMRKLLIIMHAILTTQKPFNPNLNRLT

SEQ ID NO: 130401 - protein, 320 aa, unidentified
MRNTVGLDISKLTFDASAMVGKTEHSAKFDNDSKGLDQFSDRLKSLGCQNLHICMEATGNYYEEVADYFAQYYSVYVVNPLKISKYAESRFKRTKTDKQDAKLIAQYCRSAQESELVKRQKPTDEQYRLLRMTAAYAQIKSECAAMKNRHHAAKDEEAAKAYAEIIKAMNEQLEVLKEKIKEQTEKPNCKEGVKRLETIPAIGRMTAAVLFHHLTSSKFETSNKFAAFAGLSPQQKESGTSVRGKGKLTKFGNRKLRAVLFMLTMVAYRIRAFPDFIKRLEEKKKPKKVIIAALMRKLAVIAYHVHKKGGDYDPSRYKSA

SEQ ID NO: 130402 - protein, 338 aa, unidentified
MSIVRIGIDLSKNTFHVHAVDNEERVVVQRMMSRAQLRHFLAMTPPCEVATESCGSAFHWARYAKQCGHLTKIIASQFVKPYVKSNKNDFNDAAAICEAASRPSMRFVPTKSIEQQDIQALHRVRTRRVAERTALGNQIRGLLLEYGVPIGLSLVPLRQRLPVVLEDEQNELTPRSRALFRELYAELLDLEGKIAYVERKINQIFKASEQCQRLAQIQGVGPLTSTALVAAVGDARVFKNGRHMAAWLGLVPRQQSTGGKARLLGISKRGDRYLRTLLIHGARSALRVIGRKSDRRSLWAIDVERRRGANIATVALANKTARIAWAMLAYDEDYRAAV

SEQ ID NO: 130403 - protein, 392 aa, unidentified
MYIVGIDIGKNHHEASIVSPEGKQIGRSLRFATTHKGADSLMSFIFKNIGNSPCVFGMEATGHYWYPIYSFLKAKGYTIYVINPIQSDSLRKMYIRQTKNDSIDSFLIAEVIRFGQFGTTSMADENILAMRQLCRYRDSVISSRTEIKLRIGTIMEQIFPEYEKQFSSLWVSTSMGILEKYLTPENIENAPIDELFEIIKDKSHNRLTRAKAISIKEAAADTFGIKIAQDAFSFQLKQLIDRMNFLDKQIEALDCQILEYYVKFDCYLHTIPGIGMIAAATILAEIGDINRFKSSSALVAFAGIDPTVRQSGEFSSTHNHMSKRGSPYLRHAIFLAATTCSFHNSPLNAYYKKKRDQGKHHLTATGAVARKLTSVIYAVLRDSKPYEHKSFC

SEQ ID NO: 130404 - protein, 395 aa, unidentified
MFYCGIDIAKYKHEATVIDQAGAAVLESISFANSKEGCGKLLALFQRLNIAKEDLLIGMEATGHYWLSVYGYLLDQGFEVKVINPIQSEAFRKMYIRQTKNDRKDSFIIAQIMRFGQFSATNLAEETIVALRQLSRYRLALVDACGDCKRRVIAQLDQVFPEYDTLFSDTFGVTSKEVLSQYPTPEDLLSVSTRKLSNLLEKASHGRFGKEKAEQLKAAAASSFGVSFAKDAFAFQIRQLIEQLEFLEGQIAEPEEQISSLLKQTGSYITTIPGIGDTLGAIILSEIGDIHRFDAPNKLVAFAGLDVRVTQSGEFTGTRQIISNRGSPYLRRAIWLAASRAAFCDPILSEYYQGLKARGKHHLTAIGAVSRKLCNTIYTILKENRPWQPIPPKGK

SEQ ID NO: 130405 - protein, 355 aa, unidentified
MPTIAQPQPTRVTIGVDTHGDRHVAAARDQLGRPLGTTMVATTPAGYRQLLGWALQLGEPVAFGIEGTGSYGAGLTRYLRASGQQVVEVNRPDRAARRRKGKSDPIDADAAARAVQAGDATAIPKAGVGVVEMLRVLHLARKTAVKARTQTVNALRALLVTAPPELREQLRGLSKTMLPRAAAALEAGNITSPATATMLALASLGRRHGALTAEIATLDGEIERLLDRFARPLLDRVGIGPDSASALLAAAGDNPGRLRGEAAFAALCGTSPVEASSGKTVRHRLNRGGDRQANAALYRIVIVRLRWHQPTREYMARRIAEGKTKTEAIRCLKRYVAREVFAVLNTLAFDLASAA

SEQ ID NO: 130406 - protein, 315 aa, unidentified
MTNVSAAPANFIGCDVGKTNIVVFDSRTSQTRTIANRAADLARFAATLDNTCLAICEATGGHEDGLLRALLKAGRAAHRADARKVKAFIRSFGTLGKTDAIDARALATYGRERHATLVRWQAPDPQRERLQALVLTRRDLIVDRQAYRNRLSAPGAAAVKRQLGKLLKSFDQQVEDITREIAALIRAHKGLADAEKAIRGIIGIGETTAAALLALLPELGRLNRREIASLAGLAPHPNQSGATDAYRRTRGGRPEVKRVLFMAAMVAAKNDPKQRSFYERLLSQGKKPLVALTAIMRKLVVVCNAVLRPMTVPAA

SEQ ID NO: 130407 - protein, 379 aa, unidentified
MPRGGNRAVAHNRILEEPAMAKAKTLVGLDVHATKVVAAVLDAETGEIAFFAMNAEIEKAAGFCAALPRPVRVAYEAGPTGYGLARELGKRGVECVVAAPSKIPRASGDRVKTDRRDAELLVRLLLAGKLHAVRVPGAEEEALRDLVGAREGVRVDLVRCRHRLSKLLLRHGIRFEDGDAWTDRHRAWLNGIVLQWPAAQATLLDVRGAIDALTHRRDALEREIVSMLPSSPWTAQVGVLRCLRGVDTLTAVGLCAEVGDFTRFGRAEQLMSYVGLVPSENTTGQQRRLGSITKTGSAHARRLLVEAAWHYRPRPNLSKRLTERQAGQPQEAVAVAWTAQKRLHRTWARLEARGKRRTIIAVAAARELAGFVWAIAQIE

SEQ ID NO: 130408 - protein, 379 aa, unidentified
MDIRNVAPTAVGDDATAYLAIELSGSNWLVGVRQPGRQAVSRHRLAPLDVVGRVGVVDGARASGAGRVVCVYEAGRDGFWLQRWLEEQGIECLVMEPASLPVDRRARRAKTDRLDVDALLRSLVGWLSGDAGACRMVRVPSREREDLRRTHRERQALIKERVRLVNRIKGLLASVGVAGFEPLRRAAGSALAELRGADGRRLPPALRRDVERCLQRVCLLKEQIAAVEAERDAAVCEPAAGDVEAVKIAQLMQVRSIGVQTATLLVREVFWRSFDNRRCLAGYVGLTGTPFNSGGRIREQGISKAGNPRARTAMIEAAWLWLRYQPDSKLSQWYRERVGTAAGRIRRITIVALARKLLIALWRFLQHGVIPEGAVLKSA

SEQ ID NO: 130409 - protein, 315 aa, unidentified
MTSDMYVGIDVAKDTMFVAILPTGETWEERITEDGLKRLVAKLRPITPQLVVMEATGGYEAPIFEVLWKHNIPVAVVNPRLVRSFAKALGRLAKTDKIDATVIARFGEAVKPKPKVRNDQQEKILGDLVARRRQILRMIVAEGNRKKRAVGEVQKLIDKHIKWLNKALEEIEKKLEAYISKTVEWRERNEILQSVPGIGKIVAYSLMAELPELGKLNRKQIAALVGVAPLNRDSGNMKGKRSCWGGRASIRTALYMATVVAMRFNKTIKAFYERLCQNGKHKKVAITACIRKLLCVLNAMMKNHIRWGEFKPAKT

SEQ ID NO: 130410 - protein, 405 aa, unidentified
MKKVIKVCGLDVHKDTIFACVKKGNYQSEVKKFSTMSCGLAELNHYLKGEQVSKVAMESTGIYWMPVWRALENDFELLLVNPYFIKQMPGRKTDVQDAQWIATLLDKQLLRGSVVPCKTIRILRAYLRRYAQLQGQTTRCLQQIEKQLSQCNIKIASLSSTIGSKTVIDIVESISKGNHAPEELLALVHGRIVKRHGEKVKQSLQGIIEEHDVFLLRQIYEDYRHIERQCNELLAQAQKIAETHYKGQLDLLQTLPGIKQLSAVIILSELGGNIKLFETAERLTGWCGLRPKNDESAGKIKSRSITKGNKYLRRILVQTAWAASRTKTCYLKTKFEQLSVRKSSKKALIAIARKQLVIIWNVLTKQEVYQEPKIKLSAQQISRKQKYYQEKLSKLQLLQNIEKAV

SEQ ID NO: 130411 - protein, 409 aa, unidentified
MQKFNAATHRIETASAQVALSAAGASGETKQHAAYIGLDVHKETIAVAVAEPGRGEPIYRGEIANTPKKVAKLIVKLSEAYDGGVLLFCYEAGPCGYGLHRQLIASGHDCQVVAPSRIPKQPGERIKTDRRDALKLARLLRSGDLTAVWVPDQEQERMRDLSRARDDLKAQERKARQQLNAFLLRHGQHWPKGKSRWTPAHENWLAALKLDDPWQQVVLQTYIDAERAAGERVAQLNDQLMRALPEWSLAPVVDALVALRGIDKLAAIVLLAELGDISRFDSPKQLMAFLGLVPSEHSSGGRRRQGAITLTGNSHARRMLIESAWSYRFPARQTKHLKAKASNASPVAKQIAWKAQVRLCGRYRTLTRAGKNTKLVCVAIARELAGFLWDIVRQEMPRLVQGQAAATSA

SEQ ID NO: 130412 - protein, 334 aa, unidentified
MADTQAPLDQAITQVQAQAPIPESWMGIDVAKDSLVIDAYPVSQRLTVTNNTAGIQTLVARLVEKPPCLIVLEATGGYERRVAAELLSAGLKVVVVNPRQVRDFAKGLGQYAKSDPIDARVLAHFAMVVNPKPRVAHMAPDQALAELVTRRRQLILQRDQERNHREHAQLKKVKASIDKVLKLLEAQIEELDELIADRIDSDDGLKANQAILQSVPGVGPQTIATLLALLPELGHLNRRQVAKLVGVAPFDRDSGKFKGRRTIWGGRAPVRNALFMTAMVARQHNPLIKAFGDRLAAQGKAKKAVLIACLRKLLILLNSLLRSRQTWQPATNNA

SEQ ID NO: 130413 - protein, 334 aa, unidentified
MEKITTVGIDLAKSVFSLHGVDGAGRVGFKRTVRRDQLLEVVAGLSPCLIGMEACSGAHEWGRRFQAHGHTVRLMAPKFVAPYRKSGKNDGNDAEAICEAVTRPSMRFVPVKSAEQQALLAMHRVRQGFVVERTATINRLRGLLCEFGVVLPLRSVNVRRQAAVAAENLPELACRAIGDLLEQLRLLDERIGAYDREIEAQARLSEPAQRLMKIRGIGPTTALAIVATVGNAREFKNGRQFAAWIGLTPSQYSTGGKPRLGHISKRGDAYLRNLLVQGARSVLNSAGMHQDHMSRWVLELQPRRGYYRTLVAIANKNARIAWALLAKNEPLRAA

SEQ ID NO: 130414 - protein, 273 aa, unidentified
MSPRPQFAGIDVSKDSLHVHIAQHLMDNDGPFRVFSFDHKGLSLLKAWLLEHHVQHTVFEASGGYENTLRDFLLEHHLPCTRLQPERARAFAIGIGAIEKTDKLDARVLARMACVRTQHKEVLRSETQRELVTLMDFRLQLREDITRLKTQRQKQTNAWIKETQDERIRDLEVRRDALDKRIQTLVDGDQEMSALCELMCQLKGVSCVTAWSLLAYLPELGELSKREIAKLVGVAPMAKESGDFTGKRRCSRGRGKVKACLWMASLSGRCQRV

SEQ ID NO: 130415 - protein, 270 aa, unidentified
MEEVTIIGVDLAKNVFQVHGAGADGSVVFRKKLSRPQFSRFMAGQSPCHIAMEACPSAHHWARELTGHGHRVRLIAPHYVKPFLKRQKNDAADAEAIVEAALRPTMRFVEPKSTDQQARAVAFRTREQLVKQRTESVNALRSHLYEFGHVAPVGIGYLPRLERVVEDPEANIPDLARDICRMLIEHIAHLADRIKALKSKIAAMSNEAEMPRRLQTMPGIGPITALAVETFAPPMDQFRRGRDFAAWLGLVPRQHSSGGKQKLGKTSKMG

SEQ ID NO: 130416 - protein, 609 aa, unidentified
MCTVSALDRIGVGIDTARYGHRVSFLRPDRQPAAKPLTVMENRAGYQALEERLKQLRERHPQAHFLVRIDAAGQYAVNLEQFLRSLDLPMTLSIGEPKRNKDYQKAHFPKRTTDDTESQAMARFAVVELPAATPSPSTPMVLLREVVSRLQAQVKQTTRAINRLHNLLARAFPELATLTDDLAAGWVLRLLDKYPTAERIAQAHRATLEKIPYLSHEQAEALHQAARCSVASLSGAVAEALVRELVSEVRHSQNAEKTLRQLLSSAFAALPRSSHLQVITISGIGEATAAVLVAKIVDIDRFESPAKLVNYFGAFPEENSSGVDKQGHPLPTGTLHMSRKGNDLVRGYLWNATRSAICHNPAIRALYHRLKAKGKRGDVAIGHCMRKLLHLVFAVWKTDRPFDPEHFPWEASANTPLSATTPCEPGTRATPSASDRAVGHKRDLPAKRVVTTAVEPTRPPVKPSTQVDTVARPKVDFVFLRHHVTMEQVLRYLELMSRLRGRGEQRRGPCPVHSHPGDAKRTFAVHLGKNVFQCFHAECAVKGNVLDLWAAIHRLPLYEAALHLAETFRLPRNREEEPVARTRHPRAVAAMRSLGTPPPVQMNQGDTGS

SEQ ID NO: 130417 - protein, 347 aa, unidentified
MDYYAGLDVSEEASSVCVIDGRGEVVSEMRIETEPAVLAAHLARFGNGLTKVGLEAGALTPWLARELAAMGLPVTVIETRRMKAYARASAVKTDRRDAKMIAQALRAGLYRAVHVKDEAAHKQRLALSARAMLLAQARQLQVKIRGDLKPFGIRLGRVGSGGFAARVKQLLGNRPDLMALVTPMLIMRAALLEQMRNYEREIKRHAAADPVCRRLMTAPGVGSIIALAFKATVHRPERFARSADVPAAFGLVPRIDKSGEHEAIGAISKTGDAMMRSLLFEAANALLTRTRKSFALKRWGLKVAKRRGMNRARVAVARRLAIILHRMWSDGSDFRLVAEEKQSPASA

SEQ ID NO: 130418 - protein, 273 aa, unidentified
MRFYTKPHQYYCGIDLHARSMYLCILDQQGEIVFHRNMHTMSEMFLRAIDPYREDIVVAMECIFTWYWLADLCAQQGIPFILGHALYMKAIHGGKAKNDKIDAHKIAALLRGGMIPTAYVYPPEMRATRDLLRRRMHLMHKRSELLSHIQNTNSQYNLPEIGKKIAYKANREGVAERFDEQSVQKSIEMDLLLIDHYDTLLTDVELYITRTTKEHDAQSFFLLRSVPGIGKILSLVILYEIHDVERFPTVQDFASYARLVTCSKESAGKRYGV

SEQ ID NO: 130419 - protein, 329 aa, unidentified
MTSILYVGLDVHTTNYTICSYSFPEDRFFAEIQVSPDYNEILKYLDRLRSMRGRDCQFLCGYEAGCLGYSLYHQLTYHGVDCVILAPSTMGKFDNLVHKNDHRDARNIAKCLAYNTYKAVHVPTEIDEAVKDYMRMRDDANAALKTVKQQIIAYCTRHGFLFDGRSKWSKRHLDWLHKLDFGNDIMNEVLQEYMIRFYQLQEKVELYDSRIEQFSQMEEYKEDAAKLQCFIGVKTHTAMALLSEVGDFNRFESAERFAAYLGLVPRDHSSAENGKHLGITKAGNAHLRRLLVESAHCYTRGKIGYKSKALASTRSASEGQFSTGNHLRR

SEQ ID NO: 130420 - protein, 354 aa, unidentified
MRDDSTHAANEPIATIGIDLGKNTFHLIGMSSRGKIVLRLKVSRDQLERRLANLQPCLIGLEACAGAHHVARKLRQLGHDVRLIPARYVKPFIKGHKNDYRDAEAIAEAVQRPTMRFVPIKSDEQLDLQALHRVRSRLVGQRTAVVNQIRGFLLEHGITVRQGPAGLRQALPSILAQRTDVLSLRMGHLIEDLADDWRRFDARIEAVTEQIEDLAKEDANCRRLMGIPGVGPLTASAMVAAIGTGAAFDRGRDFAAWLGLVPKQISTGDRTILGGISRRGNTYLRSLFVQGARAVLLRPESWGRYGFGHWLRAAASRLHRNVLAVALANKLARLAWGVLHGERGYEPGVQARAA

SEQ ID NO: 130421 - protein, 357 aa, unidentified
MSSNMKKYIGLDVHKEAIAIAVLNGAGKLVMESIVETKASTLLDFLHGLRGELHVTLEEGTWAAWLYDVLKPHVEEIVVCNPRRNALLKEGSKSDKVDARKLAELLRGRLLRAVYHGENGLRTLRELARSYLTISKDQARVMSRLKALYRSWGIPCSGTQVYAPRYREQWLSKIAQPGVRRRAELFYQQMDGLSVVRHTVRGELLAESRKHQAVKILRQIPLIGPLRAALLLALMQTPHRFRSKRQLWTYSGLGVETHDSAQHRYVDGQLQRSKKPQQIRGLNQNHNHEMKRIFKSTALSASRCAGPLQDFYAGLLARGMKPEMARLTLARKIAAITLTLWKKGGRFDAEHLKSQAA

SEQ ID NO: 130422 - protein, 403 aa, unidentified
MISVGVDVSKGKSTICILKPYGEMIMSPRDYEHTQSDLKKLADQLDGFEEEVHVTMEATGNYHFPIATYLKKKDYDVRIINPLEMKRYRCQGIRNPKTDSIDATMIAQYGIDSWFRPFHDCVEDNERIELKALGMQYFKTMKTRQDRCLVLESVIDRTLPGIGGILNDYDKHTGKDKKSDFVYDFYHADKITVYSENRFCDRYASWSKKKGYRYREKEARQLYFIAKDSIPTLPPSENTKLIVQDAVKILREVDASLYDILTRMNEIAKGLPEYATVMEMKGVGISIGPRLIAEIGDPRRFHNAKALIAFAGIDAPPYQSGKFMGTERHMSKRGSRVMRKIGYELMDTINKHQKLYAGDPVCDYFLTKRAEGKKYRVAMFAAYNKFLRIYHSKVSSVLNERDI

SEQ ID NO: 130423 - protein, 316 aa, unidentified
MTHGTANRRNLFGIDVSKTALDLAQWGQKAVTRFENSAAGIAALVERLLPATAIAAIVVEASGGFEQTMVTELAAVSLPIVVVNPTRIRNFARAKGQLAKTDAIDARLIAAFAEAIRPEVRPLGTEAQQLIKALVTRRRQLIDMQTAEKNRRATTNPELLPRLQKHLDWLETELAEIEDDLNNWIDQNAQWREKRASLESVPGVGPVTSFTLLAELPELGTLSRQKIAALVGLAPFNRDSGRFRGHRHIFGGRADVRSVLYMAALSGIRYNPVLKAFYNRLIAKGKLPKVALTACMRKLLTILNAIIRDEATWQIA

SEQ ID NO: 130424 - protein, 347 aa, unidentified
MLHAGLDLSRKKLDVCLISDAGDHVDQLVSPPDREALKTLARRIEETHREPVSAVIESMTGARFVHDTLEAEGWEVEIADAQKVKGLAPLACKTDKIDSQVLAMLSHRDLVPAIWLPDPRVREERELARFRLHLVKHKSALKNRIHSALISFGKPCPVSDLFGKEGRLLLERLEIPEPWRSNITASLALIDDLERQIDATNRRLREGHADHPYIPLLMSAPGIGWVLAFTIASEIGEIDRFASPQKLAGYTGLCPRVNQSGDKDRRGPITKHGPTYLRWAMLEATMHALKHPAYSERYQRTKRRLGKQRGAKVAQIDTARRLTHAVWHMLTRNETFAPRGATFRLAT

SEQ ID NO: 130425 - protein, 312 aa, unidentified
MDEAGVTVGIDVSKDRLDVCVLPHGEAFAVPRDGEGLLALTERLVGLRPKLVAVEATGGFEATVAAAVAGAGLPLVIVNPAQVRAFAQAIGRRAKTDRVDAEVIARFVEAVRPEVRALPSAAGQLLSDLITRRRQIVQMIGAEKQREKRQAQPRLKRSIARLVAALTKELTEIDRQIDDEIRGSPAWRAKEDLMRSMPGVGPIVSRTLLAELPELGRLDRRQIAALAGLAPWTRQSGKWKGKSFIGGGRASVRTALFMAALVASRHNPQLRAFHQRLIDAGKPKLVALTATARKLLTILNTMVRTQTPWSHA

SEQ ID NO: 130426 - protein, 342 aa, unidentified
MGEVSIIGVDLAKSVFQVHGATADGSVLFRKKLSRPQFARFMADQPPCLVAMEACASAHHWAREMARYGHEVRLISPHYVKPFLKRQKNDAADAEAIVEAALRPTMRFVEPKSADQQARAVAFRTREQLVKQRTEAVNALRSHLYEFGHVAPEGIGYVPRLAKVVDDPNVELPELARDICRMLLEQIAHLTDRINALKARIAAMSQEAEMPRQLQTMPGVGPITALAVETFAPPMEQFRRGRDFAAWLGLVPRQHSTGGKQKLGKTSKMGQRDIRRLLVIGATAVIRWASRRGAPKGSWLARMLERKPVPVVAVALANKMARGIWAMLTRGETYRGPVLIGA

SEQ ID NO: 130427 - protein, 364 aa, unidentified
MTIVAHSRPFIVGVDAHAKSHTLSILVAATGELVDVQQFHASEAAMARAVAWVARRTGGDLAVLWVIEGVGSYGARLASIVVDVGYEVVEAPRMNARGNRGVGKSDPLDAHRIAAAVLPLDSDQLRRPRRDDGVPAAVRVLLVARDSMTTERTGHINSLTALVRAADLGVDARRPLTTAQIAEISRWRPRGEDIGLATARAEAVRVAKRIAALDDEIAANTANTTALLKQSPARVLIKKTGIGPVTAAVVLAAWSYPGRLRNEAAFASLAGVNPIPASSGNTVRHRLNRGGDRRVNQALHMAVITRMAHHAETRAYVDKRLADGLTKREIRRLLKRYLSRQIYRALEAAAREITSMTDVTTRPA

SEQ ID NO: 130428 - protein, 419 aa, unidentified
MIHPNAAGIDVGAKEHVVAVPADRDPEPVRSFKAFTPDLHELADWLKGCAVETVALESTGIYWITLYEILEERGFQVRVVNARHVKNVPGRTKTDVLDCQWIQKLHSFGLLSGSFRPDQQVRTLRSLMRLRDNLVVNSTQSVHHMQKALFEMNVQLSNVISDIVGESGMRILEAILAGERDPEALARLCSTRIKASRQTVAKSLHGNWREELLFALRVAMDSYRFAQSKIAECDERIGQHLAQFEDRAALDTPPASLKSELHRICGVDLTKIPGIKEQAAQIIISEVGLDMTRWNTEKQFASFLGLCPNNSISGGKVLRRSTRKVYNRAADALRLCSQSLTNSKTALGAKYRRLKGRLGAPKAIVAMAHHLARLVYRMLRYGRQYVEKGIAEYEIRFRLQRLKWLKREAKSLDMQLLPT

SEQ ID NO: 130429 - protein, 370 aa, unidentified
MSIKRILVNTIDTDLEYEVIGIDLAKNCVSAILLTTDGEIFGIDRLDYQELEKSAQELSPTIFAMEPCTEMNYMVQKLEDWGHHCIVISGKNVKDYVESHFSNQKTDLNDAQALAFLTKDTQLRTVKAKDPEQLKYASLTTLREQYVKQYRQTMVSLKGICQVWGLSISKGISGKARLKDMIENHAAFPAELRTALVGMVAHAQAVQKDLKSVTKILEELAKKDKACQLIQTVPGLGTICSCRLRATVGDIQRFKHPKDFPAYYGLVPSSMATGHNEKKGKITHRGDKTMRSLMVQGAGIVINQATKGNLHSKQLTKWILKKQKEKMPWGKLVCAVAAKLLRIVRAILISGKPYNPKIAGVAKCSLPKAS

SEQ ID NO: 130430 - protein, 415 aa, unidentified
MLKIVYPICCGLDVHRDFVYACIATTVNGVTTYKSHRFSTFTKGLRELLSWLLASNCKDVCMESTGKYWIPVYNILETDCKIVLAHPKYVKAIRGKKTDKKDAKWIADIFKHDLVSGSFIPPADIRQLRDLVRYHTKLTNFTTGEKNRVQNCLTVSNLKLDSVFSDVFGKASSNIIGHILANPSVKLSDVSAFRTKGMKATDEEILEAVDGEIYPEQAEKLRIIRDHMSSLDLCKANLQSLILSTAEKYIPEIDLVCTVPGIATFSAISVIGEIGVDMSVFPTSKHLCSWAGLTPQNDQSAGKKKTTRISRAGAYIKPLLVQCALAAVKSKNKHPEVYNRYSALKKRRGHKKATIAIARMLLTAIYNILKKHEPYNAEIYRKSDTPPEHRNVSVEEAIYILQRQGYLISSPVSIE

SEQ ID NO: 130431 - protein, 340 aa, unidentified
MKNTVVKQVTGIDIGKNEFFVCYKALNNNGDVKISGTKKFKNNNSGINDYYSWVKKHNKTIEAPLFHVMEATGIYYENLAYFLFEKGDKVSVQLAQKVKYFAKSTNVKTKNDKSDSKVIADFGIEKNLNNSLWKPPSQKFKMIRDLTREHTSLKNNIIAAKSQLHAYEHAHNIDSNVLLFKKKQIDFYNSQITELEGIIKSLVESDKKFHSKVEKIVTIKGIRLMTALKVLSETNGFILFKNIRQLISYAGLDVIENESGTYKGRTKISKKGNAKLRTALYLPAMSASRYNIGLKKFYDRINDGKKVKKQGVIAVMRKLLILIYTLWKKEEEYIEDYNVT

SEQ ID NO: 130432 - protein, 407 aa, unidentified
MDVVHPKCAGLDVHQQTVVACARVVNGASVHHEVRTFGTTTQDLLALSDWLTAHGCTHVAMESSGVYWKPVWHVLGGHFELVLANAMHIRNIPGRKSDVSDATWIADLLAHGLIRGSFVPPEPIQELRDLTRTRKQLVREIAQHTLRVQKTLEHANIKLTACLADILGVSGRAILQALVAGERDPERLADLASERVKASRAELVAALHGRVTPHHRFMLKLHLTQIEALEAAVREVEARLGDALTPFRAAVDRLITMPGVSETVARVIVAEIGFDMTHFPTAGHLVSWAGLCPRLHESAGKRLSNRTRSSNPWLKTTLVQAAWSAARKKDTYLRAQFLRIKSRRGPKKAVLAVAASMLTAAYHMLKHDVDYRDLGADHFDRRDKAKLAKRLIARLHDLGLTVEVRAA

SEQ ID NO: 130433 - protein, 395 aa, unidentified
MSKIVHYIGLDVHKETIAVSIAPQNSTEVRRYGIIGGTLDATDKLVKKLAKEDTELRFAYEAGPCGFVLCRHLRHKGIHCEVIAPSLIPKKASDRVKTDRRDADQLARLYRAGELTAIHVPDQEDEAIRDLVRARTSALTDQRQARNRLKGFLLRLGFRYTGKSSWNDAHKRYLSGLVMPQGPQQIAFQEYIHALNDATDRLERLAQAVEDALPGWKWEPVVRALMSLRGVQVLTAMTLVAEVGDFRRFDDPRSLMHFFGLTPSEHSSSDKRVQGGITRCGNAHCRRVLTEAAWHYRLQPKVSEAIQKRQEGQSKEVQLIAWKAQERLHKRFQRLSAKKKSVVAATAVARELAAFVWAIACAVKPAEQPAAPEITRTCRGKVYRLDPEKKFQKNK

SEQ ID NO: 130434 - protein, 412 aa, unidentified
MDVIYPQCCGLDVHKKTVTACLITSIEGLEPVKEIRTFRTMTADLLALADWLQEAGCTHVAMESTGVYWRPVYNLLEGQFALLVVNAQHIKAVPGRKTDVKDAAWIAALLRHGLLRGSFIPSNPQRQLRELTRYRSTLVQDRARTLNRWQAVLEDANLKLASVVTDIYGVSARAMLEAILAGERDGEALADLARGRLRAKRDQLKEALEGRVTAHQSFLLTEHLSTLEYLDEAIARVSGEIDQRLIADQEAIALLDTIPGVGQRAAEIRIAEIGTDMSRFPSAKHLASWAGMCPGNYESGGKRLSGKTRKGSRWLRQVLVAIAHVAAKTKNTYLAAQYKRIAARRGKKRALIAVGHTILTIVYMMLTRKQPYQDLGAAYFDQREQQRVERRLVQRVERLGYEVSLQPRALAS

SEQ ID NO: 130435 - protein, 413 aa, unidentified
MRVFCGIDWAEDHHDIALVDADGSLLARRRISDDAAGLSQLLELLADHGDTGDDQVPVAIETPRGLLTACLRATGRKVYPINPMAVSRYRDRHSAAGRKSDHGDAVVLANVLRTDAHAHRPLPTDTELAQAIAVLARAQQDAIWTRTGAHNKLRSHLREYYPGFLAAFAQARGGIMRPEARVILAAASDPATAAQLTLAQLRALLREAGRSRGIDAEAARLREALRAPQMRQLPLVEQAMGRQTLALLGQLNAACHAAAGLEQAVIESFNQHPDAGIITSFPGLGPLTGARVLAETGDDRSRFADAKGLKAYAGAAPVTRASGKTTAVLHRRIKNQRLAAAGYLWAFSAITASPGARNHYDKRRASGDRHAAAERNLFSRLLGCLHHCLATGQHYDENSAFPPPASADPAIAA

SEQ ID NO: 130436 - protein, 351 aa, unidentified
MGRRTTTIIGGVDTHTATHHGAVIDYHGRLLGDAEFPATAAGYAAMLTWMRNHGELTQVGVEGTGAYGAGLTRYLHEQNVEVLEVPRPDRRLRRQRGKSDPIDAEAAARTVLAGKASGVPKLADGPIEAIRMLRVARIGAVKAKTAAMNTLRTMLITAPDSLRSQLHGLSPAQLVNACARLRPDLANLADPIQASKGALRSLAIRFQHLELETRTLREQLDRLTERVAPTTSAVFGLGPDTVSALLVTIGDNPDRLRSEAAFAHLCGVAPIPASSGKTNRHRLHRGGDRSGNSALHIATIVRLRYDPRSRAYADRRTTEGLSMPEIIRCQKRYLAREVFHALRADYTKISS

SEQ ID NO: 130437 - protein, 312 aa, unidentified
MTAGIDTAKDKLDVAVHGKDGGFSVENTAAGWRKLAQQLAAAAVTRVGIEATGGYERGVTRALQKAGFTVVVLQPLQVRAFARMRLQRAKNDRIDAALIAACTHMLDRQSRTPREPRFDGLADHLVFIEQVEADVTRLKARLEHVSDPRLRGIHERDIARLQKRADREIARLIRALREHPDLAQRFDLVCSIPGCGERTALAIVVHMPELGQVSREAAAALAGLAPFVHQSGTHQGESHIGGGRQRLRGSLYKAALPAASFWNPALKALYGRLRQRGKPHTCALVACARKLLIFANTVVARGTPWHASAARA

SEQ ID NO: 130438 - protein, 436 aa, unidentified
MRGCRCSMIMGFTKPIEHFNLQRKKVITMNTLYVGIDVSSKSNVVYLMLPNGDKHSNFSVANSHEGSTQLVKRILSALTSHSLDTVLIGLEATSVYGDNLVYFLREDATLAPFNRKIHVLNPKQVKKFHDSYNDLPKNDYVDSFVIADCLRFGRINKEVYLGDYRYKALQNLTRARYFAVQNLTKEKQRFINVLFKKYSTMTQEKVFSNAFSTTALAVYDEFESAEALANMDLQELTDFIIEKGKNRFPDPDAVAKAIQKAARSSYRLPKTVNDSVNQVLSISITSMKALESQIKEFDKAIKAQMELLPNVLISIPGIGPVYSAGIMAEIGDINRFDNQAALAKYAGLAWKQHQSGGFESEVTRLIPSGNRFLKYYLCEAAFSLVRCDKEYSDFYHLKYKEVNRCQHKRALALTARKFVRLVFRLLKDNRLYCPAK

SEQ ID NO: 130439 - protein, 346 aa, unidentified
MLYAGLDLSRQRLDVHVLDEDGRTLEVTAVRPDADALRTLASSMARHGQPISAVIESMTGARFVHDQLELNGWDVEIADATRVKGLAPLAAKTDRIDAWVLAELGRRDLVPAIWLPDPSVRAERERARFRLHLVRLRTALKNRIHATLMSFGHPVPVSDLFGPGGRELLGRLEVPEPWTTTLATSLRMIDELSTEIDACERDLRTLGHEDRTVTLLCTVPGISWVLASTIASEIGDISRFATPKKLAGYTGLCPFVRQSGNRDVRGPLAKNGPKYLRWALIEASIGASHHPRYRERYEQTKRRLGRGRGVKVARIELARDLSGAIWHMLTKDEPFAPAGPTIPLVA

SEQ ID NO: 130440 - protein, 479 aa, unidentified
MIRSVGIDLSRTGNHQVCCLDEQARPCDSFSFDSTLEGLEKFEKRVFWEGATPTIVFEPTGLAWIPMAAYLRARHPDCQLVKARLQKVAALRRYLHSRAKSDRVDGITLAKMPFIDAEQLDEAYLPPAEYHALQRLTRQRERLMKSITIRKNRIGSIINGYLPSLRKAFTDEWSDRARLFYRQLLNPFTVVRDGKDAFETLFVSAKTKGAVTESHRVYQLCQKLVEFYEKSRAAGMINEDFFDNLQDEISCELRLMETEEAEVERVSGRIEELYRHLHPSDHLRTIPGIGVRTAQVFLAVIGDPNRFRNQSAFANWTGVVPGARQSADSEGKGLRMTKAGPAMMKRALYQAGDIARRYDPQLADLYYREMVQHGKTHLQAMGAVMSHLAARILAVLQEDRPYELRDNQDRPISKMEAIGLIQQFKVPEETRQARRRRKPNEGRLSGRRTREAAKAPQSAPLIPPPKIVYCAEELQSTAN

SEQ ID NO: 130441 - protein, 430 aa, unidentified
MKSNTQNAKIEAITEKTLVLGIDVGSETHYARAFDYRGIEYSKKPFKFSNTEAGFVTFKEWILDLKERHEKDKVVPGMEPTGHYWFNLGKFLHDNEMKPVLVNPHHVKKSKELDDNNPTKNDRKDPKVIAGLVREGRYMIPYLPDGVYADLRTASNIRFQLQAELTRIQNRISRWFNIYFPEYKTVYGKPDAKSGILILKTAPLPEDILTLGIDGVNQIWRDAKLRAVGKARAKTLIEAAGHSVGSKEGAVSARMEIRMLLEDYESRNMRLQEVMVLIEELVKGIPMAEKLLEIKGVGIRTVSGFLAEVGDISRFNNPKELQKLAGLALVENSSGKHKGGTTISRRGRKRLRYLLFEAAMSLVAKNPEFRELHNYYTTRRRNPLKKMQSLMAVATKLIRVFYAMLTKGVDYDPKKMVSDIKRPAVYLQAA

SEQ ID NO: 130442 - protein, 455 aa, unidentified
MPKRTTGDRPELKPFNVGAAAIDIGSKLHMAAVAPTSTDTPVRAFGTFTQDLHDLADWFKACGVTSVAMESTGVYWIPAYEILEQRGFEVILVNARYAKNVPGRKTDVSDAAWLRQLHSYGLLRGSFRPDAEIATLRAYLRQRERLVEYAAAHIQHMQKALMEMNLQLHHVVSDITGATGMRIIRAIVAGERNPDVLATFRDVRCHSSIETIRAALVGNDRDEHIFALTQSLELYDTYQDKMLDCDRKLEFLIAALTDKGAKPVGKLSRPRVKTKQVNTPSFDVRTALYGVLGVDLTEIHGLGPSLALKLIGECGTDLRAWPTAKHFTSWLCLAPGNKISGGKVLSSRTRRSSSRAAALLRLAATTIGRSDTALGAFYRRLSSRAGKAKAVTATARKIAVLFYNTLRHGMTYRDPGADHYEEQYRSRVLANLKRRAKSLGFVLQAVPCDPEVAVS

SEQ ID NO: 130443 - protein, 338 aa, unidentified
MAILMGLDQHRAQITTDWVDTSTGEVSRARVAPADRAGVRRFLTRFRGQALEVALEATTGWRFVVEELHRIGAIVHLAEPADTAALRGNKKRAKNDRADARHLRELLMAGRVPESWIAPAHILDLRARVRLRHTLSEQRGEWQQRIQSVLYHHGCPKRGDLINQAGLTWLAAQPLPASAREQVTVGLAMIDALERQLAPLDKQLRTYARRQPGCKALQAHYGIGALTSVTILAELGDPSRFSSSTQAVRFSGLDITVHASDQRRAPGHLSRQGPPALRWALFEAAQCARRPNSPDHAYYVQAAERLGGNRACLSIARKLLKRSYHTLRELGEEALQPA

SEQ ID NO: 130444 - protein, 386 aa, unidentified
MMRFAGIDIGAERHMVAVLDEQGEVLCRSSPFGEDASGYARLFELLGPSADCLVALEATGHYWRNLFVALIAKDYAVAVLNPLRTARFAEEELRRTKTDAIDALGIARFAQQKRPRAAQLPDSVTEELRELERLRERVVEDFADRLRQLHRAVDLGFPEFTRYVRTLESQLAATILSRYPTAASFRGVSVKKLARIVYDGSHKIGEELARNLIEAAEKSVGAHHSEPYRRRIKYLCEDLDVLRRRLKDLARDVERKLDDHEVGKLLMTIEGLGPLTAACLIAELGDPARFDSPGAIASYVGVIPRIRQSGKKRFSLRKSLFMVVLQMVRRNPWLRQYYERLRAAGKPGKVAIIAAMRKLLTAVWSVATHRRPFVPIMPQLPAPKNA

SEQ ID NO: 130445 - protein, 348 aa, unidentified
MMLIGCDYHPSWQQICWLDTATGETGEKKLEHASGEAQQFYRGLPGPALIGMESTGNCQWFVEMATTAGHDVWIGDAAKIRAADVRQQKHDRRDAALILKLLLEGRFPRIWTPSGEEKDLRQLLIHRYKLVRIRAQVKTELQHLAMNQGITKKRKLWSKAGEKVLRELPLKPWASRRREDLFRIREMLNGQIGLLDQAVVEAAEKNEKARLLMTQPGVGPVTSMAFVLTMGDVSRFQRGKQVASYLGLIPREYSSGGHRRYGSISKQGNRFMRMLLVEAAQGAVRCDPGMRSEYLHRCHRKAKGVAKVAAARKLAIRLYWMLRTNTGYPEIVRVESSSRVALVVRHGG

SEQ ID NO: 130446 - protein, 416 aa, unidentified
MSLALPDALFFTGIDWAAETHAVCVMDAAGTIVAEFTIDHSADGIALLIGRLARYGTPGGMPVAIERPNGRLVDLLLEAGHPVVPVSPNAIKTWREGEVLSGAKSDAGDAAVIAEYLRLRQHRLRTAAPYSDETLALRTVVRSRGDLVEMRVAATNQLSALLEAHWPGAKAIFADVESPISLEFLTRYPTPAAAAHLGEKRMAAFLVKHGYSGRRTAAELLARLRAAPAGTGRESLTEALRDAVLAAVGVLTALNAAVKNLDRSVAAHLGEHPDGAIFTSLPRSGQVNAAQVLAEWGDCRQAYDGPDSVAALAGCTPVTSQSGKHRSVQFRWACNKRFRVAMTTFADNSRHASPWAAKIYSDARASGKDHPHAVRILARAWIRVIWPCWLEGIPYDPARHGAAAALAKQTAQPIAA

SEQ ID NO: 130447 - protein, 347 aa, unidentified
MTEAYDGRQVVGMDLHRRRSVLVRMTEDGQRLGTARITNSPAALRAEIAKAGTDPRVVLEATYGWYWAADELAAAGAEVHLAHPLGVKAFAYRRVKDDVRDARDLADLLRMGRLAEAWIAPPAVRELREITRYRQKLVGLRTSCKDQVHAVLAKLGIPVTCTDLFGAWGTTWLDGLRLPQPYAGKVCSLRQLIGELDAEVTMLTEVTADLLAGYRGYQVIQQLPGIGPVLAAVIVAEIGDVTRFRSAAQLASWAGLTPRHRESDVKVIRGHVTKQGSRLLRWALVEAVQRTPSGTRVRDVKDAIVARRGAQARNIAKVAAARQLLTLVFYGLRDGQIRCLSAPAGTG

SEQ ID NO: 130448 - protein, 387 aa, unidentified
MPQPNDLSRSLVALDQDSTIIAVVEMSQSSWLVGGVLPGIERQPRKKLEPSPERLLALLHRWRDESVRAGRTITRIAVAFEAGRDGFWLARWLEARGVEAHVIHPSSVAVSREHRRAKTDRLDTELLKRGFLGWLRGERGHCSMARVPTIAEEDAKRPNRERECLVKERTRLVNRMKGTLARLGIRHFRPTLRNAAEHLAALSTPEGSPLPPNVAAELERDIARLRLVIGQIKQIEEARRQRLEEQPERGPHAMVRLLARVVGIGIETADMLVNEVMSRPMRDRRAVARYAGLTGAPDESGAKRREQGLAKAGNARVRRGMIQLAWRFLRFQKNSALAQWYQARTADHRGATRKTMIVALARKLLIALWRFVTIGEPLDGVTLRPAS

SEQ ID NO: 130449 - protein, 426 aa, unidentified
MEQVTPFAALIGIDWSDRKHDVCLVDAASGRRELTVVAHTPEALNEWARALRARFGEEKVAVCLEQSRGSLIYALLKYDFLVLYPINPQMLSRFREAFTPSRAKDDPTDAAYLVELLIHHRERLKAWTPSDEKTRTLQLLVEHRRRLVGDQTRISNRLTALLKGYFPHVLQWFPDIRTPMVCDFLLRWSSLGALKGVRRTTLEKFFREHNSQRIETVEKRIAALKAAVPLTTDKAVIDSSAVMVKALAAQMQTTLAAVKEFDSQIEELCQSHEDFHLFASLPGAGKVYASRLLTAMGSNRERWATADELLCFSGIAPVIERSGKSSWTRWRYFCPKFIRQAFVEYAGESIRHSEWAKAFYVSQKAKGKRHQAAVRALAYKWIRIIWKCWQTREKYDEARYVECLRKKGSKLVAEVASAAASTSELA

SEQ ID NO: 130450 - protein, 389 aa, unidentified
MTDPTPENWTECRPGELERLSAWLAGYGVTHVAMEATGVYWKPVWAVLCEADSLVLVLANAQHVKAVPGRKTDVNDATWLADLLAHGLIRPSFVPPMEVQALRDLTRTRKQLTRERASHVQRIDKLLQAANLKLGSVLSDIMGQSGRAVLDALAAGEDDPGKLADLVRTRVRASRAELVEALRGRLASHGRLLLRLHLVQADSIEAAIAAIDQEVAQRLEPFRDAVTRLTTMPSLSHVSASVVVSEIGFDMSRFPTPAHLVSWAGLCPRNDESAGKRRSTKLRHGAPWLKTLLVQAAWAAVRVKASYHNALFHRLKARRGPRKAIVAVAASMLTAIHVMLQRRAVYRDLGADHFERAQQQRLAHRLTKKLQHLGFDVVLTQRASTTVPC

SEQ ID NO: 130451 - protein, 337 aa, unidentified
MNITTVGLDLAKNVFHVVGLDGQGHEQMKKRLSRGQVLKFFANTPACVVGMEACASSHYFGRQLRQLGHVVKLIPPQYVKGYLRGQKNDINDARAIAEAARVPGMRTVTVKTVAQQDVQSLVRLREGAIQSRTALVNRLRGLLGEYGIVAPKSVTVLRRALPEVLADASNGLSDPFRRWLERERRQLLELDAHLVELTAELTALSRQDDRVQRLQTAPGFGPIVASVFASVVGDGHQYRRGREASAALGLVPRQFSTGGKTVLLGISKRGDRYLRSLLIHGARAVVRAARRKDDRLSRWVNRLRETRGMNKATVALANKLARIGWAILRHGTRYQPA

SEQ ID NO: 130452 - protein, 360 aa, unidentified
MAKVSTVVKTAATDFIGLDLSDKTATYVVVSAGGEVVQRGKLGLSPAGLERVLAARPAAQIAIEVGGHSPWVSRKLSQMGYTVTVANPRQVKLISHGERKNDLLDAENLARLLRYDRAMLRPISHRGAQAQADLALLRGRDALVRARTRLINSARSMVKAAGGRLPKCSALSFHTKAKDHLPALLRPALEPMLSAIAGLTEQITIAKRRLEKLADERYPETHVLRQVKGVGPLTSLGFVLTLEEPQRFAKSRSVGAFLGLTSRQRDSGEFQPQLRITKAGDPFLRRLLVQSAQYMLGPFGEDCDLRRWGLKLAGSGKNKIRRNKAIVAVARKLAVLLHRLWLSGAVYEPLRQAKPEQAAA

SEQ ID NO: 130453 - protein, 412 aa, unidentified
MEILYAICCGLDVHKDSITACLRRLGGRGHVTQELRPFGTTTGELLTLLDWLVAAGCTHVAMESTGVYWKPVFNILEGHFQQVLVVNAQHIKALPGRKKDTLDAEWIAQLLQHGLLRGSFIPPAPIRDLREATRYRKQLIRLRADETNRLQKLLEGGNLKLGSVASDILGVSGRAMLAALVHGETDAAALAGLAKGRLRKKQPQLVAALTGRLTPVQRALLGQQLAHVEYLDRAIATLDALIATLMAPYQAEAERLRSIPGIDTRSTENLIAELGVDMTVFPSDGHCASWAGMCPGHNESAGKRKSGKTRKGSKWLRTVLTEAAWAASHTRSYLGAQYHRFARRRGKKKAVVAVGHSILVIAYHILKDGTTYRDLGQDYFDRRDTARIQERLLGRLRALGLHVTVEAMAPAA

SEQ ID NO: 130454 - protein, 339 aa, unidentified
MKITTVGLDIAKSIFHLFAVDQRGRYVKKKQLKRSQLLSYMAQLEACVVAMEACGGANYWAREIMALGHQVKLIAPQYVKPFVKGNKNDYNDAEAIAEAAQRPTMRFVPMKSVEQQDIQNLHRQRERIKKAPTALSNQVRGLLAEYGVVLNRGIGAVREGLPGILEDADNGLTMRSRALFADLLEELYTLDERFKQGEEQIKVSNHNNEVCERLDEVLGIGPITASATYAAGGDGKVFVNGRHFSAWVGLVPGQYSTGGKPRLLGISKRGNTYLRTLYIHGARSVLRYSAGKTDRFSLWAQGVLARRGHNKACVAVANKLARTAWVIMAKGERYRPAVS

SEQ ID NO: 130455 - protein, 414 aa, unidentified
MDVVHTHSAGLDVHKKIVVAAIIVPDPAGGWYKETRTFGTMTIDLLALSDWLTSHGVTHVALESTGEYWKPVFNILEANFEVLLVNAQHVKAVPGRKTDVKDAEWLAELLKHGLLRASFVPPVDQRDLRELTRYRTTFVRERATLVNRVHKALESANIKLTSVATDVMGVSGRAILAELIEGQATPEQMADLAKGRLRAKRDDLTKALEGRVKPHHRFVLTELLCEIDNLEEALARFDEQIQAYCRPFEEAVQHLDTITGVARTTAEIIVAEIGTDMSRFPSADHLSAWGGVAPGNDESAGKRRSGRTRPGNKALRTALNQAAQAAARTKNTYLAAQYRRIAARRGKKKAIMAVAHSILVIAYHLISRKEDYRELGGDYFDKRRPEATAKHLINRLEALGYTVNAQAQPATATA

SEQ ID NO: 130456 - protein, 345 aa, unidentified
MPIVGGLDIHRKQLTFDYLDTATGEVKRGQVAPADRAHLRAWLARFAGRDDVAFALEGCTGWRYVAEELAGAGVAAHVAEPADTAFARGRKRHAKTDKTDSRHLRELLAEGRLPECWIPPSRILECRALLETYHDLRAEHTAWVQRIHAVFFHQGAPALGEAALRTGRDLQAVRAAAAAHLSPAGQLQVDTALAVLDALEARLDVVRHRLLDAARGLTGARVLAERLYGVGPVTALAMTCWLGGAGRFSSSRKAVRFAGLDITVWSSDRKGPPGRLSRQGPEVLRWCVYEAGKTHARASAPDHRYYAAVKDRQGGKRAALSEARKILRQACHILAELGDDALSAA

SEQ ID NO: 130457 - protein, 313 aa, unidentified
MSEKLPQTIGIDISKATLDVHALPAGIARQFANTAKGHKALIAWLEQWEVERIAYEATATYHRALEAALAAWSCVKLNPERARRFAQATGTLAKTDRIDAMLLARMAATLQPPVRPARSMQQAQMSELINARDGLARDRTALKNRSKNLTIALLKRQCRQRLEQIDRHIEALDAEIATLIAADAALARRHQILTSIAGVGTLTANQLIATMPELGSLDNKQAASLAGLAPVARQSGQWKGKSYIRGGRANVRQALYMPALVAARFNPDLKAKYQQLIAAGKPAKIAITAVMRKLVVTANALIKADRCWQQSIA

SEQ ID NO: 130458 - protein, 346 aa, unidentified
MLYAGLDLSRKRLDFHLLDREGATVEVGACPPDADGLRGLTERVDRHGAPIRAAIESMNGARFVHDQLELAGWQVEIADAQKVKGLAPLACKTDRIDAWVLAQLARRDLVPAIWLPDPQVRAERERARWRLHLVRHRSSLKQRVHAVLLTHGTPCPVSDLFGVRGRQLLAGLGLPEPWQATIEASLRLIDDLDREIGDCERELRRLGADHRYVPLLCTVPGISWVLAYTIAAELGDINRFPTPRKLAGYTGLCPRVYQSGDRDLRGPLAKQGPRYLRWALVEAATHACTHPVYRQRYQQTKARIGKQRGAKVAQIDLARRLSEAIWHMLSRNQAFAPKGATDPLAA

SEQ ID NO: 130459 - protein, 457 aa, unidentified
MTRRKHSRPARDIAPVHPHAAAVDIGATLHVAAVRPGSDPEPVRTFGTFTTDLHRLADWFEQCGVETVAMESTGVYWIPLYEILDQRGFEVVIVNARDAKNVPGRKTDVSDAAWLQRLHEYGLLRASFRPKGEIATLRSYLRQRERLLDQAAAHIQHMQKALTEMNLQLHHVVADVTGVTGLRILRALVAGERDPDTLAAYSDPRCKAPAETLRAALVGNYREEHVFALAQALELYEIYQAKVAACDQQIEAVLERLKAANPPPAATLPPARPRRRQANEPGFAVREALHAILGADPTQIDGIGPSLALTLVGECGTDLSAWPSAKHFTSWLSLAPHNKISGGKVLSARTRRSGSRAAALLRLAAVAVGRTATALGAFYRRLAARVGKAKAVTATARKIGVLFYNMLRHGMDYADPGASAYEARYRQRVLSNLRRRAKSLGYVLQKADPASAAIAVS

SEQ ID NO: 130460 - protein, 411 aa, unidentified
MNAVGIDVSKGKSTVAILRPMGKVVQTPVDVPHDTVSLERLAYQILSLGENTRVVMEATGRYHEPVAMELHDRGIFVSVVNPLAIHGYCSGGTVRKVKNDQKDSLKIAKFALDHWVDLREYTPMDAVRQQLKIFSRQYNLYMKSRVALQSNLISLTDKVFPGVNEIFTSPERSDGHLKWVDFVTTFWHCECISLVSENAFTERYKKWCKRMGYKFSAAKVSDIYIDSLGHIVTLPKNNNTKLLIQTAAKELTAMNELLAVVKAEMIRLAKELPEYETVHAMFGVGELLAAQLMAEIGDIRNYPRRSSLVGFAGVDPEVNQSGKMNSESNPSTKRGSPHLRKTLFQLMTVYLRLSPADEAVYQFLDKKRSEGKPYYVYMTAGANKFLRIYYARVKECMAKLETPAEIAEENG

SEQ ID NO: 130461 - protein, 366 aa, unidentified
MKQLAYIGIDYHMNTISVAVIIKGQNDFFDTIHMKNNDKTILKYFKKLSKKFEIQACYEASCNGYSFQRKMNNWGFHCDVIAPSLIPKKPGDKRKNDYRDARNLTQLYANGQLTVVHPPTEEQESIRNLIRCRLNLKKDEKNVKLQINSFCLSQGLKWPQSKWTVKHREWLSKIEFPDAYSQQVLSEYLGHLQYLSSRIANLDKIIEEISCSKVYASSVKKLRAFKGIDTLSAMILIAEITDFRRFPTPRALMAFLGLIPSEESSANKQKGGGITKTGNSRCRTQLIESVQHLMKKPTISYKMKSNLAQVDAASSNIAIKCMHRLHKRFWALVIKGKNRNKAKAAIAREFAGFIWAMMTQPESAGI

SEQ ID NO: 130462 - protein, 345 aa, unidentified
MEQISRIGMDTSKHFFQLHGVNAAEKVVLRKKLRRKEMVAFFKALAPTVIGIEACGASHHWARILRSFGHEVKLIAPQLVKPYVKRGKNDTADAEALCEAMSRPTMRFVPVKTAEQQAALMMVALRDRLIRNRTQLSNAIRGYAAEFGFTAARGMAHIDPLLDRIQADENVPVLARELFAAQAEEYAQLQAQIAEVDAKLMAWHKADEFSRRLAKIPGVGPIGAALLMMKTPAPEMFRSGRQFAAWIGLTPKDHSTAGKVRLGVITRAGDEALRSVLVVGATAVVQQVRRGGRGSPWIVDLLKRKPPKLAAVALANKMARIAWKLMVTGNSYAAKSAPAALMGAA

SEQ ID NO: 130463 - protein, 370 aa, unidentified
MTQCTKTQFVGLDVHKDSIVIAVAQLGREPARVIGTVPHEWNALRKVLDKLGPRCEVACCYEAGPTGYGLARALIAAGWACDVIAPSLIPKKRGERIKTDRRDAVKLAQNHRSGELVAVFIPDEKGEAIRDLERAREDAKKAERVVRHQLSKFLLRNNRRYPGRTTWNAAHQGWIAKLAFAEPAQQYVLSDGLAAVETATLRVSQLTARLRELTVGWSQEPLVKALQTMRGVEFVTAVTLVAEVGDFRRFATAQDFMGYVGLIPSEQTSGPHRRQGPITKTGNAHVRHVLVESAWHYRRQPRMSKALRERSVGVAPQVCAIAWKAQKRLHGRLNRLIGRGKNKGEAVTAVARELAGFVWAISREGKLLVS

SEQ ID NO: 130464 - protein, 479 aa, unidentified
MRRCIGLDVHREFAQVAIWEDGIVRHIGQISATPEALRLFADSLAPSDEVAIEATANTHAIARLLERHVARVVVSNPQKTRAIAEARVKTDKVDAEVLAQLLAADYLPAVWLPDDETHALRRQVARRAHIVRQRTRLKNQVQSILHRNLVPRCPAADLFGRKGRTWLCEQELPDDERRTVEALLRQLDFHGEELRIVDAELGRVALRSDEVKRLMTIPGVDATVALSIVAAVGDFSRFSSPQKLVSYLGLNPRVRQSGGQPASHGRITKQGRAHARGMLVEAAWVAAKIHRPLARLLRARARPARDAGGGGGDGAQARRALLAPDHARRGLRLPAPLADREEAAGARVARRHALAPRPEGQGRRLLAEGDPPARGRARRAGRAGLSPARRRLASEGAGEEGRGRRQRGATLEALCGASCAAGLIAPCPALRSWVDHARAQPNADHDPTQTASPPRRGSTDPEFARSERAGAKPSPQEAI

SEQ ID NO: 130465 - protein, 364 aa, unidentified
MGSPVTSRAGELVVLGVDTHADAHVAVALDEFGRRLGSTEAPATQAGYEKLLAWAEGFGSLELVGLEGSGSFGVGLARYLHARGVEVVEVNRPNRQHRRRFGKHDTADAEAAARAVQAGAATGEPKSADGPAEMVRVLHVVRRSAVKARTQATNQLRALLVTAPEELKAELRGLSTAKLVATAARFRPSGFPDEVRTATKLAMRSVARRHQRLSEEIAELEEQIGRLVAEYVPALASLRGVGTDTAASLLVAVGDNPERLKSEAAFARLCGVAPLEASSGKTVRHRLNRGGNRDANRALHVLALGRMSWDERTREYVARRTAEGKSRREILRCLKRYVAREVYRVLTATPVVVPPPLPAPSAGP

SEQ ID NO: 130466 - protein, 323 aa, unidentified
MIMTKAASRFNHIVAFEVSKHELVVHSLPADQQERVSNTRAAVRRILKREAARNQRLGLGPLLVICEATGGYERHVLGAAAELGLSLHRAHGNRTRMFARFSGRRAKTDAIDARLLALYGLTPGLALYRQPGPELEALRALRRRRDDIQQMLRMEMNRTEQAILPRLKASLSRHRNWLNAELEAIEAEIETLIARSPELSRKATLMQSVKGVGPKTAAAILAYLPELGTLDKAKAASLAGLAPHANDSGLQQGARHIAGGRAALRASLYMAALVARSFNPKLRAFAMQLRARGKPNKVILTAIMRRLIVILNAVVASGQPARA

SEQ ID NO: 130467 - protein, 452 aa, unidentified
MAQRNRRIPLKPGKSAALTITHPHAAGIDIGSASHFVAVPPDRDDEPVREFPSFTVDLNALADWLTACGVDTVAMESTGVYWIPLFELLESRGFTVLLVNARHVKNVSGRKSDVLDCQWLQQLMTYGLLRGAFRPAEAVCVLRALWRQRGMLLRSQGRHVQHMQKALTQMNIQLTNVISDVVGETGQKILRAIVHGERDGQILAAMKNVRIRASRDEIAKSLQGNWRAEHLFALKQALALFDFIGTQLAECDREIEQQMQRLQVHDGTPAKGKKRGRARNAPKFDLRTQLFKMCGVDLTRIDGIDVTTALAVISETGADMSRFATAGHFASWLGLCPGTKITGGKVMSGKTKRVANRAAQALRLAAAALRSSQSALGAYFRRMCARMDKPKAVTAAAHKLARLIYTMLTKGEEYTDQGQDYYEERYRERVLRHLAQRAEKLGMKLVATEQPA

SEQ ID NO: 130468 - protein, 427 aa, unidentified
MSYIERGWVSVKYRGFPPTLINSTLGYWGVIMIYLGIDIGKRHHEAGFINEKGNSIGKTVRFANSKTGSDKLLKFLNQHQATPENCICGMEATGHYWLSVFSFLHKLEFKVTVFNPMQSDALRKFYIRKTKTDVKDAFLIAQVIRIDSPKETPFIEEDLLQLRHLERLRYTLVDQSSDVKRKVIALLDQVFPEYEQIFSDVFGVSSTEVLLNYTLPEDLLNIDTDKLADLLNTVSKGRYGKTRARSKAEQLKDNAQHTFGVSIGSDVFRMQIQLLLEQIMLLEKQLIQIEETMMELSNRQEHFLTTITGVSHVTAAVILGEIGSINRFERPGQLVAFAGLDASVNQSGEFNSSHTKISKRGSPYLRRAIWQAAFVASFNDPALSLYYQKLRSRGKAHGTAVGAVARKLTHIIFAILRDGKPYQPRAQ

SEQ ID NO: 130469 - protein, 399 aa, unidentified
MTGTPPNVYAGIDTHQATNHVGIVNELGKKLGDKEFPTTSTGYKDLLKFIVAFGTLLAVGIEGTASYGAGITAYLRTQKVTVREVIRPNRQTRRGGKSDPIDAYAAAKTIAADADDLPIPKLLGGAIDGLRVTQRARRTAVKARSAAMTQIQNFLTTAPDTVRQKYAPFKGDALYTALAATRPNDGDDLGHVLRRLARRITYLSEEIDEAEARLAVQATDIAPALMAATGVKAVTAAELLVTVGENPERITSKEAFAALCGTSPIPASSGKTHRHRLNRGGVRQANAALHRIVITRMAHDQRTKDYVARRTTNNTKSKKEVIRCLKRYVANEVYTRIVNPPEVLAVDDLRPLRLSMKITLQDVAGQFGVWPAKISQIERAVTRDDEFVVNYREFLLRTI

SEQ ID NO: 130470 - protein, 400 aa, unidentified
MRAVFGIDVSKTSSEVAILVNGEKVHGYTILNDAIGFNRLLGDLKTVHNPEIIFEATGVYSRRLQAFLEEYSYAYTRLNPLEAKKQLDSLRVRKTDKIDAEKLAKSQLVHNRKPTYVQEEVYQHLRDLSRFYQNMTEDLVRTKNRLHKVLQVTFPELETLLSTPTGEQYWNLVMAFPCKEFVLSLSQSNLCEIVRQSTSKRISEKRITYLTDKLIKLAKQSFCAVKKTSPMLEEVRYYAQELLRLSERRQVVLNDMVALAQPLPEYDILRSIPGIAETTATSIIGELGDIRRFQSTNQINAFIGIDLRHYESGNFLAKEHITKRGNPYARKILFKCIHNIASASHTNPCHIADFYEKRKRQSTIASTKPHTIASIHRLIRTMYYLITHNKLYDYSLTQNR

SEQ ID NO: 130471 - protein, 463 aa, unidentified
MRKNEKKTTAIRFDSGLQQLRRDAAGMDIGAREIWVDVGVENDSEPVRRFETFTADLNRMAEWLIGCRVKTVVMESTGVYWIPACQILEDRGIEVLLVNARYAKNVSGRKTDALDCQWLRTLHCYGLLPASFRPAHEIVTLRSYLRHRQMLIQCAAAHIQHIQKAMTQMNLQLHHVISDITGRTGMKIIRAIVAGERDRQKLAAMRDARTHASQATIEKALEGDYRTEHLFALKQSLDAFDHYQKQIAECDRQIEQHIRSLETKAEPGSNLKPARSAKTRQRKRNLMEFNAREEAFRISGVDLTQINGINETAALSLISEIGINMNPWPTEKHFASWLSLCPNNKISGGRVLNRRTRKSANRARDTLCLCAQSLLASRSALGAFCRRICSRLGKPKGLIATAHKLALLIYRMLKYGRHYADIGQEQYEKQFKERALRSLARKAKELGFQLVSNSDIASEKAVP

SEQ ID NO: 130472 - protein, 326 aa, unidentified
MQGKEASEQETKGKSNAGIDVSKSWLDAHVLPAGATLRVANRREGIRKLKRWLMPFDVALVVIEATGKWHRDVRRSLHAAMVPVALVDPFRVRMFAKACGVLAKTDRLDARVLAQFAAVMAPAVRAPASEVMEELAELVTARASAVAEQTALKNQLSTATGTFLKRQLGRRIQRLAKDIAALEREILKCIQADQGLARRYAILTSITGFGPVVATTLIACLAELGTCSRKQIGMLAGLAPVADESGQRQGIRVVWGGRPNIRRVLYLAAITAARFDADMKAFFNRLIAAGKPAKLAIIAVARKLVVLANILISEGRMWQPHSPKHA

SEQ ID NO: 130473 - protein, 381 aa, unidentified
MKSQDSNYVGIDCGKKSLEVVRINSEGSYERQQFSTTEIGISKLINWLNPNDVVGLVFLACKEPLAKLRCSLAISLFMNRSIGSQSFRIAKSILNKGIQVIVLNPGDLATIYQSLKKTDKEDSLKIARLIQRFPIEELPVVPVPTDEEEDNRRLCSEQENWTRQLTQGKNRLHSLFTQAGLTHITKKHLRTKANRETSVALLPSRYHKEAERILKVLDLVEQNLKLIEEEIKEALRKNQTYTQTIMSMPGIGMITSLAILSYMGDCKRFSSAKQAAYYVGLVPRVDISGDSAYYGRIVNRGCHSIRRVIVQAAWSLVRCQHGGKLKEFYERLYSKKGAKKSIIAVSRKMIEVLYSMIRTGTLFDSMPEEVLYRKLAQYGLM

SEQ ID NO: 130474 - protein, 291 aa, unidentified
MEQYVGLDVSLEQTSICVVDGGGKTLWQGRCASTPEAIAAAIHARAPEVVRVGLESGPLSAWHWHELRKLGVPVVCLDARHAKAALSMQLNKSDRNDARGLAQIVRTGWYREVMVKSMDSQLVRSLLTTRAQLMRMRVDLANQIRGVLKPFGLVAGKGSGQPFVERVRTLVAGGPLQEVAEALLSAWQAINGQISTLSRRLIVIARQDQAVKRLMTAPGVGVLVALTYVSVIDDPQRFAKSSSVGAYVGLTPRRFQSGEDDYTGHISKHGDALLRTYLFEAAGIILHRVAK

SEQ ID NO: 130475 - protein, 327 aa, unidentified
MDHFAGLDVSVKDTSVCIVDDTGRIVREVKVASEPDALLAVLTNPSYHFKRIGLEAGPLSQWLFSALAEASLPVICVETRHMRAVLKAQINKTDRNDARGIAQMMRVGLYRPVHVKTLRSQKLRVLLTHRKLLQSKAIAVDNDLRATLRNFGLKVGVVGTAKFEARIKELVENLPDLTILIEPLLIVRRAIREQIGVLHRRVLAVVRDDDVCRRLMTVPGVGPVVALTYRVTVDVPARFRKSKSVGAVFGLTCAKHQSGENDRPGAISRCGDEMMRMMLYEAAQILLVRSTKWSWLKAWAMKIARHRGMKKAIVALARRLAVIMHRI

SEQ ID NO: 130476 - protein, 343 aa, unidentified
MQVVRIGLDLAKYVFEVHGVDGLGNVVMRKTLRRGSVSTFFANLPPCLVGMEASNGAHYWARVLTDFGHQVRLISPQFVTPYVKSNKNDRNDAEAICEAVGRPTMRFVPPKSPEQLAIQALHRIRLRLVRSRTRLVNQIRGILSEHGIVIARDIWRLRRALAELTGNIPDDLNPLVGVLVMEAYAELIELDRRIASYDRRIRELYRTSELCQKLGEIEGVGPVTATALVAAVGDRSCFKNGRQFAAWLGLVPKQRSSGGRNRLFGISKRGDRYLRTLMIHGARAALGKAGGKQDPRSRWLASLRQRRHPNVAAVALANKNARIAWAVLAGNVSYEPARSVQAA

SEQ ID NO: 130477 - protein, 408 aa, unidentified
METIHPICCGLDVHQASVSACLRRVNTQGTVSVESREFGTTVKDLVALADWLVAEGCPIAAMESTGVYWKPVWNILSPLLDIWVVNARDVKQRRGKKSDRADAKWIAELVAHDLVQPSFVPPARIGVLRDLVRMRTVLVQGRTQVKNRVLAVLEDTNVKLASVVSDPFGASGRKIMEALVNGERDCKVLSEMAMGVLRRKIPQLEVALQGGFTEHHAFLIRLGLESLDQSNRQITELDAQIERLMDPLQEEALRLTSIPGVGQNAARVVLSEIGTDMTRFGSAERLASWAGLCPGNHESAGKRYSGKTRKGNRYLRRVLAECAWAASKTNTFLGRTFRRFQVRIGAKKAAVAVGHKILVIIFHLLNEGQIYDDGRYDSISQREQIRQRNRALRTLQRLGYQVALTSAS

SEQ ID NO: 130478 - protein, 347 aa, unidentified
MKILSLDLGKYKTVGCDYERESGRHRFRGSVTTPAALAQVVKEVRPDRVVIEVCNIAGWVCDMLRAMGVEVQVANTSDDAWRWRKVKKKNDRADALKIAQLSAVNQLREVHIPTIDVRQWRALIAFRQQLVKRRGKMKNHIRDLLISEGQLLPRGARCWTQIGVARLEAMARPLSEVGINELWRGQLDIELRQLREVQEEIAVAEEKLDAIAAADPRVALLRTIPGVGPRLSEAIVALLDRPERFEKARQVSAYIGMVPKQFDSGESERAGRITRHGSRIVRSLLVEVAWAGLRYNPWVRETYQRISGGKKSRKKIAIVAVGRRLLVRCWAMLRDGTSWRPPEAQTA

SEQ ID NO: 130479 - protein, 315 aa, unidentified
MAMLVAQTKPVVGVDVAKNELVIYQDQSDRLEAIPNTKASISKWLRTLAGTASIAVEATNTYHVLFADMAYEAGCTIYMIDGYQLSHYRKGVNVRAKTDALDARLLARYLKKEAGELHPWIPPCPLYRQLLSLFRRRAALVQARTGLVQSWSNEPLLKTAFAAQINSMKRLEALVEKKIKDVLQRAELMGQVSRCMKVEGIGFLTAARLVTTFQRGEFSNANAFIAFLGLDLRVSKSGQSDGPRRLTKRGDPEARRLLHNAAMSGSRTAAWKPFYEEQRKRGFSTTQALVMLARKMARVVFALLKTQSEYQSKAA

SEQ ID NO: 130480 - protein, 346 aa, unidentified
MKILALDLGKYKTVGCAYESESGAHQFKRGLTTAGGLAGMVQAVKPDRVVIEICSIAGWVCDLMWGLGIEVQVANTSDDAWRWRKVKQKDDRRDALKAARLSAVNQLREVYIPAPEVRQWRALITYRQQVIRRRTKIKNHIRDLLLREGQLLGRGSSCWSELGIAALAAQARPFSECGPAELWRGELQLELEQLKEIQRQVATVTAQLDKLGAGDARVQLLRTVPGVGARLAEAMVALLDQPQRFRKASQVSGYIGMVPKAMDSGETERRGHITRQGSRLVRSLLVEVAWAGLRHNAWVRQTYQRLSGGKKARKKIAIVAVGRKLLVKCWAMLRDNRPWEWQPQIT

SEQ ID NO: 130481 - protein, 414 aa, unidentified
MNCFCGIDWAEGHHDVAIIDGDGKLVAKKRISDDPAGFTALTGMLADAGDSAQDPIAVAIETPRGLLVAALRGTGRPVFAINPMAVARYRERSSVARAKSDHRDAMTLANILRVDAHIHRQLPADSELVQAIAVLARAQQDAVWRRSKATNELRSILREYYPAFLDTFAGKSTTNLAKPQARAILAIAPTPAHAARLSKARVAAALRRAGRKRGIDGLAAEIVERLRVPQLRQPELVEKAMGRQAMALLAMLDAACAGADDLEHAATEEFRKHPDHAVITSFPGLAEVTGARILAEIGDDRDRFADDRALKAYAGSAPVTRASGKVTSITHRRIKNDRLAAVGWVWATYASINPGPAREHYRRRRDHGDRHAAALRHLFNKMLGQLHHCLQTRQTFDPIKAFGQPCTAPEPAAA

SEQ ID NO: 130482 - protein, 326 aa, unidentified
MAEHRAETFVIGGVDTHKDLHVAAVVDHRDRVLGTESFPTTRHGYRLMLAWMRSFGDLQRVGIECSGSYGAGLLRYMQTAGVEVLEVTAPDKLDRRRRGKNDDFDAESAAHAAFARRYTVTPRSRDGMVESLRVLRVCRKTAIQARRIALQMIQATIVCAPDKIRDPLRSMTRMQLIRTLAAWRPDLTAYRQVEEAYRISLKSLARRYLELHDEIADLDDMIEAIVSELAPELLAQTAIGLNSAAQLLLTAGDNSDRLRSEASFAALCGVSPVPASSGKTVRHRLNRGGDRAANSAIHIIAIGRLRLDARTQDYVARRIAAGKIEA

SEQ ID NO: 130483 - protein, 341 aa, unidentified
MTSYVGLDVSLAETSVCVLGGDGRVRFEGKVKTRPEDLVQCLRKHADDAERVGMETGQTAGVLFRALKAADVPILCLETRHAHRALSARTNKTDRNDARGLAELMRVGWYREAWIRGTSANAIRSLLLGRRLLLQTKRTLENTLRGGVKRFGLITTKTAGRTFTHRAASVLDQDPAYAAFAAPILAVLRSVLVQIREYDRQLRGLARRDDTVARLMTIPGIGYLTAMAFYSTIEDPGRFKRSEDVGPYLGLTPRTHQSGEIDRTGRITKTGDGMTRSYLFEAANVLLTRIQRPSALRLWGLRLKGRAGLKKAQVAVARKLAVMMHAIWADGTEFEWGTASA

SEQ ID NO: 130484 - protein, 364 aa, unidentified
MEKKIQPYLSIGIDIGADFSVMAAALPTQEIIGRTYKILHSSPRSVQGAVDHIRSLEQRYSLPVKIYMESTSIYHLPLYHRLKDAGWTVYVLNPIVTHANQNINIRNIHNDKQDTRRIALLGLRPGLKTSIIPDDEIAAVKALLREYHAMKKETSMYICRLKNQLRQIFPQYLPLFSKVNGKASLAVLSHYPSPNAVLTASVEALTELIRKAAGKGEAMAQRKANDLFSAAQEALSFGHGNSGITFLIGHYVEMIRILDERTSAVLKQVKQSLSERPDSLLTRQTTLLESIPGAGFLTAVTIVCEIGDFSAFRCPKKLYSYFGFDPVVRQSGSSATADLRMSKRWLSLRQALLLYAGSAVCKLA

SEQ ID NO: 130485 - protein, 435 aa, unidentified
MSSKAYRATRVNEVSWEQLARGKEGLGVTLGIDVGKFDLLVICRWADGRFERPWRVKNPWEIPTLVRVLKQVKADRKLVVALEPSGTYGEALRQALGDTGIEVQRVGTKASHDYAEVIDGVPSQHDGKDAAVVAELAALGKAKPWAYPAADSWEEELAYWVEEMVAQRQMLMPWQGRLEGLLARHWPEASQVLKLSSGTLLRVLKRYGGPQALAEDADAATQLARWGRSLLSPAKIEELLTGARSSVGVRPGPWQQRQIQEYAERALAARQQANRAQRRLRELAVGHPVLQAQGKVVGVPTACVLWVSTGDPRDFDSAGAYRKAMGLNLAERSSGTYQGRLRISKRGSARTRQWLYFAVLRLVQQCGVRPWYEAKKARHEGEARRVLVAVMRKLAVALYHVGVRNEGFQPRRLFGRIGRHSRRSAERSVASKERA

SEQ ID NO: 130486 - protein, 323 aa, unidentified
MLPILGIDIAKAKYDVALQCLDGKVRHKAFRNLPDGHAQLLVWVARHAAGPVHACLEATGPYGEAVALALADAGHTVSVVNPLAVAAFAASELRRAKTDRTDADGILRYGAAQRPAAWAPMALEVRTLQALVRRVVTVDQMRVQELNRLEAYPAQDVVRQSIEAVLAQLAAELDHLRALIRDHIDRHPGLRSQRDLLTSIPGIGETTAATLLAELFGPLPCQSVKQTVAAAGLAPRVRQSGSSVRGRGSLSPVGTRRLRKALYFPALSAIRFNPVIAAMAARLSARGKCKMVIVTAAMRRLVHLAFGVLKTQRPFDPSIALSD

SEQ ID NO: 130487 - protein, 404 aa, unidentified
MPTYFVGIDVSKFKHTCCIISDQGEVIKKSFDFSNSKEGFDSLIETFKSIDQSESSFQIVMEATGHYHECLFRYLVAKNYLVQIKNPVVIARFKQSEYLDKAKTDNLDALLIAQYASKHPFSPSMLKSYNIERIRRISRAKYFLYQDKERTINHLHRYLDESFPELIPFLRKRGDIKRYQGRNFFDSKTTLWFLENFPSAKKFSSARSETADKLRRMSKGAFSLVKFNELRSIAKNSIGVSFTETETIIVQLVKELRDIQERNDELDKMLNPLIDETAPNLLTVPGIGYRLAGLLISEIGDASQFPTADKIIKFAGLDVRVYQSGTIEKHGAIRKRGSPLLRYALFQAAEKARIHCPEIAEFYSKKKSEGKHPICALTHTARKILRIVWALLKTGQNYSQSISD

SEQ ID NO: 130488 - protein, 407 aa, unidentified
MINSTNTYPIHPKMTRTYAGVDSHRDSHTIVILNCFHERLGEIRVGSTPREFANFIKQAKKYLQKGTTWAIGFEDVSAYGRAFVKYLVDRGFHVKHVDASKVATERGQVLHKTDSYDAECACRVLINQFDKLPDANPQDKYWILGGLVTRRNAITKINVMVKNSLHTAVAENYPHYKKFFSRLTTDSALAFYEQYPAPHHLDNVTVELLAEFLHSASKGRLSATKADLILTTVKRDKVEQVEYQDTKDFTVRSLVRQVKNNLSELDAIDEEIEKILTNFNYPLTSIKGIDSLTAAKLISEIGDINRFKNAKALAKYSGVAPVTFASGMSKLEMANARGNRKLNEIFYRIALTSVMPIGTNKVLLNPIFYDYYMKKISEGKLKNQALKCVQRRLVNIIYSVMVRQEVV

SEQ ID NO: 130489 - protein, 345 aa, unidentified
MTIVKTRAITGGVDTHADVHVAAALDPIGGLLGVREFPATAAGYAGLLGWLGGFGTIALAGIEGTGSYGAGLARHVTAAGIRVVEVDRSDRQDRRRQGKSDPLDAVSAARAAQSGRARGAPKGRDGAVEAIRALTADGRSARSERVQTINQARALVLTGPDDLRIRFARHTAAGLVSGLASLRPRPGDVVGYATRIALREPGRRAEFPGAQLERLDELIGPLVAARAPGLLALHGVGPDTAALLLVAAGDHPERLRPEAAWAHLRAVSPLQASSGKVTRYRLNPGGDRQANHALWRIVLTRLSAHPPTLIYVERRTKEGKSKKEIIRCLKRYVAREVYRHLRAAG

SEQ ID NO: 130490 - protein, 327 aa, unidentified
MTSAIGIDISKDYFDVAYKRGRQIVGEERFRNNEAGFAAFGKWVKNQQDQTDVVVMEATGVYGDDLAEWLYARDYAVSVVNPFQIKAYGQAQLSRAKTDKADARLIADFGCTQVLLPWKAPSPERRELRSMIRYRTSLVELIQEERQRLEASSSESVYGHITTHLSHLETTKKTLEAQIKAHVQAHPPLAEVVILLTTICGVADLTAATLVAEIDIDRFDAAKELVAFMGLNPSINQSGKRAKTATPISKMGHAHLRHALYMPTQSAKQHNKPVRALYRRLVDDKGKHKKLATVAAMRKLVHIIYGVWKSGQPFDPDYEVRLASATT

SEQ ID NO: 130491 - protein, 419 aa, unidentified
MSFKILKFNCCGLDVHKTWIYACIGITDPNNRTEYKQARFSSFTKGLQELCDWLAKYNCTDVCMESTGKYWIPVFNILEKNNIWVTLSHPKYTKPQKGNKTDRKDAKWICDLYMCGMVKPSFIPPADIRELRDLVRYRFKLTCMITGEKNRVHNCLTVSNLKLDDVFSDIFGKSSRSITEQILQHPGETFDVAPFVHSRCKTPIEEIQAAVDGAISAEQAVKLRQCLNHIDELEMHKAEIEREILRLSDKYEEVLNLIRTVPGFDKNPMTAIQVLSEIGGDMSVFPTAKNLVSWAGCCPRNDQSNHKIKSTRISRAGSYFKPVLVQIANALIKSKKHPEFTTRYRRIKARRGHKKAIIAICRMILTAIWHILTDLKPYTPEGFLESRPVNNSKVLTTSQALNLLKQRGYIIKDDAISVT

SEQ ID NO: 130492 - protein, 387 aa, unidentified
MQKPHDNSKASPAAFMQDNTLIAVIELSLSNWLVAGLIPGVSREPLKKLEPNPEDLLKLLHGWRDEAIKAGRPITRIAVAYETGRDSFWLARWLRERGIDAHVIHATSVTVSREHRRAKTDRLDTAMLKRGFLGWLRGERGHCTVAIVPTMEEEDAKRPHREREGLVHEQTRAVNRMKSALIQFGVRNFNPKLRKASVKLETVRTPEGKSLPPNTIAALRRDMERLKIIKEQIKAIEQARLQQFEQKPEALANRMVYLLVRIYGLGLETADLLAHELLSRTLRDRKAVARYAGLTGSPDESGSKRREKGLSRSGNARVRKIMIQLAWRMVKFQPDSALVQWFKQRTENAKGSRKPMIVALARKLIIALWRYANDGVIPEGFRQHSAA

SEQ ID NO: 130493 - protein, 424 aa, unidentified
MGNPWVAVPPGCAPQPVRRFGTCTVDLDALADWLIACGVTTVAMASTGVYWIPLFELLEARGVQVLLIDPRQAKHVPGRPKTDRLDCQWLQRLHAYGLLAGAFRPADQGCVLRGYLRHRQMLLTYAAHPMQPMHKALEQMHLKLTQVVSEITGVTGMAILKAIIAGERDPQHLAQLRNPHCHHPEDDIAKALQGTWRAEHLFALRQAVELYAFYHQQITQCDQQINAHLETFGDKSAGQPLPPKARRHKKTNEPRFDARTPLYRMAGVDLTTIEGIEEGTALVLLSEIGTDMTRWPSVKHFCSWLGLCPQHKISGGKVLARRVRPGAHRVTVALRLAARSLHHSQSALGAFFRRMKARLGTPKAITAAAHQLARLVSHLLKHGSAYVQQGLESYEAQYHERKVKTMAKQAKALGYTLVPLVAQG

SEQ ID NO: 130494 - protein, 343 aa, unidentified
MQVSTIGVDLAKNVFQVHGVDSEGKVVITRQLRRKQVIEFFSKIPACLVGMEACGTAHHWAREISKLGHTVRLMPPSYVKGYVKRSKNDAADAAAICEAVTRPSMRFVSIKSADQQALLMLHRTRDLLIRQRTQLINALRAHLAEFGLVAETGREGLAQLAEIVTDESNRDALPPAMKQALQAIIDQLAALELQIGALDRAIHAHHRVNDMSCRLETVPGIGVIGATAIASTVTDPSNFKSGRDFAAWVGLVPRQHSTGGKERLGGISKQGDRYLRRLLVSGATAVVRNARQHPQKHPWIMRLLARKPAKLVAVAVANKMARIAWAIMAKGGYYRAPELAAAA

SEQ ID NO: 130495 - protein, 410 aa, unidentified
MTKIIVAQDAPVLVAIDIAKARHEVLIAMPDKKRRRRLTVLNELADFNRLVTVLKEYGRPVRVAFEATGNYHRALAYHLATAGFEVKLVSSVALARTREALNNSWDKNDPKDAQVILHMMEIGSEQYYHDPLVCGTNDIQELSKTHDIVSKSKTELWHRVLTHYLPLYFPEVDRFHRSSRSDWFFAFLERYPSPHFITAMGKDAFTADAWDVIGRKVAKERLLADIYETAKSSVGLPVAPDSDAIRMFRLVLGEGRSLIAQRNQIEDRAIALLKDLPDYQLLTSIPGIGPINALTILAEAGDLRRFGHHRQFLKFCGIDLATIQSGTFRGQTKLSKYGNARLRRTLWMAGQVAILQRTNSFRDKFERYIAKDRHNTHLRRKAYTAIAAKMARTVHGIIKHGEPYRPFFEG

SEQ ID NO: 130496 - protein, 532 aa, unidentified
MPPNDFYIGSEYKRRGSLTKEIGALPIRWEIKEPKGSVQTPRDKDLHHSVFARLLLASLQAGRQGLVAIIPRHLLRKNEDILISTTVERRISMKSVQLQHKRSLINGKIIIGIDPAKTKHQAAVIDTHGVQLGKSFSFDVSLDGYTKILWQKLTQILPTYGPDSTAFAIETSCNLWLTLAFYLHHEGYHVLLVSPLTTYHSRPMASHDFSRTDPKDAFLVASNARQGFFDLYEDFPPLSNAMHRLTITYSKLRKELAQNRARLRASLEQIFPEFLEIVEPDTQTALYLLKRYLFPCDFLDIDLASEANAILAISRKQCGLQTLLQLRKAAHHSIGVLKSQEEAIAERLSVNCWLALIESLSAQMQTVFTALADYAARLPEFTIVRSLKGISDLTAALFLGELRDIHRFSHYKQIEKKAGFNLRLNQSGQYVGARHISHIGSKRLSWLLYTMTEETARWVPEIRAKYLRRQLHRRNHRKSVVASIPQLLKLIMVLVKEQREYELHPDSVIQMQALENQYSQLKVQQNKIQQAA

SEQ ID NO: 130497 - protein, 349 aa, unidentified
MRFYTKQHQFYCGVDLHANAMYVCILNGGGEIVVHRNIPTRPKVFLRLIKPYRDNLVVGCECMFTWYWLADLCAKEGIDFALGHALYMRAIHGGKAKNDRIDSHKIAVLLRGGSFPLAYTYPRPMRAARDLLRRRNHLARKRAELYAHIQNTASQYNLGEPLGRIAKPSERGDLAARFADPVVRKMVEVDLSVIEHYEKLLDSLERQLEKIATGHDPVSLALLKSIPGVGKILGMVMLYEIEDISRFPREQNFASYCRLVKPAKQSNGKSYGHSGKKIGNGHLRWAFGEAVVLMLKGNPNAQRVLQKLSSKHGKGKALAILAHRLGRAVYYMLKNQVPFDQERFLRKVA

SEQ ID NO: 130498 - protein, 346 aa, unidentified
MMIIGCDFHPSWQQVSWVDSETGEAGEQKLVHASGDARRFYQALAAPVLIGMEATGNSQWFVELVEDLGHEIWIGDAAQIRASYVRKQKTDKRDAGHILKLVVEGRFPRLWAPDREQRDLRQLVLHRHKLVEIRSRVKNELQHLAMNKGMQKKRTLWSQAGQQMLRALPLKPWAACRREDLLGLLQMLNQQISQLDAAVQKAAEENPGSKLLMTQPGVGPNTALAFVLTIGDVSRFRRGKQIASYLGLIPREESSGGRQKLGAISKQGNRMLRSLLVEAAQNAVRFDPGFRKQYLHRCHQKPKGVAKVAAARKLAVRLYWMLRTQTGYPEIVHIESSPRVPLVGAS

SEQ ID NO: 130499 - protein, 383 aa, unidentified
MNHYIGLDVSMKQTSICIVDEKGIIVFEKDVNTDPQIIYDTINGTSLDIKLAGLESGSLSHWLVDNLGKLGLPIICVCSRKMSAILSITINKTDKNDARGIASALRGGHYRQVHHKSLHAVELSTLMGARRSLVNQRTNSMNTIRGLFKSYGIIIGIANTAIFPSKVELLLEKLSKDAQIGLRSLLKAFIGINQEVLVLDKIIVKITKDDPVVKRLTTMPGVGPITALTFKMEIDDPHRFKKSRSVGAYIGVTPTQYSSGETHRQGKISKCGSSELRYLLAEGATTVIFRTKGWNKDKAWAFKIMKKHGFGKARMALARKMAVKLHRMWVDEKDYQAIDIMPEEIKSLEKAKKDRKRSKNKTDVAKITNEAKSVKAKMNIKAA

SEQ ID NO: 130500 - protein, 338 aa, unidentified
MLTQQHFVGIDVSKAWLDVFVRTSKKHFQTSNDEQGFNWMIRRIEAEGIPSKEVLYCFENTGLYSTSLARFMKNKSLSFVVAHPLDVKYSAGATRGKSDKTDAIRLADYAYKKREELKPAKASTQATDRLRVLFALRQQLVKQRAGLIAARGEYTSVLKLNANDAVIEIQSVLITELTKQINRINHEIQMTIEADEALSLNYKLLISVVGIGPVVATAMLMYTDNFTKFSTARKFCSYCGFTPYDHQSGSSIQRRRKTSQLANKEMKSLIDRGALSAIEHDPDMKAYYQRKCADGKEKRVVINAVRCKIVYRAFSVIKKQRKYIKSSANYQLQLKKAA

SEQ ID NO: 130501 - protein, 356 aa, unidentified
MRFYDRQHRFYAGVDLHARTMHLCVLDATGTVVCDVNLPCRPDAFLAAIAPFRADLIIGVECMFAWYWLSDLCAKEQLSFLVGHALYMKAIHGGKAKNDQIDAHKIARLLRGGNFPLAYAYPKGMRETRDLLRRRTYFVRQRAALFTHLQILNSQYNLPPLAKKLSFAANRQEMDLAARFADKSVRQNASVNLAVINCLDEQIAALELYLSRTAKVDDVQTYHRLQTIPGVGKVLALVLLYEIHDVRRFATVGQFLSYCRLVRCQHESAGKVLGSGGRKIGNAHLRWVFGEAACLFLRSSERAKLWKQRQAKKRGEGKALAILAARLGRAVYHLWRKREAFDEDRFWQGSGVTAKA

SEQ ID NO: 130502 - protein, 367 aa, unidentified
MRQQTSAASETLIKGRTIIDFTGKTIYVGIDVHQIDYQVAKVIDGICLGNHRMKADDRELIEHLRSRYPGAAFKCVYESCAWGFTLQRQLHRAGMDCIVVHAADVSTTDKEKRRKTDKVDALKLARDHEAKQLKGIHVPDEDIQKDRNLIRFRKKLVGDLSRSKNRLKSLLKYQGIDIPVQFGKGCWSYKFMEWIEQEAKKDPLLKETLLLMLEEVRSLRQLLLKTERKLTELMKCRYEQRVRLAMSVPGIGRTLAMLYVLEIGDVSRFKGFDALTSLVGFCPDTHSSGDTERDRGITTRRHKQLRSGLLQAAWRAIRIDPALLEAYEQLTKRMNNKQAIIRIARKLLRRMRAVLLSGVPYQNGVTA

SEQ ID NO: 130503 - protein, 311 aa, unidentified
MTSDNYVGIDVSKRRLEVCVNAEGECRDIGNDPDGMRTLVEWMQVLQPVLIVIEATGGYERKSAKALREAGYAVAVVNPTRVRRLAEALGVLAKTDKIDARMITQFAMMIKPASNGQQTPLEERLAGAVERRRQILVMLTAEKNRLSTCPEWIREEIQEHIDWLEQRVDNLDEEIQVLIRLSPEWQARAEIIDSMPGVGPITAATMVAELPELGQINRQEIAALVGVAPFNKDSGPKKGKRRIKGGRGSVRRTLYMAALSASQHNPVIRAFYQSLLARGKEKKVALTACMRKMLVIINAMVRKGEVWQFSP

SEQ ID NO: 130504 - protein, 308 aa, unidentified
MEAQRKALSFKGQNIYIGIDVHLKSWSVTLMSEATQLKRFSQSPDPDALYAHLVRNYPEAEYHSVYEAGFCGFWIHYRLVGLGIHNIVVNPSDVPTTTSEKLRKTDAVDSAKLARSLRAGELKGIYVPGSESLETRSLIRLRDSITKDQTRLKNRIKSHLRYLGIEIPEEFSGPGRCWNRRFVVWLKGAETGTAYGRQTLDFLVSQYEALRGQRLEMLRAVRALSRTERFEKPLENLMTVPGIGQLTGMSLLSEIDDIRRFKSADQLAAFIGMIPMCHSSGEREGVGDITVRRSGGSGPSLSKPHGWR

SEQ ID NO: 130505 - protein, 389 aa, unidentified
MFFCGIDVAKHKHVALVVDEKGTVVKPAFAFANDRQGFDALLGVLASLGQPVSVGMEATGHYWLALYDELTRQGYPVSVLNPLQIAAYRRSGIRKVKSDTVDAFWIADYVRIANPATTTQDIPTLLQLRELSRFRFGLTEQIGDIKRQILAVLDRVFPEYETLFSTVFLKSSRELLKEVTTADEIASFDLAELSRILYTNSRGRFGTEKAVAIQEAAQRSVGVGFLADAIRIKMRCLLEQIDLLEQQRAQLDDELAALMAQIPQFITSIPGVGPVTGAAILAEVGDVHRFERVEQLVAYAGIDPSVYQTGQFQASQAHMSKRGSPYLRHALWLAASMAIQHDDELRAYYQARRAAGKPHGTVLGAICRKLLARIYIILKEQRPYVIRDS

SEQ ID NO: 130506 - protein, 310 aa, unidentified
MSEKYELEVGVDVAKRELCASIGTRITSFANSPAGIKALFATIKKAGGNARITCEATGSYQDLLVRSCLEKGFPISQCDARQIKHYIMSFGQRAKTDPIDAGYIAAFAKDRSPATLGKEWVRQLDMRELKRRQDFLVKQCAQCKTSLDSYQDASIKAEIRREIKAKEKVIASYQLKLVKLVDADPVLKKKRELMMSVVGIGERTSLALLMLLPELGTTNRRKICSLAGVAPMHKSSGLMDAPRTVTGGGRKKVRTALYMASVSAIRHNPHVREFYLGLKSRGKKGKAIVMAVARKLLIHLNGLLEKQAAQ

SEQ ID NO: 130507 - protein, 350 aa, unidentified
MKRTTIGLDIAKRVFQAHAVDAQSGEVIRTKLGRTEVLHHFAQLAPSVIAIEACGGAQYWARELAKLGHEVKLIGAQFVRPFVKTNKNDAADAQAIWTAAQQPEMRAVAVKTEEQQAVLGLHAIRERLKKNRTAAVNQIHGLMGEFGVELPKGWRTMLPKAVAALDDATSIVPSLLRPQLRRQIEEIRSFTAQMNEVERQIASWQHRQQDCERIAAIPGVGPLTASATVATIGDARTFRSGRQFAAFLGLVPRQSGTGGRVQLLGISKRGDTYLRTLLIHGARSVISRVNGATDPNTWLGRVLQRRHRNVAAVALANKMARQIWALLAHQRQYESGRGVGASGSTVTAAV

SEQ ID NO: 130508 - protein, 345 aa, unidentified
MPIVGGLDIHRKQITFDYLDTLTGEVKRGQIAPADRAHLRAWLARFAGRDDAAFALEGCTGWRYVAEELAAAGVTAHVAEPADTAFARGRKRHAKTDKTDSRHLRVLLAEGRLPECWIPPSHILECRALLETYHDLRREHTAWVERLHAVFFHQGAPRLGEGALRTGCSLAALRQAAAVHLSPAGQLQVATALDMLAALEAGMDILRGQLLHAARHLVGARALQARLYGVGPVGGLAMTCWLGGAGRFSSSRKAVRFTGLDVTVYSSDGKRSPGHLSRQGPEILRWVAYEAGKTHARAGAPGYGYYAAVKERKDGKIAALSQARRIVRQAWHILDELGDDALAAA

SEQ ID NO: 130509 - protein, 366 aa, unidentified
MEKYKFVGLDVHKATIAVSVAEADGGEVRYFGEIDNTPEAVVKLVRQLKKGDATPKFCYEAGPCGYVLYRQLKGLGLECLVVAPSLIPTKAGDRVKTDRRDSLNLARLYRAGELTAVWVPDGAQEALRDLTRAREDMKHAEKQIKQRLLAFLLRHGKRYGGETNWTKMHFQWFETVKFEHPVQQIVFQEYVDTVKAMTKRVEGFDDQIGTNAAASVFWPVIEGLMALRGISLLAATIVMVEIGDLRRFASAPQLMAYLGVVPSEYSSGATKTRGAITKTGNGHVRRILVEAAWTYRHPARKTEYLQRRAKHAPDHIQEIAWDAQKRLCGRYQLLQTKGKLKQKVCTAIARELAGFIWAIGQAIPQQ

SEQ ID NO: 130510 - protein, 313 aa, unidentified
MKAVPSNVFIGVDVSKERLDVAVAPSGESMSFANSEDGIALLADFVKPRNPELVLFEATGGWEMNAVNQLATHRLPLVVLNPRHVRDFAKATGQLAKTDAIDARILARFGQAVRPEVRSLKPLELRKLDALNTRRRQIVEMLTAEQNRLVSAPEWVRPDIEELIAILKKRLAAINRDLNKLIRKSPLWREKDKILQSFPGVGPVTASTIIAALPELGSLNRRQIASLVGVAPLNCDSGTHKGKRKIWGGRADIRSVLYMCAMTAARCNPVIRPFYQKLLRAGKPNKVARTACMRRVLVILNAMMRSHTCWQPT

SEQ ID NO: 130511 - protein, 380 aa, unidentified
MNRLLRYSVGTDISKDKFDACISSIDDLQQVTIKASRTFKNNPEGFEDFLTWVKRHYKQGLPISYIMEATGVYYEKLAIFLSNNKCYVSVVLPGKSKHYIKSIGLKTKNDKIDSKGLSRMGAEQRLDQWKPYSKSIYRLRSLTRQNESLNKQKSIYTNQLHAIEHSGYVNKTVVKQIKQFVNLIDKQLAEVAQEIEKTINQDIDIRDKVKKICKVKGLGILTVATVIAETNGFILFKNQRQLVSYAGYDVIENTSGNHIGKTKISKKGNSHIRRVLHMPAFSVVKYEPHYKGLYERVFDRTRIKMKGYVAVQKKLLVLIYTLWKKNEEYDPNYNKTSGNDEPKSLFSLDFEKIEKKVPTFAGTQDELPCNESPEVLFSLP

SEQ ID NO: 130512 - protein, 349 aa, unidentified
MKPEALMKHIGMDVHSTTTQISVISDRGREIKRSSVLTQEADLVAFLDGVPGPKQVALEESQMADFVTRIVEPHVTKVIRCLPQHNRLISESEKKCDREDAKVLAELLYLGKLKSVHHAPLGYRQLREGVRAYCIASRDLTRAKNRLKAFYLFNGVHCVGEKVYSQRHRGKWMEKIAQGSGNLKLLQRQYAQMDFYRDNKTEHVRILKELAKRFRQDVRCLKSYPGVGFVGACTFVAYLEDGWRLKNKRRLWQYCGVGMRFHESNARGHRSASRKGNRLVKNAVMTAAASIASRRNADNALSQMWRSGLEAGVEPDRLKRNLARKVAVLVQRSLRFKEEYDDDRVVTTQ

SEQ ID NO: 130513 - protein, 349 aa, unidentified
MKKTGMEKLEAITGKTLIGGIDVAKKVHWIRFVDYRGIALTKAIRFENNRAGFEHIVAETERLRKKHGMEDVVIGMEPTGPYWKALAWRLKNLGLRVVTVNPHHTKQAKMLDDNSQTKNDPKDALVVARLIKDGRYFEPYLPEDVYGELRVTSNARIALVRRMNGIKNRVIGILDEYFPEYTTVFKCPLKGKASVQLLKSCPFPAHILALGGEGVLEEVKKAVKKTVGRKKVLALLEAARDSVGVGYGLESARMQMRLLIKELEFLGEQLAEVETRMKELLEMTDYADLLLGIDGVGVVSTASFLGEVGDPMRFDSPRQISRFAGYNLVENSSGQSKSAPASQSEAVSN

SEQ ID NO: 130514 - protein, 297 aa, unidentified
MSYDVKYIGMDVHKEAIVIAVLNEGGKLVMESVIETKASSILQFLHGLRGELHVTWEEGTWAAWLYDLLQPQVQHIVVCNPRRNAFLKEGSKSDKVDARKLAELLRTGMLRPVYHGENGLRTLRELGRSYQTISKDLTRVMNRLKALYRGWGIPCAGTQVYAPRYREAWLNKIPQAGVRRRAELLYQQLDGLQGLRRNLRPELLAESRKHKAAKLLRQIPCIGPIRAARLLALMQTPHRFRSKRQLWTYSGLGIETHDSAQYRFVSGQLQRAKKPQQIRGLNRNHNHEMKEIFKSVI

SEQ ID NO: 130515 - protein, 343 aa, unidentified
MTHYVGLDVSMKETKLHVLDEAGQRVWRGRCATEPTAIAAAVRRYAPAAVRIGLETGPLTTWLWTALTAEGLPMVCLDARHAKRALDMKVNKTDANDAEGLAHLVRAGWYREVRVKSRNAMLAKALLGARSQLLSMSLALENQIRGILKTFGRIVPKGAGGLFEKNVRALITDDAAIAAVIMPLLQARGMARSKCAALDRRLIGSVQADVTCRRLMTMPGVGPLTAVAYVAALEKPDTFKRSRAVGAWLGLTPRRFQSGEVDYDGHISRRGDRQLRALLYEAAAVLLTRVRKESALRRSGLMLWKRLGFKRAATALARRMAVVLHAMWKSGTPFNPTLGAATP

SEQ ID NO: 130516 - protein, 427 aa, unidentified
MSERKSLEVRVSVDVGSRRHSVAIGLSDGQVLEEFEIAHRPEGFQEFFSRIARHEKVHGCEVAVAMEGYNGWARPLDSLVRQHGYRLYNINNLKLARFKEIFPGAAKKDRIDARKGLELFQLRDHLALAKDVLQEVTGTPKENEILKRVTRRRRRLVNERVRVVNNLQADLHAVCPGLLEMTSDAGNQWFLNFLVSADTVPQLARLRKSTLLKIRAVGRKYAGLIAQWQKQAHFSDEAEWVSEMIQEDARRCLELDEKIKTLEIKIKEIARNSTMATLLSSIPGFGAVCTSELAGEIGTVDRFSKEASLALYLGMSHLDNSSGKYQGTKQAKHVNTRAKAAMMTAIDRHRKYVPQSQKYYEKKRAEGKSHNQAIRALGRHLCRIIFTMLKEQRAYQLRPETGDTQGRVSSVACVKTALQRSKIFVNN

SEQ ID NO: 130517 - protein, 341 aa, unidentified
MNEITLIGIDLRKHVFHLHAQDAKGHEVFRKKLSRVQLLPFFSNLKAVTIVMEACAGSHWLARKLNAMGHEAKLISAQYVRPFVKSNKNDYIDAEAICEAACRPSMRFVEPRTEAQQLLAAMHRAREGLVAERTATINRIHGILLEFGIVVPLSKATLRRLPDVLAVHDLPPRLIQLVHRLHAHYRYLDQQVDDLERDRTVQLREDENAARLLSIPGIGTITASLLASEVGNVAQFEGSRNFAASIGLVPRQHSTGGRSVLCGISKRGDKHLRHLLVQGARAVIQRVEKRTDRLGEWIRSMLTRRHSNVVACAVANKLARIAWAVLTRHTTYDPARLKLAD

SEQ ID NO: 130518 - protein, 453 aa, unidentified
MEHFVGLDVATLKTAVCVVDREGEIVFETEVETDPLIIAEILKPWARTLRGLGHEAGALAPWLHTGLLEAGLPTSCLETRHVRASLGAQRNKTDRNDARGIAQLMRTGWFSAIHMKSRDCYRIRLILVHRRTLKRKFLDIENTIRHSLKVFGIKLGLVSRGKLGDAVMAAVAGDTLLEGLCGAMLAAREALWAQVERLDRLVGELAGGDEVCRRFMGIPGVGPITALTFKTAIETPGRFTKSRDVGAYLGLTPRRWQSGDSDGHNGAISRRGDGEVRTLLYEAAQSMLTRSGTWSTLKAWGMAQAKRSGHKKAVTAMARRLASIMHAMWRDGTVFEFAPGKWAPDWEPSPSNPGKPKRDRSKPQKNDDLSADEKPPKAPRQRPPQGVTPQIIALVQSSKRTLPARQLGKIKAALAALDPKLRDEAIAAASKPMTLKRRGKPPKAGPAITAPTA

SEQ ID NO: 130519 - protein, 380 aa, unidentified
MPQALKKERSPAVSQSKYIWVGLDVHIDSITAAILENDSNEAKVLKMSGDLTKVRRLFRRLAEKGIVRGCYEASCAGYVLHRVLRRDGFHCDIIAPSLIPRKPGDRRKTDRLDAVMLVQLYRSGHLTPIHIPTEDQEAVRHLLRLRYSYQEQCKSTKRRISSILLSHGLVYREGKSLWRGKHKQWLSKLRRELQGPLQTALSAELEHLEYMETQRNALDTEIDRYSQQPPYRNYIEPLCCLRGVKTLTAMTLLSEIDDINRFHSPRALMAYFGLVPTEHSSGDRERKGSITKAGSTYARRVLVEAAWNNHHRAGADLLLNRRRQGQPPEVVAIAIKAQHRLSRRFYYLSHRKHLHVAITAVARELCGFVWAIMKAAPQTN

SEQ ID NO: 130520 - protein, 438 aa, unidentified
MSNNVIFNFDELFISVGIDVGADFSWMSIVLPNQQFVGKPYKILHNSMDSLASAVSKIKEAEEMYSLESRIFLESTGIYHYPLFCYLRDKGFNCSVINPIITKNSTNINIRKVHNDRFDSKKAALVGLKPDLKVSLMPSDLALNCRNLCREYYDLMDSRNAYVNKLIDELRMVFPQYLGIFSKVTIDTSLILLETYTSPSAFINADKQEIIDLIRSTARFGLTYACNKYNAIIQAANDADEFGYILDSNIKRIRLYIGFIRKYDEEINSILESMHELAAANEDTDFVKQIRLIETFRGAGFLSAMSLMGEIGDFSAFSKPKQLFAYFGLDPAVKQSGKFEGTKIQMSKRGSAIARRVIHTLTLQSISASRTGESKNPVLLDYYLKKCESKPKLVAMGAVSHKVCNMIFAILRDSKPFEIITPQEHIKKYNAAKCDVAA

SEQ ID NO: 130521 - protein, 391 aa, unidentified
MVCVGIDVAKDKHDCCILDSDGTIRADCITIPNNMDGFKQLLQTIRDCTKRSDKIKVGLEATGHYSYNILGFLLDNDLAVYVMNPLHTNLYRKSLSLRKTKTDRVDARTIATMLLSDVDLKSYTDTAYHNEELKSLTRYRFDKVRERAKLKQSVSRLVTILFPELEKLVPSLHIASVYALLSEYPGAKQISEIHLTKLTNLLVTASKGRYGKDKAIQIRDAARTSIGSVMPAKFLELKHTIKLIRELTSEIDEIEVSIQKIMDELNPPILSIPGVGIQSAAMILAEIGDFSNFESPDKVLAYAGCSPSTYQSGKLTNCYAHMEKRGSRYLRYALYNATKYVCYWNPVFAEYLAKKRAEGKHYNVALSHATKKLVRLIYALQKSGKAYLTAA

SEQ ID NO: 130522 - protein, 348 aa, unidentified
MDHYAGIDVSLECSSVCVVDASGKIVREGKVASEPAALIVWFAAPGFGLARIGLEAGPLSQWLYAAMRQAGLAVELLETRHVRDAFKAMPVKSDRNDARGIAQLMRLGWFKPVHCKSIPAQETRAMLTARKLVQAKLRDVENSLRGILRGFGLKVGHTTSRSFAGRLRELVAGHPALETIADALLAVHAVLLREFNGFEKRVRTMARAHGQAKLLMTTPAVGPIVALTYAAAVDDPTRFKSSKAAGPHFGLTPKKHQSGQTDRTGRISKIGDASVREALYQAAHVMLTKPVRGCTQLKSWAMRLAKRAGMRKAKVALARKLAVILHRMLADGQAFNPAASAKTMTAAA

SEQ ID NO: 130523 - protein, 300 aa, unidentified
MALLPDKTQHRVSNDAAGWAELEAWLPPDGSVMVIGIEASGGYERGVTEALRAAGYRVVVLDAQRVRLYAHALGKRAKSDTIDAEVIARFVATVGSDSLTRSAERRRLGELVDYRQGLIEERTRLANASAQVSEPTLKKMTQRRLAQIERDVTRLEECMAALIAETPELAATAALLDTVKGVGPILIATLLAFLPELGQLTRRQIAALVGVAPYDRDSGTMRGKRHIAGGRERPRRVLYMATMSAATLHNSVLKSFYRRLLAKGKLPKVALVACMRKLLTILNAMIAHGTAWRQPQRIAA

SEQ ID NO: 130524 - protein, 339 aa, unidentified
MGQVCVIGLDLAKRYFQVHGVDTNGKVVVRKRLTREQVLSYFAQLPRCVVGMEACGGAHHWARELAKLGHEPRLMAPHYVKPYVKTNKNDAADAEAICEAVSRPSMRFVAVKSQEQQDVLALHRVRARLVRGRTALVNEIRGLLYESGVVLPKGIGHARTALPQLTEDLENVLTPLQRDLFSDLYTELVDADERIAKLDGQLKTVASTCPACQRLREIPGVGVLASTALVATVGDARCFKNGRELAAWLGIVPRQHSSGGKERLLGISKRGDKYLRWLLIHGGRAVLRFSAGKDDARSHWITRLAERRGKLRAAVAQANKIARTAWVILARGEEYQVAA

SEQ ID NO: 130525 - protein, 410 aa, unidentified
MEVLYRRCCGLDVHKETVVACLRLVSDGQVTTELRTFQTTTADLLRLSEWLAINGCTHVAMEATGVYWKPVWHILDDGEFTLVLVNAAHVKNVPGRKTDVNDATWLAELLAHGLLRASFVPDTQTQEMRTLLRTRKQLVREQSSHVLRVQKTLEDANIKLDTVLSDVMGKSARAMIEALIAGETNPAKLASLADRRIKASPEELREALRGRVTKQHRFLLRLHLNQIDALAAAMATIDAQVEESLQPFRTAVELITSVPGIQRLSAQVIVSEIGIDMSRFPSDAHLISWACLCPRSDESAGKRRSNRTRKGSVWLKTTLVQCAWAAVKKKDSYLQAQFFRITARRGKKKAIIAVAAAMLTAIYHMLKDGTLYQDLGRNYFDRRSTDQQKKRLVKRLADLGYGVELTPLAA

SEQ ID NO: 130526 - protein, 457 aa, unidentified
MTGKNKPVQSRAMSPIHPRAAAIDVGAKMHVAAVGPDRASEPVRTFGTFTDDLNRLADWFQECGIETVAMESTGVYWIPVFEILEQRGFEVLLVNARDAKHVPGRKTDVSDAQWLQRLHEFGLLRASFLPKGEIAALRAYLRQRERLVELAASHIQHMQKALMQMNVQVHHVVSDIMGVTGMRILRAIVAGERDPGVLAANRDRRCHADVETIQRALTGNWRDEHLFALDQALALYDACQEKVAACDQKIEATLKRIEAQSAKPVGKLPPARSTKRQPNAVDFDVRTALHAVLGVDLTQIHGLGPYLALKLVGECGTDLSAWPNAKHFTSWLGLAPSNKISGGKVLSSRTRRSGNRAASLLRLAAVTVGRTDTALGAFFRRLSGRVGKAKAVTATARKIAVLFYNTLRHGMDYADPGASYYEERYRQRVLTNLERRAKSLGYVLQQADAAPAANGVS

SEQ ID NO: 130527 - protein, 596 aa, unidentified
MLPQQPSASQAPRRFGVGIDTSRYGHYAAFLNEELQPAAPELQFPESAAGYALLRQRLERLAQRHRPAHFVVRLDAAGQYADNLLHFLHGLAGPPADAPTALDPFSLAVSCGDPQRNKNYRAALFGGQKSDPIEARAAARFALTEKPTTDIPLSQELRSLRQVAGRLQAVVRQRTRLRNQFHHLLALTFPELALLTKDLAAGWVLELVHRYPTARRLAAATPTDLAHISYLPDRHVGPLLEHARASVASLDGATAAELVREQVRQLRDSSARQKRLENLLVAAYRALPQANHLEPLPGFGEVTAAVLTAFTVTIDRFASPGKYVAYFGVLPTEVASGVARDGQARAPRRWVRSRRGNDRVRRYLWRAARSAVRCNPAVRALYARVVAKHPQQKAVALGHAMRKLLHLAFAVWQSGRPFARDHYPWQTPAHVEGTDNGMSPARGTSDNGMSQEGQAAGHKPDAVPAAPGVTAACTDTVAEAAAVGEGTYLDFAHLKGQLPLARVLDQLGWTARLRGSGPQRRCACPLHRGDARGRTFSVNLDAGVWQCFAKECGRKGDVIDLWAAVQGLSLRAAALELVQTFGLEPAPRSGTEKRNG

SEQ ID NO: 130528 - protein, 386 aa, unidentified
MPQLNDLSRSLVVLEQDATLIAVIEMGQSNWLVAGIVPGVERSPLKKLAVDESALLKLLNRWREEAEKAGHRIERIAIAFEAGRDGFWLARWLRARGIEAHVIHASSVAVSREHRRAKTDRLDTELLKRAFLGWLRGERDHCKMVAIPTLAQEDAKRPNRERESLVGEQTRIVNRMKAALARLGIRGFNPKLKKAVERLDGLRTPEGEPIPPNTLAELKHDMERRRLVRSQIRDIEGTRLERLKQAPGDGPHVMVRLLARVVGVGVETADMLVQEVLSRNLRDRRAVARYGGLTGSPDESGKKRREKGLARSGNARVRRGMIQLAWRFLMFQKDSALAHWFYARTKNAPQTRKTMIVALARKLLIALWRLAREGAIPEGIVLRPAL

SEQ ID NO: 130529 - protein, 342 aa, unidentified
MQITTIGLDIAKNVFQIHGIDAKEKVVVRKQLRRSQVIAFFAPLPPCLVGMEACATAHYWARELRKLGHEVRLMPAKDVKAYLKRNKNDAADAEAICEAVRRPTMRFVQIKSAEQQGQLMQHRTRDVLIRQRTQIINALRAHMAELGIVAAQGDAGVSELRAIVADDRDERLPIDARASVIVLAAQLEALQTLIGSIEKRIKMQHRSNEASQRVETIPGIGVLGATAIVATVADPMIFRSGRDFAAWIGLVPRQDSTGGKQKLGPISKQGDRYLRRILVVGAIAVLRRARENPGKYPWLTQLLARRPFKVVAVALANKMARTAWALMAHGGTYRAPELAEAA

SEQ ID NO: 130530 - protein, 402 aa, unidentified
MKYCLAIDIAKGKSMVGLISEEGEIVLDLHEIAHSKSNLVNLHNQIQNLNLDNVSVIMESTSTYHYPILKFFKELNYDTILLNPIISKEHKKNLRKTKTDKTDCLNLASIYFKKEYNKQTNLSLVYSELQHFSRQIHNLQGNLVRYKNRFKQLVEMVFPEYEKLFKNKAFFSETGLTFISIYPHADLIVNKRIDALANTLGSVHNRHPNYYRKKAEIIKEAAKDSLTSVSVDSSVVYSIKQQSTLILDLQKEIEILKDMMIELAKTIDIFPIIQSIYGFGEYSTALFLAEVKDPRRFKNTKKLTASCGLDPTIIQSGKTINYHGPISKRGNKIARKVLFNIITNIIRNASKGTKNLNHPILVYYRKKRSEGKHHYACIIACTTKLLRIVYTMCINNTTFVIY

SEQ ID NO: 130531 - protein, 407 aa, unidentified
MNLSIGIDWSSQKHDAVILNEYGATIAAVSFPHTVDGFAYFDDVRRQTGVAAAECAVGMETHYSLLIDFLHDRAYGTVYVVPPRIVKNRRREASASSAHTDQTDAQLIATLVRQEPHLLQVWRPEGLLISQLRATVSERLFLVTESLRLGNRLASLLGRYYPAARIVFSDPLSQIALHFVQTYPTPQAATTLSYEQFVAFAKEHGYRRTSTLPRAYARLQTPQPVARPAAVAALWADAQQLAQLLLVLTQAKLATQKRLAALFAAHPDHELFASLPAVGETLAPSLLAKFGDDRERFPTAASVQALAGTCPVTMQSGKMRQVVFRHACDHEFRTIAQQWARIASQEMPWAAAYLGRHMQPQRTASQAYRRLANRLLNIAWTVWQTKTPYDEQRHMQDCAKRSRPKAA

SEQ ID NO: 130532 - protein, 342 aa, unidentified
MEHITTIGIDLAKSVFQVCGLNKARAIQFNRRVSRKKLIATILQYPNAQLAMEACGSAHYWYRTFSALGFKVRLIPAQHVKAFSRGNKSDKNDALAIAESVFRPDIHDAQPKTLEQQDIQTLLRIRTRIQQQRKSNVVQLRSFLSEYGIVLPQGITQYEEGIHGVLEDGSNELTPVARKAIAELAEEHRHLSARVNQLEKELKALYKQILIAQELTRIRGVGPITALSIYASIGLNSTFKNARQLSAWLGLVPKQHGTGGKMRLGPISKRGNQYLRTLLIHGARSVLNWSKHRDDYLSQWAKQVAERRGKHKANVALANRTARMIWVVLNKGADALPDFYQS

SEQ ID NO: 130533 - protein, 419 aa, unidentified
MGTASKKSFSAFIGIDWADAKHDVCIQAAGDERREFSRLSHKVEAIDEWAQSLYRRFGGPIAVALELSKGPLVYALQKYDFFVIFPVNPSSLAKYRETFTPSGAKDDPTDAEFVLDLILRHAEHFAPLKPQSVEMRTLVSLVEQRRGLVNDRVRTTNRLRNTLKQYYPQPLEWFDRIDTPLFCAFIERWPTLVQVKRARKTTLQSFFQQHNMRRTHLLKARLASIKAASPLTLDEAVITPHRLQALVLVDLLRATLAAIKRFDEAIAKLAPQHPDYELFSPLPGAGPSLAPRLLVAFGEQRDRFKNAAEVQKYVGIAPVTERSGKKHWVHWRWQCPTFLRQTFVEWAAQTINKSYWAGLYYYQQRAKGCSHQAAVRALAFKWIRILYRCWITRTPYDEAKYLKTLQQRGSPLLKIAQAA

SEQ ID NO: 130534 - protein, 403 aa, unidentified
MNAVGIDVSKGKSMVAIMRPFGEIVVSPFEIKHTSSDINSLIELIHSVDGESRIVMEHTGRYYEALAHELSAANLFVSAINPKLIKDFDNDSLRKVKSDKADSVKIARYALDKWQNLKQYSVMDELRIQLKTMNRQFGFYMKHKTAMKNNLIGILDQTYPGLNAYFDSPARSDGSQKWVDFAATYWHVDCVRKMSLYAFICHYQKWCKRKKYNFSQSKAEEIYGKAKELVPVLPKDEITKLIIKQAVEQLNNASATVEELRALMNETASKLPEYSIVMNMKGVGPSLGPQLMAEIGDVSRFTHKGAITAFAGVDPGVNESGTYEQRSVPTSKRGSSNLRKTLFQVMDVLIKTMPQDDPVYQFLDKKRAQGKPYYVYMTAGANKFLRIYYGRVKEYLATLPESN

SEQ ID NO: 130535 - protein, 351 aa, unidentified
MKKIIIGIDVSKEKCDATAIFAENGLLEVRKLDYTVFENRPSGFRNLLSWARKLMPDVTDDELLFVCETTGAYDRAMCDYLFEKGMDIWRESALQINRCSGVRRGKDDRTDSLMIAEYAMRHMDKMHLYESPDSRILELRAVFLYRRKLEQEKTSKLVRIKELEATAGRSKTLTFIMRDAKKSIRQLEKSIMECERRIRELINDDESMQRNYEHLDSVKGLGIVNITAFIIFTNNFRSFRTARQMATYWGVVSFRRVSGTSIDKRSDVRKLSNSMLKSYITQAAMHTIVKGGIYYEYYQRLIARGKTHSVALNNAKNKLIHLAMSLVANDMDYEENHELLRLQRMQNGNVM

SEQ ID NO: 130536 - protein, 319 aa, unidentified
MSKRVLGIDAAKKKLDVALMFDGKVLSKKFDNTPKGFKLLGGWLASLHIEQVHACLEATGTYSEAVAEYLHECGHRVSVVNPFRIKSFANSDLQRNKTDEADARTIADFCLTKDPEDWHPMPPEIKQLRDLTRRIEALERMLGVERNRLEMAPAATRPSIERMVDSLNKEIDAVRGLIKDHIDDHPDLKQQSELLQSIPGIGEKTAALLLGEIEFRSFESARAVAAHAGVTPRRSQSGSSLNRTRLSKLGNARIRKALYFPAVVAVRFNEIIKQFAQRLSRNGKTPMQIVCASMRKLLHIAFGVIKHNRPFDPELAFHI

SEQ ID NO: 130537 - protein, 366 aa, unidentified
MKTSITPIGTPVGVDVHKRRCKVVEFDHGDIKVRKPIANTREEWLEMLSELPPDAEIGLEVSTAGYYAMSVLEEAGWRERAHWVHPAGIDSNRRQKNDRLDAERLARKLAAHHLDPLPEAWFPPPEIRALRLRVRQRCWLALLRTQTKNHLQSLLQMHGLLLPGSDPFGAEGQAWLAQQKLPLPLTESIPQIQHLLKLLGEDLEISEQHLAAVRKQFPQLVLLQTIPGIGSLLGAVIWSEIGSIERFASAKALANNTGLVASYYDSGEVQVSGPITRQGSRWLRWALVTAANVAVQHRNPFADRYHRLRRKKKPNVAKAAVAHSLARCVYGVLKHGCPYGEDRWGRKVGALEQEARGSQRSTKTVP

SEQ ID NO: 130538 - protein, 431 aa, unidentified
MNESVADQPIGTPQVAAYVGIDWADQKHDVVLRSVDNPAKAEHQVIKSEINALNDWIAQMQERFGAKGKVIVCLEQSRGALIYHLMAYELFELYPINPSQLANYRKTFFSSGAKDDRPDADLLSELVMCHRDRLKAWKPDDQLTRELASLNEGRRNAVDRRTELANEIKSQLKLYFPVALQILENDITTALAADLLVQWPTLAELQKVSPGKLRKFFYGHNSRQEKKILERLALIKQAKPLTTDVAIIRPNALRVKLLAQQLKSLLPFIAEYERRIAELFGSHPDRFLFDNLPGAGPALAPRLLTAFGTDRDRFEVAGDLLSLSGIAPVRIASGKKTGKNASVHFRRACPKFLRQSFHEFGECSIRYCPWAQACYQAQRGRGKGHHAAVRAVTFKWIRILFACWKQRTPYDPQRYFQALQTRGSDYAQTTA

SEQ ID NO: 130539 - protein, 504 aa, unidentified
MAPGRRLNIGEAQRGTPLGESRGINPPGRPVFTNTGREGCDGMANEERTGRPEGLKPIDEGFPVLRADVAGIDIGSQQHWVCAPTPTGKGREVAVFAATTPGVEQLAAWLKDRGVTSVALESTGVYWIAPHEILEAHGFDVVLVDTRELGRVPGRNKSDRRDCEWIQRLHSCGLLRGAFRPVEQVCMLRTLVRDKGTLIAERADWIRRMQKTLDQMNVRVHRAVSDVDGATGMAILRAIVAGERDPHQLAALRDPRCRKSEVQIAEQLTGHWRDDHLFSLQQALKMYDALSETIAAYEREILRQLERMTNVDRRDDQAPPPTSPTKAKAIKKRGEDPLRHALYRISGVDLTTIDAVGVETVNVVLSEYGPNLSQFPTEKQCVSHVGLAPHTPTSGGKVVKKKKKPGSASARVGAALRMAATSMRHSQTALGAYYRQVARRGGADVAVFATARKLAQYIYRLLRWGQPYVDEGVAAYEKRYQLARAQRLAAAAKNLGYRLIPVEA

SEQ ID NO: 130540 - protein, 427 aa, unidentified
MPYRIAGIDVHKRMLAVVIADVAVEGDYEFESRQVGTSPGELRKLAEWLVEKEVEEAVMESTAQYWRPVWSELEETWMPRRREQEDASPMSGTLHLAQAQSNRGAAGRKRDFPDAERLVKRYTSGELTLSFVPEGEQRLWRTVMRRKYQVTCDRVQLHNRLECLLEEARIKLSSLVSDLLGQSARRMLQALADGETDPARLVALGDWRLRATREQLCDALGACKSLHPVYRQLLRMTLEELRLIEEQIKELDQQMAGLLIAHQDAVKRLAEVPGLGVDSAQQIIAEVGPSAATFPSAKQLASWVGACPGESESAGVSYSHRSPKGNRQMRRVLNQAANAAVKTKGSIFELLYRRLVVRLGHAQAIGAIAHRLCRLIWKILHQGVQYEERGPAVTRKRKQQRAAKMIRDLRSLGYRVEFVGSQPGSLS

SEQ ID NO: 130541 - protein, 326 aa, unidentified
MEHELHYIGIDTAKEKLDVDVLRPDGRHRTKKFANPTKGHDELVSWLKGHKIDHAHICIEATGTCMEPVAECPYDAGYIVSVINPALGKAFAQSEGLRNKTDTVDARMLAEFCRQKRPAAWEVPHPLERALRALVVRHQALTDMHTQELNRTETAREVQRPGIDAHLLWLEAELKRLEKQIKDLTDDDPDMKHRRKLLESIPGIGEKTSAVLLAYIGLKNRFAHARQFAAFAGLTPRLHESGSSVRGVSRMSKAGHVSLRRALYMPVMVAASKTEWGRAFRDRLAANGKKGKVIPGAMTRKLARVAYGVLKSGVPFDASRHNPVAA

SEQ ID NO: 130542 - protein, 414 aa, unidentified
MEVLYPRCAGLDVHKESVVACIRIASGGEVVTEVQTFNTTTASLVSLSEWLASNGCTHVAMEATGVYWKPVWHILSDSAFTLVLANAAHVKNVPGRKTDINDATWLADLLAHGLIRASFVPESETQDMRALLRTRKQLVREKASHIQRLQKTLEDANIKLDSVVADIVGKSGRAIIDALIAGDSDPAKLAALADTRIRSSQNKLREALSGRIRRHHRFMLNLHLQQINALDAAITEIDREVDVNLAPFRTGVELLTSIPGISTLSAQVILSEIGTDMSRLPTAGHLISWAGLCPGNDESAGKRRSTRLRKGAPWLKTTLVQCAWSASRKKASYTQAQFHRLRARRGAKKAVCAVAASILTAAYHMLKDGTQYRDLGPDHFNRRSKQQQTNRLLKRLADLGFAAELTPIPIAVSL

SEQ ID NO: 130543 - protein, 438 aa, unidentified
MLKINPLSTLYVGIDVSSKSNYVCALDFYKNKYINSSFANNQPGAEELAKKILECLKEHPDLNTIVAALESTSVYSIHIANFLSSCEELMHFKPYVFVLNPKCTANYKKSYIGLGKSDPIDAFVIADYARAGNIETEPWRGSQFLALKRLTRHRLHLVECMTREKTYLVSNLYLKFSELQMLEGDDQPFCDIYGATSSSVLTEYLSPEEIIDSSEEDLISFLAQKSRNRIKDISKTAELLRKAARDSYRLDKALYEPLNVSIASSFNCIETFKKEIKLIDIAIEREIRGLNPNAFIILQSIDGIGPVFAGGIVAEIGDISAFHSSDALAKYAGLMWKSNQSGDFDGEDTPMSKAGNRYLRYYLGEAANSMRKHNAEYGAYYRKKYNEVPKHQHKRALALTSRKFVRLVYGLLARNQLYSGVSLDTSIKDSNWSNLCFA

SEQ ID NO: 130544 - protein, 335 aa, unidentified
MYNYIGIDVSKATLQVYIPITDENISIENSTKALISLYSKLKKYYKKEIKNLVIIFEPTGSYSALLKRFCFEKSIYAFIINPRQSANFAKALENRSKSDIIDAKMLYKFHVMLSDDDIAIPIINSVQEELSETLTYYKFIQKQRVSFSNHLEALESKNGSNLIVKKLKSEIKHLREEEIKVIAIMKLLVISDDSMKQTFENISSIVDIGDKAAIVLMHLFITYPEANRQEITALSGLDAIENTSGTSIQRRTRISKKGSSIYRSVLFMAVLSSIQHNQYMKRFYERLKDNGKHSTVAQIAVMRKMILIAHSLFKNNVKFNDSTYEKNIGIYKNVA

SEQ ID NO: 130545 - protein, 430 aa, unidentified
MPYRIAGIDVHKKMLAVVASDVEIENEYQFERRMFGGNPEQLRSLAAWLLEQEVEEVVMESTAQYWKPVWEALERYWKPIREKREGARPRSGKLHLAQAQSNRGRRGRKRDFPDAERLVKRLVARELVLSFVPDSQQRLWRTVSRRKYQLTRDRVRLQNQVESLLEEAHIKLSSLVSDLLGVSARRMLKALAEGETDPTALAGLADQHLRATPEQLCDALGACTDLQPVYRRLLKMALEQLQFLEQQIGQLDQEMANLLSQHQNAVERLAEVPGLGVDSAQQIIAEVGPTAATFPSEKCLASWVGACPGDDESAGVNYNHRSPKGNRHMRRVLNQTANAAVKVKGSIFEIAYRRCVPRLGHNQAIGTIAHRQCRLIWLILHHGVRYEERGPAVSRRSKQARTAKMIRQLRRLGYRIESSTAQEDSAARVW

SEQ ID NO: 130546 - protein, 533 aa, unidentified
MKHRVLGLDLGIRAPSVAMVADTDGTIIGNAVRFELGIDELERVEAAALEGAKEGTKLHVVMEQTYPTSEYVTAFFLAREHKVSFAKPNQVKEFRKCLSPKVKTDDVDAYVMARLPWLDPKQLARTYVPPPEIRELKIQVSQRASMVKQLVDLKNQLIAYANAVWPGISRAFGDLDSAHARSFLREQMPKSIATLQVDELAELLKNRGQIQQSYAKRLASKLLAIAKRTLGLHQLLPEEQIESTRAHTIELVEMVEELELRLHTKEKRLDEAYLRCDPERLLMSIPGIAEKTAPTIFSYFGEPERFASTRKAQGFVGLFPETDASGTSDRKGTHITKNGPALLRRDLFLAADHFRRVDPHGAQMYHDLMVHRGKHHNSALCIIANRSLIPRILVVLREQRPYELQDLEGNSLTKPEARELAAQWKVTQEVRKRLRNRKTLAHERREESPYVTSEPKAPRNGQPSRPADRNPTTLPEAKDQLAEPNPETLSVTTDQLKMLVFKSLEQMLNTGGNVEEIRLQLKEEAANFFQKRA

SEQ ID NO: 130547 - protein, 435 aa, unidentified
MNYVDDIRLEQFLQMKKEIRGSEQYLIVGIDAAKEKHKAFFGTAQGKTLVKILVFDNTIEGFEKLDAYVERAKVQYSLSKVVFGIEPTANYHKPLAEHLVKCGRMVVLVGGAAVKNNRQLLNGRWDKNDDKDSANVADLIAQGKCLFYEYPIMTLRNVRILNALKRRLTKREHGISICIRNNIIAQYFPELDKHYGPAETLAVVRGCLDPSEIAGMEYDEFCRTVVPGKMTLAKERRVGAIWRVAVNSVGCTMGEAASYEAQVMVDSLKQIRQTIKEVDDKLEDVCLQFPEYTYLLSIPGFGPDVSAKVLGAIGNPHRFMSGKQVLRLAGLDLCAKRSGKTSNSATPVISKQGKADLRYGLYQAALSASTKNKHFVPYFTNKLVGRAKEKGIGTKMRVKLAAKLLIIAWTLMKKKECFDPKYLQQENQAARKAAA

SEQ ID NO: 130548 - protein, 347 aa, unidentified
MRFYTKQHPFYCGIDLHARTMYVCILSQDGEVRLHRNMKASPDALLKAIAPYRDDMVIAVECIFTWYWLADLCAQEGLPFVLGHALYMKAIHGGKTKNDTIDSQKIAVLLRGGMLPQAYVYPAAMRATRDLLRRRTHLMRKRAELLAHIQHTNSQYNLPEIGKKIAYKANRDGVAERFPEPAVQKSLEVDLALIGHDDQLLRDVELSILTTAKPHNAQTLYLLRTVPGIGAILSFVLLYEIHDITRFPRVQDFLSYCRLVKCTKESAGKRYGTSGTKIGNAHLKWAFSEAAVLFLRANPAGQKYLTKLEKKHGSGKALTLLGQKLGRTVYDMLQRQTAFDMGKLLNG

SEQ ID NO: 130549 - protein, 317 aa, unidentified
MEQGRFNTKVAGVDVGKGGLDVAVHGLEAQLQVANAPVGFNELIGWLRGQEVGRVGLEATGGYERGVRAALEAAGFEVVVHQPLEVRLYAKLKRRRAKNDKLDAALIAAATAQVEAVKAAQDPRLTELAERLTAYEQITDQAAELKTFLEHVTLKDIAADVRRQIAALTRLKAKLAGQVVAAIKAHPDLLARFRLLISLPGVGPIVAATLVVRMPELGAMRRGQAASLIGVAPFDRDSGQWKGLRFISGGRSRPRRMLYLAALQAKRCDPSLKAFADQLLKRGKPAKLAIVAVMRKLIEAANLVLGRGQPWVKQPAA

SEQ ID NO: 130550 - protein, 327 aa, unidentified
MTNFSNFVGIDVAKADFYACFDEQTESRKFNNTTLGINSFIRHLRKNNFQNTDTVIGLESTGSYHLRLCLQCSVVGFQTKVINPLIIKKQNQTNLRRVKNDQQDASLIRYCLTTGVGYVFEENKETLLLKSLVRQRNSLANMLLKNKRQQADVNYKEDCLKTKFNPVYQEIGAVLSQKIKELNKQLKAYRKSEQKLLQTIPGVGPITAVSFIAEVNDIKRFKQSKQLVAYVGLDSRVHQSGTSVRGKGYISKRGNKILRTRLYNAASVAVLHSNLFQRFFQKKRSEGKPYKVALVAVMHKMVLVIHSVWTNNKPFIDYTANNGKEAN

SEQ ID NO: 130551 - protein, 309 aa, unidentified
MVFVGVDVSARRLDVAIGSEVRQFPNPEGIPDLLRQLPSGAVVGLEATGVYGRPLAFALHRSGFRVYVLNPLAVKSYARSLLRRAKTDRADARLIARFLAERHADLEPYEPTGDVLYQVGLLVRFARGLVAQRVAALNRLHAWGYAWPDGLGLVRQVPDVLASLRREVEAMALSLLETDPEAWRHFQALQALPGVGPSIALTILAYSGDLRRFRSARAYAAYTGLTPRLYQSGQLPERASISRMGPSALRAAFWMAALSASRVEPYASLVARLVQSGKPKKLAITAVANRLARAAWAVVVKGGLDKWEL

SEQ ID NO: 130552 - protein, 413 aa, unidentified
MDTVISRGCGLDVHKRIVVACRRIVGPDGKVQSETRSFGTMTADLLALSDWLAEAGVTHVAMESTGVFWKPIWNMLAGPFEVLLVNAQHVKKVPGRKTDVKDCEWLAQLLQCGLLRPSFVPPLPLRELRDLTRHRAKLVKDKTAVANRIQKVLEDANIKLASVASDVLGVSGRQMLNAIVDGEGRPEVLAEMARKRLREKIPELRLALQGRVTPHHRFMLKTLLEHLAFLEAQIARIDERVEAAMRPFAQELELVDTIPGVDQRNAENLLAEIGTDMTQFPSADALASWAGICPGNNESAGKRKSGKTPKGNRWLRRTLTETAWAAAHTKNTYLSAKYQRLVRRRGKKRAIIAVAHDVLRAAYYVLTRRTSYNDLGSDYFDRMDPQRLQRYYVRRLNALGLSVTVTPVQEAAA

SEQ ID NO: 130553 - protein, 434 aa, unidentified
MRILHERCCGLDVHKASIAACALVMDKGKTSEQIRRFGTMTQDLRALAQWLSEKEIRHVAMESTGVYWKPVWNVLEAAGFQLLLANAHEVKIVPGRKTDQKDSQWIAELHQHGLLRHSFVPPRQIRDLRDLTRNRAILTQEHTSVCNRIQKVLEDANIKLGTVASDVFGASGRAMLQAMMQGQNDAGALANLSKGTLRRKIPQLRQALEGATTAHHRELMAGHWKRMQFLEQQISSIEAQIGEAIQLWSPVSPDDARPWPTLQQAVTLWMEIPGVGWTSACSMAAELGTNMDQFPTAAHVSSWTGLCPGNNESAGKRFSGKTRKGNVWVRRTLCEVAWAASHRQDTYFAAQFRRIALRRGKKRALIAVAHSILVTAYQMLKHQSHYRELGVDFFDTINRDKVRKRLVQRLSNLGFEVTLVSKDLEPAVNDTLTH

SEQ ID NO: 130554 - protein, 429 aa, unidentified
MSYRIAGIDVHKKMLAVVVSDVEIESEYQFERRMFSSNPEQLRALAAWLLEQETEEVVMESTAQYWKPVWEALERYWKPIREKQEGARRRSGMLHLAQALSNRGRRGRKRDFVDAERLVKRLVARELTLSFVPAAEQRLWRTVTRKKYQLRRDRVRLQNQVEALLEEAHIKLSSLVSDLLGLSAQRMLKALSDGETNPVALAALAHERLRATPEQLCDALGACTELNDVYRRLLKMALEELRLIDEQMGQLNQELARLLSQHQDTVERLVEVPGLGVDSAQQIIAEVGPTAATFPSEKCLSSWVGACPGDDESAGVNYNHRSPKGNRHLRRLLNQTANAAVKTKGSIFEIVYRRSVPRLGHNQAIGAIAHRQCRLIWLILHQGVRYQERGPAVTKQSKQRRTTRMIRQLRSLGYKIEAPNPKPSQALAQ

SEQ ID NO: 130555 - protein, 348 aa, unidentified
MRGLKDHVPGGEELFVGIDLHKHRWHVTIRTFDVELFSASIPGTWETLYRVLARYAGHRLAAVYEAGYFGFRLHDRLVDHGIPCIVTPPSLVPQEYGNRVKTDRRDSRKLAHLLAKGLLKRVWVPSEEELYHRQVIRRRRQLVRDRVRTQNRIKAELRFYGIHLEEPRGRWTQIYFETLRRIRFGNRWMQASFNRLLEQYEFLSAQIDKQTQLLRELSETALYRERVEILQSIPGIGIISAMELQDVSRFRRAEQLAAYVGLTPSQYSSADKVRMGHITGIGKNTLRAILVEASWKLITKDQIMREKYERIKIRSGGKRAIVAIARTLLLRRRRMLLDKQVCALDLAA

SEQ ID NO: 130556 - protein, 319 aa, unidentified
MNISEYPFSTFIGIDISKDKIDIAELKGAAGKTIGNNKKEICRWITSLKETSHTIVVMEATGGYESLLVKLLHEHQISLAVVNPRQVRDFAKGLGYDAKTDPIDACVIARFGDVVHPAPQAAQSEEHIKLGALVERRRQLLDLVNQEQNRLQQTTDSEIRKSIQTVLKGLKAQVKTMDARIAKAVEADTANARTVEILNSVKGIGPVTVSTIVAELPELGKLNRQEIAKLVGVAPMNNDSGKSTGKRKTAGGRCNVRSTLYMATLVATRFNPTIKAFYQRLLAKGKLKKVALTAAMRKLITILNTMVHTDQLWRESVSG

SEQ ID NO: 130557 - protein, 361 aa, unidentified
MRIIGCDLHARQQTLAMLETTTGEVVNLTLMHEGNEVREFYSQLPRPVLVGIEATGSMQWFLNLMQELGIECRVGHPATIRAAEPRKQKHDRRDADLILKLLVENRFPAIWLPNKELLDLRALLLHRHQWVRIRTRIQNALQAIALANGLRRGPSLWSYDGQAKIAFLPLPPHASYRRSALQAMYRKMRDEIENLTKQVAEQAEQRCGARLLMTHPGVGPVTALATEVFLGDPGRFVDGKALASYVGIIPREYSSGGTQRFGGVTKQGSPLLRFLWCEAGAHAVRRDPELQRFYRRKLVQKGLGKARVAVARKLGIRLWIMLRDEIDYEEFCRRGQKPQSGAACAGMLEVGNGANSHRPVD

SEQ ID NO: 130558 - protein, 345 aa, unidentified
MHQIGIDVSKTKLNAALLLAPAFLKKKTKVVPNNPEGFESLIEWLQRQAKDQKPFRFIMEATGTYHQPLALFLSDHGFEVCVINPALIKRFGESMAARTKTDEKDCVIIAHYGAKMNPKPWVPPSPRYRALEQLLRRLDQLDKMIRQEKNRLEALGSGPADQDVLDSIEKTLSYFEKEYKEVSKKIQNHLDQHPDLKDDVKLLTSIPGIGERTALRMTTALEGGSRFASARQFAAYLGLTPRQNQSGNIKGKTSLSKMGPSALRKALYMPSVVACQCNPDIPALYERLLKAGKTKMSALGAAMRKMAHLAFGVLKTRQTYRAFYSPILEPEVGKEANPLAVGLLS

SEQ ID NO: 130559 - protein, 368 aa, unidentified
MRANSNTRPGDRCPLGAQDTVSKLDPRPRFVKQPEQSLGHQARICKEGSFTMNEDFSTELKATLGSSSWWGVDVASDKLDLACYEGACYEGTEVLTFANSPRGIEQLVARISGQGAALIVIEATGGYELPLLTALAVAELPVVRINPRQLRAFAVAVGELAKTDMIDARLIARFAHDVRPAVRSLPTAEQRRFGDLAARRRQLISLRTAESNRHQKTCQPEVKRSIKAVLAVLDRQIALLDQQLSELVAADPHWQQQTQLLESVPGIGTVTSQVLLAELPELGQLEHKQIAKLVGLAPLNRDSGKFRGRRTIVAGRGTVRTALYMAALSASRFNPPIRCFYERLRQAGKPFKVAVVACITNCSRCSTP

SEQ ID NO: 130560 - protein, 454 aa, unidentified
MAEQELEQVEEPAELVARAAAIDVAKDSGMVCTRVPHESRSGRRVQKVWNVAARFAAVVELADHLRCEGIERVVLEATSDYWRIWLYLLEAAGLQVWLVNARDVKNVPGRPKTDKLDSVWLCKLNERGMLRPSFVPPEEIRDLRALTRLRTTLTAECSRHKQRTEKILEDALVKVSAVVSDLFGKSGRAMLRALVAGERNPQVLAGLALGRLRPKQAQLAEALTGRFRDVHAYEIGLLLHLIDTLEAQITELDGKIEAHLAALPGVPPACTRCGLIGGGHAPGCDNHGARLLSLVERLDEITGAGVITAQVIIAELGLDMAQFPTAGHASAWAKLSPQTIQSGARTRAGKTGKGNRWLRGTLGDAAMAAGKTDTYLGERYRRIRRRRGKQKAIVATARAILEIAYLLISNRDLRYHDLGAGYYDRLDPQRQTRNKIRELERLNPGMKVTLTAAA

SEQ ID NO: 130561 - protein, 363 aa, unidentified
MKGLNRNSGLGPIIKEFVNALLWKQTIKIMEQKYFIGIDVSKEKLDCAIILSDYTVVTERIVKNKDKSIASFLLAFLRKMKVSASSVWVCCETTGIYNKPLQRVCGELSIDLWVEHALKIKRASSDLRGKSDRKDAMRIAEYSVRYQDRKLLYQTPSESIEELATICKVRETLLAQKVALENQLREAKSHDPRAFKQLNELYNCSLKAIEKSLRKIEIEIEQSLEKNQEMKTNVELIKSVPGVGKRTAIQMVIHTNNFRDFNSAKHLACYAGVVPFANESGTIIKRQRVSKMANLKLKTLLHLAAMAATRTKSELKQYYIRKVSEGKNKMSVINAIRNKLVHRIWAVIERQSPYICQEEFLTN

SEQ ID NO: 130562 - protein, 358 aa, unidentified
MQSVTRVGIDLAKMFIQVHAVDAVGKLVCNKQLSRDKFIAWCNQLPAGCLVAMEACSGSHAWARKLIALGLDAKIIAANHVTPYRLEGKGGKNDANDAAAICEAASRPSMRFVPVKTLSQQGMLCVHRYREGVKEERTANINRIRGLLAEFGIIAPQSPNKLRERLAEIIEDADNDLCGIARLVIQEAFSHWDEIDKQLGWCTQRISAHVKENQQAQTAVQLMGVGPVTASAAVVTVGDFKQFKNGAQFGAWLGLTPRQNSSGGKTKLGRITKRGDVYLRMLLIQAAKAAVMTAHKRDDPISRWLLQLREKSGWQKAAVAMANKNARILWAVMTKGCDFDPRYVSVKPSGGGSIAVAI

SEQ ID NO: 130563 - protein, 356 aa, unidentified
MKYVGIDVHKKMGQAAVLNEDGELLDQIRFLNNKEDIKDFAMKLLTFRDDVKAVVESTGNLWIQIHDTLENYGIDVVLSNPTKTRLIAEAKNKTDKVDAKILARLLRADMLFTCYVPGEEIRNRREFLRHRLDLVKMRTQVKNRIHSLLDKYTLRSPYNSWTKKYVAWLREQDLGFMDNAIIKSQLAILETLEEQVRLIEDKIAAIAVDDPQVRLLMTIPGIGYFTASLLVAEIGDINRFSNDKKISSWASLAPRIRQSGDKTHIGRVGKGNKRVGSMLVQCAHTARRHDARFNKTYKRVSRRGGKGKAVVAVAHEMIRIVYFMLMRDEPYRGQNVEMTTRKLKTMEDRARIGLRI

SEQ ID NO: 130564 - protein, 367 aa, unidentified
MTKPKLNNSKARVEQVTSSKVPTIKLGLDVHADSIMVVRVVDHSGPQPAQKFTPSKFREWVKSQLPLAEQVHSCYEAGPFGYGLHRYLVELGIQNLVVQPVCLDERHTGVNHDKSDAKELALRLDRYVAGNPHALATVRVPTPAEEQKRIASRQREQLKREVKRLAAQGRSLLLTQGCRAKGGWWGARQWAELQVKLPAWLDERLEVFRRLLAVLTAELDAATAALEASAPTVRPKGLGGLTYEVIQSEVGDWGRFANRRQVASYTGLCGGVSASGQSHHLLPITKHGNVRLRTALVELAWRLVIWQRDCKLVQKWWPVLGSAKATRAARKKAIVAIARQLAVDCWRWRTGRVTPQALGWVMVGPPA

SEQ ID NO: 130565 - protein, 354 aa, unidentified
MHATTVAIDLAKEVFELAFADAQHRIVQRTRLSRRAFAHALDNRGPLRVVMEACGSAHYWARRFAAQGHAVRLLPARDVRPYVRRNKTDRTDAAGLLEADRCGEIDSVPIKSPEQQGVMALHRIRERLKAQRTATINLVRGVLREFGIVIPVGAAKVRLAVLAALEDGDNALPMALRHTLGEMLDRLVDLTLSMTAIEQRLEEFARHDSVSVRYQQVPGIGLLTATALRASVGSLERFRSGRYFAAWLGLTPREHSSGNRRCLGRISKRGDGYLRLLLIHGARASLRAAHLRAQRGQPVNRLQTWALTLQQRIGHNKAAVALANKTARRLWAMEHHGVSFDGDHVSVRPADSTV

SEQ ID NO: 130566 - protein, 343 aa, unidentified
MSIVILGVDLGKNSCSVVGVDAAGAVVVRRSMRRQTLIDYVSKLPACVVAMEACCGAHYLGRLFAAHGHKIRLMPPEYVRPYVKAQKNDDRDAEGIAEAASRPTMRFVELKSQEQLDIQTLHRVRSRLVAERTNLINQLRAILLERGVIFPLGRRKFELGLDAMLADGDGAMSQRMRQLVSDLRGEWLELDTKIQALNGEFVELAHHDAAARRLTSIPGVGVLNATALIAAVGNASGFARGRDLGAWLGLVPRQQTTGGKPRLLGISKRGNTYLRTLLIHGARAALPSLSQSDIPLGRWLKAMIERGVHRNAVVVALANKLARIAWAVLRKETTFERGYAVAV

SEQ ID NO: 130567 - protein, 360 aa, unidentified
MIVIGADTHKRTHVLVGVDAGTGELFEGREIAASDEGHRDAVRWSRELHPERVWAIEDCRHVSRRLEQALLAAGERVVRVPPKMMGQSRRAERQSGKSDEIDALAVARAVVKDGVERFPAAYLDERAMEIRLLSDHRDQLVGERTRLQNRLRWHLLALCPELEARLPRGGLTRQAEQQRIARRLRSFDGDPRARVAREQLSRTRALTHQVNELERELQRLVAAHRPALLAEQGCGALTAATLIGHTAGAERFPSDSHFARQAGAAPIPASSGRVDRHRLHRGGDRQLNRALHMIAITKARIDPETKAYLERKRAEGKTRREAVRCLKRHLARKVHRLLSMPAVDPDSVELNAAITGRCLT

SEQ ID NO: 130568 - protein, 338 aa, unidentified
MIVIGLDVHKQSVTAVAVDEAGRPLAEKVIAVGSCELLGWAAALDAERLWAVEDCRQLTGWLERQLLSVGEDLVRVPPKLTVPERRAGRTRGKSDPIDALAIARAAIREPGLSRPRPDERVYREIKLLVDHREDLVAQRTRSQQRLRWHLHQLDPTYQVPLRRLDRATQLERVARWLARREQELQVRLARDLIMIIRQLNRTISELEQELQARTNEVAPALLELPGCATLTAAKLLAEIGPIDRFRSDAQLARHSGVAPLEASSGKSQRHRLDRGGNRQLNAAFYRIAITQARYYAPARDYLERKRSEGKSRREALRCLKRLLARVVFNTLKTSPALT

SEQ ID NO: 130569 - protein, 350 aa, unidentified
MKTILAIDLGKHKSVFCRLNTSSLKPEYFTAKTAPQKFHNIFAELDSSNSIVLFEVGSQAGWLCDMLRAMRIGFKVANVNHSAWKWSNNPNKSDKTDAHRLAMMYHHGFFPEVYVPVKPVRQKRSLIYYRQKIVNRLTQVKNSIRALMTTQAIDLPTGKACWTKKRRRQLEQLALPFDTIDDPCQLWRGRLHMELHQLDILQASLDKITAKLDELNKQKQSIKLLETIPGIGPRTAEAIVAVIDDPHRFKSCRQICNYVGFTPKRFQSGQMDRTGRISKRGNPLLRALLVQASWAALRFDWAKHIYKRVSRGSAKRRKIAIIAVARHLLMRCWAMLRDNKPWQYKTQTAV

SEQ ID NO: 130570 - protein, 429 aa, unidentified
MNQETKSVERVVGLDGHPDSFTAALLRGPTPAAAIVEKVFNKVPLSQLESWAQKHTTEQDLFVLEASGNSFQIARTLTELGRQSKVLESCQLGKLKEAHANNDKISAVRIAKAYLAGTAKEVWVPDPLTQERRDWFHAHRKAVKRATQVRNRLKSFLSDNAVRLAKGTRLAQDTEQVQEQLRLTRQWSPRQWQVIALLLLELHHADQQRHRWRSLITQEVLSDPLLLSMVRLCGVREIVAFAMGAFIGDIKRFNSPAKLVKYVGLNPAFDDSGEGKWSGGIGGHGRADLRSLLVEGAQAILRTSQSPLAQWGRKLLRRKGQIKLVVAALARKLTVAIWYLLMGRWTPLEHIDERLSMKVSKMITAVGTENLELLGMNRTTYREQTYLSLKTRVYFLDPDKKFVPRAMGQPVQAAPATASPKENRSEEEN

SEQ ID NO: 130571 - protein, 413 aa, unidentified
MERIIERCAGLDVHKSSVTACVRISEENEGLHQEIREFATTTRGLLLLRDWLASFEVRLVGMEATGVYWKPIYYMLEDDFELWLLNARHLKNVPGRKTDVKGAAWICQLVEHGLVRPSFVPPKEIRELRNLTRYRKAQIEERTREVQRLEKVLQDAGIKLSSVATRVLGASGRAMLDALVGGTTDPEVLAELARGRLRSKLPALRDALEGCFSSHHALMVGKILAHIDYLDESIGDLSAEIERVIAPFSDEVELLDTIPGVNRRTAETLIAEIGVDMSQFPTHRHLASWAGMCPGNEESAGKRRSGKTRKGSKWLRSALTESARAAARAKGTYLAAHYARLRGRRGSKKAAVAVGHSILVICYHVLERQVPYEELGEDYLDRQRSSEAYAKRLVRKLERLGHKVALEPLPQTA

SEQ ID NO: 130572 - protein, 347 aa, unidentified
MSNNNAKGTIKVLGIDLAKQSFQLHGVDEKGNTVLKKKLSRKKLTAFIANLPPCLIGLEACGGAHHWARVFTQLGHTVRMMAPQFVKPYVKSNKNDAVDAEAICEAVQRPNMRFVPAKSIAQQDIQSLHRIRSQLVGRRTAQANQIRGLLLEYGLVIPKGIGCVRKEIPLILEDAENALSSLFRGILSDLYAEMVHLDEKISAVETQLAGICAANEDCQRLLTIPGVGLLTATALIAAVGDISVFKNGREMAAWLGLVPRQHSTGGKATLRGISKRGDTYLRTLLVHGGRSVVRVAHKHQDKRNQWVGAIKQRRGENISNVAVANKNARIAWAVLTKNVNYSTAMGA

SEQ ID NO: 130573 - protein, 466 aa, unidentified
MENNYILYVGMDSSKGKADAAILKVSDRRSVKPKFLRKKLSFKFVKSEVTSFLETVRSYSDDNCTSICFALEVTGIYSTNVYNFIKDNLNDNESIKFLNTDFVNQWRNAHNIAKSDPLDAQTISTIIGTDSDVQYVNDNVFENKNGYQDLKALVHRHYQIKKIYSQEINRLIAQCDCLFPELQYVFEPKSAAFIAVLSSYPTTHDIINASRLEVFNVVYEATKHRCSMDKIDKLFDLCHDTLVPDNISSYGRSIILDLVENIKNIKGQLKMIERYIRDVASLNPAYKLLLTITGCGPLTAATVIAETGDIKRFKNADCFVSYSGTSPRNKRSGTSVETMGKISKKGSRYLRHAIYIIAEFARRHNPVLKHQFERIKNGNKKRHKLANIAIANKIARYIYSIMKNESGFVIFHEHIMRLPEETQNTFFNSISLDFPKNTRKQIYQYSDINGEVHKFVYTKLEETMII

SEQ ID NO: 130574 - protein, 343 aa, unidentified
MYFIGLDVHKKTISFCVKDAAGRVHQEGKIGSTRRELDGWIQTMPRPRTIAMEATIFTGWIYDYLLPHAEKIKVAHPLMLRAIAAAKKKNDRIDAGKIADCLRCDFLPECHMASTEIRDRRRTLRYRSLVVKQMVQMKNRVSGLLMETGVSYNKQRLHKVGYFAELMTTNEDMHESIRPLLKLSRDMISRSQKLDYTLISSLERDPLLKERLRRLRTVPGVGPITALTWALEIGDYTRFLSIKQAISYCGLCGDENSSADKVMRMPISKQRNKHIQRVLIEAAKLATRESPELAMIRARELERGNPNRATLAVARKMVTYMLAVERRQQDFVPAEQFSRTAAA

SEQ ID NO: 130575 - protein, 365 aa, unidentified
MPELTHIGLDVHKETIAVAVLRPGESECDECVIANTPAALRKLFARCPDRAALRTCYEAGPTGYDTHRLLASLGVPCEVIAPSLIPRRSGVRVKTDRTDARNLARLHRAGELTAVRVPTPAEEALRDLVRAREDLKSDRRIARQRIRSFLLRYGRRYPAPAARWSFRFEVWMRALTFEEPAAQAAFDHLVSAYSVRDAQLAAIDRQIEEAALCEPLAVDVARLRAFRGIDTLSAVTILTETCDFARFPTAASYMAFTGLVPSEHSSGAARHQGSITKAGNAHVRRVLVEAAWAYRHRPAVRGAHAKRLEGQPPEVAAYSWKAQCRLSSTYRKLAARKSPNKAAVAVARELSGFVWGAMTGRMGAC

SEQ ID NO: 130576 - protein, 323 aa, unidentified
MIKDIKYFGIDISHLVFDITDSDGNYHQFKNNPSGFKKFVKLLNQQSHCVMEATGYYHYQLAYFLLESGIKVSVENPLAVKRFIQMKLSKIKTDKSDSKAICEYAQKVELKQWKGNTKDEMECLQITRALSVYTKQSTMLKNKLHGEDVLGDPSKAVVRSLKRSLKQLEKEMKTLEDKLLVLVKQEHQDLLTRLKTIPGIGPKTSIMLVVLTDGFDRFTSAAELCSYAGLTPVIRQSGSSVKGRPRISKIGNQKLRNLLFMCSFNACKYNKACRDLYERIVAKGKSKKLALIAVCNKLLKQAFAIAKSGLIYDKEYKSTLVRN

SEQ ID NO: 130577 - protein, 325 aa, unidentified
MAKRITVCAGIDTGKRKLDVAIDGNGEPLQVENTAEGHKVLLEWLQRHKVKRIGIEASGGYEQPVVAALRRKRFVVIVFQPAQVRAYAKFHLQRAKNDKIDAALIAACTAAVKKIYPAPDPRLSPFAEHLTMIDQIGEDIMKLKNRIETCRNERIRALWKEDIARLAKRERTELKALVAAIRQYPDLAERFELIYSVGGAGVPTAVAILVRMPEIGQLTREQVAALAGLAPYDDDSGDQAGARHIDGGRERLRRALYLAALPASMRWNPQLIALYQRLRAAGKEHKRALVACARKLLIFVNTVVARGTPWQSEPPAARTANPSAA

SEQ ID NO: 130578 - protein, 349 aa, unidentified
MRFYTKQHQFYCGIDLHARLLAICIVDQAGGVVLQTQIPADKQLLLATLAPYRPDVVVAVECLFAWYWVADLCRDEKIPFVLGHALYMKAIHGGKAKNDDIDAEKIARLLKGGNIPVAYVYPKGLRETRDLLRRRRYFVHQRAALITHVQIVNAQYNLPEFSKKLIYARNRAELKIAERFDNPQLRKSVEVDLALIDALDERIGEVELHLERTAKVEDPQTFHLLKTIGGVGKILGLTLLYEIHDIARFAEVGEFLSYARLVRCRHESAGKKLGSGGHKIGNAHLKWAFSEAVCLMVRHYPAVKAWQARHEKKHGKKKTLGILAARLGRTVYHMLRKREAFDVKRFLGQ

SEQ ID NO: 130579 - protein, 356 aa, unidentified
MGASPLLMRRLTQLLNRRQRDFEKAYLRQNEDDVTINESPKGNVLVRRSLRRSEVINFFGKLTPCIVGIEACATAHHWAREIGRFGHTVRLMPPAHVKPYVKRNKNDMADAEAIGEAVMRPNMRFVAVKTAAQQSVLMLHRCRALLVRQRTMLANAIRAHLAELGIAMPKGIRTLLAALSAPQNEGNDVPDLARRALEPMALSLVELGKRIRELEVDIVRGHRGNETSRRLETIPGFGVMTSTAMAATVADPTAFKSGREFAAWLGLTPRENSSGGKQRLGGITKMGDGYLRTLLVVGATAVIRFAREEGSAKTAWIRKLMEKKPAKVVAVALANKMARIAWAIMTRREVYRVIPA

SEQ ID NO: 130580 - protein, 342 aa, unidentified
MGEVSIIGLDLAKNVFQVHGAGADGSVVFRRKLSRAQLLKFMASQPPCIVAMEACAGSHHWGRAIGNLGHEVRLIPPAYVKPFVKRQKNDMADAEAIAEAASRPTMRFVAVKSEAQQAAAMAYRTRDLLVRQRTQTINALRAHLAEQGIVAPTGPAHVGRLAAIVDGDNGILPAAVRDLARLLLEQIAGLAEKIAGLDAELRRRVTIDDAARRLTTIPGVGAVTAAAITTFAPPMETFSKGRDFAAWVGLTPRQHSSGGKERLGRTSKMGQRDIRRLLIVGAVAVVRWAARKGAPEGTWLGRMIARKPKMLVAVALANRMARTAWALLRKGEDYRDPSMAAA

SEQ ID NO: 130581 - protein, 367 aa, unidentified
MRKHNTAKESAVIRKGAKRKLTVGIDLGDRSSRYCILDEQGEVLAEGSVATTKKGFAQVFGSKPRSRLALEVGTHSPWVSRYLAELGHEIVVANPRRVRLITDSTRKDDRLDAKTLARLVRIDPELLSPIRHRSAQAQGDLMVIRARAVLVEARTMLVNAARGLTKSYGERLGSCGTGRVCEELAKSLSEPLQNALKPLLAEVESVSERIREYDEQIESIAKSRYPETELLQQVHGVGTLTALTYVLTVDDPYRFRRSRDAGAYFGLRPRRRESGDSRPQLRITKEGDAYVRKLLVQCAHHILGPFGPDSDLRRWGLELAAHGGKNAKKRALVAVARKLAVLLHKLWVTGEVYEPLHVRKGSKTAAA

SEQ ID NO: 130582 - protein, 343 aa, unidentified
MTKLNVIGVDLAKNVIQVSVLSPSNHELRNSALTRRKFAEFLGRQRPSLVAFEACATSHYWARVAQRHGHDVKILPAKAVFPFRQGHKTDENDALAVAEAARRPNVKLAPLKTVEQQGMQAIQRSRELLVHERVSLANHLRGLLMEFGMVIPQGFASLYRLLPEILEDGENELPDLYRPTLNLLYGRLCDLREDLERLNREIEVLVQANPVCRRLTALEGVGPIGSVLLYATLGTGEAFTNGRQFSAYLGLTPKQFSSGGKVNLVGISKRVANRRLRAVLITGARAYVYHMKEPKTAKDRWLWAIVERSGKCKAAVALANKNVRTAWAMLTQNTEYQHYPIAA

SEQ ID NO: 130583 - protein, 346 aa, unidentified
MTIVEATRTVAGGIDTHGEFHVAAALDDVGGLLGAESFEANRTGYEALLSWLESFGTVVKVGVEGTGSYGAGIARHLARAGIVVIEIDRPNRQARRNAGKSDPLDAVEAARAALSGKASGRAKSRDGWVEALRVLLVAKRSARTARVKALTQMRAVTYSAPDELRGRLEGLSISAFVSSAQLLRPSRARDQVMAATKATLSSLAHLVNDLEAEITGLDAMITPLVRSNAPELLAIRGVGIDTAASLLVAAGDNPERLRSEAAWAHLCGVSPLEASSGKVTRHRLNRGGDRQANSALWHIVITRLAIDPDTQVYMERRVKEGRSKREVVRVLKRYVAREVYRAMPRG

SEQ ID NO: 130584 - protein, 377 aa, unidentified
MGFHRELAVKVAVSHRDGGTRSERVGLKHQRKTAMEWFIGIDVSLEQSSVCVLDAGGKIMREAKIASEPEALVAFCRELELPVTRIGLEAGPLSQWLHAGLTSAGFETVLLETRQVKAALSAMVVKTDRKDARGIAHLLRMGWYRPVHCKSVPAQEVRALLAGRKLLLGKLRDVELSMRGLLRGFGLKVGEVSKGRLEARIRELIAGHPMLEQVIQPLLRAREVLNQQYHVLHRAMLNLVRHDAVCRRLMTVPGVGAVVAITFTSAVDDPTRFSRARAVGAHFGLTPKRYQSGETDVVGTISKAGDEAARTALYQAAHTMLTCPGRYSSLKRWGMEVAKRRGLKRATVALARKLSVVLLRIWTSESEFRFDRPVAAV

SEQ ID NO: 130585 - protein, 403 aa, unidentified
MDITVSDFMKGRYNLMIYVGIDIAKLNHFAAAISSEGGILIEPFKFSNDYDGFYLLLSKLAPLDQDSIIIGLESTAHYGDNLVRFLISKDFKVCVLNPLSTSAMRKNNVRKTKTDKVDTFVIAKTLMLQDPLRFISLKDLDYIELKELGRFRQKTVKQRTRLKIQLTSYMDQVFPELQHFFKSGVHQNSVYTLLKEAPTPNDIASMHMTHLTHLLQTASHGHFGKDTARGLRILAQKSVGIHDSSLSIQITQTIEQIELLDSQLFHTELGMANLVTCLHSVIMTIPGIGTTNGGMILGEIGDIHRFPTPGKLLAFAGLDPSVYQSGNFQAKKTRMSKRGSRVLRYALVNAAHNVVKNNATFKAYYDAKRAEGRTHYNALGHCAGKLVRVIWKMLTDEVEFNLE

SEQ ID NO: 130586 - protein, 342 aa, unidentified
MQITTIGLDIAKNVFQVHGIDMAEKVVVRRQLRRSQVLAFFKPLPPCLIGLEACATAHYWARELTKLGHQVRLMPAKDVKAYVKRNKNDAADAEAICEAVRRPTMRFVQIKSAEQQGRLMLHWTRDLLMRQRTQVINALRAHLAELGTTSAQGREGLKELLKIVASDADERLPADAHASLVVLAAELQAMQTLIGSIEKRIVTQHRENKASKRLLTIPGIGIIGATAIADTVTDPKAFRSGRDFAAWIGLVPRQDSTGGKQKLGPISKQGDRYLRRILVVGAHSVLRRAKLNPQKHPWLTQLLARRPFKVVAVALANKMARMAWALLAKGGAYRAPALAATA

SEQ ID NO: 130587 - protein, 424 aa, unidentified
MEKIKAKKLRRVNAETLIVTIDMGKTTPVGYCRCPDRTEVKPFEFTNNRAGFTKLWNCIVQTQAAKGLKEVVVGYESTGCYAEPLLHFLQNKPVRLIQVNPLHTKRLKELQGNSPHKTDQKDPKVIADIIELGHGLTVVIPKGAAAELRRLTQARERELKRRTALYNQLQDLVFLCFPELLQIMKNVKTKTTQYLLQHYPTPVLLLAQGVESLAFTLRRISKGKLGLERAKALSAAAGHSVGITDGLIGLNLEIQAILAAITVSDTYITSLEHEMRHHLEQIPYSPLLLSIKGLGLVTVAGLIGEVGDFTKFHSQKEVLKLAGLDLFEISSGKHKGQRRISKRGRSLMRKLLFFAAMNTVRTGGIMHQQYQQYLQNGMKKIKALVAIARKLLGIMFALVRTQSEYYENYQKAPAEAEPQLLLAA

SEQ ID NO: 130588 - protein, 334 aa, unidentified
METLYFLGIDISKKKFDAALTIDGKQFHEAQIENTPAAIQLFFRDLKKQLSSLNRLTVCLEHTGIYCLPLLNFLVKHKIRVSVEPALQIKQSQGMTRGKNDQADAKRIALYALKNCENLRFWQPQRHCIQRLKALLVLRERMVKMKVQLEVPLHESREFVATSIFKQTLANCQKTIRALQSDIKGIEKEIDTLVSNDEQISQQCRIATSVPGVGKITALNMIISTQEFSSIQDAKKFACYAGVAPFEHSSGSSIRGKTRVSKMANMTLKKLLHLAAMSAIQCNDELRIFYKRKVDSGKNKMSVMNAVRNKLISRIFACIKDKRIYQKVYQHALV

SEQ ID NO: 130589 - protein, 573 aa, unidentified
MIDPNIVKQQMEEQKKNLTTLDLTDPQVAGIDLEISVLGSACIVCVHPALARENLRKFFITSINLQAMVSWLKDCAVTTIIMPKKSAHWEEIFRLLHKEGFNLCLVDARRFADFSRLWQQGKDSIFEMINPNAAGIDIGSRQHWVCVPENRAEKNVRSFGTFTCDLYDIAQWLKECGVTTVAMESTGVYWIPLFQILEKQGFEVFLVNAHHLKNVPGRPKTDNLDCRWIQKLHSFGLLSASFRPKDDICKLRSLGRHRDNLIRFKAKSIQHMQKSLEQMNIKLGNVLSNVAGVSGLRIIRAILEGQRDFAKLSQLKDWRAKASEEEIVKSLHGDYRSEHLFTLQQSLDQFEFYQGQIIKCDQEIEKILLTMEPNIERLKGQLTFPFYTNSLPKTKQRSENSPSFDARNIFFEITGIDLVAIDGMGENAVQTVLFEVGLDMEKWPTAKHFAAWLGLAPNPKISGGKNLGNQKRRVKNRAAQAFRMAASALQSSKCALGAFFRRIRARTGFKKAVAATARKIAVIFYSMLKNGTEYKKIDEAEYLQKFNKQILQKIQRQAKLLGYQLVPQNSATE

SEQ ID NO: 130590 - protein, 378 aa, unidentified
MHKDSVYLCILRENGEKIERVYGVLTPQLDSMRDFMAENEVSEVAMESTSVYWIPIWRVLVDSFELKLVNPYFIKQLPGRKSDVKDAQWIAECVMKELIRGSFIPPPLIQQLRLYDRRIFELNAELVRKYSKIDAILQRCNIRLSNYVSNTDCKSYKNVVKRISEGVTSPQELLMLVHKRIINKHGEDTILAALTGVVSEAEIDMLAQYVAESASLEDNKNKCIEKMREICNREFEEQMKNLQTIPGVSERSALTVLAEIGPDVNAFPSAKHLVSWCGFNPRNDESNKKIKSNKITHGNRFIRIASVQCAWAASRTKDCYFSKFYAFHTQVRKKFKLKVVVAVARKILVCIWHILKFNVSYKDFEPQKSVAKDCTQLA

SEQ ID NO: 130591 - protein, 280 aa, unidentified
MTYVGIDVSKATFVVAYSSAKGSETKTFKNTSKGIREFIRTISPKENHCVLEATGNYSMLLVYLLSKAGVTVSMENPLKIKNFARVMLSVVKTDVIDARLIALYGERMQPAPFKLRSDSLLLLKQKRTVLRQLKKQLTANRNLEGSLKVLPFIDSKCKKVLEKTIKFLEKQIEEMEEELTSLAEIEYKKQMNLLTSIKGIGATLAAALIIATGGFTYFDNAKQLTRYLGLSPTYQQSGTSVNVKGHINRNGDAYLRSQLYIGAMASLRCNTECKVIISLK

SEQ ID NO: 130592 - protein, 413 aa, unidentified
MATTSSPTRFVALDIHRKYLVVGAVDPHQQVVLPPRRFGFEAFSVWATTHLTSSDAVVLEATSNAWLLYDQLEPLVGSVTVAHPLAVKLIAAARVKTDSRDTIKLAHLLAANLVPAVWVPPVPVRELRALVSHRKRLVNQRTQVRNRLHAVLHRHNLTLPPGKPFAAHQQEWWLSLALSASEKLRVQQDLSLLHSLEELVGAVEAELGRLSTCEPWVKQVPFLVQLPGLGVLSVMSILAAIGDITRFPSAKKLVGYAGLGASVHDSGETHQGGHITKEGRRDLRGVMVEAAWVAVEHHPHWKAQFERLSRRIGKQKAIVAIARKLLVAVWHVLTEQQADCHADAQAIARKLMNWIAHAGVTPGQHRDRLLLLYQQLDQLGLSEELEEINYYGTTYRLSVRQQLLREAQKRKRS

SEQ ID NO: 130593 - protein, 344 aa, unidentified
MDHFAGLDVSVKDTSVCIVDDTGKIVREVKVVSEPEALLTVLKNPAYRFKRIGLEAGPLSQWLFSALAEAELPVICVETRHMHAVLKAQINKTDRNDARGIAQMMRVGLYRPVHVKTLRSQKLRMLLTHRKLLQSKAIAIENDLRGTLRNFGLKVGMAGKVRFEARIKELVENLPDLAVLVEPMLIVRRVLREQIVILHRRLLAIVRDDEVCRRLMTTPGVGPVVSLTYRATVDVPARFRKSKSVGAVFGLTCSKYQSGEIDRSGRISRCGDEMMRVMLYEAAQSMLRSKKWSWLKAWAMQIARRRGMKKAIVALARRLAVIMHRIWVDGTEFRWTREQTTAAA

SEQ ID NO: 130594 - protein, 344 aa, unidentified
MKNELYIGVDVSKNWLDLAYYDGVVVDWKQGHIRVDNREAGFRQIDKWLKKIGAEKDCVLFCMEYTGLYSQDFRIWLEKEGIVYGMVQPRKMHRFEPDLGENERALDRIKTDETDSFRIAMYCEKHCRKIKASPSKLPGEAYFKLKRLIAERRQYTKHSVLYRQQLHDTVAMYDTERSVERKKAMSDFINGKLKQTDAEISSIIKTDQALKKNYDLLCSIKGIGLVIAVETIILTENFTSITNPRKYACYIGIAPAKKESGVSVRGGEHVSRKGFTQAKADLSIACLTAIKHDSNIKLYWERRKAEGKRGGSVLNAIKFKLVLRMFAVIKRQKPYVELDGYRKK

SEQ ID NO: 130595 - protein, 425 aa, unidentified
MHSKHYSKQLEKRQKITGHTLVVGMDIGSEFNAACFMDKEGNILGRYPTIYNSRKGFDYFQTMLTKTRRKHKLTDVIIGMEPTGHYWRKIAFFAKEKGYEVRFVRTTAVKHQRELDESSSGKSDSKDAYTIGNIVREGKYIDTIIEESVFRQLRTLAHARERILRYIVGSTHGLQAHLSDYFPELRHLFWSMQAKGLWRLLETYPFPEDVRNAGVAAVTALLMKGTGRKRRIGEQAAQVYQAAVESVGLKAIGKADRVRLTMYLDEIKRSDARRILLEREMEELLREIPLVPYLLSLPGMGKVSCAVFLGELGNPKYFQNPRQIIKYAGYDPKENDSGSRVGRKIISKKGRWLMRKCLYFIALNVIHRSSFFKEHYEHKKKGVGRPLEKKEAICAVILKLIGVLFALMRDGRMFTEEMPRCEKAA

SEQ ID NO: 130596 - protein, 338 aa, unidentified
MTLYAAIDLHSNNSVLCVLDETDRIVFSKRLPNDLAKIEQALRSCPGLIVGVAIESTYNWYWLVDGLQDAGFTVHLVNTCAVTQYDGLKHSGDLDDARHLAHLLRLGILPTGYIYPRHERALRDLLRKRSQLVRQRTSQVLSMQNLMARNLGSNARGNEIKRWTDADIAAMPMLPSQRLALMTNRAVMDCLDDQVKRLESAILAQARDRADYQALHTVPGIGKTLALTIALESGDMARFADAGHFASYARTVDSRRESNGKKKGRGNVKCGNKHLAWAFIEAAHFAVRYDETIRRWFQKKCAKSLQVVAIKAVAHKLARACFHVMKTGAPFDAARAFG

SEQ ID NO: 130597 - protein, 350 aa, unidentified
MQVSTVGIDLAKNVFQVHGVDAAGRVVLRKQLRRGEVLRFFAKLEPCLIGMEACGSAHHWARELQALGHEVRLMPPSYVKPYVRRGKNDAVDAEATCEAVGRPTMRFVPVKSPAQQAVLGLHKTRQLLIRQRTMAVNALRGQMAEFGIVEAAGIGNVAKLTARLEQAIGGAIPELLAPALRSLAAQIEALNGEIGKLNAAILAWHRSNETSRRLTTALGVGPILASAIVATIGGSPQEAQRFHSARHFAAWIGLVPKQDSTGGKTKLGRLSKMGNRYLRQLLVLGATALLRVARKPRVDSAQMAWIRRQMQRHQSSRKVTVAVANKMARAIWAMLVRGEAYRARPLPAAA

SEQ ID NO: 130598 - protein, 401 aa, unidentified
MKRVCGLDVHKETIFCATIKGEKRGLVTEHSTLTPSIRAMGEQLRNDGIEEIAMESTGIYWVPVWNILEEMGFSLMLVNPYLIKQMPGRKSDVKDAQWIATLLHKGLLRSSLVPCQHIRELRTYSRKYIKIQQRQTSVLQEMERALEMCSIRITSFVSNLSGKSVYHVVQQIVQGETSAEVMVKAVHGRIVNAHKKERIIESLTGFITEHQRFMLELLLQEYEMLIDQSNRCLLKMEELCREYYPEQLKLLLTIPGISHISAMIVVAETGADMKAFENSGKFSGWTGLRPRNDESAGKFKSTATMKGNRFLRSTLVQVAWASTHIKGSYFKEKFSRLAMRKSRKKALIAIARKLGVLIWNVLYYEQVYNPTRLIVYDPGKLQAKVNYHQKEVERLQNLGRK

SEQ ID NO: 130599 - protein, 369 aa, unidentified
MDDITFVGLDVHKATVCIAVAEGGRGGEVRQLGVFENRPEILSKVVSRLSKGGRRLSFCYEAGPCGYGLHRLLTGYGHECIVVAPSLIPMKAGDRVKTDRRDALMLAKLHRAGELTAIWIPDAAHEAMRDLVRARATAVRALAKARQHLQGFLLRHERIYHGARAWTLAYRRWLTTVRFEHPPQQIVLQDYIHAVQEAETRRDRLTQQIEELLPNWSMAPVVAALQSMRGVALVVAVTVVAEVGDFRRFANPRQLMAYLGLVPSEHSSGSSVRRGGITKAGNALARRVLIEGAWTYRMSARVSRKLHDRLEGLPAAVRDIAWKAQLRLCSRYRRLAATGRPKVVVTSAIAREMVGFIWAIARLAQPAPV

SEQ ID NO: 130600 - protein, 309 aa, unidentified
MNEIYVGIDVSKDSLDVIALPSKEKWRYANDEVGIGKLVARLKKLSTSLIVMEPTGGLEAMVAAALAAEGINVAIVNARQIRDYARATGKLAKTDKLDALVMAEFASVIKPQPRQLRDEESEEIKATVSRRRQLLEMLTAEKNRMAIARKNLKPNILAHIEWLKKEIADLDRDLRRRIEGSPIWRVKDDLLQSIPGVGRVLSATLLAELPELGKLNRRQIAALVGVAPFNRDSGIMKGKRSVWGGRASIRAVLYMATLASTRYNPVIRSFYQQLLVRGKAKKVALVACMRRLLTIMNAILKYQRAWRYV

SEQ ID NO: 130601 - protein, 447 aa, unidentified
MFTYRLTVLGRLQPQPPCWIVNQLDTVPSVYVERGYEWQEACGASSINHIIEEGYHMTYVGIDVAKDKHDCYIINSDGEILADVFTITNDQAGFNLFFQKLQSVAPDLGKVKVGLEATGHYSYNILGFLLDKGLATFVINPLHTNLFRKSTSLRRTKTDKVDARTIAAMLASDVVLTSYTATSYHNEELKSLTRYRFDKVQERAKLKSSVSRLVSILFPELEKLVPTLHMNSVYAMLSEFPGAKQISSCHLTRLTHLLSETSKGHYKRNKAVEIREAARTSIGSVMPAKSLELKHTIQLIKVLTEEIDEIETSIREVMDKNPSPILTIPGINYRMGAMILAEIGDFSRFDSPDKILAYAGLSPSTYQSGKLDNAYPHMEKRGSRYLRYALYNATKYVCIWDSTFAGYLAKKKAEGKHYNVAISHAAKKLIRVIFALQKSGMPYCPAT

SEQ ID NO: 130602 - protein, 355 aa, unidentified
MESNNISQAEVIGIDLGDRTSHLVGLNTNGEVVATGRLTTTAEAMTKEFGSIGSKVIAIETGTHSPWISRLLTQLGHRVVVANSRKLRLIYENRRKNDRVDAEYLARLVRMDPKLLEPITHRSERDQQHLSLLRSRDKLVRTRSGLITHVRGTVKSIGLRVPACSAEAFVKRARPVIPKELKAAVAPVLGTIEHLNKQIAGYDRRVEQLARTEYPAAQLLMQVTGVGPVTSVAYVVTVGDPGRFARSRSAGAWVGLTPGQSASGQQDPQMRITKEGDSYLRRLLVSCAQYILAPNRPDSDLRRHGLALAARGGKNAKKRAVVAVARKLAVLLHMLWRTGVVYEPLYNANAIRAAA

SEQ ID NO: 130603 - protein, 352 aa, unidentified
MERYVGLDSHARSCTLGVMSAGGRRLQALVVETNGRALVEAVRGIGGRVHLCLEEGTQSAWLYELLKPHVAEVVVAMAPERKGPKDDQRDAWARANELRTGAIETRVFKAPEHLAGLRNAVRAYGFAVTDVVRAKNRLKSVFLSRGIGTDTSVYDPTKRTAWLTKLSSPHVELAEWLGRQLDQLEPQREEAERRLLAESKKHPIIRKLSTAPGMGPIRTAQVVAIVATPERFRTRRQLWSYSGLGIVTRSSADWVQDRSGKWVRAQHAQTRGLSRKRHPRLKAVFKGAATTVIAQLKDDPLHGDYERMLESGIKPTLAKLTLARKIAGTVLSMWKHQEVYDPKRHRLTPKQK

SEQ ID NO: 130604 - protein, 433 aa, unidentified
MSPYRLQVGIDFSQKGADFFLLLPEGQPLELHRAFANSLSGYTKARQFLLEALKTQPFDGLNVTGEATSYYWMPFFWQLARDSELASKDLHLFLLNPRWVHWFKRCFAPDDKTDFKDPFYIAERTRTRPPEYTWSPQADWLPLRFYTRLRFHLVQVMIREKNFFHAYLFLRCSAYQRTKPFSNTFGTTSEQVLSQPPSLEELAALSAEDLAQHLDEWSNHHLNDPVETALKLQKAVADSFPLEAALMRPIQRILDLTLQNIHFLEAQIEQVDAWIADEVQAHHPLVLNLSSLPGIGQALAAGIASEIGDLSFFFRGQKWNEKHKRFQAKNLRDVEDAVAKFAGLWWPRSSSGDFEAEERHMAKTGNRYLHYYLIQAANGMRLHIPDYTQFYARKFREVPKHQHKRALVLTARKSVGLFVGLLHRNEAYRSKEA

SEQ ID NO: 130605 - protein, 369 aa, unidentified
MGDGIRYVGLDVHKDGIVVAVAEGGLRSEVRDYGRIANTPAALRRLAHKLDREGVTLRLCYEAGPCGYGIQRQLSALGQECIVVAPSLIPKRMGDRVKTDRRDAANLARLHRAGELTAVWVPDPGHEAMRDLVRARLDAVRALRRARQQLSGFLLRQGCHYGRPAWTKLHRRWLAGLKFEQAVHHIVLEDYIAAVEAAQDRRDRLTAQIAAMLSDWTLAPVVAALQTMRGMALVNAATLIAELGDLARFANPRQLMAYLVLVPSEHSSGASVKRGSLTKAGNSAARRLLIEAAWTYRFPARISRELRLRQEAQSRAIREIAWKAQLRLCARYRKLARSGKPANVVTAAIARELAGFVWAIARRVPPAVS

SEQ ID NO: 130606 - protein, 374 aa, unidentified
MEKLIRIGVDTSKSVFQLHGVDASEKPVLVKRLERRQVMAFFKKLGPTKIGVEACGGSHHWARELGALGHEVFLLPPQHVKAYLRRGKHDAADAEAICEAMSRPRTRFVPVKTCHQQAAQMLVGVRDQLIRRRTQLSNMIRGYAGEFGLVVATGLAKIEPLLAQVEATESVPRLAKEVFGVLAEEYRLLQPRIEKIEGKLMAFHRQDATSRRLAQVPTIGPIGATLLSIKVPDAKAFRSGRDFAAWIGLTPKNHSTAGKTRLGGITRAGDEALRSVLVVGAMSLIWQVQRGRGHDRAWLTELLKHKPPKVAAVALANKTARIAWKLMVTGECYQRPDHQSVAPVSAPSRPLRAADRGGLPPALTAPAPSAPARN

SEQ ID NO: 130607 - protein, 320 aa, unidentified
MKELTAGIDVSKETLDISLYNGGKHDNITIANNKKSFMKFLKKYSSDDLQIVMEATGIYHLRIALEAHDLGYFVSVVNPLIIKRYGEMKMLRAKTDRVDARLIAEYGYEQSPKEFTPHSDDRMVLFQLLKAIEDLYKTRTEFRNRLESYTHGYPVSKEVGKTYRSMVQKIDREIERLKKKLQDSLDTHFPDQSSKLTSIKGVGKMTASMIMVFYGNFEQFETAKQAVSFAGLNPHPRQSGTSVKRGSSISKRGHALIRKTLYMSALSAKKHNPVYREYYERLLASGKSKKVALVAVAHKLLRHIFAIVKYDREWDPQYAK

SEQ ID NO: 130608 - protein, 388 aa, unidentified
MDVLYQSCAGIDVHQATVVVCILHGPLTSTRPKREMAQFDTTTKGLKACHDFLTQFHVEAVGMESTGVYWRPVWHELCDDFELILAQPAHMKAIPGQKTDKKDAHWIAQLTRIGLLPRSFVPDETIQELRELTRQRKHYVESRNRETNRIHKILQSGGIKLTTYIEDIMGASGRNLLQLLIDETPLTPRMIHQSVYTSLKRKVPQLLEALDGYFSAHHRFMLGQSLEIYDFYQKQIDCLEERINGYLNLYERPVEILDSIPGMDLITASVIIAEIGVDMSQFPTAGHLASWAGLCPGNNESAGKKRSTKIRHGNSYLKRCLCQAVFAAKRQKGSPLAERYYQIQSRRGSQKATIALAHQLLKIAYILLKENLTYQEFVLQKRLLETSQ

SEQ ID NO: 130609 - protein, 399 aa, unidentified
MFSKADIMDKAGSKVLLGAAQPQAKKRAQRPAVDRATLGAMDAAAQRDRGRSGIVSPNSRQSRTRPRAASSSHLQGRDGSIMQDSVVTWIGIDVAKDSLDVAWSCADQPHRLAAKNACPGWTALLAQLPPAAQVRVVVEATGGYERSLVTALFEAGYRVAVVNPRQVRDFAKALGILAKTDRIDAAVLARFGQQVQPRLLEEDPAQRAELMQLVARRRQLIDLRTMESNRLQQTTARMAQKSITHVLKLLDKEVDQLEAEITRLLQSDDDWRAKVELLSTTPGVAKVTSATLVAEVPELGQLNRQAIAALVGLAPFNDDSGRHRGKRRIAGGRASVRRVLYMATLSARRCNPVIRAFAERLAAQGKKPKVIITACMRKLLVILNTMVKNNTPWYTTHVA

SEQ ID NO: 130610 - protein, 427 aa, unidentified
MSERKSLELRVSVDVGSRRHSVAIGMSDGQVLEEFEITHRPEGFQEFFSRIEKHQKAQGCGVAVAMEGYNGYARPLESLVRQRGYRLYNINNLKLARFKEIFPGAAKKDRIDARKGLELFQLRDHLPLAKQVLQEVTGTPKENEILKRLTRRRRRLVNERVRVLNNLQADLQAVCPGLLEITTEASNQWFLNFLVSADTLPQLARLRKSTLLKIAGVGRKYASVIQEWQKRAHFSEEAQWVGEMIHEDAQRCVELEEKIKTLASKIEQVAKGSKIAKVLLSIPGFGPVCTSELAGEIGTVDRFGKEGGLALYLGMSTLDNSSGNYHGTKQPKHVNTRAKAAMMTALDRHRKYVLESQTYYEKKRSEGKKHNQAIRSLGRHLCRIIYKMLKDQREYEIRLHQGNTKTKVGSRSCVKTKIRRPKIFPNS

SEQ ID NO: 130611 - protein, 361 aa, unidentified
MVVQRTSVGLDVHARSVVACALDGQSGELVETRLTPDPADILRWVRERPGPVAVAYEAGPTGFGLARYLAGEGVAVQVAAPSKLLRPSGDRVKTDARDARHMARLLHAGQIVAVTVPDAATEAARDLVRAREDVRRDLTSARHRVSKLLLRQGIVYSGGAAWTERHLAWLRRHRFDSLALQTTLDVGLETLVSIVDRRDRLDEVIEAMAADSPFTPVVRRLGCLRGVATLTAFGLAVEIGDWHRLTGRSIGAYLGLVPTESSSGATRSQGGITKTGNGHARRLLIEAAWHHRPRYTAASPTLRRRWQAAPPAARERGQRANRRLHARWAAYDARGKKTVVANTAIARELAGWCWSLAVLED

SEQ ID NO: 130612 - protein, 363 aa, unidentified
MTSMTTNSSAVTGGVDTHGQTHHGAALDSVGRQLGDREFPTTPAGYRALVNWLQTYGHLERVGVEGTGAYGAGLTRQLRAAGVTVVEVDRPDRKARRAKGKSDPLDAYSAARAALAGKATGVPKTQDGRIEAIRMLRVARSSAVKARSQATNQLKALLVTAPAELREQLRTLSNTKLIATCARLRPTGDIADPEHATKTALRRLARRHQYLSEEISAADTELRTLVTAAAPRLIALPGVGTAVAGQILITAGDNPDRLRSEAAFAHLCGVAPIPASSGRTHRHRLNRGGDRGANNALYIVVIGRLRYDSRTRAYAARRTTEGLSKPEIIRCLKRYVAREIFTVLTARTAGDQSHTAQAMSTAA

SEQ ID NO: 130613 - protein, 427 aa, unidentified
MTRKDFNRGYAKRQRICEPTLIVGLDIGCEFNMMCMMNAKGKVLGEHKVHNSREGFEFFRDVVDKAAKRNRLWDVLVGFEPTGTYWRKIAFYAKELGFEVRFVRTTALKHQRELDESAPLKTDRRDAYTIANIIREGKCIDSVIEDGIYRELRSLVNLRENAVSDGTRLKNALRTFLEDFFPELSRLYSSMSAKGLLAILQTCPFPADVLNYGEKRLAELISKSSRSKKIGESKSSKIYAAAQESIGLKRVGSSDRLRLEFYLKGLRKSAEDLKAIDAEMARLLKEIPHAQYILSIPGIGMVTAGIILGEFGNLDNFQGAKQGIKYAGYDPTGKESGKHVGRRRISKKGRWRLRKTLYLSSMRVVRAIPEFKEYYTRKIDGTSGSGRKLARKEALCAVIIKLIRLIFAIVKDGRTFEYREKSKLLAA

SEQ ID NO: 130614 - protein, 323 aa, unidentified
MKMSNNSTKSCICAGIDVGKASLAYALADREGSSQCANTLEGRAQMIAFFKSENVTRIGIESTASYHFEAADELRAEGFEVHILLPQQVKAYATFKLQRAKSDPIDAGLIAQCTAACDASRPPPDPRLIPLAEHLTLIDQISEDIARAKTRRDRYRDPRLKKLIDDDIREKTKLKRTEVALLLKAVRAHADLARRLALLFSIQGIGEPTALTLLIRMPELGSLSREEAASLTGVAPFVHESGQYKGQRRTGGGRARARTSLFAAAQAARKWNPALAALYERLVKAGKPHAVAIIACVRKMVIYANTILAKNTPWEKRPLQPAI

SEQ ID NO: 130615 - protein, 355 aa, unidentified
MLYSGIDLHRDNSMITTVNDSGTIINQQKLPNDEVALLNYFLSMGNEHRAVVEATANWYWLSDLLNDHGIDLILAHAKYLKAISYAKVKTDKVDSQTLANLLRIDMVPTAHQIQPRLRPLRDLMRARLNLVHKNTSCQNSIHRLLGKYNQNIPQGKKLHDLSTLDTLNDLSLPQEAFLQLELLKEQIRLLHRQINDLEKTLHPKLIPNPDIQRLLWIPGIGKILAFTIYLEVDGIDRFQGTPQFLSYSRLVPGADNSNRKNKHKSANKDGNKYLKLAFTEAAVRAIQYFREIKDFYLTKQRKKHNNIARILVAQELAKICYHVLKNKTDFNNTFKGKNLSRRKSLQWPRLASPDA

SEQ ID NO: 130616 - protein, 467 aa, unidentified
MPAVFSSTNEWALNPKPNDCQSNSLGLSLLDSQSMSAYIKEVLLLARLSIKHFVCCGMDVHKKFVVATIAFTDFRGVTIYKKKRFATFNSDLRALKKWLLDHHCSEVCMESTGKYWIPIFNILEDSCHVVVANPKYVRAIKGQKTDDKDSEWIADLFKFDIVPSSYIPCREIRALRELFRYRQKLIGHRSSEKNRFQNALTVSNIALSSVLTDTFGKSATAIVDYILTCETFDPEYCKSLLLKKAKDKADDVVKSILGYELRGDQSLKIKVCRKHFDQINECVRTLDDAISDLAKPYHKFIDLATTVPGITEKSATYIIAEIGVDMAVFKSSKRLCSWAGLTPQNNESAGKKKSVHISRAGVYLKPLLVQCANAAIKDKKNPYFKYKYDRIKKRRGHKRAVIAIARMMLTCLFHMFSKQEAFNPADTDYSAIPEEMYQRFQEQYDKNAIKRLEKRGFTVIPPTAVTA

SEQ ID NO: 130617 - protein, 367 aa, unidentified
MKKVSTAATKQSRNISQQQLTIGLDLGDRNSWYCVVDESGQIQLEQRVRTTAKGLQEVFGAMPRSRIALEIGTHSPWISRLLSDLGHEVIVANARKVRLIGESRKKDDRLDAQTLARLARIDPQLLYPVKHRGVQAQADLMTIRARAGLVRARTALVNTARGLAKSYGERLRGCNVRDMDPEKAEGLSPELQRALEPLLATIEEPSERIVEYNDRIEALEQTSYPQVALLKQIKGVGTLIALTFLLTLEDPHRFRKSRDVGGYLGLQPGRRKSGESEPQLHISKEGDPYLRTLLVQGAQHILGPFGIDCDLRRWGLKLAERGGRNGKKRAIVATARKLAVLLHHLWVSGEVYEPLHNSSRMTVAAAA

SEQ ID NO: 130618 - protein, 463 aa, unidentified
MAKSRKQVTAKKQPRDVMEGLQPLNLDVAGIDVGSAEHYVAVPADRDVRPIQKFHSFTADLHRLARWLEGCGIKVVAMQATGVYWIGLFQILESHGFVVKVVNARYTRTMAGHKSDVQECAWIRKLETFGLLNNSFLPPHEIRALRSYLRQRETLVSEAGTYIQRMQKALTEMNIQLANVLSDLSGVSGMAILRAILKGERDGYQLADLCDRHVKATPQEIAQSLEGDWRPELLFVLQQTVALYDQSLKLITECDQRIQQHLDTMASKVDPAVTPPPEPRKPPVKRRAKHEPPLQLRTELYRIAGVDLTRIDGIQLATAQVVLSEIGVDMSRWPDEYHLGSWLGLSPNNQVSGGKVLRKGTKKVLNRASHALRLAAQNLFRSQSALGSKYRRLRMKLGAPKAITAMAYHLARLIYRMLKNGTDYTDKGMNYYETKYRESELKRLAKLAGRHGMQLVPIAGVPV

SEQ ID NO: 130619 - protein, 391 aa, unidentified
MTFIVGIDIAKYKHECLVIDESGNSIFESFPFDNSVQGFDFFLLKMKSLPSPNKIKIGFESTGHYADNLKNFLIKSDYDFMEIHPVLINRYTKATTLRKTKTDKVDVEIICSYLNSVEYKSYSTKSYHTKNFKSLTRSRDSLVKERSLQLQRMTNVLDVMFPEFKPFFKGSLSSATARYILHNYGSPQKISNMNQSSYKKMCSELRRTISYAKFMSLKDLAKHTIGSSCELLEFQLQNYYVLYEHLNMVIKETDALILVEFEKETTYLDSIPGIGPITAATIISEIGSVDNFSNPAQLVAFAGLDPAFYQSGESEFTGRMVKRGSSFLRQAIMNSAQSSLVHNPQMYEYYLKKRNEGKAHRVALSHVAKKLIRIIFALETKRQTFNTEQMK

SEQ ID NO: 130620 - protein, 403 aa, unidentified
MIFVGDDWAEEHHDVYVMDESGKRLAARRLPEGLAGIRRLHALIGEYVEDPDQVVIGIETDRGLWVGALTAAGYQLFAINPLAVARYRDRHHISGAKSDAGDAKLLADLVRTDRHNHRLIAGDSADAEAIKVLARAHQSLIWARTQHTLRLRSALREYYPAALEAFEDLDDRDALAVLGRAPTPELAATLGLPAIRSALKRGGRQRYLDARAREIRAALRSEQLGAPAAVNAAFAATTRAAVAIIVELNRQITELEVTLAEHFETHPDADIYLSLPGLGVILGARVLGEFGDDPNRYTDAKSRKNYAGTSPLTVASGRKRAALARYVRNNRLYDAIDHWAFCALTASPGARAFYDQRRDANDSHHQALRALGNRLVGILHGCLRHHTHYDEHKAWAHRSAIAA

SEQ ID NO: 130621 - protein, 402 aa, unidentified
MIFVGDDWAEDHHDIHVMDADGTRLASRRLPEGLPGISRFHELVAAHVAEPSQVVIGIETDRGLWVQALGAAGYQVYAVNPLAVARYRDRHQVSGAKSDAGDAKLLADLVRTDRHNHRLMAGDSSEAEAIKVLARGHQNLIWARTRHTNALRSALREYYPAALEAFDDLADRDALAVLGRAPTPTEAAHLSLAKIRSALKRAGRQRNLDARAQEIAAALRTEQLAAPSAITAAFAATTRAAVGIIIELNRQISDLEISLAAHFETHPDADIYLSLPGLGDVLGARVLGEFGDDPNRYTDATSRKNYAGTSPLTIASGKKRAVLARHVRNRRLYDAIDQWAFCALSNSPGARAFYDHRRDAKQSHHQALRALGNRLVGILHGCLRHHTPYDEHTAWAHRAAAA

SEQ ID NO: 130622 - protein, 365 aa, unidentified
MIESRPSATVHVGLDVHAASLRLATVSADELLDERTLPHDSEAVARAVSRWPRVRCCYEAGPTGYGLARHLRARGIACDVVAPGLVPVRPGDRVKTDPRDARKLARLHAGGLLEAIMVPSEQVEALRDLVGAREDARIDRMCDRHRMSKFLLCHGLQMPNKSWGATRRAWLGSLTSEHAHQQQAFQTYLHALDLVDRRIEALERDLDAAAKDGPWAQLVARLRCLRGVDTLTALVAEIGTDWSRFRTAEQFMSYVGLVPSECSSGQSRRQGSITKAGNAHVRRLSVEAAWHQRQRPRVGAALAARQRGQDPLVLERAWRAQQRLHRRWSRMAARGKPHQKIVVATARELAGFVWAIATDQPLRST

SEQ ID NO: 130623 - protein, 368 aa, unidentified
MASVLYVGLDVHKDSIVIALAREGREAAETWKTIPYDGVRLRKALKMLVNSREELRVCYEAGPTGFGLCRRLREAGIDCIVVAPSLVPGKAGDRVKTDRRDARRLAHFLRSGDLTAVHVPEEAVEAIRDLERARDDAKCAERVARHQLSKFLLRHDRHWDATTWTLKHRDWIRTQKFAYPAQQRVLEDYLKTVEDLAERVARLTQALEELVEETVLAPLVKSLQAFRGISLVSAVTIAAEVSDLRRFATAGQFMSYVGLIPSEDSSGKRRRQGPITKCGNRYLRRILVEAAWHYRHAPVMSKELRRRNQGVAPEVRRIAWEAQKRLNKRLYHLIRAGKSTQKAVIAVARELAGFIWAVGQQERLLEAA

SEQ ID NO: 130624 - protein, 413 aa, unidentified
MEQGLITAVGVDVSKGKSMVAVRRPGGQIVMPPIQINHTTEELARLAERLQGLGGDIRIIMEHTGMYWRPIAHSLKEAGFFVSVVNAILIHNFSDNSLRKVKTDKADALKIANYGLTFWTELRNFSDEDETRQMLKMQCRLYERTQKASVELRNGLISLLDQTFPGINEIMPAHYCTKRSHYKWVDVSKRFWHKDCVKKLSESAFTNTYQKWCKKEGYRFSRIEAEKIYRAAQNTVATVPQNESTKILIVQAVDCLNAVYESMAVLRTEMKRLASLLPEYEVVMAMQGAGDVTGPKLIAEIGDVRRFTNKNALVAFAGVDAPPFQSGSFEAKSRHVSKRGSPHLRRTLFQVMSVVLQRSSTDNPIYSFMDKKRAEGKHFYVYTVAGAAKFLRVYYARVKEYLLALETKQETAA

SEQ ID NO: 130625 - protein, 346 aa, unidentified
MEKITRIGMDTSKHIFQLHGVNAAEQVVLRKKLRRKAVVSFFAGLAPTVIGIEACGGSHQWARLLAGFGHTVKLMAPQLVKPYVKRGKNDAADAEALCEAMSRPTMRFVPVKTPESQAALMLAGTRDRLVRNRTQLINAIRGYATEFGLIAAKGLDKIEPLLERIRMDETLPALARELFAAHAKEYAQLGARLAAIEAELMAWHHQNECSRRLARIPGVGPIGASLLVMKTPDPAAFRSGRQFAAWIGLTPKDHSTAGKTRLGTITRAGDEALRCLLVVGATAVIQQVRRGRGHPSPWLVALLKRKPPKLAAVALANKIARIAWKLMLTGEPYDAKPMTPATAQAA

SEQ ID NO: 130626 - protein, 319 aa, unidentified
MSAPVCFIGIDVSKATLDVAVRPEGGAWSAGNDDAGIAALVARLRPLGPALIVLEATGGFETAVAVALVAAGLDVVIANPRQVRDFAKATGQLAKTDGLDAHVLALFAERVRPEPRPLPDEAARGLDALLTRRRQLLEMRTAEQNRLGFATAAAVRRDIAQHIRWLERRLRDVDGDLEQVIRLSPVWRAKEDLLRSVPGVGPVVSRTLLGELPELGTLTHRQIAALVGVAPRARDSGTLRGKRIVWGGRASVRAALYMAALVASRYNPVIRTFHARLRAAGKAPKVALVACMRKLLTILNAMVRSNSHWRMPLGAGAGA

SEQ ID NO: 130627 - protein, 325 aa, unidentified
MNKYNETFGIDISKDVFDCYGSKQGHLQFKNDEKGFKKFYKTLSQGSLVVMEATGYYHYRFAQFLYKQNVAVSVVNPLSIKRFIQMKLAKVKTDKSDAKAICNYGLTQDVQLYNALTDTQSECLQLFRLMDNQLKMRTATKNKIHGEKVLGIPSKFVYRSLTKTKKYLEKELKGIENKLLSLVKQDQQEQLTLLQSIPGIGLKTALFLIVVTDGFKKFESASQLCSYAGITPTIRESGSSVRGRARISKVGNRKLRNLLFLCSFSAYKHNKGCREIFERIINKGKSKKLAMLAVSNKLLKQCFAIAKSGIPYDASYVSVLKLDKT

SEQ ID NO: 130628 - protein, 391 aa, unidentified
MYVVGIDCSKYKHDCFIATETGEVIRDTFTFDNSGTGFAQFFSILETLNCPKSQIKVGFESTSHYMVPLMKHLSVKGYEFILLNPVIVSRFRRSATLRRIKTDKIDAKTIAQVLASSDYESYHMQVYHFPELKSLTRLRDRLVKQRSYYLVMLTNVLDEVFPEFKEFFDDSLKSKTAFYLLDTYKIPSRIANMNSNSFDNLRKISHGHFSYAKFIKIKELAKSTIGSSSEADELEIFSLLNIYKTINDEVCRVESKIEEIMNIIDSPTVSIPGVGMMSAASIIAEFGDLSRFANADKMLAYAGLDCGRSQSGTADYKGKMVKHGSGYLRQALMNVVETMMIHAPVFYDFYHKKRDEGKPHRVALSHLARKLVRLIYKLETSHTRFDLNNSK

SEQ ID NO: 130629 - protein, 340 aa, unidentified
MPKYIRIGVDIAKNSFQVHALESEDCSATKRRLSRSGIVKFLAEVEPCTIGMEACGSAHYWARRFRAMGHEVKLTPPIYVKPYVKRGKNDAADAAAICEAMSRPNMRFVAVKSEDQQATLMAHKTRELLIKQRTMSVNALRGHLAEFGVIAAKGISHVEELVERAAAADLPAMVQATLGVLLAQLRSLDAATDELERAIVANHRRDPVSRLAASVPGVGALAASAILASAPDSQAFKSGRDFAAWLGATPKQNSTGGKEKFGSITKQGNRYIRRLLVLGAISVLRAAPKRKGALCDWLAALRARKPAKVVAVALANKLARIVWAIITTGEAFRTSIYAKA

SEQ ID NO: 130630 - protein, 466 aa, unidentified
MTFVNGEVQARFMARIRGVDPQRCLAIPVDVGKATAVALVADHYGEIIVAPFEFALTEAGFAVLSAAITCAQVERDALIVRIGVEAAGHYHRTLVARLRAAGLEVVELNPKAVKDARGQQLLRTLKSDARDCGAMAELLIRGSGRPPQCRDEALAAQAAWVAHRRRKVAAQVTLSNQIHGQLDLIFPGLTGCFANGLDAASLRVLIRDLPDPERVRRLGVEGVLRFVRRRGVRMSRPKARQVVQAAQLALRLPGAERPAPLVVLAADWALFEALDRQIQDATTQLAALLPDTPAGVLLGIPGVGVLTASSYGAAIGDPNRYRDAAAAYRASGLVPVTYQSAGRTRPRTGISREGSVELRRAIVELGRGVGLHHPDFIAYRRRLLSRGKPPLVAMIAVGHRAHRLAFAMLRSQRPFDADRWARAVAGHRHRADEQARHGGTTARGGPPARRDLPAQPTLTHAEAHSN

SEQ ID NO: 130631 - protein, 486 aa, unidentified
MAKRKPESTFERLTSGKLSRKRRKEIIRRIEAEDPALEVVYRNAAGIDVGNESHMVSVPPERDGQPIREFGSWTQALEQMAVWLKGCGIERVVMQSTGVYWIALYDILEKHGLEVCLTNARDTKSLPGRKTDVEEAQWLRKLYSYGLLRNSYRPAEEIRSVRSLWRLRDRHVKEMAEEIQHMQKALTQMNVQLANTISDISGTTGQAIIRAILAGERDPHKLAELKDYRIQASREEIARSLEGTWREDLLFELKQVVARYDFCQKQIVECDERLKKLLTALPDGPERKSSLGDNAKGSKGAAEKEKSSQQKKARKNQPVGFDLQQELKRICGVDLTRIEGVKLMTAQTFLSEVGPDLSSFATENHLVSWLGLAPKRQISGGRLIRHERSRHKNRAAIALRMAASTLERSQSYLGARFRSFKSRLGPGRATKAMAAYLARQIYRMLTRGEDWVDRGAQEFEKRHKQRKQAILERMAADLGCRLVPTV

SEQ ID NO: 130632 - protein, 420 aa, unidentified
MPSHPSDFVAVIGLDWADRKHDICLLETGQLTPEFSVLEHDPVAIDVWAAGLKQRFGGRPIAVCLELARGPIVSALLEYDFFVIFPINPAMLAKYRRAFSPSRAKDDPRDAFLALDLFRHHFDRLSPLRRERPAMRSLQRLVQDRRTLVEDRCRLINRVTCALKEYFPQVLRWFRDKHTDVFIDFVTRWPTLDAAKRAHRDTLVDFFHAHNVRYGKTTERRVDAIKAARPLTSDVAVIEPNRLMAESLLAQIGALSEAISRFDAEIAARSAELPDFHIFAALPGAGAALAPRLLAAFGENRDRFPNAASVQKCTGIAPVVERSGNKSWTHWRFIGPKFLRQTFVEWVGETVPHSFWAKAFYESRRAKGVPHHVILRALAFKWIRILWRCWHDRQPYDEARYLLALQKRHSPIIAHAAQSA

SEQ ID NO: 130633 - protein, 338 aa, unidentified
MYYVGLDIHSKSITICVLNGNGKVHRRCTVRQIDQMMAVLERLPEPFQVCYEASTGYGIFFELLSKVADHVAVAHPGLLKLIFRSKQKNDRRDAEKLAKLLYVGEVPIVHVPTADVRAWRELISFRRRLVEKRTRAKNGLRGLLRSLTIRSPQRPGLWTREGIAWLEQLPLDNAMHALRRDLLVEEVATLSGQIHRVETELARDSIHNPAVKLLRTIPGVGLRTAEAVVAFLDDPHRFANSKRVGAYFGLVPSQDQSGSTNRLGHITREGSATVRHLLVEASWQAVRRSPTVAAYWARIGRGDKARRKIALVATAHYLVRVMWSMLKNQTVWKETVAA

SEQ ID NO: 130634 - protein, 408 aa, unidentified
MELLYDRCSGLDVHKDSVSACIRTGSGPSTRRLHQDFSTTTSGLLELSSWLESHQVTHVVMESTGIYWKPVWHILEGHFELLLANAQEVRNVPGRKSDFNDAMWLADLLAHGLIRGSFVPPEPIQELRDLTRTRRQVVRERSQHSLRLQKVLEDANIKVSSFLANVMGRSGRRIVEALVQGETHPVKLAALADCRVQADRAKLAESLHGKVREHHRFLLKLHLDQYDHLDGIVRRLEERIEEMLRPFGEAVERLETIPGISRTTAQVLVAEIGVDMSRFQTSGHLLSFVGLCPRMDESAGKRRDTRIREGNGWLKPALVQAAWAAIRRKGSYFQAQYQRLRARRGAKKAVVAVAASLLTTVYHVLKKGEAYRDLGSGYFDQQNKERIKKKLLKRLEALGVQVEIKTAA

SEQ ID NO: 130635 - protein, 412 aa, unidentified
MQDILTCAMGLDVHRDIIVACLVKGAVDAEPEAETRTFSTLIPEMQKLRDWVIESECRNIAMESTGIYWQPIYEMLESCFDGEISILVVNARHMKNVPGRKTDMKDAQWIATLLRAGLLKGSFIPDKAFRELRHLTRYRKSVVHDITAQKNRIDKFLQSSGFRFTAFLSDTFGASGRNIIRHLIEHGSIDREALDKCLKTKTRNRIDEILVALNGSLSEHQRRFLNMVFRHLEDLEAHKHTVEDEITEEVLKHTDALNLLCSIPGIDVTAAAAIIAEIGTDMSAFPDSQHICSWAGLSPGNNESAGKRKSVHINKGNPYLKSMLCEVAWIMASHRKLYLSGWYWKVKQRKGAKRATIALARKVLSIIYTMLKTGTPYSEECFEQRRQRCERKRANRMVNELQKLGYTVVAPD

SEQ ID NO: 130636 - protein, 396 aa, unidentified
MTTIGIDIGGRAHVAARCRDGQSRADREILRVSQDRAGFTALDAWLLRQPGPVTLVTMESSGHYWMPLASHLLRRDVPVAVVNPLAAKYFARSRLGRTKSDPADARSLAEMAMRDTPDARDPLAGVELRQAARFAMTLVTEQAKVCQRLIHLVELGFPELGELFDDPTCRTAREVLRVAPTARAATRRRTATLANANGGPGHRRLGQAKAGRLQVAAADSIAVPELDAEVAFEVRLLLDQYDLLERQITDADHRVAGLLDGETARRLQTIPGVGPSIAASLISEIGDIGRFDDFDQLLAYAGVHPAERSSGTKGANPETSWHMSKAGNAHLRAAAYRMALVGIQHNPVIAAHYARKRDAGKSKMNALGHCMRKALAIVWGVWRNGTDFDPTYGVEA

SEQ ID NO: 130637 - protein, 453 aa, unidentified
MEKSSTDDQLMSLEVLHPNAAGIDIGNAAHYVAVPPDRDTEPVRRFACFTQDVRAIADWLKQCGIVTVAMQSTGVYWLPVYEVLVERGFEVFLVNARHTKNLPGRKSDVQECQWLMKLHTYGLLNNSFRPTEEICVLRTYWRQRDEHVKAASAVIQRMQKVLTEMNVQIANVISDISGVTGMAILDAILKGERDRYQLADLANPRIQASKEEIARSLEGNWRPELLFVLRQQRDLYHEYQKRIGECDEVIQLHLRTLEDKAQPENKPENPKRGKRAGGNAPRFDLRGELYRITGVDLTRIDGIHVMIAQTILSEVGLDMSRWPTEAHFASWLGLCPDNKITGGKVYHRGSRHVENRAATALRMAATSLWRSKSYLGAKFKRLRTKLGAPKAITAMAHHLARLVYRMLKYGQEYIDKGMEYYQQRYQNQQIKWLEKKAKDLGLTITFASASVAR

SEQ ID NO: 130638 - protein, 369 aa, unidentified
MGEYSEAFVAFDTSKVKHAVAIAEGGRRGEVRFVGDVASSPATVARLIGKLTGRYAKLHFCYEAGPTGYGLYRQIRELGHECTVVAPSLIPKKPGERVKTNRRDAVSLARLLRAGELTAVWVPDATHEAVRDLVRAREAAAQDLRRKRQQLLSFLLRHGRIFDGRKHWTMAHRRWLADQRFDHPAQQIVFQDGIDAIEDALARLRRLEEQLVAIVPSWSMAPVVEAYQAMRGASFLVAVTFAAEIGDVRRFDNPRQLMGFLGLVPRERSTGETVRRAGLTLAGNHRARRVLVEAAWSYRHPARVSQTMLVRLEGLPKAVSDIAWKAQVRLCGRYRRLSAGGKKLPVVIAAVAREMAAFLWAIGHQVAPA

SEQ ID NO: 130639 - protein, 346 aa, unidentified
MKLFAGLDVSLEKTAVCIEDDTGKIIWEKKVDSEPEALVEALAPWRTAIALVGLEACPLSEWIFRGLATAGFEVRCLETRHAQRFLSTRPNKTDKNDARGIANMMRLGHFKPVHMKSSQAIYLRTLLTGRKQLIAAMLKIEATIRGLLRVYGLKMGETHRAKFEARVVELVAEVPALALALDPLMIARNVMRQQKRRFDYALEKLARADEVCLRLMTVPGVGPITALAFKSTIDDPKRFASSKAVGAHLGLAPRVYQSGEIDHTGHVSKCGDVMMRYYLYEAATVFLTRDKRWSALKAWGVRLAKRHGFKRARVAVARKLAIVLHQIWMRGETFRFTSQPEVAGAS

SEQ ID NO: 130640 - protein, 403 aa, unidentified
MFAGIDIASERHVLARLDDAGAAIGKPITITEDRAGYDALLAALAPPPVLIVMEATGHYWKNLFAVLTAAGHEVALLNPLIARRFQEASLERTKTDAIDAAGLARLAFEKRPAPTHLHDEVAEALRELVRHRDRLRQDFDDRVRQLHRLVDLGFPEFTRYVRGLGSMLATCLLAEYPTAHAFARATPRRIAKLRYDGRHFVGPELAQSLVEAARRSVGQHHGPAYKLQARHICQDLDTWRKRLAEIEHDIEDLLDTHVPGKLITSIDGIGPQTAARIIAAAGDPAHFKTAGAFAAFVGVVPGLRQSGKQTSTRAGIGPLGNARLRRALWMPVLSAIKRNAWLRAFYLRLRAAGKPAKLALIAAMRKLLHAVYSVAKHRRPFVTTEQGRAVEPPTSATARPCGA

SEQ ID NO: 130641 - protein, 358 aa, unidentified
MQSVTRVGIDLAKMFIQVHAVDAVGKVVCNKQLSRDKFIAWCNQLPAGCLVAMEACSGSHAWARKLIALGLDAKIIAANHVAPYRLEGKGGKNDANDAAAICEAASRPSMRFVPVKTLSQQGMLCVHRYREGVKEERTANINRIRGLLAEFGIIAPQSPNKLRERLAEIIEDADNDLCGIARLVIQEAFSHWDEIDKQLEWCTQRISAHVKENQQAQTAVQLMGVGPVTASAAVVTVGDFKQFKNGAQFGAWLGLTPRQNSSGGKTKLGRITKRGDVYLRMLLIQAAKAAVMTAHKRDDPISRWLLQLREKSGWQKAAVAMANKNARILWAVMTKGCDFDPRYVSVKPSGGGSIAVAI

SEQ ID NO: 130642 - protein, 345 aa, unidentified
MLNIIAGIDLAKEEIQVCVCKHNKVQSNQAMTPVQFASWLASSTPMTIVFEACSTSNYWKQCALKYGHDARLISAKLVASVRQNQKTDKNDALAIAQAAQLIDVSFINGKSKEQQELQTLARLRELAVKQKVAIEHQLKSLLLEFNIRISPRQGGLNGVVQAVLEDAENGFSMLFRDALQTAWEQLMLRIDSIKKYDGYLEKAANQHAVCKSSQAIEGVGPLNAINLYIALGCGEMGQFKKGRDASACIGLTPTQHSSGGKVKLGAIGKYVKKHTIRSTLVCGAMAVVQHTLRRTAKTKKDLWIQQMVERRGKRCTAVALANKTVRTAFAMITNGTEYKAELLAA

SEQ ID NO: 130643 - protein, 476 aa, unidentified
MKNENSNKKLTGNKKNVNQDTSKTFMEMPIVNLKAAGVDVGSRSYFVCVGQGANDVREFGIFTCDLHEIALYLRNLGVQTVAMESTGFYWKQLFVLLQDYGLEVILVNARHIKNVKGRKTDVVDSRWIQLLHSLGLLSASFQPDLMTEELRTYTRQRQYLIQHASQQVLKMNKNLTLMNLQLKPVLRDLVGLSGRTLIEAILNGKRDPQYLASLIHPSCKHPTNDFVNALDGNYREEYLFELQQSYDSYKHFQHQVEECDLKINLLLQRSVEIKDNYPPQIYSSAEKKASKYIPPKNINYKNCPPTQMAEYVYHLSGVELLNIPGVNTGTILTLISEVGLDLSKFKTAKHFTSWLGLSPNNRITGGKIISSHTDSKKNRIALAFRDAANSLDRIVIDNQLKSFFKRLSAKKSRLVAITATARKIAIIVWNMLTKKEEYNPLATARNEEFLRKKKMKSIQRFINEYGIKQNELAFIL

SEQ ID NO: 130644 - protein, 419 aa, unidentified
MNTTTTTYAALIGMDWGHERHAIALRPEGGALEQRTLEHSAENLHAWLDELHQRFGGRPLALAIESSRGAVIHALARRDWITVYPIHPKTSARYREAFTPSGAKDDQPDADVLLALIERHRDRLKPLHRDDDSTRRLDLFCRARRTAVDLRTQLLNRLQSLLQGYFPQALELCGEHLGAPLALDLLARWPTLAALQKVRSQTLRAFYYTHNVRRPESVDARVQRVAEARALTDDAVVIDVSVAQVQGLIAALRPLQKHIATLDETIAQVFATHPDAALFRDLPGAGKVLAPRLAAAFGTDRTRYPEAESLGRFAGILPVLERSGGRKWVHWRWSAPKFLRQSFVEWAVQTTRYCAWARAYYQLQKGRGKRPHAIYRALAAKWLRILWRCWHDRTPYDDARYCAALEKQASPLHALLAAA

SEQ ID NO: 130645 - protein, 507 aa, unidentified
MKAKKQLKAKSNHKTGSSASKKRSVASKAQQREEQMRRVNPHAGGIDCGAREHYVAVPPESVEPGEPCVRCFSAFTEGLDILVEWLKACGVTTAAMESTGVYWIPLYQKLEAAGIEVYLVNARHVRHVPGRKSDVQDCQWLQQLHSWGLLSASFRPEDMICRLRSLQRHRANMISVAASEIQHMQKALQQMNLHLHHVVSDINGVSGLRIIDAILAGERDPKILAKLRDYRIRKSTPARMEAALVGDYRAEHLFVLGQGLQAYRFYQAQMEVCDREIETVLNQLAQRFESACDAEAGAPQPEQAVQDPQREHAVEAQTQRRVKEKRKRKPRANEPKIDLCAYLERICGVDLTQVVGLNVMSVLLIVSEIGVDMSKWRSAKAFCSWLGLCPGNKISGGKVLDSRTRKVINRVATALRLAAQAAGRSNNTCLGIFYRRKKAHLGPAKATTATARKLACIVYHLLKYKDQYREPDPATYQLKLHNATLNKLQKQAAIIGYQLVPSPLVAR

SEQ ID NO: 130646 - protein, 344 aa, unidentified
MKIVGCDFHPSFQQVAILDTLTGEVVELKLMHGTGEAERFYRELEAPGLIGMESMGNSLWFERLMEQLGHELQIGDAAKIRASYVRRQKTDKRDAGHILTLLLEKRFPRIWVPSRQERDQRQLLLHRHRLVQMRTKVKTELQHLAMNQGLQKQRSLWSVRGRAELEKLPLEGWTKRRREDLLKVLAMLETQVGELDEAVAKVAFANADARFLMTQPGVGPITALAFVVTIGDWSRFQRGKQVASYLGLIPSERSSGQKRRLGAISKQGNVFLRTMLVEAAQSAVRHDGEFKKEYAHRCHSKPKGVAKVAAARKLAVRLYWMLRTQTPYAHAVHNEGSPSHSLVG

SEQ ID NO: 130647 - protein, 336 aa, unidentified
MRYIGVDLHTTQVTVCYLKSLDNYQFKQYRLDEMADFVDSLSADDELAVEATGNSRWLVGMARERVKRIVVVNPREFEVVKRSVKKTDKRDALNLARFLAVDMLPEVRIKSELAEAVARMNETRNKLVGLKTSLLNKIHALAVSRGWKLKKESLGSQKGLAKVMEFAWTAIERLELEIIIEQISGLKASLKRLEEAIGEISRELAGFENLITVTGIGARSAGILLSVIGEVKDFKTEDKLASYFGIVPKVSNSNERVNHGRITKRGSKMGRTALVQCALVAIRYSPYLKKYYEQVKARRGHGKAKIAVARKYLGIIYNTLKNNWVFEDFNNFVLAE

SEQ ID NO: 130648 - protein, 427 aa, unidentified
MNEPKYKPTLCVGADVHKDEMVLRAVDKALGHEVLERFRVTNNLPGAQSAATTLAQVAAEQGYTRIEIGWEATGMLWMPFHRYLSTEPLLQPFELELICFNPKLVAKFKDGLVLRSPKNDDRDAFDIAARIRFGELPDTYVPGDFWQGLRRLTRYRYRLSKALSQEKMRFQAYAFLKASDWKRVKPFSNVLGATSAALLTQFTVAELQAMTHDQLVDLIARRGRGKFADPTATARLVRQALRSSYPIDPRMDEMVTASLAAMWDHIRYLDRAMKRLDQHIARTIDLLPNPIITVKGLGAVITAGILAEIVDVLRFKEHKHLAQFCGLTWRKRSSAGFVSQNTRLTKIGNVYLRYYFILGANLLRQHNLEYKAYYWRKYQEVSKYQHKRSLVLTARKLVRLVHALLTKNVPYVRPRMTDPGQEDDGLQ

SEQ ID NO: 130649 - protein, 409 aa, unidentified
MERQLERCCGLDVHKETVAACVRVGGRTGKAEQHVQTFGTTVGDLLVLRDWLAAHGVTHVAMESTGVYWKPVFYALESDFTCLLVNAAHIKQVPGRKTDVKDCVWIAQLLEHGLLRGSFVPPAPIRDLRDLTRYRKALIHDRTRVANRLHKALEEAGMKLASVASDILGVSGRAMLAALVQGTTDPAVLADLARGRLRGKLPALRQALASRFRPHHAFVLGQLLAHLDYLEEAITTLSAEIERVMAPWAEPLRRLDTIPGINQRTAEVILAEVGADMSVFPSARHLASWAALCPGHHESGGKHKSGKTRKGNRWLRTALIEAAAGASRAKNSTLQARFRRVLRRRGPKKAVVAVAHALIRVVYHVLADGTVYREAGANSYDRHHSQRVTRRALQTLERQGYRVTLEPAA

SEQ ID NO: 130650 - protein, 397 aa, unidentified
MIAVGIDISKAKSTVAVIDSDGTVLASPFTMAHTQPEMEAFVSYLKGLGEPTTILMEYTGHYHYPVLKKLQDEGFPVCIVNPYQMKKYGDVEIHKAKTDKKDALRIAAYALEKSYKLVPYSSMEQKYEDLKFLSRQYNQRISYVAKLKVQLIALLDQTMPGITRILPLNSRNPEKCALLLFIKRFKSFDEIQRIGKARFLASYDVLAKKASERSASSKGLSIYELAVDSITTRGEDPYIWLSQNQCVDLLSATQNAADEIISQMRNIAETIPEYKVLRAMHGVGDRLGPIILAEIGDVHRFHSGKALNSYAGNDAPPYQSGQFESRNRHISKRGSSTLRKACYEVMQALKLTKPQDDPVYLFMLKKEQEGKLFNVAKMAGVNKFLRIYYARAMELYK

SEQ ID NO: 130651 - protein, 391 aa, unidentified
MINIGIDVGKFKHCATVLDDSTGEVLIKPFFLTNDRKGFDLLYSKTKQFIHRKHSVGMEDTGHYMINLTNYLLDKKFTVKYINPRATFLRRKELGISAKNDRKDALLIAEMLSEKRFWRSISVRSIENSKFRDITRLYHQLQEQQNQDMNRLQRALDIVFPEVNSLSWTRYSKAYMKFLSTYPSASSIALEDIRNLRKALKTEGKGRQSKVTAEEIRELAKCSVGEDNISIDLEVTSIIAIINTREEQIRILGKKIEEFSHKLNSPIISIPGISHISGMTILAEIGDINQFQNTGNLISFAGMDPLVYQSGKYDAAHMPISKHGSRYMRKALYQAVFTVCKYSPTFHDYYTKKRNQGKSHRCAQGHCARKLLRVIYKLLSTNSLYDQNHIQ

SEQ ID NO: 130652 - protein, 339 aa, unidentified
MRTYAGIDLHSSNCYLAVIDEQQRRLFSKRLPNSLDHILAALQPFKDQLAGVVVESTYNWYWLVDGLQEAGYRVHLANPSAIRQYEGLKHTDDQSDAFWLAQQLLLGILPQGYIYPKSERPTRDLLRRRSLFVGHRTAHILSLQSMVQRCCGHGISANEIKKLTLPEASALFSDPQLGLTARFQVETIGFLSQQIRSIEKAVLPQVKLRPEFEILLTIPGIGQILGLTIMLEVGDIRRFAKAGNYASYCRCVKSQKLSDTKKKGEGNRKNGNRYLSWAYVEAANFAIRHSPRAKSFYQRKCAKTKNVVALKALANKLARASFYILRDQCAFDEKRLYGG

SEQ ID NO: 130653 - protein, 479 aa, unidentified
MNLKGRKAKKQAEINHSMMNVLSREELERRIAEIDAHMKSSTWRDLETGGKFAKNDKLTFISDDMLIVGCDIGSETHYVRAIDVRGRELSRDVYSFSNSREGFQSAKDWAMRIAAEHGKKQIVLGLEPTGHYWFCLAAWMVSNGISVVQVNPYAVKQTKELEDNSQLKDDRKDPKLIANLVKDGNYGMPYLPEDLYAELRRLSMLRDQLTEDRTRNINRLHREMKIYFPEYKDAFGKLDGAFTLEVLKQSPFPEDILNIGTDGLRGIWRDAKLRGRGYSRACTIVSLAGTSVGLKHGLQGGREAVKWFAVQILEISGKLDEIEKLLHEKCREIPYAENLLDIEGIGENLLSGILAEMGDIARFDDVKEIQKLSGLGLVACSSGKHKGETRISHRGRKRLRYWLFSAAKSAVAHSEEFELLHMYYTTRAINPLKKMQSLIVIACKLIRIIYTILKTGQKYDPERMLKDIRHPDPAVSRTA

SEQ ID NO: 130654 - protein, 467 aa, unidentified
MSTPVPVPVAMVCKEMAAVMEPQEIEDEEHEQILERVAAVDVAKSAGMVCTRVPHEMRPGKRRTRVWQVDAATNAILELADHLRCQGIEKVTLESTSDYWRIWFYLLEAAGVDVQLVRARDVKQAPGRPKTDKLDAVWLAKLTERGMLRPSFVPPVEIRQLRDYTRLRTDLTRERTRHYSRLEKLLEDALIKVSAVASKLDTLPVRDMLEALIAGERDPQALARLARGKMRAKHDRLVQALTGKFDDHHAELARMLLDQIDALSAQIGKLTTRIEELIAAIPAAQGIDPGGTTGPAAGQGAGAPVLPAVDRLDEVSGIGREAAQALIAEVGLNMAQFPTPAHLVSWTKISPQTIQSGARNRAGHTGKGNPYLKGILGEAAAAAGKTDTFLGERYRRLARRRGKLKALVAIARSILVIVWHLLADRSTRYHDLGAGYYASRIDKNRKTRSHVRQLEALGYTVTLTQAA

SEQ ID NO: 130655 - protein, 349 aa, unidentified
MRYIGVDLHKTNFVVCFLNQDESFRLETFPLSKAGISRFTSELSKDDAVAVEVTQNIYYFYDQIKTYVGRIVLVDTYRFAIIAASKKKTDKADALALARFLKLDHLPEVPVPSENVRQLRHLLQARETIVGMRTKLKNLGHAALTRNGIALSRSAFASAIGRERLQKREDLSAADKVILESALRQIAELNKEIEQLESEIVCLGKTLAGIKRLLQLHGMNLLSAISLLAEIGDIHLFETSKQLVAYSGLATSIRQSNQTSKQGHITKQGRKRLRTVAIRAVLSMVSRTNTPLMDFYARKKREKGSGKAICATAQKLLTIIFVMLKKELVYWYLEERLYNRKLRQLNAAA

SEQ ID NO: 130656 - protein, 355 aa, unidentified
MNSSKFIAMDVHKDSISISVRNAAGKIVMESLIETKASMILQCIAGLRGDLHVTFEEGTSAAWLYDLLKPHVTRVVVCDPRKNKSMREGNQSDKIDARRLAELLRLNHLNPVYHGEHGLRTLKEFVRSYLTVTKDLGRVMTRVKAIYRSWAIPCTGKQVYAACHRAEWLAKIHEPGVHRRAEFYYQQLDALRVLRLGVRRELLAESKKHKAWKRLCEIPAIGPIRAAVLLGILQTPHRFRTKRQLWNYSGLAIEMHSSADYRSVDGELQRSKKNVLVRGLNRNCNHDLKNLFKGAAVIASSKPGPFEKFYAGLVAKGMKPELARLTLARKIATIVLILWKKGVSFDPQYLKPQTA

SEQ ID NO: 130657 - protein, 457 aa, unidentified
MKQGKRHKESKSGRRIQTRQGPVHQGLVHPHAGGIDMGATEIYVAAPPAGEEQDVRCYKTFTEDLHRLADWMQERGVDTVAMESTGVYWIPLFQILEARGIEVCLVNARHVKNVTGRKSDVQDCQWLQHLHAVGLLAGSFRPEQEICALRTVLRHRAEVVQDASGHIQHMQKSLDQMNLQLHHVISELAGMTGLAILDAILAGERDRYKLAGLRDARIRASEETIVKSLVGDYRPEHLFTLRQALEAYRFCQKQLAACDDQIRRMLQEMDSFEGGDGGSPAPWANDAFDLKSELHRVLGVDLTQVPGLEVKTAQVLLSEVGVNLAKSFRSAEAFVSWLGLCPDNRVSGGKVLSSRIRKVHNRVANALRGAARSLHHSDSPLGAYYRRMRAKLGAPKAIVATAHKLARIIYHMLTSRQAYDPSVFDEMERKRVQYVKAKLQAHARALGMRLVPAEAAC

SEQ ID NO: 130658 - protein, 392 aa, unidentified
MRKPKQRKPLNDLSRSLTTLDANHTLIAVIEMGQKSWLVAGIVPGVERQPLKKLDTDEDALLKLLNRWRMEAEKAGHKIKRIMVAFEAGRDGFWLARWLRARGVEAHVIHASSVAVSREHRRAKTDRLDTELLKRAFLGWLRGERDHCKTVAIPTIKDEDAKRPNRERDSLVGEQSRIVNRMKAALARLGIRDFNPKLKKAAERLSGLRTPEDQPIPPNTLAELYRDMERRRLVTDQIRQIEDARLERLKQAPKDGPNVMIRLLARVIGVGIETADMLVQEVLSRNLRDRRAVARYAGLTGSPDESGSKRREKGLARSGNARVRRGMIQLAWRFLNFQKHSALAKWFQARTANARGSRKKMIVALARKLLIALWHFVRDGVMPEGVILRPAQ

SEQ ID NO: 130659 - protein, 355 aa, unidentified
MRILSLDLSKYKTVACDYEAETGRHQFATVLTTPKGLHDLIVDREPDRVVIEICSIAGWVCDLVRSLGIELQVASTNDERWQWRKVKTKNDRRDGLKLAQLSARNELDLVHVPQSEMRQWRALIAYRQHLVQRRTKIKNHIRELLLREGQLLPRHRSAWTQEGLAALEAMGKPLREVSMAELWRGELEVELAQFKAVQAQLTEVVAKLDALGAANHNVRLLQTAGGVGPRLAEAVVTMFDDPRRFRRGAAVSAYIGMVPKQWDSGETERRGKITRHGNRLVRSLLVEVAWCALRHNPWARETYQRISGGKKSRKKIAIVAVGRKLLVRCWAMLRDQTPWHWEGQNAVVTPPAPTA

SEQ ID NO: 130660 - protein, 320 aa, unidentified
MNSIIVGIDVSKETFDAAVLINNKVQTRKFNNNSEGFNKLVTWLKSRGTGHVCMEATGIYWKNLAKYLYDYGYKVSVVNPARIKGFAMSKLRRTKTDKADSVLIADFCKAMKPEAWYPQPLYIQELQQLVNRLNVLIKHKTQETNRLEGASKAIANNIQMHIEFLETQVKEIEQLINSHIKNNKDLHDKAMLLESIPGVGAKTQAIVLAFFADIEKFSSAKQVVAFVGLNPKHRQSGSSVRGVSRISRTGNSDLRKAFYMPAMSALRYNCIIKQFSQRLSDSGKPKMLILIASMRKLLHIIYGVLKHNSSFNPNVSIIQK

SEQ ID NO: 130661 - protein, 323 aa, unidentified
MLIHYIDIAKRNFVIAVSSLSKTKTETNNPKGIAHTIEYLKKHKVALVVTESTGGLEIPAAKAIRRAGIAVIIANPRQTHQFAQSQPLTKTDAKDAKMPAFFAQMTAQKEDSQTMPYQPPTEAEEVLEALVNRRNQSADMRTAEKNRLHQVHETQVGSVKQLIAHFDRLIDELDKQIDNHTHTHFDGKAQVAEQIKGIGSITTATLMAMLPELGRLSHKRIASLAGIAPHPRESGETKFKSRCFGGRPAVRKALYMATVAATRFKPLIRDFYQRLPSEGKPYKVAVTACMRKLLTISNARMRDYFAENDTAENDTAENGIRTA

SEQ ID NO: 130662 - protein, 389 aa, unidentified
MPAVADRPDAPTAIQTNLAAIFVSLELSRSIWLITSLSPGSAEKMSKHSVRAGDVAALLARFSELKRKASERTGKSFPIVVIQEAGLDGFWLHRALQSEGIESHVVDPASIATSRRRRRAKTDRIDGEALLRALLAFKRGEPRVCAMVKAPTPEEEDRRRLCRERKVLIAERVKHVNRVKWLLFSQGVSGYEPLRRDRRQRLDELTTGDGRSLPMHLKTQITRELDRLELLLDQIKRAEGERDTLLAAQQAAAPGPAGRMLLEFKGIGAEFAASIWMEALFRHFDNRRQLASYAGLAPTPWQSGSVDREQGVSKAGNPRLRTTLIQLAWLWLRHQPQSALALWFKERVNRNGGRLKKTTIVALARKLLVALWKYVTAGVVIEGAVMKDA

SEQ ID NO: 130663 - protein, 378 aa, unidentified
MRIVCGLDVHKDSVYLCILSSTGEIVEKVFSVLTFQLAKMRDLMLKHHVQEVGMESTSVYWIPIWRILEPHFKLKLVNPYFIKQLPGHKSDVKDAQWIAECMLKELVRGSFVPPERIQQLRQYDRRIFDLDDEINRKLSKLDAALQRCNIRLSNYVSNTDSKSYKEVVARISEGITDPKVLVEEIHGRIINRHGRKTIIAALTGVITQADSDMMRQIREEIDIAERHKQECIDKMQEICEKEYSDQLRNLQTIPGVKLRAATSLIAEIGIDMSHFETANHLASWSGLKPRNDESNKVIKSKRITHGNRYLRRTIIECSWAASRTQGCFFSRFSYHQTQVRKKTKMKVQVAISRKLLICAWHILSKNVPYQDFCERGIS

SEQ ID NO: 130664 - protein, 338 aa, unidentified
MNIVFLGIDLAKNVFQLCGLNQAGKPVYTKRTGRKELLQTLANIPACLIGIEASTGAFYWQREFEKLGHKVKVISPQYIKPFVRGQKNDGNDAQAIAVALMQPTMQFVPPKSPEQQDIQALHRARQRIVSHRTATVCQIRGLLLDRGIPIGSAVSRARRAIPLILEDAENGLSSRMRRTIAELYDLFSDLERRIHFFDKEIETVFRQSEACQRIAKVKGIGPKTATAVVAAIGKGTEFKNGRHFAAWLGLVPRQHSSGDRQVLMNMTKKGDKHLRTLFIHGARAVVRVATNNNDGHMNQWVNQLKERRGFNKTTVAVANKNARIIWSMLRNETEYQVV

SEQ ID NO: 130665 - protein, 339 aa, unidentified
MKLYGAIDLHSNNNVTVLIDEQDKVVYEKRLPNDLGVIAQQLAAYQSSLEGIVVESTYNWYWLVDGLMDKGHQIHLANTAAIQQYEGLKYTDDHSDARWLAHILRLGVLPQGYIYPKEERAVRDLLRKRGQMVRQRTANLLSLQNLITRNTGSSISSNRIKTLDSETVDALLPNQDLALAVKANLAMIQCADGQIDILERTVTDRVKLRAEFSFLKTVPGIGQILALTIMLETGEIQRFSTVGDYASYCRCVGSQKLSNGKKKGKGNTKNGNKYLAWAFVEAANFAIRYNARIKSFYQRKKAKSHGVLAIKAVAHKLCRACYYIVKNRVAFDIAKAFAG

SEQ ID NO: 130666 - protein, 344 aa, unidentified
MLIIGCDFHSGFQQVAIFDNQTGEIQEKKLLHPAEATEYYRSQREQVRVGMEAGAPCQWFRRLLAECGHELWMGDAAKIRAAEVRKQKTDRRDAELILKLMLEERFPKIWVPSEEERDVRQLLMDRHHRMRTRTQIKNQLQSLALNQGMQKGRKLWSAAGMEALRELPMMEHAARRRDQLLQRVVELDAQLAELDVLVRRQAEGRKDARRLMTHPGVGPQTALAMVLTIGDVNRFESAGKVASYLGLIPGEYSSGNKQRLGHISKQGSSLMRFLLVEAGQSAVRGDERLRRAYARLAAKKCRAVAKVMVARRLAERLYWMLRRNWTYAELARHAGEPGSSCGAK

SEQ ID NO: 130667 - protein, 345 aa, unidentified
MEIRTIGIDLGKTVFHLVGVNARGEVVVRKKCSRLQLLRFTSNLPECLIGMEACGGSHFLGRALREQGHDVRLMPAQYVKPYVKTNKNDYIDAEAIAEAVTRPSMRFVPIKTDDQLDLQSLHRVRERWVGRRTAVINQIRGLLLERGITVPKGRRRIEESLPWILEDPDNKLSGALRALLHELRLEMQYLQKQIDECDKLILRIANELEDCRRILAVPGIGPMTATATIAAIGNGSAFKKGRGFAAWLGVVPGEHSTGGKQTLTGTGRRGNRYLRKLFIQGAHAVLQQRMKQSNGLNTWLAQLTSRKRIQVAAVALANKMARMVWAVLSKGEAYRPPFLLETAAA

SEQ ID NO: 130668 - protein, 409 aa, unidentified
MDIMYERCCGLDVHKKTVVACVLVPGSGRQPTKEIRTFGTMTADLLELGDWLAEKGVTHVALESTGVYWHPVWNLLEGNVELLLVNAQHIKQVPGRKTDVRDCEWIANLLRHGLLRASFVPERPQRELRELTRYRTSLIRERAAEINRIQKTLEGANIKLGDVASDILGVSARRMLEALIGGTTDPAELADLAKDKLRKKLPQLERALKGQFRAHHRFLLAQQLAHLDGLDELIDSLGSEIAERVRPVEQVVERVDGIPGFGRRTAEIVVAEIGTDLSRFPSYKHLASWVGLCPGNNESAGKRMSGKTRKGDVWLRSALIEAAHAASRSKDTYLAAYYHRVAARRGKKKAIVALAHTLLTIIYYLLTRDCDYEDLGPEYLNEHDREQTERRLIRRLQGFGYTITRETAA

SEQ ID NO: 130669 - protein, 368 aa, unidentified
MNESITALSTLTIGIDLGDRKSHLCVLDASGEIVEESQLATTPTAMRARFEGLAPARIALEVGGHSAWVSELLKELGHEVIVANARKLRMIFQNDSKNDRLDAEQLARVARMDPKLLYPIEHRDRSARADLAVMRSRDALVATRTRLVNHIHGVLKSFGHRVKKYAAPGFHRQVVDQIPDELRASLQPILNTLAGLAEQILILDRELRRLSTAIYPETSLLSQVGGVGPITALRYVLTIEDPRRIKRSRNVGAYLGLRPRQRQSGQRDPELRITKAGDRDLRRLLVQCAQQILGPFGKDSDLRRWGLELASRGKATAKKKAVIAVARKLAVLLHRLWLTGEVYEPLRNTNRLAAARAGKSGAVPALVA

SEQ ID NO: 130670 - protein, 293 aa, unidentified
MSDYSYFGGIDLAKNHFSLHVVDQKGKVILHKSVTRSKLLTTISNLPHMRIGLEACGGAHYWARTLNKLGHDTRIMAAKYVAPYRTKGKNDLNDAVAICEAVQRPATRFVPTKSPEQQAILSVHRMREHWVRERTAIMNRIRALLSEFGLVIPVGRSSLMKQVPLMLEDAENELPQLARVVLHDAYQHLDALNQRIADTEQTFESFAKISDNVQRIMKVRGIGPQTATAILASIGNGAQFDKSRDFSAWLGLVPKQYSTGGKPKLGRITKHGDEIPSYTARSRGENCHSQPRR

SEQ ID NO: 130671 - protein, 427 aa, unidentified
MKKADLLSTLFVGIDISSRSNVVALLDFESQKPLQTFAVDNNQPGAVELANRLADYLHSRPDLPRLLIGLESTSFYGVHIANYLSSCEILMPFHTHVYCLNPKTIKNYKKSFVDLGKNDFIDAFVIADFARANRITTQPWRGSQFLALQRLTRHRLHLAKALTREKAYMLSNIFLKFSEFSLLDPEEQPFSNTFGATASAVLTDFLSTEEIIEMPTEDLIRYICEKGRNHFPDPEKTASLLQQAARNSYRLDKCLYEPLTISIASSFTLISTYMAEIKAVNKAIEKTLRGLDPNAYQSLLSIPGIGPVMAAGILSEIGFIEAFKSQDSLAKYAGLVWRENQSGNFRGEDTTMSKAGNAYLRYYLLEATSHVKNHCSEYAAFYQKKYAEAKTHQHKRALALTARKLVRLIFGLLAKHQLYSSDRVGQA

SEQ ID NO: 130672 - protein, 430 aa, unidentified
MSSISEEHGSRQAVPDAACGVVVGVDISKGRADWRACRPGQWGKRHHLVQDGTGFLGFEEQLRALAAEGREVWVAMEPTGPYGLCLQEWLLDRGWRAVLVNPYHVHRTEEIPDNSPRKDDGKDPGVIAELVWRGSYSHPRRMAGPYAELRTGIREWFSLVKKQTAAKNEAGALLEVWFPELGRLFRSGLCKSARVVIKRYESPQAVLAAGKGRLRRTLRAGTSGRGERYAERIWEAAEYSVALEEGQMGRVRALRGLVAQLELVEARQEQLRAELAQWLAQTPEGEYLRSVPRVGTIVAAGLLGECGPLGDFPREAAIEKFVGLHLYRKASGKRRGKLHITKRGRSGARALLGRLAALHLQPGGLAWAWGQELRAQGKQGTEIQTTLARKLLRVVFALCRRQEHFDLKRWEAGAQVADGVRVLHGMPVAA

SEQ ID NO: 130673 - protein, 322 aa, unidentified
MSPNTPKTMTKKSAAVYVGLDIAKATLQLHLQGRQHALPNSATGHRKLVTLLRSVSGAHIVCEASGGYERAVVAALQAADLPVSVLNPAQVRHFALAQGRRAKNDPLDAAVLTACGEALRPKPTPAPQAVLAELRALVQWRNYLKDQLCAARNQGEHATLRYVQKQQAKLVKHLATQMEKVEAELASALNRAPETQKQVQRLTELDGVRTLTAVSVLSQMPELGQLNRGEAAALAGLAPWTRQSGPWEGQRHIGGGRAEVRRSLYMSAVVLARQTETLLGKFYQRLRAGGKPAKVALTAVMRKLLLQMNQALKPTRDEPQAA

SEQ ID NO: 130674 - protein, 355 aa, unidentified
MKGTAVTTTMAETGVAVTGGVDTHLDTNMAAALDGVGAQLGTKEFPTNIAGYRALHLWLESFGTVVRVGIEGTGAYGAGLARYLGAHDVQVIEVDRPNRQNRRRRGKSDPVDALSAARAALSGEASSLAKTRNGAVEAIRVLRVARSSARRDRTEALNQMRSLVSTAPDELREQLRDLSGLALIERAAALRPGAGMSVISATKTALRELARRVDYLGEQMDRLTALLGPLVADTAPALVASHGVGTDTAGALLVAAGDNPERLSHEAAFAHLCGASPIEASSGKVTRHRLNRGGDRQANHALWRIVMVRMVSDPDTRAYVERRTKDGKSKREIMRCLKRYVARELYPLLAAEKRA

SEQ ID NO: 130675 - protein, 355 aa, unidentified
MSVYLGVDFHARTQTVCWCDTADGLIQQRTLDHQQDDVRGFYTQFPAPATVGLEATGYARWFHRLLESLGHRLLIGDAYVIRKCALRRQKNDRRDAQLLLDLLLHGDFPAVHIPSTASQETLRLLRYRQRLVQIQTKLCNIVQALALNYQLRLGPSLWSKRGQQQLSTLPLDSSDALQREHSLVLLQEIRTRIRAIEKELTLRADQDARVRLLQTHPGVGLLTSLAVVHTLEPVTRFDRARRIAAYCGLDPREASSGDTVRMGHISKQGNRLLRYLLTEAAHRAVHGKGDPDLRSFYFRLLERKKNAAVAVTAVARKLVLRLYRMLREDIDYTEFRRRGREARCARKPASPAVRD

SEQ ID NO: 130676 - protein, 379 aa, unidentified
MKVVYERCCGIDVHKNLIVACFMNGRKREIRSFGATTKELRELTEWLQESECQMAAMESTGSYWKPLYNILELSGLDAIVVNAAHMKALPGRKTDVKDAEWIADLLRHGLLRASYIPDRHQRELREIARYRKSLTEERSRELNRLQKMLEGANIKLSSVVSDINCKSSRRLLNEIVEGEDLNEEKVKDLIYVKMHKKIDQIMPAIDGIISPLQRRLFESVISHIDDMTKRINEMSNIIGDYLKGYEDAIAQIVELPGIGRLSAEMIIAEIGVDMTRFPTAAHLCSWAGLCPGNNESAGKRTSGRTPKGNKKLKVTLVQCATVAKGMKKSFFSAQYQRLVVRRGKNRATVAVTHSMLIAIYHILKTGEPFRDLGADYFTI

SEQ ID NO: 130677 - protein, 319 aa, unidentified
MNNKQSQFTTVIGIDVSKNKIDVADNQNSAVKTVGNNKKELTQWIKSIADRTITIVVMEATGGYESLLVELLHQNEIALAVVNPRRVCNFAIGIGRDAKTDPIDAGVIVRFGEVVQPVPQLAQSDEQIKLGVLVERRRQILDLINQEQNRSQQTRDKEIRDSIDTVLETLKKQLKTLDERIAKAVVADEANVRKVEILNSVKGIGPVTISTIVAELPELGKLNRQKIAKLAGVAPLNNDSGQSIGKRKTAGGRSGVRRTLYMATLVATRFNPRIKAYYQRLLAKGKLKKVALTAAMRKLITILNTLVRTDQLWIDPVAG

SEQ ID NO: 130678 - protein, 405 aa, unidentified
MTDIEQHDRVQVFVGVDVGKGTHHAVALDRKGKRLLDSALPNDETKLRALIGKLKEHGPILLVVDQPATVGALPVAVARDEGVLVAYLPGLAMRRIADLHAGEAKTDARDAYIIAEAARSLPHTLRSLKLADSQVAELTMLCGFDEDLAGQIVQVSNRIRGLLTQIHPALERVVGPHLDHPAILDLLERHPSPAQLAALSQKQLANRLIKLAPRMGKTWAADIVQALSEQTVVVAGTQAASIVLPRLARQLAALRIQRDEVAKEVERLVLAHPLHPVLTSMPGVGVRTAARLLIDVASRAFASAGHLAAYAGLAPVTRRSGSSIRGELPSRRGNKQLKRALFLSAFAALRDPVSRAYYTRKVSQGKRHNQALIALARRRCDVLFAMLRDGTFYSPPQNKISLTTT

SEQ ID NO: 130679 - protein, 313 aa, unidentified
MAMRAEQFIIGVDVAKVELVSYCEQSGQHHSFRNTQPEIRKWLALQPSNTAICVEATNIYHLDLVEMAYEKGFAVYVVDGYQLSNYRKGIGGRVKTDASDACLLARFLDREGSALRPWAPPPPVYRKLQSLLRRRAALVSARTSLTQSWSNEASLKEAYHSFSRHFESLDLLIQKRLKTLVREAGLLEQVVRCQKVEGIGFLTAVALVTAFIRGEFRSSDAYIAFLGMDLKVADSGQKSGRRRLTKRGCSEVRRLLHNAAMAASKSAAWKELYEYYRSKGKATTQVLVILARKLARVAFALMKTQGEYVSRRA

SEQ ID NO: 130680 - protein, 345 aa, unidentified
MQAITITTIGLDIAKSVFQVHGVDADGQVVIRRQLKRRYVLVFFGKLPPCLVGIEACASSHHWSRELKALGHTVRLMPPAYVKPYVKRQKNDATDAEAICEAVTRANMRFVPTKTPEQQSCLMLHRTRHLFIRQQTAVINSIRAHFAELGIVAPVGRKGVEELLSVVAGPADKRVPDIARECLAALGAHLRRLKEQILEFDRMIIAWHRSSDTSRRLDAIPGVGPMLATALVAGIADPKAFRSGRNFSAWIGLVPKQHSSGGKDRLGSISKQGDRYLRGLFVAGALAVIRYAKIHGTKHRPWLTALLARRPTKVAAIALANKIARMAWAMMARGEQYKQPVALAA

SEQ ID NO: 130681 - protein, 441 aa, unidentified
MDLLHTHGAGLDVHKHSVVAHARITDAKGRVTRHTRTFGTMTVDLLALAAWLLSLEVTHVAMESTGEYWKPVYNLLEGSFTLLVVNAQHIKNVPGRKTDVKDAEWIADLLCHGLVRGSFIPPQAQRDLRDLTERRTNLVRDRATVVNRLQKVLEWANIKLAAVVSDVVGVSAREMLAAIVDGQSDVSVLADLARGRMREKRAVLEAALHGRVRDHHRFVIASHLEQIDFLDAQIASFDTQIVECVNEQVPPNPPAATATPPPAAPPSTGDTDDLSWEDAIEIWDSVPGIGRRLAEQLVAEIGPQMREFPSAAHLASWAKVAPGNRESAGKRLSGKTGKGNRWLRTSLVQAAHSAVKVKSSALAVYYRRLAKRMSGKKAMMAVAHKILTIGYRLLSKRELYSEPDVRVRDTRRTEQLAAQMQRRLERLGYSVHIEPLTASAT

SEQ ID NO: 130682 - protein, 341 aa, unidentified
MKPELSVVGIDLAKSVFHLVGMDERGKIILRKRLARGEVMPFMAKLPRVLVGMEACGGAHYWARQLREQGHEVKLMAPQYVKPYVKTNKNDLRDAEAIAEAVTRPSMRFVPIKNVEQQDLQALHRVRERLMGARTALVHEMRGLLAEYGIVLPTGVNTFRTALAEKLEVEHAKLTPLSQELFSKLCEEFKKVEAEVVYYDAKLQAIATTHPESQRLLTIPGIGPITATALIAAVGDVGGFTNGRQFAAWLGLVPKQHSTGGQTRLLGISKRGDSYLRKLLIHGARATLRWARTKTDSRSQWIRGVLERRGWNQTAVAVANKNARIVWALLSRGGVYGESTN

SEQ ID NO: 130683 - protein, 441 aa, unidentified
MKSFEKMQIVNPNAAGIDVGSRSHFVAIGQDENQIREFNVYQSGLCALVAYLQENKIRSVALESTGSYWQSLFMILQGNGFEVLLVQGTQTKNLKAKTDVKDAQWIQKLHSLGLLRGSFLPSETTLQIRTLHRHRSSLIEQSSSFVNKMQKALRLMNFRLDVVISDITGVSGIRVIEMILSGETSGEKLAEYCDKRVKKSKEEIADALQGKINNEYLHELSDCYDIYRLIQDKIKNTDTRIDQVLKNQTREIVLSEDIELVKKQNKGKNQPKFDVQKYSLKLFGVDLFAIESVCSGTVTSFLAEIGTDIYKFKTSKQFVNWLRLAPNNKISGGKVLSSRTPKGKNKFALTLRNAANTIERKKEGYLVMFFKRISFKKGRGAAITATARKIAVIIWNMIVKKQHYIPINTDQYIQEMKNKKTIQIKKMIKKYGIETTSLSIP

SEQ ID NO: 130684 - protein, 271 aa, unidentified
MTPTFLGIDISKKDFHVFLLKEERGSKPKKFTNNTEGFESLNQWLKKQGVEELHACMEATSIYGDALAEFLYEAGYQVSVVNPARIKGFAKSELLLTKTDSVDATLIARFCAAIKPSFWKPTPFEVKELQALLRRLESLTQMYQQEENRLETATVSVAKLTRAHLEYIKEQQAEIKKMISAHFDQHPHLKQQRELLTSIPGIGEQTAAVLLTEVGRIEDYKNARQLAAYAGLTPCERSSGTSVHGKTRLSCTGNVRLRKALYSSSVTLGRV

SEQ ID NO: 130685 - protein, 352 aa, unidentified
MTYYKRIHQFYIGIDLHARSMYICVINNRGETVFHKNMECSTDNLEIVTKTFGTDIVIGVECIFTWYWVADFCAEHEIDFALGHAYYMKAIHGGKTKSDKIDSEKIANMLRGGMFPLAYAYPKKKRTTRDLLRRRLYFVRQRAELSVHLQLTNHQYNINEPLASSKMRSRVYRDTIPEKFSDPMTLKMVNADLYMFDAYHDIITKLESQIEDSMEVQDPVSYAIINSIPGLGFILSLTILYEIDDINRFPDEGKFISYCRLVKCSHESAGKKESGRHNKIGNVHLKWAFSEGAVLFLRNNESGQKWHDKLVQRYGKARAMSMIAQKLARTVYFLLKRKESFNAEQFYGLKKT

SEQ ID NO: 130686 - protein, 331 aa, unidentified
MLSEHSVLKKFRQDPDVDALHKFLVTNYPEGTYHSVYEAGFCGFWIHSKLISLGINNIVVNPSDVPTMSKEKLRKTDSVDCGKLARELRSGTLKGIYVPGVETLEMRSLIRLRNSIVKDSTRQKNRIKSLLRFHGVEIPEQFTRYSVGNWSKRFLKWLEGVELSTMYGRKTLELHLEQFVRLRGMLLQETRAMRAISRSEPFKEWIRLLTSVPGIGITTAISLLVELDDINRFKSADQLAAYIGLIPMCHSSGEKEGVGDITIRKHAMLRCYVIEAAWIAIRKDPAMTMAYEGYRKRMNAQKSIVKIARKLVNRIFFVLKRRQEYVPCIVK

SEQ ID NO: 130687 - protein, 355 aa, unidentified
MHAKKKGSTEELAVVGIDIGKETFHLVGFDRSGQLVMRKQIKRLALSATFEHLPRCVVGMEACLSAHFVSRTLRGMGFEPRIIPAIYVKPFNKGQKNDYNDAEAIAEAALRPNLRTVAEKDQDQLDLQALHRVRARLVSRRTATINQIRAFLIEQGITVRSGLRALKNSFEAILDQRREEISPRIRGILMGLYGDWLWLDRRIEDVLTEIEEISRTEENCANIMSIPGIGPMISTAMVAAIGKGEAFDRGRDFAAWVGLVPTQYSTGGRTILGRITKRGSRYLRMLFVQAAKVIMMRQHRWADFSFGPWLTGAVARTPRNKAAIAFANKIARTAWSVLHHGTRFDAKQDPALEAI

SEQ ID NO: 130688 - protein, 365 aa, unidentified
MSQDTTYLGLDVHKRDIAVAVRLSGALIHEEQLPNEKAAVSRFARRWKRRSAGRLRCAYEAGACGYALQRQLETLEVACDVVAPSLVPRKPGERIKTDRRDARKLAEYLEGGHLTPVHPPTPAQEAGRDLSRAREDAKQDRMRARHRLLKFLLRRGKPYAAGRKHWTGAHRVWLGTLSFETRAEQIVFDDYRLALDQVDARIAALDQEIETLAQTAPYQAAVGALRCFRGIDTRTAFGLVAELHSIAHFDRPSSLMAFVGLVPSEASSGDRQRRGAITKAGNGHARKLLIEAAWHARHKPAVPVALRKRREGQPAEIVAMADVAQKRLHRRYWQLVERGKPTTVAATAVARELAGFVWAALREAA

SEQ ID NO: 130689 - protein, 327 aa, unidentified
MKQNPAPVYVGMDVAKATLQVHLNGHQFEFKNDATGHAQLSEKLAKLSRPHVICEATGGYERPVVEACHKAKILVSVLNPAHTLAASQAQGNRAKTDPCVAAALTDYGQRFQPEPTAALPPAVRAITELTLWLKQLIDNRAVVRTQAEHHANSFVGQRHAELLAHYQSQIETVEKEIKKRVRAQAPFQQRVDCLTQIEGVGFRTALLTLVFLPELGFMNRGGTATLAGLAPWPCDSGLMKGKRCIGGGRAQVRPVLYMAALSASRCNPILAPFYQGLKKREKPGKVALTAVMRKLLIHMNSQLKKLPAIPIHQKSGKSNKLKKSLAT

SEQ ID NO: 130690 - protein, 403 aa, unidentified
MKQIVIGVDPHKLSATIEVVDQHERVLGSGRFATDKAGYAAMLGYVAQWSRPTWAVEGSNGAGRSLAQRLVADGEHVVDVPAKLAARVRLLDTGHGRKTDAHDAHAVAAAAVRAKKLRVLSENPELESLRMIVDRRDELTRQRVQTVNRLQRLLAELIPGTSKKDITVLQAKAKIASVRPRDLVGKTQRRIAAEELADLVAVEKKIKTLTKDLKTIVEASGSSLTTLPGVGTIVAARVLAEVGDVTRFADRNRFASWTGTAPLEASSGEQVRHRLSRAGNRRMNHMLHIAATTQIRLDTAGRAYYRRKVAAGKTRMEAMRCLKRRISDAVFRQLLADARADANRPVGAGPVGHCGASRESSAVDFHPLIDTSDQPLPGPAETTLQPDPRRRKTAGSSALSPAS

SEQ ID NO: 130691 - protein, 340 aa, unidentified
MLIIGCDYHPSFQQISFVDTETGECGQRRLDHGTGEAESYYRSLPGSRVRVGMEASGHARWFERLLGELGYELWVGDPGKIRAAEVRQQKTDRRDAEHLLQLLLEDRFPRLWVPTLAERDLRQLVLHRHRLVGLRTRVKNQLQAVALNEGMQRKKRLWSKKGREEFEQLRLLPWAGRRRGDLLALLDGFDGSIAELSQAVEQEAKRRPEVRRLMTHPGVGPLTALAFVLTIGKWERFGCGKQVASYLGLIPSEYSSGGHQRLGHISKQGNTLMRWLLVEAAHVAVQRDPQWRRHFIHLSLRRQRSVAIVAVARKLAVRLYWMLRQECDYPQMAQHGSHVG

SEQ ID NO: 130692 - protein, 483 aa, unidentified
MHPLATNISTPTRDVHRFGFEPAGALEITNEYSGLAVAPAHLYCFRRSQACMSLMANVTQRSIPMDALNTSAFTAFIGIDWADAKHDVCIQGADSDDSEFAVIPHQVEKIDEWAQALRRRFGSPMAVAVELSKGPIVYALQKHDCFVIFPVNPSTLAKYREAFQPSRAKDDPTDAELAVDLIMRHPERFKPLQPQSTEMRTLATLVEQRRRLVDDKIRITNRLRVALKQYYPQTLAWFDHIDTPLFCDFLTRWPTLLQAKRARKNTLKTFFHGHNMRFEQVLEQRLVAIKKASPLTLDEAVIVPYRLQALVFVEQLRVMLNAIKRFDTEIESVAKQHTDYALFSVLPGAGSTLAPRLLVAFGEQRERYKNAADVQKYSGIAPVTERSGKKHWVHWRWQCPTFLRQTFVEWAAQTINKSFWAGEYYQQQRAKGNTHQAAVRALAFKWIRILYRCWQTRTPYDEVTYLKALERRGSSLLTVRKIT

SEQ ID NO: 130693 - protein, 412 aa, unidentified
MEYRIAGIDVHKKMLAVVIADVAKPGEYRFERRKFGAGDAEMRLLADWLLEQGVKEAVMESTAQYWRPVWHTLEGKCQLHLAQAQSNRAPKGRKRDFDDAERLVRRHVSQELFLSFVPDTEQRLWRTMTRTKLQLTRDRVRLRNQLEGYLEESQIKLTSHLSDLFGLSGRRMMRALAEGVTDAAQIAVLADGRVEATPAELEDALRAAATFTPLRRQILKLFLERLDLIDSQMDVMDKNIAQVLREHQDAVVRLGEVPGLGVDSAQQIIAEIGPKVANFPSAGQLASWVGCSPGREESAEVSKSDRSPKGSRFMRRILNQAANCAVKAKGSVFQDLYRRVVSRLGHKKAIWAVAHKLCRITWKILHDGVHYEERAAQPNAETIRRRIGKLSRELRRLGYSLQPTPVTEAGTA

SEQ ID NO: 130694 - protein, 342 aa, unidentified
MQVIIGVDPHKASHTAVAIGTCEDELARKKVRASRSQVEQLLAWAEPFPTRLWAIEGADGMGYLLAQQLVASGEHVLNVPATLAARTRLLGSSRSSKNDPNDALSVAVTALRTRDLRQVQRVGHSEVLRLLAKRNTDIGDQRTRLVCRMHALLLEIAAGGIAKEINASDVDRFLAAVVPATPVEQVRFDLAVELLADIRRLDEQLKASHKRIRVAVAASGTTLTDLFGVGPILGAMLIGFTGDVRRFANRDRYAAYNGTAPVEFSSGGRTVHRLSQRGNRQLNHALHMVAVCQLRQPHSEGRAYFDRRVAEGKTKKEALRALKRQVSNAVYRQLVADAARGH

SEQ ID NO: 130695 - protein, 312 aa, unidentified
MRTKSNYVGIDVGKDNLDFAVAGIEKITRFDNRASGIEALIRQIDHLQPKLIAVEASGGYEATFVEALMVKGHQVSVVNPTRIRALAKAKGLLAKTDEIDAQNIANYAAIIRPEPTKLREDLDQRIRALIIRREQLVDIRSAERNRLGTCHESTKEDIQEHLDWLGQQITHLETEIKQLVKGSEVWSRQIGLLETMPGVGFLTAVTLTANMPELGTLNRQKIAALAGLAPYNRDSGKKRGKRRIFGGRQSVRRVMYMAALSAMRYNPVIKKFYERLIENGKPFKVAITACMRKMITILNVMVKKQTGWVCPV

SEQ ID NO: 130696 - protein, 378 aa, unidentified
MENITHVALDDHKKRHQVAVLLPGMDREEATTWRIENTRAGIRKMVRKVLKMAPGDVRFCYEAGPNGYVLLRQISEFDRVSCVVVAPSKTPRRSGDRVKTDRRDAKKLVSLFRAGELKSIVPPLEEEEAVRDLCRCRRAAQRRVTASRHQVDKFLMRNGYVYRNGKNWTRRYREWLRSLKFDDWRRERTFQAYLFGIEQDEDRVKRLDLEILRAAEEEPYRTLVGLVRCFRGLDTLSAMILTSELYAIGRFTTAPSLMGFVGMVPSEDTTSWDPHRGPITKAGNEHVRRILVEAAKHYRHPARVSKALTQRRKGQPDWVIAIADKAQTRLHQKYWRLVMGKGKHPNVAAIAVARELVGFIWAILIQAATTANIEELVA

SEQ ID NO: 130697 - protein, 347 aa, unidentified
MSIVGGLDIHRQQITFDYLDTDTGQVSVGQIPAADRCQLRTWLARRFADREDRGLVEFSVEGCTGWRYVAEELAAAGMVAHLAEPAETANLRGRKKRAKTDRADARHQRDLLLAGRLPTCWIPPTEVLEARALLGCYHDLRRDHTAWVQRIHAVLFHQGATVCTDLGTSPGREKLAKVAAEQLSPAGRTQVAAAVLMLEATEAQMEILHRQLLWIARHMQGPKVLVERLYGVGPITGLALTCWLGGAGRFSSARKAVRFAGLDITVYSSAGKRSPGRLSRQGPAVLRWCLYEAGKTHARPSAPDYAYYTAVKKKIDGKRAALSEARKLVRQGVHILTELGDDAFAYV

SEQ ID NO: 130698 - protein, 432 aa, unidentified
MDELDRKRLEEFRQLRGEIRQSEEYLIVGIDVGKDWHRAFFGTARGKTLLRRFTFINDRKGFRELEDEADGWKRSEGLSKVVYGMEPTANYHKPLGEYLILRGNRVVLVSGVTAKRNRETLDGRWDKNDTKDAANVADLISQGKCLYYDYPSTRLRGLRGLLSLKRRLKKEEQGYRVRIRNHLIAQYYPEMDREYGRRESEGLAIVRWCFPPRQMTVLEVDGFVERVTRGPVKEEQRRRLEGIWEGAEETIGCDGVPGVEHEARVMVEGLRQIRERIKETEKKIEGLCKEFAEYQYLLTIPGFGPDVSSKVLGAIGDADRFENGRQVLKLAGLDLGANRSGKESEKAVPEISKRGKADLRYGLYQAALIGSTRDRNIKIDYMRLLKGREKEKGIKTKLRVKIAAKLLRIAWTLMKKKEAFDPSCLGFWDDWA

SEQ ID NO: 130699 - protein, 370 aa, unidentified
MLDTTTFIGLDVHARSIKAVSLDVMTGEVRAATFGYDAGAVAGWVRSVDPRARCVYESGVTGFDLQKRLSGLGVDCVVGAVSKMIKPSADRRRKNDRNDAEFLARMLSVGNVVEVWVPDDECEAARDLTRALEDARDDLSRSKQRLSKFLLRHGLAFDERTPTGRRKGNWTRAHWSWIESIRFAERADNDVLAYYVDAVRRAAEEKARLEGLVEAEARKPRWRRRVDSLRCLKGVDTATAADLVFEAGEFSRFRNARSFAAWVGLTPSEHSSGESDRRGAITKAGNKHLRKTLVEAAWHYLTCSGRPKDLAKGQAPDRGARRHAAKGVRRLAERRGALLARGVHGNKANVATARELACWVWAVGLMAEEA

SEQ ID NO: 130700 - protein, 409 aa, unidentified
MDIVPIYKRVIGLDVHQAQITGCAIIEQPDGSVTHERREFGGFKRDRQALAQWARAMNPDVVVMESTGIYWKSPYAALEGVGIIAWVVNARHVKAVPGRKTDVADAQWLASLARAGLLRASFIAKADLRSLRHIARQRQKLGGMLASEKNRLHKLLTDAGVRLGVVVSDLYGQSARAMVKALIAGKSVPEVLKLASNRLRASREDIFEALQAEEITPAHRFVLAEIMTHIEELEARMGRFDAELLRSLRSAGYGNALQLLQTLPGIDLMGAAMLLVEIGADMSVFGSAQRLASWVGMCPGNNESAGKRKSGRIRKGNAWVRRLLCEFAQAAGRSRCALKDKFQALNVRKGHKRSIVALGHKMLRTIYAMLSKNACYVDKTVDYEALMVARNAPRWLQMLVKHGYVPTPA

SEQ ID NO: 130701 - protein, 350 aa, unidentified
MHARSVVAGVLDIGTGEVWSRRLPPATEAVLGWVGSLPGPVAVAYEAGPTGFGLARALPGGRVRCVVVAPSKLERPAGDRVKTDRRDAERLARLLHIGELPAVRVPTELEEAARDLVRAREDARADLMRARHRLSKLLLRYGLVFEDAAWTQAHGRWLTSVAAGLTQPGLRMAMDEAHGTVLAVQARRDRLDAAIAELAATPTWAPVVGRLGCLRGIGVLTSFGLAVEIGDWHRFTGATVSAWLGLVPSEQSSGDRRSQGSITKTGNSHARRLLVEAAWHHRKPYRPNQQLRARQAGQPATVRERADRGNRRLHQRWCRLDARGKRSTISVVAVARELAGWCWSLAVLEV

SEQ ID NO: 130702 - protein, 342 aa, unidentified
MKQYAGIDVSLECSSVCVVDANGKILREARVASEPEALIGWFRSSGFDFERVGLEAGPLSQWLFAALRQAGLAVELLETRHVRKAFEAMPVKSDRNDARGIAQLMRLGWFRPVHCKSMSAQETRSLLTARKLVQSKLHDVENSLRGILRGFGLKVGKTTERKFAGRIEELVVNHPQLQVIANALLAVRAVLRQEFAAFEKQVRRLARSDARARLLMSTPAVGPIVALTYASAIDDPARFKSSKQAGAHFGLTPKKYQSGETDYTGRISKIGDGSVRTALYEAAHIMLTKPLKGCSQLKNWAMRIARRAGMSKAKVALARRLAVILHRMLADRTPFNAAATAA

SEQ ID NO: 130703 - protein, 401 aa, unidentified
MWAAQHLEVTDMSYFVGIDIAKNKHDCFIATGDGEVVRNSFTFPNNDEGFRTLKATLDQLNHSQKIKIGLEATGHYGKNLKQFLTSIGYEYSELNPYLVKKFTQSITLRRTKTDKVDAQMIAKFIQLEASKPTTPPSYNTMELRTLVRNHDRLVRSRSDELVKITNSLDRIFPELKKFLNDRIGEWALYLLEHFTTPEKISRLTSGQIQKLHNVGRKVTVNRITMLKELAAKTIGHPSPADELVIKQSVKMVRAINDSIEAYRSRIEAIMKEVDSPLLSIPGIGMMTAACLHAEYGDLRRFSSPAKLLSFAGLECSKNQSGQSDRKGHMVKHGSAHLRYVLMNAAISVKNHCPAFSAYFQKKYSEEHKNYRVALNHVVRKFLRVAFKLVTLNESYSLELSK

SEQ ID NO: 130704 - protein, 346 aa, unidentified
MEHYVGLDVSLKLTAICIVDRTGKIEREGVIASDPETIAAFIKSHAPHVARVGLETGATSTWLWTELNKMGLPVICIDARHAKAALKMQINKSDRNDAVGIARIMQCGWYKEVRVKDLDSHAIKALLVSRALLVKIKRDIENQIRGLLKNLGLVIGQAKMNVFSVRAAELAEARPELAAAVEPLLKAREAIGRQIADLDRKVMRLARNDAHVRRFMTAPGVGPITALCFLATIDDPARFKRSRSVGAYVGLTTRRYASGEIDWTGRISKCGDKMLRSYLYEAANVLLTRVAKWSALKAWGVRLAKRSGLRKAKVAVARKLAVILHRMWIEGTEFNWSSKEAANQPA

SEQ ID NO: 130705 - protein, 410 aa, unidentified
METIVRRAAALDVHKAQVTACVRVPARGRERVQEVAEFATTVGGLLGLRDWLKAHRVTQVAMEATGVYWKPVWAILEDEFDCLLVNARHVKQVPGRKTDVSDAAWLCQLLEAGLLQRSFVPPKPIRALRNLTRYRKTQIQERQREANRLHKLLEDTGIKLDCVASDILGKSGRAMLDALVAGTTDPEVLAELALGKLRAKIPALREALVGRFDAQHALIVSAILAHLDFLDEQITLLSEGIEEQLRPFAPAVKLLCTIPGVQQRTAETIIAEIGTDMSRFPSERHLASWAGQCPGNDRSAGKHRSGKTRHGSKWLDTALTEAAMAATRTNDVYLAAQYQRLRPRRGHGRALGAVKHSIITGCWHMLTTGELYREAGGDYFTRRDPERATRRLVKQLEALGHHVTLEAAAA

SEQ ID NO: 130706 - protein, 351 aa, unidentified
MTMLAEVAGAVVGGGTHRDTHALEMLAPNGTTIAALAISNDDDGFAEAIAWIAGNVPGPRVVVGLEGTRSYGIGLARAVAAAGLIVVEVQAPRRADRRHRGKSDPIDAHLAGLQVLRMPAGELPAPRADGDREALRILLSARRELTMARTRQINRLRALLLGGDDTDRDLSRGTLTGARLQAIARRRARASDTTEQSVRRAEARRLANAIRAAAAELAANKRHLAGLVRGLTPALLDKTGVGPVSAAQAIVSWSHRGRCRSDAAFAALAGASPLQASSGRTTRHRLNRGGDRQLNRALHDITLTRWRADPRTHDYIARRRAAGRNDTEIRRALKRYVARELYRALQASPAA

SEQ ID NO: 130707 - protein, 341 aa, unidentified
MGQAHTIGLDIAKRVFQAHGADASGRVVFRKRLVRAKVLAFFAAQPPCTVAMEACAGAHHWARELGKLGHIVRLIPPAYVKPYVKRQKNDRADAEAICEAAQRPSMRFVPVKTEEQQANGVVFRARDLLVRQRTQCINALRGHLSEYGYIFPQGITHADAVIAHVEDPDSAVPESARAVLKVLIGTFQALEAQIQALDAEITQRAKADPVARRLMTIPGIGPIAATAITALVPAPEGFRAGRDFAAWLGLTPLQKSTGGKQKLGAISKMGERTIRRLLILGASAVVRWAGQRGTPAGSWLARMLARKPKMLVTVALANKTARIVWALLVKGGGYRAPAPAA

SEQ ID NO: 130708 - protein, 465 aa, unidentified
MGAGKMNRKQRKELGRRLQSANPGLEVVHPRAAGIDVGNGAHYVAVRPEQDAEPVRRFECFTADLHRMADWLEACEVKTVAMQSTGVYWIPLYEILEQRGFEVYLVNARHTKNLPGRKSDVQESQWLLKLHTHGLLNNSFQPTAEIRVVRTYWRQRGEHVRGASTCIQRIQKVLTQMNVQLANVISDLSGLTGQAIVRAILAGERDPRKLAELSHPRIRAGREQIAKSLEGNWRSELLFVLKQEMEMYDTYQHKIAECDRELEATLKQFGAPERASTEQPKIPNAKKTKRIQRNAPGFNLTSELHRITGVDLSRIDGVNAIVAQTIISEVGLDMTRWKTEAHFASWLGLCPDNRISGDKVLARGTRHVINRAATALRMAATTLIKSQSYLGAQYRRLRTKLGAPKAITAMAHRLARLVFRMLKYGQEYVDKGTQYYEQKHHEQQLHLLKKKAATLGFQVVEIGVA

SEQ ID NO: 130709 - protein, 429 aa, unidentified
MFLEVVCVLGVGVDWAEAFHDVALGVPGKGVVDQFRVEHGPSGVSRLVTRCLELEPDPAEVRVVLETRHGLLVEALVDAGFTVLPVNPDLVARRRGPAKKKDDAEDARICCLMALDSYLDLRKLIPHGEIGAELRAIARDDERAARDERRIGNRLRADLLAVFPAAIDIAAGDLSAPVFLRLLERWPSAGELAAASREEIEAFARSARHGWPGRFAGQVTEAMAEPRLAVRPELARAKAGSIRLAAAQLLLLHDQRRAWEKRMGELLLGGTRPRPGASPKDADPGKAFPGGEIYLSMPGLGDRLTARVAGEIGEHSGQFTTPNALQCYAGRAPVTRRSGRSEFTIARRLAYNRHLGEAVQQWAFCSLTRSGWAREFYNAKTAAGDGHHAALRKLGNRWLEVLWHCLDKGVCYDEAVHAANRNRHQRPAA

SEQ ID NO: 130710 - protein, 408 aa, unidentified
MESQIIFGIDVSSKSSTVCVVNDRIKQGESFRISNDSFGYQKLYEQLNQYLITPLVVFEATGVYSLSLQAFLEDYHIKYLKLNPLKAKKLMDNNLRHNKTDKVDAYRLALIQFNAPQKLRDPQPREYHELQNASRYYEELTRSIVTTKNQLHRNLQSTFPQIEEILSHPSGRIYWALVSLFPHAGYVLEKNETQVTQMLNSISGIGQQRARYLTTRLYAFAREAYPYDSKDSIIVRAIQRNISNLFSLQQERDYVINYMEKLAKAVNARALSIYLSIPGVARITAVRLVAELGDLRRFSTSAQIDAFVGIDPGRYQSGEKDSSLGITKHGNHIARKILYRVIIQMETVKATQPCHITDYYDKKKRSSNSQGYKKIAIASVHKLIRTMFALIKHDQLYDYNIATENKRL

SEQ ID NO: 130711 - protein, 343 aa, unidentified
MHTVTTIGLDIAKSVFQVHGIDAAGQVVIRRQLKRRYVLAFFQKLSPCLVGIEACASSHHWSRELKALGHTVRLMPPAYVKPYVKRQKNDMADAEAICEAVTRANMRFVPTKTPEQQSCLMLHRTRHLLIRQQTAVINSIRAHLAEFGIVAPVGRRGVEELLHVVADPADKRVPDIARECLAALGAHLRRLKDQILEFDRMIMAWHRSNETSKRLDAIPGVGPMLATALVAGVADPKAFRSGRNFSAWIGLVPKQHSSGGRDRLGSISKQGDRYLRGLFVAGALAVIRYAKIHGSKYRPWVAALLARRPTKVAAIALANKLARMAWAMMSSGEPYNYPPALRA

SEQ ID NO: 130712 - protein, 348 aa, unidentified
MLADRLDYVVGVDPHRDSHALAVVHVVSGAVVFEETVVASSDGYAQALKFVDRHAPGRRAFAVEGTASFGAGLTRFLSGRGEQVLEVGRLRRERRSGGKTDALDAVRAARSVLTRERPTTPRAGGERQALQALVAAREGAVNAKRAGLCQLRDLLVTTPEPLRSELRPLTRARLLQRLAATRPGGGREPELRGSMLALRSIARRVLQLTAEERELAREIETLTRKLAPQLLDQPGVGPHAAAQLVLSWSHQGRISSEAAFARLAGAAPIPASSGQTVRYRLDRSGDRKLNRALHMILVTRKRSHPATIAYIERRIQEGKTRREATRCLKRYLARKLYRLLEHGPPLAT

SEQ ID NO: 130713 - protein, 449 aa, unidentified
MSTLETQPIPAVVQPPAFAAHIGLDWADQKHFWTMLVDGHKTRGQLDNTPEAIEVWAAELAQRFGGRPVALALEQSRGAVIAVLSKYAHLVLFPIHPTSLANYRKSFSPSGAKSDPVDGDLILDYLVKHPEKLRCLRPDTVATRSLQFLTEERRKLVDAHTATLQTLIHWLKQVFPQIMRWFDDPGAPLVADLLLRWPTLQELQKAKPKTLLRFFHQHNCRSEERTQERLQQIRQAVAATDDPALLQAGILSIQNAARILAGMRQGIAEFDRQIAVIYQAHPDRFITESLPGAGPALEPRLIAAAGSLRDRFDSAYNMECCFGIAPVTEGSGNSLWIHWRWACSKFIRQTFHEWAACSIRTCDWARQFYDRQRANKKDHHAAVRALAYKWIRIFFRCWRDRVAYSDQRYEQALRTRAAQSKPVPTNSKMDFSVEWKSCGGFSKPAKLSS

SEQ ID NO: 130714 - protein, 347 aa, unidentified
MRKSITDLSSVTTVGLDLAKHVFQVHCVDASGRVIVAKALRRKDVLFFFAQLPECLVGMEACGSAHHWARELIKLGHDARMMPPAYVKPYVRRQKNDAADAAGICEAVTRPSMRFTGLRTLENQAALMHHKAREMLVAQRTQLINALRGHLAEIGVIAAQGLKNARELARVIKAEGDETIPACVRAALAPLVRQLHVLDQEIACSDRTIAAMARDDEMARRLMTIPGLGPVTASALAASVQNVSAFSGPREFAAFLGLTPKQNSSGGKERLGRISKMGNRYLRKLLVVGAHAVLYHRKPHEDALRSWAKKLMQTKPFKLVAVALANKMARIAFAIMRGKTTYSAAPA

SEQ ID NO: 130715 - protein, 399 aa, unidentified
MFVGWDWGNAAHDVTVINDAGGRVDRLRIPHTEDGITRALAELARHGDRTDLPVAIETTRGLVVDRLLAAGHPVIAIHPNAFHAARPRWGAARAKNDPGDAFKLADFARTDIHRLPRLVPTLPETLELQALTRQRGDQLGLRIAAANQLAALLDAHWPGGKTVFAQLHSPIALEFLDRYPTPQSAAGLTPARLEQFCKRRGYSGRRSGSELLARLRDAPVAATRLGQAVVAQLVRAQVAVVRALQAGIDALETMITEAVTAHPYARLLGDLPRVGTLNLAQIIGEVGPILERTTSFDQLAAETGVAPVTRASGKTHTVAFRHATNRHARQALHVWFDNSRRAHAWAAQRYAAARARGQRHPHALRTLGRAWLRVIWACWRTKTAYNPTRHQPEKQPTAA

SEQ ID NO: 130716 - protein, 327 aa, unidentified
MSQNNNTINYVGVDVAKKSLAVDGVGYCGELPNDAKGHRDFLSLVGKTAQPVHVIVEASGGYEQGLVRALHEANIPVSIVEPFRVRSFARAKGLRAKTDPIDASVLRAFGEAIRPQPSLPPRSEQIRLAELVTRRAQLIDSEVAESNRSVHYLDPLLRRQAKTYLRLLRRQIEQCESAIAQLIEKNQSIKQHSARLQQVPGVGAITAATLLADMPELGTLSDETAAALAGVAPYNNDSGPFRGQRRIRGGRASVRRALYMAALSAVRHDLVLKGFYQRLRAAGKKPLVALVAVMRKLIILLNRLLKNPNLTLQSHSKRVEKRHAAST

SEQ ID NO: 130717 - protein, 356 aa, unidentified
MSEAGHALPVETIGIDLGDRFSHACVVDARGVVVERVRFASTRSAVEECFRSRSRARVVMEVGARSPWMSRVLSAMGYDVTVANTRKMPANPLKTDDRDAEFLARLGRVDLGLLYPVEHRDEEKQGHLAILRARDITVRMRTKLINCVRGTVKAFGFDLPSCDAHHFADRAAQSLPPGLSPALAPLLRMIATTSREVARYDLLIARICRDIHPETALLRQVPAVGPITALAFVLVLGRPDRVRSSRSVGAYLGLVPRKSQSGEIDPQLRITKTGDKLLRRLLVGCAQGLMRGSAPDTDLRRLGLRLAAVGGKAARKRAVVAVARRLAVLLHHLWRTAEVYEPLHNETIARGARPAA

SEQ ID NO: 130718 - protein, 347 aa, unidentified
MDVHQATISVAVMDAGGKLIMECLLETKASTIVEFIQGLQGTLSLAFEEGTSAAWLHDLLKPHVSRRVVCDPRKAARLKEGNKSDRIDARKLAELLRTNQLKPVYHEEHGIRALRELGRSYLTITKDVTRVMNRIKALYRSWGIPCSGTSIYAPRHRAEWLAKLVEPGVRVRGEHLYQQLDSLQPLRLQARRELLQESPKHSGAKLLRQIPSIGPIRAALLVALLQTPQRFRTKRQLWAYSGFAVETHDSGEYRCVRGKLQRNRERITVRGLNDNHNKDVKNLFKSAAISASTRPGPLHDFYVARVEKGMRPTMARLTLARKIATITLTMWKKGVGFDPQNLYRQAA

SEQ ID NO: 130719 - protein, 381 aa, unidentified
MIAVGIDVSKSKSTVAILNGDGSIRAKPFDVHHVVDELQALVDYIKRTSEPPTILMEPTSHYHYPLLKAFTEAELPVCLINPYQMKKYGDTELRKAKTDKRDSLRIAQYALEKSYSLIPYTPQDQKYEDLRFLSRQYSQRISTLTVAKVQLLSLLDETMPGITTILPLKSRDPDNCVLLRFIKRFKSFDVIRKMGKTRFLDSYQVLVKKTKDRFAGSKGLDIYELVLSSVTTRGENPLSAMTQDQCVDLVSTSQKAADEINLQMRIIAETMPEYKVLRSMAGVGDRLGPIILGEIGDIRRFHSGKALNAYAGNDAPPYQSGQFESRNRHISKRGNPALRKACFEVMQALKLTKPQDDPVYLFLLKKEQALAKRYVPELEAA

SEQ ID NO: 130720 - protein, 343 aa, unidentified
MQTVATIGLDIAKSVFQVHGVDAAGQMVIRRQLKRRQVLVFFAKLPPCLIGIEACASSHYWARELQAVGHTVRLIPPAYVKPYVKRQKNDAADAEAICEAVTRPNMRFVPIKTIEQQGCLVLHRTRHLLVRQQTATINSIRAHLAEFGIVAPVGRRGVEHLLEVIADANDTQVPEVARACVAALGVQLQQLKAQILEFDRRILAWHRSSEASRRLNHIPGVGPLLATALVASIADPKAFRSGRDFSAWIGLVPKQNSSGGKDKLGNISKRGDRYLRSLFTAGALAVIRYAKIHGTKHRPWLVALLARRPTKVAAIALANKLARIAWALMTKGGRYRQPAALRV

SEQ ID NO: 130721 - protein, 355 aa, unidentified
MTSTKYIGMDVHKESISIAVRNDAGKIVMECVIETKASMILQFIDGLRGDLHVTFEEGTSAAWLYDLLKPHVTKLVVCDPRKNRSMREGNQSDKIDARRLAELLRLNHLNPVYHGEHGLRTLKELVRSYLTITKDVGRVMSRVKAMYRSWAIPCTGKQVYTSRHRAEWLGKIGEPGVRRRAEFYYQQLDALRLLRQEVRRDLLAESKKHKAWERLCQIPSIGPIRSAELLGILQTPHRFRTKRQLWTYCGLGIETHSSADHRVVEGQLKRAKKQVEVRGLNVNCNHDLKNLFKGAAVVAATKPGPFEEFYAELLAKGMRSEMARLTLARKIATIVLIVWKRGVSFDAQHLKPQTA

SEQ ID NO: 130722 - protein, 351 aa, unidentified
MKEYIAFDSHKHYTLMERETCSTGRARQKRIDHDRGAIRRALAGCEAGTAVALEATANWYWIVDEIERAGLCASLVHPRKAKLMMGMINKTDRLDVHGLNRLQRNGTLPTVWIPPGDLRDLRALTRTRITVAHHRTRLKNRIQATLSKYGLGVKAYSDCYGKRARQELNAQVAELPTETRYVTGLLLEQLDFVVKQLAEMERRLKDLVEVTPEMELLRTLPGVGVILSATLLLEIGDIGRFPSAEHLAAYAGTTPRVHASGGKVRYGRLRPDVNRYLRWGFVEAANSVVVNHTRRPDRHVSVLYHRIKKRRSHAKAVGAVARHLAEAAFHILSRKEPYRDPVLKKGRTREA

SEQ ID NO: 130723 - protein, 359 aa, unidentified
MRERRNEISFKGQKIYVGIDVHLKSWSVTVLSETSVLKKFSQHPSPEALHGFLTRSYPGAEYHSVYEAGFCGFWIHERLTALGIDNIVVNPADVPTTSGEKLRKSDAVDSGKLARSLRANELKGIYTPDSVSLEMRSLIRLKNSITKDTTRQKNRIKSQLRYLGIEIPQEFLEPFSNWSKRFFAWLKEVETLTPSGRQALDIQIRHLEELRRQKLEMARALRVLAKTDRFREPLRLIMSVPGVGQATGMAFLSEICDIARFRNAEQLAAYIGMIPMCHSSGEKDGTGDITVRKHAIMRCNLIEAAWVAVRQDPAMNLFFTEQCKRMPKSKAIVKVARKLVNRLYFVSKHQTEYVNCVVS

SEQ ID NO: 130724 - protein, 496 aa, unidentified
MGCCALEGGDAVSAIPIRNLMNCAAQPFRWRQQEELEMNPKRSKSRHGRKMPMVHPNAAAIDVGATMHMAAVRADRTPEPVRSFGTFTADLHRLVDWFTQCGVETVVMESTSVYWIPVFELLDARGFTVFLVNARDAKHVPGRKTDVSDAQWLQRLHSYGLLRASFRPKGQIAELRSYVRQRERLLEYAASHIQHMQKALTEMNLQLHHVVADITGATGLRIIRAILAGERDPQALAALRHYSCHSSAETIAKALTGSYRAEHLFALEQALALYTAYREKASACDVRIEAVLKELSIHRGRDHGAVPPPRRRHRTDQVNALAFDVRAALFALLGKDITAIDGLGAYLSLKLIAECGDDLSSWPSAKHFTSWLGLAPSNKVSGGKMLSSRTRRSGGRAAALLRLAAVAVGRTDTALGAFYRRLSSRIGKAKAVTATARKVAVLFYNAVRHGMEYVDPGASSYETRYRTRVVNNLHRRAKAFGFVLQPLEPKAGAAVS

SEQ ID NO: 130725 - protein, 430 aa, unidentified
MKSNTQNAKIEAITEKTLVLGIDVGSETHYARAFDYRGIEYSKKPFKFSNTEVGFATFKEWILDLKERHEKDKVVPGMEPTGHYWFNLGKFLQDNEMKPVLVNPHHVKKSKELDDNNPTKNDRKDPKVIAGLVREGRYMIPYLPDGVYADLRTASNIRFQLQAELTRIQNRISRWFNIYFPEYKTVYGKPDAKSGMLILKAAPLPEDILTLGIDGVNQIWRDAKLRAVGKARAKTLIKAAEHSIGSKEGTMSARMEIRMLLEDYESQNMRLQEVMVLIEELVKEIPMAEKLLEIKGVGIRTVSGFLAEVGDISRFNNPKELQKLAGLALVENSSGKHKGETTISRRGRKRLRYLLFEVAMSLVAKNPEFRELHNYYTTRRLNPLKKMQSLMAIAAKLIRVFYAMLTKGVDYDPKKMISDIKRPTVYLQAA

SEQ ID NO: 130726 - protein, 340 aa, unidentified
MRQLYVASDLHGNNNLVGIIDGEGKRIFKKKLPNDPLLISDVLKPFKEEIMGIVVESTYNWYWLVDALMEEGYKVHLANPAAIQQYSGLKHSDDRHDAFWLAEMLRLGILPEGYIYPREERPVRDLLRKRGHLVRLRTSLIISLENIISRNFGRKLPVNEVKGLRKDRVTPLFEGKEDLALAGKVSKETIDFLTHQIRQIEGVVEKRIQLKEAYRYLLTIHGVGKILGLTIMLETGPIGRFETVGDYTSYCRKVPSQWISNGKRKGSGNRKNGNKYLSWAYAEASDFARRLHPESRAYYNRKMQKSNPAVAHSALSHKLARAAYYIMRDQVAFRPEKLFG

SEQ ID NO: 130727 - protein, 495 aa, unidentified
MKQLRDPVAGLDVHRDNVVAAVRALADDGEASYVKRTFATTRRGVAALTAFLKEAEVVRVAIEATGVYWKPVYYPMEGLFPELWLCNAQHVKNVPGRKTDLADAEWLADVAAHGMVRPSFVPPPEIRELRELTRYRKTQITERGREIQRLEKVLQDAGIKITSVASHVWTLSGRRIVEALIAGERDPAKLAELALGRLRPRQGELIEALSGHFGSHHAVVCRQVIGHIDFLDASIEALGKEIGERMLPFESAVVLISAIPGIQEAAAQSIIGEIGVDMSRFPTAGHLCAWAGVAPASYESAGKKRPAGTRQGGRHLRKTLIECSRSVSRMRSTYFHALYGRIAKRRGSNKAAMAVAHSMLVAIWWTLTTGVVYEDPGADYYQRHIDPEREAKRLLSQIEALGFGRTHHPEGSRVGDPRSTKPQHCTSKATLSGREPNESRLRPVASGGIPAQNDLGRSLESQRRPRGRRAGGRLRRCERRSWQQKTAGGPSSCRR

SEQ ID NO: 130728 - protein, 395 aa, unidentified
MFNLLVGVDVSKDFFSASGLSGEGKERFSGTYEMKADGFSEFLKVLCSHDERLDQMLVAMESTGCYHINLFSFLSSQGIRTVVVNPLLISNFAKLSLRKTRTDKKDALTIARFLLDHHDEISQLSISQDHQDLRDLSRERESLCHLISATKVEIKRVLRTTFPELESIGSLYSRVMLRFLQQYPSARLVRGEKRKVIAKALRGPRVGDKLTFSAEDIIKAAQSSIAVVSPAKEIIIQGKIATLLHLQERLEELTKLLSDLCKATRLEDLEILRSIKGVGPNTAVPFLAEVGEVKNFASSKKLIAFAGLDPSIHQSGKFLGTSKLSKRGNRHLRRAIYLMAASVVSQNGFFKAYFLRKKKEGLPPQKALFAVAHKLIRVIFAMLSQRTYFNVKEAI

SEQ ID NO: 130729 - protein, 368 aa, unidentified
MSKLHFVGLDVHKDTIVIAVAEEGQAEALALGTFPHDLPKILKVLTKLVADKAQLRVCYEAGPTGFGLCRRLQEAGISCVVIAPSLVPQQAGSRIKTDRRDARRLAHFLRSGDLTAVWVPDEQTEALRDLERSRDDAKNAERVARHQLEKFLLRNERVFREGKHWTNQHSIWLHQQKFEDPCKQCVLDDYLLAVESATERVKRLAKEIERFIQGAALEPLIRALMSFRGISTLSAVIIAAEIGDLRRFRTARQFMAFVGLVPSEHSTGKTIKRGPLTRTGNRHVRRILVEAAQHYRHRPTLSLALRARQQGVSSEVLNISWKAQQRLCKRLIYLTEKSKPRNKAIAALARELAGFVWAVGQVQQLLVT

SEQ ID NO: 130730 - protein, 408 aa, unidentified
MEVVHARCAGLDVHQQQVTACLRLVHEARIRQEVRTFSTTTQGLLALSDWLSEEGVTHVAMESTGVYWKPVWHVLESTFELVLANAAHIRNVPGRKSDVSDAMWIADLLAHGLIRGSFVPPTSIQELRDLTRTRKQLVRESAQHIQRIQKALEDANLKITGLISNVIGVSGRAILEALIAGETDPKRLLALTRDRLKAPPERLLEALRGRIRDHHRFLLKLHLGQIDALQTAIAEVEGRIGDTLRPFRERAQLLTTIPGVSDTVAHVIVAEIGIDMSRFPTAAHLISWAGLCPRSDETAGKRRSTRIRKGDAWLKTVLVQAAWAASRKKGSYLRAQFLRLRARRGPMKAIIAVAASILTAAYHMLRTGQAYRDLTDTYFDARDRSRLARRLIRRLKDLGLEVEIRAAA

SEQ ID NO: 130731 - protein, 371 aa, unidentified
MKSIIYIGMDVHKKTYSLCALLKETGEIIGETKIPADVSLIIKFIENAKKSVDSDDVQIKTGYEAGCLGYSLYWQLAAKGIECDILAPSTMHRSAKNKVVKNDRRDAKNIAANLANGTYKSVYVPTDEDVEIKEYIRMMHDFKIELKKVKQHINAFLLRFGHHYPGKSKWIPAHIKWLKELELSDMYREILDEYLSQLEILSEKIERFKYRLEELSQKETYNEKIGQLRCIKGIDTTAAMTMHAETSDFDRFPTANAFASYCGLTPGEDSSGDSYHRLGITKQGNSMIRTTLVEAAQTLVRGTIGKKGKKVKSKQKDQDVKVIDYADKAVIRLQKKYHRMIFRGVKRNIAITAVARELACFVWGIETGHIS

SEQ ID NO: 130732 - protein, 270 aa, unidentified
MDAAGQVVREQSVASTPEAISAVIRAFGREVERVGLEAGINSAWIARGLLEAKLPVVVIDATHAAAALKTGFRNKTDKNDARGIADLMRVNKFRAVSVKSVAAQRDRALLTVREQLRRQSLDARNVIWSILQVEGLKPPKLTSPAFQVLVAQWLDDEALAPLLRPFVAVVEHLDGQVTGWGRAIAARAKASAACKRLMTVPGVGPLVALTYAAGVDDPARFSDSRTVGAHFGLTPRRFQSGETDWSGGISRAGDAGVRHAVSGSQRAGPP

SEQ ID NO: 130733 - protein, 415 aa, unidentified
MPKRTIGDRPELKPVNVGAAAIDIGSKMHMAAVNPASTDVPVRSFGTFTRDLHDLADWFKACGVKSVAMESTGVYWIPVYEILEQRGFDVILVNARYAKNVPGRKTDVSDAAWLRELHSYGLLRGSFRPNAEIATLRAYLRQRERLVEYAAAHIQHLQKALMEMNLQLHHVVSDITGATGMRIIRAIVAGERNPAVLATYRDVRYHSSIETIRAALVGNDRHEHVFALTQSLELYDVYQAKMLDCDRKLEVLIAALNNRGERPAGKLSKPRIKTKQVNTPTFDVRTALYGVLGIDLTEIHGLGPSLALKLIGECGTDLQAWPSATHFTSWLCLAPGNKISGGKVLSSRTRRSSSRAAALLRLAATTVGRSDTALGALPTFSAGPNRWASCCRPFRGTPIRLFLRKSIAIFAGGPK

SEQ ID NO: 130734 - protein, 405 aa, unidentified
MTTETLFAGTSTLRQDVTLCASVELGSTGWLVTSRASDQDKMQRTRIGTNDWQGLIALLRRQQKARQAGRVVCGYEAGREGFWPYRALHEAGIEACVLDPASIAVNQRGRRTKTDRTDGIIELEAIEALELGRRTAARRVVTLTEDQEDARQPSRTRGRLVKDRTALIAYIKSALARVGTDLPAADRPGWLEHLTAARQWNGRPLPRNLVRDIELAHERLTLVCRQIDALEADQRAALLSRDRSGKRRQLKSRQAAQAWEAQANPAERAVAGLAEQLYRLNGIGRVIALSLAGEVYWRDFVNRRQVGGYLGLGGAEHSSGAQRRELGISKAGNRRARFVLVEAAWLWVEHQPDSALTQWFKCRAPKGASPRQRRIAIVALARKLAVALWRYLNDGIVPEGARMKA

SEQ ID NO: 130735 - protein, 371 aa, unidentified
MTQSNILFIGMDVHKDSIVISLADDNRTDIQRYGSIDGSLDDFKKTLRKLVATGKTLFFCYEAGPTGYELYRYITSQGHQCIVVAPSLIPKKPGDKIKTDKRDADNLTRLLRSGDLTAVYVPNAEDEAIRDLSRAREDAVLVFKCAKQRLKSFLLRHNIRFDGSANWLEKHLHWLAESVNMPYPVQKVVYQEYLNSVTEANDRVKRFDKKILFHTKQWRLYPIVQSLMALRGVRMVVAVTMIAELGDLTRFENPKQLMCFLGLTPSEHSSGDKKKKGAITKTGNQHARRVLVEAGWSYRFHAKVSKEMQKRQDGTSLKVRDIAWKAQLRLTKRFRMMANNGKPRNVIVVAMAREIAAFMWSIAQEVPIAPR

SEQ ID NO: 130736 - protein, 428 aa, unidentified
MKPKPPEKIQKATNPSTRGHWNEMNRKQRREMMRQIQSEDLSLEVVHPHAAGIDIGNESHYVAVPPTRDSQPVRHFGCTTVELKAMAEWLKQSGIRTVAMQSTGVYWIAVYDIHEATGLDVYLVNARDTKNLPGRKSDVQESQWLMKLHTYGLLRNSFRPSQEIRTMRTYWRQRNDLIRAAVSHIQRIQKALTQMNIQLANVWSDVSGVTGQAILKAILAGERDPHKLAALRDPRVKASEEQIARYLEGNWQEDLLFVLKQEQEGYEFCQQQMAECDRQLEQYLQQREDRSQGASLPQEMRKGRLLRKKGNKPAFALRAELFRITGTDLTQVDGMDVVTAATILSEAGWDMSKWEDEDHFVSWLRLCPDNRISGNKVLGKGRLPTNHRASIALRMAASTLRLSNTYLGAQFRQWIWPPSRARCARRRF

SEQ ID NO: 130737 - protein, 315 aa, unidentified
MANLTKSKIAVNVGVDVGKYFLDVCIYEKALYWQEDNTIEGIKRILKRLSYYKVERLVMEATGRYEFELAQAAYQRGIPVCIVKPLRVRRYAGAIEQLAKTDKIDAALIAEFSFKVQPKVTPQKSKNLLVIKNLITRRRQLMGLRTQELNRLKIMGKDLAVSIRRIIRVLDTEIQRMEKRLAQHVEQQAIWTEKQAILKSAPGVGDTLVYTLLADLPELGELKNKEISALVGVAPVNRDSGRMRGKRRIQGGRANIRTVLYMATLSATQCNPVIKAFYKKLVAQGKNKKVALTACMRKFITILNTMVKNQTEWAV

SEQ ID NO: 130738 - protein, 343 aa, unidentified
MDHYAGIDVSLEQSSVCIVNKDGKIVREMKVASEPAALVEFFGQLGLPLLAIGLEAGPLSQWLHAGLTAAGYETVLLETRHVKAALSAMTVKTDRKDARGIAQLLRMGWFRPVHRKTDSAQEIRALLVGRKLLQGKMMDMELGIRGLLRGFGLKVGVITKAQFVPRIRELIAGHSMLEKIVEPMLRARDALRAEFNLLHSQMLAIVRTDALCRRLMTVPGVGPLVALTFKTGVDDPHRFTSSKTVGAHFGLTPKKYQSGETDITGGITRAGDAMVRVALYEAAQALLTRSQRFSTLKRWAMDVAKRRGMKRAKVALARKLATVLHRMWIDGSEFRWGKEPVTA

SEQ ID NO: 130739 - protein, 399 aa, unidentified
MASKHRSLDKAFTMNRTARQTVSPPVTKTVGEPRSPRLSSSSTVVPEQSIGHRSAATQRTGKPHNKGGRRRSSTSREVLVMDGACFVGIDVSKHSLDGCLRPGTTFRHENTPAGIAQAVALLSSHAVTLVVVEATGGLEVPLVRGLQRAAIPVAVINPRHARDFAKASGRLAKTDTIDAQVLAHFAEALRPKPRQLSDEQTQLLDALVTRRAQLIDMRTMEQNRLGNCADSRVRDNIQAHLDWLRQHLDDTDRELAEAVRNNPTWQARDELLQSIPGIGKVVSQTLLAGLPELGTLTARQLTALVGLAPFADDSGQRQGKRRIFGGRADVRAKLYLAALTASRSKGPLGQFYQRLRTAGKAAKVALVAVARKLLTIANALVRSGRGYTTDYAPLALARA

SEQ ID NO: 130740 - protein, 456 aa, unidentified
MPKPKHVQRGSRISPTIRVLEPNAAGIDIGATEVFVAIPSDRDPRPVRRFSTFTDDLNCLVDWLQTCGVDSVAMESTSVFWIPLFQILEDRGFRVCLVNARHVKNVPGRKTDVSDCQWLQYLHSVGLLRASHRPPQTICAVRSICRHRESLVQMATVHIQHMQKALDQINLQLHHVISDITGATGLAIIDAILGGERNPEKLAALRDGRIAASRETIARSLVGDYRHEHLFTLRQSLEAYRQYQQWIAACDGEIERQLRALPGNIANDQKALSRPKDRHKPRRNELRFDLRGHLYRIFGVDLTEVPGISGLTAHTLLTEVGSDLSRFPNPAAFASWLGLCPDNRISGGKILSVATRKVKNRLAIALRMAAQSLHRSQSYLGQYFRRMRTRLGTPAAITAAAHKLARILYHLITTRQQYQEATFAEMDQRARKRQFLRLAKQAANFGFQLTPVGSVP

SEQ ID NO: 130741 - protein, 412 aa, unidentified
MEGETVIAGVDTHKYVHVLCLLDGLGRKIWSGSFGADPEGYDRLAEAIGDPGSCMVVGVEGTASYGAGLTRRLVELGYNVVEVLRPKRDKVRPGEGKSDPLDAERAARKAASGKGCSVPKSQDGWVEAVRQLYVARRLAVATSTSCVACAKSMLTTAPSALRERFRGRERPKDLMPLLARGRKAASALEESVLASLRSVAAVWKEARSQVESLDERIRALLEANAPALLGVEGCGTTTAAALVVAAGDNPGRLKGEAAFSMMCGASPIPASSGKTDRHRLNRGGNRQANWALYEIAIKRMAYDERTRRYVARRTSEGKSRREAVRCLKRYIAREVYHVLMDPNPDGAAPEGPELAKMRKAMRVTQKKAAAELGLSAATLGHLERGKRRSTKLERRYYELLCELERTLPQTAS

SEQ ID NO: 130742 - protein, 407 aa, unidentified
MPDYDWYVGVDWGGERHQVAILDATGARVAEHQVAHSGAGRESLVEHLARLGADPGRVAVAIEVPRGPVVDTLLMRGYHVFALNPKQLDRFRDRYSVAGAKDDRREALVAASALRTDQLAFRQLQPDDPQVIRLRELSRTYDELLGEERRLANQLREQLWRYYPQALPHCPGADESWLWELLHEAPTPAHAQRFTRPALRALLARYRLRRITGDMLYETLQARSVTLTPGAAEAAAEHVELLLPRLRLVHEQRQQWERRMDALLDALGPPVEGRQEHRDVTILRSLPGVGRVVAATMLAEAWGLLAARDYQSLRAQSGVAPSTQQSGKQRLVLMRRSCNHRLRTAVFHWARNSVRLDPRCRAQYQRLRQRHSQARALRSVVDRLLSVLVAMLCSGTTYDVTRCPNAA

SEQ ID NO: 130743 - protein, 360 aa, unidentified
MRIIGCDLHARQQTLAMFDTETGEVVNRTLMHEGDEVREFYSELPRPALVGIEAIGPMQWFLDLLAQLGIECRVGDAAKIRAAEPRKQKHDRRDAELILKLLVEKRFPAIWMPSKELLDLRALLLHRHQWVRLRTQVQNALQAIALANGLRRGPSLWSYDGQAKIAFLPLPPHASLRRSALQAQYRHMDEEIEKLTVQVAEQAEHRSGAQLLMTHPGVGPVTALATDVFLGDAQRFADGKALASYTGLIPQERSSGKRRRLGRISKQGNPLLRFLWNEAGAHAARRDPELRRFYRRKLVQKGMGKARVAVARKLGIRLWIMLRDQIDYQEFCRRGQKQSGTVCAGMLETGYGANRHREVE

SEQ ID NO: 130744 - protein, 431 aa, unidentified
MTQSSNPLNQPRPTPVAFVGIDWADQQHAVCLSPADSLTPEQFTLPHTPEAIAEFVARLRTRFGGQPVAIALEQARGALLYALMGHEFIVLYPINPATSKRYRDAFAPSGAKDDPVDAHLIWQLLVKHRDQLRPWQPEDATSRQLALLCEHRRDLVSQRTRLVQQLRAALKTYFPQALDWTGEDLASVMAADLLVRWPSLEQLQRAHPNTVRAFYYAHRCRRPDLVQQRLHQIKTAQPLTTDAAVIAAHSLRVQCLASQLRPLLGSIATYDRQIEALFASHPDAALFVSFPGAGDCLAPRLAAAFGTHRDRFPEADSMARWSGVAPVTRRSGKFQAVHRRHACAKFLLQTFHEFARCSIKCCDWARCYYELQRAKGKGHHASVRALAFKWIRILWRCWRDRRPYDDALYTAALRRSGSPLAKLLSPSCEQS

SEQ ID NO: 130745 - protein, 315 aa, unidentified
MTKHLSPVNVGVDVGKSQLDLYLLERDRALTVPNEDQAILALVRSLSRYRVERIVVEATGRLEQPFVRAALAAGLPVIVVSPLKIRRFADVIGQLAKTDQIDARLIAQFAATVKPLLRPASDANAQAIKDLVVRRRQLTSLRTMEKNRRQVMPQELKPSFDRIVKALDRELKSLEQLIDDAIDQHSSSRHKRELLTSMPGIGNCVAATLIGDLPELGSLDRRQIASLTGVAPFNRDSGTLRGKRRIRGGRAHSRTALFLSAMSAIRFNPDIKRFYERLLSLGKHKKVALTACIRKIVVALNAMLRDNVPWHSAIA

SEQ ID NO: 130746 - protein, 352 aa, unidentified
MKTETTALIPKLYIGIDVHKKSWTYHYQTDLFDGKTITQPANPQTLVDWVGKHYPSHEVTCAYEAGFSGYSAARLFQKQKWNVLVLNAADIPRSQKQSIVKTDKIDCRNICKQLKNEALKSITIPEEQRESFRSLFRERNNFVEGLRHIKLQIKSYLMYCGVTIPEEFDNANWSKNFIEWIRQQSQPYETGTLKITFLLKRYDFMYQETLAISNQLRAYARKNYKKDYDLLRSVPGIGGITASAILAELGDLRKYNRFDDLASSVGFVPGIYSSGDTTIVKGITPRAKSLLRSYIIEASWQAVRFDPVLQEYYRSHYGKQPNKIIVKVARKLLSRIHAVIKTETSYQIGVIK

SEQ ID NO: 130747 - protein, 365 aa, unidentified
MSKDIKKPAGETRRYVGIDLGDKKSRVCILDERGEIVLQEWVVTTPEAFFKRFRGEAKMDIAMEVGTHSRWASDLLGRCGHKVVVADPRQLGLITKNDAKSDKRDARTLAQLLRADPRLLSPIEHRAERLQTDLTVIRMRDNLIETRTRLVTSVRGVVKATGGRLPSGETSSFPQQVSDLIPEPLRPALAPVLEVIDRLNEATYEYDCLLEHWARTRYQESSRLTQVKGVGTLTALTFMLTVGDKARFSRTRDSGPYLGLRPRLGQSGDNEPQLRITKAGDGLLRKTLVECAQYMVGPFGPDSDLRRWGLKMIEAGNGSKRARQRAVVGVARRLAVLLMSLWKSGQTYDPLRHSRAQESSQEVAA

SEQ ID NO: 130748 - protein, 410 aa, unidentified
MRLYCGIDWASAHHDVAVVDADGGVVARGRVDNDAAGFAQLLTLLAEAGDTAEHPIPVAIETDHGLWVAALRSTGRVIYPINPLAASRYRARHAVSGAKSDATDAVLLANILRTDADAHRPLPADTELAQAIRVLARAQQDAVWARQQIGNQIRDLLNDFYPAAIAAFAELPSGGLARADARTIPAAAPTPAQAAKLTPARLRRLLVKAGRRRSLDRDIERLRTIFTDTYLHQPPQVENAMGIQLSALLRQFDAACAAAEELAQAAIAHFEQHPDAAIITSFPGLGNLAGARVLAEIGDDRARFADARGLKAFAGSAPITRSSGKKTVVLHRHIKNRRLAAVGPIWALGSLRASPGARRHFDARRAGGDWNHQAQRHLFNKFLGQLHHCLQTGQIYNEHRAFPPPLLRVA

SEQ ID NO: 130749 - protein, 319 aa, unidentified
MQTEQIHFEQVIARGCGIDVHKKTVVATIKGSGLKKETREFSTFTSSLTELKEWLLANKITHVAMESTGVYWKPVYKVLEPSGLKVWIVNARHIKYVPGHKTDKRDSAWICKLLLAGLLKPSYIPPKAQRELRDLTRYRVKLIQQIASEKNRIIRFLEESNVKLSSVLSDTQGVVATKLINLLCEGKQITMEYIDKVYHNKLQCTKEELYEACNGVMSENTIMLLGIIRKNIDHTQALIESINQRIKSSLSEYENVIELLKGVPGFNQKTVEDLVAEIGFDMSVFPTEKHLTSWSGMSPGNNESGGKKKVDELPTETSR

SEQ ID NO: 130750 - protein, 400 aa, unidentified
MPDGIRWVGLDVHAHESTVAVFDQATGEVSTKRVIGRPHELLPLLRAVPRPARVVYEAGPTGYGLARRARAEGIEIVVCAPNRTDRPPSDRLKTDKRDAIRLARALVAGQLAIVTVPSIEREQLRDLVRCREDIRADLMRARHRLGKFLLRREIYYEGPGEPWSLKHRAWLVSLRFADRASQLTIADYLHSHDVLISRRDRVEAELATLAAESRCAATVARLRCLRGIDTLSALGLCAEIGEWERFDHPDQLAAYVGIVPSEHTSGERRRQGSITKAGSTHARRLLIEASYHYRRQPGVGLKLERRQRDQPPEIINIAWRAQRRLNARWRQLKDARHKPNGVVAVAIARELACYCWEIATCTTHPERIPPASVPASDPLTQASSVPQKPKSTTRRISASL

SEQ ID NO: 130751 - protein, 425 aa, unidentified
MRFFTQPHRFYCGIDLHTKAMHVCIQDRDGNVLVDRSLATDAKAFLELIAPYRDGIVVSVECTFSWYWLADLCQAQNIPFVLGHALYMRLIHGGKGKNDRIDADKITRLLRSGSFPLAYAYPKGMRETRDLLRRRMYLVRQRSALLTHVQIVNSQYNLPPLAKTLLNESKRPDIVARFTDASVRQNIAVDLRLIDYLGGLIDEVEEHLLRTVKVEDVQSYYRLQTIPGVGKILGLVLLYETHDWRRFDSVGQFLSYARLVRCMHESAGKQVGSGNRKIGNAHLKWAIAEAACLFLRFSERAKKWKQRYTQKHGQRKAMVVLAAKLGRTVYHLLRKQEVFDEERFWNGGGRARKQGSAGQECVSLFSLWRQRQCAGPVGGVDASKFVRRRRRSVPALGPRHPVAGKPAAADSRSVACLPYTNQPGG

SEQ ID NO: 130752 - protein, 438 aa, unidentified
MSNKVIFNLDELFISVGIDVGADFSWMSIALPNQQFVGKPYKILHNSIDSLTTAVSKIKEAEELYSLESRIFLESTGIYHYPLFCYLRDKGFNCSVINPIITKNSTNINIRKVHNDRFDSKKAALVGLKPDLKVSLMPSDLALNCRNLCREYYDLMDNRSAYVNKLQGELRMAFPQYLGIFSKVTINTSLTLLETYTSPSAFLEADKQEIIDIIKSTARFGLTYAQNKYNAIIQAATDANQFGYIIDSNIKRIRLYISFIRKYDEEINDILESLHKLVDSNEDTKFVKQVHLIETFKGAGFLSAATIMGEIGDFSAFSKPKQLFAYFGLDPAVKQSGKFEGTKVQMSKRGSSIARRVIHTLSLQSISISRNGKAKNPVLREYYLQKCDSKPKLVAMGAVSHKVCNMIFAILRDNKPFEIITPQEHIKQYNAAKCDIAA

SEQ ID NO: 130753 - protein, 366 aa, unidentified
MKETSTTARKRKNFVNHRELTIGLDLGDRFAYYCVLDQTGEVLLEDRLPTTKSAMEHVFGKFPRSRVALETGTHSPWVSRQLAQLGHEVIVAHARNVRLIGESSRKDDRLDARTLARLARIDPELLGPVKHRSAQAQIHLTVIRARAALVSTRTALVNAARGLTKSYGERLKKCGTEQIHRDSSLGLSPELRQALDPLLREIESLNERISEYNRRIEQIAKEVHPEVALLKQVKGVGTLIALTYVLTIDDPRRFRRSRDAGCFLGLRPGRRNSGQSEPQLHISKEGDRYLRTLLVQGAHYILGPFGQDSDLRRWGLKLAERGGKNAKKRAVVAVARKLAVLLHKLWVSGEVYEPLRNHCKEVSAVA

SEQ ID NO: 130754 - protein, 412 aa, unidentified
MAEGRGAVGQDESYGWFVGIDWATQAHQVCVLDGEGHRVAERSVTHAGGAIAEFVDWLVDLAGGQPECVAMAIEVPRGALVETLVERGFHVYALNPKQLDRFRDRYTVAGAKDDRRDAFVLAASLRTDRPAFRRVRLDDPVIVELREYSRMDDDLRDELTRLANRLREQLHRFFPQMLELVPAADEPWLWTLLEIVPTPQAVPRLKRQRIEKVLRTHRIRRFDAAAVLAALGTPPLPAGPGTVEAASAHVALLLPRLRLVSDQRLRCGRQIDALLTRLGESDGPSGPNRAPTDVRILRSLVGVGSRVSATMFAEAAQLLADRDYPALRAHSGIAPVTRQSGKRKQVVMRHACNGRLRGAVYHWAFISVQHDERSAATYAEYRGRGHTHGRALRGVADRLLRTLIAMLRSRTL

SEQ ID NO: 130755 - protein, 391 aa, unidentified
MEARTMNNLPPAGTHDDAICCVLAIELSKKSWIVAVNTPLSDKISRHTLKPSDGKELLDLCERIRTRVAKETKKRVEMVSCYEAGYDGFWLHRLLQAHDIRNHVIDPASLQVDRRARRAKTDRVDAERLLRSLMAYLRGEPKVWSVVRVPSVAEEDDRRLHRERGRLINERIQHVNRIKGLLAIHGIYDYQPLRRDRIQRLEQLHTADGRTLPPRLEAEILRELQRLEIVIGMIKTIEAERDAIASANTETERGSVKKIQHLAKIKSIGPEFATTLVGEVFYRSFDNRKQLASYVGLTPAHFQSGAMSRDQGISKAGNAKARTVMIELAWLWLRHQPDSDLSVWFRDRVGKLKGRIRRITIVAVARKLLIALWRYLETGLVPKGAALKVCD

SEQ ID NO: 130756 - protein, 339 aa, unidentified
MNPATVGLELAKNVFHVHVVDASGRTIDSKRLTRRDLLPYFKALPLCLIGIEACATAHNWARQLQGLGHDVRLIPPSYVKPFVRRGAKNDATDAAAICEAVTRPNMRFVPIKSREDQAFLMLHRARGLLVRQRTMAACALRAHLAEYGIIVAQGIHRVDALIAKLDEIRADLPYDASFALDALVGQLDTLNRQIDRIDVRLAEIHKTNAICRLLATIPGIGPITATAFAATVPDPSTFRSGREFAAWLGLTPRQNSSGGKHRLGGITKQGDRYLRHLLVLGARTVVRYPKARSRVDGPWIEALLERRRPMVVAVAVANKLARTIWAMLSTGEMFRTAHP

SEQ ID NO: 130757 - protein, 359 aa, unidentified
MRKSISKFETVTTVGLDLAKNVMQVHAVDAAGNVVVNKPIRRGKLIAFFAALPKCVVGMEACSSAHHWGRQIAELGHDARLMPPAYVKAYVRRGKNDKVDAAACCEAVGRPSMRFVPLRSVENQAELMRHRAREMLSSQRVALLNALRGHLAEIGVIAPQGAQNAYYLKKLAETGHDENGEVLVPDGVRQSLAPLARQIDAIDAEIAAIDKILVKQAKSDPTARRLATVPGIGPVGATAFTATVLNVKAFANGREFSASLGLPPRQHSSGGKPRLGGISKMGDRYLRKLLVVGATAVLRHADGHNDALRGWAKELLARKNGPYKKKIAAVALANKLARIVYAILSSGGTYDDRPVRARA

SEQ ID NO: 130758 - protein, 420 aa, unidentified
MRNAGIHANSLLEVRRMYNAVGIDVSKGKSTVAVLQPGGTVIRKPFDVSHTSQNLNELADYLSSLDGTTKIVMECTGRYHEPMVKALSEAGLFISIVNPHLIKNFGNNSLRKVKSDPADARKIARYTLDNWTELRQYSGMDNTRTQLKTLNSQFSFFMKQKVAAKANLIALLDNTYPGVNKLFDSPTREDGSEKWVDYAYSFWHADCVRKIGLKAFTERYMSFYKKHHYIFQQDKPEKLFNASKELVAVFPKEKTYKLLIQQSIQQLNLASEHVERLRREMNELASTLPEYSTVMGIYGVGKTYGPQLIAEIGDVSRFTHREALTAFAGVDPGVDESGQHKSKSNRASKVGSARLRKTLFQIMTTLLQNAPEADPVYRFLDKKRSQGKPYYVYMTAGANKFLRIYYGKVKECLRNLEQTE

SEQ ID NO: 130759 - protein, 360 aa, unidentified
MQPEASWEVKRGMVRFVGLDIGKWKCRAAIMNQGGNILDEFTFTNNREGIEGLASKLTLEDRVVMESTGSVWTNLYNCLDDRHIHVSLANPLKTKAIASAKVKSDKVDARILAHLLRSNLIAESYVPEKPLREIRALIRHRVAIVKIRTIVKNQIHAIIDKHGLSCPYSDMFGKSGTEWLRILKLTSLDRLILDNHLIHLESLKQQTDRVDEDIHRKACEDEDVRLLLSLTGVDVYTALLVRSEIGSIHRFSDYKKLVSWAGLAPSLHQSGSVEYHGSITKQGSRMLRWIMVEAARVAVNHDPRMRAFYERVKHRRGDQKAIVAVANKMLKIIWFMLTRREPYESRNEKRYQQKLNSVAA

SEQ ID NO: 130760 - protein, 331 aa, unidentified
MNYSHFVGLDVGKKTFDASLMSADEKELSHKSFDNTPTGIQSLLDWIAGYHLSLSKLLFCAENMGSYVTELSVSSVSMGFSLALVCPLTIKKSIGLQRGKNDRIDAKRIANYAVLHYRKLELYKLPDKDLVRLQGWIIIRDNLVKQKVSSIKLLETFSRMAKLADVTESISFLEEQLKSIKERILEVEEDMEQLIAASTSLYTNYLLLRSIKGIGIINAIVLLCVTDNFQRFDNPRKFACYCGGAPFEHTSGISIRGKTQTSSLANKEVKVYLTRAAITAISWDPQMKAYYKRKIAEGKHKAAVINAVRAKIIARSFAVIRRQTPFVTLAV

SEQ ID NO: 130761 - protein, 426 aa, unidentified
MSTAMSGLSAGSAAVVRPSSSSLSSSSSSSSSSSSNRMYYVGLDVHARQTTLEMLNDRGQTVKRQTIRGGLDKVVEEVAKLPGPLSIAYEASCGYGYLHDRLAPLAKRVVVGHPAQMRLIFKSKRKNDRIDGGKIAKLLYLDVMPQVHVPGVDVRQWRGLIEFRAATLNRRVALKNQVRALLRGLGLAASVPRGLWSKKGIVWLKDLSGLGETEALRRDMLIDELSEVNRRIKLLEQALAKIAAAHPAVRLLMTIPGVGIRTAEAVVAYVDDVNRFGKMTQLGTYFGLVPCQDSSAAVNRLGHITKEGPATVRKLLCEAAWQARRRSRRVSGWFERITGGDTDRRKIAAVAVARKLVVVMGHMLRSGEAWREGPASTSSSTNTSMRTGCARRLRGSPPEDTVTGNDRRSSVAGAVAGPTVNGERRR

SEQ ID NO: 130762 - protein, 375 aa, unidentified
MLKKLRFLGLDVHAATIAVALAEQDGEVRKLGTIPNRPESIRKLIKTLGPVANLRVCYEAGPTGYVLYWQLTRLGVECTVIAPTLAPVKAGDRVKNDPRDAERLARSHRAGELTAVWVPDEQSEALRDLVRAREAAKQDQLRARHRLGKFLLRQGRRPEETIKAWSERYMAWVRQLRFEQPAQEAARLDYLHEVEHMTERIKRLEKSITEAVGQATPQMQALVAGLQALRGIALISAVTIATEVGTVSRFQSATQLMGYSGAVPSENSSGKRTQRGPITKCGNAHLRRVIVEAAWSYRLQPAVGPKLRKRQEGLSQEIKEIAWKAQVRLSKRYAKLTLKGKDKRKVMIAVGRELLGFVWAIGMRAEAESQQKIAA

SEQ ID NO: 130763 - protein, 343 aa, unidentified
MEHYAGIDVSLELSSVCVVDATGRIVREAKVPSEPEALVGFLGQLGLPLTRVGLEAGPLSQWLHAGLTGAGLEAVLLETRQVKAALSAMIVKTDRKDARGIAQLLRMGWYRPVHRKSPPAQEVRALLVGRKLLQGKLVDVELSIRGLLRGFGLKLGEVSKGRFAARVRELVAGQPMLERVVEPMLRARDVLRAEYQVLHRAVLAIVREDAVCRRLMTVPGVGALVAVTFASAVDDPARFRRSRALGAHFGLTPKRYQSGETDVTGGISKAGDGMVRAALYEAAHAMLTRTGRFSTLKRWALEVAKRRGMKRAKVALARKLSALLHRLWVDGSEFRFGREAAEA

SEQ ID NO: 130764 - protein, 408 aa, unidentified
MNPLFVGIDVSSKNNVAYLMKPDGSKHSSFSVQNNLGGAKLLSERIVSALGSMQLERVVIGLEATSIYGDSLVYALREDGRLGRFQRKIHVLNPKQVRKFKEAYSDLPKNDWVDAFVIADHLRFGRINREVYMDDYRYKALQTLTRARFDVIQNLTREKQRFANYLFLKCSGMAQDKDIQNTSATTIALMEHFETVDDLANADLEELTAFITETGRGKFADPDATAKAVRAAAKGSYRLPKTVNDTVNQAMAVSIASMRALKGQVKVLDKAIEQQFEIIPNTLTSIPGIGKVYSAGIIAEIGDIHRFDSQASVAKYAGLVWNRSQSGDFEAEHSRMIKSGNRYLRYYLLEAANSVRRCDSEFRRYYDLKFKEVNKYQHKRALALTARKLVRLVFRLLKDNRLYILPEG

SEQ ID NO: 130765 - protein, 338 aa, unidentified
MLYHGIDLHKHSVVIGTVDETGKMLANRRLRTRRADLVRYFESMPGPHQAVVESTSGWYWLSELFRKHEIDLKLAHAYRVKAISAAKVKTDSVDAATLAQLLRVDMIPEAHMLDPELRPYRDLLRLRQRLVRKRSGALCSIQTLLEKYNQPSPEDLPPLPALEASMHAERIVLLKSQIKEIEKTLEEVLLPLAPVQRLLYIPGFGAKTALTVFLETGDAHRFATDRNYTSYCRVVPGSSNSGGKTRHRPSKQGNPHLKFAFINAAVRAVQWEPVVKAWYRGKLRKKPKPIAQTLVAKELARIAYRVLVDECDFNGTFKGVPVEKIKTSQWPRRANPVV

SEQ ID NO: 130766 - protein, 340 aa, unidentified
MHKPSAEGFLCCGIDVSAGQLVVALEVENGRSLQRSFPNRVPGHQALIRWLQKDGTRVRVCLEATGLYSLDLALALHAAAGIEVAVLNPKKVNRFAATLCRSKTDPADAQVLAEYARRMPFQRWHPPQAAALELRAITRHIAALTQQHTQQSNRLHAVSASSTGARCVQQDLKRSLRALERRVERMRRAALAVIERDAELRPRFALLLSMPGIGEVSALSLLGELALLAPSLTVRQWVAHSGLDPAHHDSGASVHKRSRISRAGNRYLRRALYMPALVAVRHDPHLRAFYQALVARHKAKLQALIAVARKMLHAIFGMFRGRTGYDGSRLFPAIELAAAA

SEQ ID NO: 130767 - protein, 377 aa, unidentified
MTTAASTEVQLTVGVDTHADVHVAAALDHLGRLLATQSVPTTPAGYRTLVAWAGSLGTVERFGIEGTGSYGAGLTRWLRGRGFEVLEVERPKRQNRRRHGKSDAIDAEAAARAVQAGTATAQPKSGDGPIEMLRTLQAARRSAIKARTQAVNQLHALVVTAPDSLRTRLRGLSRPRLVTTAIAFRPRLPLTSTIAATQLALKSLAVRHQQLTAEVEALEAQLELLVAKAAPDLVAVKGIGTDIATTLLATAGDNPDRLRCEGAFAHLCGVAPIPASSGKTNRHRLNRGGDRDANRALYLLAVGRIGWDPATRAYVERRTTEGLSKKEILRCLKRYIARELYPLLAGNPALLTLRQNYPAVTPAGDQHSSGGDLAGGA

SEQ ID NO: 130768 - protein, 391 aa, unidentified
MIYVGIDVAKDKHDCFITNSDGKVLFPVFTIQNNRDGFDVLFSRIQSSSSDVSNIKVGLEATGHYSYNLLGYLIDKGLHTFVINPLHTNLYRKSLSLRKTKTDKVDARTIALMLMSDVNLKSYSDTSYHNEELKSLTRYRFRKVQERAQLRQSVSRLVTILFPELEKLVPSLHIASIYALLSEFPSAGTIASCHLTHLTKRLENASKGRYSREKAIEIRNAARASIGSNMPAKSLELKHTLRLIGELDSEISEIESEIKRIMDEIHSPILTIPGIGYRMGAMILAEIGDFSRFDSPDKILAYAGASPSTYQSGQMESSYSHMEKRGSRYLRFALINAAKYVCQWDETFGAYLQKKISEGKHYNVAITHAAKKLVRLIYAMEKSGKPYIKTA

SEQ ID NO: 130769 - protein, 401 aa, unidentified
MRRRAWVGIDVGKTSHHACAIDETGKVVWNQKVSNEQRAIEQLVTRACKGAEQVQWAIDLTSPMALMLITVLLCAEQSVVYVPGRTVNTMTHAFRGEGKTDAKDARVIAETARLRNDLSNVVLPDELVVELTQLTGYRADLMADWVRGINRLRALLGSIFPGLEAAFDYSTRTPLILVSGLCTPAEIRAAGIDGMTAFLVDNHAWPTGIVKSAATAAALANEQPLALPGEAGTAALVKRLACRLLELDREIKDIDKTITARFRDHPYARIIESLPGFGPGLGAEFLVVTRGDLASFATAGRLASYAGLVPVPKDSGRITGNLRRPKRYNRRLRRVFYLAALSSLRADGPSRRFYDRKRAERLIHTQALLALARRLIDVLWALLRDDREFTPEKPITATAAA

SEQ ID NO: 130770 - protein, 403 aa, unidentified
MSVPDVIWVGIDAGKASHHAVAVDGEGRQLWSAKVANGQRPVEDLIARAGRSGGEVRWAVDLVSPMASLLLAVLLAGGQNVVYVPGRMVAGMAGVFGEGKTDAKDARTIADTARMRRDLTRITADDELVVELARLTSHRADLMADWVRGVNRLRSLLGSIFPALEAAFDYSTRSALILVTGFDTPAEVRQAGPGGLTAYLREHGAWRKGISAMAAAAVRAAAEQTVALPGEATTALLVKQLAGKLLDLDREIKDADKLIAGRFRTHPQARIIESLPGMGPILGAEFLAATGGDVQAAFTSPGRLASYAGLVPVPKDSGRVTGNWRRPRRYNRALRRVFYMAALSSLRTDGPSKTFYQRKRAEHRLHTQALLALARRLVDVLWALLRDNRTFSTISPVQAAAAA

SEQ ID NO: 130771 - protein, 340 aa, unidentified
MNEITTIGLDLAKHVFQVHGVDASGVTVVRKRLRRSEMLAFFARLPSCLIGLEACATAHYWARKLQAIGHEVRLMPAQYVKAYVKRNKNDAADAEAICEAVQRPTMRFVPVKTAEQQAALLVHRGRERLVRQRTALVNALRAHLAEFGVIAPLGLRNVARLIAIVRDESDARLPDLAREVLRVLAEQVEQLQAAVAAMEKQLMAWHKSNPVSQRLATIPGIGPIIATAIAATVVEASGFRSGREFAAWLGLVPRQHSTGGKARLGGISKRGNRYLRRLLINGASANLLRSKATNADPWVIGLRRRRPSLVVAVALANKTARIAWAVMHRQENYQRMAVAA

SEQ ID NO: 130772 - protein, 485 aa, unidentified
MVVRKQKVPAPSKTSRLDTLRQEAAACAELADLPVKHRHAAGIDVGDASHWVCIDADGGDAGVREFPAHTPGLRALVAWLKERGITTVALEASGVYGHVLYLTLLEAGLNPVMTSPAFTKQIKGRPKTDRRDCQWICRLHQHGLLPSIFQPDEATQTLRSYVRQRANLVRLSGQHIQRMQKALELMNLKLTRVIGDITGVTGLKIIRAILSGVRDPQMLAQLRDRRCKHAEPEIAQALDGRYRDEHLTELRLCLKLWEQYQEAIADLDLVIAKHLHAMRKTSELPRLPQQPRVRGRKPHDPKFDVRTALYYAVGVDLTAIEGIDEIHALTLIGELGSDMTKWPTVKHFTSWLGLCPNWKKTGGQVKSSQTRKGKNRAASALRLAAWSLMRSKSYLGAYLRRQRARLGAPKAITATAHKLARIVYNLLRFGIGYVRQQEAAYADEVRERLERQLRRRAKELGFEVVKPTSEGAPNEAPPAHDPKAG

SEQ ID NO: 130773 - protein, 367 aa, unidentified
MKKVSTAGVKATKNFSQPKLTIGLDLGDRSSWYCLLDEVGEVLQEQKLGTTPKAVREVFGAMPRCRIALETGMHSPWVSRVLSELGHEVIVAHARSVRLIGESRKKDDRLDARTLARLARIDPQLLCPVKHRSAKAQADLTVIRARAGLVRARTALINTARGLAKSYGERLRGCNPRNVNPEKAQGLSPELQFALAPLLAATEALSERIYEYNQQIAKIAKESYPQVARLEQVKGVGTLIALTFLLTLEDPHRFRKSRDVGCYVGLQPGRRNSGQSEPQMHISKEGDPYLRTLLVQGAHHILGPFGADSDLRRWGLKLAERGGKNGKKRAVIATARKLAVLLHRLWVSGEAYEPLRNSRRMTMPAAA

SEQ ID NO: 130774 - protein, 326 aa, unidentified
MTQLSSPVVSPLFVGIDVAKDKLDLARSDSGELLTFTNDDRGIRAIVELLQAARPTCIVVESTGGLERPLLEALLDADLPVALVNPGRVRHFAIGIGVLAKTDPIDASVLMKFAQLAEPRLAQKRTQNQAELDELITCRRQLTAARTAQANARLTTRSTDAQKSIDAILKALDKQIELLDQKIRKLIDSDDDFKHLDRLLRSVPGVGPVLSATLVAELRELGTTDRRQIGALVGVAPFNCDSGKFAGQRSIHGGRTSVRCVLYMATLAAIRFNPVLRPFADRLRKTGKRAKVIIVACMRKLLILLNAMIRDNLTWSELNVVRNIDI

SEQ ID NO: 130775 - protein, 339 aa, unidentified
MQHFAVDLGGRKSQICVREASGTILREREVATSSLPRILAKEPPSRIVLETCAEAFSMADAALEHGHEVRVVPATLVRSLGVGARGVKTDRRDAQVLSEVSTRIDLPSVHIPSAKAREWKSLCGLRQQLVRSRTAFINTSRGWGRSRAIRIPSCTPATFPKRATKAAESLPDGLPLALQRVLDSIEDLNVRIAEADKELASLAKEDDTCKRLMTVPGVGPITAINFAAALDEISRFSSAHAVESYLGLTPGENSSSQRKQRTGITKAGPPAVRTTLIQAAWSLRRARPNDPIVVWAKNIELRRGKFVATVAVARKLAGILFALWRDGTTYESSRAATKT

SEQ ID NO: 130776 - protein, 336 aa, unidentified
MAFYCGIDLHSDNHVVVIIDDEDKKVYERRLSNDLSLTLGALAPYRSDLVGVAVESTFNWYWLVDGLQAEGYPMQLVNTTAVQQYSGLKYTDDRYDAFWLAHLMRLKILPTGYIYPKEQRGLRDLLRRRTMLVQTASKQLISLQSQIWRQTGVKIPSSKLKQARFSVDLPGEMEKRAAQASLRVYRSIQAELEQMESELIKAVKPREDYQVLTSIPGVGPILGMTIALETGNIQRFAEVGDYASYCRCVKSERVSNAKKKGEGNAKSGNKYLSWAFSEAAHFAVRYEPLAKRFFERKQRKTNGIVAIRAVAHKLARAAYYMMRNNTTFDAQKLFAN

SEQ ID NO: 130777 - protein, 348 aa, unidentified
MTMLAEVFDAVIGVDTHKHTHTAAVVIAATGAVVEDLTVSTDPAGYTRLVELADRHSGLRVWSIEGAGSYGAGLTRHLRDLGEVVIEIERPNRPARHHGAKSDPIDAARAGREALAREHHAQPRATGQRAALAVLLTTRRSAVKATGDAQRQLHALITTAPEEIRNRFRDLSTASIVTAATRLRTRTGWDLETSTYAEALRDLARRVRSLQTETAKHERSILTIVQAWRPDLLDITGIGPINAATILCAWSHPGRCRNEAAFANLAGVAPRPASSGMTVRHRLNRGGDRDLNRALHFIALTRLRHDPDTRAYAQRRRAEGKTNREIKRCLKRYIARRIYTQLEHPPTP

SEQ ID NO: 130778 - protein, 362 aa, unidentified
MESMRWVGVDVHAKESVAVVLDQATGEITAQRIAGRPNEVVEWLSTLEPPFRAVHEAGPTGYGLVRRARERGLDVVVCAPGHILKNATDHIKVDKRDAVRLARLLSAGELRLVRVPEPEEEQLRDLVRSREDLRVDLTRIRNRIGKFLLRREIYAPKHTETWGVLHRKWLQSLRFEDRASELVFEDAMHGHDILVARREQLERALAEIAETSPWALTIARLRCLRGIDTLSALGLVAEVGDFRRFQHPRFLSSYLGLVPSEHSSGEKRRQGGITKAGSKHARRLLVEAAWQYRHVPRTSHHISQRQRGQDQRVIDIAWRAQRRLYKRWQRLHDERRKRRTVVAVAVGRELAAYCWEIATLSS

SEQ ID NO: 130779 - protein, 316 aa, unidentified
MAEELYVGIDVSKAELVVAMRPSGERMTLSNDRTGIKRLVARLSELKPQLVVVEATGGLQRQVVAGLWLAEIAVAAVNPSWVRNFAKGRGVRAKTDRKDAELLALFAQRERPEARPPADAETQALQDLVMRREQLLEMSVAEKQRLHRASGPMRKELRHHIAYLEGRIKQIEEEIDKTVRRSDAWRRKNEIVRSVPGLGQHFSAMVLAKVPELGTLNRKQIGALIGVAPMPDDSGSRHGRRAIAGGRFEVRNMLYMCAMVAARSNPVLKQFYQQLVARGKPKKLALAAVMRKLIVTLNAMFKTNSLWRPPCPDPSV

SEQ ID NO: 130780 - protein, 342 aa, unidentified
MDVVIERACGMDVHKDNITACIMTPEGKVIQTFSTETVFLIQLVDWIKQHRCTHVAMESTSVYWKPIVNLLETEVIEFLVVNAQHMKAVPGRKTDVKDAEWIAKLLRHGLLKASFIPDRNQRELRELVRYRRSIIEERARQHTRIQKVLEGANIKLGSAVSDIMGVSARNMLDAIAEGEEDPEKLANFARRTMKKKKDELALALKGSINPHQRLMLKTILKHIDFLTEQMEMLDEEVEKRVSKYQEDIERLDSISGIATRMAEQISSEIGTDIKKQFPSAAHMCSWAGLVPGHNESAGKRKSAKTKKGNKYLRSALTEAAHSVRESKNYLGALYRPYSITKR

SEQ ID NO: 130781 - protein, 348 aa, unidentified
MAMTIVEAGRTVIGGVDTHLDVHVAAALDPIGGVLGVESFDATPRGYQALLEWMGAFGTVTQVGVEGTGAYGAGLGRFLAKAGVEVIEVDRPNRQARRTKGKSDVADAVEAARAVLSGRAAGTPKSRDGAVEAIRALLVAKRSARTARSRALAQMRQLSYTGPDQLRSRFKGLSIADLVDQAAALRPRASGDPVLYATKVSLAALGRRVLALDDEMVGLDELLTDLVTTCAPQLLGLYGVGVDTAATLLVAAGDNPERLRSEAAWAHLCGVAPIEASSGKVTRHRLNRGGDRYANQALWRIVMTRLAGDPRTRAYLERRTKEGRSKREVIRVLKRYVAREIFKYLPRG

SEQ ID NO: 130782 - protein, 349 aa, unidentified
MTMLAEHVDVVIGVDTHKHTHTGAVVRAATGAVVEKITVSTDPDGYAELIEMADRHAALRAWAIEGTGTYGADLTRHLGDAGELVLELDRPKRPPRRMGAKNDELDAVRTARDALGREHNATPRRGTDRAALSVLLAGRRSAVEAAKVAQVQLQALICAAPEQLRTKFRGQRSKTVTNTAARLRVRGDWDLETRTYATVLRDLARRRIALLKEAKTHDGAINLIVKSWRPDLLDDFGVGPIVAATILCAWSHTGRCRNDGAFAKLAGVAPIPASTGVTNRHRYNPFGDRQLNRALHLIVVHRMRRDATTRAYAERRRGEGKTDREIRRCLKRYVARQLFRQLEQPVDSQ

SEQ ID NO: 130783 - protein, 344 aa, unidentified
MAKINTIGVDLAKNVIQVAVVSPSSKVLQNKDLTRNQFVRFLARQPPSLVAFEACATAHYWARQSRKYGHTIKIIPAKAVSPYRQGHKTDRNDALAVAEAACRPNIKEAPLKSIEQQGLQSIQRSRELLVQDRTALSNHLRGLLLEFGICIPKGLAALRQHIPEILEDGENELPDIYRPTLCRMFERYQQLQLDIEFLDRQIRELVKQNDACHRLMDLEGVGPISAVLLFATLGTGEAFKNGREFSAYIGLTPKQYSSGGKTNFVGISKKIANRRLRAVLIQGARAYVHKLKEPKSPKQRWLHALIQRAGYGKAAVALANKNVRTVWAMLTTGSEYNSALTIRV

SEQ ID NO: 130784 - protein, 346 aa, unidentified
MSQYVGLDVSVKSVSICVVDVEGAVIARGETSADPDQISSFIGEHAPRAERVVHESGILAIWLTRELEARGLPIFCIDARLAHKALSGRINKSDAGDAEGLAHLARTGWFSTVHVRSEASERVRVLIGTRERLIRMRKDLEGHVRGVLKVFGVCMGTVHRTKLRQGFRDQLAEAAGTDPAIAVMAEMFNPVHEALCAATDAMDDELKDIARKSALARRLMTVPGVGPVVALSFIATLDHAGRFRRSRDVGAFLGLTPRRHQSGEMDWSGRISKCGDRDLRRLLYSAASTLITQVRKPSPLLAWAKRLQERKGFKKAAVATARKLAVILHCIWRDGTLYDPRLEATT

SEQ ID NO: 130785 - protein, 388 aa, unidentified
MQDVADQSAAPTTIGADLCAIFVSLELSRSTWLATSLSPGRGEKMSKHSVSAGDIAALLARLSELRRKACARTGKSFPIVVIQEAGLDGFWIHRVLLSEGIESHVVDAASIATSRRRRRAKTDRIDGETLLRALLAHKRGEPRVCSMVRAPTPEDEDRRRICRERKVLIMERVQHVNRIKGLLFSQGASGYEPLRRDRRARLDALQTGDGRRLPQHLKAQVCRELDRLELLLEQIKAVEAERDAPLDAEQTKASAPPPMLLGVHGVGPEFASVLWSEGLSRHFDNRRQVAAYAGLAPTPWQSGSVNREQGISQSGNSRLRTTMIQLAWLWLRHQPRSALTLWFKDRTERNGGRRRKTTIVALARKLLVALWKYVSAGVVIEGAMVRPA

SEQ ID NO: 130786 - protein, 457 aa, unidentified
MKWYLGIDVSKGYADFALVSELLVQQEETFQLDDTRSGHEQLEIWLDALFKQHPGLEVDCGLESTGGFENNWYALLIKLSSSIPLRAARLNPSTVKNASRALLNANKTDAESAKEIAGYLKRYEDQIDFAVRDNQYASFRSLQNHLELVTKQKTQLINELKQILYSSFPELQRFCKQGIPGWVLELLMQYPSPEKLVRQKPLKLARIKGITEEKAKSLIEKAQATIASRSNSTYEFLIVQMATEVKHKQEKIKQLKQYLEDHCKGKEKEWLESIKGIGSYSAAAIMIQIEDIRRFASPKELASYFGLHPLIKMSGDKRMVSRMSKQGRPAMRALLFMCANSAVRCDEHMRTIYARHRAKGKNHKQALGAIMHKMTRVIWGVLIHEKPYDSRIDLANQSKNIQNPVQDELKETENKRRMQQFDSEAPISRIASKKRKVHAASQVGEAGLVRDLEHEPG

SEQ ID NO: 130787 - protein, 381 aa, unidentified
MTAATRPTFGSVSEPTLYVAFELGKKEWKLAMTSGFGVPPWLRTVASGDLRGVERALTDGRRRLGLAASAAVVSCYEAGRDGFWIHRALTQLGVRNRVVDSASIEVNRRARRTKTDRLDALKLVMMLVRVCAGEPRVWHEVRVPSVEAEAARHVSRERSTLTGEQTRLSNQISSYLVTWGCVVSRRGRRPAGWWTRVRDWAHAPLPAAVQARIARAEERLAVLATQIAALEAQQAAAVATAPPASALGRLVRLKGVATTSASVLLDEGLVWRAFRNRREIGGLLGFAPAKYDSGDSEHDQGISHAGNAHLQAISIQLAWNWVRWQPTSALTRWYREHFGPRRRARRIGIVAVARKLIISLWRYVTTGVVPPGAILKGAARA

SEQ ID NO: 130788 - protein, 414 aa, unidentified
MLKIVYPVCCGMDVHKSFVVACIATTNENGVTTYKSRRFSTFTGDLRRCAQWLADNNCQDVCMESTGKYWIPIYNILEPTCNIVLAHPKYVRAIRGKKTDKRDAKWIADIFKHDLVAGSFIPPADIRQLRDLVRYRWKLTNFTSGEKNRAQNCLTVSNIKLDDVFSDVFGKAASAITTRLLDNPTKKITDVSGFRTKGMKATNEQILAAVDGELCAEQAEKLRIIRSHMSSLELCKLNLESLILATAEKYLPQLNLVMTAPGIQSFSAIGIISEIGVDMSVFPTSKHLCSWAGLTPQNDESAGKKKTTRISRAGAYIKPLLVQCSLCAIRAKQFPEVRNRYLSLKKRRGHKKAIIAIARMLLTAIYNMLKKNEPYNPELYRIADRPPTNRQVSVEEAVFILQRQGYLVTAPTVT

SEQ ID NO: 130789 - protein, 367 aa, unidentified
MKKGSTAAAMQSRNFSQQKLTLGMDLGDRNSWYCVLEEAGQIQQEQRVRTTAKALREVFGGMPRSRVALETGTHSPWISRLLTELGHEVIVAHARKVRLIGESRKKDDRRDAQTLARLARIDPELLCPVKHRSAQAQADLTVMRARAGLVRARTGLVNTARALAKSYGERLRGCNVRNMSPEKAEGLSPELQRALEPLLSAIEELSARIGQYNQRIEALAEASYPKVALLKQIKGVGTLIALTFLLTLEDPHRFRKSRDVGCYLGLQPGRRNSGQSEPQMHISKEGDPYLRTLLVQGAQHILGPFGVDCDLRRWGLKLAERGGRNGKKRAIVATARKLAVLLHHLWVSGEAYEPLHKSSKVTAVAAA

SEQ ID NO: 130790 - protein, 320 aa, unidentified
MMTQNDLVVVGIDVAKDKVDACIRTVTERRTFPATASGRRSLIAWLRKHQVGKAVMEASGGYERVWAKALRQTALEVRIVDPKRVRSFAESAGRLAKNDKIDAEMIAWFAETFSEAPSQVEDPAHEEIKALVKGRKSLIDLRARLEMQKEHEVPALVGKAHARLLKKLASEIAAIETAIGAKIKATPAFAVRAEIIQSVPGFAEATALTLLAGLPELGQVSNEVAAALVGVAPYDDDSGKRHGQRCIKGGRRWVRNALYMPCVGAATLNNPVFKAFYQRLIAKGKEPKAALIACMRKLIVILNTMIARGEKWDPKRYQVA

SEQ ID NO: 130791 - protein, 340 aa, unidentified
MSVYVGIDVHRKRSQVAVIDQDGEVLANRNVPNGTETILGVIGGLPAGTAAAFEAAFGWGWLLEVLEDYGFEPHLVHPLQCKAIASARLKNDKAGAAILAQLLRADLLPEAWIAPPAVRQLRALLRHRAQLVRLRTLLRNRIHAVLADHGQDRPAGCWSGPGRAWLASLPLPAVSREVIEDDLAMTGALQVPIDRLDWEAHQRARSDPRVKILTQLPGVGPYTALVILAEVGDVTRFGSARKLAAWAGLTPTVRGSDRTVRHGHISKQGSAWLRWILCEAAQTAKRHPDFAASYQAIAARRGKKIATTAIARKLLTRAWHLLTDAERAARLQDATPAPAA

SEQ ID NO: 130792 - protein, 355 aa, unidentified
MVMLAENYDFVIGGDPDRDTIDLAVLDTSAGRVQAHLADSADGPGYDRMLTWAGEHAPGRRIWALEGTGSFAAGLVVVLLDAGETVVEVGALKRARGAKNDRIDAIRAARQALARDEQGAPRAGGLREALRMVFACREGVLVSRTKAINELKSLIVVAPEQLRAELRGRSLAVQLTRIEALQAPTAAPVELRLSVFSLQSITARIRFLSTQLAGLDPQLLSLIKQHPAGPALLAEAGVGPVVAAQLLISWSHHGRVRDEAAFASLAGVSPIEISSGQRSRHRLNRGGDRALNRALHTVAITRLRCHPESIAYEIKRTAQGKTHRDIRRSVKRALARRLYRRIEAAIRLENTSAAA

SEQ ID NO: 130793 - protein, 371 aa, unidentified
MKKSTNATGSKAKTAAKMKTIDWRRAETIGIDLGDRFSHYCVLDGDGAVVGEGRVLTTPGAIELLFKTSRKRIAIEAGTHSPWMSRLLARLGHEVIVANSRKLRLIYENQHKSDRVDAEYLARVARLDPKLLGAIEHRSEVGQCHLSLIRARDTLVRSRARLIQHVRSAIKSLGERIPSGTAEAFHKRAGASIPEGLREALMPLVATIEQLTVRIKEYDRKVEQLAEDRYPDTGALTQVCGVGSLTALAYILTLEDEQRYRRSRSVGAWLGLVPGQHDSGESQPQRRITKEGDAYLRRLLVGCAQYILGPFASDSDLRRHGLLIAARGGSNAKKRAVVAVARKLAVLLHRLWRTREVYEPLHNAGEQTAAA

SEQ ID NO: 130794 - protein, 360 aa, unidentified
MTTINPSQSTASYEAIKLGIDAHAQYYWVSRQVDGATPQPVQKMTYEELMLFVVKQQKLTRNVVTCYEAGAFGFHLHRRLEELGIKNYVVQPQDWDERGKGVKNDRLDAAALCQRLDRYERGNKKAFSVVRIPTVDEERERAITRQRQQLVRERQRLAAMGRSLLAMHNIHVTGKWWKGKAWIALKILAPAWVIERMEVFIVILGPLEEQEAKLTNAIQEAAQEQKIPRGVGPLTFEILRREVGDWSRFNNRRQVSSYTGLCPREHSSGGKRRSGSVSKSGNPRVRAMLVEMVWRMMRWQPGYTALQKWAPVLNSPTPNPAAKKKAVVAIARQLAVDLWRVFTGQVEAEKFGLVYLPEAA

SEQ ID NO: 130795 - protein, 374 aa, unidentified
MNKHSMIFIGLDTHKEFHEVAYCEEQRGASPVHYGRIPSSKASVKKLLRQFESKYPGATLHVVYEAGPCGYWIYRLITSLGHCCYVVAPSLIPKKPGERIKTDRRDALKLVRSLKSEDLTPIYVPEPEDEAVRDLSRAREAAMKDLKEAKYQLKALLLRNNIRYEGTANWSKKHLRWLTELILPHPAQQIVLQEQLQTIEERIRRLERLDNELTHHVHQWRYYPVVKAIQAMRGVRLLVAVGVVAELGDLHRFDHPRKLMAYLGLVPSEQSSGGKRHLGAITKAGNGRARRLLIEGAHSYRYPANVSTELQLRQEGLPKDIVDIAWKAQLRLCKRYQRMSKKGKHYNLIITAIAREMAAYIWACLLYTSPSPRD

SEQ ID NO: 130796 - protein, 385 aa, unidentified
MGIKKSPKARAVAAVPDSGNVFGADPHKRTVTATVLDERGAVLGTETFRVSGDGHRAMEAWALSFGPIARWGIEGASGLGRHTAMYLIGQGHDVRDVCPTRTAEQSRRRRQGKTDALDSVRVARETQADPAMPMAFKRAAGDAGPDETHELLSLWHKARRSILKSRQHLLNEAEHLLGELPEQLRAALPDTTDVRSRLRALAERDDHTWDPATTLRLQLLDRHRDAVADLDAQDREAAMALKALAEQAGSSLREVRGIAERIEAELLVEVGDPRRFAGEGGFARFNGTAPLPASSAEGDGEPVRHRLNRGGNRRVNACLYRIAITQLRCDPRARKIYDNARQRGHTKNEAMRILKRHLSDVVYRQMMRDLNTRLAAQSHDLRAAS

SEQ ID NO: 130797 - protein, 426 aa, unidentified
MMYLGFDIGKRWHEGALVGAGGDIIRRLRFAPTRAGLAELATWLAGVAPADVQIGLEATGIYWLTLHAWLQQWGATAIRVLNPLQTRAFRNANLRGVKTDRVDAVAIARLLRWEGARLASHAVPEDRRAAAREIARLRTEMVELRARQLTKLGTVLEPLFPEFAGAFADLGGPSALAVLARWPAPAALAQARASDLTRVLHAASRGHLGAAKARELRERAAASVGVADPYGASAIAVQTLVAHLEHLRAQITALAERLDALQAEDTAARALLASIPGFGPETVRTWLAELPPMQAFATQAREQSRALPPGTKPKHGADKLVAAVGLDAQVKQSGRWQGQARMSKRGNRYVRRAIMLAAQAAARTDPQCRAIYDAQRARGKHHTVAVSHVAHQLLHVAYSVLLHARPYTLPERFLTAPPPQLAEAGT

SEQ ID NO: 130798 - protein, 327 aa, unidentified
MDNPTYIGLDIGKYAVSCAVPGRRVRDFNNDRPGIRRLLQWCGLTSPPAKLFFVMEATGGYCLFTASTLLDLADTRVAIVPPVCIASFIKAGIKRTKTDRADAEAIRRFGEVHHPAPWFPRLKQQQRLRDLLLVFDAAKRTVVRLKCLKEKLATALQPDPFTLASLQRQLDSALAEQRLVAAEMDAVVSADEVLSTDSANMLSIPGVGPGVRNVLLALIGEQLHALSQRKLLAYCGLSPQENQSGKFKGRTMLNKAGDPRIRQILYMAALRAVSPRGILHDYFQRLKRGGKHGKSALVHVMRKLLYLIQALVKSGKPFDRAMYLNPA

SEQ ID NO: 130799 - protein, 357 aa, unidentified
MLIIGCDYHPSFQQIAVLDNETGELQEHRLKHREEAEQFYRSLATTGARARVGMEASGHAVWFERLLAELNIDLWTGDAAKIAAKRVRKQKTDRQDAQHILRLMVKDDFPKIWVPSWENRDLRQLLWHRHRMVQTRTRIMNQLQAAALNEGLRYKKKLWQESGRQQLESLPLAEWASRRRRDLLEVLDRINPTIAELTRAIEQEAEKCAEAKRLMTHPGVGALTALAFVLIVGQAERFDCGKQIASYLGLVPEEDSSGERRRLGHISKQGNSLLRFLLVEAAQVTVRSDVRWRNRFFHLAQRRGRKIAKVAMARKLGIRLYWMWRRGWNYTQLESLGSHAGQPWKSSWCAVNHRRND

SEQ ID NO: 130800 - protein, 360 aa, unidentified
MVRRLQLRCGRMKASTGGFSHEGPRCGVDIGKTVFHLVGLSKEGHIVTKKRFSRKQLLTHTVNLPTCLIGIEACPGAHFLARVLLKQGHNVKLMPAEYVRPFVKSNKNDYVDAEAIAEAVQRPTMRFVPVKNEAQLDLQALHRVRDRWIGRRTAVINQLRGFLLEHGITVAVGPAHLRRQIPSILEDADNLLSPRMRTLLSELREEWEKLEEHIDTTTRELAQFAKQEEGCRRLLTIPGIGPLTATALTAAVGNGAAFRKGRDLAAWLGLVPREHSTGGKARLLGISKRGDPYLRRLFVHGGRAVLGQVKRERHQFGGWLDRLEARSPRNVAIVAMANKIARMAWAVLTSGQSYNAALTS

SEQ ID NO: 130801 - protein, 340 aa, unidentified
MGEVSIIGLDLAKNSFQVHGAMADGAVAFKKKLSRSKVLSFIAEQPACLVAMEACASAHYWAREIGKAGHQVKLIPPIYVKPFVKRQKNDAADAEAIAEAASRPTMRFVAVKSEQKQALGMAFRARDLLVRQRTQTINALRGHLAEFGIIAPQGTAHVKRLRESVHDSAAGLPSEVQEVAGMLLEQIDALQVKVDALELNIRARAQKEETAARLMTVPGIGPICASAIDAFAPPPEGFCRGRDFAAWLGLTPRQHSTGGKDILGRMSKMGQRDIRRLLITGAMAVVRWAVRRGTTDPWLAQMLKRKPRMLVAVALANKMARIAWALLVKGGHYRAPAVTA

SEQ ID NO: 130802 - protein, 444 aa, unidentified
MMKSLPVLDPKAAAIDVGSEKLHVSIAGDVPKVFGTFTGDLEALRDWFRAQGVRTVAMEATGVYWLYLYEVLEAAGLEVVVVNGRHVQNVPGRKTDMADCQWLATLHAHGLLRGGFVPPAEIRRLQDYQRLRADHLIGAAAQVQKMQQALERMNVKFHNVISDLVGVSGLKVVRAILQGQREPDCLLALCDPQIQKKKAAAVKESLRGCWKEEQLFALRQALELWEYFQQKMAECDRQMEKLLQQMAEHPSGQGGLGSGPVKLARAKDPGKNAPVIERCQELLARLCGGRDITQIPGLSVYLVLQLISEVGTDMERWPTEKHFTSWLGLAGGRKQSGKRKGTVKAHRNRAGRMFCAAARALAQSVDKALGGFYRRLRGRVGGLAANVALARKLALLFYRLLRYGMDYVEKGLKAYEAKVLESETRLLRKLAQKQGFILMPAAAE

SEQ ID NO: 130803 - protein, 346 aa, unidentified
MLHAGLDLSRKRLDVCLLSDQGELVEQTATPPDLDGLRALADRFAHHDEPIRGAIESMTGARFVHDTLEDLGWDVLIADAEKVKPFGRVACKTDTLDSQVLARLGQLALIPEIWLPDPRVREERELTRFRMHLVKHRSTLKHRIHATLMTFGRPCPVTDLFGKEGRALLDHLEIPEPWRSNVSVSLELMDELDRKIAECNARLQAGHADHPYVRLLMSVPGIGRVLAFTIAAEIGDISRFPSAKHLTGYSGLCPRVNQSGDKDRRGPLTKNGPRYLRWALIEATMHASRHPAYSERYQRNKRRLGKQRGAKVAQIDIARKLTVAIWHMLSRNETFAPRGATFRLAA

SEQ ID NO: 130804 - protein, 342 aa, unidentified
MKLFIGLDVSLAKTAVCVVSDHGQIVKEAVTESEPEVLARWLDELDGSIAVIGLEAGPLSQWLHRRLTEAGLDVVLMETRQVKGALKAMPIKTDRRDAEGIARLLHLGWFRPVHCKSVSAQETRAVLGARKAIQQNMIALEMSLRGLLRNFGLKVGAISRGRFETRIRELADGNPMLETATEPMLRARASLRQELAGLEKCVRQLAWDDPVCQRLMSMPGIGAVVALTFRAAVDDPARFQSSKRIGPWVGLTPSRSQSGERDVSGGITKAGDVNLRRALCQAATVMMNRGRSTWLRTWGAQLAQRRGRKIAMVALARRIAVILHRIWVDNTTFQPDAAPNLA

SEQ ID NO: 130805 - protein, 319 aa, unidentified
MNKLSQNAIIGIDVSRDWLDIHVLPEGQPQRLPNTAEGHAQLTNIASNPGAVVCFEATGGQEWRLWAALDTAGVEARQLPPAQVKAFAASQGTRAKTDRLDAELIARFLAFRPDAGRKLPAQKLRLIRALTSKCGQLVETRKRLLAQIKARQKQGPDDAFKDMDAALRLLLDTQVGTLETQIGHLIAADDALMQTAKILRSVPGIGPVASSMLIAEMPELGQISGEQAAALTGLAPIARDSGAMRGKRAIGGGRRLLRHVMFQAALVASYHNPVLKAFADRLRNAGKPHKVIVTAVARKLVTIVNALCKSRQMWASPIR

SEQ ID NO: 130806 - protein, 355 aa, unidentified
MNDAKYIGMDVHQATISVAVRDSRGNLVMEAILETKADTILEFIHGLRGSLSVTFEEGTWAAWLHDLLQPHVTRVVACDPRKNALLKVGNHNDRMDARKLSELLYLNKLSPVYHGEQGIRTLKELARSYIAITRDLTRVMSRLKAIYRSWGIPCAGQQVYAPRYRAEWLAKISEAGVRRRAELYYQQFDALAALRQGTRRELLAEARKHPAMRLLRQIPAIGPIRAALLIALIQTPNRFRTKRQLWAYCGLALRTYTSGEYRFVAGQLKRSKKVLAVRGLNINHNHDLKNIFKGAATRAAATAGPFQGFYQDCVARGMKPHLARLTLARKIAAITLLVWKKGDRFDAEHLKQQAA

SEQ ID NO: 130807 - protein, 322 aa, unidentified
MKQKPFLGIDVSKAKAECGLLLADSKYRSKVVSNQAVGFAQLRQWLEQHDAGQAHVCMEATGVYWEELALALSAQGMPVSVINPAQIKAFGESRLVRTKTDKVDARLIAEFCRAMQPPLWQPPSPSAQALRALVGRLEALQRMRIQESNRLGVARDAVRSNIEAHLHWLDEQIKALTQQIDRHIDQDPDLRRKRDLLDTIPGVGGRTSALFLAFCSRTEAFANARQCAAFAGLNPQQHQSGSSVRHKARLSKIGHALLRKAMYMPAVVTLYKTAWGKAFRSRLKAAGKPPKLIIGAMMRKLIHVAYGVIKSNKPFDPTLHAT

SEQ ID NO: 130808 - protein, 360 aa, unidentified
MKLDAALDTSATTTAICVVNSRDGAIVLETTVPTNPRAIFRALEPFLPRLHLVGHEATGWSAWLQRELEARGVPMVLLETHHTARMLEAQRNKTDKNDARGLAQIVRSGWFKPVHAKSDASNRMKLLLAHRRTLKRKLMDIENEIRQSLKMFGLMVGRRVQRASFETRVTALVADDPLLGSTTACMLRCWATLWTEYKRLHTLLVQVVGRDELCRRFCGIPGVGPVAALTFKAAIDDPARFAKSKIVGAHFGLTPKREQSGTSVDHDGHISRRGDGEVRTALYEAANAMMTRSQKHCAVKAWGLRLAAKRGHKRALVAVARKLAVIMHRMWLDGSEFRFAASDQPAGKERNPAPAAPACA

SEQ ID NO: 130809 - protein, 320 aa, unidentified
MHSEKFVGIDVSKSYLDVAIYETDIDKKWDNDDSGIKELIAFLKPLSVTLIVLEATGGYESLAASTLNENGLPVVVANPRHVRNFAKATGALAKTDQIDARNIAHYASAIRPARRGIKDKQTQLLAALNARRRQIVDMLAAEKNRLHTAPQANQKNIREHIKWLEKNIKQINKDIQKTIRESPLWRENDDIIQSYKSMGPVSSSTLLSDLPELGTLDRKKIAALVGLAPFNCDSGRYRGRRRIWGGRAHVRKTLFMAARSAIRFNPEIKMFYEKLRGAGKPHKVALTACMRKILITINAMVKNKTYWSQGYKNLDFEHGC

SEQ ID NO: 130810 - protein, 367 aa, unidentified
MKKISTVMAKKVEKNASQKLTIGLDLGDRFSWYCVLNEAGEVVLEQKVATTPKAMKEVFGGMPRSRMALETGTHSPWVSRILSELGHEVIVAHARNVRLIGESRKKDDRLDARMLARLVRIDPQLLAPVKHRSAQAQADLMAIRARAGLVRARTSLINTARGLAKSYGERLRGCNPRNMNLEKAQELSPELKTALEPLLGEIESLSERIGEYNERIEQIAKQSYPEVARLTQVKGVGTLIALTYVLTLEDAHRFGKSRDVGCYVGLQPGRRNSGQSEPQLHISKEGDPYLRTLLVQGAHHILGPFGADSDLRRWGLKLAERGGKNGKKRAVIAVARKLAVLLHRLWVSGEAYEPLRNQREVALPAAA

SEQ ID NO: 130811 - protein, 346 aa, unidentified
MDRYIGLDAHSQSCTVAVMSAAGKRLREERLETNGEALRQFVRTLPGRTHLCLEEGSMSEWLYELLEPLVDEIVVVVPERSRGNKNDSVDAWARADELRRNATQRRVYKAPQKFTALRDAVRAYEISQRDMVRAKNRVNAIYRSRGLSGMGDAIYDAEQRKRWMEKLPPHRRELAGLLSAQLDGLLQSHAQAEKWLREEAQRVPIVEKIKTAPGIGEIRAAQIVASVISPHRFRTKKQFLSYCGFGIVTHSSSDWVRLGQAWERRQVSQPRGLNRNRHPMLKRVFRGAADAVIGNMPKHPLHIAYQRSIAAGTKPNLARLTLARRLAASVLAMWKNNEDYDPIRQS

SEQ ID NO: 130812 - protein, 353 aa, unidentified
MSQTLNAAIAVIGIDIGKNSFHIVGHDERGAIVLRQKWSRGQVEARFANLPPCLIGMEACVGAHHLSRKLNSLGHNARLMPAKYVRPYSRGQKNDFRDAEAIAEAVQRPTMKFVATKTADQLDLQALHRVRERLVSQRTGIVNQIRAFLLERGIAVRQGQRFLRAELPRILATPPDVLSPRMARVIEDLAGDWRRLDERIEGLSAEIGVLARADSGCERLMSVPGIGPIISSAMVAAIGAGDCFSKGRDFAAWLGLVPKQMSTGDRTILGKISKRGNRYLRVLFVQAAWVVLIKPNSWERYGLKPWIEAAQKRLHRNVLAIALANKLARIAWSVLARGRGFEVRKMEAATQSA

SEQ ID NO: 130813 - protein, 394 aa, unidentified
MTLYIGIDVAKTFHIACVINAQGQMMAQLRFDNDAAGFHQLEQIIQRLAFPEMEWVLCGMESTGHYGIALRDFLIQLGYPVQVFNPLKVNRFRDFYIQPHKDDYRDAFVIAQMLRYGERAPYTPPRPAIRALKQLTRYRTSLVRARAKVKTQIRAILDEIFPEYQQTPLFVDVFGAGSLALLKRFPTPQELAATSQEELASLLSRNSRGRLSSQRAALILEKARGSVGSPASARAFATILPDLIDELEILESRISHFTAKIEAQLAEIDQTLTTVPGIGPIFAATILGEIGDITHFPSADALVAYCGFAPRRYQSGQFTAKNMHLAKRGVPQLRYVFYRAALVSIQYNPDLAAYYQAKLRQGKPKKKAVIAVARKLIRIVYALLKSQSPYISPG

SEQ ID NO: 130814 - protein, 392 aa, unidentified
MTCFIGLDLSKFKHDCFIMSEHGEVVRNSFSFANDREGFNTLLNVLNDLDPSQEKRIGFESTGHYGSNLKLFLEANGYSFMEFNPLLVNRFFKSESLRRTKTDKVDAQKIALYLYSRDYKPNPNSSYHLQCLKSLTRLRESVVDERSLQLVRITNIMDKMFPEFKPLFDKQGLKAATAMYLLENYGSPSKMANMTLASYHKMASKLRRTISYAKFCKIKELAKSTIGNENEVLSFELEVCLELFKELDQKVLQLDNKIIFELSLLNTHISSIKGIGDVLAAGILAEYESIDKFDNPAQLTAFAGIEPSENQSGTHDGGGRMVKHGSPHLRRYLIQAANNMLVHNPVLYEYYLKKRSEGKSHNVAISHVARRLTRIIFYLEKNNVDFDINKMR

SEQ ID NO: 130815 - protein, 327 aa, unidentified
MKKLYFIGIDVSKEKLSCFDGKEEFSVKNDLDLEEFKRLLRRKYKDLKRIVLIFEATGIYSYFLKAFCNTKHIKAYILNPKKTPNLAKVLGQRSKTDKIDARTIYCFKDLISKEQIKVPQIDETLEKIYAYFSSYKFLIKQRVALSNHLDALERNPFAPRDLMKRMQERYLELRAEEKRLMEKMEQIIAEAEDTQEDFSNLCSIKGIGINNAICLLILFKRYQVENRQQVTALLGFDVKTRQSGTSVYSRGQISKQGNGMMRSMLYMAALNAVRTNLRMKFFYKRLIDRGKPRKVALIAVARKLALIAYAIYKTKEPFKEYVGIYRY

SEQ ID NO: 130816 - protein, 410 aa, unidentified
MKVAGIDVHKKVLMVVVVDASTPEEKPARRRFVTMPSELHRLLMWLREQGVEEAVMESTAQYWRSVWLELEPHMRLHLAQAFSNRAPRGRKHDFKDAERLVRRLMANELILSFVPNGEQRIWRSMTRMKLQLTRDRVRLQNQIECLLEEMRIKLSIVVSNLLGASGLRILHALAKGETDPKKLAQLGDERLQCTEEQLVDALTGRVQPVHGEMLALQLQRLQLIDQQMAELNRLIAQAMKSHQDAVIRLAEVPGLGVDSAQQIIAEVGAQASTFPSAAELTSWVGTCPGKEESAEQNHSSRSAKGNKYLRRVLNQAAHAAVAKKGSHFQVVFRRLLPRLGYQSAIWAVAHRLCRLVWKILHEGVRFIEQGAQVGPRERKKRAQMLARALRKLGYEVTITPINQLAPKPVV

SEQ ID NO: 130817 - protein, 371 aa, unidentified
MGWTAPYGIECARMRLLKSQTREPSVNQIIRIGMDTSKHIFQLHGVDAAERPVLRRKLRRSEVLAFFAKLPPTVIGMEACGAAHYWARELRKLGHEVKLMAPQHVKAYVKRNKNDGRDAEGTCEAMSRPTMQFVPVKTEEQQAALMLAGVRQQLITRRTQLSNAIRGYAAEFGLTTAKGLDKIEPLLARIALDETVPALARELLAIQGQDYARLQIELKAIEVKLMAWHRANVCSRRLAQIPGVGPIGATALVMKTPDPRAFPSGRHFAAWLGLTPKDHSTAGKTRLGKITRAGDEVLRSLLVAGATAVIQQVRNGRGRPSAWLLALLKRKPPKLAAVALANKIARIAWKLMTTGESYDGARMPGAQAFAA

SEQ ID NO: 130818 - protein, 355 aa, unidentified
MKSTAGVTTIAIDLAKDVFQLALADASWRIVRGLRLKRAEFLAFWANHAMVHVVMEACGSAHHFGRWLRAMGHRVTLLPAQYVRPYVRRNKTDKADCAALLEALRASDIKPVPIKTEHQQVIQLMHRSRQQWQHDRTARINLARGILREFGVVVPEGAERGLKVMSAQLANDQLDPNVRKLLKTILDEIDGFEQKVIQLDRSLAALSESDPVLEKLESVPGVGWVTATALRASVGDIHRFKDARTLSSWIGFTPKETSSGSSRILGGMSKRGDVYVRTLLIQGARSVLAAARRKQQSGKPLDALRQWALDLADRRGFNKAAVGLANKLARIIWATWKHDREFNGDHNLKHATATA

SEQ ID NO: 130819 - protein, 426 aa, unidentified
MAVVMIGVDPHKASHTAVAINAAEQSLGQLRVRASAVQAERLLAWAQAWPERTWAVEGAGGLGHLLAQQLLSAGERVLDVPPKLAARVRLLATGNINKNDPNDARSVAVAALRSADVREARRDDHAAVLKVWSKRYRDLGRIRTQVACRLHQVLCELVPGGVPGEISAGQAARLLESVTPAGAVDAARWELAAELTEDLRGAGARIRETRTKAAAAVRATGTSLTGLFGVGPVIAAAVIGDVHHVSRFPDRDRFAAYNGTAPIEVSSGGRKVYRLSRRGNRRLNHAIHMAAVTQIRYRHTKGRAYYDKKLAEGKTGKEALRALKRQISDAIFACLQEDARRAAAAAKSPGGQPGNHFASRAAGSHPDHRLFGQATPGPATHPTTPAAPVPAQLPSRASERLSPGPGAARPRSGARRASSTQPRASR

SEQ ID NO: 130820 - protein, 462 aa, unidentified
MEKVTTKLKLKSSSKSEGFKLMNLNSAGIDIGSREHYVAVPSDRDLEPVRSFGCLTPDLHQMARWLISCEITSVVVESTGVYWVPVVQVLESYSLEVHLVNARHVKGVPGRKSDVQDCQWLQELHTYGLLSGSFRPPPEIQTLRGYWRQRAQLIELCSQQIQRMQKSLEQMNLQLHKVLSDITGVTGMNIIRSILHGERDPKVLAQMKHRSVKSSEATIVQALTGNYREEHVFALKQAVKLYDMSQAMIADCDNEVQNYMTMTLQPESQKPKKTTPPKLLTQKRRKNQPHFDLRNQLYQTTGVDLTQIDGVDAMTAQTVISECGYNMKSFPTEKQFASYLGLCPNNKITGGKIYGSRTRKVFNRAASALRVAAQSLHGSSTALGAFYRRMRAKLGAPKAITATAHKLAKLIYRMLKYGEDYIDKGQQYYEQLYQERVLNNFKNKAKQLGYQLLNTNSGEVVS

SEQ ID NO: 130821 - protein, 324 aa, unidentified
MIDGILGIDVSKNTLDASMSSCNKVRAKSFANSPDGWRHLLDWLIGQKIRRVHACLESTGLYSLGVACKLNEAGHVVSIVNPAQIRDFARTKLGRNKTDAVDASHIREYCELFKPAPWSPPSHAHRQLGELQTIRAGIVAGLTEWKNRKNSGMIDVVAQSLADATISHFTSQLGAVEKAIAQAIDNDTDLRRKRDLLLSISGVGETLASVVLAELPGPDVLRSSAEAVAYTGLNPRRHQSGTSIDRLTRISKIGNAVLRAALYMPAMSAMRYNPAIVALVTRLKARGRLNPKQIVVAAMRKLLVLCFGVLKTGKPFDPALAMGC

SEQ ID NO: 130822 - protein, 347 aa, unidentified
MRFYTQQHKYYCGIDLHARKMYVCILNNLGKIVLHKNIKTDPEIFFEVIFPYLEDVVVGVECMFSWYWIADLCHEHCIPFILGHALYMKAIHGGKTKNDKIDSRKIAALIRGGNFPLAYAYPKGMRSTRDLLRRRMHLMRKRAELLSHIHNTNTQYNLPVIGEKIAYKSNRKGIAERFEDPSVNKSIQIDLAMIDTYDKLLQDVELFILKHAKAHDANTLYLLQTIPGVGKILALVMLYEIHDIGRFPIVQDFSSYCRLIRPEKESNGKKAGKGNKKIGNPNLKWAFSEATILLLRESEQAKKLQQKLIKKNGEGKALGILSNKLGRAVYYMLKNKKAFDMNKFFSN

SEQ ID NO: 130823 - protein, 411 aa, unidentified
MEAAVITAVGIDVSKSKSTVAVRRPGGEIVLRPFDVRHTNSDLKKLTSTLKKLGGDIRIVMEHTSTYWRPIALTLKEAGFFVSVVNAMLIHDFSDNTIRKLKTDRADALKIANYALTFWDILPPFNNEEETRLLLKMQSRANERITATATALRNGLIALADQTFSGVNIAFAPNTKNANGHEKWVDFFLRYWHKDCVCQYSMDAFTESYRGWCKRKNYKFRTDTAHKIYLLAQESVATLPKCESTKMLITQACKSLNAVCEAKQSTQLEMQRLAAMLPEYEVVMQMEGAGPVTGPALMAEIGDVRRFKNKKALVAFAGIDAPPFQSGAFESKSRHVSKRGSPHLRRTIFIISNIILTRSNPENAVYCFMDKKRSEGKHYYVYTVAGSAKFLRVYYARVTEFLRSQPSYDAY

SEQ ID NO: 130824 - protein, 408 aa, unidentified
MRRMKGKRSASSIVGCAPKCAEPHAETPESVLTASIQRRQTVSQNITAFVGLDDKDSIAIAAAEAGRETPRFLGTVGPDLGQLLKALKSLAKPETMLVVYEAGPCGYGLARQLRSRGYACEVVAAGKMARRPGERIKTDRRDALTLARVARSGDLVTVIVPDERDEAMRDLSRAREDAVKARLKARQQLKALLLRHGHRYGGKSSWTLAHERYLARVSFAHPAQDIAFAEYRQAVREGHERVERVTEALRTQTEHWRMKPLVAALLSLRGIDFVAAVTLATEIGDFSRFAHPCELMGFLGLVPSEYSTGDSRCQGNITKTGNTHARRVLVEAAWNYRFPARISRMLQIRQEGQPKAVREIAWRAQLRLAHRYRRLSSRKLHPNKICVAIARELAGFLWDIARQVKVPA

SEQ ID NO: 130825 - protein, 340 aa, unidentified
MGYYVGLDVSLKSTHICVLDGERRVVWRGVSDTQVAMIAERLARWSKQIVLVGLETGSLTPWLYHGLSDLGLPMVCMDARRASDALKARAEKTDKADARALAEMLASGWYSAVHVKSLESHQLKALLGARDQLVRVKRQLYGQVRGLLRPFGIKISQRVGAKSFDEAVRMACNKEDVLYIAVGALLDTLANVASQIAVLDKQVRTLAQKRKACWHLMSVPGVGPITALAFTAAIEDPHRFSSNRDVGAYLGLTPKRYQSGERDVSLSISRQGDEMVRHYLYEAANCLLTTVTGASALKSWGLKMVRRCGAKRARTAVARKLAVLLLRLWKQEGHFEAQSA

SEQ ID NO: 130826 - protein, 427 aa, unidentified
MSYRIAGIDVHKKMLAVVVSDVEGGGEYQFERRLFGSNPEQLRSLAEWLLEQEVEEAVMESTAQYWKPVWGALERFWKPMRQRRGGAGPMSGALHLAQAQSNRGPQGRKRDFPDAERLVKRLVARELTLSFVPDGEQRLWRTVMRRKYQLTRNRVQLQNRRECLLEEAYIKLSSLVSDLLGVSARRMLKALAEGETNPASLAALADRRLRATPEQLCDALGACMDLNPVYRRLLKMMLEELRLIEEHIGKLDQEMADLLHPYQDQVKRLAEVPGLGVDSAQQILAEVGVRAAAFPSAKQLSSWVGACPGDNQSAGVNYNHRSPKGNRAMRRILNQSANAAVKAKGTIFEVVYRRSVSRLGHKQMIGAIAHRQCRLIWKVLHDGVRYEERGPTVSKGSKQRRAWRMIRELRGLGYRVELESPQQPNPA

SEQ ID NO: 130827 - protein, 461 aa, unidentified
MAHPMVPVKPSRRQRDLSSVHPNAAAIDIGATMHVAAVGPDRDPEPIRTFKTFTDDLHRLADWFEQCGVKTVVMESTGVYWIPIYEILEQRGFAVSLVNARDAKHVSGRKTDVSDAQWLQRLHEYGLLRSSFRPQGEIATLRAYRRQRERLLDYAAAHIQHMQKALTQMNLQLHHVVSDITGVTGMRIIRAIVNGERDPDVLASCRDRGCHASVETIRQALIGNDREEHIFALSQALELYDTYQAKVAECDKRIAAGLKRLKEASPAPADPLPAARHKGRSSNPLTFDVREALYAVLGIDLTQIHGLGPYLALKLVGECGTDLSAWPSAKHFTSWLSLAPHNKISGGKVLSSRTRRSGNRAASLLRLAAVTVGRTDTALGAFYRRLSARVGKAKAVTATARKIAVLFYNALRHGMDYADPGASYYEERYQQRVLANLQRRAKSLGYVLQQADIAPAAVGVS

SEQ ID NO: 130828 - protein, 345 aa, unidentified
MTVYIGVDFHARQQTISYLTTEDGEIRRTELEHAKPNEVRAFYQQFRAERVIVGFESSGYAAWFEELLEELGCEIWIGHAGAIRLFARRRQKNDRRDADLILDLLVRGDFPRIHRYSAESREVLQQLRYRQRLVKMRTMVVNSLLFLASSRGVTLRRQLQSQRGQERLRQLPLPPPLAQQRDELCQLLLELQCKTAKVQTWLEAKAEQDMRVQRLRTHYGIGPLTGLCLAHTLECVERFANPRKVTAYVGFDPVEDSSAERRRIGSISKQGSRLLRFYLVEAGQIAVRKDPELARVYKRVLLRRGHAKAKVAIGRRLLVRAFIMLRDEIDYAEFQRRGVAARSSR

SEQ ID NO: 130829 - protein, 354 aa, unidentified
MGMLEGQVEFVIGVDTHRDSHTAAVCDPTGAVLVHTTVATTTTGHRQLLRLAQRQAPGRRVWAVEGTGSFGAGLTSLLVACGEVVVEVDRPKRPARRNGAKSDVLDAARAAREVLAREHLAQPRARGDREAMRVLLATRRCAVDARTKAINQLKALIVSAPPELRQRLRHHCTAQQVRRCARLRVHRAYSIEYRVTVQAMRATARRIRLLEVEAAQHQAELDRLIGQVAPFLLNELGIGALTAAQLLVSWSHPGRVRSEAAFAMLAGVAPLEASSGRVTRHRLNRAGDRQLNRALHVVALTRLRQDPATSRYVARRRAEGKSDKEIRRCLKRILARNLFRLMQRQLTPAPASPA

SEQ ID NO: 130830 - protein, 369 aa, unidentified
MKKNTIFVGLDVHKNSITIALADAGRDGDVRYYGGVDGELESVHNVARKVQSTGATLRFVYEAGPCGYGLYRSLTNKGFDCIVAAPSKIPRKSGDRIKNDRRDALTLARLHRAGELTPVYVPTEEDEAMRDLTRGREDAAKALRVARQHLLAFLLRHGHRYSGKTCWSKAFWNWIADIKMPHRAQQIMLQEYVHAVHEQVERVQRLTDQIRELVPQWQLAPMVKALQALRGVSLIVASTILAELGELTRFPKAKQLMAYLGLVPSEQSSGESNRRGGITKTGNGHVRRALTEAAHAYSHPARESRALLKRLEGLPQRVQQTAWKAQVRLCARFRRLMAKGKPRNAVVSATARELAAFTWAIAQEIQPKS

SEQ ID NO: 130831 - protein, 349 aa, unidentified
MERFCIGVDVSAKTIDVAWRGDRRVECRQFANDRNGHRALIKQTRKRARRIRVVMESTGVYGLDLALALVGARFEVIVANPRVAANFAKAILQRSKSDRLDAAMLLQFAETMPFVAWEPPSAKARELRSICRRVQALLKIVRAEKSRLHAALHEQGTSVVRQSIRASLKAVEGQMAALRRAAQKVIASDPLLSRQHELLLSCTGIGQISAISILAELAVLPSDMTERQWVAHAGLDPRQYDSGSSVHAAPRISKKGNRYLRAVLYLPARVAGRFEPNAARFAARLRGRGKKPLQIHVALMRKLLHAIHAMFRNDQPFDGSRLFPAAADAVGTSGIASSAISEVSTACPA

SEQ ID NO: 130832 - protein, 342 aa, unidentified
MTAIGIDTHKATLAACAVDELGRPIGEASFANDPAGHLEFIAWARAVAPEVTIGVEGSSSFGAALARSAQSAGLVVREVPPHLSRVERLRTRRPGKSDPGDALAIARVTARESNLPPIRLPDRTTELRLLLEAREDLVAESNRARNRLHAHLLTLAPGYGGTVTNLVAARHRATVGRLLRGIGGVQAELARGLLLRLARLEREVKALTSRIGALVAGHPLLGLPGAGPITAARLIAEVGDVRRFRSADALAALAGVAPIPASSGQVQRMRLNRGGNRQLNRAFYFIAVIQSRFHPAAKAYVTRRMEVDGKSWREAIRALKRMLVRPVFRLLVEGAALQLEAA

SEQ ID NO: 130833 - protein, 341 aa, unidentified
MSDYSYFCGIDLAKNHFSLHAVDQNGKVILHKSVTRSKLLTTIANMPLMRIGVEACSGAHYWARTLNKLGHDARIMAVKYVVPYRTKGKNDLNDAIAICEAVQRPSTRFVPIKPPDQQAILSVHRMREHWVRERTALMNRMRALLSEFGLIIPVGRSSLMKHVPLMLEDAENGLPHLAITVIADAYHHLGELNQRIADTEQVFDSFAKVSANVQRVMKVRGIGPQTATAILASIGNGSQFDKSRDFSAWLGLVPKQYSTGGKPRLSRITKHGDKYLRTLLVHGARTVIANLGDKQDKLSQWCRGVLERRGMNRAIVALAAKNARIIWSLLHNQTEYENYAA

SEQ ID NO: 130834 - protein, 343 aa, unidentified
MSDKLYFGVDVSKHWLDIAYYDGMDVDWKHGHIRVDNDERGFAQLGRWLDRLCVGKGTCIFCMEYTGLYSQEFRQWLERMKIVYGMVSPRKMHRFEPDLGENERALDRIKTDEMDSFRIAIYCKEHSMKIRRKPSHLPSDAYFKLKRLLAERRQYVKQSALYKQQLHDIGKYDTEASRHRKEAELASLTEKALQTSKEMETIIREDADIRRSYDLLLSIKGIGLVVAAETVVLTENFTSITNPRRYACYIGIAPGRKESGVSIQGSDHVGRKGFTQAKADLSMAALHAIHYDKGIRAYWLRRKTEGKHSGVVLNAVKFKIVLRMFAVIRRQKPYVEMEEYGKK

SEQ ID NO: 130835 - protein, 427 aa, unidentified
MSRVESIQSEPEFAAFIGIDWADQKHIWCLQTTGSKQRESGELEHTPEAVESWVANLYQRFAPRPIAVAVEQSRGALVFMLSKYELFHLFPVPAQMAASMRQALYPSGAKDDPRDADLLLDLLLQHRNKLRRLSPDSEATRRVQNLVEERRKLVDEKTAQINRLTDHLKVYFPQMLEWFGRLDSELVCALLERWPALEELQKASPANLRTFFRKHRCRDRERIECRIEAIRRALPAIQDRAVIEAKSAVVKVIVQLIRILIGGIEDLDGQIEEAAAAHPDFFIFNSLPGAGPVMAPRLLAAFGSQRERYRSAHEIQSFSGIAPVTESSGKRKWVHFRWACPKFLRQSFHEWAGHSIVQSEWARVYYQQQRSKGNTHHAAVRALAFKWIRIVFRCWQDGVAYDENTYLAALVKHGSPLSGLVAIGKTL

SEQ ID NO: 130836 - protein, 337 aa, unidentified
MKLYCAADLHSNNHFLTIIDEHDKRVLEKRLPNDLAVTLQILEPYRTDISGVAVESTFNWYWLVDGLMEAGYPVMLVNTAKARQYEGLKHTDDRYDAFWLAQQMRLGILPTGYIYPKEQRALRDLLRERRRLVRQRTTHVLSTQSTLWRHTAVRLPSKVILGVSKKPWPKLPDANVELGIRAHRATIKVLTTQLEGIERTVLKSLQPRPEYQMLRTVPGIGPVIAWTIVLEAGDLRRFVNVGHFASYCRCVDSQRISNERKKGENNVKNGNPYLAWAFFEAAHFAIQFLPAAKRFYERKATQRNPILAMKALAHKLARACYYIMRDKVPFDAARLFA

SEQ ID NO: 130837 - protein, 333 aa, unidentified
MPHFLGLDVAKDSFVAALLNEAGELVAQVATFSNSPEGFAALLAWLPQPASTIGMCEPTGVYNQHLKHALAAALASLHELNAQTLKQFAFSQVRTKTDQADALLIADAARVLLLTKPEKLAKCRVALSPDRENLALWLAEHDRLRVAIAMLRHQIGDLDHHAASDAAQVQRRRQRELQHLLTEQKQVLRKIEQACRKLDDVQARLVDSIPGIGPPSTAATLVVVRDVSRFRSADALKAYLGIYPRRNQSGKREQRSHLARHGNALMRHVLWNAAKAAVMVKHPANPFRELLERFLKKGRSYNYAIGAVCRKLVQVIYGVLKSQTAFQFPTSTS

SEQ ID NO: 130838 - protein, 428 aa, unidentified
MVAVVIGVDPHKGSHTAAAVSAAEELLGELRVGACADQVQQLLAWAAAWPERTWAVEGAGGLGQLLARQLLAAGECVLDIQPKLAARVRLLAAGNTNKNDPNDARSVAVAALRSVGVREACREDHSAVLKVWSERYKDLGRARTQVACRLHAVLCELIPGGVRKRITAGQTGRILASITPADAVAAARWQLAAEHAADLRGIDARIRQTRKKIDAAVRGAGTSLTGIFGVGPVIAAAVIGEVRDVSRFPSRDHFASYNGTAPIEVSSGGRKIDRLSRRGNRRLNHAIHMAAVTRVRHRHSDGRAYYDKKLAEGKTGKEALRALKRQVSDAIYTTLQADAARAAARPAPDEPGRATGERLFSQRGRLTPPAPALRASHSRTRHQLTAPPATPADPAPAPSRTAATPSERAGGSRTGAQPGRTAAPAGRP

SEQ ID NO: 130839 - protein, 403 aa, unidentified
MNNVAGIDVSKGKSMVSVLRPFGEVVAKPFSVGHTGSELKELADYLKSLDGETRVVMEHTGRYYEPVARFLHEEGVFVSAVNPKLIKDYGNNTLRKVKTDKADSRKIARYGLDNWAELRQHTPMDTIRMQLKTLNRQQSLYSKTKTMMKNNLIALLDQTYPGVNALFDSPVREDGSQKWVDFATTFWHVDCVRNMSLTAFAERYRKWCKRHGYNFSQSKAVEVHAGAQDLIAMLPRDALTKTMVRQAIDALNAVSASLERLKAEMQALAAQLPEYPVVMAMHGVGDSLGPQLMAELGDVTRFTHRNAITAFAGVDPGADQSGTHEAKSTRVSKSGPPELRRALFLVMDCLLKTQPQDDPVYRFMDKKRAEGKPYLVYMTAGANKFLRIYYGRVKEYLAQLENS

SEQ ID NO: 130840 - protein, 361 aa, unidentified
MLSMCWVGLDVHARETAVAVFDQATGEVHQARVRGRSQEVLAFLEDLQRPFRAVYEAGPTGYTLARLARARGLELAVCAPHTTARRPTDRIKTDARDALRLARLLAAGELSLVRVPEVVEEQLRDLVRSREDVRIDLMRARHRLSKFALRREIVYPGPGGAWTGRHRDWLGTLRFADAASELVFADMLEAHDLLLSRRARLEQGLAELVGASPWGELVGRLRCLRGIDTLSAAGLCAEVGDFTRFAHPKLLAGYLGLVPSEDSSGERRRLGSITKAGSQHARRLLVEAAWHYRRPPRVSAELARRHQGQDPRAVALAWRAQRRLHGRWRRLEGERGKRSTVVAVAVARELSTFCWELARLG

SEQ ID NO: 130841 - protein, 343 aa, unidentified
MQSITTIGLDIAKSVFQVHGVDAAGQVVMRRQLKRRYVLTFFEKLPPCLVGIEACASSHHWSRELQALGHTVRLMPPAYVKPYVKRHKNDVTDAEAICEAVTRPNMRFVATKTPEQQGCLTLHRTRHLFIRQQTSVINAIRAHLAEFGIVAPVGRNGVEQLLSVAADSTDKRLPEVTRACIAALGTQLQTLKAQILEFDRMIRAWHRSSEASRRLDDIPGVGPALATALVASVADPTVFRSGRDFSAWIGLVPKQNSSGGKDRLGNISKRGDRYLRSLFTTGALAVIRYAKIHGTRHRPWLTALLARRPTKVAAIALANKIARMAWAMMARGERYKEPAALAA

SEQ ID NO: 130842 - protein, 433 aa, unidentified
MNNINNDTEPDALDQYAAFVALDWADQKHAFSLQVAGQNKREAGTLEHKPEQIGAWVAALRERFGGRPVAVALEQSRGALIHALLSYDFLVIYPMHPTAVAKFREAFKFSGVKSDPLDTDQILEIITKHLRLLKPLRPDTEATRLLGRLVEDRRKAVELRAGHIQALKASLKEYFPQALEVLSQNVTSRLAHDFLKKWPTFGDFQQARPATVKRFFYGHNVRSPAVIEQAQQVARQSRALTADTAIVESGVRISQVYAQVIQTLNPLIEQYEQRIETVFHNHPDAMVFSTVPGAGPALAPRLLAAFGTDRSRFDTAGNLHSFSGVGPVTKSSGKMRVVFARCACPKFLRQTFHEFARLSVAQCQWAQNYVQYYTAKGKKYHTVIRALAFKWIRILFRCWQDRTPYDDAKYMKSLEKRGSIFATLHLQKISKIS

SEQ ID NO: 130843 - protein, 345 aa, unidentified
MNKCVSSNATTAYCGIDVSASSVSVALIEQDGSVSRREFANSASGHKLLVVWLGKHHVKMRVSLEATGIYSLDLALALEAGAGIEVAVLNPKLVSRFAQTLRRSKTDAADALVLAEYSQRMPFTAWQRPGIQELRLRTIGRHIEALVVEQARLKNRLCNAEVTATTPRAVLLDLKQALAAHLRRLAKMRREAMKLVHAEAELRERFALLVSVPGIAKISALQILSELVLLAPAMTVRQWVAYSGLDPVHQVSGTSVHKPSQISRAGNRHLRRALYMPTLAAVRCDPHLRAFHQALRERHKTGLQALMAVARKLLHAIYGIFKTGKPYDGSRLFPNLLLELESVAG

SEQ ID NO: 130844 - protein, 456 aa, unidentified
MTKRRKKPAAGVSEDMPVQNPNAGGLDVGAAETWVSVPADRDNEPVRRYEMFTKDLHEMALWLRRCGIKTVAMESTGVYWIAVSQILEKQGIDVVLVNAKHVKNVSGRKSDWLDCQWLRILHTHGLLAGSFRPEAQVGVLRSYLRHRQMLIECGAEHIQHMQKALTQMNLQLQHVISDITGMTGMLIIRAILEGHRDPQHLASLRDRRTKNDEQTIAKALEGDYRPEHLFALKQAVELFDFYQQLVLKCDQQIAAYLQTMESKVDIQEVPLKPPRAKKKNRRNDFGFDGRQQAYRISGVDMTQINGISESAGLTILSEIGVDMTPWKTEKHFASWMTVCPNNKITGGRVFQRRTQKSSNRVREVLCLCAQGLFNSKSALGAFARRMRSRLGVEKAIVAVAHKLALLIYRLLKFGKDYVDSGQDAYEEKYKQRAVRNLARKAREFGLTLAPITAEVP

SEQ ID NO: 130845 - protein, 278 aa, unidentified
MDASLELSSLCVLDAAGKVIREAKVASEPEALVAFLRGPGVTIVRVGLEAGALSQWLCDGLQEAGFEAVLLGTRHVKAALCAMAIKTDRRDARGIAQLRRMGWYRPVHRKSVPSQEVRALLAARIRELVSGHAMLERIAEPMLTAREALWDEFAKLHREVHRADVDDPARFAKSKSVGAFFGLTPKRYQSGETDVTGAITKIRDAGVRTALHDAANALLTRATRFSTLRRWGLDVAKRRGMRRAKVALGRKLAAVLHRIRADGTEFVWGKDPAAAAAA

SEQ ID NO: 130846 - protein, 404 aa, unidentified
MQVLYPRCAGHKDTIVACVRCVSAPQHHELRSFAATTTGLLALADWLAMHGCTHVAMEATGIYWKPVWHILEGRFELVLANARHIRNVPGRKTDVNDATWIADLLAHGLIRSSFVPPSATQELRDLTRTRKQLVREIAQHSLRIQKVLEDANLKLGSVLSNVLGCSGRAMLDAIVAGEDNPERLAALAQGNARRKAPELREALRGRITDHHRTLLKLHPGVIEALQHTLAELDATLGKALTPIRQCVRLLVTIPGVSDVTAQVILAEVGADMTRFPDAAHLISWAGLCPRNDESAGKRRSTRVRKSGTWLKTALVTAAWAAVRVKSTYLHAQFLRIKARRGPKKAILAVAASMLTAVWHMLSDGVGYTDLGTDYFSRLDSSKTIQRLLRRLADLGYHPEPTSPS

SEQ ID NO: 130847 - protein, 405 aa, unidentified
MPYILALDVSMGHSYSVLYKDDTCLFEDEIEHTQRGFHALLEEIQHLPERPLIVFEATGIYSRPVEKFFQDHHFSYCLLNPLEAKKQMEENTLCSWKTDKSDAHRLAQTHLKNQRQPKEVQSNFYLEMRDLARFYQEIEKKITRLRMDLHNCLQLTFPELEQFFSNRLTPYALTLIRLFPHPDFVLASTRTKIKNKLINETRKKISANRAEQKADQIIHYAQCAYPAVEKDSIHCQKTIYYAELLQDLLEQKKALATQMIKKAEGSPCFLLYQTFPGIGALTAALLLGELGDITRFKTHKQLNAFVGIDIRRYHSGKYTGQDRINKRGNPKARKIIFFTIRNMIRQQRAAPNHIVDYYYKLKKQPIPKKDKVATVACMNKLLKCMHAMVRAHTEYDYAYAVSVDH

SEQ ID NO: 130848 - protein, 340 aa, unidentified
MNYVGVDLHKKVITACVMDANRKILDERKLYPNEPHRIVEFFEGLGEYRVVLEATSSYSWFVELLEPTAEEVVLANPAKMRVIAESTRKTDKLDARVLAEFLARDMIPRAYMPTPRQRQHRALVRHRKYLRERATAVKCKIRHVLADYNADRRDLFSAGGGEAYLRALKLNEVDRFRLADLWNEWESIEKRLARTAAKIKAFAKEAPRAEAEARALLKTAPGVGVVTAEVVLCELGDARRFKDAKAVCSYAGLVPIVRQTGGKKSKDGRITKQGPGLLRWALVEAAWRLVASSPRWSGTYQRIKKRNGAKRAIVAVARKLLCVLYAMLRDSKPYRPLPAA

SEQ ID NO: 130849 - protein, 416 aa, unidentified
MNAVGIDVSSRKSTVAVLRPLGEVVCLPFDVTHDIAGLASLAEKLKALDGETRVVMEHTGRYYEAVEKALHEAGLFVCAVNPLLIKEYGANSLRRVKTDKADAVKIARYALDNWADLRDFTPMDAIRYDLKTLNRQFQLASKQRTASANNLIALLEQSFPGIRKCFDSPVRSDGTQKWVDFAHSFWHVDCVRKQPFAAFCERYRKWCKRHAYLFKLSNAEEVYALAKRAVVLTPKSKVVKVLVQEAANQLSSISRSVEVYRAEMDRLATMLPEYPVVMAMYGVGKSYGPQLMAEIGDVRRFERKQALVAFAGIDPMPNQSGDKNVRSNKSSKRGSPYLRKTLFNVIRTYLQCAPQDEPVFQFLNRKRAEGKPFYVYMLAAANKFLRRYYAKLRDYFASLDTLQPVAPIPTILKATL

SEQ ID NO: 130850 - protein, 343 aa, unidentified
MDHFAGIDVSLELSSVCVVDAAGQIVREAKVASEPEALIAWLRGLGLELARVGLEAGPLSQWLHAAMRDAGLPVELLEARHVRDAFKAMPVRTDRKDARGIAQLLRLGWFRPAHCKSVSAQETRALLTARKLLQAKHLDVEMSLRGVLRGFGPKVGPTTPRSFAVRIRELVEGHATLTVIAEALLAAREALGTQLRGVEKRLRDQAREDDRAQLLMTVPGVGVIVALTFAAAVDDPGRFRSSKAVGAHFGLTPKRYQSGETDVTGRISKIGDAGVRTALYEAANIVLTRPVKGSALKSWAARLAVRAGMRKAKVALARKLAVVMHRMLVDGTRFAAERAAAAA

SEQ ID NO: 130851 - protein, 343 aa, unidentified
MGEVITIGLDIAKSVFQIHGVDGDGAVVIRKRVSRGKVLEFFADLSPCLVGIEAWPTAHHWSRELQSLGHTVKLMPPSYVKAYLKRAKNDANDAAAICEAVTRPSMRFVATKSKEQQGALMLHRTRQLFVRQRTMLSNAIRGQLAEFGIIAPVGRLGFARLLEMMDGPEELGVPKTAWVCLMGLAEQYQRIQGEIGKLEQFIQAWHRSSELSRRLEEIPGVGPIVATALVGTITDPHAFASGRHMAAWIGLVPQQNSTGGKDRLGGITKQGNRYLRWLLVAGAMAVIRYAQKHGTAKRPWLARLIERKPTKVAAVALANKIARIAWVIMARGERYRGPAPLAA

SEQ ID NO: 130852 - protein, 351 aa, unidentified
MIVLGADTHKRSHTIAAVSAPTGELVGEQTVQVGAKGFAALVLWARRLGSERVWALEDCRHVSGSFERFLIERGERVVRVTTKLMADSRRRARGRGKSDSIDAIAVARAALREGLDALPAAQLQGPELDLRLLVDHRERLVRQRVALNNTLQWHLHDLWPELQLPGSSLFYGTWGPRVARRLARAEQTMRVRIARDELRRIRELSHTIKALEAEIAQLVAQIAPHLLAEPGLGPLTAAKLVGEIAGAGRFATDAKLARAAGVAPIPVSSGNTNRHRLDRGGNRQINATIHRIAVTRLRCHAETQDYIARKRAEGKSAKEAIRCLKRHLTRRIWHLLRPAPPGPGHPHPSIS

SEQ ID NO: 130853 - protein, 414 aa, unidentified
MEQIHERVAGLDVHRDSVVACFRQLGPRGGVVREKERFTTTTAGLRVLEAWLADRRVQLVAMEATGVYWKPVLYALEGRFTVWLCNARHVKKLPGRKTDLTDAEWLADVAAHGMVRPSFVPPLPIRELRELTRYRKTQIDARAAEKQRLEKVLQDAGIKLTSVASKVLTQSGRSMIEALADGERDPARLAELAKGKMRPKVPALTEALAGHFGSHHAVACRRILAHLDFLDDTIGALTEQIDARTASFEAVYKSLLPVPGFDRLTIDVIIAETGADMTRFPTAADLASWTGVCPGSYESAGKRRNVSTTAGNRWLRRALIESARAAARTKGSYFGAQYRQITRRRGPNKAAVAVAHSLIELVWHLLSTGEVFNDLGDDYFKTRQDPERQARRLLAQLEDLGYTVTVTAPPAITA

SEQ ID NO: 130854 - protein, 363 aa, unidentified
MVNYIFVGIDLGDKNSVARIAVNRGKTERMGFVNDRRGRARLFEQLRRRAEKVDEGQIVMAYEASSCGFILSDEAKARGIRCWVLAPTKLEKSVEQRKHKNDERDADDVLEKLRAHVLAGNRLPTVWIPDVQMRDDRELVRSRVELVEKQTRLKTQIQMLIKRHGLEKPSGCGVGWTTRHRQWLNALTESDALGGGTRAALQSLLRQLGFLEAEIERMEKPIHQLAQQPRHQPIIDELTQEHGVGLMTAMVYRTEIGHAGRFRRGRRVGKFVGLTPTSHESGQQQDRKGHISRQGPPRLRKMLCQASWVHVQRDPQAKRFYQQLVARNPKKKKIAIVAVMRRLAVRLWHRMRAAELRMAAMMP

SEQ ID NO: 130855 - protein, 332 aa, unidentified
MSIIGCDLHSRYQVIAMLETGTGEVITRRLEHEDGEAKGFYAGLGKPVLIGIEATGYTQWFERLAAELGHELWVGDPAEIRARAVRLQKTDTRDAEHLLDLLLSKRFPRVWVPRPEERDFRQLLKHRDKLVKMQTSVRNQLHFLAMSQGVCRKQKLWSVRGRQELEGLELGPWASRRRQELLELLDRLGPRIEELEAAVKAEAARRPEAVLLMEQKGVGPVTALAFVLTVGPVERFATSRKLTSYLGLNPREDSSGGHQRLGHISKQGNEMLRWLLVEAGHTAARLDPELRRVYQRLKFRRGGKVAKVAIARRLAVRLYWSLRRYAAGSHVQ

SEQ ID NO: 130856 - protein, 346 aa, unidentified
MLYAGLDLSRKRLDFHLLDAEGATVDVGASPPDADGLRGLSERVGRHGAPVRAAIESMNGARFVHDRLELAGWQVEIADAQKVKGLAPLACKTDRIDAWVLAELARRDLVPAIWLPDPRVRAERERARWRLHLVRHRSSLKQRVHAVLLTHGKPCPVSDLFGVRGRRLLARLGLPEPWQGTIEASLRLIDELDREIGERERELRRLGADHRYVPLLCTVPGISWVLAYTIAAEIGDINRFPTPRKLAGYTGLCPRVYQSGERDLRGPLSKQGPRYLRWALVEAATHACTAPAYRDRYQQTKARIGKQRGAKVAQIDLARRLSEAIWHMLSRGEAFAPKGATDPLAA

SEQ ID NO: 130857 - protein, 342 aa, unidentified
MESVQGLVVGVDTHKDTHSAAMVDEIGGVIAALDVGANRNGYRSLLEWARCQSSRRIWVVEGTGSYGAGLAAFLSAAGEVVFEGDRPQRRKRGAAGKSDQLDAIKVAREALARPHPAVPRRRGQREAIRILLTTREGAVQAYRQGLNQLYALVVSAPEPIRERLIRLKGEQLIHACMRVRGASDLESSVTATTMRQIARRLNLLRSEAADYERQLAELVGAAAPSLLAEPGVGPITAAQLLISWSHAGRIRHEGAFAALAGVAPVPASSGRVVRHRLNHQGDRQLNRALHVVALSRSGFHRPTRAYIARRTAEGKSTREIRRCLKRYLARRFFRLLQRLDNP

SEQ ID NO: 130858 - protein, 309 aa, unidentified
MKEELVYIGVDIAKSYLDAAIGSEKRRFSNDTIGHRELIKWVKRVKTPVQVICESSGGYERALVQRLARARVKISLVQANRVRQFARAAGILAKTDCIDAKVLREFGKLMRPQTVTAAKLEQEHLRELESQRRHLTHLLVMEQNRGARVSDASVQRLNRSLINQIKKQIDQLDLLIKEHIDQSHELSAKAAKLTRVSGVGARTAALLLAQLPELGELNRREIAALVGVAPFNRDSGRIRGKRAIYGGRKRVRHGLYMAALVAAHHTPILRSFYLRLRAAGKPAKLALTATMRKLLIVLNSSLKNDLIYA

SEQ ID NO: 130859 - protein, 312 aa, unidentified
MAMLSFCGIDVSKDRLDVVVLPQGWFFSVSNDTAGWAELVARLRPLTVSAIGLEPSGGYERGIIRALLAAGLSVRRINPNKLRQFARARGVLAKNDRLDARLIAEYVAIMPTRVVQRDAAVERLAEIVTMRRQLCDEHVAAENQAAHLEDAMLRRLSKRRQMRLEADIRLLDKRLAEMVAANVALAQRYELLTSMPGVGPVLAFTLIALLPELGKMSRKQIAALVGLAPYDFDSGKLKGHRSIYGGRMSVRNVLYMAALSASRYSPALKAFHNRLADADKKSKVIIVAVMRKMITTLNAMLRDSAAWQPRSA

SEQ ID NO: 130860 - protein, 407 aa, unidentified
MICVGIDVSKRKSTVCFMAPGDKIIRRPFDVKHTKEELQPLVDEIRVQAKYDEIKVVMESTGVYHLSIAYFLQQNGIFVSVVNALKVANFNKAENFRHTKTDSIDSTNIARYGIAYWAKLPQFDLNGDKYFLLKRLCDAYLNFSEERSRILLQLQSQLEQTMPGIFDLFGGFDINSGKDKLLDFLERYCHIEDIIAKSEAEFVASYCGWAKEKGYRSNESKAATIYAQAKNGIPSIPNNPIVRETSMWYVGLLRRADETLMASLTRMEDIAKDLPEYELVGEMGGVGRVTRVALIAQIGDVRRFKNKHSLIWFAGLTPSIHESGKFRASQNHIVKKGPARLRKVLYQVMMSLVMHKIPKDDAVYRFIKKKEAEGKYKKVAKVAGMAKFLRIYYGRVMHLYRDLGLAA

SEQ ID NO: 130861 - protein, 365 aa, unidentified
MDNYIVSCDAHKRYSLFGTLDLNSQARAHSRVEHARGAIRTFLAKFPEGTPVALETVGNWYWIVDEIEAAGCLPLMANAGRAKLMMGHVDKTDKLDADGLLTLLQVGTLPTVWLPPGPVRDTRELYRTRMALCKERTGLKNRVQATLAKYALSVEDETDIFAGKGRKQLELTIQSLPAETGRCVQQELQVLDYLQKQIQAMEKRIRECVKLTPVMQLLKTLPGVGDILAIVIALEMGPADRFGRAEQFCSYCGTVPTVKSSGDVTRYGHTRQQCNHYLKWAFFEAANVAARHRKSRTWCDRHVVRLYERVRKHKGHGVAIGAVARHLSEAAYAVTLRSEPYREPNPRRACPSRGKREAKLAPREP

SEQ ID NO: 130862 - protein, 350 aa, unidentified
MKIVGCDLHTRYQQIAMLDTETGELTERRLEHANGEARAFYASLQGPVRVGIEATGHTGWFERMLAELGHELWIGDAAQIRASMVRKQKTDARDAAHVLQLLVEERFPRIWRPSWAERDLRQLVWHRQKLVWMRNAVGNQLHALAMGEGLCRKKQLWTKKGRAELEGLRLGDWAGYRRQELLTLLDELDGSLAKWDRAVEEQSQQNRAAVLLRTHPGVGPVTSLAFVLTLGPVERFARSKQVVSYLGLNPREHSSGGKQRLGAISKQGNPLMRSLLVEAGHTAARLDAELKQDYQRLKLRRGTGVAKVAIARKLAVRMYWMLRSQVSYAQLVRMQGSSRGTLVRGKSPLA

SEQ ID NO: 130863 - protein, 344 aa, unidentified
MPSIVGGLDIHRKQITFDYLDLVTGEVSCGQVAPADRAHLRAWLARFENPAEVAFAVEACTGWRYVTGELRRAGIGAHLAEPADTAAARGRKRRAKTDRADARLQRDLLIQGRLPECWIPPEHVLECRALLELYHDLRAEHTAWLQRVHAVLFHQGAPVFHDLSRADAPAELAAVAREHLSPAGQLQVTLCLRMLEVTAGELDGLRRQLTAAARRLHGAKVLAESIYGVGPLTALALTCWLGGAGRFSSARKAVRFAGLDITVYSSDGKRSPGHLSRQGPPVLRWAVYEAGKTHARPAAPDHGYYAAVKDRKDGKRAALSEARKIIRRACHILSELGDDALAMD

SEQ ID NO: 130864 - protein, 374 aa, unidentified
MENTITYVAMDTHKKQHKIALHYPCREEIVELAIGNTVRDIKKMVNKIKKQAPGKVEFCYEAGVCGFTLKRRIEQLGCRCRVIAPSLVPRKPGERVKTDRRDARKLLMMYRAGLLTEVHAPNEHQEAARELTRLRETARDNLKRIRHQLLKLLTRHGYVYTEGRHWTQRHITWLRTVKFAESTLTSVFENYFNEMIYCIGRLENLDKEVGLLAGSQEYKEIVGLLCCYHGIDTLTAITIITEIFEFGRFESPRHLMSYLGLTPSEDSSGEKQKKGAITKAGNKRIRRLLNEASWHYRHRYVPSAALKKRRKGQPQWAIEIADAAGRRLSTRHRYLTNKGKMPCKANIAVARELAGFIWFTVTQYQARKNTIDAA

SEQ ID NO: 130865 - protein, 482 aa, unidentified
MIKSVGIDLAGLGEHKVRCLDENAQLCDGFGFETTPQGLAKLEERIFRDGSKPFIVFEPTGLAWVAVAVYLRSRHPDCRLVKTQARNVAALRKYLRRSSKSDKIDAITLAKMPFVDAERMAEVSLPTAKIYATQRLVRQRRRLECDITSRKTRIMSILDGYLPGVRQTFSNLWSVQAKAFLGSRLNPLAVVRDGERALHRFLAEARSSPRESTVDSHALYLACQAAAMIYERSRSVGMVDDDFFVSLQEELARELRLMEAEEVESESITRHLTELYQELHPSGNLNTIPGVGEHTAPVFLAVVGDPARFKSQAAFANFSGVVPDSRQSSSVEAKGLRMTKAGPAIMKWALYQSADIGRRYDPQLAWLYYREMVHNGKNHKQAMGAVMSHMGARVLAVLRENKPYELRDIEGKLISKEEARSLILSRYQVPEEIRRDRRRRTATRASSDKPLRKRKETVSSRSHEAAESPQPVLSTASPSQLV

SEQ ID NO: 130866 - protein, 333 aa, unidentified
MVYAAIDIHKRVFQAAVLDADSGQLGQERLPATREALDDWATRWAGKLEAVALEATTGWRWVARELQARGFDVRLCDPGEARALGGSKRRPKSDRLDAAWLARLLAKEMLPEAWLPPAEIQYLRDRTRLRHALAQDRNRWAQRLHALLTHEGWPCGRGRLLTVSGQKWASALALPEPARASVEAMLTIIHALDEQIELLDTELRRLARSDPRLQALCAIFGVGPVLAAHILAELGEASRFRRARQVVRLSGLDPVVSESANVRRRGRLSKQGSPELRWALAEAAHHACRRRSPDHALYTSAKQRRGTQRATLTVARKIARRAYHVLADLEQAA

SEQ ID NO: 130867 - protein, 355 aa, unidentified
MSQEKYIGMDVHQATISVAVMDAQGNLTMECLLETKAATIVEFIQGLQGTLSLTFEEGTSAAWLHDLLKPHVSRLVVCDPRKAALLKEGNKSDRIDARKLAEMLRTNQLKPVYHGEHGIRTLKELGRSYLTITKDVTRSMNRIKALYRSWAIPCAGTSVYAPRHRAEWLAKLVEPGVRIRAEHLYQQLDSLQPLRLQARGELLRESHTHPAVKLLRQIPSIGPIRAGLLVALLQTPQRFRTKRQLWAYSGFAVETHDSGEYRWVRGKLQRNRERMTVRGLNDNHNRDVKNLFKSAAISASTRPGPLQDFYVALVAKGIRPTMARLTLARKIAAITLTLWKKGVSFDPKQLHRQAA

SEQ ID NO: 130868 - protein, 347 aa, unidentified
MNYIGCDCHISTLDCAVVNERGHETKKQKINTGVKGLMGFVKSIPKPRKIIIEEGTLASWLLEVCTAYGEELIITDPKTNRWIGRAGQKNDEIDASKLAQLARGGYIKEIHHPIGHRRRYRELVLSYHDTVKSQTRIKNKLKAKFRQNGIKCSGETVYAATFRNEWRKKLPQDKVVQMMVEGLWRQLDQVHEVQEELFGHMCKQSRRYSEIKRFKQIPGIGPVHAATISAIVETPHRFANKKKLWMYAGFGLAERSSGEKVYSRSLTRSYNRLLKNALKQSTEAAISAKDNQFRRQYLRLTLEKGIPSHRAKLTVARSILATLYGIWKSGEKYDPTIDKKRTESDNT

SEQ ID NO: 130869 - protein, 467 aa, unidentified
MAAVMIGVDPHKASHTAVAISAAEEPLGEVRVRACVVQAERLLAWAAAWPQRTWAVEGAGGTGHLLAQQLVSAGERVLDVQPKLGARVRLLAAGDVNKNDPNDARSVAVAALRSAGVREVRADDHAAVLKIWSKRYRDLGRTRTQVACRLHAVLGELIPGGVPKAITTARAARVLKALRPEGAVEGARCELAADLLEDLRRVDTRIRETRKKLAVAVAAAGTSLTGLFGVGPVIAAAVIGDVRDVSRFPGRDHFAAYNGTAPIEVSSGQRKVYRLSRRGNRRLNHAIHMAAITQIHHRHSQGRAYYDKKLAEGKTPREALRALKRQISNAIFACLQADARAAARAKGPGGQAGNGSVASVAGSHPRHRLFGTATPGPGVHTTTAAGNPPPGPARGRGTAGHSSIAATPPPAKPQVQVERPQRSEDERPGGAARRRPHSAARKGQGPLIKPQRPKGTSHPGRKADRTP

SEQ ID NO: 130870 - protein, 348 aa, unidentified
MSICMIGMDTAKSVFHLHGVDAQGKMLLKRKLKRDELIGFFEQQPRCTVVMEACGAAHHWARVLSGLGHEVKLIASEAVKPFVKRGKKNDPADAAAICAAASRPEAKFVMAKSLEQQGVLALHSVRSLLVKQETMLANAMRGLATEFGLVAPKGMSKLEDLVALVEEDQSCPERARRAFAELREHCRTTTERIAGLEKQIVVHARQHEVARRLATIPGVGPITASLITATIGDGIGSFRSARHFAAWLGLVPRQHSSGGKTRLGKITKAGNGQIRTLLVLGATSMVYRAAHWGNAAGKWVRGLLERHPVRHVTVALANKNARIAWALMTRNEVYRAKGGAAPAATATA

SEQ ID NO: 130871 - protein, 366 aa, unidentified
MKKNSTVATRRKQIFKQKQLTIGMDLGDRFTYYCVLDEAGEVMVEQKLPTSRQAMKQVFGGMPSSRVALETGAHSPWVSRQLTQLGHEVIVAHARNVRLIGESSRKDDRLDARMLARLARLDPRLLSPVQHRSAEAQVHLTVIRARAVLVGARTALVNAARGLAKSYGERLRKCGTQQVGKNSAAALSSELRVALEPLLAEVESLNQRIAEYERRIEQIATEVHPEVARLKQVKGVGTLIALTYVLTVGDPRRFRRSRDLGCYLGLRPGRRNSGSSQPQLHISKEGDRYLRTLMVQGAHYILGPFGQDSDLRRWGLKLCERGGNNAKKRAVVAVARKLSVLLHKLWVSGAVYEPLRNHNAALGQVA

SEQ ID NO: 130872 - protein, 345 aa, unidentified
MPIVGGLDIHRKQITFDYLDTETGQVRRGQISPADRAHLRAWLARFAGRQDVAFALEGCAGWRYVAEELAAAGVTAHLAEPADTAFARGRKRHAKTDKTDARHLRMLLAEDRVPECWIPPARILECRALLELYNDLRRERTAWAQRIHAVLFHQGAPPLGEGVLRTEQGVAGLRAAAAAHLSPVGQLQVATALEVIDALEARLHAVRHQLLDAARHLAGAKVLAARLYGVGPVTALAITCWLGGAGRFSSSRKAVRFAGLDITVSSSDRKGPPGKLSRQGPPVLRWAVYEAGKAHARTSAPDHGYYVAVKDRKNSKRACLSEARKILRQAHHILAELGDDALAAA

SEQ ID NO: 130873 - protein, 309 aa, unidentified
MKEQKVYVGVDVAKAYLDVAWGQESWRVTNDVLGRSALVQRLNQIAGSLQVICEASGGYERGLLEALHRAEIKVSLVQASRVRQYARASGILAKTDSIDAHLLCRFGEAIRPPAAPPPKPQQDQLRQLETQRRHLSRLLVAEQNRSAQLTQSALIKLSRSLRHQIQKQIAQIDLLIKQLIEHSQELSSKAQKLTAITGVGPRTAALLLAQMPELGELNRREAAALAGLAPFNRDSGTARGKRSIFGGRRAVRSGLYMAALVAARHNPILAAFYQRLRSAGKPPKLALTATMRKLLIVLNSALKADPLLA

SEQ ID NO: 130874 - protein, 345 aa, unidentified
MRLKERETDMNYCGIDLASKASAICVMGDSQEISLEGTCTTDVDGFRRLLKGYSGLRCVVEASPLSEWVADIVESLGHEVIVIDPRKAKAVLTSKKKTDKLDARNLARMAATGWYTAVHRKSAESRLLRSALIARKGLVDTQRQQNNRIRGLLRAHGIVLGRVGSQVFERRVLDQLEQRCPGLIPAIRPLLEIWSTLRVSITRLTRQIRQMARQDRTSQLLMTVPGVGPLISSAFIATIDDPGRFARSEQVAAYLGLVPRVSQSGETEYRGRITKDGDRLLRWLLVEAAHVLLTRSGQDCALKRWGKRIEQKKGAAKAKVAVARKLAMVLHRMWLTNTPFEARLV

SEQ ID NO: 130875 - protein, 370 aa, unidentified
MSQSSTLFIGMDVHKDSIAVAYVAQDHGAEVTYLGSIGTRQCDLDQLIRKMQSKAKHLLFVYEAGPCGYWLYRYLTNKGYDCWVVAPSLIPKKPGDRVKTDRRDAVQLARLARSGDLTVVYVPKVEDEAIRDLTRAREDTLRALKSAKFRLKAFLLRHDIRYTGRATWGPAHLRWLAEVLCPTPAQQIVFQEYVRAINEHTERLQRLEQELQGHVKTWRLQPVVEALQALRGVQFTAAVTMVAEVGDLTRFESPRELMKFLGLIPSEYTSAERRRQGSITKAGNTHARRVLVEGAWAYRYPAKVSRHLQLRLENQPKLIQDISWKAQVRLCKRYRHLIARGKHANVVTVAIARELTGFMWAIAKQVPVTA

SEQ ID NO: 130876 - protein, 343 aa, unidentified
MQFFVGIDVSLDSSSICVIDERGVIIKEGKTDSDPAAIGRFVRHKGRKIEHVGLETGSLSQWLHAGLSREGFRVTVMEARHVRAAFAAMRVKTDRNDARGIAQLIRLGWFKAVHVKAPSAQETRTLLNGRRFLVDKLTGIENSMRASLRNLGLKMGHVTRSKWAARARELPVGIPALELVIESLLRVRDALRQELRTIDRQLLDEAKADPVVRMLMTAPGVGAVVALTFKSAVDDPTRFKRVRDVGPWLGLTPSRYQSGRTDIVGHITKAGDAGVRTALYEAATTVLSRVTRCSTIMNWGMRVASRSGAKKARVAIARKLAIVLLTMWRSQTPFRWSATQASA

SEQ ID NO: 130877 - protein, 429 aa, unidentified
MHDVTDRLELFRLMRASVRGSEKYLLVGVDVAKNNHHAFFGTPNGRTLRKNMVFDNSTKGFESLRSLARDLQNQHGLVEVVYGLEPTASYHKPLAEFLIRQDEHVVYVSNVAVAKNRAMLDGRWDKNDKKDAANVADLVGQGRCLYYDVPEESLRELRSLIAFRIRLKKEEHALRMRLRNNVFAQFFPELDKLYIRAGQPDDLVLSIAQHCLDPREIAGMEFEVFLKLITTRKIRIESEKRLRELWEIAKESAGCQVHDAARWEAQSLVSKLKAVRETVRDTEKLMEKVAQQFPEYESLLSIPGFGPIVSAMVLAAIGNAFRFENRKQILRLAGLDLSAERSGRNSDSAKPVISKQGKAALRYALVQAAMVASSLNPDIRSYFSNLLKGRELERGIKLKMKVKLAAKFLVVAWTLMKSREKFNPSCFTG

SEQ ID NO: 130878 - protein, 334 aa, unidentified
MKKRYFMGIDVAKATFDFCLLSSAGACLWRGRFCNDARGIERFLVQLRARSWKLSQIHFALEATGVYGKALVAALHRADLAVSVLNPAQVKYFAFSVLRRTKNDTVDAEIIARFCRERKPLATRPLRPIEEQLKVLVHERESRVGEQTRERNRAKKDPFQIELPSLISRQRQQRLKQLAKEIAQLDAAIDSLIASDECLRTQSQLLCSIPGIAELTAAKLLSELAGKEFQSARQLAAYAGLTPAEFRSGYFLYGKTHLSKIGNAFLRKALYLPAAVARRWCKPLKPWIAILESRKLHGLAIRGAIMRKLLHIAFGILKHQKPFNPLLLSFPKTV

SEQ ID NO: 130879 - protein, 384 aa, unidentified
MKKNSSRSVEMKATAYERNTAMRNAAGRTVIQPSDYLAVVGLDVGDRKTHYCILDLDGDLVVEGEVATREASLRVQFAGKGRMRIALEAGAHSPWISRLLVELGHDVIVANPRNVRMISRSDSKNDPADARLLARLAHVGPELLSPIQTRSQQTQVDLALVRARDVAVQSRTKLINTVRGIVKSTGHRVPKSSTLTFARKAKDACPEALQPALLPLLRVIEELTREIELYEKLVVHKAEAEYPETKAIRTIHGVGHLTSLALVLLLNNDRSRFRKSRDVGCYIGLRPKQRESGLRAPQLGITKAGDPLLRRLATQSAQYILGPFGKDSALRRWGLSLALRGGKNAKKRAVIAVARKLVILMHRIWITQEVYEPLRGVTLKSTAA

SEQ ID NO: 130880 - protein, 392 aa, unidentified
MCLQDAEGRVLAARRLPGGVAGITRLHELIASHLDGDDPGQVLLAIETDRGPWVRALVAAGYRVFGVNPKQAARHRETVAVSGKKDDTFDAAALSDMVRTRRHQLREVAADSDEAGAVKVAARAHQKLVWERTRHALRLRSALREYFPAALAAYAPLTLTGATLELLARAPGPASAGRLTVPQITAALKRARRHDVAGKARQIQAALREPQLGQSEIVTEAYAASVTAAAAVITVLNEQIKKMEATVESLFRRHPDAGLYLSQPGIGVITGARMLGEFGDAPGRHADAKARRSYAGTSPLTIASGKRKTVHARYIHNDNLVSALHDQAFAAISASPGARAYYDDLKAREIDHTDALRRVANRMAGILHGCLKTGTAYDEDTAWGHRSQPAAA

SEQ ID NO: 130881 - protein, 384 aa, unidentified
MYKHNILFIGLDTHKVSTEVAHIEDQHGAKPVHHGKIKTTKAAITKLARQYQSKYPQATLHFVYEAGPCGYWIYRLLTSLGHCCYVVAPSLIPKKPGEKIKTDKRDALKLAKLLKSEDLTPIYVPESEDEAIRDLSRARETAMKDLKDAKYQLKALFLRNNITSKVNDNWSAQHLRWLTELVLPHPSQQIVLQEMIHTITERIAREKRLANELFHQVKQWRFYPVVKALQAVRGVKLLIATGVVAELGDLRRFDHPRKLMAYLGLVPSEYSSSDKRRLGSITKCGNGRARRLLVQGAHTYKHKANISTELQKRQESLPKEITDIAWQAQLRLCRRYNRLMSRGKHRNVVVIAIAREMAAYIWAIAREVVISEVNPRLRVSRVPA

SEQ ID NO: 130882 - protein, 327 aa, unidentified
MQIIGVDVSKLTLDLHCYGHSSSPDPVGNNLSGFKTMAKWINKKVSNCNEDILIVMEYTGIYTYNLERFLKEKGWNYVKRPALDIKRSCGIRRGKTDSMDARIISEYGWMRQSVLKPMVPLSDTQVELQQLMAYRDKLVADRASYQSRLKELKGQMQSRLNEQIEQSSEYIMQVLSVEIKQAEKNIKALIGSEEELQTNYDLVTSVRGIGFATAVHLLITTENFTRFDSHRKFACYCGVAPFDHTSGSSIRGKTRVSHLANKKLKSLLTMAALTAIKYDADLKAKYEQKVQEGKPKMCAINIIRIKLIERIFTVIKRQTKYELRAAA

SEQ ID NO: 130883 - protein, 408 aa, unidentified
MKTLHQRCAGLDVHKQEVVACLRLVTQGRVHREVRRFPTTTRGLLELAAWLEAARCTIVAMEATGVYWKPVWHILDGRFELVLANAAHIKGVPGRKSDVNDATWIADLLAHGLIRASFVPPQPIQELRDLTRTRKQLSREIVRHTQRLQAVLEEANVKLASVITDILGASGRRILKAMITGETDPSHLAELGSRRLGCSRDTLVEALDGRVRDHHRFLLDQHLKTIEQLEETMAAFDARIEAALAPFRDTVERLTQVPGLSTRAAEVVIAEIGLDMSRFPTAGHLLSWAGLVPALDESAGKRRSTRVTKGAPWLKPVLVQCAWAAANKKNSYFEAQFLRLKGRRGPKKAAVAVAASILTTVYHMLRDGTCYQDLGPNYFARRNPARTARKLADRIRSLGYIVEIRSAA

SEQ ID NO: 130884 - protein, 430 aa, unidentified
MKYNTQNAKIASITEETLILGIDVGSETHYVRAFDWRNYEFSDKPLAFSNDEAGFLTFIAWVEDIKEKSGKTAVIPGMEPTGHYWFNLGKFLQDSGMRPVHVNPHHVKKSKEMDDNNPEKNDRKDPKTIAALVNEGRFSCPYIPTGVYAEIRSLSNLRFQTQEEITRVRNRIARWISIYFPEYKDVYGKLDAVSGMMVLKEAPLPMRIKELGAEGINQIWRNARLRGAGMKRAKTLLSAAEHSVGSQEAPETASLEIRNLLEDYEKYGRRMEELMAKIEEKIKEVPYVDKLLEIKGIGLKTVCGFISEVGDLSRFDDPKQLQKLAGYAIVKNSSGKHAGESHISYRGRKRLRYVLYEAAISVIGKNGEFREIHRYYQTRDKNPLKKMQSVVVIACKVLRVFYAILTKGVEYDGEKMLRDIRRPGMSAQAA

SEQ ID NO: 130885 - protein, 370 aa, unidentified
MEQYSTDQIWVGLDVHQSSITAAVLYGDSHDPEVVRMRGDLNAVRKFFRRLSQDGTPRSCYEASGAGYVLQRALGRDGFHCEVIAPSLIPRKPGDRRKTDKLDAIRLAKLYRSGHLTPIAVPDEEQEAVRQLVRARLAVQREITRLRHRIVRVLATHGYRFHGTKSNWTKKHRAWLGQLRHELDGPLRTVAGMHLEHLEYLETQQRSMDAEIERFSQMPPWRRGADALRCFRGIKTLTAMTLLTEIGDIRRFPTASGLMAYTGLIPSERSSGEVERRGPITRAGNSFLRRVLVESAWHYRHRAGADLILKRRRQGQNPEVVAIAVKAQHRLSRKFWNLSQRKHTNKAVVAVARELTGFIWAALMALEEEV

SEQ ID NO: 130886 - protein, 433 aa, unidentified
MLKINYMSTLFVGIDVSSKTNAVYAMDFEENKYISSSFGNNQPGAGELVNMIAECMQKHKNLDTLLIVLESTSVYSVHISNFLSTSEVLMPYRPYVFCVNPKATSNYRKSYIGMEKTDPTDAYLIADFGRVGRTKKLEPWRGGQFIALKRLTRHRMHLSECITREKTYMVSNLYLKFSELQLLEGDDRPFGNLYGATSSAVLTEFLSPQEIIDMPEEDLLTFLAQKSRNRICDISKTSQLLRKAARDSYRLDKCMYEPLNISLASSFNCIHAYQKEIKLIEQAIEKCINGMNPNALIILQSIPGIGPVWASGILSEIGDITAFHSSDALAKYAGLYWPKGDSGDFTSEDKQMSKAGNPYLRYYLGEAANSVRKHIPEYADFYARKYAEVTRHQHKRALALTSRKFVRLVFGLLVKNQLYTGEKLDTEYNIESN

SEQ ID NO: 130887 - protein, 383 aa, unidentified
MQPTQGTDFTPSGKLLAVSLELSKNSWKIALHDGKRDKPSMHTVASEQAAKRLEEAAAVIEATKKKWGLPERTRTVVIYEAGQDGFWIQRALTGMGYEALVVDPASIPVERRARRAKTDRLDAIKLVVSLLGWLRGECDRMHVIRVPTEEAEAQRHLARDRGELQKEIGQHRDRMRKLLRTVGCWDSVEGKFAERLEQGAVHCQDGQPLPAQLKARLERECERLKLATKQLAALEESLVEELPEAVRGRIGQLMRLKGVGQVGALRLVLELYWRDFDNRRQVGSCVGLVPQPYDSGESRVDQGISKQGNRRVRALLIEMAWFWLRYQPDSELAKWFVHRTQGSGTNKRGKRIAIVAVARRLAIALWRYLKDGVVPEGAALKAG

SEQ ID NO: 130888 - protein, 401 aa, unidentified
MSKKNTRRSLDTSISYAVIGLDLAKADAAVAAVPCSNDEMGLIDRMDYATLFEQAEKLPPTLFAMEPCCGYSHICLRLQSLGHDVKVISGRAVKNWIATHKANQKTDLNDAIALAKLALHDDALTPIRVKSVEQCRMATVQTIRRQLRTQATKSLVCFKSTCQSWGIVIPRGSLSTKKMEAAIAGAEDMLGAEVTSSLKILLDAYKVTVQSINELDKKLDALVQNNEQARLMNSVLGIGTQTAARLATITGDIKRFQTPRSYVAYIGLAPRNIITGHCGTPTPKKNGASRPVSNRGQGKVSRNGDRVARTYVIQGAASIYMQNCKNQLPECQLRRWLEEQIKRGKPYGKIIVSLAAKLLRIVWALLTYKEEFNIHKAGVPRSVLAAIERPQESTVAAEAAA

SEQ ID NO: 130889 - protein, 343 aa, unidentified
MQTITTIGLDIAKSVFQVHGVDADGHVVVRRQLKRRYVLAFFQKLPPCLVGIEACASAHHWARELQALGHTAKLMPPAYVKPYVKRQKNDATDAEAICEAVSRPNMRFVETKTPEQQSCLMLHRTRHLFIRQQTAVINAIRSHLAEFGIVAPVGRNGVDQLLGVVADAGDKRLPEIARACVAALGAQLQTLKAQVLQFDRLITAWHRSSEASRRLDAIPGVGPALATALVASVANPKAFRSGRDFSAWIGLVPKQNSSGGKDRLGSISKRGDRYLRSLFTAGALAVIRYAKIHGTKHRPWLTSLLARRPTKVAAIALANKIARMAWAMMAKGERYKEPAALAA

SEQ ID NO: 130890 - protein, 403 aa, unidentified
MNSVGIDISKGRSTIAVMRPFGEVVISPFEVRHTDSELSKLARRLKSLNGETRVVMEATGNYHAPVAKLLHDAGLYVSVVNAKLVHGYGNNDLRRVKTDRKDAVKLANYGLDRWLTLPRYIPEEDTRLLLKNCYRQYRQYSKVQTILKNNLISLLDTVFPNVNRLFSSPARADGSEKWVDFVAEFWHCRCVSEKSEKVFTNKYQRWCRKHGYNFSEEKAHTIYVEASGHIGVMPKSETTKLLVEQAVAQLRATSAALAALKHEMQSLASMLPEYPVVMDMFGVGPTLGPQLIAEIGDVRRFYSKKALVAYAGIDAPPNDSGDVIGRHKSMSKVGASSLRRTLFLIMSAYLQNSPPNEPVYQFLNRKRSEGKPYYVYMTAGANKFLRIYYGKVKAHLRSLEQNE

SEQ ID NO: 130891 - protein, 461 aa, unidentified
MSRNKPTGPQKRSVQKKVDWKALGIVHPDAAGIDVGGSEHWVAVSPDRDPEPVRRFGCFTADLHEMGQWLVQKGVRSVALQSTGVYWMPVFEVLEQHGLEVYLVNARHTKNLPGRKSDVQECQWLLKLHAFGLLNNSFQPTDEIRIARTLWRQRGNLVAEASSTIQRMQKVLTEMNVQLSNVLSDLSGVSGMKIIGAILEGERDPWHLAALVAPGVKATPQDIAKSLQGNRREELLFVLRQHVELYRIYQKKINDCDLQLRKHLESFGSKRDLQAQPIGPKPKGKKGSRNAPGFDLRTELYRITGIDWAQINGMDVLTAQTVIAEAGADLSAFPSEKQFASWLGLCPTNEQSGGKILNRRTQKVVNRATVAFRNAASPLLRSQSYLGAQYRRLRTRLGAPKAITAMARKLACLFYRLIKHGQPYIDKGSEYCEARYREQQIRSLTKRAQKLGLQLVIPKTA

SEQ ID NO: 130892 - protein, 434 aa, unidentified
MRILFERCCGLDIHKVSIAVCVVITRDGKTEEETRRFGTMTADLLELAAWLKARGIQHVAMESTGVYWKPVWNILEAEGFDLLLANAQEVKIVPGRKTDQKDSQWIADLHQHGLLRKSFVPPRLVRDLRDLTRTRATLAQDHSSTCNRIQKVLEDANIKLGAVASDVFGASGRAMLLALMKGENNAEALAELSKGRLRHKIPELRRALEGRVTGHHRFLIDRHWRQMETLENQMRQFEEEIAERMKPTAEEIARMRESLPADAPLPPSPREEAILLWMELPGVGLTTACSMVAELGVNMEQFPTSAHVASWAALCPGNNESAGKRMSGKTRKGNVWLRRTMCEAAWAAAHSKGTYFAAQFGRIAARRGKKRALLAVAHSLLVVAYEMLKNKQHYRELGADFFDGLNKDQVKRRLVQRLAKLGFQVTVTRTPTAK

SEQ ID NO: 130893 - protein, 350 aa, unidentified
MTMVGGFDVHRKQITFDYVDTGTGLVRCGEIRPATRTTLRGWLGEHCPAGDAEIAVEGCTGWRYVVEELAAAGATAHLADPAETAGLRGRKKRAKTDRADARLLRTLLLQGRLPESWIPPGHVLEVRTLGRLYCALMDERRAWRQRIHAQVFHQGCPPITALLTEAGREALSLAELSAMGRQYVDTALRRIDELTAEIDPVRRQLINFARRQTGCQALQSRQYGVGWLCAAIMWAEIGDARRFHSSDQLVRFAGMDVTVYSSDGKRSPGHLSRQGSPELRWATFEAAKCAARRGSPDYAYYQRLAARPDNGKNPTLAVERKILRRSYHTLRELGDAALAMPVPEAKGVAA

SEQ ID NO: 130894 - protein, 337 aa, unidentified
MKFCGIDLHSNNSVVVVTDETDRVLVSRRCPNQLTPILSLLEPHRAELVGVVVESTYNWYWLVDGLKAAGFEVKLAHPVAMKRYDGLKHADDKDDAAFLAHLLRLGILPTGYIHPPQERALRDLARKRIQLVRSRTQHILSVENIMARQFGQRLSCNEVKGLSATSVDRLGLPTDVALAMKANVAIVQALQIQIDFLEERLLHEAYLRPEFSLLKTMPGIGEVLATVIMLETGNIERFADVGHFASYARCVKSAHYSNGKKKGEGNAKNGNAYLIWAYIEAANFARRFSEDAKRFFEKKKAKTNAVVATKALAHKLARASYHILKEKQPFDARRCFA

SEQ ID NO: 130895 - protein, 438 aa, unidentified
MSNKVIFNLDDLFISVGIDVGADFSWMSIALPNQQFVGKPYKILHSSIDSLTTAVSKIKEAEELYSLESRIFLESTGIYHYPLFCYLRDKGFNCSVINPIITKNSTNINIRKVHNDRFDSKKAALVGLKPDLKVSLMPSDLALNCRNLCREYYDLMDNRSAYVNKLQGELRMAFPQYLGIFSKVTINTSLTLLETYTSPSAFLEADKQEIINIIKSTARFGLTYAQNKYNAIIQAATDANQFGYIIDSNIKRIRLYISFIRKYDEEINNILESLHELVNANEDADFVKQIHLIETFKGAGFLSAVSIMGEIGDFSAFSKPKQLFAYFGLDPAVKQSGKFEGTKVQMSKRGSAIARRVIHTLTLQSISISRNGEAKNPVLREYYLKKCDSKPKLVAMGAVSHKVCNMIFAILRDNKSFEIITPQEHIKQYNAAKCDIAA

SEQ ID NO: 130896 - protein, 339 aa, unidentified
MRLYAGIDLHANSHYLGIIDEQGKVVFKHKMVNELRQTLSVLEPFRSELKGVVVESTFNWYWLVDGLMDHGYQVHLANPSAIQQYEGLKHSDDERDAIWLANLLRLGILPEGYIYPKQERPIRDLLRKRLQLVRHRTSHILSIQNIVSRSLGIRVRGNEVKGLDEEQVAELFREEHLYLAVRSSVGVMRYLGDKIKEIEGVVKGWVKLRKEFEKLLTLPGVGPILGLTIMLEVGDIGRFPEVGNYASYCRCVRSTRISNGKLKGEGNRKNGNKYLAWAYVEAAHFAIRDYSEVNRYYHRKAAGANKVVAIKAVSHKLARASYYIMRDQVAYDPNKLFHY

SEQ ID NO: 130897 - protein, 350 aa, unidentified
MKILAMDLGKSKSVACVYEGAHAGREADPRFETIASTPAEVLKLLERERPGRVVIEIGPTAGWVCDLCRGRGVEVQVANTNAEAWHWKRVKRKSDRDDALKLARLSALGQLPTVHMPEPRVRAWRELIRYRHTLVGRRTRIKNSLRAVLQRQAIDWPAGPAGFSKGALEELAAMAAGGSESWRLTLGPELAQLRQVGEAIAQVERELDTLAAADDRVALLRTIPGVGPRLAETIVAVIDDPRRFRSGKEVGCYAGLTPRRWQSGGTDRHGRISGQGHDLLRSLLVEVAWLGRQYNPWMKAVYERALRGSPSRKKIAITALARRLLVVCWAMLRNATPWREPAAAKLGLAA

SEQ ID NO: 130898 - protein, 454 aa, unidentified
MQKQDSYDYYVGIDCAQNKHDFAMKNNQDKFLIKKGHFSNTLQGYEKFLNTVLSKCLDKDKILFGMEVTGIYGTNLYERLKSDGYHVVMIFPDSVKNYRDYKRLNKTDKIDSACIAELLLNGDAQIVHAEKNGYTDLKAYIRRRNALKVTCTQETNRFLAKVCLYFPDLLKVFPSGRATLKAIFSIYPTPYSIIEADFNELVSVLQKASKNKFGVDKANELIHAARNSIVVRKSISDGELYNIHSLIDSIDSLESEIRNLEKIIDSKAEEFPAYHVLLTLTGCGKITAAIIVAEIGDISRFHKASQIVSLAGLYGDNSKSGSSVNKRGKISKKGSRYLRHAIYMVAEFARRNNPIFKAYFTKKKNGDRTKHILAVNAVANKLCKVIYSSMKNQSTYIIQYRDLAKLSESTQNEFFQNAETDFSAKTRRKKYLYEDEYGELHEFVFKSIKTALIE

SEQ ID NO: 130899 - protein, 296 aa, unidentified
MTSTKYIGLDVHKESISIAVLNSAGKVVMECVIETKASTILQFIHGLGGDVHLTFEEGTWAGWLYDLLKPHVTELVVCNPRKNALLKEGSKSDRIDARKLAELLYMSKLSSVYHGEHGLRMLKELSRSYLTITKDLGRVMNRLKALYRGWAIPCAGTQVYAPHYRSEWLAKIHEAGVRRRAELYYQQLDALRLVRQQARKELLAEARKHRATKLLRQIPGIGPLRAAHLVAVMQTPHRFRTKRQLWNYSGLGLETHDSAQYRVVEGQLQRSKKPVTLRGLNDNHNHDLKDIFKVRR

SEQ ID NO: 130900 - protein, 330 aa, unidentified
MTLPPFGIDVSKATFRGELLRPEGRSSSPEFPNSPAGFARLAAWFRRQHVDRVHACLEATGVYGEPLALFLHQAGHAVSVVNPRQIHAFAESELARNKTDPLDAALIARFCQAHRPPLWSPPPPEVTALEALVRRLEALEQMRQQEANRLEVAAPAVQPSIAEHLQFLDQQIRKTQQAIRDHIDSHPSLRAQRDLLVSIPGIADKTAAKLLAEIPRWDQFAAARQLAAFAGLNPRQYTSGSSVRGRTHLSKVGSPRLRKALYMPALVALRHNPLLRALARRLGQRGKHRMVIVGAAMRKLLHLAYGVLKSRKPFNPNFSSQYLLTSQDGI

SEQ ID NO: 130901 - protein, 428 aa, unidentified
MNYNTQNAKIASITEKTLIVGIDVGSETHYARVFDWRNFEFTRKPLVFSNTQAGFLTFKAWIEEIQEKNGKTAVIPGMEPTGHYWFALGKFLQDNGMKPVHVNPHHVKKSKELDDNNPNKNDRKDPKTIAALVNEGRFSYPYIPTGIYAEMRSLSNLRFQTQEEVTRIKNRIARWFAIYFPEYKDVYGDLKAVSGRMILKAAQLPEDIGKLGVEGVNQIWRDAKLRGAGMKRAKTLVSAAEHSVGSKEAPEAARMELKNLLDDMDVYTSRLEELVQKLEGKLKEIPYIDKLLEIKGIGMVTVSGFIAEVGDIRRFDNPKQLQKLAGYAIVANDSGKHNGESRISYRGRKRLRYVLYEAAISLVGKNAGFREIHGYYRTRKENPLKKMQSVVAVACKVIRVFYTILTKGVDYDAARLLGDIKHPQMQTA

SEQ ID NO: 130902 - protein, 341 aa, unidentified
MQITTIGLDIAKNVFQVHGIDAAEKVVVRKQLRRGQVLKFFAALPPCLIGMEACASAHYWARELTKLGHEVRLMPAKDVKAYVKRNKNDAADAEAICEAVRRPTMRFVQAKSAEQQGRLMQHRARDLLLRQRTQVINALRAHLAELGIVAAQGHEGLKQLLTIIADERDERLPIDARASLIVLAAQLQALHTMIGSIEKRLTVQHRANEASKRLQSIHGIGIIGASAIAATVTDPKAFRSGRDFAAWIGLVPREDSTGGKRKLGPISKQGDRFLHRILVVGAHSVLRRAKQNPEKYPWLTQLLARRPFKVVAVALANKMARIAWALLASGGHYRPRLGTAA

SEQ ID NO: 130903 - protein, 349 aa, unidentified
MSEKPNKAIAVIGIDIGKNSFHIVGHDDRGAIVLRQKWSRSQVEARFANMPPCLIGMEACVGAHHLSRKLQGFGHDARLMPAKYVRPYSKGQKNDFRDAEAIAEAVQRPTMKFVATKTADQLDLQALHRVRERLVSQRTGIINQIRAFLLERGIPVRQGQRFLRADLPRILATPPDVLSPRMLRVIEDLAGDWRRLDERIEGLSGEIEAIARQDTGCERLMSIPGVGPIISSAMVAAIGTGDAFSKGRDFAAWLGLVPRQMSTGDRTILGKISKRGNRYLRVLFVQAAWVVLIKPKSWERHGLKSWIEAAKKRLHHNVLAIALANKLARIAWSVLARGRDFEASKLRVA

SEQ ID NO: 130904 - protein, 431 aa, unidentified
MVAVMIGVDPHKASHTAVAISLSEERLGELRVRACAAQADQLLAWAHAWPERTWAVEGADGVGHLLAQQLLSAGERVVDVQPKLAARVRLLATGDINKNDPNDARSVAVAALRSADVREARRDDHAAVLKVWSKRHRDLGRTRTQVACRLHAVLCELVPGGVSRRITAGQAAHILASIRPSGAVDAARCELAAEFTEDLRGIDARIRETRKKLAIAVRATGTSLTGLFGAGPVTAAVVIGDVRTVSRFASRDHFAAYNGTAPIEVSSGPRKIYRLSRRGNRRLNHAIHMVAVTQIRYRHSEGRAYYDKKLAEGKTPKEALRALKRQVSDAVFACLQADARRAAAAAIKSPGGQPGNGSASSATGSHPAHRLFGQATPGPATHPTTPAGADTPAPLSRAAAISCERAAGSRTGRSPAAQRRKASLTRPPASR

SEQ ID NO: 130905 - protein, 362 aa, unidentified
MRIIGCDLHARQQVVAMLDTETGEVVSMTLKHEGNNVQEFYSQLPRPVRVGIEATGSMQWFVNLMEELGIECLVGHPAEIRAAEPRKQKHDRRDADLILKVLVENRFPAIWLPSKELQDLRALLRHRHQWVRMRTRIQNALQSIALANGLRRGTSLWSHDGQNTIASLPLAPHTAYRRNELQALYAKFEAEIEKLNQRVEEQACKRAGARLLMTHPGVGPVTALATDVFLGDPARFADSKALASYVGMIPREYSSGGRQRLGGLTKQGNPLLRFLWGEAGAHAVRRDPELQRFYRRKLIQKGFGKASVAVARKLGIRLWIMLRDQIEYNEFCRRGQKQQKSSDACAGMPETRNGANSHRPVD

SEQ ID NO: 130906 - protein, 412 aa, unidentified
MSNHTASWTYVGLDVHADTITVAVAEGGGRARGRGVGTIPNRPDAIRKAMKKLGEAKSLRVCYEAGPTGYALYWQLHKMGLACEVIAPTLVPVRAGDRIKTDKRDALKLAQAYRAGELTPIFVPDAEHQALRDLVRAREAAKKDQLRARHRLSKFLLRLGRRRDTQSQAWGQAHWRWLDAQVFDHTAQEETFHDYKNEVQHATERVARLDKALDRAVEQAPPRMQELVLALQSLRGVAMLTAVTVVSEVGSFARFPSAQKFIGYLGLVPSEHSSGGRRHQGGITKTGNAHLRRVLGESAFCGRLRPRRSPSLKRRQQGQSQAIVDIAWEAQKRLYRKHGRMRIRAKSHQVTVTAMSRELAGFVWAVGRQREAEMNKEGLPVERFKEAGKHPHGKDKPRNIYAIGTAVPNSRH

SEQ ID NO: 130907 - protein, 405 aa, unidentified
MTDLDQHEAIQVFVGVDVGKGAHHAVALDRSGKRLLDSALPNDEAKLRALIGKLKEHGAVLLVVDQPATVGALPVAVARDEGALVAYLPGLAMRRIADLHAGEAKTDARDAYIIAEAARSLPHTLRSLKLADHDVAELTMLCGFDDDQAGQITQTSNRIRGLLTQIHPAMERVVGPHLDHPAMLDLIERYPSPAQLTSMSEKQLANRLTKLAPRVGKTWAAQIVQALSEQTVVVLGTQAATIVLPRLAQQLAALRRQREDVAREVEQRVLAHPLHPVLTSMPGVGIRTAARLLIDVATRAFASAAHLAAYAGLAPVTRRSGSSIRGEHPSRRGNKQLKRALFLSAFAALRDPTSRAYYVRKISQGKRHNQALIALARRRCDVLFAMLRDGTLYNPPRTETSLTTT

SEQ ID NO: 130908 - protein, 342 aa, unidentified
MSVTIGIDPHKSTHTAVAVDRDEQPIARLTLPASRHQTDRLLAWAEPLDAERVWAIESAAGLGRLLAQQLVGAGERVIDVPPTLAARVRLLSSSKTSKNDPNDALSTAIAGMRHCGLRRVERDDHTAILRLLADRHHDLTGLRTQAACRLHVMFRELTAGGAPLRISAAQARQLLDAIDPGDLVAVERRRIAAEHLADIERIDGEINTVKERIADAVIASGTTLTELHGVGPVIAAIVLGQVRDITRFRTRAQFANYNGTAPIEASSANTNRHRLNMRGNRALNHAIHIIAVTQVGHDTPGRAYYLRKQAEGKSRKEALRALKRRISDAVWRQLQIDTRATS

SEQ ID NO: 130909 - protein, 456 aa, unidentified
MPVINRHAAGIDVGATSHWVCVPEDAVAPGESPVREFGAFTKDLDELVEWLLTCGVKTIVMESTSVFWIPLFQKLEAARLEVLLVNARHVRHVPGRKSDCKDCQWLQRLHSYGLLNGSFRPSDDICRLRTLMRHRDNLTKSCGAEVQHMQQALNQMNIHLHHAVSDLNGETGLRILDSILAGERDPKKLVELRDAQCSKTRPEELGAALQGDWREEHLFVLRQSLENYRHLLKQMEICDAELEKALAKVVVNPAAFTEEERPENPPAAEAKAKTRKKFKKLKSSTGLKRDLSAELTRICGVDLTRVIGLNVLGVLILISEIGVDMSRWRSVKAFCSWLGLCPGNKISGGKILSSHTVHVVNRVSILLRTVAPAVGRSDTWLGIFHRRMRARLGPAAANTATARKLACMIYHLLKYKEDYIDVDCLIYQEKIRKSRITKLSRQAEELGFELTKKEAA

SEQ ID NO: 130910 - protein, 343 aa, unidentified
MAQQTIIGIDLAKHVFQVCMVTPTGTLKTNTTVARGKLLALIARQPPALIFMEACGGAHDWARRFCAMGHEVRLLAPQYVTPFRRGQKNDPNDALALTEAGQRPNIPTVPIKTVEQQDLQALHRVRERLVKNRTAVVNQVRGLLLEYGIVIPQGIARLRKRLPRVLEEADNGLSFLMRDLLQSLQSELSALDTRITDVTGQLARLSHELEACQRLQEMEGIGPLSATALVAALGHGHDFQTGRQVAAWLGLVPRQHSSGGTTRLGGITKGGNSYVRRLLIHGARSVISHVRDKPDAKSAWIRQLVARIGVNKACVAVANKMARVAWALLHTGEHYRKPVALPV

SEQ ID NO: 130911 - protein, 402 aa, unidentified
MTIVTTYVGLDYHQDSVQVCVLDQSGQLLLNRSVKDEAAVVARVASRHGRPRRLAVEACCGAADLADELASGYGLSVQMAHPGYVARMKRSPDKTDWGDAQLLADLTRINYLPRVWLAPESIRQLRRLIRHRAQLVRRRKDVKLRIRGLLRENRLKCDDANAWTKAWLSWITSTDLAPSDHWLIEDHLEELASLPRRIKAVEAQIADRVKDDPIVAKLMTFQGIGLVTAATMRAEIGDFTRFDTGKQLARFCGVTPRNASSGTRQADSGLIKAGAPELRRVLIELAHRLIWRGVPRWGELGSSMLRRGKPKSVVIAAVANRWVRWLHHQLREDAATSAPAQQEGLTQTAFKETSSQAIFGIRWGSKLEAARGRKARQRIGQLPPPTSKNPQGLPAHHAGTLG

SEQ ID NO: 130912 - protein, 357 aa, unidentified
METAYDGRQVVGMDLHRRRSVLVRMTEDGRRLGTARITNSPQELRREIARAGKSPKVVLEATFGWYWAADTLAAAGAEVHLAHPLGVKAFTYRRVKNDERDAADLADLLRMARLPEAWIAPAEVRELRELTRYRHKLVHLRTSCKDQVHGVLAKLGVPVTCSDIFGTAGSAWLDGLGLPQPYAGKVTSLRHLTGELTAEVTMLSAVIADLLAHHRGYQVIQQLPGIGPVLAAVIIAEIGDVTRFKNPAQLCSWAGLTPRHRESDTKVARGHITKQGSRMLRWALIEAIQRAGADTVTGAVKDAIIARRGKEAKNIAKVAAARRLLTLVFYGLRDGQIRCLSQTSEDLPPVTPAQRAA

SEQ ID NO: 130913 - protein, 347 aa, unidentified
MNYIGADCHISSLDFAVVNEKGNITQKAKVETSALEFMKFVKSIPKPRKIYIEEGELADWLLETSLKFGEKLIITDPKINKWIGKAGKKDDKIDAEKLTQQARGKYIKEIYHPVNKRRRFKELVFAYHDTVKSQTRIKNKIKASFRREGIRCSGDTVYSDKYRKEWQKKLPTNMVVRLIVNQLWTQLDQIRAAKETLKRHIRIQGKQFSEIKKFIKVPGIGLIHASTISAIIETPHRFANKKKLWMYAGIGIAERKSGEKVYSKKLTREYNRLLKNAVKQATEAAISARDNQFRRQYLKLTIEKGIATHKAKLTVARSLLAAIYGMWKKGEAYDPQIDNKRFKENNK

SEQ ID NO: 130914 - protein, 408 aa, unidentified
MNTLYVGIDVSSKSNVVYLMLPNGDKHSNFSVANSHEGSTLLVKKIYSALTSHSLDTVLIGLEATSVYGDNLVYFLREDATLAPFNRKIHVLNPKQVKKFHDTYNDLPKNDYVDSFVIADCLRFGRINKEVYMGEYRYKALQNLTRARFFAVQNLVKEKQRFMNVLFKKYSTMTQEKVFSDAFSTTALAVYDEFESAEALANMDLHELTDFIIEKGKNRFPDPDAVAKAIQKAARSSYRLPKTVNDSVNQVLSISITSMKALESQIKEFDKAIKALMELLPNVLISIPGIGPVYSAGIMAEIGDINRFDNQASLAKYAGLAWKQHQSGGFEAEVTRLIPSGNRFLKYYLCEAAFSLVRCDKEYSDFYHLKYKEVNRCQHKRALALTARKFVRLVFRLLKDNRLYCPAK

SEQ ID NO: 130915 - protein, 429 aa, unidentified
MNFRPIAGIDVGKFFSEMAILSPSNEVIARMKIRHDSGTDVERAVELLKKTEKDFASRPFVVMESTGHYHKILFHSLCKAGFEVSVTNPIQTDSIKNIGIRKVKNDKVDARKIALLYRFQELRTTNIPSEDIECLRSLCRQYYKLSDELTAYKNRLTGIVDQLMLNFKDVFPNIFSKAAMAILEEYPTPARILKANRNKLIALIQKNSRRSLKWSTAKYELLVSKAREFEPLSINNSSNIAMLGVYISMIKTLEENLEKVLKAIHKLIAEDLAKDMPVLALTLELLQSIPGVGLLSAATILAEIGDFSAFKKPGKLVAYFGIDPSVMQSGEFTGTRNKISKRGSRLLRRVLFTIALANIRTKRDKTACNPVLLEFYHEKCKSKPKKVALGAVMRKLVNYIFAVLRDRKPYQPRSPQEHAQMLAAKHTAA

SEQ ID NO: 130916 - protein, 386 aa, unidentified
MHDGTNLPVPERTSIPGDCATLFVSLELSRSTWVATSLAPGSKKMSKHTLVGGNGRELLDLLARLKTRAEQRIAAPVKVVAIHEVGLDGFWIHRLLEANGVESHVVDPASIAVPRRHRRAKTDAIDGETLLRTLMAWQRGEPRVCAMTVPPSPSEEDCRRVSRERATLLRERIQHTNRIRGLLFGQGITNYNPLHKNRRECLEELRTGDGRSLPTHVKAEILREIDRLELVLRQIGEVEAERDEILRPAEASSPAALLMRLKGIGAEFATVLYFEGLFRHFENRRQLAAYAGLAPSPWKSGSIDHEQGISKAGNPRLRTTMVELAWMWVRYQPDSALSGWFRQRVGSERGRTRRISIVALARKLLIALWRYVTHGEIPAGAVMKPV

SEQ ID NO: 130917 - protein, 315 aa, unidentified
MAHSVSLISLGADVDSRFIQINGHGEPTVHKIENSPRAIRAWLKSVAASARLAVEATGAYHLELVDQAHKAGLTVYVVNPRAIRQYRESVGQRAKNDRCDAKLIARYIDREHDEVRPYTPLSARQRRVWQLLKRRATLVKARQQVQQSLAGITGLGAPLRQTIAKLNRLITLIEMQIETLLKELGLWELVECCQSVQGIGRVTAMGLVIAFDRGDFKSADAFVAYLGMDVRVRDSGKFVGQRKLTKKGDGEYRRLIYNAAVTAGRYDFKPLLQRFKDRGMKNTQAYVALARKLIRIAFALMKNRDRFDPNQLRIA

SEQ ID NO: 130918 - protein, 369 aa, unidentified
MGDRITYVGLDVHKDGIVVAVAEGGARGEVREYGRVANTPAVLRRLAGKLCDQGVELRFCYEAGPCGYGIQRQLSALGHECIVVAPSLIPKRAGDRVKTDRRDAASLAKLHRAGELTAVWVPDPGHEAMRDLVRARLDAVRALRRARQQLSGFLLRQGCHYRRPAWTKLHRRWLAGLRFDQAVHHIVLEDYIQAVEAAQARRDRLTTQIEAMLPDWTLAPVVAALQTMRGMALVNAATLIAELGDLSRFANPRQLMAYLGLVPSEHSSGASVKRGGLTKAGNSAARRLLIEAAWCYRFPARVSRELRLRQEEQPRPIREIAWRAQLRLCARYRQLARGGKPANVVTAAVARELAGFIWAIARRVPPAVG

SEQ ID NO: 130919 - protein, 408 aa, unidentified
MQVTFGIDVSKSHSTVCELIGESKNELTITNDRPGFIQLLHELAAFSKHPQIIFEATGVYSRRLQAFLEDYGYEYVILNPLKAKKEMDMGLRHNKTDKTDAYHLALIQRLYCHPVNQSESQTYKQLNALSRFYDQLTSDLVIAKNRLHQALQSTFPEIENLFSIARGKNYWQIVARYPHCDLVRKDDKKQIINWLMKLKGIAFNHAQRTTDKLIELAHLAYPVVSCSDIEVQQAQYYAQRLLNLSNKRESIITKMVKLAKTLPNHDLENLESIPGFAQTTAVRVLAELGDLRRFSNPNKINAFIGIDPGRYQSGETDSNLSITKHGNAVARKLLYRAIGQIDNAAKTNPCHIADYYESKKLSSQTKRFKKIAIASIHKLIRTIYALIINDQPYNYNVATHNQKDFSRN

SEQ ID NO: 130920 - protein, 367 aa, unidentified
MTSAGVTRPTRLHHHHRHREVVLGVDTHKDAHVAAVVSTTGKLIASCSFSATSDGYRQLLDWARSHGTVDRAGVECTGSYGAALSRFLRGSGVGVIEVNQPDKATRRRRGKTDAIDAEAAAHAVLSGRATATAKLADGPAEALRLFKMAKVSGVKARTQAINQLRAVLVTANPDLREPLDKLTIPKLVRARIALPKTAAGTATAAAVFALRLLARRVEELDDEIAALKQQITDVISRHTPQLLECYGVGPDTAATLLIATGDTPERLRSEASFASLCGVSPVEASSGKTQRRRLNRGGDRQANSALCTIVLARLCWETRSRSYVERRIAEGKTRREAIRCLKRYVARELYTIIIRAHTTSQDQALAA

SEQ ID NO: 130921 - protein, 407 aa, unidentified
MEVIYPRCAGLDVHASSITACLRIAAGHEVTYQHRTVATTTAGLLELAEWLETAGCTHVAMEATGVYWKPVWHILEGHFTLVLANAMHIRNVPGRKSDVNDATWIADLLAHGLIRSSFVPPAPVQALRDLTRTRKQLVGEIARHTLRIQKTLEDANLKLTRVVSDILGTSGRAILRALIAGETDPERLADLTTGRLKATRAQLVEALHGRVTAHHRFLIELHLTQIETLETAVQKLERHLGDALAPFRAAVDLLTTMPGVSETAARVLVAEIGTDMTRFPTAGHLVSWAGLCPRLDTSAGKRHSTRIRHATPWLKTTLIQGAWAATRKKDSYLHAQFVRLKSRRGPKKAIVAVAASMLTAAYFMLRDGVEYADLGGAYFAHRDVEATKQRLLRRLRDLGVEVEVKVA

SEQ ID NO: 130922 - protein, 422 aa, unidentified
MKRRQEDWFGPHELYLGVDVGKSFHWAVGLDPDGEIRISRRVENRQEDVDALLDEAGSGALVVVDQKNNIGSLVVRRCRARGIDVGYLPGKSMKAARDMLPVTAKNDRIDAEVIAQAGMSLRRAILPIAETDDLGASLSLVSSQLTYATRRATMARNRLHAVLLESDPASEAAADLSAAWTLDVLALLGGAAGIAEAGRRAYGTACARHGATKAARDALWDAACASASNGRHPDAEGMVVKELAAEIADADAERTELTDGLRRRLDGDETYQCLLTVPGIGPKTAAALVTSIDISLFHSDGKLASYCGLAPRDKDSGTSIDSTTSTHSGNKALKNLLIFSCNSLVGTRNRFGRYYDSCVARGMRHNKALKAVARKRLRVIYAVMRDRVPYAEPIANVEKPDTESLDGPENVEKSGTTPLTKL

SEQ ID NO: 130923 - protein, 420 aa, unidentified
MKVVYSTCCGVDVHKTFLVATIIKTTKGVQPSYRKKRFSTFNSDIRRFKQWLLDNACFDVCMESTGKYWIPVFNLLEDRINVTIANPKWVKAVKGNKDDTKDSKWIGDLFRLGLVPGSFIPCKEIRILREYTRYRFKLTCCKRSEKNRFQNAFTVCNVALDAVVTDMFGKSASSITDYLITSDEFDPETCKSFLQKSLKKKADAVIESIEGYQMTSSQKERMLMVRSHLEFVQQYIDSLDSKLDELIAPYENAVSLLCTIPGVDRASAITIISEIGTDMTQFNSSKRLCCWAGLTPGNNESAGKKKSVRITHAGVYLKPALVQCAHAAVKSTATPYYKNKYERLAKRRGKKRAIIAIARMILTAIYQMLSTGETWNPCDLYKIDMPKEMQDKQKAKAVKLALKLLISQGVISPESAPTAV

SEQ ID NO: 130924 - protein, 384 aa, unidentified
MSNVRVTFAKGKPIHCGIDSHKETWAVVIRCEGEEIYRAEIGADTDRLINLLRRFEASEVHTVYEAGPTGFWLHDALEAAGFHSLVTPASKVPQVNDKVKTDHRDARKLAQMLEAGFLKGIHIPTPEERAHRQMYRTREQVMKHRTQTQNQIKSMLLFNGVRRPKGVRERWTQQYVRWLETLSFEHEEIQTSMGVLLKLFRWLDEQVKELDRKLQDMALRDEYRETVEIMDSVPGIGVHTAMAIELELRDVARFRKGSQLSSYLGVTPSEHSSGQTTRKGSITHCGNPRLRDLFVESSWTLIRHDPEMRRTYERIRHQSGSGKKAIVAVARRLALRVRRMLLDKKPYQIEMNKGSSDGAGGSSRPVVKAASSVGAKRFVLKQRA

SEQ ID NO: 130925 - protein, 399 aa, unidentified
MLAVGIDISKSKSVAAILNQDGSMHTSPFEFHHTQPELDAFIKYILNSNQSATILMENTGHYHYPVLKAFREAGLPVCMVNAYQIKKFGDMDLRKAKTDKKDAVRIARYALEKSYSLVPYTSMEQKYEDLRFLARQYNQRMLTLKTNKVFLLNLLDETMPGITNILPLTTRTPETSLSVLFINRFKSYDRIKKMGKNRFLDAFEKIARKSRNRQTKTYGLAIYEAALRNITTRGENEYILAAQDQCLELVCESQKAADSIILKMKTLAETLPEYAVLRSMAGVGNRLGPLILAEIGDIRRFHSGKALNAYAGNDAPPYQSGTFESHNRHISKRGNAALRKYCFEVMQALKLTQPQDDPVYLFLLKKEQEGKPYNVAKMAGVNKFLRIYYARAMETLKQQ

SEQ ID NO: 130926 - protein, 401 aa, unidentified
MTAVMIGVDPHKGSHTAVAIDVAEEPLGRLRVRASAGQAQRLVAWAAAWPERTWAVEGAGGLGHLLAQQLVAAGERVLDVQPKLGARVRLLATGASNKNDPNDALSVAVAALRSKTRRPVSADDHATVLKVWSRRHRDLGRAKNQVACRLHAVLCELVPGGVPEEITAAHAARILRSATPSGAAGQARGELAAELLADMRRLDAQIRESKKKLATAVKASGTSLTGIFGVGPVIAATVIGDVADVARFATRDRFAAYNGTAPIEVSSGNRKTYRLSLRGNRRVNHALHMAAITQIRHPHSDGRAYYERKVAEGKTHKEALRCLKRKISDAVYARLQADAQPAARAVMTGPGGQPGNGSDSSAAGSHPARQLFGKATPRPATPTLRPGTPPRPAAKEIRQTH

SEQ ID NO: 130927 - protein, 445 aa, unidentified
MLPIMYKQVAGLDVHKKTVVATRMRVTDEDRVEWETETFGTTTPDLLRLHDWLEAWQLTHVAMESTGDYWKPVYNVLEDTFEILVVNARHVKHVPGRKTDVNDAEWLAELMMHGLLKASFIPPKPQRALRDMTRYRTTLVQERTRLVNRVQKLLEGANIKLSSVATDVMGLSARAMLAEIAAGQTDAVLMADLARGRMRKKISELEKALTGIVQPHHRFLLAQQLGHVDFLDEQIEKISAAIGQQLESMSWPDRPSGPGTSADAEEEAGVTDESELPLTWNAAVALLDTIPGVERRVAEVMLAEMGLNMCQFPTAEHLASWAGLAPGNHQSGGKRYSGRTTKGNRSLSCIMVQAAWSAVRTKDTFLKARYHRLAARRGKKRAIVAVAHSMLVSAWHMLTHQQPYRELGGDYFDERKKEAKVSYLVRRLEKLTGGSVAIEIQPAAA

SEQ ID NO: 130928 - protein, 401 aa, unidentified
MKRLSGGIDVGSESHHILILDEEDNVLYNKKVAHKLNEFTENINLFKQIEKREGGKISFALEGKNGYSAPLDRILINKGFTLYNVDNLKLKRFREAFAGEWRDDQRDSLMLSKMLKLKDHINSQREKVFIKIEKPSPLTESLKLLSRHQQTLIDEKVRLINRLGKKLLEVCPQVLKLAKLKNKKIIAILVKYPDFSKYKRITLKSLLKIKGIGKRQGPFLLKRLNNIEYVPGLTDIYKTIILSYAKRILELQKEIKDIDKKLDEIGEKNKEVRHLKTVPGVATKLASRLIGEIGDVNRFPSEKQLAIYCGIACVNHDSGKVTKAKAVYKANKICKQTLITMAGCSIRSIHQCKAYYLKKRTEGKSHNHTLRCLARQLIKVIYRMLTEDRDYIVRKELKKVA

SEQ ID NO: 130929 - protein, 337 aa, unidentified
MSKITLIGIDTAKNVFHLVGIGERGNYAYRKKVSRRQLLPALVRLEPCEVVLEACAVSHHWARQIAQIGHRVRLISPQHVKPFRRGQKNDYRDAEAIISAALSPGIHFVGVKSIGQQAEQALHRVRSRLLSHRNAAASELRGLLGEYGLAFSKGIKPLRAGAVRFADSDEAQALGLVELVWDVLEELDQLQHRLDEYTHRIEQRVRNDAISQRLRDELLGVGPLSASALRVKVADVRDFVNGRNFAAYLGMAPGHRGTGGKVKIGKIRRGHDRYLRQLLIHGARAVVQHLGDKQDPQSCWLRGVLDRRGFNIAVVAQAHKNARQAWAILAKEQVLQG

SEQ ID NO: 130930 - protein, 335 aa, unidentified
MQIKHFIGIDVSKDTLDLSVVVDGKNLQYFCIKNRTVEIKSTINKIMKGLGATVDDTIFCMEHTGMYNLPLVKWLQSHQGKMWLESGVHIRKTLGVVRGKNDKVDSSRIAMYAYTNRHQIKFWNPPRKLIERIAALLSQRARMNKAKKQLNTANKEQKRFLDKDIMKSLNKYTQKTILVINKQIGAIEKEILGLINDDVKLNRIYKIITSVHGIGFVTASYILVTTNEFININNPKKYACYSGVVPFEYSSGSSVRGKNRVSHMANKNIKSLLHLSALSAIQMQGDIQEYYKRKVSEGKNKMSVLNAIRNKLVLRVFACVNQNREYEKKYEYTLV

SEQ ID NO: 130931 - protein, 347 aa, unidentified
MLIIGCDFHPGFQQVAIFDNRTGEIEEKRLAHREEAEAFYRSLAGEEVRVGMEACGHYPWFERLLAELGCELQLGDAAKIRASEVRKQKTDRRDAAHLLDLLLSGKFPRIWVPSLEERDVRQLLVHRHKQVQARTRTKNQLQAMALSHGVQKKWKLWTAAGRTELEQLPLLPYAAQRRKQLLAALDQLEVEIAELNRRVEQEARERPGVSRLMTHPGVGPVTALAMVLTLGEATRFHTGKQVASYFGLIPSEWSSGGRQKLGHISKQGSSFLRFLLVEAGQAAARGDAGLGRFYRRLSVRKHRALAKVAVARKLAVRLYLMLREDWTYAQLCQAVVQASPSHSVAGK

SEQ ID NO: 130932 - protein, 344 aa, unidentified
MKHNILKDTVAVLGIDLAKSSFHLHGVDKHGNVILTKKLTRSKLCAFVAQLPASLIGIEACGGANYWKRTFERYGHTVKMMSPQFVKPYVKSNKNDAIDAEAICEAVQRPNMRFVPSKTIAQQDIQSLHRIRSQLVARRTAQANQIRGLLMEYGIIMPKGISYVRKEIPGILENANNELTVLFRTLLKDLYDEMVHLDERVEKLEDNLKIVCRENTDCQRLLTIPGIALLSATALIAAIGDIHVFKNGRELAAWLGLVPRQHSTGGKPTLLGISKRGDTYLRTLLIHGGRAIVRVAEKYQDNRSQWIGKLEQRRGNNIATVAVANKNARIAWALLTNQTNFQAV

SEQ ID NO: 130933 - protein, 310 aa, unidentified
MDMIEQNYVGCDISKQWLDFFDEASSRHQRIDNRADAIAAYVAGLHPGRDFVVMEATGVHDRLLRHALAKAGVAFSRHNPVHTHHYVKSMRRRAKTDRLDARMLSGYGRRYRPAAEPAPREEGERLQSLASHRDHLVEMRAELKKHRHEAFEETVVADLEDMIAAFDTRIAALESRIATVIAQAEDMARDHALMVSVPGVSKITALCLLAQMPELGQRSPKSIAALAGLAPFDDKSGKLIRRSRIHGGRSRVRRALYMAALGAIRACRRFTDFYTALAARAGSKKLAIIAVARKLIVVLNAVIRDKKAFA

SEQ ID NO: 130934 - protein, 508 aa, unidentified
MPRMIIAVDPHKASVTIEVVDQHGMLAATGRFPTARGGYQALMKYVKQWPTRTWAVVGAGGVGRPLALRLVRDGERVLDVPAKLAARVRVFDTGQGRKTDATDAHSIAAVAVHARGLRELALEDTDLEVMRLLVDRRDEVAHLRVQIVNRLHRLLTELIPGGAAKRDLSALQARRILAGIRPRDPAGATRRRLAMDLVADLDAVDAKLKTLKAELRIAVRQYGSRLMDLHGIGPAGAARLLVDVTTITRFPSKGHFASWNGTAPLDASSGEQVRHRLSRAGNRRINHVLHIMAIVQLRNDTLGRAYYRRLLARGKTSMEALRCLKRRLSDAVYRQMLADQLAALTPQPGAGPGGHTGATTDSSADDLATPTAASSDKSLPGPATNHATPEEQLTDPHDNQDVDGLQDELAGPVETIDLPAVALLRRALAGAGPGLPLKSPARARRGSAVQGGPKGRPAGTRSALDGGGASPYQRGAGDPRAADQEQSGGEAATEDLQSGPTNEAPITH

SEQ ID NO: 130935 - protein, 423 aa, unidentified
MWQGPGCQGAPLVPLNPSTLASEVFAGIDWGGSFHQVCLINAHGDVIVQQRVQHDLAGLAELDRLLLVHRNAASRLRVAIERADGLLVEHLHTIEVEVFCVSPKISARARERYRLAAAKSDAFDAFVLADTLRHEHRHWRALSPASPALAELRAISRDRDRVVIAQQATENRLRAVLEAYHPAPLHLFSSLDRDITLDFVTDYPTPEQAARVGEARMQQFCRRHGYSGRTDPTVLVERLRPHLLSAAKGTEAGKAFSATMFTEELRLLNAHLRAYDKRLVELLDQHPDAPIFTSFPGIGPVVAAALISEMGEDRGRFPAPEALLAEAGLSPVTRASGRTRQVRFRYAANRRMRHMIDWWAFVAAREDAWSRRIYDDARARRQGKYRALRGLGSRWTRILWRCWTDHTTYDPAIHHKQQEPAQA

SEQ ID NO: 130936 - protein, 438 aa, unidentified
MSNKVIFNLDELFISVGIDVGADFSWMSIALPNQQFVGKPFKILHNSIDSLTTAVSKIKEAEELYSLESRIFLESTGIYHYPLFCYLRDKGFNCSVINPIITKNSTNINIRKVHNDRFDSKKAALVGLKPDLKVSLMPSDLALNCRNLCREYYDLMDNRSAYVNKLQGELRMAFPQYLGIFSKVTINTSLTLLETYTSPSAFLEADKQEIIDIIKSTARFGLTYAQNKYNAIIQAATDANQFGYIIDSNIKRIRLYISFIRKYDEEINNILESLHELIDANKDADFVKQIHLIETFKGAGFLSAVSIMGEIGDFSAFSKPKQLFAYFGLDPAVKQSGKFEGTKVQMSKRGSAIARRVIHTLTLQSISISRNGEAKNPVLREYYLQKCDSKPKLVAMGAVSHKVCNMIFAILRDNKPFEIITPQEHIKQYNAAKCDIAA

SEQ ID NO: 130937 - protein, 359 aa, unidentified
MVMLAEHYDFVIGGDPDRDTVDLAILETGTGRVRDQTADRTDGPAYARLLAWARQRAAGRRVWALEGTGSFAAGFVTMLAEAGEDIVEIPGQKRSRRAKNDRIDAVQAARTALAQTEQAAPRERGLREALRQVLVTRQGVLVSRTKAINELKSLIVVAPDHLRAGLRGLALIKQLDRIDHLTSPAGATIEHRVTVSTLRSIAARIRFLIAQTAELDAELQVLVPHHPAGPTLLAEPGVGPVVAAQLLVSWSHRGRVRSEAAFAALAGVAPLEASSGQHTRHRLSRAGDRDLNRALHTVAITRLRCHDESRAYETKRAAQGKTHRDVRRSLKRALARRLYRRIQAATRPAAAFNGLAHAA

SEQ ID NO: 130938 - protein, 330 aa, unidentified
MKNWDFTLGVDVSKNTLDVCCAEIKEHIQIKNRSEGFLQFKKWCKHFDIKLQRSFLVMEYTGGYEYKLIQFCEANNILYTRIPGLAIKNSLGIARGKNDKVDAARIAQYGEEKHKLLNADKPLNAAIVKLKELLNFRKRMVRENAGYKSSIKERRHMYGDNKKDIIVKMLEQKQKENVKKIAAVELALLKILTADEKMRTNYTLLTSIKGIGKINALMTIAYTENFVSFTNLRSYAVYVGVIPFDHSSGTSIRGRKGVSHIANKELKQELNQAARSAMEWDKEMKLYGQNKMKTKCYKIVLNNIKFKLILRMFAVVKKGEMYVGNRQNAA

SEQ ID NO: 130939 - protein, 376 aa, unidentified
MKKNITVKNQKKTTAKTKGKRRTATQQRLTVGIDLGDRTSRYCILDEVGEIASEGAVATTASGWNSIFGKMPASRIALEVGTHSPWVSRHLTAQGHEVIVANPHKVKLITQSVRKNDRIDARQLARLARVDPKLLSPIRHRSAQAQADLGVIRARAELVEARTALINSVRGLVKPLGERLKACDADQVSEELGESLSETARSIVGGLLNSVEAISEQIREYDRQIEAMAERYPVVKDLLKQVYGVGTLIGLTYVLTIEDPGRFQRSREVGPYLGLQPRQRESGERRPELGISKAGDRLLRSYLVQAAHCNLRKGAPDSDLRAWGIGKVGEGGSAKTKRRVVVAMARKLAVLLHRLWVSGEVYDPLYQRKAAAAKAA

SEQ ID NO: 130940 - protein, 345 aa, unidentified
MTEAYDGRQVVGMDLHRRRSVLVRMTGDGRKLETVRITNSPAELRKVIARAGENPRVVVEATYGWYWAADVLAAAGAEVHLAHPLGVKAFSYRRVKNDERDCADLADLLRMGRLPEAWIAPAEVRALREVTRYRHKLVQQRTSCKDQVHAVLAKLGIPVTRSDCFGPGGGIWLDGLRLPQPYAGKVASLRALIAVLDGEIARLGQQAGDMLAGDPGYAAIRQLPGIGPVLGAVIVAEIGDVSRSGKPGQLCSWAGLTPRHYESDTRVIRGHVSRQGSRILRWALVEAIQHQPAGTRPRDVKDAIIARRGAGARDIAKTAAARQLLTLVFYGLRDGHIRRAISPAA

SEQ ID NO: 130941 - protein, 418 aa, unidentified
MKIVFPTCCGVDVHKSFLVATIIKTPQNSLQQSYQKKRFSTFNSDLNRFADWLRENDCLDVCMESTGKYWVPVFNILEKQGIRVVIANPKWVKAVKGNKDDTKDSKWIGDLFRIGLVKSSFIPNKEIRILRELTRYRYKLISMKSSEKNRFQNAFTVCNVALDSVVSDMFGKSATAITDYLTSDVEFDAQHCISLLQRSLKKKAPAVLEAVEGHEIAPEQKTRIGIVRDHLHYIDKLVERVDDCVEGMVQKYEGAITLLRTIPGVDRSSAITILSEIGIDMAHFGSSKRLCCWAGLTPGNNESAGKKKSVRISRAGVYLKPALVQAAHAAVKDKSSTYYAVKYERISKRRGKKRAIIAIARMILTAVFCMLSTGEVWNPVDLYKVDMPEHLKEKQLAKAVKQAVHFLETQGLTVLDSA

SEQ ID NO: 130942 - protein, 358 aa, unidentified
MRAVFGIDVSKASSEVAILVNGEKVHGYTISNDAIGFSWLLDELRTVHKPEIIFEATGVYSRRLQTFLEDNGYAYTRLNPLEAKKQLDSLRVRKTDQIDAEKLAQSQFVLNRKPTYVQEEVYQNLRDLSRFYQNLTEDIVRAKNRLHKVLQVTFPELENILSTPSGEQYWNLVIAFPCKDFVLDLSKDELSESIRQSTSKRISDKRVAYLAEKMVELAQPLPEYDILLSIPGIAETTATSIIGELGDIRRFQSANQINAFIGIDLRHYESGNFIAKEHITKRGNPYARKILFKCIHNIASASHTNPCHIADFYKKRKRQSQTTSTKPHTIASIHRLIRTMYYLIMHNKLYDYASTQNR

SEQ ID NO: 130943 - protein, 349 aa, unidentified
MEYIGVDHHKRFSYLTLMDEKGQVLKEGRIGNSQKSLQHFLGKAEVGRKAVLEAGRNWTIMHDWLESEVEEVKLAHPLKVKAIADAKIKTDKIDAKTLAHLLRCDLVPCAYVPDKKTRIVKNILRQRMFLVKLSTMVKNRIHIIIDRHPELKDEKGTIDLFSKQGLEWLKKATLPKEDKRILNEELDLLDYINKKLDSSNYWITQLGKEDKRVRLLMTIPGIGKFFALLIANEIGNIRRFKHKSKLASYCGLVPSVHASADKVFYGRIIRSANKYLRWAFIEAVWPAIRKDLSLRLYYESLKKRKGANQAKVAVARRLSVIVYRVLSQNRPFEIKTSGCPHNTLAEATC

SEQ ID NO: 130944 - protein, 411 aa, unidentified
MRLFVGDDWAEGHHDVEVMDEAGRVLAKGRLLEGVAGMARLHELIGRHLPDDGVDAEVVVGIETDRGPWVAALVAAGYAVFPVNPLQASRYRERHSVSGAKSDGGDAHMLADMVRTDSHQLRPAAGDTLHAGAVKVVARTHKTLIWERTRQVQRLRHQLREYFPAALVAFEDLDARDTLELLGRAPDPARAARLTRAQVSAALKRARRRDIAGKTDAILAALRGEHLGQPAALTAAYAATARSLIAVIATLNEQVKVLEEQVREHFGQHPDAEIYQSQPGMAAILGARVLAEFGDDQYRYVSAKARKNYAATSPITRASGKKKVVAARFVHNDRLIDALMSWAFASLSASPGARAHYDDLRARGIDHNDALRRLANRLVGILHGCLKTRTRYDEATAWGHRENPPKSSRAA

SEQ ID NO: 130945 - protein, 352 aa, unidentified
MKGDWLLDYCGLDVAGVSSYLYVTNEKGRKLTCGAVDTTKEAIERRLKPFVRGGLWVAIEAGNQTAWIYEVLVGMGAKVTVVNPAKVKAIAESRRKTDKIDARILCELLRLDALPHPVHMPGRETRALRGLLVARRQLVSARTKLSNVVRGMLRQEGTRLPAGALSSFAGWRRLLAQGYEQAHLPVVLATFFDSFVSLTDSIRDLEKHLAESERKDGRVARLKTMPKVGRIAALTFVAAVDDVHRFPSSRKLVGYSGLAPTVRSSGERTEYGSISREGRRELRAVWVQIAHLVAMDTSRATQPLRTWFNRVARKRGKKMALVALARRLLVIAYRLLKDETVYDAARLRRKAA

SEQ ID NO: 130946 - protein, 337 aa, unidentified
MYYTGIDLHKFTSYLTTVDALGNIVKQADIKNVNHNFVQYFSDLGDENLTTVESTMTWYWLNDLLSSLNIPLVLAHAKYVKAIAYAKVKTDKVDSHILAQLLRMDYIPVAHKISNDNRLLRDALRARLKIVQRHTSVTNSMHLLLAKYNLDSPNQLDSIPKFQFEQLSEVESLLQEQMLDLEKQLYPFLIPNDDIQRLLWIPGIGKMNAFTMLEVDDITRFTDVKHFFSYCRLVPSARNSAGKSKQRTSKDGNKYLKIAFSDAAIHAVQYYSEIRKYHNALTRKKNKQIAKTIIAKELANIVYHVLKNKTQFNNTFKGHILQHQKSLQWPRVVSPDT

SEQ ID NO: 130947 - protein, 353 aa, unidentified
MRGIFEGGCDYHPGFQQIAFVSTDTGKVGERRLEHTEEAEQFYREVGKHGEVVRVGMEASGHARWFERLLHNLQFELWIGDAAEIRTKRVRRQKTDRQDAQLILQLMLENRFPRIWVPDAENRDLRQLLWHRHRLVQMRTRVMNQLHVVALNEGLRRKKALWRPEGRAELQALSLAPWAGRRRQDLLDLLDRLTPKIHELNGKLEQIVERRPVTRQLSTHPGVGPLTALAFELVIGTPERFACAKQIASYVGLAPSEESSGDRRRLGHISKQGNVLLRFLLVEAAQVTVRSDAQWRSQFFHLAMRRGRKIAKVAMARKLAVELYWMWRRGWDYRQMQQLGSHAGEPGNPHGVQ

SEQ ID NO: 130948 - protein, 341 aa, unidentified
MKKFIRTAIDLGKTYFQVHGLESEGGQSISRKMKRSKMREFYEQIEPCRVGMEACGSGHYWARELVAMGHEVMLIPPAYIKPYIKRGKNDAVDAAAICEAMSRPGMRFVPIKSADQQAVLMLHKTREMFVKQRTMSVNALRGHLAEFGIIVAKGIGRVDELLALAQSDAELPQIAKSAVAGLAQHLEGLDQSIEAVDDEIARAHQKNPTSRLLDEIPGIGVLIASVIASSVPDPSVFKTGRDFAAWLGLTPRQNSSGGKEKLGSITKQGNRYIRKMLVVGATSVMRVAGKRKGALADWINALQAKKPKRVAAVALANKLARICWAIMTTGEGFRVDTYVKA

SEQ ID NO: 130949 - protein, 408 aa, unidentified
MQVEHPVCCGIDVHKDTLTACLRRVDANGQVSKEGREFATTYTSLLALSDWLVEQHCPVVAMESTGVYWKPVYHVLAGTVEVFIGNAHELRSRPGQKTDKRDAAWIAELLAHGLIRPSFVPPPDICALRDVTRTRVALVQTRSQSKNRVHKLLEDTNLKLGSVVSDLFGVTGRRMLAALVAGERDPQVLASLALGSLKRKRPQLALALTGQFTAHHGTLLGLLLELIEMLDRQIATLDQQIGALVAPLQAQIAQLDSIPGVDIIAARDILAEIGTDMSRFGDAARLASWAGVCPGNHESAGKRYHGKTRKGNRYLRRVLVQCAWGARKTPTFLGRTFRRLEVRIGKKKAALAIAHKILVIVYHLLAAGTSYEETRYDQWNPRQEARERQRALKALERLGYTVTIERAA

SEQ ID NO: 130950 - protein, 429 aa, unidentified
MKILALDLGKFNTMCCFFNTETRKAEFLTAATDRHYLSTIFKKCQVDLVVMEACGPSGWINDLAVSHGLKTLVCSTNEDAWKWSNVKRKTDKDDALKLARMAAMNELQAVHMPSQAHRQFRSLVKYRKTLDYRINKMKNTIRAWFVNHGISIDKGDKAWHTGRTHINSFRKPLDQCGPTELWKAELDIELTQLDVLSAQLERVIKKLETIGKDDPRIQRIRSIPGVGPRTAEILVACIDDPHRFRNGRQVSAYFGLVPRQYQSGQTDRNGRITKRGNPLARTILVECAWASLRYNPWAKGVYERISGQQKTRKKKAAVALARKIAVIAWAMLRDEKDWDSKRMIEVSESFGCMPTSLKESLSEMKPKENSVQRRSRRRREARETQAAKQAPATSSQPSPTEPASKNVKRKSIPTSKTKPRQARKPVSAG

SEQ ID NO: 130951 - protein, 359 aa, unidentified
MLFVGIDVAKAKHDCCIIDSNGVIITDSLRIPNSKEGFEILYNTILSSLGSNDLSDIKIGLESTGHYSTNITNFLYSKGFHIVMLNPLVTNAFRKAGTLRKTKTDKCDAKVIATMLFSDDSKSYSPSSYQIQELKSLTRHRYRMIGYRSKLKLSVTRLIDIIFPELPSFVWSIHQNSSYQLLLELPSPEDIKKCHLTHLTHILAKTSRGKYGREKALQLRELDKQIKLVVDELNTPLLTIPGIGYTIAAIILAEIGDINNFSSPAKLLAFAGMEPSTYQSGKYNASHTPMVKRGSTYLRWAVMQAARLVPMRDPTFSSYMCKKRSEGKHFNVAKSHVGKKLIRVIYYLLKHNTAFVPQM

SEQ ID NO: 130952 - protein, 451 aa, unidentified
MDPGFLEHIRLSPRAIIGPGARFLEFLFVGPHAYDAIQEEEMELLHRRCCGLDVHKETVVACLRLVSDGKVTTEVRTFQTTTVDLLRLSEWLAANDCTHVAMEATGVYWKPVWHILDDGEFELVLANAAHVKNVPGRKTDVNDAMWLAELLAHGLIRASFVPDTQTQEMRNLLRTRKQLVREQSSHVLRVQKTLEDANIKLDSVLTDLMGKSGRAMIEALIAGETNPAKLASLADRRAKASHEEFREALRGRVTKHHRFLLRLHLNQIDALDAAMATVDAQVEANLGPFRTAVELLISIPGIKNLGAHVIVSEIGIDMSRFPSHAHLISWAGICPRNDESAGKRRSNRLRKGAPWLKTTLVQCAWAAVKKKNSYLQAQFYRIKARRGPKKAIMAVAASILTAIYHMLKDGTMYKDLGCNHFDRRSTDKQKQRLVKRLAELGYVVEIKPIAA

SEQ ID NO: 130953 - protein, 296 aa, unidentified
MLIIGCDFHPRYQQIAMMDTETGELVERRLEHENGEARAFYASLPKPVLVGMEAPGYAQWFERMLAEFGHELWIGHASEIRAGVVRKQKTDARDAQHLLRLLLEKRFPRIWIPSPAERDARQLLRHRYKLVCFRVSVKNQLHGLAMSQGVCRKKKLFTAQGREELEKLSLGPWGSCRRQELLGMLDQLNPVIDELDRAVRQEAESRADAARLMIHPGVGPVTALAFVLTLGPVARFRRSKQVVSYLGLNPKERSSGDKQHTYAISKQGRRNAVELARGRAVNFSESRREPHKFGQR

SEQ ID NO: 130954 - protein, 340 aa, unidentified
MGEVTTIGLDLAKHVFQVHGVDAEGATVLRKQLRRAQLLAFFSRLPPCLVGLEACATAHYWGRELRALGHEVRLMPAQYVKAYIKRNKHDAADAEAICEAVGRPTMRFVPVKTADQQAAVLLHRGRERLVRQRTGLVNALRGHLAEFGVIAPQGLRNVGKLIAIVRDEGDARLPDLARQVLQVLAAQIEQLEASVAAIEKQLMAWHKSNPVSQRLASVPGIGPIIATALAATVVEPSGFRSGREFAAWLGLVPRQHSTGGKHRLGGISKRGNQYLRRLLINGASANLLRSKATNADPWVIGLRRRRPPLVVAVALANKTARIAWAVMNRHENYQRVAAAA

SEQ ID NO: 130955 - protein, 340 aa, unidentified
MAMMHYVGLDVHRNRTSMEVLDGNGKSLLRKEVVGDWAKVITEVEALPRPLAVCYEASCGYGYLHGRLSKVSDRVEVAHPGHLRLIFRSKKKNDRVDAAKLAKLLYLDEVPQVYVPGLDVRQWRGLIEFRRRMLDKRTAAKNQLRAILRSNNVRPSKGLWTKKGQAWLAALKEDALPSMQLLQRDLLVEELEGLAKKVARVEAELAKIAASHPAVTVLMTIPGVGIRTAEAFVAYVADAARFRRSLRAGTYFGLVPCQDASGGKERLGHITREGPPTVRKLLCEAARQAVRRSPKVKKWFERISGGEAGQRKIALVAVARKLAVVMLAMMKSGEVWREAD

SEQ ID NO: 130956 - protein, 431 aa, unidentified
MKVIYSIACGIDVHKSFIVAVICDSTTLTPTYTKKRFSTFYKDLTKFRDWLLEHDCHNVCMESTGKYWIPVFNILEGYISNVVLTNPKWVKAVKGKKDDNKDAKWICDLFKLGLVQGSFIPEKQIRILRELTRNLFKVTNMRSSEKNRFQNALTVGNCNIDQVFSDVFGKSASAIINLILADKPFTLQDISASLHGRCKATAEEVSDAITGFSLEHVQKQRISLIQAHMEYLDSMIYHFQSLIDSIVSPYEPFITLLSSIPGVKRLSAITIISEIGIDMSPFGSHHRLASWAGLTPGSNESAGKKKSVKISRAGVYLKPCLLQVAHAAVKDNKNPYYANKFNKIAKRRGKKRAYIAIARKILVAIYHMIDTGEFFNPRDLADTETTIKKRIQYTKNNLRNDINSLLNSGLSQEDLSILINSILPDNTQFST

SEQ ID NO: 130957 - protein, 312 aa, unidentified
MKNICGVDISKARLDACIEPGSIRGSFANDPAGIAGLAAFCRQHRVELVAMEATGGYERRAFLLLWEQGLPCTVTNARQVRLYAEAMGVLEKTDTIDAHIIARFAQAKNLKPTPLPSSSQKRLKALVARLRQLTDDLTVQKQRRSSLFDDAEMLASIDEVIALLKRQSRTLEGEIGSMIDDDSLWACLSDTFRSIKGVADRTVAWIMADLPEIGTYSNKAIAKLVGVAPIANDSGKRRGKRPIRGGRASVRSILFLVAAIAARYDKSLGEFRARLVAAGKEKMVIRIALARKLLVRLNAKARDARAQYANAT

SEQ ID NO: 130958 - protein, 403 aa, unidentified
MSNRFAGLDWASRTHAACVIDEHGGVHLQFEVNHDRAGLAELCRRLRGAGATAVAIERPSGLIVDALLQAGFTVVPIHPNVVKATRPRYRSHGGKSDASDAYLLADLLRTDGHRFKPLAPQSDDIRALRALVRGRDDLVATRVQLANQLRSLLESFWPGAAEVFADVDSPIGLAFILRYPTPESAARLGPKRMAAFCAQHAYSGRRSADELLARLHQAPAVTLGELEMESKGELALGLARTLDRLVDQIRLLTSRIEHHVGSIEDGRILMSFPRAGRVCAAQILSELGSVRERFDSDEHLAAEAGVAPVTYASGKSKAVTFRWACNHRLRAALTCMADNSRHANAWAASVYAKARARGCDHPHAIRILSRAWLRVIWRAWTDRKPYDPALHGGAQLLLKTAEG

SEQ ID NO: 130959 - protein, 343 aa, unidentified
MHTVTTIGLDIAKSVFQVHGIDATGQVVIRRQLKRRFVLSFFEKLPPCLVGIEACASSHHWSRELQALGHAVRLMPPAYVKPYVKRQKNDTTDAEAICEAVTRPNMRFVPTKTVEQQSCLMLHRARHLFIRQQTAVINSIRAYLAEFGIVAPVGRRGVEHLLEVVADANDRRLPEVARMCLAALGGQLRALKAQILEFDRRIMAWHRSNATSKRLDAIPGVGPALATALVASIADPKAFRSGRDFSAWVGLVPKQNSSGGKDKLGSISKQGDRYLRSLFTAGALAVIRYAKIHGTRHRPWLTALLARRPTKIAAIALANKLARMAWAMMARNERYKEPAALTA

SEQ ID NO: 130960 - protein, 416 aa, unidentified
MSELKGWFVGVDWASENHRVRITDCYGKRLGERDFAHGGAGLAEMATWLMSIAGAEASAIHVAIEVPHGPIVETLLERGFNVYAINPKQLDRFRDRFSPAGAKDDSRDAEVLADALRTDMRAFRKLALAEPLLVELREWSRMTDDLNAERNRLCNRLREQLWRYFPAMLELEQDLGAEWFLDLWELVPTPDKAMRIRETSIARILKNRRIRRLAAAEVLAVLRKPAVTVAPGTIEAASAHIRVVAERLRVVNRQLKDAHRQLDRLCGLLAEPTQSEPGQVNEQRDAAILASLPGNGRIVLATLLAEGWEPLQRRDYHALRTLCGAAPVTKRSGKSCIVTRRLACNPRLRNALYHWARVAVQHEARSHAKYAALRQRGHSHARALRSVGDRLLNVACAMLRSGTQFNPPLESQKSAC

SEQ ID NO: 130961 - protein, 403 aa, unidentified
MNAAGIDVSKGKSMVSVMRPLGEVVAKPFTVCHTGSELKELADYLKSLDGETRVIMEHTGRYYEPVAQFLHDAGLYVSAVNPKLIKDYGNNSLRKVKTDKADSKKIAKYGLDNWGELRQYASMDIIRYQLKTLNRQHALYSKMKTAMKNNLIALLDQTYPGVNALFDSPAREDGTQKWVDFAASFWHADCVRGMSQTAFTERYRKWCKRNRYNFSSDKAAEIYTGAKDQIAMMPKGDLTKRLIRQAIDSLNTVSRTVEQLKAEMLKLASQLPEFPVVMEMHSVGDSLGPQLMAEIGDVTRFAHRGSITAFAGVDPGANQSSEREAKSVRTSKSGPPELRRTLFLVMDGLLKSMPQDDPVYQFMDKKRAEGKPYLVYMTAGANKFLRIYYGRVKEYLASLETAD

SEQ ID NO: 130962 - protein, 363 aa, unidentified
MSKQGAVLATKKSARRVLVGATIVGVDLGDQWSHYCILDEDGEITEEGRFRTSESGVAKRFEDMDHARVAMEAGTHSIWISEQLKEYGHEVIVANVTELHAISRNDSKSDRTDAEKLARYARLDPRILRPITHRTVEQQQALTMIRARDVLVRPRTAVVNAARGLAKPCGYRLPASSTRSFPARCAGLLPEGLAAALEPLFAQIAHMNAQIKLYDRAILKLATVTYPETQALTQVHGVGPLTAVTYVLTLGSKERFERSRDVGCYLGLRPKRSQSGDRDPQLRITKAGNEYLRRLLTECANFILGRFGKDSSLRRWGLHLAERGGRNARKKAIVAVARKLAVLLHRLWVTDQPYVPLHEAQAA

SEQ ID NO: 130963 - protein, 334 aa, unidentified
MLYAGIDIHKAVFQVVVLDPDSGELCESRFEPSRARLGDWAMEWQGKLAAVAIEATTGWRWVARELEQHGFEVHLVDPGRASALRGRRRQPKTDRLDARWLALLLARELLSECEAWLPPAEIQRLRDRTRLRKALAGERTGWAQRLHALLAHEGWPCARGRLLTREGSRWVAALELDAHVRGQVDVIVAVMAALEEQLELVERDLRRFARADQRCQALQTIFGVGPILACHLLAEIGDVRRFQRPRQLVRASGLDPAVIESADSKRRGRLAKQGSRQLRWALVEAANHSHRRSSPDHALYSSTVRRCGRGRARLTVARKLARRSYHVLLAAEAA

SEQ ID NO: 130964 - protein, 362 aa, unidentified
MKKTIRERESEWKEKPDRTVGVDLGDRFSHYCVLNGDGEVMEEGRMRTSEEAFRRHWEAEPRQRIVMETGTHSPWISRLLRGFGHQVIVANARKVRAISENESKNDRQDAEMLARLGYCNPRLLKPIQHRSAERQRDLNLIRTRDTLVRARTMLINSMRGLVKSAGGRLPPASSESFAVRVSAAVPAELGTATQPLLRQIAGLTAEIRDLDQVIEKLTERYPEIRILRTVPGVGPVIAAAYVLTLDGVDAVEHSRSVGAFLGLRPKQSQSGDSDPEHNISKTGNIYLRRLLVQAAQYILGRYGPDSALRRWGLKLAQGGKRTKKRAVVAVARKLAVLLHHLWRTGQNYRPFPEAAVAAGSAA

SEQ ID NO: 130965 - protein, 353 aa, unidentified
MKTYYVGMDVHRASIVMVVLNGAGKVVMQSVIETGAERVRGFLKQLRGKVYVTFEEGTQANWLHEVVRPLVTEVVVCDPRHNKLMQSGNKSDRVDAQKLAELLRLGSLKAVYHGDNGVRTLKELVRSYDCLVSDTTRVMNRLKAIYRGRAIGCAGHDIYRQDRREQWLEKLREGGAKQRASFLYQQLAALKPLRHEAKRMMVKEARRQRAYPWLMSVPQFGSVSVAQLLAIVSTPHRFRSKRQFWTYIGLAVVTRTTADHEVVNGVLRRSKRPVATRGLNRNHNHALKRVFKNAANGACHGGPFKAAYELRVRQGMVPSLARLTVARQLAAITLAMWKRGEPFNPERMKQQAA

SEQ ID NO: 130966 - protein, 352 aa, unidentified
MEYIGMDFHKQYTIATRIRENGSKDCQRLANTPASFATYFAGSRSATSVVFESGRNWPMLYELLEKEADHVTMAHPMKVKAIASARIKTDKIDSRILAELLSADLIPEAHLRDESVRTELKVLRQRAFLTKQRTMTRNRIHVLLDEQPYEIRKSRPEGKRLWSKAGMSWLTHVQLPNSAQHELLQAMLRLDTDIRREIDASNQQINELFEKNTDAHLLQTIPGFGKFGALLVSNEIDEIGRFASAKKLAAYAGIVPSTYASGGKCYHGKITKTGSKWLRWILLEAVQPAVRANSEIAAYYESHKQRLGSKKARVATARYLLTIAYYCLRDQREFLPVKPRHSASPSYLPSGT

SEQ ID NO: 130967 - protein, 368 aa, unidentified
MGEPITYVGIDAHARELHLAMLLGGASQATLWTAPNEPRAIERLRRRLERDAPGPIECCYEAGPTGYALQRRLTTARIHCRVIAPGLIPEKPSDRIKTDRRDARKLAQLLRADLLTEIQPPSEDAEAVRDLVRARDDARVDLMRSRHRLSKLLLRRGHRYPREPWTAAHRQWMRQLEWPHAAERHVIRDYELAIAQLEVRLSELERAMADIGSTAPYQKAVAALRCFRGIDTVTAVTLLAELYDIRRFAHPRALMSFVGLVPSEASTGERQKRGGLTRTGNSLVRRMLIQTAWQYHHPPRLGRALRLRRAQQPAAVLAIATQAEQRLCRRYQRLCARQKPKPLVVAAVARELVGFIWAVLHLSEAQMV

SEQ ID NO: 130968 - protein, 413 aa, unidentified
MERIIERCAGLDVHKSSVTACVRVPDESEGLHQEIREFATTTRGLLVLRDWLASFEVKLVGMEATGVYWKPIYYMLEDDFELWLLNARHLKSVPGRKTDVKDAEWICQLVEHGLVRPSFVPPKEIRELRNLTRYRKAQIEERTREVQRLEKVLQDAGIKLSSVATRVLGASGRAMLDALVGGTTDPEVLAELARGRLRSKLPALRDALEGSFSSHHALMVGKIVAHVDYLDESIGDLSVEIERVIAPFSDEVELLDTIPGVNRRTAETLIAEIGVDMSQFPTHRHLASWAGMCPGNEESAGKRRSGKTRKGSKWLRSALTESARAAARSKGTYLASHYARLRGRRGSKKAAVAVGHSILVICYHVLERSVPYEELGEDYLDRRRSSEAYAKQLVRKLERLGHKVELERLPQSA

SEQ ID NO: 130969 - protein, 332 aa, unidentified
MKFIYFIGCDVSKNELDFAVYNGNKFVLHRKIKNDTKSINNFFIELQKLPDFELSNTIVCMEHTGIYNNPLLEYLHKIDGNICLESALQIKNSQGSVRGKNDKIDSIRIAQYAYTFRDKIQLWKPKREVIQRLARYTSDRDRLISVKKMILVPLKECVNFVIDKIQNESESFFEATLKSIEEDLLKIEKAIQDVIKSDEELCRLFGLITSVQGIGSVTAIGIIITTNEFKDINDPRKYACYAGVAPFVRESGIFRGKGRVSKMANMNMKSLFHMASLVAVRFSDDLKKYYARKTQDEKKNKMSVLNAVRNKLIHRVFACVNQNRKYDKNYTA

SEQ ID NO: 130970 - protein, 353 aa, unidentified
MPKYSNTLPEGEPVFVGLDLHNLRWHVTIRTSDVELSSAAIPGDWTSLRRLLDRYAGHPIKVVYEAGYFGFWLHDLLTDYGTDCVVTPPSLIPREAGNRVKTDRRDSRKLALLLAKSLLKRVWVPSARERAERQVARRRRQLIRDRVRTQSRIKAELRFYGLRLPEHRGAWTRRFVEGLRRLGCESPWLQASLESLLAQYEFFSSQAAHLTRLLRQLSETEAYRERAALLRSIPGVGLVAAMELLLELQDVGRFRRADELAAYVGLTPSQYSSAEKLRLGRITKAGRGSLRATLVEAAWHLVGRDPAARQQYERLKARAGAKRAIIAVARKLLLCTRRMLLNHESYVSGFARS

SEQ ID NO: 130971 - protein, 355 aa, unidentified
MTSAKYIGLDVHQATTAAAVLDANGKLLMESILETHASTLRDFLAGIRGELNLTFEEGVAAEWLYGVLKSDVDKIVVCDPRKNALLKAGNKNDRIDARKLAELLRGGQLKQVYHGNRGVRTLKELARSYVVLTRDVTRVLNRIKAVYRSMAIRCAGQRVYHPRYRQQWLEQLAVPGLRRRAERLYQQLDLLQPLRQQARRELLAESRKHAARQLLEQIPSIGPVRAALLMAILQTPHRFRTKRLLWAYSGLGLEIRTSSDHDFKNGQLRRRPKQISVRGLNRNHNPELKNLFKSTALSASLRPGAWQECYQRMLAKGIKPAMAQLTLARKIAAVVLTLWKKGENFDPDKLTMQAA

SEQ ID NO: 130972 - protein, 356 aa, unidentified
MSNITRVGVDLAKNLIQVHAVDATGKVVTNRALKREKFLVWCAALPAGCLVAMEACGGAHHWCRKLRESGLDARMIPAQFVAPYRIQGKSGKNDANDAAAVCEAASRPHMNFVPPKTLAQQGMLCVHRLREALKEDRTACINRIRGLLAEFGVVLPQTPAILRQHLNEVLEDASNDLAGMARLVLQRAQEHWRELEKHIQWCDERIAAHQKDDEQVQRAAELKGVGVITASAVVATVGDFKQFKNGAQFGAWLGLAPKQNSSGGKTSLGSITKRGSNYLRTLLIQGAKAVVLVGKHNDDPISQWLQRLRQRSGWQKAAVALANKNARILWAVMTGNKRYDSHHVSIPPAGAIPAVA

SEQ ID NO: 130973 - protein, 343 aa, unidentified
MQTITTIGLDIAKSVFQVHGVDVGGQVIVRRQLKRRYVLTFFQKLSPCLVGIEACGSAHHWSRELQALGHTVRLMPPTYVKPYVKRQKNDATDAEAICEAVTRATMRFVPTKTPEQQSGLVLHRTRHLFIRQQTSVINAIRAHLAEFGIVAPVGRRGVEELLNVVADPNDRRVPEIARACLSALGAQLRRMKEQILEFDRLIRAWHRSNEMSMRLEEAPGVGPVLATALVAAVADPKSFQSGRNFSAWIGMVPKQHSSGGKNRLGNISKQGDRYLRGLFVAGALSVIRYAKIHGTKHRPWLTALLARRPTKVAAIALANKIARMVWAMMARGERYKEPVALAR

SEQ ID NO: 130974 - protein, 367 aa, unidentified
MKNHSSFDQSVSSSDLSACTTLAVDLAKQVFQVAGENILGQLLYEQRIKSREAFYDFLRQLPPHVVVLMETGPGAQAWARQLQDQGNPVRILPAGLVATHRSGPKNDRNDALAILRANRDEKICAVPVKSVAALAMQALHRARQGYVRRRTALSNQMRGLLLEHGIALAQGDVAISQKIPRVLEDATQPVPGLLRELIDELLAEWRHLGERISVLTGRLEVAANADMTAKRLMTVRGIGPVTATALVAKETKPERFPNARKFAAYFGMVPDQHSSGETVRLGGMTKRGDAYLRSLMIQGAHAVLQQLRPDSQQPDDRRLLHWMSRLGRKEAAIRLANRNLRIVWVLLQNDQTYRRHAGDGQPATMGH

SEQ ID NO: 130975 - protein, 408 aa, unidentified
MEIIYPKCCGLDVHKRSVAACVRLLEADGRLDQETRTFGTMTRDLLEMADWLAAAGVTHVAMEATGVYWKPIYNLLEERFTLLLVNARHVKHVPGRKTDVKDCQWLAQLLQAGLLQPSFIPARPQREFRELTRHRSQLVAEKARVANRLQQVLEDANIKLASVATDILGASGRDMLRALISGETDATKMADLARRQLRSKIPQLRPALEGKVTEHHRFLLGQLLAHVEHLEGQIEVLSRRIEELSGPFAPAREAMVSLPGIEQRAAENVLAEIGSDMSVFPSEHHLSLWAGVCPGNNESAGKRKSGKTTKGNRWLRAALVQAAWAASRKKDSYFQAQYRRLAARRGKKRAILAVAHSLLTVIYHMLKNGSTYQELGGDYFDKLNKNRLLPYFVRRIKDLGFQVTLEAA

SEQ ID NO: 130976 - protein, 341 aa, unidentified
MSVLIGIDPHKRSHAAVAVDGAERVVGELGVRTSRRQVEQLLGWAARYPQRSWAIESAAGLGYLLAQQLVAAGEHVVDVPAMLAARVRVLGSTKSQKNDPNDARSVAIAALRAPGLRVVEAEDHVAVLRMLAKRHKQLAGLKTQAGCRLHAVLAALVPGGLGKEMVPRQAAALLRRVRPATLVEAERKRIAHELLGEVRRLEWDLVASKARLRVAVEAADTSPTDIYGVGGVVAGLIIGYTGNVARFPTRHHYAAYNGTAPIEASSGPTRRHRLNPRGNRMLNHALHLIAITQLRYPGTEGRVFYERKLAEGKTKKEAIRALKRRLSDVVYRHLEADQQPR

SEQ ID NO: 130977 - protein, 311 aa, unidentified
MTNKTYQFNIGVDIAKHKLDVSFSDQRVVSFENNQSAFKLLLKEIENKSQTRVVMEATGGYEKPLAHFLQDHGVAVSIINAKRVRDYAKALGLLAKNDVIDAKVIRMFADAVNPKLLPAANDTQQALDAQVHRREQLVKQRAMEKQHLETVGNKDAVRSIKRTITFLDKEIERIEKAIKALIKTDSTLTEKVDRLSAIKGIGDITALTLIADLPELGQLSNKEISALVGVAPFCRDSGTQKGKRTTWGGRIQVRSILYMAALSAVQYNPPLKAFYNRLLMKGKTKKVALVACMRKLLTVANPYLTHTINIH

SEQ ID NO: 130978 - protein, 342 aa, unidentified
MDKIEACGIEVSAQELVVAMSGKGPEAVLRRFANTAVGHRQLLHALTRGGKRVRACMEATGLYGLDVALLLSAHPGIELMVANPRAVRHFAKATMQRSKNDQLDAVMLRQFAMRMKFTAWTRPDESTLTLWAIARRLEALTKQCTAEKNRQHAAGVSQAMPACVRTSVARTLRWLQREIQKLRGLARQCIASNARLQRRYQLLRTVPGIGEISALQILAELALLPADRDVRQWVAYAGLDPREHSSGSSVKKHARISKVGNRHLRCALFMPALVASHCEPHLRGFYEHLVAEGKKKKQALTAVARKMLHAIFGMFRWDRPYDGNCVYPLPLSRLAIQAQKIA

SEQ ID NO: 130979 - protein, 312 aa, unidentified
MYHMKEELVYVGVDIAKAYLDAAIGNEKRRFANDALGHRQLINWIKQMPASVQVICEPSGGYERALVRALVAAQLKISLVPANRVRQFARAAGILAKTDRMDAKVLCAFGEAMQPGTISASQLEQEHLRELESQRRHLTHLLVMEQNRAVRMSDLWVCKLNRRLITQIKKQIEQVDLLIQQQIKASRELSSKAEKLTAISGVGARTAALLLAQMPELGQLNRREVAALVGVAPFNRDSGRMRGKRAIYGGRRSVRHGLYMAALVAARHNPILRAFYLRLRAAGKPAKVALTATMRKLLIVLNSSLKPDLTYA

SEQ ID NO: 130980 - protein, 293 aa, unidentified
MSITMIGLDTAKSVFQIHAVDETGKTEIRRRLSRNDLIPFFKKQELCTVVLEARGAAHHWARILTGPGHDVKLIAPEAVKPFVKKGQKNDAADAAALCAAASRPDMKFVPAKSLEQQGILALHSARSLLVKQQTMLANAMRGLATEFGLTVPKGISKLEELTVLVDADETFPAKARQAFTGLFDQCKALTESIVTFEAEIVAHARHDETARRLATIPGIGPITASLIAATVGDIGMFKSARHFAAWLGLVPRRHSTGGKTRPGRITRTGNREIRKLLVLGATSMVYHTSISGS

SEQ ID NO: 130981 - protein, 381 aa, unidentified
MPSMQLRRDDVIVGVDTHKDNHVAVAIDGFGGRLGDIVVPTTIAGFEELLAFCLAFVGSAGRLIGFGVEGTGSYGVGLARYLRNHGHDVHEIARPARAAERRLAGKNDTIDAEHAARQLLAGHGLSTPKTADGAVETIRLVKIAYDGAVQARTTAMITLKATLATGSEALRAELETLTDHKLILACAALEGPTPLPPVRRGAPAVVVPGDPDVAMRHVLSSMAKRWLALHEEAKAHAASLKALTAAAAPQLVEAVGVGYDTAAQMLITAGDNANRIKSEAAFAKMCGACPIPAGSGKTNSRHRLYRGGNRQANAALFRVVIVRMRWHQPTIDYVARRTAEGMSKREIIRCLKRYLARELFRLLPAPDAIAKPVNGELEIAA

SEQ ID NO: 130982 - protein, 340 aa, unidentified
MVHVGVDLDKHSSQIAVLSEDGEIVQHRLANDAARLEKFFADLPPHTPIAIEASGTWWWLVDLLEELGHQPVLSNPKQTKAIAAARLKNDRVDAERLALLLRGDLLPRVWIPPTALREARELIRHRIQLVWLRGVIRNRLQAMLARRNLQPTSGQSWLTQRGQRELQRLPLGETPSRIREDCGALLPTLDAQIRRLDADLVTRWGADPRVRRLTTIPGIGPFIAIVLVLELGDIERFASAKRVASYVGLTPRVRGSAGRVRAGHITKEGNRLLRWVLALAATQAVRRPGALRAWFHAVKKRRGKKVARVALARRLAEIVFHVWKQECDYFTVVRHGVVRG

SEQ ID NO: 130983 - protein, 403 aa, unidentified
MNSVGIDISKGRSTVAVMRPFGEVVISPFEVRHTDSELSELARQLKSLNGETRVVMEATGNYHAPVAKLLHDAGLYVSVVNAKLVHVYGNNDLRRVKTDRKDAVKLANYGLDRWLTLPRYVPEDDTRLLLKNCYRQYRQYSKVQTVLKNNLISLLDTVFPNVNRLFSSPIRGDGSEKWVDFVAEFWHCRCVSEKSQKAFTSKYQRWCRKHGYNFSEEKAHTIHAEASGYIGVMPKSETTKLLVEQAVAQLRATSAALTALKHEMLALAAQLPEYPVVMGMFGVGPTLGPQLIAEIGDVRRFYSKKALVAYAGLDAPPNDSGDVTGKHKSMSKIGASSLRRTLFLVMSVYLQNAPLDEPVYQFMDRKRAEGKPYRVYMMASANKFLRIYYATVKAYLESLEHTA

SEQ ID NO: 130984 - protein, 343 aa, unidentified
MQMITTIGLDIAKSVFQVHGVDAAGQVVVRRQLKRRYVLAFFQKSPPCPIGIEACASSHYWSRELRALGHTVRLMPPAYVKPYVKRQKNDATDAEAICEAVTRANMRFVPTKTPEQQSCLMLHRTRHLFIRQQTAVINAIRAHLAEFGIVAPVGRKGVTELLHVVADPSDGRVPEVARACLAALGTQLLGLKEQIVEFDRLIMAWYRSNETSKRLHYIPGVGPLLATALAASVADPQTFRSGRNFSAWIGLVPKQHSSGGKDRLGSISKQGDRYLRSLFVAGALSVIRYAKIHGTKHRPWLTALLARRPTKVAAIALANKLARMAWAMMARGERYRNPVALAA

SEQ ID NO: 130985 - protein, 345 aa, unidentified
MKCNLVSIDLAKSIFQICGFDDDRKVLFNKKVKRSNLIHELSKIDPTNIVMEACYSSNPWGRRIERLGHNVFLIPPFAVKPFVIGNKNDHNDTIAIGEAFFRPRIRFVAVKTVEQQDIQSLTRIKDLLIKHQTALSNQLRGLLAEYGLVMPKTRAALCHAIPYFLEDAENELSPVSRSFINRQYENLKHTIEQIEAVKHELHELVKDKADYQRLLTIPGVGPVIAATLMGTVPDPESFKNGRQLAAWLGLTPSQYSSGEVNRMGAITKRGNSTLRRLLIHGARSVLNWCDRKSDSLSCWLKRLKIRMPGNKAAVALANKLARIIWRVLAKKEVFNVRLACAGSSS

SEQ ID NO: 130986 - protein, 370 aa, unidentified
METEASNRLVDRIDLGTRDRGSAGSQDVFFKPEPSHELPRASSNLLGWDFMKSVTTNDKLYVGVDVSKATLDVYRPDTKEVFKIENSDEAIALLCSQLEKKKRSVMVVMEGTGGYEYLLVKHLASHKLDAAVINPRRIRDFAKGIGLDAKTDPIDAKVISRYAEVVAPQPMATKSDHELKHGALVARRNQLLELVNQENNRLKQSWDEDAQQSIRDVLEVLKKQLKSIDSQLAKMLAADSENQRTIEILKSVKGVGPVMISTILAELPEIGKLNRGEIAKLVGVAPINRDSGKKSGKRFIGGGRGQVRRVLYMATIVGIRHNPAIKAFYVHLKSQGKESKVAIVACMRKFITILNLLIKTDQLWENKMSV

SEQ ID NO: 130987 - protein, 342 aa, unidentified
MKDMMIGVDLAKNVFQVHGALRTGEVQFRKKLTRKQFHAFLARQDPCLVIFEACGSAHYWAREIEALGHEVKLIAPQYARPFVKRQKNDAADAEAIVIAARQPEMRFVQPKTIEQQSRAAVFRGRERLVHQRTADVNALRALLYEHGHVFPAGIRYLDRMTALAEEEASDLPVLIREECKDLLAQIAETTARIAERTAKLKALVARSDRARRLQTMPGVGPLTAVAVEAFGPDMAQFKTGRAFAAWLGLVPRQHSSGGKERLGRMTKAGQADIRRLLIIGAMSRLNWLGQRSIVEGSWLSCMLTRKPKMLVAIALANKMARQIWAMLTKNEDYRDPVLASTA

SEQ ID NO: 130988 - protein, 386 aa, unidentified
MRQPNDLSRSLATFDPESTLVAVIEMSQSSWLVAGIVPGLDRQPLKKLTVDEGALLRLLQRWRDEVIRLGGKVERIAVAFEAGRDGFWLARWLRAYDIEAYVIHPTSIAVPRQHRRAKTDRLDTELLKRAFLGWLRGEREHCSMAAIPTLEEEDSKRPHRERESLVAERTRIINRMKGCLARLGIRGYKPNLQRATKLLPALRTPEGTPLPPNALAEMGRDLARLHFVEGQIREIEAARLERLHQDPTEKSHSMVRLLTRIIGVGVETADMLVREVLSRNLRDRRAVARYAGLTGAPDESGSKRREKGLARAGNARVRRGMIQLAWRFLMFQKESALVQWYRSRTADSRQGARKSLIVAMARKLLIDLWRFVSTGETLVGVAMRPA

SEQ ID NO: 130989 - protein, 410 aa, unidentified
MERVIERACGLDVHKKTVVACVRVPGRTSAREPHVRTFGTTTAELLALREWLGGYGVTHVAMESTGVYWKPIDYVLEDAFTCVLANAAQIAQVPGRKTDVKDCAWIAQLLEHGLVRGSFVPPVPIRELRDLTRYRAALIGEHTRETNRLQKVLEDAGIKLASVASNVLGVSGRAMLEALTHGTRDPDVLADLARGALRRKLPALRQALAGRFRPHHAFLVGQVLAHLDYLDEMIATLSTHIEEVMAPFAEAVRRLDTIPGVNQRTAEVLIAEIGVDMGVFPTAGHLASWAGLCPGNNESAGKHRSGKTRKGTRWLRSVLIQAALAGGTRATKGALAARYRRVMRHRGHKKAVVAVAHAMLVAAYHLLARHTTYHDPGADYYERRHAERVRHRAVQLLERQGYRVILEPAA

SEQ ID NO: 130990 - protein, 411 aa, unidentified
MQVIYQRCCGLDVHKRSITACRLKWLGSCWEREIRQFGTMTKDLLGLGDWLAQEGCTHVAMESTGVYWKPVYNILEGQFELLVVNAQHLKAVPGRKTDVRDAEWIAELLAHGLLRGSFVPPVEVRELRELTRYRSSVVRDRARTINRLQKVLEGANIKLANVVSDIDGVSARQMLEGLVAGERDTEQLASLAKGRLKEKREQLVEALSGRLKPHQSFLIAEHLAQIDYLEGAIERLSQQIEERLRPFEQEIGWLDTIPGVSRRTAEVLWAETGGDMSRFASARHLASWAGMCPGNNESAGKRRSGRTRKGSPWLRHCLVEAAHGAAHTKNKYLSSQYHRIGARRGKKKAQVAVGHSILVIAYHLLTRRQTYSDLGANYFDERDRQAVTKRCVVRLQRLGFQVSLEKLPVAA

SEQ ID NO: 130991 - protein, 451 aa, unidentified
METQGIQGTQAVVWYAGIDWAERHHDVVLIDAQGDRVAQLRVAHSPEGLRTLVTWLRGHGDVAEHPEHLACLVETTRGLLITALVEAGLALYPVDPGRLKALRKPAGAKTDALDAYALARLGRSELRELRRLVPDSDLVRELKVLTRDQDGLIHQQTRLVNQLTACLKEVYPAARGLFSQLQQRSTLAFLAAFPTQQQAAEAGADAIAAVLLRAKHPTARATAARIAGQLQAPQLRADVATARAKARLTQALVAQVQLLVEQIAAYAAAVTALFAAHADRDLFASLPGTGKRLAPRLLAEWGEDRERYTGAPSVQALAGTCPVLYQSGQYARARHRRACCKPVRQALHQFARESLHADAAARVYYLRRARGGQSPHGGGAGARQPLGTYPGRHVDPPRALRPCHLRRRPARAPAGCRVTCATPEAARPAPLGSRPVHPTDAGTRHRERRQE

SEQ ID NO: 130992 - protein, 423 aa, unidentified
MKFKAQAKQNQLLERISTQHLVVGIDIAQQSHVARAVNFRGILLGTPLHFSNDDAGFSLLLQWMKNLQETHQLNDAIIGMEPTGHYWLSLAAWLKSRSLEVVLVNPHLVKKNKENRDNTPSKSDIKDAFVIADMVKNGYYTLIKESSEVFMELRVLMANRETIVHRLVSAKNQIHRWVDIVFPELRQVYKHLIGAGALATLRLFPTPADLQKLTVRQVVEGWKTVMKRHSGERRAGELLALAACSVGAKHAEKAYKLHLQQLLAEYDLATEQLQVIEDEVANALARIPLAKPLLAIKGLSTLAVAGILGEAGDLSGYAHGNALLRHAGLNLAEASSGKWKGQMSISKRGRPRLRHALFMATMALIMNDESFKRQHEMNVKTKSMKPMRSVMKLCGRLARLLVAIAQSGEAYEPNRALPLKQTA

SEQ ID NO: 130993 - protein, 387 aa, unidentified
MIYYVGIDISKYKHDFCIISNTGEVIVENSSFDNNKKGFQLFLDQLKPYNKQDVRIAFEATGHYSLNLELFLTNQDYSFMKVNPLVVHQFLKARSLRRTKTDKADSFTMASYLMSIQYKPNSYLLYNIYTLKSLCRSRELLIKERSKFEVLLTNELDKSFPELKPFFNNMISTTLLFILDKYKNVEHISLMKDYDSIRCISHGKFTYAKFAQLKELAKNSVGHHDENTDLLISTYVSIINNFNEKIVPINKQISTIIKDLNPRMLTIPGLGEISAAIILSEYGDISNFSSPNKMLAFAGLEPSIIQSGTLEHNGKMVKHGSGHLRYAIMNIAMTILRYSPTFYDFYLKKRSEGKCHRVALSHVCKKLIRVIYTLEKNNIDFDPSLLK

SEQ ID NO: 130994 - protein, 313 aa, unidentified
MDPTPVYAGIDVSKKELVVAVRPTGARWLAANEPRSIDRLVRRLRGLAPALVVLEATGCYHQAVARALARAGLPVAVMNPKQIRAFARATGRLAKTDSIDADMLAWYGETLHPEPRPLRGEADEELHGLVARRRQLVGMRVAERNRLESAPPDVRRRIRAHLTWLGHEIDAYNERIAQWLQEHRSEQMEQLVSVPGVGVQTAAVLAAELPELGQLNRQEIAALAGVAPLNNDSGKHRGRRSTWGGRAAARSALYMAALTAARCNPDIRATYQRLREAGKPTKVAQVACMRKLLVTLNTLSRENRSWQPHAAAA

SEQ ID NO: 130995 - protein, 356 aa, unidentified
MPQKLNSRIAVIGIDIGKNSFHVVGHDKRGAIVLRQKWSRSQVETRLANMQHCLIGMEACVGAHHLSRKLQVLGHDARLMPAKYVRPYSKGQKNDFRDAEAIAEAVQRPTMKFVTTKSVDQLDLQALHRVRERLVSQRTGVINQIRAFLLERGVAVRQGYRFLRTELPSILAKRTDVLSPRMSHLLEDLAGDWRRLDERIEHLSREIEGFARQDQGCTRLASVPGIGPIIASVTVAAIGTGDAFSKGRDFGAWLGLVPKQISTGDRTILGSISKRGNRYLRALFVQAAWVVLVKVGPKQWERYGLKSWIEAAKKRLHHNVLAIALANKLARIAWAVLNKGREFECMKAYVVAPPAA

SEQ ID NO: 130996 - protein, 476 aa, unidentified
MHDLGAARGTSSRGDQSMSRTRKTNRCEHSTSNDKPQPLPILQPNAAGLDIGATEIYAAVAGDRDQKPVRCFGTFTVELLALAAWLRQCGIETVAMEATGVYWIPVFQILEARGFEVCLVNPRYFQNVPGRRTDVSDCQWLQRLHSVGLLQGSFRPPQQVCALRSLTRHRDNLIQLASTHILHMQKALDQMNVQLHHVLSDITGLSGLAIIDAILDGERDPAVLAELRDGRVQASAETIVQALTGDYRAEHLFTLKQSLECYRHYRKMVASCDREIEQLLKKFEARVDATTKPLGTPKVRRKPVRNQPKFDLRKHLYRIFGVDLTEIPGISVLTAHTILSEIGPDLSKFPNDAAFTSWLGLCPHNDITGGRVVSSKTRRVKNRAALAFRLAANALWRSQSALGDYFRRMRAKLGAPEAITAAAHKLARIVFHMLSTREPYDESLVRNHEQQFRARAEVRLRAQAKALGYSVIAATA

SEQ ID NO: 130997 - protein, 319 aa, unidentified
MNLIPVGVDIAKAKFDVAVLLPNQKYKTKKFANTPAGCREFMAWLARFGDCHVCMEATGCYSTELATSLADNGWSVSVENPARIHAFGDTELTRNKTDKSDAALIARYCALHQPPPWYPAPLCERQLTALVRHLKNLEEMHQMEENRLEGAEEVILASLNEHIGTLAALIEETKKKINQHIDNNPDLKRDKALLKSIPGVGDMLSASLLAFAGNLRRFSNSKALVAYAGLNPRRCESGLWKGKSRISKVGHAELRSALYMPAIVAGRYNEVVKSLMHRLAERGKSGKERVCAGMRKLLQLAYGVVKSGSMFDAEIPLAA

SEQ ID NO: 130998 - protein, 446 aa, unidentified
MPLDCCERARGSVSWQRSLRTGAVRRWSPHGGRRDVMEVLFDRVAGLDVGKESVTVCVRTPGPRGGRRSETRTFKTMFGSLRVMRDWLIEAGVTIAAMESTSTYWKPPFYCLEEVMVVWLLNAAHMKAVPGRKSDVRDAEWIAQLLEHGLLAPSFVPPPQIRRLRMLTRYRMQLMGDRSREMVRLELMLEDASIKLSSVASSLKTVSARAMLTAMINGESDPLRLADMAKGRMRRKIPDLAQALTGTFEAHHAQLARSMLRRLELVEQALAELDAVIAEACRPWQHHIELLQTIPGVGETVAQVIVAETGADMSRFPTAAHLSAWAGLAPAMHESAGRQTPAGKRHGNKWLTAMLVEAAGSVGRMHGRNYLAAQHARLMKRRGMGRAQVAVAHSMLVAAYWMLKRDEPYHDLGADWHRRRSDEAHTRRLVAQLEHLGHTVIIDPAA

SEQ ID NO: 130999 - protein, 367 aa, unidentified
MSKANSASSQTTWVGLDVHRDSITSAVLAPDKETPVVDRWFHDEPSVRRFVSALGTPGRVRLCYEAGPTGYDLARLLTRLGTHVEVIAPSLIPVAPGAKVKTDARDARRLVHLYRSGELTAVHIPTPGEEAIRDLARARADLVIDRIRSRHRLSKFLLRHGEVYRGGVAWTLTHEAWLRQLHFDDAALQSTYAHYRAIVAGLDAHLSAVESDLKIYLERGPFTHAVGRLCAYRGISELGALTLSAEVCDWRRFGRATSLMGFCGLVPSEYSSGERKSRGRITKSGNLHLRTQLVESAWAYQHRPAVGATIKKRQERCGPDTITRAWTAQLHLCGKFRRLAERKNSRNVVVTAIARELCGFLWAEMAA

SEQ ID NO: 131000 - protein, 352 aa, unidentified
MTRITTIGVDLAKKVFQIHGVDAEGKVVVARKLRRKEVLAFFAKQAPCLVGMEACGSAHYWGREIAKLGHTVKLMPPKYVKAYVKRGKTDAIDAAAICEAVTRPSMSFVPLKGLEQQGLYMLHSARSQLIGQRIQLINGVRGHLSELGIVAARGLLGLAALAAIVRDESDRRLPVTARAALMVLVRQIEAVSAEIAALDTALRKENKASELGPRLETIPSIGPVIASALRARVTDAKLFENGRHLSAWIGLVPENDSTGGKVKQNGLSKKGDRYLRSLLVVGAMAVVRQAQIRPDRNPSVTKLLARMSPKQAAISIANKTARIAWAIMVHGGAYQAGHHPAQYRAEACVATG

SEQ ID NO: 131001 - protein, 410 aa, unidentified
MRPISRREASNSDAVQPGVADGRTHRSLRSLVCDSLTESGAGSADRSAPLVEETVRETGSPSPKSRPKARTVARAKARISQGWAAAGPSRTLGKRDKGRDMVKPYVGIDVAKATLDVAIGSDGEVVQVENNEAGVAQLTERLVEVVPALVVLEATGGYESVVAGAIAGRGIAVAVVNPRQVRDFAKATGVLAKTDRIDARVLARFAEAVRPEPRPLPTEEAKELDELLSRRRQIVDMLTMEKNRLGIAATDRMKKGIKKHIAWLEEALRRSNDDIDTAVKNSPAWREQEDLLRSMPGIGPVSARTMLAELPELGRLNRRQIAALVGVAPLNRDSGTLHGTRICWGGRATVRQVLYMAATTAIRCNPAIRRTYAALRERGKKHKVALVACMRKLLTILTAMVRDQRRWSPS

SEQ ID NO: 131002 - protein, 309 aa, unidentified
MEIVVGIDVSKERLDVAILPQEEVFAVGNDHAGIDELAERLKGIGVDAIALEATGGFEMLAVAGLSAAGLTVLVVNPAQVRAYAHAIGRRAKTDPIDAAVIAAFVLATKPEIRPLRDAETQALSELVARRRQIVQMVVAEENRLRMALAKQAQKSIKRLLKALRRELESLDADLDSHIRKSPVWRVREALLTSVPGVGPTTARTLLAELPELGSLDRRQIASLAGLAPWTRQSGKWKGKSFIGGGRSKVRAVLFMAALVASRYNPDLKAFRDRLVAAGKPKIVATVATMRKLLTILNAIIRDGRPWQNA

SEQ ID NO: 131003 - protein, 356 aa, unidentified
MGKLTTIGIDLAKEVIAVCVLDVHGTVMERRVLRRDAFARWAEQLPASNVAMEACGSAHYWGRWFAARGHITRLIAAEFVVPFRKGGKNDTADAEAIAIAARQPTMRFVPIKTVDQQAILAWHSVREGWKEERTALLNRVRGLLAEFGIVIARSSDRLLTALPELTEDARLPDAMRAMLLEAREQFAALHARLARCDTQIAAHARNSPAAQRASELLGVGPVTASALAATIPDAKVFRNGRQFGAWLGLTPRQHSSGGKTRLGRISLRGNVYLRTLLIQGARSTLQAAMNREPARASRLQRWIIELYGRKGYYKTLIAIANKHARILWAMLAKGERYDASAWQRHPMHQPPLAGSA

SEQ ID NO: 131004 - protein, 360 aa, unidentified
MRIIGCDLHARQQTLAMLDTETGEVVNRTLMHEGNQVREFYSELPGPVLVGIEAIGPMQWFLDLLAQLGIECRVGDAAKIRAAEPRKQKHDRRDAELILKLLVEKRFPAIWMPSKELLDVRALLLHRHQWVRLRTQVQNALQAIALANGLRRGPSLWSYDGLAKIAFLPLPPHTSLRRSALQALYRHMDEEVEKLTVQVAEQVEHHSGAQLLMTHPGVGPVTALATDVFLGDPQRFADGKALASYVGLIPEERSSGRRRRLGRISKQGNPLLRFLWNEGGAHAARRDPELRRFYRRKLVQKGLGKARVAAARKLGIRLWIMLRDQIDYQEFCRRGQKQSSAACAGMPEVGNGANRHRPVE

SEQ ID NO: 131005 - protein, 365 aa, unidentified
MNTIKVGIDAGKEKVVCAYRGNGAGEVRVITLANRREALKPWVEKLQQGGLVQACYEASSVGYEIYRWLMELGAECEVVAPSLIPKKPGNHVKTDTRDAKELLSLFEAGLLTSVRVPTESEEALRDLVRSRGDIQKTLTMNKHRLNQFMQRHGRIYAGLSHWTLAHFAWLAKQTFSEEASQKTAENYRRWVDQSQAELDRVELMIREIAPKHKDTYALAQRMMSFHGIDVMSGVSLASELLDVRRFTKASQLMSFTGLTSREYSSAEVTRRGSITKTGNSQVRHVLIQAAWKYTRKPSESKRLREHWKTQPAAVEKIAQKAKDRLHKRFWHLTNKGKLKQKAVVAVARELAGFLWAAAHVETTAA

SEQ ID NO: 131006 - protein, 418 aa, unidentified
MNEDGDTRALRRYVALDIHKHYCVIAAVNREGRVVLQAVRVEHGDLEGWLKKNLRATDHVVIESTTNAWHVYDLLVPLAERVVVANPIKVKQIAQARVKTDIRDTLILARLLAANLVPEVWVPPVQVRELRQLLSQRRQLVETHTQIVNRMHSVAHRHHLKHERGKRFNEKNTLWQKDKRLSRIEQFQLELEMENRTYIEKQISRIGKEVAKMSHQKPWAQDMTYLIQLPGFGVITGMTVLAAIGEIQRFDSARHLASYSGLTPGLEQSGTKYNEKGITKEGRKELRWALVEVAQRAVKSDPHWKHRFQELQKRMHRNQAIVAIARRLLELVWYVLTRRQPYRHFSHERIAYKYLTWAWQMDEAARDGLTRQQFTRYYLMRLGIGRDLTRIALDPKHPRRISSEAELLVLRPELNHIE

SEQ ID NO: 131007 - protein, 366 aa, unidentified
MKSYVGMDVHSKSSVFVIQNEQGEEVGRGEVPTSVEGFSSLRLRFRLRASTLVALESGTMAFFAARCLSELGLPPVVVDAREVRIKAHRPRQKSDTRDAVELCEGLRRGIYRAIVHVPPEQIEHLRNTLSRRRHFVRLGTAEINAAKKMLRSAGLSELSRQHLGTLRAWKRLLQALAEHPEVRSFVELHYRAWQSAVEQKAACEKALEEQHAFFGEDLERLKTVPGVGEIVALTAIAVFSDATRFPSAKHASSYAGLVPQTYQSGETNRQGHITRTGSPELRAMLVQAAHTARRQTSPLNPFLRSLTLRVGTRRAVIGVAHRLCRVLYAMLRDKASFDQSKLKAHEPRTVHAARIYRLNPQAAKSR

SEQ ID NO: 131008 - protein, 370 aa, unidentified
MGKSVLYVGLDVHKMSIDVAIAEDGPGAEVRFYGQIGGDLDSLDRVIRKLRATGSQLQFAYEAGPCGYVVYRHLTAQGWPCLVAAPSLIPRRPGDRIKCDRRDALTLARLFRAGELTSVKVPDADDEAMRDLTRAREDAVSVERRAKQRTGALLLRHGRRYPGKTTWGRGHWRWLLQQAMDHPAQQIVLQEYLDAVREASVRVQRLTGQIQELLPQWRRAPFVAAYQALRGVSLIVAATMVAELGDLNRFNNPKELMAYLGLVPSEHSSGASVRRGRITKTGNGHARRVLVEAAWAYRLRARVTRPLLQRQEGLPESIRQISWKAQLRLCARYRRFLAQGKHKNTIVTAIARELAAYIWAIGQAVEPVTA

SEQ ID NO: 131009 - protein, 387 aa, unidentified
MEEITEEPGALVERIAALDIGKATLTACLRVPHEDKPGARRQEVRTYATLTPALLELRDWLICQGVTLVVMEATSAYWKPPFYLLEDDIECWVVNARDVKNVPGRPKTDKLDAVWLAKLAERGMLRASFIPSRPQRQLRDLTRYRRTLTQERTREKQRAEKLLEDAQIKLSAVISDIFGKSGRAMLDALIGGQRNPHELAALAYRNMRAKTSVLQEALTGHFTDHHAFMLGMMLARIDALTTQIDTLTTRIGEAIAPYAAQVAQLDEIPGIGITAAQDLLAEIGTGMSRFPTPGHLVSWAKFAPRGPPVRRPQQGRLHRQGQPLARRHPRRGRHLRRPHQDLPGLPLQADRQAPRQATRPGRRRQLHPQHRLAPALRPRRPLHRPRP

SEQ ID NO: 131010 - protein, 354 aa, unidentified
MKVQGRIDQNTNQKKREIKNMKYQQVVGMDIAKDSVQASRFDGTTFFDFSFPNQEKSFLKEVQKSIPKSDPSHTLFVMEATGAYHLKLATTLYKKGYSVAVVNPFIIKKYAEMLLKRAKTDRKDARLIAQFGFYQEATLFAPKESMAEEITQVLKGLDQLKKERTNLKNYREAFTCHNEINPVVRDIYQKQLEEIEKAIKTLEAEAKRLVSQYAPKEYQLLLSIKGIGKCSATALLGLLQKMDRFSRGKEVASFLGLAPQISQSGKDKGKAWLSKKGNGYLRRLLYLAALSASRSNAQCRELYQRLLAKGKPKKVALIAVANKLLRQAFAVLKSGCPYDPHYLKLKSNLEVVLT

SEQ ID NO: 131011 - protein, 347 aa, unidentified
MDIIGIDLHKRESQLCILRADGGITEQRIVTSRDRFTAIFGSRAPSRVLLEASTESEWVAPCLEGLGHEVIVADPNYAPMYATRSRRVKTDKRDARTLAEALRLGAYRPAHRVSAARRHVRAELAVREALVRTRTRYIAIAKAFVRREGLRVPGSESHLVANRVATLDVPPLLGAELEPLLAVLAPLNAQIHGADGRITAFVQADPVIALLATAPSVGPLTASAVVATIDDVTRFSSAHQFEAFLGLVPGERSSGEKRRIGRITKAGNSRARYLLIEAGWRILRSKSPETAALRAWALKIAVRRGNRIAVVALARRLAGILYAMWRDNTPYTVSKVRMPTSPIARAG

SEQ ID NO: 131012 - protein, 320 aa, unidentified
MDTTQQTIFAGVDVAKEELEACVMPGEHRITVARDGEGVAKLLEFFKQHGVEGAIVESTGGYDRIVTAACLEAKLRTSLINPRQAKHFGIALGLLAKNDRIDARTLALFGDRIRPRTMEKTPEKQQELHDLVTRRRQLIAMQTAEKTRREHAATKLAKKSIAASLTFLEKQIAALDAEIARRIEADDSWRNTDDLLQSVPGVGEATSAALIAELPELGKLNRQAIASLVGLAPFDHDSGKMKGQRSIWGGRKTVRTALYMAALAALRCNPALRAFAQRLKRAGKKFKVIITAVMRKLLVTLNTMLKNNTPWQDALASEIS

SEQ ID NO: 131013 - protein, 369 aa, unidentified
MNKGTTYVGLDAHQASTNGAIILASGEVVEDRFATTTDGVRRWVRRLKRRCKGQILCCYEAGPLGYTLQRTLVSLGVECIVIAPSLIPSKPGDRIKTDRRDALKLAELLAAGLLTEVHVPTPEQEAIRDLCRARGSVKGDQKRIQHRLSKFLLRRAIRWTSGRKMWTGAHRQWLRGLRLEHAADQDILDDHLLALEQNNGRLTALDEKLAHWATQEPYVEAVAWLRCFRGIDTLTALSVVAEIHDWRRFPSPRALMAYLGMVPSESSSGGKFQRGGLTKAGNSRVRRLLIESAWHYRHRPGVGHRLAKRRAGQPSEIIAIADRAQQRLHRRYARLSARGKSHNLVIAAVGRELVGFLWAVMQRTEVRSA

SEQ ID NO: 131014 - protein, 347 aa, unidentified
MKFYTQQHRYYCGIDLHARTMYLCVLNQQGEILLHRNMPCSPDFFLKAIAPYREDMAVAVECIFTWYWLADLCAQENIVFVLGHALYMKAIHGGKAKNDKIDAHKIAALLRGGMLPMAYVYPALMRSTRDLLRRRMHLMHKRSELLTHIQNTNSQYCLPQFGKKIAYKKNRQGVAEHFADSSVRKSIEMALSLIDHYDKLLTEVELYITQNAKIHDVNAFNRLRSVHGIGKILALVILYEIHEIDRFPTVQDFVSYARLVKCAKESAGKRHGSSGTKIGNVHLKWAFSEASVLFLRANPAGQRYADKLTSKHGKAKALSILAHKLGRAVYYMLKRDKAFDMNKFLNS

SEQ ID NO: 131015 - protein, 342 aa, unidentified
MIDAMIGVDLAKRVFQVHGSLTSGEVRFRKKLSREQFRAFMARQPACLVVFEACGSASYWAREMQTLGHEVKLIAPQYVRPFVKRQKNDAADAEAIVIAARQPEMRFVAPKTADQQAKAVLFRCRERLVHQRTELVNALRATLYECGHVFPAGITHLKRMEALVEDPDCDLPALILAECQDLLLQIAEKSARIDVKSKKMKALAAETDTARRLQTMPGVGPLTALAVEAFAPDMAQFKCGRDFAAWLGLVPRQYSSGGKERLGRVSKAGQRDIRRLLIIGAMSRLNWLGRRTILQGSWLAKILARKPKMLVAIALANKMARQLWAMVTKNEDYRDPALAAAA

SEQ ID NO: 131016 - protein, 310 aa, unidentified
MDAIYVGIDVSKDRLDVHVRPNGEAFAVARDGKGLEELVTRLAACSPTLIAVEATGGFETIVAAALAGAELPLVVVNPAQIRHFAQAVGQRAKTDPIDAAVIARFIEAVRPTPRALPDQQARLLAELVSRRRQIIEMIVAERQREKRVENVRVRKSLARHIKVLEKELPEIDNDIDTLVRGSPVWRDKEELMISFPGVSNTLARTFLAEVPELGTLNRRQIASLAGLAPFTRQSGRWKGKSMIGGGRAALRAGLYMAALSASQHHPQLKAFYRRLLTAGKPKMVALIAVARKILTILNAMLRDQKQWQTA

SEQ ID NO: 131017 - protein, 350 aa, unidentified
MNILAMDLGKSNTVFCNYDSETGKHKYGKVKTVPQQIHDMFTQYSPDRVVFEIGAAAGWVHDIVTALSIEAQVANTNHQAWRWKNVKKKNDRNDALKLAQLSAMNQLPLVHIPRHEVRQKRALIQYRQSLVKRRTQIKNNIRSILERKGHHEILPSGKKGWSKSSIELLSKMALAFNRCDMDNLWKGEMHLELKQLEAVEKCIGEIEKKLDKLAEGDKDIKVLRSVGGVGARLAEAIAAFVDEPGRFKTGKQVGSYVGLTPRQYQSGQMDHQGKISGAGNKVLRALLVEVSWLGLRHNKWMNETYHRILRGSPSRKKIAITAVARKLLVRCWAMMRDGKSWREEAEKKAA

SEQ ID NO: 131018 - protein, 346 aa, unidentified
MMIIGCDFHPSWQQVSWVDTETGDCGERKLVHAAGDAKLFYQQLGAPVLIGMEATGNSQWFIELVEDLGHEIWIGDAAQIRASYVRKQKTDKRDAAHILKLVVEGRFPRLWTPDREQRDLRQLVLHRHKLVIIRSRVKNELQHLSLNKGVQRQHKLWSQAGQKMLRELPLKPWAACRREDLLGLLAMLNQQIGALDDAVQQAAEENPQAKLLMTQPGVGPNTALAYVLTLGDVGRFPRGKQVASYLGLIPREESSGGRQKLGAITKQGNRMLRALLVEAAQVAVQHDPGLRRQYFHRCHQKAKGVAKVATARKLAVRLYWMLRTNVAYPEIVRVESSSGLPLVGAG

SEQ ID NO: 131019 - protein, 338 aa, unidentified
MEQVITIGLDLAKNVFQVHGIDAAGKVLVRRQLRRGDVLRFFGGLPRCLVGMEACATAHYWARELTKLGHTVRLMPPAYVKPYVKRGKTDVADAEAIAEAVTRPTMRFVAVKTADQQAALMLHKVRDLLVRQRTMLINALRGHLAEFGIIAARGPGGVTAAIISLHEAQDSLPELARVALHGLIDQLRIVRGEIARVEKRIVAWHRASNASRRLATIPGIGPITASAIAAAVPDATLFQSGRQFAAWLGLTPRAHSSGGKERRVGISKQGDGYIRRLLVTGATAVIRLARQGNASKTWAAKLLERKSARLVSVALANKTARIAWAVLARNQSYVAPAM

SEQ ID NO: 131020 - protein, 432 aa, unidentified
MSKYYKSPVIGIDVSANFSMVSILAPNGDIYKKPFKVNHDSDGFELLLQKIRKTEEEFSTKSVTFMEATGIYHLTLFCFLKDNKIDCFVINPLVTNCNKNKSIRKVKNDKVDSITIAKTGKFENVKASNYLDIDIYLLRDLCREYYNLVDTKANIKKQISSTIRITFPGYQTVFSDTTGKTSLNVLKSFTTPKKMINTPKDEIINLLKKSSRKGNLWARKKYNELITAADNAIKIGIESYTFINKLTRQLKLLETYETEINLLIEEIKEILNSNKISDSFRKSVDLISSVSGVGFITSITLASEIGDIKRFKKPKQLVAFFGIDPSVSQSGKFNSTKNVMSKRGTSYGRKALYAVALTSVRKKRNGELNNPVLFKYYKTNLQGKKKKVALVAIMHKLLKYIFAILRDEKPYEIRDPKLHSKMYLENNSRLIA

SEQ ID NO: 131021 - protein, 542 aa, unidentified
MAIVMGLGQHRAQITAEWIDTDTGELGRARISPALRGDVRRFVKRFAGQPLEVALEATTGWRFVVEELHAVGAEVHLAEPAETAARRGNKKRAKTDRADARHLRELLMIGRLPESWIPPEHLLDLRARVRLRHTLVDQRGEWQQRIQAVLYHHGFPQRNGLLTGENRAWLEALALSPSAREQVRIALQIIDSLDAQSAPITRELRLYARRQLGCRALMKHYGIGELTAVTILAELGDARRFSSSRHAVRYAGLAIVDEVSKATPTEALVPMARSRRWVLVGDELPLPPFVDTGLIDEGILEGHGLERSDLEETLFTQLGGTLPKDRDRVLSMQHRMLRPIGELISECFYRGRGGLEHARPATSDLQSLREAFLSPVTWYSTTRLPGQREKRVGATYWNESELRLVRRLLDTLQRRAVANDESLDVAVISGYGEQARRVRRDLRPHDPKWTHLTLDVHAVDSFQGQERDVVICSVTRSNADNDLGFLRSERRVNVALSRAKDSLIIVGDPRFCRRAREGDNPFALVLEHVERFDGCTLVEPRQ

SEQ ID NO: 131022 - protein, 308 aa, unidentified
MSQPLCHLGVDVSKAALDLHHLTKSWQVPNSPQGFRKLIAYLKKHPARVVCEASGPYHLPLVLALQKAKLEVCVVNPRQVRDFAKSRGILAKTDTLDARVLTLYADSCPPRTTAPLPSEQLLLAAWVDRRQQLVDQRTAEANRTEPCLPPPVAKHLRDSIRLLNRRIAQVEKKIQQLLAKCPQLNQRVQCLKSVKGVGSITATAVVAAIPELGSLNRGQVAALTGTAPLNRDSGTLKGKRTTWGGRAKVRTALFMAAFCASRHNPVLKALYLRLRLKDKPHKVALTALMRRLAIHLNSLLKQSLPAPT

SEQ ID NO: 131023 - protein, 355 aa, unidentified
MNSEKYIGLDVHQATIVVAVTDSTGKLVMESILETEAATILQFFAGLRGNLAVTFEEGTWSAWLYDLLNPHVEKLVVCNPRKNALLKDGNKNDRIDARKLAELLRGNQLKPVYHGENGVRILRELSRSYLAIVKDLSRVMNRLKAVYRSWAIPCAGRDVYYRRHRAQWLDKIREAGVRRRAERLYEQLDMLQHLRQEARRELLAESRKHAITARLRQIPYLGPIRSALAVALMQTPHRFRTKRQLWAYSGLALETRISAEYRMVEGQVRRSKKLLSIRGLNKDHNHDLKGLFKGAATMASVRPGPLQDFYQAALAKGIKPTMARLTLARKIAAITLTLWKKGESFDAKKLKSQAA

SEQ ID NO: 131024 - protein, 414 aa, unidentified
MEVIHSRCAGMDVSKRDAKVCVRVAGAGRRRTVETVTTWGATTNRILALRDHLVAEQVSLVVMEATGAYWKPFYFLLEDAGFEVLLVNARQVKNLPGRKSDVSDAAWLAQLGAHGLVRGSFVPPAPIRELRDLTRARTMMTRERGREIQRLEKLLEDGGIKLSSVASDITGVSGRLMLQALIDGEQDPVVLADLAKRRLRAKIPELVEALTGRFNDHHAFLASMYLAAIDQRSQAITDLSERIEVVMEPFRGFADLIATIPGIGDQTAEVIVAETGADMSVFPTAAHFASWAGTCPGSHESAGRVKSTKTRPGNPYLKAALGTAALSIANSHGTYLSAKYRRIAARRGPMKAIVAVEHAILVAIWNMANTGAVYDDPGPDYFTRRDPERARRNATNQLERLGYHVTLEPIAASA

SEQ ID NO: 131025 - protein, 344 aa, unidentified
MQYIGFDIHKRYTFYTQMDGMGQIQRQGKLTNSREALAEFFGDMAEPARVVIEASMNWYHLYDLLEELEIPVTLAHPLRTRAIAEAKVKTDKIDSTILAHLLRTDLVPAAYIPPRAIRDLRELLRYRAALVKLQTMIKNRIHAILLKHGYQCPHSDAFGVKGRAWLTTLDLRSVYQQALRGLLAVLDTLHAQIQEASRTIDQQAKATPMAQQLCTLPGVGHYTALLILAEIGEVARFPDPKHLVSYAGLAPSVHGTGGRVYTGHISKQGSTWLRWILIEAASHAATRPGRFQRLYQRIARRKGPSLHGSWWRVSCSPLPAGCCAMLTERALGTPRTVAWSRRGP

SEQ ID NO: 131026 - protein, 456 aa, unidentified
MEIPMAKQSHRRCDQLPVLHPDAAGIDVGASELFVAVGADRDPQPVRRFPTFTRDLHVLADWLQQCGVRSVAMESTSVYWIPIHQILEARGLEVCLVNAQHVKNVPGRKTDVSDCQWLQYLHSVGLLRASFRPPGAICAVRALWRHRGSLVQMAAEHIMHIQKALDQMNLQVHRVLTEITGLSGLRILDAILGGERDPLTLARLCHKRVKSSESTVAKSLEGDYRPEHIFALRQSLAAYRYYQQLVLETDQEIQRQMVELEAADNALAKMPKRTKRLPYQRQGHEPRVFDLRSELYRIFGVDLTNVPGISAMTSQTILCEVGTDVSRFRNASAFASWLGLCPEKKISGGKVLFTKSRRVRSRVAIALRLAARSLHHAKDHMGEFFRRICRKLGKPQAITATAHKLARIVYYLLSTREAYDQSVFHKCEEEALKRAEMRLRRQAAHLGFRIIPAAEG

SEQ ID NO: 131027 - protein, 387 aa, unidentified
MKKSNQRVIGLDVHPDSFAGAILEGRDPASAKVVSTSTRVALVELEKWVERHTTGHDLLVMEASGNAFAVAQRLRALKRQVEILDSHRAGKVGKAYCANDRVDAVKIARIYLTHLSPLVWQPDTRTLERREVFSAYQGVVKESTRLKQQIKAMLNEHCVRLGNGFRLSHPTAIARLLKLKEWSPVQAMLLEQLHSGLVSARVRRSKLRRYMAQEVLAEPKLLRLTRLCGISLITLYGLSAAIGDIGRFSNSRKLVAYLGLNPSVCETGNWEGNTALKRHGRGALRALLVQSAKKLLQVNNPLQKWGLAVAVRRGRNKAAVAVARKLCVAVWHVMQGHVIGAIERVDTLHTKLHKLATELGLPAVKALGYETKEAFVQKKLYLLKSYP

SEQ ID NO: 131028 - protein, 353 aa, unidentified
MQYAAFDAHKHYTWARVERPDGTLVREKKIPHEPGALRRFLAGCEPGSPVAVETVGNWYWIVDEVEAAGCRPQLVHAYKAKVMLGSVNKTDRLDARGLVRLQRTGTLPMVWILPRELRDARELPRARMVLVQQRTRLKNRIHATLAKYAIQLPEVSDLFGKRGRRELQVRLVKLPPHTGFVLSLLLEQVAGADRAIDALEQRMTELFEVDDATRLLLTLPGVGPILATVLRTEIGDVGRFPTGEHLAAYAGTVPRVHESGGRRHYGPVRSDVNRYLKWAFVEAANGVCRNRRRKHRQRHTTRLYERITRRRGHPKAIVAVARHLAEAAYCMLTKGEAYREPGSSTGASARNSV

SEQ ID NO: 131029 - protein, 419 aa, unidentified
MNYVGFDWASRAHDVTVLDEAGGVLDRWAFPHSETGWVTTLDRLARHGSAAEVPVIIERTSGLIVDRLLAAGHPVVPVHPTAFYAARPRWGASGAKSDPGDSYKLADYLRTDGHRLRRLTPTDPGLHELQALVRLRDDQVRARTAATNQLTAILDTYWPGPKQLFMSLASQIALAFLTDYPTPTSAAHLGEARMAAFCRRHAYRGGKSPAELLSRLRAAPVAPVGLPPATLAAMVTAQVTLLKTLQTVISDVERLIAVRVVAHPRSNLFENLPGVGMINLAQLLAEVGPILDRVDSAEQAATECGAAPVTRSSGQTRGVYFRWAANTRARKAITSFAHNARMQDDWAAALYADARARGKRNPHATRILARAWLRVIWACWTSGQPYNLDRHHSSRFLHRCHPAGAQARSRWSPPPEERS

SEQ ID NO: 131030 - protein, 314 aa, unidentified
MSFVGIDVSKRELEICRLSSEETRWTIQNEPANIAEFVKQMQQQPPTLIVLEATGGWEALVTSALAVVGLPVVLINPRQVRDFARASGLLAKTDKLDARVVAQFGRVMNPAPRPIASERVQELQALMARRRQIVEMISAENNRLGISPQRVRDDIRQHITWLQRRLKEIDKDLDGAVRNSPIWREKENLLKSVPGVGPVVSRTLLAHLPELGGLNRRQIAALVGVAPFNRDSGTLRGRRTIWGGRGAVRAVLYMGTLSAVRFNPLIRNFYERLRNAGKAPKVALTACMRKLLVVLNAILRKERPWQPTDGRAAT

SEQ ID NO: 131031 - protein, 412 aa, unidentified
MRRVIGIDIHRIFGEVVFWEDGRLRPAGRVDMTRSALENFGRSLTKEDEVVVEATGNAMAVVRVLTPYVARVIVANPTQVKAIAYARIKTDKIDAGVLAALRAADFLPEVWLPDANTERVRRLVARRNLAVRHRTRIKNEVHAILHAHLIPPCPHADLFGRLGRAWLGRQIVPADETAAIARHLRELDRLGEDLAVLDREIAQGAVDDPAVKRLLTVSGINLTAAVGLVAAIGDVSRFASPQKLASYVGLNPRVRQSGLGLAQYGRISKQGRAHARAMLVEAAWTAAKTPGPLRAFFLRIRARRGHQVAAVAVARKLAVVCWHLLSKNADYHWARPALLAHKVRAMELQAGLPEKKGNKRGPAYAYNVKELRDREIEVARHAERAYERFVTGWQPRVTRTTRRTGAAIEERR

SEQ ID NO: 131032 - protein, 329 aa, unidentified
MIVVGIDPHKQTHTAVAVDAASGRSLGELTVKARTAGFERLVEWAREFDQERTFAVEDGRHVSGHLERHLIARGERSVRVPPRMMGEARRIDRVWGKSDPVDATAVARAALAHPDLPEATLAGPEREIGLLVAHRESLVRERADKICKLRWLLHDIDPDLAPVPRSLNRFVTLRRLAQVLQAMDASVEVEICLDLIARCADITTRANELERRITSLMRTHAPALLQIPGCAALTAAKIVAETAQIDRFPTEGHFARYAGTAPIPASSGARHRQRFNPRGNRQLNTAVHRIAVTQIRMHPSARDYVAKKRAEGKTKTEAIRCLIGRVSAL

SEQ ID NO: 131033 - protein, 354 aa, unidentified
MNQEKYIGMDVHQATISVAVMDAQGKLIMECLLETKAATIVDFIRGLQGTLSLTFEEGTAAAWLHDLLKPHVSRLVVCDPRKNALLKDGNKSDIDARKLAELLRGNQLHPVYHGEHGVRTLKELGRSYLTITQDVTRVMNRIKALYRSWAIPCAGATVYAPRHRAEWLAKIAEPGVRVRAERLYQQLDLLQPVRLEARRELLVESHKHSGVKLLRQIPSIGPIRSALLVALLQTPHRFRTKRQLWAYSGFAVQTHDSGEYRSVRGKMQRNRERMTVRGLNDNHNRELKNLFKSAAVSASTRPGPLRDFYVARVEKGMRPTMARLTLARKLAAISLTIWKKGVDFDAKQLDQQAA

SEQ ID NO: 131034 - protein, 398 aa, unidentified
MFYCGIDIAKNTHYASVINEVGKKIGASVSFSNTKIGCEKVIALFEKHGITTENLIIGMEATGHYWLSVYTFFAGNGYDTKVINPIQSDIMRRMSIQPIKNDAKDSIVVAEVMRFGKYSASEIADEKYVALRQLSRYRVSLTGEIGDAKRRVIALLDQVFPEYAKEFSDVFGVTSQEILLNYSTPEELEKVSVKKLSKLLEKASRGRFGEEKARSLKSLAKSTFGISIANKAFSFEIKLLMQTIEFLTNQLSELEKEIADLLGETDTFITSIVGIGTVLGAAILGEIGDINRFSEAENLVAYAGLKCRHSDSGEFKSSQNHMTKRGSPYLRRAIWLAATVAANHDPTLASYYQSLKSRGKHHLVAINAVARKMCNIIFVILKENRPYEKFPPQKVKVA

SEQ ID NO: 131035 - protein, 372 aa, unidentified
MQQNSKVFVGLDTSKLKIAVAVAEDGRQGEVRFLGEIDNTPEAVRRLVSKLSGKHRELLFCYEAGPTGYGLQRQISALGHECAVIAPSLIPKRPGERIKTNRRDALSLARLHRAGELTAIWVPDPGHEAVRELVRAREAAMEDLREKRQHLQSFLLRHGRIFSGHKPWTRAHARWLSELIFEHPAQYLVLREYRQAIEDAEARLERLNQQVAEVVKTWSMAPVVEAYQALRGVALLTAVTFVAEIGDVRRFESPRQLMAYLGLVPCESSTGERVRRGRITKAGNPRVRRVLIEGAWTYRFPARMSRVLQERQEGLPAIVRAIAWKAQVRLCARYRRLMAAGKRQTVVTTAIAREMAAFLWAIGREIEPRSAA

SEQ ID NO: 131036 - protein, 402 aa, unidentified
MTDAPNRYIGLDIHKEYFVAVGVNEKLEAIFGPQRVSNYLLDDWILRCLTPEDAVVLEMSTNTYQFYDALLPHVHSVMAVHSPNVAMVTNVRVKTDNKAALALAQLHAAGLLTGVWIPPYPVRDLRSLIARREKMVRLSTMAKNRLHSMLHRHHLVTPEKPFAPEQRTWWESLPLSANEQFLVRSDLDTLDFAQKQVGQIEECLKQESAEDARIPLLIQLPGVAMLTAITILAAIGDITRFPTAKKLVGYAGLGTRVHHSGMTHSNGRITKAGRKDLRCAMVNAANHAVEHHVHWKKELERLTPHLGRSKAIVAIARKLLVAVWHVLSKQVADRFADPRDVASSFIRYAYRIGVRNLPNQQPALSFTRDQLDRLGVGRDLKEIPWGSICFKLPPSKLLLEKE

SEQ ID NO: 131037 - protein, 422 aa, unidentified
MGLQIVYERCAGVDIGKDIIAVAVRTPGEGPDGRKTIKRTFKTFYGVLRECARWLTGHGVTHVAMEATGIYSMPVYHALVAHGEFEVLVCNAGHVKNVPGRKTDLSDAEWLAQLLECGLLRGSFIPPADIKAARDVIRYRRKLVEHRTSELQRLGNVLQDAGIKADSVASSVTTKSVRAMVEALIDGERRPTVLADLAKGSMRSKIPDLARALEGRFDDHHALMCRLHLTHLDQLDEMITRLDEQIEQMMQPFCAQRQLIESVPGIAEHGSAAVISEIGADPAAWFPSAEHLASWVGLCPGNHESAGKRHHGRPRKGNQHLAPVLVECAWAAVRTDGYLREYYRRMVRKFGGFRSPSAKKKAIVAVAHKLIVIIWHVLATGRPYQDLGADYFTNRIDPEKERRRLIAKLEAQGFKVTLEPAA

SEQ ID NO: 131038 - protein, 392 aa, unidentified
MIYVGIDVAKGKHDCCIVDSDGVIINDSLRISNSRQGFELLYSTILSVLPGKDISNVKIGLESTGHYSTNIQNFLCAKGFKLSILNPLATNLFRKAQTLRKTKTDKTDALVIAKMLFSDDTKSYSPVSYQIQELKSLTRHRHRLIGYRGKLKISITRLIDIIFPELPKYVWSIHQNSSYRLLSELSSPEDIANCHLTKLTNILSKASRGKYGKDKAIALKEAAGSSIGTSTRSLSFELQQTIRLIQSVQAEIDALDLQIKEVVTEINSPIMSIPGISYTLAAIILSEIGDIEKFTSPAKLLAFAGLDPSTYQSGKYNASHTPMVKRGSAYLRWAILIASRTVSLRDYTFSAYLSKKQSEGKHYFVAMSHVAKKLIRVIFYLLKTNTAFVPQM

SEQ ID NO: 131039 - protein, 400 aa, unidentified
MLSIGIDVSKGKSTVCGMKPGGEIVYAPFEVQHTREGMSELVSLLHNSGEEVRAVLESTGSYHCPVVAALLESGIFVSVVNSLRMKRFCSQSIRKVKTDRIDAMQIALYGLAYWQELQPTRLPEDTYRELQLLARQYYQMTSMLIKAKVDFNALCDQVLPGMQELMSDHAGRHKLSDFVLRYHHTTYILETGETRFRKDYCKWAEKKGYRNCERMAALIFATAQNGIPVLPNAPSTQIVITEAIRVLHTVEASRDAILTQMQALAKTLPEYSLVREMPCIGDTLAPRLIAEIGDVRRFHSKRALIAYAGIDAPPYQSGKFCANNRHISKRGNRYLRKTGYEVMQSYVMHKPANDPIFTFIEKKRGEGKSGKLAMVAGLNKFLRVYYGKVTELYRSLPAIE

SEQ ID NO: 131040 - protein, 454 aa, unidentified
MLKTQKKKQPRGLSPAPVLEPNAAGVDIGATEIYIAVPPDRDGRPVQRFATFTEDLVAAADWLQRCRIETVAMESTGVYWIPLFQILEARGLKVCLVNARYVKNVPGRKTDVSDCQWLQYLHAVGLLRASFRPEQQICAVRSLMRYRESLVQMAAVHLQHMQKALDQMNLQLHHVISDLSGMTGMAILDAILAGERNPVELAKLRNGRIKASEATIAKSLVGDYRREHLFTLRQSLVAYRHYQKQMADTDVEIEQMLTEFSDGAGPDAPALPQPKDTHKPRRNDLRFDLRAHLYRIFGIDLTAVPGINALTANMLLTEVGRDLSAFRSAAAFASWLGLCPDNRVSGGKVLSSRTRQVDHRLARALRMAAQALFRSQSWLGQYFRRMRAKLGAPKAITAAAHKLARILFHMLTTGQAYDETVFAQQEALNNQRMQQRLQQQARKYGFQLVEIAPQ

SEQ ID NO: 131041 - protein, 346 aa, unidentified
MNQIIRIGMDTSKHFFQLHGVDAAERPVLRRKLRRNQVLAFFARLPPTVIGMEACGAAHYWARELRKLGHEVKLMAPQHVKAYVKRNKNDGRDAEGLCEAMSRPTMQFVPVKTEEQQAALMLAGVRQQLIARRTQLSNAIRGYAAEFGLTAAKGLDKIEPLLAQIAQDETVPESARQLFSFQGKDYAQLQIDLKAIEAKLMAWHRANAASRRLAQIPGVGPIGATALVMKTPDPGAFPSGRHFAAWLGLTPKDHSTAGKTRLGKITRAGDEVLRSLLVAGATAVIQQVRHGRGHPSPWLVALVKRKPPKLAAVALANKIARIAWKLMTTGESYDSARMPGASAAAA

SEQ ID NO: 131042 - protein, 458 aa, unidentified
MQLLYRRCAGLDVHKSSVTVCVRRRVSGSSQVEMEEAVFATFTQDLRRLGAWLKQHKVKHVAMESTGVYWIPVWNALEGQSLSLTLVNPATVRALQGRKTDRIDARRIAEYMQYGLLGGSFVPPRAVRQWRELTRMRVHVQQDRNRVINRIARQLETVNIKLSSVASNIVGKSGRAILAALAAGRSTPEQMANQALSRLRDKRAALVLALDGKPDAHFRWMLSRLLRKLESLDMELAEIDAQLDQQMSEQADLIERLSTIPGVDRTTAQAVIAELGTDMSVFPDAAHLASWAGLCPGNAESAGKRFSGRTRKGDRYLRRVLVQSAWAAARTRNCFLRALFFRIAGKRGLKKAAVAVAHRVLTIIWRIIRDGGAYEERGGDYFDQRDPQRTARKLTRRLEHIGFEVEIKRRPIDPVPNDQAVPASVCGKCHRWHLAHCIHHNPRPLRNRRPPKSLESQR

SEQ ID NO: 131043 - protein, 371 aa, unidentified
MNTIVYIGMDVHKESYTLCCYSYDTDKVEYKQTVPADYKLILKYMEQVRKRYEGEVSFVCGYEAGCLGYSLYHQLKDHEVDCKILAPTTMAITNTSHVKTDKRDAANIARCLAFHTYSEVYVPDDEDNAVKEYIRMRDDQKQMLKKIKQQILAFVLRSGKKFDGGKTYWTIAHLKWLRSLNLEGLDKEILKEYLITYDYLVEKIVRLDQRIEELASNEKYSRTVKNMGCFLGVKTHTALSMIVEVGDFDRFEKAQKFAGFLGLVPSENSSGDSTNRYSITKAGNSHLRRLLVEAAQSYTRGNIGHKSLALKQRQKGCDPEVIAYADKANERLRRKFYRMTLNKGINRNIATTAIARELACFMWGMATGNIS

SEQ ID NO: 131044 - protein, 346 aa, unidentified
MEQYVGLDVSLKMTAICIVDRAGKIEREGMVASDPAAITAFVRLHAPHVARIGLETGATSTWLWTELNKMGLPVICIDARHAKAALKMQINKSDRNDALGIARIMQCGWYKEVRVKGLDSHAIKALLVSRSLLVKIKRDLENQVRGLLKNLGLVIGRAKMNVFVVRAAELIGDRPELAAAVEPLLKAREAVEKQIADLDRKVMRLARNDVQVRRFMTAPGIGPITALCYLATIDDPTRFKRSRSVGAYVGLTSRRYASGEVDWTGRISKCGDAMLRCYLYEAAGVLLTRVAKWSVLKAWGMRVAKRSGLRKAKVAVARKLAVILHRMWVDGTEFKWSSKEVATQPT

SEQ ID NO: 131045 - protein, 344 aa, unidentified
MDTIGLDLHKRESQLCILTTEGELVEQRIVTSRDRFTAVLGSRAPARILVEASTESEWVARHLESLGHEVVVADPNFAPMYATRSRRVKTDRRDARTLAEACRLGAFRRAHRASDTQRQVRAELAVRDVLIRTRTRCVAVTKALLRGDGLRLPSGNAEHTERKLAALALPGDLTQSLAPLRAVWAPLAAEITAADDRLAARAHQDPVVARLMTAPSIGPVTAIAFVATLDDVTRFQSAHQVEAYLGLTPREYSSGEQQRRGRISKTGNPRMRWLLVEAGWRILRTKDPAAAALKAWAEGIALRRGRSIAAVAVARRLAGILYAMWRDGQDYRASRPPEGAIAIT

SEQ ID NO: 131046 - protein, 391 aa, unidentified
MIYIGIDVAKDKHDCFITNSEGEVLFNAFTIPNNADGFHDLFQKISSLTNDFSNVKVGLEATGHYNYNLLGFLIDKGLPTFVINPLHTNLFRKSLSLRQTKTDKVDAHTIALTMMSGVNLQSYSNTSYHNEELKSLTRYRFDKVQERAKLKTSISRLVNILFPELEKLVPSLHMVSIYALLAEFPSSAQIASCHLTRLTNLLANASKGHYNKEKAIEIRNAAKHSIGSNMPAKSLELKHTIRLIQELTSEIDEIECSIKSIMDEIRSPILSIPGINYRMGAMIIAEIGDFNRFSSPDKILAYAGLSPSTYQSGQLDGCYSHMEKRGSRYLRYALFNATKFVCIWDNQFSAYLAKKRSEGKHYNVAISHAAKKLVRVIYQLEKSGQLYHRAA

SEQ ID NO: 131047 - protein, 429 aa, unidentified
MEEVDEVELVVQRVAALDLGKATLEACMRVPHPSKPGRRMQEIRGYATTTATLLEMAIWLRQWGIERVAMESTSDYWKGVYYLLEAEGFDCWLVNAREVKNVPGRAKTDRADAVWLAKVAERGMCRPSLVHPPPIRRLRDLTRYRRALVADRSREMQRVEKLLEDAQIKISSVLSDIHGVSGRAMMEALIAGQRDPRSLARLAKGLARKKTDRLEEALRGFFTDHHATILQMMLDNIDRIGAQIAALDARIAEAISPFSRQAARLADIPGVNTVAAAELIAEIGVDMTRFPSPAHLVSWAKFCPQIHQSAGKSRSKARGKGNPWLAGTVGRIVFSASHTDTFLGARYRRLARRRGKPKAIVAVGNSVLTVVYHLLSDADLDFCELGPAHYESRINKHRRARDLATQLQALTGQHIVIRDGKAIITDNAA

SEQ ID NO: 131048 - protein, 415 aa, unidentified
MSKILHVGIDVSLRKAAVALLDSSGVRLGKPFEIPNTLSGTQQLEERLLALLKAGGFQGLRLGMEATHFYGFHLAEHFTASPLLLPWHPLVYLINAKRIHDFKGAFPEREKTDLVDAEVIAEFLRFGRLPTPYEGQARWLPLQRLVRYRYHLVHTLQRETQYFLSHLFLQFPGWVQNKPLGRLGASARAVLTELTPGELIAMPLEELASFIAKAGKRRSPNPQALAKAVQQAARESYRIRPELAKSVQFILASILRNLLALKASLKEIDAAIADAGKGFLNPLRSVPGIGPVYASGLLASLGDIRRFPSDEALAKMAGLVWRRRQSGEFEAEERRLIRSADRYLRYYLVETANSLRVHNEEYRAYYHKKYQEVRKHSHKRALVLTARKLVRLIFALLSKNQLYDPARPFQSAAAR

SEQ ID NO: 131049 - protein, 453 aa, unidentified
MIILALDLGKFNTMCCIYNSETHKHQFINAATERNYLTTLFNKTKCDLVVMEACGPSGWINDLAVSLGHKTLVCSTNEDAWKWFNVKRKTDKDDALKLAKMASMRQLKAVHMPSEEHREFRSLVKYRKTLDSRICKMKCTIRAWFVNHGITIDTGEKAWHSGRERINSFRKPIADCAPNELWKGELDLELTQLDAVTAQMDSVVKRLEAIGRKDPRVQRLRTIPGVGPRTAEILVACIDDPNRFRNGREVSAYFGLVPRQYQSGETDRNGRITKRGNPLARTILVECAWASLRYNPWAKEIYDRICGKQKTRKKKAAIALGRKIAVVAWALLRDGKDWDPKRMLNVTESFGKTPQSLKDTLENMKPKENSDQRKSRLRREAREASAATTTQSSMAPKTATKPTSKSTQSTKVVAMKPKRTSRIVPSKAQAVPKGKAMASAPKTRRAKKLVSPV

SEQ ID NO: 131050 - protein, 339 aa, unidentified
MRLYAAFDLHANNNFHAVMDQDGQRVFHKKLPNDLGLILEVLRPRQSEMVGVVVESTYNWYWLVDGLMEGGYRVHLANPSGIQRYKGLKHSDDRHDAFWLAEMLRLAILPEGYIYPKEERPVRDLLRKRGHLVRLRTSLILSLQNIIARNCGVRVGANEVKRLREDRVSCVLDGQQEIALAGRASKETIDFLTHQICRIERRVEGKVKLKESYRYLLTLPGVGRILALTIMLETGPISRFPKVGDYVSYCRKVSSHWTSNDKNKGKGNQRSGNRYLAWAFSEAAEYARRYHLPSRAYYNRKLQKTNLMVARSALSHKLARAAYYVMRDQVPFMAEKLFA

SEQ ID NO: 131051 - protein, 411 aa, unidentified
MVKENFIYVGIDLHKETHTAVMIDCYNQKLGEITFPNRPADFPKLVTKVKKCNTDAKEVVYGLENAYGYGRPLAVWLIDKGYFVKDVNTAISHRQAKHRGAMYRKSDSDDAEAIALATLNMLDKLPDACPNDAYWSLGQLVHRRDNIMKQRTRLVNQLHEQLCIAYPSYKQFFNDISRPTALYFWEHYPSRKYLKGKSVEDLRTELVPVSHNRCSTKNCEKILDAVASDKVKNNAYQDARDMVTLSIVSDLQHYDSQLAEVDKMLEQMYKMLGCTLTTIPGVNVITAVKILAEIGDIKRFSNANKLAQFAGIAPLHLSSSGKGKDVATKQGNRRLQATIYFLAIQMVQVSSKGTPRNPVVRAYYEKRKAEGKTSQQALICISRRLISIIYGMLKNGTEYRMLVVENAGEKL

SEQ ID NO: 131052 - protein, 305 aa, unidentified
MSAIQYRQIIEVGCGIDVHKDIIVATIRKSDSVYETREFDAYTSSLTDLRDWCKEEGVSHIAMESTGVYWKPVFNVLESDFEILLVNARHVRNVPGHKTDKKDSAWLSKLLLSGLLRGSFIPPRDIRELRDLVRYKKKIVGQMASEKNRIIKILEDANIKLSSVLTNVDGATGTKVIADLISGTMEATELSRHYHGKMKASKADMERALEGKLTPHHQFMLTTIKRSIEDKQALIDELDRQIEKATQGYQVEIDLLQSIPGVGKESAIGIISEIGADMSQFPNQNHLSSWAGMSPGNNESGGKKK

SEQ ID NO: 131053 - protein, 343 aa, unidentified
MQVITTIGLDIAKSVFQVHGIDASGAVIVRRQLRRSQVLPFFRELPGCVIGIEACATSHHWARELEKVGHEVRLMPARYVKPYVKRNKNDAADAEAICEAVTRPTMRFVAVKTCEQQSVLMLHRTRQLFVRQRTTLINALRAHLAEFGIVAGIGRNGVEKLLELITRGEDDRIPPAAHECLVALAAQLAMVKRQILEADRRVLAWHRTSKTSKRLEAIPGVGPLIATALVASIPDPTVFRSGRDLSAWIGLVPKQNSTGGKERLGSISKAGNRYLRSLLVVGALSVIRRAKQLGYTRHPWLVRLMERRSVKIAAIALANKIARIAWAMMTRNESYRTPLPASA

SEQ ID NO: 131054 - protein, 435 aa, unidentified
MSSLEKIIKNCAGIDIGSEKVFVAIEGEEVRSYRTFTRTYKELGVYMREHGITHVAMEATGIYWITLYDILEAMGFDVYLVNPADSKNLPGRKTDVQDCQWIQQLFSYGLLRKSFVPEDIVRKLRVYTRMREDKLQMASSHILHMQKALVQMNIRLSEVLSQTHGASGMAMIEAILEGERDPQVLLSYCTTDLRKRKGADILLALEGNYKEEYIFELQQAFDGYMFYLNQVQLCDKETEKILIEFKNKSNNDYKDDNRIKPIRHNKPDIKNLHDLLMGIHGANPTVLPGLTDYSLMRLTAELGNNIEQWPNVKAFISWLGLAPGKNQSGKMNKRSKKKAMTRSGQIFKQAAQSLLVSKQPGLGAFARKLKARRGAAIAIKATTRKLAELYYKTFSNGMQYVEKGVEIYLQKQKEQQIRFLTKKATELNMQLVDIK

SEQ ID NO: 131055 - protein, 280 aa, unidentified
MQITTIGLDIAKNVFQVHGIDASEKVFVRKQLRRSQVLAFFKALPPCLVGMEACATGHYWARELTKLGHQVRLMPAKDVKAYVKRNKNDAADAEAICEAVRRPTMRFVQVKSAEQQGRLMQHRTRDLLMRQRTQVINALRAHMAELGIVAAQGREGIKELLTIIASEEDARLPVDAHASLVVLAAGLQAVQTMIGSIEKRIIVQHRSNEASKRLETIPGIGVIGATAIAATVPDPKAFRSGRDLAAWIGLVPRQDSTGGKQKLGPISKQGDQYLRRILVV

SEQ ID NO: 131056 - protein, 310 aa, unidentified
MQVESSIIGIDVAKAELVIYFLGQTYSIENTPQAIRAWLKDLPSLCEIAIEATGTYHMDVIELAHRKGHHIYVIDGSRLHHYRKGTGGRAKTDASDAQLLARHLQHEKGALRRWSPPPKAYRTLQTLLRRRAALVKARTIIQQSLGAEPLLKAGLKRLISQINTLDAQIQKHLRDTVRDAGLSEQVQRCKALEGVGDLTAYALVMAFLRGDFRNSDAFVAFLGMDVHVRDSGTKTGKRKLTKKGDSEARRLLYCAAMAARRSKRWAGVYQAYLDRGLATTQALVILARKLVRIAFALMKNGTDYQPAPAS

SEQ ID NO: 131057 - protein, 389 aa, unidentified
MEARTVSSLPTAAPHHDVVRCLLAIELSKTSWVVAVHTPLSDKISRYTLEGCDWKGLLELIERIRKRVTREFGPSVEMISCYEASYDGFWLHRLLEGHGVRNHVIDPASLQVDRRVRRAKTDRIDAARLLRSLMAHVRGEPKVWSVVRVPSVAEEDDRRLHRERDRLINERGQHVNRIKGLCAVHGIYDYEPMHSKRMPRLERLRTATGDQLPRRFKEEIKRELQRLELVLQMIKSIETERDAIASAKASTHTNAKKIQKLVKLRGIGSEFATVLVGEVFFRPFSNRHQIASYVGLTPSHFQSGSMSRDQGISKAGNPKARTTMVELAWMWLRHQPGSSLSAWFRERVGALRGRIRRITIVAVARKLLITLWRYLEAGVLPTDIELKKG

SEQ ID NO: 131058 - protein, 335 aa, unidentified
MDTHADVHVAAAVDTNGGLLGIESFPTDDAEYRRLNEWLAEFGPVIRVGVEGTGSYGVGLTRHLHSGGVEVVEVARPNRQRRRRLGKSDPIDAETAARAPLSGTARVVPKRRDGAVEQIRVLSVARRSARVQRTATLNQLRQIVLTAPDAVRTRFKDRARTGLVSEAAAMRPRKGHDPVAYTTLVVIRGLARRIRDLDDEIAGIDDALKELIDATAPSLHDCHGVGVDTATTPLVAAGNNADRLTSERSRAHLCGVSPVPAGSGKTSGRVRLNRSGNRQANAALHRIVLTRMASDPETRNHVRRRSAQGLSKREIMRCLKRYVARQTYQHLPRAA

SEQ ID NO: 131059 - protein, 333 aa, unidentified
MNAVFCGLDVHKESTYATVLDQTGQVVTQRRMKNEEVPEFLEPLEVEKVAMEASTYIIPMYRRLVEEGYDVTVSHPKKTRYIAEARIKSDRVDSKALAELLRLDSLPTSYIPPKELSDLREKIRRRAFIVRQNTKLKVKIRDVLAYEGVKPPTGYGLFTKKGVDWLRGLSMEPVDCYLRLMAPLSREVLLLSKELRGMAKDDPDVQLLMTIPVVGYYIALLVKAEIGDINRFSSGDHLASYAGLVPSTRSSGGVTRHGRITREGSRWLRWALVEAAMVHVRQDSQVTRFYHRVAERRGKKPALVAVARKLATVCYSVLVNRRPYYDPLQSQAT

SEQ ID NO: 131060 - protein, 359 aa, unidentified
MKTQNYKLDFKDQNIYVGFDVHLKSWRVTIMTEHMTHKTFSQSPKPELLYQYLVKNFPGGTYYSAYEAGFSGYWIHNKLQSLGVNSIVVNPADIPTTDKERDQKDDTRDSRKIARSLRNKELTPIYVPTLKTLEDRTLVRTRSMLVKDITRYKNRIKSFLYFHGIEIPDTFVKNSSHWSKRFTDWLENIEMTETSGKSALKLHVDTVKTLRESLLKTTKQIKELSNTLHYQEKILLLRSVPGIGLITAMIIITELENIDRFSNIDQLCGFIGLVPSRHSSGEKDQTGDLTHRGHGTLRPAIIESAWMAVRVDTALLKCYTSYCMRMEPNKAIIRIARKLLSRISFVLRNKQQYVCAKVK

SEQ ID NO: 131061 - protein, 336 aa, unidentified
MNIKRIGLDLAKQVFQLHAVDHQERIVLRKTLHRARMLTFFTRLEPCLIGIEACGSSHYRARELTRLGHTVRIIPPQFVKPYLKGNKNDANDAEAICEAVSRPGMRYVAIKSEAQQSMQAEHRVRARLIHDRTALSNEIRGMLGEFGFVLPAGLSALRKALPEILSQQEKWDNRFIRLLSELTEELQALDERLNRYDRRLKQLAQEDERIRRLQEISGIGPVTASALVAAVGDAKQFKSGREMAAWLGLVPRQHSSGGKTKMGHISKRGDSYLRTLLIHGARAVLNACDHKEDRRSRWLQSVAERRNRNIATVAMANKNARIAWSVLSRGEEYRVM

SEQ ID NO: 131062 - protein, 409 aa, unidentified
MAPSAPASNLADGAHPTRKPKQQMKPLNDLSRSLTPFSPNHTLIAVIEMSKESWLVAGIIPGVDRQQLKKLATDENELLKLLGRWRAEAEKAGHKIARLAVAFETGRDGFWLARWLRARGIEAHVIHAASVAVSREHRRAKTDRLDTEGLKRAFLGWLRGEREHCKMAAIPTSAEEDAKRPHRERETLVGEQTSIINRLKATLIRLGIRNFNPKLKQAPERLEHLRTPEGEPIPPNTLAELRRDMQRRRLVSEQIRQIEEARLEQRKQAPKTGPNLMVLVLVRVIGMGIETADMLVKEILSRNLRDRRAVARYAGLTGSPDESGSKRREKGLARSGNARVRRGMVQLAWRFLNFQKESALAKWFRARTENSRGSRKKMIVALARKLLIALWHLVRNGVVPEGVILRPAH

SEQ ID NO: 131063 - protein, 456 aa, unidentified
MTTWNKRPRWVEISEDMARINRNAAGIDVGASEMWVAVPGSRDAKPVRRFDAFTRDLYALADWLKQCGIETVAMESTGVYWIPLFQILEERGFKVVLVNAKYAKNVAGRKTDMLDCQWIQVLHTYGLLAGSFRPTAEMCVLRCYMRQRQMLIEYAAGHVQHVQKALSQMNLQLEMVISDVVGLTGMRIIRAIVKGERDPQRLAAMRDVRTKNNEETIAKALEGTYQPEHIFSLKQAIELFDFYQQQISDCDQQIADYLRSLESKINTETHPIKPPRLKKKNRRNAPGFDCRHEAYRISGVDLTQIDGISESAALAILSEIGVDMSRWKAEKNFASWLTLCPNNKITGGKVFHRRTRKSANRVRDLLRICSLSLFNSHSALGAFARRMRSRLGPEKAIVATAHKLALLIYRLLKFGKDYVDIGQGAYEQQFKQRAVKNLARKAKQFGFQLTPSPVAP

SEQ ID NO: 131064 - protein, 345 aa, unidentified
MKKVVAGIDLHSNNVVIGIMDMDGKRVANQKVSCELKEVAKVLAPYEKRLEQIAVESTYNWYWLVDGLRALKYPVVLANPAGMQQYNGIKHADDTNDAFFLAELLRLNILPTGHIYDPELRPVRDLLRRRLMLVHHRTALMLSFKSLYTRTTGQELALGKLKDLEVQEAQELYEHPANQLIAGMQVKHIEQLTESIEKIEKAVLSCARELPCYSKLTTLPGVGRILGMTITMEVGDVKRFAGQGNFASYCRTVEAKRTSNSKKKGENNSKCGNKYLAWAFVEAANFARRYDEQCRRWHDRKAAKTSKVMATKALACKLAKAAWYLMAGEVGYDAKRMFGQPATTK

SEQ ID NO: 131065 - protein, 423 aa, unidentified
MKVVYPICCGVDVHKTFLVATVITTEEITPHYQKKRFSTFNNQILEFKQWLLENNCLDMCMESTGKYWVPVFNLLEDSIHVTVANPKWVKAVKGNKDDAKDSKWIGDLFRLGLVPGSFIPCKSIRILREFTRYRFKLVCCKSSEKNRYQNVFTVCNVALDAVVSDMFGKSAASITDYIVNSDTFDPEHCVSLLRKSLKKKADDVVASIEGFQMSDAQKFRARMVMEHYKFLMELIHRLDEKIDELAVPYESAITLLCSIPGIDRNSAISIISEIGTDMSQFSSSKRLCCWAGLTPGNNESAGKKKSVRITRAGVYLKPMLVQVAHAAVKDKKNPYYRTKYEEISKRRGKKRAIIAIARMILTAAFHILLTGELWHPCDLQQIDMPPELRKKQLQKTLRRAAKLLVSHGVITQDAIRLSEPAPA

SEQ ID NO: 131066 - protein, 439 aa, unidentified
MHKEVEELPPAPTAPIWRIEECMARSRKCRSGAHTRREAMGLTATAKRGANLKSKGRAAVGIDPSRTALQVSLLFPRAGKPRNKTLPLGPAAVKRLEELLRGVPATIAMEGSHSTGQLFLLEVLKQGHDVREVHPFVSKRFREALSEDHTDRKDAEGLAVLARWKADLPPVRFAEAQATYKRISRLRQRLVRDHARYLNRVHAVLSETYGVTYKGLFKNLASKKALRFFQQYPTINDALRGDPDAPLQVGPQAWERLRRAGSWRETTYLRCLRTEVRTLAAHVLALHDRIAEVGREMAKAPRTRNLETLLSLPRLGVATAMTIVGNSGDFSRFGGNVDRYVAYAGLAPASHQSGAGEPSGRPRCRYNRYLKNAFMFMAFNRLQVDQRAREYYQRKRQEGKEHWTALRALARYLCRWVFRILTGKTPTQQGGAAPTNPHP

SEQ ID NO: 131067 - protein, 428 aa, unidentified
MNTNETPVGTADQYAAFIAIDWADQQHVFRLQVAGQTKKETGTLEQKPEVIGPWIAQLRARFGGRAIAIGVEQSRGALLHALLGYDFLVLYPIHSTTVAKFRGAFKSSGAKSDPLDTDQILLILTKHLELLKPLRPDTVETRLLARLTQDRRKVVDLRTTHIQALLAALKEYFPQAIELFNGNVTSRLAADFLKKWPDLPAFQAAKPAVLKKFYYGHNVRTPEVIEKMLQLAATAQPLTTDPAIVESGGQLSRLHSQVIQTLNASIAEYDERIAAVFASHPEAKIFTGLPGAGAALAPRLLSFFGTDRNRFATASNVQCFSGIAPVTKSSGRSKVVHFRLACPKFARQTFHEFARLSVAQCQWAANFVEYHTGRGKKYQAVIRALAFKWIRILTQCWKNHTPYDEQKYLADLKKRGSIFATLHLEKKS

SEQ ID NO: 131068 - protein, 476 aa, unidentified
MNAKSSSKKNQVVAANIFEREELVRKAEKIGKDLRAYSWKELETHGKFAKNDKISFISDNMLVVGCDIGSETHYLRAIDTRGRELSTKAFPFSNTAEGFASAKAWLLELAARHGKTQIVVGLEPTGHYWFCLASWLVSNGISVVQVNPYAVKQTKELEDNSQRKDDLKDPKLIANLVKDGNYGMPYLPEGVYGDLRRFTLLRDQLTEDRIRAVNRLHRELTICFPEYKDAFGKVDGAFTMALLKTVPFPADLKAIGADGIREIWHAAKLRGRGYSRAEEIIRYAEQSVGLQDGVDGSRTAVIWFAEQIASLDQKLAEIEEVLRAKCHELPCAENLLEIPGVGGTILAGIVAEMGDLSRFDTAKEIQKLSGLGLVACSSGKHKGETKISHRGRKRLRYWLFQAAKSVTAHTAEFKELHAYYTTRENNPLKKMQSLVVIACKLLRIIFAIFKNGTRYNPEKMLRDIRRQTDQAIASAA

SEQ ID NO: 131069 - protein, 274 aa, unidentified
MERVYIGLDVHKEQIVIGVAGIGDAHLYGQCSSDIRCFMKAMRGVERKYAVERAQLRICYEAGPSGFALARHLQRIGYAVEVVAPSLIPTKAGERVKTDRRDAKKLARLYRAGELTAVHIPDAEDEVIRDLCRARTDAIDDQTRAKHRLMMFLLRNGHRYGGKTAWNDAHRRYLRELVLVDPIQKLILEEYLQAVDRARDRVESLQEQMRLRLEGWSRRPFVEALQGFKGFQLVAAMIVTSELGDLSRFKHPRQLMAYLGLVPSEHSSGNSRYE

SEQ ID NO: 131070 - protein, 461 aa, unidentified
MKPVDGDDSAERGRLQGLPVVRTKVAGIDLGSERHWVCAPTEDGVGREVADFGGTTGELMRLAEWLKRRQVESVAMESTGVYWIAPHEVLEGQGLEMFLVDTRQLARVPGRNKKTDPTDCEWIQRLHACGLLQSSFRPAEEICMLRTLVRDKATLVAESSDWVRRMQKSLDQMNVRVHRAVSSIEGATGMAIIRSIVEGERDARVLAKLRDPHCRKSEEEIAEQLSGHWREDHLFSLRQALKMYDGIVERISEYEAEILRKLESMERPEHQGKSAPPLRNANKARMIRQRGQELKRQALYRMSGVDATQIDSIGVETIEVVLSEYGPDLSRFPDEKHFISHLTLAPRVPMSGGKPLKKRKRNSASTRVAAALRMAALALRNSDTALGAFYRHIAQRLGADVAVFASARKIGTLIFRLFRWGQPYVDQGAEAYEAHHHQRRIKALKTKAKQLGFQISPATAS

SEQ ID NO: 131071 - protein, 446 aa, unidentified
MEVLHSHCAGLDVHKKTVVVCCLTPGAQGQRQREVRTFSTVTGELLQLLDWLLAQGVTHVAMESTGEYWKPIYNLLEGHLELLVVNAQHMKQVPGRKTDVKDAEWIADLLQHGLLRGSFIPPLPQRDLRDLTRQRANLMQDRTTVVNRLHKTLEWANIKLTSVLSDVTGASGRAILGALLTGQTDPTVLASLARGRLRSKQTELVAALTGVMRPHHSFLLAQALIQLDFLDEQLEVFDTMIAQYLAEAPPIHASPPDLPPDPPADPPADPPADPPADPPLTREEALVLLDTIPGVGPRVAAILLAEIGTNMAQFPTARHLAGWARLAPGNNESAGKRRSGATGRGNRWLKSTLVQSAWAAIKIKDSYAAGLFQRLCARRGAKRAIIAVAHHLLTAAYYMLLRHQPYHDLGANHFDQLHAQHTVNRLTHRIRQLGFEVAVTPMPETA

SEQ ID NO: 131072 - protein, 341 aa, unidentified
MSKKTFDAVVYDVKAAGVQDCQHCRFDNNGDGFASFREWAVSSRGVRRGSVVVGMEDTGIYSTDLRVFLEDAGIDYCCFNALKLGMDMGRRRGKDDRTEAYRIGRYLYQNRDTLRPSRLEGGTVLKLRELAAERARLVKQAAMSKALVTDRKGRRPTAQVERAKKLIGYIEGLVKEVEQEMRATMEQDDEVRSNYGLLTSIKGVGPVNAMAVITSTDNFRAFSNARQYACYVGVAPFPYTSGTSVRGRTRTSKFANAGIKAVLSQAAKSAVVHNPELRAYFMRKTGEGKHYACVLNAVKFKLVCRMFAVIKRRLPYVADSNEYRIRIAMDDYTPARHINVS

SEQ ID NO: 131073 - protein, 356 aa, unidentified
MKYLKNTEKFVVNKTVFCGIDIHKDHWNLCFYCDGVIVETLRAPANFELIMKHTSSLYQGAAHVRFVYEAGFTGFHLHRRLIKSGYDCIVTPPNRIPSSRDKVKTDKRDAKKLAQFFAGGLLKKVYVPPLSVESDRQVLRLRHNSQKKLTRIKAQIKSHLYLHGHVWPRIMGNPWTKKHMLWLNQLEFENPSLRLILDEYLNEYHYYRDKIAKLTRCIRELSKTEAYHHHFKCLLACRGIGLITAMTFLLELYDMLRFPSSEKFCSYLGLTPSQFSSGEHVRLGHITREGNSHVRRVLVESAWTVIRHDPSLREKYDRIKSRGTNGKKAIVAVARSLAVRLRRCLLDEMEYEIGIC

SEQ ID NO: 131074 - protein, 406 aa, unidentified
MNKLFVGIDVSSQNNVSYLMDSDGVKYSSFSVQNNLGGAKLLTEKIVSAMETLKLSDVVIGMESTSIYGNHLVHSLREDGTLGRYQRKIHVLNPKQVSKSKKAYPDLPKNDWVDAFVIADCLRFGRIRSEVYMDDYRYEALKTLTRARFYAVQNLAREKQRFANLLFLKCSGLAQSADIKNTSSTVLSLMEEYETVDDLANADLEDLTVFVTAAGRGRFADPENTAKTLQAAARGSHRLPQTINDSVNQAMSVSIATMRSMKEQIKVLEKAIEQQFEIIPNTLTSIPGIGKVYSAGIIAEIGDINRFQSQASVAKYAGLVWTQHQSGNFEAENTRMIKSGNRFLRYYLLEAANSVRGCDPEFQRYYGLKYHEVNKGQHKRALALTARKLVRLVFRLLKDNRLYNRW

SEQ ID NO: 131075 - protein, 324 aa, unidentified
MFYLGIDVAKAKIDCCLNLENSASKKKTKTFSNTPKGFEQLQTWLKQHAATSTQTIILMEATSIYHELLAKYLFDADYQVCVTNPARARYFAQSMSKLNKTDKVDSEVLARFAMTADLHFWQPLPQHIQFLNALLDRRAVLCEDLQREKNRLEKAESTFTMEPVLQSIHKSIRQLNKHIQGIDQQIDAHIEQNPDLRNDKELLSSIPAIADRTSLLMLSFLRSHTFERASQAAAFVGLVPIQKQSGSSIHGRSRLSKAGSSKIRAGLYMAAIVATRHNPHIRGMNERLLANGKSKMMAIGAAMRKLVHLCYGVLKHQQPYQADY

SEQ ID NO: 131076 - protein, 371 aa, unidentified
MKKHSTFIGMDVHKNSIDIAIAEEGRNAEVRHYGKIGGTISALAKAVKKLAVKGKPLFFVYEAGPCGYQIYRYLTGQGHDCMVAAPSRIPKQSGRQIKNDRRDAMMLAKLHRSGELTPVCVPDEQDEAIRDLFRAREQAKSDMKRSKQRLLAFLLRSGNRYDGKRPWSQAFMRWLSELKMPHRSQQIVLQEYINANSQSQERVDRITGQIRQLLPQWHLYPIVQALKSLRGVSEIVASATVAELGDFKRFRTPQDMMSYLGLVPSEHSSGNRIRRGSITKAGNSCVRRMLVEAAWAYRYRARVTPQLLKRQQGLPQHIRDIAWKAQERLCRRYTHLFSIGKPKQVIITAIARELCGFIWDIANQVELPQAS

SEQ ID NO: 131077 - protein, 388 aa, unidentified
MNVGADKSEPLTAIHTDLGAIFVSLELSRSSWLITSLSPGGGEKMSKHSVPGGDFAGLMERFAQLQEKARLRTGQSFRIIVVQEAGLDGFWIHRALQNEGIESHVVDAASIATSRRRRRAKTDKIDGETLVRALLAYKRGEPRVCAMVKAPTPGEEDRRHLCRERKALTAERVRHVNRIKGLLFSQGISGYQPLRRDRRQRLEELHTGDGRAFPQHLKALVNRELDRLELLLKQIKTVEAARDALLAVGQTGKPAPAAMLLDIRGIGPEFAAILWSEGLFRHFENRRQIAAYAGLAPTPWQSGAVDREQGVSKAGNPRLRTTLIQLAWLWLRNQPRSALSVWFHERVSRNGGRLRKTTIVALARKLLVALWKYVTAGVVIEGVTMKVA

SEQ ID NO: 131078 - protein, 393 aa, unidentified
MKQRKNAESEPVRIKKFARFIAISGLPACLNPDPDSRLTSIVKVVGLSSSPFFLKSVKDKSMENFYFIGVDVSKKKLDFCVMFEGKVVHEEETNNHQGSIMSLLHHLEEDYGIASGQMLVCAEHTGQYTFPLACACKAVECKLWLENAAEIKYSSGVQRGKNDKVDAKRIAIYASRFQDKVQYYERPTEDIERLKQLESERTLYMTDLAKYKGQMKDQKDYMPKTLYERKMKRLQALMEDLEEAIQSITDEMDEVIASCSVLSRQRELLMSIDGVGRVVATNMIIATEAFTRFDDPRKFNCYAGVAPFSYSSGSSLHSKARVSHRADKVMKRLLHLAAVAITHRIGGELKKYYERKVAEGKNKMSVINALRAKIVARMFAVIKRNEKYKPILS

SEQ ID NO: 131079 - protein, 349 aa, unidentified
MADQRLTYRDRIVYVGVDVHKDTYAVTCVCDKKIVKTATVQADPVGLAASLQRWFPDAMLSTVYEAGFSAFVLHRALIKAGIPNIVVNPASVAVAANDKVKTDRRDSKKLAIDLADGRLRGIYVPTEAEELARLLPRTRAQIVEHRATIARQIKAKLHQFGLIAPSSRRLISNRYLREIAAWPLPSELGVRLSLLAEQWRFATRQLIEIRRLLRAQAQAQAPIEKVYRSVPGIGEVVARTLATELGDMTRFANERALFSSTGLTPSEPSSGASVRRGHISRQGSSRIRQWLVETAWRALPRDPVLKESFDRIAATRGKKRAIVAIARRLTGRIRACFRQGTTYAVGTYA

SEQ ID NO: 131080 - protein, 452 aa, unidentified
MMAPGYNSLGVPTDALITNIGGATKMKNSTARKLRQIPAGYLIIGIDAHKKKHAAVVKTQDAFTRAKFKVSNSRDGFVELLERTKAQMVKTDSRGTIFAIEAGGRYWRTLAYFLEERGIPFRLISPFTLKRRREGEDIDRRKNDYRDADMAAELLRTGKFTETRLPQGIYADLRAAYHTYYGLGRERSRATNLLSALLDSLFPEFYTVFKDISTKTALAVLAAYPSPYVIAEMSMEKFMDTMMAKYKGQHIIRKKVSAIYQAAHNSVGIHAGTGVICFEISLLVERIRLLTEHRRKVEDLIVTLVEWIPESKYLLSIPGLAHITIAGILGELGPLNHYRSGKQLVKMAGINPIQSESANKQASKTPMSKKGRPLLRYCLWEVSLNILQHNQEFKAWAKRLQERPLHQNPLNKREARGAVCKRLLYLVFALFNKHSFYEKNYKVETERELVVA

SEQ ID NO: 131081 - protein, 399 aa, unidentified
MAVVDGDGLLVAKLRIDDSAEGFGKLLGLLAESGDTPDEPIPVAIETSRGLLVAALRGSGRNVYAINPMAVARYRDRHSMARKKSDHVDAMTLANILRTDAHAHRTLPADSDLARAITVLARAAQDAIWRRTKATQELRALLREYYPGFLDAFAGAGHTNLAMPDARAILAIAPTPALGARLSKARIISALRKGGRQRRLEDTAIRILDALRRPQLRQPPLVEKALGRQASALLATLNIECVNADDLNAAAAEAFRQHPDHRIITSFPGLGESTGARVLAEIGDDRGRFADARGLKAFAGSAPVTRASGRSTCVTHRHVKNNRLAAVGFVWAFAAIPRPGPIKDHYERRRAHGDRHAAALRNVFNRLLGQLYHCLQANQTYDESKAFPGSVHAAEPAAA

SEQ ID NO: 131082 - protein, 324 aa, unidentified
MDQMEPTTSAAGAAIFVGIDVSKAALDVALRPSGEQWSSPNDEVGIAELVDRLRPLGPQLIVLEATGGLERLVVAALALAGLPVAVVNPRQARDFAKATGQLAKTDALDAAVLAHFAAAIHPEPRPLPDAQSQALAALVERRQQVVSMLTAEKNRLRQAGPAVRAKVAAHIAWLEQALQDLDGELDQTLRASPLWRERDQLLRSVPGVGPTVSLTVLAHLPELGHGPVKHIATLVGLAPLNRDSGAWRGTRAIWGGRRQVRSALYMAALVGVRHNPVLSTFYQRLLARGKPKKVALTACMHKLLTILHALLRDGTPWQPTLLAT

SEQ ID NO: 131083 - protein, 338 aa, unidentified
MSSMQLRRSDVIVGVDTHKNEHAAVLLDGLGGRLAELFIPATAAGFEYLLTFSLSRIGENGRLVAFGVEGTGSYGIGLARFLRNHGHTVREVTRPPRRGERRTSGKSDAIDAEHAARQVLANIDMPVPKAADGQIEAIRLIKIARDSAVKARSTTMITLKATLVTADAELRAELEPLTDHKLIEAAALLEPEAALADPGAAMQHVLGSLARRWLVLHKEVKDHSRQLKLLTRQVAPQLVEAVGVGYDIAAEMLTTAGDNGSRIKSEAAFAKMCGACPIPAGSGKDQRPSPPLPRRQPASQRGALPSGYRADALAPAHHRLRHQTQKGRTVQARDHPLP

SEQ ID NO: 131084 - protein, 316 aa, unidentified
MAGELYIGIDVSKDSLEVALGYDGEVRQIANQDRAIAALAAELKELGPELVVMEASGGYERMVAALLWEAGLPVVVANPGQVRDFAKGMGQYAKTDRQDARIIARWGEVKQPPLRQLPDAQGRELSELLTRRRQLLEMLVAERQRLAQTVSKPIRKELSASIGSLERRLERIEAEIEQRIRKSDLWNRTRELLESVPGVGKLTSFILLAELPELGTSDRRQLASLVGVAPYPRDSGKWHRPRLIHGGRAAVRSALYMAALSAARCNPVLAPFYQRLLSRGAAKKQALVAVIRRLLGILNAIVRDRIPWRLSCVVPA

SEQ ID NO: 131085 - protein, 350 aa, unidentified
MSQNLNSAVAVIGIDIGKNSFHVVGLDNRGAIVLRQKWSRGQIEARLANMPPCLVGMEACVGAHHLSRKLKALGHDARLMPAKYVRPYSKGQKNDFRDAEAIAEAVQRPTMKFVATKTADQLDLQALHRVRERLVSQRTGIINQIRAFLLERGIAVRQGQRFLRAELPRILAAPPEVLSARMVRVISDLAEDWRRLDQRIDCLSSEIAVLARQDAGCERLMSVPGIGPIISSAMVAAIGTGDAFAKGRDFAAWLGLVPKQISTGDRTILGKISKRGNRYLRVLFVQAAWVVLIKPMSWERHGLKHWIEAARKRLHRNVLAIALANKLARIAWGVLAGSGRTFEASKLQAA

SEQ ID NO: 131086 - protein, 315 aa, unidentified
MAVGLARTSVGIDVSKQTLDVVILPERGRFTVRNDGIGIRRLVRALSARSPHRIVLEATSSLHIAVTDALSAAGLPVVVANPRHVRDFARSIGQLAKTDALDAYVIARYAEAVSPPIRQLPDAATRELQALIARRRQLVEMRTAEMNHLCSAHPTVAPEIRRSITAFDRKVAAVERRIAAVIESRPDWQKRAAQLRSVPGVGSVTAATLLGGLPELGCTPDRALSALVGVAPLNRDSGRFRGKRCVWGGRADVRAVLYMAALTAARCNPDIRAFYKRLRDAGKPTKVALTACVRKLLIVLNSVIRREAAWMPCAA

SEQ ID NO: 131087 - protein, 419 aa, unidentified
MARIHSIAQDAVLVAIDISKKRNDVLIQVPGSPRRRRLVVLNQRAEHDRFIQRLKAFDRPVVTGFEATGNYHRALAWRLVDAGIETRLISSMALARQREAIHNGWDKNDPKDAQVILHMLATGLSQVYQDPLAAGLADIQELSKTHEAVSRARTQTIHRILTHYLPLYFPEIEKFLGSSRRDWFFALLEMFPTPASISALSPEAFSAAVWDIIGKKTSKARLIADIYETAKESIGLPVPLDSRAIAMFRMVLAEARSLNRQRNAIEAEAEALLGGTPDFEALKQIPGIGPIIALTILAEAGDLRRFGHHRQFLKFCGLDLSTHQSGTFRGQTKLSKYGNARLRRALWMAGLVAIRQRENSFRDKYTRYIARDPDNADLKRKALTAVTAKMARTAHAVIKSGKAYRPFYEGPVPGGRTSL

SEQ ID NO: 131088 - protein, 337 aa, unidentified
MKSWSVTVLSETSVLKKFSQHPSPEALYGFLTRSYPGAEYHSVYEAGFCGFWIHERLTALGIDNIVVNTADVPTKSSEKLRKSDAVDSGKLARSLRANELKGIYTPDSVSLEMRSLIRLKNSITKDTTRQKNRLKSQLRYLGIEIPQEFLTPFSNWSKRFFAWLKEIETLTPSGRQALDIHIRHLEELRRQKLEMTRALRTLAKTDRFREPLRLIMSVPGFGQATGMAFLSEICDITRFRNAEQLAAYIGMIPMCHSSGEKDGTGDITIRKHAVMRCNLIEAAWVAVRQDPAMNLFYTEQCKRMPKSKAIVKVARKLVNRLFFVLKHQTEYVNSIVS

SEQ ID NO: 131089 - protein, 450 aa, unidentified
MMREVQEIEDEEHEQILERVCAIDVAKASGKVCTRVPHPSRPGARRTRVWDVDATTNAILELGEHLAGEGIEKVTLESTSDYWRIWFYLLEAAGLDVQLVNARDIKNAPGRPKTDKLDSVWQAKLTERGMLRPSFVPPAEIRRLRDYTRLRTDLTRERTRYWQRLEKLLEDSLIKVSAVASSLGTLSVRDMLEALIAGERDPKVLAGLARGRMKAKHAALIEALTGRFDDHHAELARMLLDQVDALNAQIGKLTTRIGELIAAIPSAQGVDADGTTGPTAGTSPGAPVLPAVARLDEVTGIGPDGAQAIIAEISLDMSRFPTAGHLVSWAKLSPRTIQSGTSSRSGRTGKGNPYLKGILGEAAAAAARTDTFLGERYRRIVKRRGKLKALVAVARSILVIIWNLLANPAARYHDLGSGYHASRTDTGKKVRNHIRQLEALGYTVALTQAA

SEQ ID NO: 131090 - protein, 411 aa, unidentified
MLQTLIHCCAGLDVHRLLIVATILKTLPEGRVDKTVREFSAFRRSLQQLARWLKDEGVELAVMESTGIYWKAVFEALEDEEIEAMVVNARHVKNVPGRKTDVMDSEWLADLARCGLLRSSFIPPRDIRELRLLTRYRKKLSGILSGEKNRLHKALDDCGIRLGAVVSDIDGVSAREMVRALLKGDCSPKEIARLARGRLQSKIDELELSLDGRISDRHRFLLETILRHIEGLQHEIQEIDRQVFAAMQPYEGQWQLLQTIPGMDRISAAMLLVEVGVDMSRFGSRERLSSWAGMCPGNNESAGKRKSGRSRKGNRYVRAILCEVANAARKTDSQFKGLYQGLVIRRGHKRAIIAVGHRILEVVYLLLSRKEPYRDPCVDYEALMVKRNAPRWIQALRKYGYLHEKTHEVAL

SEQ ID NO: 131091 - protein, 425 aa, unidentified
MSNPCRTNQVMSNQHTTYMTKEVLYLGLDVHAENIAVAIAEAGRDGEVRSYGEIPNTFHSVEKLMRKLGHPDKELRVCYEAGPCGFVLARFLKKKGIACDVIAPSLTPKGSGDKIKTDRRDARMLARLHRAGELTAVHVPDERDEAIRDLCRARTDAVQDQRSGRNQLKAFLLRNGYRYGEKTSWSTAHMRYLRELILPHPAMKIVLEEYLQCIDAAAERIERLEVHMKALLDEWHMKPVVLALMGFKGYQTVAAMITVSEIGDIHRFPHPRQLMAYLGLVPSESSSGGSRTQGTITKCGNGHLRWIFNECAQHYRLPPKVSQELTTRQEAIPKAHRRQVIEISWRCQNRLHERGRKLAARSKTRQKVQIAMARELSAFVWEVMRAVMPKADGTQAASTARGEKAIVNTEAEAKKKGRTYTLKPK

SEQ ID NO: 131092 - protein, 345 aa, unidentified
MTTMNYIGLDVHKKTISYCVKDVSGRIQQEGKIGSTRRELDCWMKTLPQPWTVAMEATIFSGWIYDHLLPHATQIKVAHPLMLRAIAAAKKKNDQIDASKLADCLRCDFLPECHMMPRAIRDRRRTLRYRHLLVRQMVQMKNRVSGLLMETGVEYNKQRLHKVSYFRELLSANGEVPPSIRPLLKLSRETIERCQKTEYALVSSLQRDPVLADRIKRLRTVPGVGPITALTWALEIGDVSRFGSIKKAISYCGLCGDERSSADKAMRMPLSKQRNKHIQRALVEAAKLAPRQNHEMAVIYDQERQKGNSNRATLAVARKMVAYLLAVDRQQRDFVPAEERRTTAT

SEQ ID NO: 131093 - protein, 345 aa, unidentified
MNNVSILSIDLAKNVFQLLGIDEHGKPCFSKRVSRVKLHEIILNLPPCEVVMEACSSSHYWGRACLNSGHQVNLIPAQHVTPFVRGNKNDKNDCLAIYEASRRPNIRFVPIKSEQQQAVLCLHRIRERLLSTRTACINQTRSLLLEFGFHIPKAYSVFKKHIHELLSQDVQPVIRLMLLEVQQELENYDKKIKLMDTLFQQTNTHNTSAEIMQSIPGIGPIIASAFSASIDKGQAFKSAKDFSVWLGLTPRQYASGETNRLGTITKRGDGYLRKQLIHGARTVVNHAHKKDDDLNLWVTAIKQRRGVNKAAVAMAHRLARLMWILLQKNEYYRPIRSCNQVQGNV

SEQ ID NO: 131094 - protein, 388 aa, unidentified
MTQAPGALPTPTVLDYERTLILAIELSNTSWVLAAQIPGLPGVKAKRSIEPTPEALMAAIENYRTRAVKAGRNVERVVAIYEAGWSGFWLARWLAQYGIETHVIQASSVPVDRRARRAKSDGIDAELLLRTLLAWLRGEPRVCSMVPIPAEADEDARRRVRERAELVAERVGLVNRIGAVLATLGVGEYNPLRRDRRQRLDELRTALGGSLPTHARAKIVRMLDRLELLLIQITELEKSRDAVLEDENPDKAASMIQQLAKLRGVGVQSATVLVREGFVREFANGKALGSYAGLTSTPYSSGGTEREQGIGKAGNVRLRTLMVELAWLWQRYQPDSAQVSWFRERVSGTGRRMRKVMVVGLARKLLIALWRFATQGVVPEGAVIKPAT

SEQ ID NO: 131095 - protein, 316 aa, unidentified
MNNDIEIIIGIDISKNKLDIQIQEDGQYFTCGNNIIDIGKLVEKLSSIDPALIVLEATGGYEKGVVSALVEAKLPVAMVTPSWVRYFSKSTGTLAKTDKIDAKMLVRYGRANHPPVVIVRTELQERLSVLMARRSQVSLALISEKNHLSIIAYLDVKALIEASIENLEQQIMQLEEMIAEIIDQSPELKKNEKIICSVPGAGKITAAILLADLPELGTLDHKKIAALVGVAPFNRDSGYYRGKRRIKGGRQSIRKILFMAAITAIKWNPVIKEFYERLLTRGKVKKVAIVACMHKLLTIMNAMVKAQTFWKPILSS

SEQ ID NO: 131096 - protein, 369 aa, unidentified
MRKGTTYVGLDVHKETIAVAVAEGEGGEVRSLGLIPNRPEALRRLVGRLGPAKDLVCAYEAGPCGYTVYRFLTRLGVRCVVVAPSLIPTKPGDRVKTDRRDAAKLARLLRSGELTPVWVPDEEHEALRDLTRAREDARVDLLRARHRLSKFLLRLGLVPPAGVKPWGAKHRQWLQGLQLGRASQQVVLREYLLAVEQTQERLRRLEAELAEAARTSRHAAVIGALQALRGVGLVTAVTLVAELGDLQRFRTPREVMAYAGLVPREASSGPRQHRGAITKTGNAHVRHVIVEAAWHYRHAPGVWGALRQRQVGQPEAIKAIAWRAQDRLHRRYRRLLGRGKARQQAAVAVARELLGFVWAVAHAVRSSGR

SEQ ID NO: 131097 - protein, 351 aa, unidentified
MRYIGIDCHKQFDHATMINSETGEIKTKKLSHIKGEFAQFIGDKAGTRMVIESCRDWSRTYELSEDLVDEVILAHPLKVKAIASAKVKTDAIDSRTLAQLLMADLIPQAHLRKAENRVKQRVIRHRAFMVVMRTRVKSRIHDLVDSQTLSAETLKAKPKSLFTKKGMEWLLSLEWAKDQDRKLTESHLRVMDAINQEISLSNGMVAEMYEQDADAQLLASIPGIGTTLAMLISTEIDGIERFPSPSKLCSYAGLVPSTHSSGGRTYHGRITAEGNRWLRWALVEAAVPASYADAQIRDRLNRFRARKGANVAKTAMARWLLKVVYHVLKERRPYFSVYSEIERIGAALETA

SEQ ID NO: 131098 - protein, 375 aa, unidentified
MTKHSEVFVAFDTSKLRNAVAIAEAGRAGEVRFLGEIENTAEATTKLVRKLEAKYERITFCYEAGPTGYELQRHIHGLGHECMVAAPSLIPKKPGDRVKTNRRDAVSLVKLLRAGELTAVWVPDRRHEAMRDLTRAREAAVIDLRAKRQRVSALLLRQGRCYPANKKTWTKVHMNWLAGQRFEQPERGIVFAEMMFAIRQAQERVERLEQAIRTAVPEWSLAEMVTAFMAFRGIDLVSATCLLAELGDLTRFPTAPEVMGYVGLGCSEGSTGDRIKRGGITKSGNRRARRTLVECAWSYQHPPRVGIAKQAKVAAAPAKVREIAWKAQCRLNRRYRVLLRRGKLKTVAITAVARELAGFLWAAARELSSPQRVAK

SEQ ID NO: 131099 - protein, 318 aa, unidentified
MTQAALFVGIDVAKDKLDWCIRGVARATASNSPDGCAKLAAELKGLGITLAVMEASGGYERTVAAALRKQRVPVRIVDPKRIKDFARAAGRRAKNDPIDANTIAWFAQTFTLAAEDHPDKEREHLAALVAERQDLVEIRTQCLNRNEHKAPALCQHVRKNVLNEVKQGIAKLDAAIAAWIAKCPRLAARARLLASVPGLGRKSVAALLAWLPELGNITRQQIAALLGVAPFDNDSGEHSGIRHIAGGRRQLRNSLYMPLVGAATQHNPILKRYYKRLLASGKLKKVAILACMRKLIVILNVMLAREQSWNPRPTSAQP

SEQ ID NO: 131100 - protein, 412 aa, unidentified
MEVVFNRCCGLDVHKETVAACVWVRDEAAKVHKEIRTFGTMTQDLLLLHDWLMAHKVTHVAMESTGVYWKPVYNLLEADFTVLLVNAAHIKAVPGRKTDVKDCEWIADLLAHGLLKGSFIPPEPIRDLRDLTRYRKSLMDERVREVNRLHKLLQSANIKLSSVATDVMGASGRAMLEALLEGSTNPEVLAELARGKLRAKLPELKKALEGRFRSHHRFMLEQILLHLDFLDQQLQRINQEIAKRSAPFQEEITLLCKIHGIEIKGAQNIIAEIGVDMSRFPTDDHLCSWGGLCPGNNESAGKRKSGRTRKGDHWFRRTMIEVAWAAARTKNSYSNSLYHRIAARRGKKKAIVAVAHSIAVIIYHVLKYKKPFFDLGADYFDKLNAAHIKRHHVKRLESLGFKVNLEPLTEAA

SEQ ID NO: 131101 - protein, 347 aa, unidentified
MKFYTKQHKFYCGIDLHAKSMYVCIMNQDGEIVIHRNIRTNPEVFLKTIAPYREDIVVAVECIFTWYWLADLCAQENIHFVLGHALYMKAIHGGKAKNDKIDAHKIAVLLRGGMMPMAYVYPQGMRSTRDLLRRRMHLTRKRAELLAHVQNTNYQYNLSDIGKKIAYKANREGVAERFPDASVQKSIELDLTLLNHYDQLLPRLEHEISLIAKTHDADSYFRIRSIPGIGRILGLVILYEIHDINRFPKVQDFVSYCRLVKSAKESAGKRIGTSGKKIGNAHLKWAFSEAAVLFLRRNLRARKYREKLQRKHGKAKSLTILAHKLARAIYYILKRKEVFHMETFFAT

SEQ ID NO: 131102 - protein, 348 aa, unidentified
MLLYGAIDLHSNSNHSAILGEDRKRVMKRKLANDPSLILNFWAPYQADLAGIVVESTYNWYWLVDLLQDHGYRVHLANPTAIQKYRGLKHADDNHDAFWLAELLLLGILPEGYIYPKELRPLRDLLRKRQQLVRVRTALILSLQNIVTRNSGTKLSADHLKSLKENRAQVHLQDNEDLLLAGCANKTCIDTLSREILRIEAAVGKKLRLRAPYTQLLGLPGVGRILASTIMLETGPIERFSKVGCYASYCRKVNSQWTSNEKVKGHGNKKNGNKYLAWAFGEAAERARIFHQASREFYLRKLRQKKHPALAHGALAHKLARAAFYILRDNVPFDQEKMFGQREGALGS

SEQ ID NO: 131103 - protein, 356 aa, unidentified
MTSTIKYVGMDVHKQSISIAVRNAAGKIVMECVIETKANTILQFFDGLRGDVQVTFEEGTWAAWLYDLLKPHVGKLVVCDPRRNALLQDGNQNDRVDARKLSDLLYMNKLTSVYHGDHGLRTLKELVRSYLTITRDQSRVMTRVKAIYRSWAIPCSGKQLYSPRHRAEWLGKINEPGVRLRAEFYYQQLDALRALRQTVRRELLAESKKHKAWKRLCEIPSMGPIRAAELLGFVQTPHRFRTKRQLWTYSGLGVEIHSSADHEVAQGQLRRKKRPVEIRGLNENCNHDLKNLFKGAAVVASIKRGPFAEFYAALVAKGMRPEMARLTLARKIATIVLLVWKKGVSFDASHLKPQTA

SEQ ID NO: 131104 - protein, 426 aa, unidentified
MHRTSESSRFHTVPGVLDASFDVGGDELHLMTVIRGERVRRRIDNRTEEIELMLTWLSRRAKLEGYSNVRVVVEPTGVYHELLFRIARMRGLETCLVSAEAASKMRVVIFGDHGKTDRRDPIAIADLAARGHVLRHRDLPDTFSAMRSAGVLYARAEKNGISAKNRIHRAMRRVFPDFDFSPSFLFGRSGRAVHQCTGFDPIRILRSGEKRLTRRLKRIVPRIRNQSIDRLLKTAKMSARSAPSPATHEINLLDLAQAWQDLLAAEQRKHDARLLLENFYDNARELDPSLPAPQKGLASKLSLARLVAETGPFSDFGSWRELLKYLGLNLCERQSGHFRGKTRISKKGRSLARHVIAQMVVPLVRRTRLLGPYYHYKRDVEKKPGPVAITAAARKLIKILWGWSRSGEKFDPARVFTCHGDLKAAA

SEQ ID NO: 131105 - protein, 308 aa, unidentified
MIALPATTYVGVDVAQDSLVVCGPHTALTITVPNSAAALRVWLAGLPAGAHLVCEATGRHHRLLHQLCADQGIPLTYLNPARARDFARSLGRLEKTDPIDAAVLRRFGQERQPAATVLIPAALRELTDLLMARHAVVAQITAFDLRDQLVSTTVRQALRRLILGLRRQRRQLEQTMAQWLDSPAADPWRDKVYTLCLAPGVGVLSALALIGYLPELGTLNRRQIAKLAGLAPLPWDSATLRGVRRIQGGRAPVRRVLYLCALVAARWHEPTRDHYRQLRLRGKPATVAYVAVARKLLIYLNSLLSPAR

SEQ ID NO: 131106 - protein, 371 aa, unidentified
MKSILSVGMDVHKNSFSLCAYDGYTGEIVSESTFASDVKLVIKFIEKLKSRYENDVEIKCGYEAGCLGYSLYKSLTSRGVDCVILAPTTMQVSAKNKMVKNDRMDALNIAKNLASGSYKAVYVPDEEDVEIKEYIRMIHDFKKELKRVKQEIYAFVLRHGYQYDGKSKWTIRYMNWIRELEMSEIQRETLDEYLAEMDNLNDKIERFMNRIDEMYQSDRYNEKVSELRCFKGIDTFAAMTIQVETADFERFPNAKAYASYTGLTTGEHSSGDKNNRIGITKQGNTVIRKTLVECAQSLVKGNVYTPKSKRPKSRQKGMDVNIIAYADKATERLKKKYQKLIERNVPRNKAIVAVARELACFIWGMETGNIH

SEQ ID NO: 131107 - protein, 368 aa, unidentified
MKQQTSATTETNIKGRNIIDFTGKTIHVGIDVHEKDFQVAKVLGDICLGNHRMAANGQGLIDHLRRHYPGAGFKCVYESCAWGFTLQRQLQQAGIDCIVVHAADVSSSDKEKKRKTDKVDALKLARNHAAHQLTGIHVPNEEIQKQRNLIRFRKKLVGDLNRSKNRLKSLLKYQGINIPEQLGKKNNWSYNFMNWVEEVAKKDVLLQDTLLLMLEEVKLLRQLLLETERALRKLMQTSYNDKAKLLMSTPGVGRTTAMLFLLEIGDIQRFGPFDRLNDFVGFCPDTDSSGEIDRDTGITSRRHKQLRSALIEAAWEAIRIDPALLDTYQKLTRRMKGNHAIIRIARKLLRRMRAVLISGISYQKGVVV

SEQ ID NO: 131108 - protein, 406 aa, unidentified
MEGPIITVDVSKGSCHYQPFIENGHPMRKPKQLSTTIDGFQKLGQTIKDLEAKTEREDIPVIFEATGVYHRPLQKYLEDHKIRYYIISPLLSATYRKTDLHSNKTDALDCAHIAKAYYCEKKLRQYQAQPQEYKRLYQLSRIYESELVHLRKRKVSLRSMLDIIYPRIDKTFKGNQNLYDPIPMEILKRYPHPSLLLSHREDTIVKTVGHRTGHLKGYTERIVHKIYEKAKECYSGCDIDDIEVVKLPSLIENVQEQKKKCDSLLKEMIEIARTCPYFASVVSIVGIGENLAARIIAELRDVNRFDNRAAIVAYAGLNPKIQQSGDIDGLHLKISKKGNKHLRCLLYLGAQCNYRLRKEDPLYEFTKKKRQQTQCPLSSKAAYTASAHKLLVIIYSLCKNGTLYHS

SEQ ID NO: 131109 - protein, 313 aa, unidentified
MIHQNGVVGIDVSKNHLDIHLHPSGQHWRCGTQPKEIADLARRLAALEPIAVGLEASGGYEQSLADSLHAAGLKVHILPPARIRSFAFGIGQWAKTDRIDAGVIARYLMAVHMGLAPYRPDPTRQRLHALAAHRRRLLAEKSGLVSQSDTINEPLVQTLIAERLNTIAQDIKRLDAAIAELLAQTPHLGQCQKRLRQVTGVGPVLATALLADMPELGKVSAKVAAALLGVAPYARQSGSTQRSGKCMGGRKHLRDIAYMAVLSAIKAKDPVLGGFYQRLRSRGKPFKIAMIATVRKLITILNAIAKNDPAFQT

SEQ ID NO: 131110 - protein, 392 aa, unidentified
MLYIGIDVAKSKHDCFIIDSDGAVYTDNLRIPNNRAGFNRLLETILNALNGEPVKNAKVGLEHTGHYSINIKRFLESQGFVVTSFNPLGTNAFRKASTLRKTKTDKGDAKTIAAMLFSNESIPTLNPSYQIQELKSLTRHRFRLIGYRGKLKTSLTRIIDIVFPEFPDFVWSVHQKSSQQLLLELPTPDAIAHCHLTRLTNLIRKESRGRYGREKAVALRKLAASSIGLSDEALAFELRQTIRMIQNVQTEIDALDQKIKSIVRELDTPLLTIPGISYTLAAIILAEIGDIDNFSNPSKLQAFAGLDPSTYQSGKYTASHSTMVKRGSTYLRWAVFQAARLVAMRDKTFADYLAKKRSEGKHFNVALSHVSKKLLRTIFYMLKHNEAFVPQN

SEQ ID NO: 131111 - protein, 347 aa, unidentified
MRFYTKQHRYYCGIDLHARSMYVCVLDSQGEILMHRNMPCSPELFLKAIAPYREDVAVAVECIFTWYWLADLCAQENIPFVLGHALYMKAIHGGKAKNDKIDAHKIAVLLRGGMLPMAYVYPSAMRATRDLLRRRMHLMRKRSELLTHIQNTNSQYCLPQFGKKIAYKRNRHDLPEHFTDLSVRRSIEMDLSLIDHYDKLLTEVELYITQNAKVHDVNAFNRLRSVHGIGRILALVMLYEIHDIKRFPTVQDFVSYARLVKCSRESAGKRHGFSGAKIGNVHLKWAFSEASVLFLRANPAGQKFVDKLSSKHGKAKALSILAHKLGRAVYYMLERDKAFDMNKFLNS

SEQ ID NO: 131112 - protein, 518 aa, unidentified
MESDVAINSLVAGSTEVPRDPVGESVSIFRRLSQASFVGQSNKPMKHKRAKSKTKSEATKPLHEPNPDAGGIDLSPTEIWVAVPPERAQNSVRKFEAFTKDLIELVQWLVQCEVRTVAMEATGVYWIPLYQLLEDAKIKVCLVNARHVKNVPGRKSDVRDCQWLQYLLSVGLLSGSFRPAQSVCAARSIWRYRQELISTAGQYVQHMQAALDQMNIKLHYVIDDLTGLTGQAIIEAILKGQRDPVALAKLRDKRIKASEATIAKALEGDWRKEHLFVLQRAWESYRQIQQQIQQCDQELVAYAGELEAATQVIQPAKTMRLRPELLGTEPDKVSIQKPPKVRKKTSKNQPEGPWKEELERFFGVDLTAIPGISVLSGLTLMTELGNDLRSFKTEHHFASWLCLCPDNETSASKVLRRRTRRSQNRVRQALRMAASSLHHDKSFLGQKYRRLRTRLGAPKAIVAMAHQLARIIWTLISRQLPFDPSVFAYQEKLNEQRRLKALKASARQMGYQLAPIAA

SEQ ID NO: 131113 - protein, 456 aa, unidentified
MAEQELDQAEEEPAELVARAAAIDVAKDSGMVCTRVPHESRAGRRVQKVWSVPARFAAVTELADHLRCEGIERVVLEATSDYWRIWLYLLEAAGLQVWLVNARDVKNVPGRPKTDKLDSIWLCKLNERGMLRPSFVPPEEIRDLRALTRLRTTLTAECSRHKQRAEKILEDALVKVSAVVSELFGKSGRAMMRALVAGERDPKVLAGLALGRLRPKQAQLAEALTGRFRDVHAYEIGLLPGLVETLEARITELDGKIEAHLAALPGVPPACASCGLIGGGHAPGCGSHGAQLLSLVQRLDEITGVGVVTAQVIIAELGLDMGQFPTAGHASAWAKLSPQTIQSGARTRAGKTGKGNRWLRGTLGDAAMAAGKTDTYLGERYRRIRRRRGKQKAIVATARAILEIAYLLISNRDIRYHDLGPGYYDRLDPQRQTRNKIRELERLNPGMKVTLAVAAA

SEQ ID NO: 131114 - protein, 357 aa, unidentified
MKSQDSNYVGIDCGKKSLEVIRINSEGSYERQQFSTTEIGISKLINWLNPNDVVGLEAGSQSFRIAKSILNKGIQVIVLNPGDLATIYQSLKKTDKEDSLKIARLIQRFPIEELPVVPVPTDEEEDNRRLCSEQENWTRQLTQGKNRLHSLFTQAGLTHITKKHLRTKANRETSVALLPSRYHKEAERILKVLDLVEQNLKLIEEEIKEALRKNQTYTQTIMSMPGIGMITSLAILSYMGDCKRFSSAKQAAYYVGLVPRVDISGDSAYYGRIVNRGCHSIRRVIVQAAWSLVRCQHGGKLKEFYERLYSKKGAKKSIIAVSRKMIEVLYSMIRTGTLFDSMPEEVLNRKLAQYGLM

SEQ ID NO: 131115 - protein, 357 aa, unidentified
MAVAVDTVAPTVIGGVDTHKDVHVAAALDHLGRLLGTAEFPTTAVGYRALLAWLAGFGEVERIGVEGTGAWGAGLSRFLRASGIVVIEVDRPNRQRRRRRGKSDATDAESAGRAVLAGDVSGIPKAQDGLVESIRMLRVAQRSAERARTQAANQLHSLLDTAPASLREQLRILSLRDLADRASRFRPGANLRDPAIAFKAALRSLARRWLTLSNEIKMLERQLAQLVRAVAPPPLLAEFGVGPDVAGALLVAAGDNPERLHSEASFAALCGASPLDASSGRQHRHRLNRGGNREANAALWRIVMVRLRWNHPETRAYVDRRVAAGKTRRETIRCLKRYLARRIWRLLTQATRPAAAP

SEQ ID NO: 131116 - protein, 404 aa, unidentified
MVFLGVDWAEEHHDVCLLDERGKVLGRARVANSLEGVSRIHALVADHAEEPDAVVVGIETDRGLLVQALLATGYQIYAINPLAVDRYRDRHSVSGAKSDAADAKVLADLVRTDRNNHRLVAGDSQQVEAVKLLARAHQALVQTRQRQVNQLRSTLREFYPAALEAFKDDLGGRDAIAILDYAPTPIQGKSVSQAKLTSALRKAGRERNLEARATELQSILRQPHLEQPATLVAAYGVIVKSCVRMIRELNAQMTALEEELTKSFELHPDAELYLSLPGLGFVLGARVIGEFGDDPNRYLDAKGRRAYSGMAPITKASGTRHVVLARYARNRHLADACYLWAFASLNGSAGAHQYYRALRRRGKSHHQALRALGNRWVSILHGCLRHRSPYSEQVAWTVPIAVAA

SEQ ID NO: 131117 - protein, 407 aa, unidentified
MDVIHAKCAGLDVHQKTIVACARVMTGKTVHHHLQTFGTTTDDLLALGDWLARHEVTHVAMESTGVYWKPVWHALEGQFELLLANPMHVRNVPGRKSDVNDATWIADLLAHGLVRSSFVPPEPIQELRDLTRTRKQLTREIARHTLRIQKTLDQANLKLTGLLTDILGVSGRAILDALVAGERDPDRLADLATGRLKASRAELVAALHGRVTPHHVFMLQLHLTQVDALRAAVRDLEARLGDALAPFRAAVERLTTIRGIGPLAASVLVAELGVDMSRFPTAGHLRSWAGLSPRQDESAGKRRSTRTLAGNPWLKTTLVQAAWSAVRKDNTYFRAQFLRLKARRGPKKAIVAVAASILTAAYHVLQREVRYDDLGGDYFSRRDKAKLARRLIARLHDLGVMVEVKVA

SEQ ID NO: 131118 - protein, 333 aa, unidentified
MSILKQIVGIDISMNTFNARFGTTNTKQDCVLSSDQSYTNALPGFKQLLKWAKKSIASADIPLLFVMEATGVYYQQLAYFLVENNCSVAVVLPNKIKNYCKSLSSKSKTDPLDAAAITRFGLERQLTLWTPPTETLKALHTLSREYHALKSTITEIKNQRHALVSSFEPLASTLKRKHHLITMLEKQARQIEQELHDRVESDVTLSGRVENICTVKGLGFMTVVSVLAETQCFQHVTKRKQLASYAGYDVVFNDSGMKKGKTSISKKGNKFLRNAVFMPALAACRYNPQLKEFYHRLVAKGKNKKLALIAVARKLLLLIYSLWKNNSVYDPNY

SEQ ID NO: 131119 - protein, 343 aa, unidentified
MDKVYVGLDLGSSTFQQAAINQDGVTIMNRSYPTSEANLRSAFANQRGELHVHLEAGELAPWAAAIIAPLAKRVVCSHPKDNAWIAKDGDKCDRVDAYKLAELLRINRFKEVHYAPDQPRRNFKQLVQHYDELTAHQARWKTKLKARLRMQGVIVTGERLFSRTGRTAVLARIESRDVRMAISQIYEVLDQSVTAQEQARLLMLRAAQAFPEIKLLRTVPGVGPIGACRFSAYIHTPKRFSSKRKLWKYSRLSVSHRSSNGKPLRRPKLDYSSGCGRLKDVSRKAFDVSQRLRTDNGFKRTYQRALETTHDKTHARLTVQRKILSTMRAIWISRTPYRDELSR

SEQ ID NO: 131120 - protein, 316 aa, unidentified
MESQRPFVGIDVSAQRLDVAVLPHGTHFTVPYTDDGVASLVQRLQELAPQIVLLEATGGYEIPAAYAMSEVSLPVVIMNPKALRHFAKSTGKLAKTDKLDAQVLAHYAQAIQPPVRPLKDPEQLELATLMSRRRQLQGMIVMEQNRRRTSTPRVRHNIDQLLAYLRQLLNDLDREIHDVIRRTPLWHEKQEILRSTVGIGPKVSASLIADLPELGLLPGPKITALAGLAPMNRDSGQYRGKRMIQGGRPAVRQALYMAALVASRHNPVIREFYQRLRQAGKPAKVALTACMRKLLVILNAMLKNHTHWEDRLPVAA

SEQ ID NO: 131121 - protein, 354 aa, unidentified
MKRTTKHVALDVHQATTVASVREESGRVIARTILPTEDGALVEFFRGMRGTIHVAFEEGTQAQWLHDLLTPLVHRVVVCDRRGEARRGNKGDQVDADALSELLRRGSLRPVYHGGTERATLKELTRAYENLVEDATRVMLRLKALFRARGIPAPGKRVYHPAERAQWLARLTNRGARYRAEALYAQLDPLRALRPRVKAAMVAEARRDPAWKLLQAIPFYGPVRVAQLLATLQTPWRFRTKRNLWAYAGLAVVTHTSAEYQLVGGRPVRRRRAPLTRGLNQNYHRGLKNVFKGAATAATAQPGPFQDFYQGLLARGMRAELARVTLTRKLAAVTLRLWKKGERFDPTKLTVQAR

SEQ ID NO: 131122 - protein, 400 aa, unidentified
MSVVGWDWASQAHDVTVLDDAGAVLDRWAFPHTEAGWAMALARLRCHGEPGDLPVIIEKTSGLVVDRLLAAGHPVVPVHPNSFHAARPRWGASGAKSDPGDSYKLADYLRTDGHRLRRLEPADPGLRELQALVRLREDQVRARTAATNQLWAMLGNYWPGPRDLFYSLASAIALAFLTAYPTPASAARLGEARMAAFLRRNSYRGGKSPALLLARLRAAPQAPLALPAATLTAMVRAHVQQLRSLQAAITGIEHLIAVRVAAYPRTRLLAPLPGVGTINLAQLLAEVGPILDRATSAEQAATECGTAPVTRASGKTTGVYFRWAASTRARKAITAFAHNARMQSPWAAKLYADARARGKRNPHATRIVARAWIRVIWACWHTGTPYDPATHRAARQLLTR

SEQ ID NO: 131123 - protein, 347 aa, unidentified
MKILALDLGKYKTVACDYERETGEHRFKTTCTTPAALEQLVKEVKPDRVVIEVCNIAGWVCDRLRGLEVEVQVANTNDDAWRWRKVKKKNDRRDALKAARLSAVNQIKEVHIPTIEVRQWRALIAFRQQLVRRRGRIKNHIRDLLVSEGQLLPRGGSCWTQLGVARLEALARPLREVSMSELWRGQLAIELRQLREVQQEIAAAEEKLDAIAAADPRIKLLRTIPGVGPRLSEAIVALLDHPERFQKASEVSAYIGMVPKELDSGETVRRGPITKHGSRLVRSLLVEVAWAGLRHNPWVRQTYQRISGGKKSRQKIAIVAVGRRLLVRCWAMLRDGSSWRTPLSVAT

SEQ ID NO: 131124 - protein, 402 aa, unidentified
MAYDFVIGVDVGKYFHHACVLDPQGRQVLSKRINQHESSLRKLFGQFIADNASVLVIVDQPNNIGRLTVTVAQDMGADVRYLPGLAMRQLSRIHVGNSKTDVRDAYVIAHAGLNLPDALRSVDRVEEVFIQLKVLNGIDEDLARAYTRLINQMRSALVGTYPAFEHVLRGQMIHRKWILHLLAKYGGPTKIRRIGRTRLAAFARSHKARNPEPVIDAMLAAIHAQTVSIAGAEYAELGVAMSAKDALAKLEHRKEIEAQVLKLIQDIPQTEILLSMPGIGPRSAAQILMTAGDMSDFPDAAHLASYAGLSPRTNQSGTSIMSNSPNRAGNKKLKNALWQSSFASIRFHERSRQFYERKRKEGKRHNAAVVALARRRLNVLFAMMRSGELYRDISTVREAAAA

SEQ ID NO: 131125 - protein, 351 aa, unidentified
MEMVGGLDLHRSQITFRTVDLRTGEVQRGKIHPGARDAFRDWLGGFEPGTDAHFALEGTTGWRFAVEEIQRMGFTAHLADPAELSERRGPKRRAKTDHADCELMVNLVLEGRLPESSIPPAHILELRALVRLRKTLVDQRIEWQQRLQAQLFHQGVVPGLRLCRPEDRRRLTGMEMSPAGRQTMGTGLVMLDDFDAQLVPLSAQLVSLAKSQPGCRALEHELYGVGWLTAVAIVAELGDCRRFHSGDQAVRSSGLDITVHESNGKRPGGHLARQGPAVLRWALFEAAQCAARKASPDHAYYVRVRDHIDHNRACLSVARKICRRACRILKDLGDAAMAPPEPPARRDPKAA

SEQ ID NO: 131126 - protein, 322 aa, unidentified
MNKYKETFGVDISKDVFDVHGSTIGHNQYTNDESGFKKFLKSLPVNSLVVMEATGYYHYRLAQFLYKNTVIVSVVNPLSIKRFIQMKLAKVKTDKSDAKAICEYGQMNNVPLYDALTDVQSECLQLFRLLDSFLKHRTATKNKLHGEDVLGIPSKAVYRSLKRNRKHLDKEISGIEERILSLVKKDQQEQLTLLTSIPGIGLKTALFLVVVTDGFSKFENASQLCSYVGITPMIRESGSSVRGRARISKVGNRKLRNLLFLCSFNACKHNKGCKAIYERIVNKGKSKKLALIAVSNKLLRQAFAIAKSGRPYDETYVSVLPR

SEQ ID NO: 131127 - protein, 406 aa, unidentified
MQQSNVETVIIKNATALETIRRQQKGGNHYAAYIGMDVHKDTITYAVALPGRANGQYRGEIAHTRKAVNKLMGRLSAEFGGELLLFCYEAGPTGYHLYRQMMASGHDCQVVAPSQIPHKPGERIKTDRRDALKLAQYLRSGDLTAVWVPDQEQEAMRDLTRARGDMKGQELKARQQLNGFVLRHGHSWPSNKTRWTKTHYNWLESLAFPHPWQQVVLQEYIDAAKAATRRVADLMDQILQALPSWSLAPVVGSLVALRGIDKLAAITLLAELGDISRFDNPKQLMSFLGLVPSEHSTGKRRRQGAITLTGNGHARRMLIESSWSYRFQARQTMHLKRKAVNASDEAKTIAWRAQKRLCGRYRRLVEAGKNQKLVVVAIARELVGFIWDIVRIEMARLPVQQSAQAA

SEQ ID NO: 131128 - protein, 342 aa, unidentified
MEQVSVVGLDLAKSVFQVHGVNAQGEAVLRRKLSRGQLLKLFEKLPPCLIGMEACASAHHWARELATLGHEVKLMPPQYVKPYVKRGKNDAADVEAICEAVTRPTMRFVGAKSPDQQATMMLHRVRKILTRQRTQISNALRAHMAEFGIVAPIGRVGLDRLTAAIADQDDARLPDEARACLAVLCSQLEMVKEQILDNDRRILADARKTEAGRRLMKIPGIGPLLASAIVACVPDPATFSNARSLSAWIGLTPRQNSSGGKERLGSITKAGNSYLRELLVVGATAVVRRAKQGSAKRPWVVQPLARKKPKVAAVALANKNARIIWAMMATGEAYRETELAAA

SEQ ID NO: 131129 - protein, 344 aa, unidentified
MKITTLGIDLAKNVFQIHGVDALGKVIVKKQLKRDQLAAYLVNLPPCLIGMEACGGAHHWARKLMGFGHTVRLMAPQFVKPYVKTNKNDAADAEAICEAVARPNMRFVPIKDVGQQSVLSLHRVRQGFVGARTAQANQIRGLLAEFGVIVPQGIAHLYTRVPELIEDGSNEMTGSFRLLVQRLLEHLKALDKQVDEMEAQIVQWHKHSQASLKLAAVPGIGPITASALVASLGDAKNFENGRQVSAWLGLVPKQHSSGGKEKLLKISKRCDTYLRTLLIHGARSVLYREQSKADSCSWVKGVATRRHHNIAAVALANKNARIVWALLTREKGFDAKHVSLRVAA

SEQ ID NO: 131130 - protein, 393 aa, unidentified
MAEFANTRDSPLSGNGIKCQDWFVEVNLTFERGSPMSEITRVGVDLAKAVIQVHAVDAGGKLVTNRQLSRDKFLPWCAQLPPGCLVAMEACGGSHHWARKLIGLGLSAKIIAAHLVTPYRLQGKRGKNDANDAAAVCEAASRPNMRFVPVKTTDQQGILCVHRQREGLKEERIASINRIRGMLTEFGLVVSQKPEKLREKLTDILEDASNDLSGLARLVVQEAYDQWRDVEERIKWCDERINAHVKNDAQAKAAKELMGVGPITASAAVATVGDFHQFKNGAQFGAWLGVTPRQNSSGGKTSLGGITKRGDMYLRMLLIQGAKSAVMTAHMRDDPISKWLCQLREKSGWQKAAVAMANKNARILWAMMTKGCRFDSRHVSVKPAGAMALAVTA

SEQ ID NO: 131131 - protein, 342 aa, unidentified
MKFYCGIDLSARDCHVCVIDEQLKIVVQQKLRNELPKICQLLEPYKANLKIVVESTFNWYWLIDGLQAEGFEVVLAHTLGLYLITGAKVKTDRRDAYSLAKLLLVGAVPAAYIYPVETRPVRDLLRRRLHLVQLRAGEYGSLRRLLLRQGILSSKQQEIKTATEAELEQWFEHPLVRLHASQELQRIELYSEQIAELEKTILALAKTEQSYELLLKLPGVGQTIALTILYEVGELTRFANVKVFSSYCRVVPGIAQSGNVSRRGRASKQGNHYLKAAFSQAAVHAVRCYPKVRRYYERQLKRHQGRGRQMICYNIIAHKLAQAAFHVLKEQTEYREELLFGR

SEQ ID NO: 131132 - protein, 413 aa, unidentified
MSIDPGTATARVTAGVDWAKDDHAVCVAGEQGEALERFTVRHDAAGLRQMAARLLRAGVEQVGIERGDGPVVETLLAAGLTVFVIPPAQVKNLRSRYGSAGNKDDRFDAYVLADVVRTDARRLRPMERDSEQATALRSTVRARRDLVGHRVAAANQLRAHLQIVFPAAAELFAEVDSAITLAFLSRFTTQEQADWLSPKRLAAWLKSAAYSGRTDPAVLHARLRAAPRGNAGPHAAAHAGVTHALVAVLRALNTQIQALADSIATQLAAHPDAAIFRSLPRSGTIRAARLLAEIGDARGRFPTRDSLTCLAGVAPSTRQSGKVKAVTFRWGADKQLRDALCDFAGDSRRASPWAADLYDKAIARGCDHPHAVRILARAWAHVIWRCWQDHAPYDPAAHNSLQTLLRQQQQIAA

SEQ ID NO: 131133 - protein, 424 aa, unidentified
MRSIGLDVGRQFAEAAAIEPGGEVHRLGRITASPAGLRAFAAGLGPDDAVVLEATANTWAIAELLAEHAGRVVVSNPLRTRAIAAAKTKTDQIDAATLAQLLAADYLPEVWQPDAATQALRRMVAHRAGLVRGRTGARNRVHAICARRLLSAPVSDLFGVAGRAWLDKLVLEPDERLALDAQMRLLATLEVEIDAAERAIAAHVLDDRRVRHLLTIPGVGLATAASLVAVIGDVGRFPRPHKLVSYLGLDPRVRQSGARPAFTGHISRAGQAHARGLLVEAAHAAVKVPGPLRGFFVRTRGRRGTGVAIVAVARKLTVLAWHLLTDDVDYRWAPAVRSAEKLRRLELLGGASKRFDLRGRREGVKARRAAELVRERVVLEQAEAAYVALVAARRTRHAKDAAATNGERLDGPALNGQGPAARRS

SEQ ID NO: 131134 - protein, 422 aa, unidentified
MKTPSEIAFTAFIGIDWADAKHDICIQAAGTERREFSQLSHKVEAIEDWAQSLYQRFGGPIAVALELSKGPLVYALQKYDFIVIFPVNPSTLAKYREAFTPSRAKDDPTDAELVLDLILRHADRFTPLNPQSVEMRTLVSLVEQRRRLVDDRVRTTNRLRNTLKQYYPQPLEWFDRIDTPLFCDFIERWPTLVQVKRARRTTLQSFFHQHNMRRTDLLEARLTSIKAASPLTLDAAVITPHRLQALVLVDLLRVTLAAIKRFDEEIAELAPQHPDYELFSPLPGAGPSLAPRLLVAFGEQRDRFKNAAELQKYAGIAPVTERSGNKHWVHWRWQCPTFLRQTFVEWAAQTINKSYWAGLYYRQQRDKGCNHQAAVRALAFKWIRILYRCWQTKTPYNEALYLKALKRRGSPLLNQVETAISA

SEQ ID NO: 131135 - protein, 469 aa, unidentified
MDLLKLPIYTFYCEFLDMEERFMKKVFIGIDVGKFKNSISIIDIEGNPIIKKGLSIENDYYGFARLEEQIDLIINNYGVTYDDCIAGVESTGHYWFNLRDYLKDIGIETVMIKTDSVKHRRALEEGQKGKNDTLDARVIASCLRNGNYVYIRDNERELRALQKLTRMRNDISDELVALKNKIHRCIDICNPVFFKIFENLNSKTGVALIKLYPSPQDIINVELDNIKKELGEIVDKPNMRMVSLYKEECEIWSGLIKEPSYAEKVEMVAYIDKFLLQNKSKEHLDKQIKEIAKNIIPLYSEFEQIKGIPLIQLISVLSEIGDIRNFKNTRAILAFLGLSLKGNASGKYIGERRINKAGSRIVRKHLFNIMDTLVKHNEYFRIAYCYYKSYNHKNPTKKRSMQIAVMCKFVRVMYGMLKYNASFDYKEMMKGYYFGDCNMQVFKEEFEGENRRKKIENCKIAYDIYTIYS

SEQ ID NO: 131136 - protein, 344 aa, unidentified
MSEVSIIGLDIAKHVFHAHGADERGRAIFSKRISRGKLLDFFAAQPSCTVALEACGGAHHWARQLTQLGHDVRLIPPAYVKPFAKRQKNDAIDAEAICEAAQRPSMRFVAVKSEEQQAAGLVFRTRDLLVRQRTQLINAVRGHLTEYGWIAPKGPSHVAMLADLIEEEEMASSLPEAAHAMFRLMLELLAGLNGKIADLDKEIARRAREDEVSRRLMTVPGIGPISATAIAALAPPAETFAKGRDFAAWLGLTPLQRSTGGKQKLGATSKMGERTLRRLLIIGSSAVVLQASKRGAPRGSWLEQMLARKPRMLVTIALANKMARIVWALLVKQENYRAPVAAKA

SEQ ID NO: 131137 - protein, 402 aa, unidentified
MNCVGIDVSKGKSTIAVMRPFGEVVVSPFEVLHTDSELSELARLLKSLNGETRVVMESTGNYHTPVAWLLHGAGFYVSVVNAMLVHDYGNNSLRRAKTDRKDAVKLANYGLDHWLTLPRYVPEEDTRLMLKACYRQYQQYSKVRTMLKNNLISLLDTAFPDANRLFTSPPRADGSEKWVDFVATFWHCECVCGLSEKAFTTKYRKWCKKHGYNFSEEKALGIYASACGHVGIMPKTNTTKLLVEQAISQLQATSAALVALKQEMQSLASYLPESPVVMEMFGVGPTLGPQLMAEIGDVRRFHSKKALVAFAGIDSPPYQSGQMNVCGRSISKRGSASLRRTLFLVMGGYLKNAPTNEPVYQFMDKKRTEGKPYRVYMMASANKFLRIYYASVKAYLDSLEHA

SEQ ID NO: 131138 - protein, 423 aa, unidentified
MLEETADREEIIQRVAALDIGKAEVMCCVRVPYESRPGRRLQEVQAYSAMTRSLLGMADHLRSLGVTRVVMEATSDYWKPAFWVLEAAGFETWLVNARDVKHLPGRPKTDKLDCIWLCKVAERQMIRPSFVPPPQIRRLRDVTRYRIDLVGARTAEKNRAEKLLEDAGIKLSSVASDITGVSGRAMLAALIDGQRDPDVLADLAKRRMRSKIPELTEALTGRFSEHHGFLAQLHLDLIDNHTRAIDELTGRIEVVVEPFRHVRDLLVTIPGISTLVADVIIAETGGDMSRFPTAGHLASWAGTCPGSNESAGRIKSTQTRPGNPYLKGALGIAAMSASRSKDTYLAAKFRRIASRRGPIKAIVALEHAMLVAIWHMITTDVPYSDPGGDYFTRLDPDKAKHRALNQLHKMGYSVTLEPLAVAG

SEQ ID NO: 131139 - protein, 339 aa, unidentified
MMNFSNHLLNRKSKVMKNIIIGIDISSKTLDICIKNETVSYFSIENKVPVIKRFLKCYSREKVIIAMENTGRYNWNLFEVLEKFDFKVYVISALHIKKSIGLVRGKNDKIDALRICNFIEKNHQESREWKPCSCSIKKIKILLTERASRIKIKKQLIVQQHDYKLMKSIGLDKQLKDLNIKLLKDIDVQIKIIENDIENIIQNQESLNQQQKLIKSVPGVGQVLSWTLLSKTEGFTTITDPRKMACYSGVVPFDFQSGTSLKRRPGVSMLADKNLKTILHLAAMSAIRSDNDLRTYYIRKVDEGKNKMSVLNAVRNKIIHRVFAVIKNQIPYQKDLVLS

SEQ ID NO: 131140 - protein, 345 aa, unidentified
MSSMYYIGLDVHKKTISYCVKDAGGKIHQEGKIGATRRELNSWMRTLAQPWTVAMEATIFTGWIYDHLLPHAAQVKVAHPVMLRAIALAKKKNDCLDAAKIADCLRCDLLPECHMVSSEIRERRRSLRYRHLLVRQMVQMKNRVSGLLMETGVSYNKQRLHKVGYFRELLSSNEEIHPSIRPLLQLSRETIVRLQKTEYALVSSLQRDPLLVERVERLKTVPGVGPITALTWALEMGEVSRFRSIKQAISYCGLCGDERSSAEKVLRTPLSKQRNKHIQRVLVEAAKLAPREDHHLALVYESEKQKGNANRATLAVARKMVAYLLAVDRGKREFVPAEEHRGAAA

SEQ ID NO: 131141 - protein, 338 aa, unidentified
MVLIGIDPHKSTHTAVAVDKEETALGELTVKADRHQIERLLKWAIDFPDRRWAIESANGLGFLLAQQLVAAGEDVVDVPPTLAARVRVLGSGKTQKNDPNDALSTAIAALRAKRLRTVVGEDHSAVLRLLADHHRDLGSLRTQAVCRLHALVRCLIPGGTGIRLSADRAAAVMRTVRPTNAVDTERKRMALGFVADIRRLDAEIVASKARIVDAVAASGTSVTELYGVGPVVAAFLIGHSGDMARFANRDHYASYNATAPIEASSGPRVRHRLNPRGNRRLNHAIHVIAICQIRHPTEGRKYFDRKVAEGKTTKEALRALKRQISNAVYRQLVIDSVR

SEQ ID NO: 131142 - protein, 348 aa, unidentified
MRNKPMGATVYGIDLGKNTFHIVGVDPAGKPIQRITLSRATIFNFFSNASRALIGMEACPGSQWLARKLEALGHQVRIIPAQFVKPYVKSNKSDIIDAAAIAEAVARPTMRFVRIKSTEQAELQAMHRIRDRLMSCRTQLINQVRAFCLEFGIPMRTGPGPFKADLPNVLADEANDLTPVMRELLGTMSTELGALETRISQITRQIDAVATRSELAMRLATIPGIGYLSATAILAAVGDGKQFAKARDLAAWLGLVPAQYSTGGKANLLGASKRGNPYVRRLLIHGARTCVLHLNRSTDRLGVWIARLESRMHINKVVVALANKLARVAWIVLTRPGACYLRDASVRS

SEQ ID NO: 131143 - protein, 433 aa, unidentified
MPKSKSQSVVQTDDDALYYERCAGIDVHKKLLVVCLRIGRKCESRDFGTTTGEIRGMTAWLKDNGCQMVAMESTGSLWKPLYNIFEQEQLPAMVCNAYHIKNVPGRKTDWNDAFWIAKCLSQGLLQPSFVPDREQRELRDMTRFRKSQIEERARNINRLQKFLEGSNVKLGSWLSDVEGKSATALLELVIGTSDFTLADVKSRMHGRMKSSPEMLFASLESCITPTQRLFLTHVMDVIRQQTAQIEKTDAMIKASLNENQKSAVMALDEIPGIGVISAEQIIAETGTDMSNFRNQHAFSNWTGTAPGNNESAGKRKSGRTNPGNKTLKSTLAQCAKSAVNNKRCFFSAQYSRLVSHRGKNRATMAVAHSLAIAIFFVLSGKEFKDLGADYYTQFNREKKINSHVKQLSKLGVTIPGDLLQLALQHPPESLASA

SEQ ID NO: 131144 - protein, 337 aa, unidentified
MDITTVGIDLAKSVFQLHGIDANGNIVLQKTLRRGRVLAFLTKIPPCLIGMEACATAHYWAREITSLGHKVRLIPPAYVKPYVKRQKNDAADAEAICEAVTRPNMHFVPVKSKEQQGVLVLHRSRDLLMRQRTMLLNAVRAHLSEFGYIAAQGPQKTLGLLRQLEEGDGIELPDTVITALLSLGEQLSSLQRAIRGIEKRLLIWHRQNTSSQRLETIPGIGLITATALAASVPDPAVFKSARQFSAWLGLVPKQNSSGGKTRLGRVSKMGNGYLRKLLVVGATSVTRRAANNETRTGAWVRSLLERKPTRLVTVAIANKTARTAWALMIKGEVYKAH

SEQ ID NO: 131145 - protein, 434 aa, unidentified
MNTTTTTTAPAEPAPVLAPAPTPLPPPAAWIGLDWGHKTHAFALHAAPGAPEEGTLPASAEALHAWLRTLEQRFGGRPVAVGLETSRGAVVHALLQYPWITIYPLNPVTSARYRKAFTPSGASDDLPDARVLLELVRDHAAKLRPLEPEDPQTVQLAGLVQARRDLVDRRTQVLNQLTSLLRTYYPQALDLVGDLDSALAVDFLDRWPDLLTLKTAKPGVLKRFYYAHQLRRPELLEQRLQLIRQAVALTSDEARVSVAVLQLRCLLDQLRAFRRHVARFDQEIKTVFAAHPDAMIFRELPGAGPALAPRLCVAFGTIRTLYPDPASFQKHAGVAPVREKSGASCWTHWRWQAPAFLRQSLVEWAGLTVEYSAWAKVYYQRMKAKGKGRHVILRALAFKWIRVLWKCWQTRTPYDEARYLKQLLHRKSPNALPA

SEQ ID NO: 131146 - protein, 336 aa, unidentified
MQVKFIHFAGIDVSKKWIDVCVLINGEKSIIHHQRFDQSKQGFAELRKWLINISGKQTDRLLICIENTGLYDDALLYFLTEKGFTVCLENAARIKASIRDRRAKNDQLDARHIAMYALRHADELEVWQKPRAVVDQLKQLVAARATLVGHLTSIKQAQKEIEGFKWAKVKKTKNYQAGIKGLQKDIEQIEADIWQLIKSDPALHKMFMLLLSIPAIGKITAWHFICYTNEFKRVKSGKNLSSYCGVVPFRETSGTTRNSPARISQEANRTLKKLLHLCALTALKMKGEFALYYHRKIAEGKHALKVINAIRNKLALRIAAVIRNDEPYNENYIYQP

SEQ ID NO: 131147 - protein, 377 aa, unidentified
MKSTRFVGLDVHAATIAVAVAEPDGEVRSLGTIPNEPEAVRRVMKKLGPAAHLRTCYEAGPCGYVLYWQLAQLGVACQVVAPTLVPVKAGDRVKTDRRDAERLARSLRSGDLTAVWVPDAAHEALRDLVRAREAAKKDQLRARHRLQKFLLRHGRRSPAGTKAWTEGYRRWIAALQFEQPAQEATRVDYLTEVDHARERIARLERAIDEAVETAPAPMRAVIEALQALRGIAKVAAVTIVAEVGKLSRFARARQLMGYSGAVASEHSSGPRVRRGGITKTGNAHLRRIVVEAAWSYRHRPRVGYALRQRHARQSETVRAIAWKAQHRLHRRYCRLLGRGKNKQQVVTAVARELLGFVWAIGVTVERQQGAPSSSQVA

SEQ ID NO: 131148 - protein, 395 aa, unidentified
MVAALRPMGEVALLPQEFLHTEVGLEQMAYAIIALGEDTRVVMEATGRYHEPVAAALHEYGIYVSVLNPLFIKQSGGGSIRKVKTDKADAMKIAKYGLDNWVDLREYTPMDTVRQQLKLCSRQYNLYMKTVVSLQNNLISLTDKTFPGVNELFSSPERADGHQKWVDFVMTFWHCDCICRVSEKAFTERYQKWCKRKGYHFSTEKALDLYAGSCGHFTTLPKNDNIKLLITTAAQQLLAGKMTLAALRAEMTRLAMQLPEYDTVRAMYGVGQTTAAQLMAEIGDVRRFPRRSSIVGFAGVDPGVDDSGKHSAKSVPTTKRGSPHLRKTLYQIVCTYLRKAPADEPVYQFLDKKRAEGKLYFVYMTAAQNKFLRIYYARVKECLEAFDAQQDIAQS

SEQ ID NO: 131149 - protein, 489 aa, unidentified
MSTARKQQRGKKDPMLNAQLLKRKARGSHCQQGKGNQRRSKLTITNPDAAGIDVGAQVHYAAVPEGRDQVSVRSFGAYTAQLDELVQWFKDCGIKTVAMESTGVYWIPLYQKLEEAGFEVLLVDARQAKHVPGRKSDVQDCQWLQQLHTYGLLRAAFRPEDSICRLRTLQRHRKNLVECAAMWIQHMQKALNEMNLHLHHVLSDISGHSGLTILDAILAGERDPKKLASLADRRVKKSQAQIEAALTGDYRPELLFVLSQSLQNYRQIQQQIAQCDLSIEKQLAKMADCTNPSQDSESTQQSPDSAGCKPRKTKPKDALELSLAGHLKRILGVDLTTIPGLNVLAILTLVSEIGTNMAKWRNEKAFVSWLGLSPNNKISGQRVLSSRTRKVVNRAATTLRLAAMLLGKTSTPLGSFYRRKRAQFGAPKAITATARKLGCLIYRLIKNGQAYQEPDLHTYELKYKDQILNSLRKRANSFGFDLVELPKAA

SEQ ID NO: 131150 - protein, 482 aa, unidentified
MVVPNEEPKKPTKPNKPTKPNKLTKPNKSRERSLPVPVPVSAAALHVINPDAAGIDVHSDMHMVCVPADRDANPVRQFGANTADLQEIVAWLKKCRVRTVALESTGVYWIPLFELLESEGFEVNLVEPGQLSRCGARPKTDVLDAQWIQRLHSYGLLRASFRPPDSVLALRAYWRQRQMQVRYAAHHVQHMQKAMEQMNVKLTEVVSDITGLTGMLIIGAILEGERDPIKLAQLRDRRCQHSEEQIALALEGTWRPEHLFELRQAHELYQFHHRQITECDQQVQAELANFPNRAGEKTRTVKRRKRGRKSNDVRFEATGPLFQALGVDLTSIEGIDVGTALVILGEIGVDVSRFPTEKHFASWLRLCPPQDESNKTKKRRGHRKGTNRVTIALRMCARSLGKTMTPLGLFYRRIRSRIGGLGAVKATAHKLACLVYRMLKYGQQYVTQSMEEYEAKVKANMLKALKRKAAALGFQLSPLPTQ

SEQ ID NO: 131151 - protein, 362 aa, unidentified
MKYHQMKTEFACGIDLHARQMYMCVCDRAGNVYKRLNIRGNNLDFFSHQLEPYQGKITIACESTFNWYFLADYCEREGYEFVIGHALYMKHIHGGKAKNDRIDAKKIADLLRVNLLPVAYAYPAEKRSVRDLMRRRGRFVKLRGELAGHLPILAHQYNLGFEGSGRKPEDCNELLDKLEDPYAKLNAEADIYLLEAYNETIHKLELEIRRFARKEVGRTFKLLKSVPGCGDILALTLLYEIDTINRFDSVKDFASYARLIKCRAESAGKSYGFSGTKIGNAHLKWAFGELAVYAVVHDEYIRCYFEGYLLKKYSRVKAYSCLAHKLGRGIYNILKRDQSFDYDKFFVGSKASQTRSIVNPEI

SEQ ID NO: 131152 - protein, 409 aa, unidentified
MEVVYRCCCGIDVHKRIIVACLLKGGKRELREFGTTTGEIKDLADWLLEEGCEMVAMESTGVYWKPIYNLFELVGLEAIVVNASHMKALPGRKTDVKDAEWIADLLRHGLLKASYIPEREQRERRDVARYRKSLVEERAREVNRLQKILEGANIKLASVVTDINGKSARRLLDTIVSNQPLDSRKVTQLLHHSLLPKLDQIMPAIEGITTPLQRILLAQILDHIDDMARRIAKMDDLIKEYMAECEQAIAAIEEMPGLGRRSAEVIIAEIGTDMGRFPSAAHLCSWAGVSPGNNESAGKRKHGKTTKGNRTLKSTLTQCAQAAKKNKNSYFAAQYQRIAVRRGKNRATMAVAHTILIAIYHVLKNGVAFHDLGSNYYDNFNREHKIQGYLKRLNALGWTPQPDHPTLTA

SEQ ID NO: 131153 - protein, 311 aa, unidentified
MGGVNVAIEVGKHKLDVALGSDGELFSEPNQPRAITRLAKRFAQVGCERVLIEGGSYQNVLVGALRAAGLPVVIINPRRVREFAKSIGQLAKTDHIDARVLARYGERIQPPVRELPDEQNQALRGLWVRREQLIEMLVMEENRLEHAPKALHRSLRAHIDYLRKQIKQSDSDLDRAVRDSALWDKYELLSSVPGVGRVLSVALLSDLPELGRLNRSEIAALAGVAPFNCDSGTLRGQRKIQGGRKRLRRVLYSATVASVRCNPVLRPFYQRLRAAGKPAKVALVAAMHKLLLILNAMLKTKTVWRPSYPNA

SEQ ID NO: 131154 - protein, 343 aa, unidentified
MQVVTTVGLDIAKSVFQVHGVDAAGQVVIRRQLKRRYVLAFFEKLPACLVGIEACASSHHWSRELKTLGHTVRLMPPAYVKPYVKRQKNDTADAEAICEAVTRANMRFVATKTPVQQSCLTLHRTRHLFIRQQTAVINVIRAHLAEFGIVAPVGRKGIETLLDVVANPTDKRVPVIARACLAALGAQLRRLKEQILEFDRMIMAWHRSNEASKRLDAIPGVGPVLATALVASIADPKAFRSGRNFSAWIGLVPKQHSSGGKDRLGNISKQGDRYLRSLFVAGALAVIRYAKIHGTTHRPWLTALLARRPTKVAAIALANKMARMVWAMMTRGERYKDPIALAA

SEQ ID NO: 131155 - protein, 426 aa, unidentified
MLKSQVEKVMAINPKVMIVGIDIAKKKHWARVLNFAGLEITKPFSFHNTKEDFIRTVVKLKNLKKENGLEEIIVGMEPTGHYWKGLAWFLKQNGIPVVMVNPYHVKRAKELDDNTQTKNDRKDAFVIAKLVKDGRYSKVYLPEGIYADLRVLSNTRIQLRAKLNAAKNMLVAILDEYFPEFAKVFKNLEGKLATCALYHFPFPEQVMEVGLDGMVFEFKKAVKKGACLKRAKKLLAAAEESICVKAGTESAKIRLRSCLDEIEFLRKQMDNIEDEMEKKLEATGIAQYMLSFPGIGIVTAAGILGEIGDPKRFESWEQVRKYAGFNLVEDSSGDRQGKTVISKRGRSMLRNILYQAALVMVAKNNEMKLMYHYLTNRKENPLCKKQALVVISIKIIKVILALVKKGQMYDVEKVLGEYRVAQIKAA

SEQ ID NO: 131156 - protein, 347 aa, unidentified
MNFYNNMHPYYCGIDLHARILYVCILDQEGNTLTHKEIPANPEKLQKILEPYIGNIVVGVECMHCWYWVSDFCHEIGVDFILGHALYMKAIHGGKAKNDRIDSYKIANLIRGGNFPLAYVYPKEMRATRDLLRRRTKIVQHGADLKAHVVNTTSQYNLPPNKVNLKNISAREQLKSTFPDISVQKNINLDMVILDCYAEQLSKVEWFIEQQAKQHKPVHLHVLKSITGVGRILSLTIIYEIGNINRFNSVQNFASYARLVKCKAESAGKSYGTQGNKIGNAHLKWAFSEAAVLYLRGNDKARRYLNHLQKRMSKAKALSALAHKLGRCIYFMLKNETVFDEDKFLKS

SEQ ID NO: 131157 - protein, 371 aa, unidentified
MDESSKTLYVGLDVHKDSIAVAYAPEDRGAEVVSLGAVGTRQCDIDKLIRKLQSKGATLVFVYEAGPCGYWLYRYLSQKGLACHVVAPSLIPRKAGDRVKTDRRDAITLARLMRSGDLSSIYVPGIEDEALRDLSRGREDAMQDLKRSKRRLKSFLLRQDIRYEGRASWNPAHLRWLSEVVCPTPPQQIVFQEYVRAVTEQQERLQRLERELHEAVKGWRLYPVVEAIQALRGVELTGAVILMTELGDITRFDTPRKLMSYLGLTPSEYSSGERRRQGGITKAGNSHARRALVEGAWAYRYPAKVSRHLQLRLEKLPAEVQAIGWKAQVRLCKRYRQLTARGKHVNQVVVAIAREMAAFAWAIARIVPLAS

SEQ ID NO: 131158 - protein, 355 aa, unidentified
MNSKKYIGMDVHKESISIAVRNDAGKIVMECVIETKASMILQFINGLRGDLQVTFEEGTSAAWLYDLLKPHVTRLVVCDPRKNASMKEGNKSDKIDARRLAELLRLNHLSAVYHGEHGLRSLKELVRSYLTITKDLGRVMSRVKAIYRSWGIACTGKQVYAPRHRAEWLAKITEPGVRRRAEFYYQQLDALRALRQEVRRDLVAESKKHPAWKRLCQIPSIGPIRAAVLLGILQTPHRFRTKRQLWTYSGFGIETRSSADHRSVDGQLERAKKQISIRGLNQNCNHDLKNLFKGAAIVASSKPGPFQEFYTALLTKGIRPEMARLTLARKIATIALIVWKRGASFDAKYLKPQTA

SEQ ID NO: 131159 - protein, 350 aa, unidentified
METVVNRPEAGQVVYVGLDIARTKWVFNVRWGGREQRRVSTPAGLDHLQAVLAVYAGSPIHLAYEACGFGYEIAWALAGRGIAVTVVPPNTIARPPGARVKTDRLDARQLATELAAGRLKRVRVPTREDHVRRQLSRTYQQVLKDKKRAQARVRSLMQDHGYYGPRPTAGWGPYAQWVAAQALPPVVQQCVEELVAARTAAVASARRLKRAVLAVAQEPPYQPVVRALSTQGGVGVFTAIRLRLELGDITAFRTAASFANFLGLIPTEHSSGDRTQRGPLVKCGPRHVRGWLVQCAWSAVRTGKDPALQECYARLVPHTGKKRAIIAVARRLALRVRARWLEQLRAAEAV

SEQ ID NO: 131160 - protein, 354 aa, unidentified
MSRLRTGTALVFLKPERLRAPLSSAHAQARELKTMSATSVVVGIDVAKAQVDLAVQGAGLPVKQFANDPDGHSALVAALVPLQANLVVMEATGGYEAALACALQAAGLAVAVVNPHQARQFAKSMGRLAKTDRIDARTLADLAAVLLRRDDLARFIRPLVDEQQKQLAALVTRRRQLTTMMLSERQRLQLAIDVVRPSLEAMIQAIRAQLDDVEAQMIIHVRTHFADLDALLQSTRGIGPIASATLIAELPELGRLDRRAIAALVGVAPIANDSGCTRGRRRIQGGRFEIRRVLYMATMTATVHNPILKAFYQRLIASGKLPKVALVACMRKLLTILNAMARDRTRWNATLHSA

SEQ ID NO: 131161 - protein, 424 aa, unidentified
MYRIAGIDVHKRLLVVVIAELRADGVVILERRKFLATPEQMRKLAECLLEWEVEEVVMESTAQYWQPIWGMLEEVWQPARRQRTGAGPKAGKLYLAQAQSNKGRRGRKNDYEDAERLVKRLEANELVLSYVPEPEQRLWRAVSRRKIQLNRDRSRVQNQLECVLEQAHIKLSSVISDLLGVSAQRILRAIAEGGSDPVVLAGMVEKNVKATPEELADALSAVRRCRTEYRKLIQMMLDHVKLLDEQMEQLILQAAKLMKPYEDAVQRLAETPGLGVDSGLQIVAEVGPRAEVFPRPGNLCSWVGSIPGEQISAERNASSKSPKGNRQMRRILTEAVQAAVKQKGNIFEVKFRKFITHMDYQEAIWCVVHFMCKIVWKILHDGVRYQERGPAVDAKNAHRRNQKMARHLKAVGYNVLPPVAPMPS

SEQ ID NO: 131162 - protein, 420 aa, unidentified
MDDEVYYERCAGIDVHKKLLVVCLRIGRKTEVREFGTLTHEIREIVAWLKANGCQMVAMESTGSYWKPIYNIFEQEGLPAMICNAYHIKNVPGRKTDVNDAQWLAKCLSQGLLKPSFIKDREQRELTDMTRFRKSQIEERARNLNRLQKFLEAANIKLASWVSDINGISATELLELVINNTEFTISDVSNRMRGGMKSTAEELFYSLEGSITQTQREFFTHVMTVIRDQSAQIEKTDAMIQCVLSENYKEAIRALEAMPGIGRISAEQIVAELGTDMSRFRNQHSLCKWAGVCPGNNESAGKRKSGKTPPGNKTLKSTLTQCAKSAKRDKNSFFSAQYSRLVTHRGKNRATMAVAHSMLIAIYFVLSGYQFKDLGADYYTQFNRDKKINSHVKQLSKLGVIVPEDALRAAFEHPPDGFVA

SEQ ID NO: 131163 - protein, 352 aa, unidentified
MMIIGCDYHPSWQQVCWFETATGETGELKLEHASGEAEKFYRGLAGHALIGMESTGNCQWFVEMATTAGHDVWIGDAAQIRASDVRQQKHDRRDAALILKLLLEGRFPRIWIPSGQEKDLRQLLIHRYKLVRIRAQVKTELQHLAMNQGVTKKRKLWSKAGEKVLRELPLKPWASRRREDLLKVREMLNGQIELLDQAVMEAAEKNEKARLLMTQPGVGPITSMAFVLTMGDVNRFQRGKQVASYLGLIPREYSSGGHQRFGSISKQGNRFLRMLLVEAAQGAVRCDPGFRNEYLHRCHKKAKGVAKVAAARKLAIRLYWMLRTNTGYPEVVRVESSSRVPLVSASLPGQAS

SEQ ID NO: 131164 - protein, 352 aa, unidentified
MSFETIVALDLGKFKTVLCVMDVATHTHRFASVDSTPTAISHAVQHHLSIDPAQTQVVFETCDTCGWVHDSIVGLGVKIVIVNANDERWRWQRVKRKTDQDDALKLARLALLDQLPAVHLPDPPQRQRRRLMIHRRSIVQRRTQCRNAIRSIFSQQGIPLARGQKQWTAAGLQQLEGYAASIDTCPIDDLWKGRLNSELLLMASINTQLKALDAKLDELADPRMKLLQTLKGVGPRTAEAVVLYVDDPGRFKSGEQLASYAGLVPKQLQSGEMNRLGHITHRGPGLLRSLLVEAAWTVYRHNRWAQVFVNKISHGSKARRKLAIVALAKKLLIILWGMLKSNQPFRCPAVAG

SEQ ID NO: 131165 - protein, 434 aa, unidentified
MQDAEDEPLFAERVAGLDIAKAEVEVAIRVPSDTTAGRRQQETRTFATTRKELLALADWLRCWGVTKAGMEATGDYWKPVFFLLESQGFDCDLYNAAQVKALPGRPKTDRADSIWLAKITERGMISSSFVPPEPVRRLRTHTRYRRHLTQARTAEKQRVEKLLEDGHLKLSSVISDIHGASGRDMLNALAAGQRDPRALAQMARGTMRGKIRRLEEALECSFFTDQHAAVLAMMLTTIDHYTTQIGQLTVKIEALTEPYLHQIGQLDQIDGIGIICAQDIIAEIGTDMTVFPTASHLVSWARWSPQIKQSAGKRKGSNATGRGNPYLGAALGEGAASAGRTQSFLGARYRRLTRRMPKKKALVATGNSMLTIMHALLADPDACYQDLGADYYEQRMHTRRQARNHIKSLERLGYQVTIQATANDPGNQTLTAAG

SEQ ID NO: 131166 - protein, 376 aa, unidentified
MTAKGPVLFTGLDVHNDSIAVSLAPSDSTEVRRYGIIGGEHDDVLKLAKKLVTAHPGMLLKFCYEAGPRGFALCRCLRAHGFDCILVCPSKVPRKPGERVKTDRRDADDLARLYRAGELTGIYVPQPEDEAMRDLIRARFQVGKQQHRARQQLKMYLLRHNLRYVGKSSWSPAHLRYLAKIKMPFPVQQIVFQEMLEVITHATTQLERYDQEIERAVPGWRWEPAVRALMSLRGMALLHAATLVAELGDFNRFEHPGQLMGYLGLVPSEHTTGNDRQQGGITKMGNAPARRALVEAAWQYRAPARLSPHLQKRQEGLPKTITDIAWEAQRRLHHRYTHLTRVGKKKSQVAVTAVARELSGFVWAIARQVKPHAVRS

SEQ ID NO: 131167 - protein, 392 aa, unidentified
MYIVGIDIGKNHHEASIVSPEGKQIGRSLRFATTHKGADSLMSFIFKNIGNSPCVFGMEATGHYWYPIYSFLKAKGYTIYVINPIQSDSLRKMYIRQTKNDSIDSFLIAEVIRFGQFGTTSMADENILAMRQLCRYRDSVISSRTEIKLRIGTIMEQIFPEYEKQFSSLWVSTSMGILEKYLTPENIENAPIDELFEIIKDKSHNRLTKAKAISIKEAAADTFGIKIAQDAFSFQLKQLIDRMNFLDKQIEALDCQILEYYEKFDCYLHTIPGIGMIAAATILAEIGDINRFKSSSALVAFAGIDPTVRQSGEFNSTHNHMSKRGSPYLRHAIFLAATTCSFHNSPLNAYYKKKRDQGKHHLTATGAVARKLTTIIYAVLRDSKPYEPKKFC

SEQ ID NO: 131168 - protein, 416 aa, unidentified
MIDQETFTWFAAIDWGTERHQACVLDARGGIAGERAFSHSGAGLALLCDWILSIAGSATVVAVAVEVPHGPVVDSLLDRGMAVHAINPKQLDRLRDRFCVSGAKDDRRDAYVAADGLRTDRHLFRRLHVADPRLVELREWSRLAEELQQERVRLSNRLHDQLWRYYPQMLGLSDDIAADWLLDIWTMAPTPAKSKQLRKTSVEQLLKRNRIRRIDAEAVLRTLRQPAIKVAEGVTEAATIHIRSLITRLRVVNRELRDATHKLDELCAGLDEAPPAAAEHDGEQHDIKILKSMPGIGRINLAILLAEASGPLSRRDYQALRTLSGVAPVTKQSGKSRVVVRRYAAHVRLRDAVYHWARVATQHDPKSRSRYVALRQRGHSHGRAIRGVADRLLALACTLLQRQTVFDPDFGTPEVT

SEQ ID NO: 131169 - protein, 346 aa, unidentified
MKILALDLGKYKTVGCTYESESGAHQFQRTFTTPTDLRRLVQEVRPDRVVIEVCSIAGWVCDLMGQLGTEVQVANTSDDAWRWRKVKQKDDRRDALKAARLSAVNQLREVYIPPREVRQWRALITYRQHLVGRRTKIKNHIRDLLVREGQLLPRGRSCWNQLGQAQLNTMARPFAEVEAAELWRGELWEELQQLQMIQERVASVEEKLNAMGAADKRVQLLRTIPGVGPRLSEAIVALLDQPQRFRKASQVSSYIGMVPKAFDSGESERRGRITRQGNRLVRSLLVEVAWVGLRHNSWLRQTYQRLSGGKKARKKIAIVAVGRKLLVRCWAMLRDNCPWRWQPQIT

SEQ ID NO: 131170 - protein, 356 aa, unidentified
MDSTKYIGMDVHKEATTIAVLSSAGKLVMESIVETKAITLVQFLEGLRGELYVTLEEGTWAAWLYDLLKPHVTKVVVCNPRKNALLKAGNKSDRIDARKLAELLRAGLLSAVYHGEAGLRTLKELGRSYLAISKDLTRTMNRVKALYRSWSIPCGGTSVYAPRHRAEWLSKITEPGVRRRAELFYQQLDGLQKLRQEARRDLLAESRKHGATELLRRIPYIGPIRAALLIALLQTPHRFRTKRQLWAYSGLALETHSSAEYHYVQGQLQRSKRPVALRGLNHNHNHDLKSIFKGAATKAGTAKGPFHDFYTALVAKGMKPTMARLTLARKIAAITLIVWKKGVCFDAQQLKQQVSV

SEQ ID NO: 131171 - protein, 334 aa, unidentified
MTFELLAIDLGKSSFHLHSIASDGTILSRKVSRSKLAEIVKAIAPKTVAMEACASAHHWGRQFNGDGREVLLINPRFVKPFVRGSKNDAVDAAAIYEAATRPTMRFVPLKSAAQQDLQSLHRIRERLIVQRTSLINHARGLLAEYGIVLPQGPWRFASQAPSAVKDAALSDLGRELFLELLDQLTDVNDRVGRLDRKISEICRERNDCRRLSELPGVGPIIATAIVASVEDGRHFKSGRELAAWIGLIPRQYSTGGKPRLGGIGRRANHYLRRQMIHGARAVISRLASHDDRRSQWLKELVARRGFNRAIVALANKTARVAWALLTRQERYAAQ

SEQ ID NO: 131172 - protein, 377 aa, unidentified
MSKLLFVGLDVHAETIAVAVAEQGGEVRSVGGIANRLESVRKMVHKLGPVQHLRACYEAGPTGYVLYWQLTQLGVACEVIAPSLVPSKAGDRVKTDRRDAEKLARCHRAGELTAVCVPSAAQEALRDLVRAREAAKKDQLKARHRLGKFLLRHGRQRPEGIKAWTKKHREWIKSHVRFEEAALEVTLADYVEEVDHVATRIVKLEKAIDEAIRQAPPELRAVIEALQALRGVAQTTAASIVSEVGSLSRFPTAPQLMGYSGLVPSEHTSGNRVQRGGLTKTGNGHLRRVLVEAAWAYQHRPNVIGHLARRQKDLAISEEAKQIAWKAQHRLHKRYQAMAARGKNKNQIVAALGRELLGFIWAIGVKTEQQQKLAKAA

SEQ ID NO: 131173 - protein, 324 aa, unidentified
MKEQAVNEIFVGIDVSKHHLDVSVRPTGEEFHVGNNDEGFAEIVERIKTISPDLIVLEATGGYETAVASALGIAGHPIAIVNPRQARDFAKSLGRLAKTDRIDAAMLAHFGEATRPEPRKLPDEQSILLQSLLCRRRQVIEMLVAEKNRHGVIHKSQKSRVKEHIVWLEREKAKLDEELREQIQQSPIWREKEQLLRSVPGVGEVLVTTLFAELPELGQINRKKIAALVGVAPFNCDSGKMRGKRAIWGGRAAVRNALYMAALSATRYNPVIRAHYQHLLEEGKPKKVALVACMRKLLTILNAMIRTMKPWEPILAAPRSAVVA

SEQ ID NO: 131174 - protein, 404 aa, unidentified
MGTPDDIDVWIGLDIGKAEHFADVLDSAGAPLFAGTVANDEADIEALLDRAAGLGTAALVVDQPGSLASLVLAVAARRQVPVAYVPGLVMRRAADLYPGEAKTDRRDAFVLADTARLRRHQVHWLDAGNDELLAQLRVLNGYDADLAADATRLSNRLRDALTGISPALERVLGPRLHHPGVRDLLARYPAPHALRKAGRSRIENAIRKRSPRLAKALAAAVMQALRAQTVVVPVESVMGRVVAEVVAELDRTLARRKRLASDLEELFDAHPFGRILGTLPGIGPRTGSRILAEIGDGARFATGSRLASYAGLAPVTRQSGSSLRGEGRSRRGNHRLKNAMFLAAFASLRDPVSRAYYDRKRAEGKKHNAALICLARRRCDVILTMLRSREPYRVRAPRDQVAAA

SEQ ID NO: 131175 - protein, 416 aa, unidentified
MEQGYKSKVFCGYSITIFPSEVFIMVVSVGIDVAKDKHDCFILNSEGEVLADVFTIPNNMDGFNCLLQTIRDCTTPQDIIKVGLEATGHYSYNILGFLLDNGLATYVLNPLRTNLYRKCLSLRKTKTDRVDARTIAAMLLSDIGLKPYTDTAYHNEELKSLTRYRFNKVKERAKLKSSVSRLVCILFPELEKLVPTLHGASIYALLEEFPGAVQAAGAHLTRLKYLLSDASRGRYGRDMAVEIRDAARNSIGSRMPAKSLELQHTIRLIRELDAEIEEIETAIQTIMDEIHSPITTIPGIGYRMGAMILAEVGDFSRFESPDKLLAYAGLSPSTYQSGQLINCYPHMEKRGSRYLRYAIYNAAKYVCLWDPTFAAYLAKKRAEGKHYNVAISHAAKKLVRLIFALEKSRQPYNLAA

SEQ ID NO: 131176 - protein, 352 aa, unidentified
MLIIGCDFHPGFQQIAIFDNQTGAYEERRLSHRAEAEEFYRALAGQEVRVGMEACGHYPWFERLLAELGFELWLGDAAKIRASVVRQQKTDRRDAAHLQMLMREDGFPRIWVPSLEERDVRQLLVHRHKQVQARTRTKNQLHALALSQGVQKKWKLWTAAGRAELESLELLPYAAQRRRQLLHRLDALEAEIAALNRQVEEEVKGRPAAGKLMTHPGVGPVTALAMVLTLGPAERFRDGRKVGSYFGLIPSEYSSGGRQRLGHISKQGSSFVRFLLVEAGQSAVRKDAELGRFYRRLGARKHRALAKVAVARKVGGEVVPDVARGLDVRATVQGRGAGKPESFCGGKPEPTA

SEQ ID NO: 131177 - protein, 337 aa, unidentified
MEREYVGIDLHRRRSVIIRKNAAGELISKVHIDNSAEALVAAVAAAGPEPEVVIEATFGWYWAVDLLTEMGAHDHLAHPLGNNWGNRRVKNDERDAADLVDLLRLGRLAESWIAPPEVRELRELVRYRHKLVRLRAGLKAQVHAVMGKHGVLPTRTDMFGPGGTAQLDALELPDGYARRLASLRALIKVYDTDIAELDRTIAASLVHHRGYHVIQALNGVGPIVAAVLVTEIGDITRFPSPDRLCSWAGMTPTHRESDTKVKRGSITKQGSRLIRWAAVEAVSKNHGDDLIKAAYRRIAERRGRNIAKVAAARRLLTLVYYGLRDGEIRCLTGPARG

SEQ ID NO: 131178 - protein, 344 aa, unidentified
MATIAHIGIDLAKYVIQVHGIDANGKVLLKKMVKRSELIKTIMNIEPCVIGMEACGGAHYWARRFSEFGHEVKLMAAQFVAPYRKNQKNDANDAEAICEALTRPSMRFVPKKSVDQQVVLSLHRTRALLVGQRTAIVNHMRGLLLEFGIAISRGIQKARNQLPGILEDGDNELPDIVRELIAHNVQHLKLLDARIGDLDKQLDHLAKQSELSQRILKIEGIGPLCATAMIASIGDAKLFNNGRQLAAWLGLTPKQYSSGGKTRLGRITKGGNRYLRTLLIQGAKSALFQCARKKDQKSHWAMQIRERRNHNIAVVTLAAKNARTIWALLAKNREYQHDYQPMAA

SEQ ID NO: 131179 - protein, 324 aa, unidentified
MQVPLVTVAPACIGIDVDSKRLNITRADAATLDTPVTGVANTASAIKAWLKTLPAGCRIGMEATGPYHRSLADLAVRGGHTVFVFNPAQVASYLRSLRSRGKTDVLDARGIARYVLNESAQCHPYVVPSPFHAKLAVLIGRRHQLVKESSSLQMSLGDLTDCAAQIKALKDAFKALLARIDAQINAVFAAEHELQVQRQRLGTIHGFGPLVSAAVAARLSRLPYANSDAVVAAFGMDPRPRDSGDFKGLRRLSKCGNAEERRLIYLAAVSACNNPLFRAIRDKLLLKGMSPIQAHCVIARKLLRIAFAVWTSQQPFNPELIGKA

SEQ ID NO: 131180 - protein, 379 aa, unidentified
MQTITLYIGLDVHKDSITIAIAEPGPKGEIRLFGTITNDLGRLENALGRIRKAHPGAHLEVAYEAGPCGFVLARRLKQLKIPCLVAAPSLIPKPPGAPFKTDKRDARAIARLLRAGELTAVYIPEPTDEAIRDLCRARTDAVDDLRRCRHRLKGFLLRHGYRYQGKANWSQPHMRYLRELVLPHPAMKTILEEYLQGIDAAHQRVQRIEASMLILLDTWRLKPAVQALMSFRGFQLVAAMVTASELGDIHRFAHPRQLMTYLGLAPTESSSGPHQRQGGISRCGNSHQRWLLTECAEHYALPPKISKELSRRQEGQPEAIRALSWKAQNRLHLRFQRLLARRLQRHKAKVAIARELCGFIWALLRTQDCYRQPAAAQPA

SEQ ID NO: 131181 - protein, 341 aa, unidentified
MSESALIGIDLGKHTFHLHGQDTSGREVFRKKCSRAQMMQFFGNVPSCVVVMEACAGSHFVARQLMAMGHTAKLISPQFVRPFVKGNKNDFVDAEAICEAASRPSMRFVTPKTESQQTLSVLHRMRESLVHDRTKTANQMHGFLLEFGISLPKGLAIMQRLASVLAEHELPVRLTVLLQRLHDHFVYLDEQIKALDKELAGQLADDDLGSRLLSMPCVGPITASLLAVEMGDGKQYRCSRDFAASVGLVPRQYSTGGRANLLGISKRGDKHLRQLLVQCSRVYMQRLDHQKGALADWVRSLLSRRHSNVVACALANKLARIAWAIAAHHTQYEAGPDALNA

SEQ ID NO: 131182 - protein, 349 aa, unidentified
MLADELDYVVGVDTHLEEHVLAVVAAATGAVLARQVLPANKRGYQAALRFAGEAAHGARAWAVEGTGSYGAGLARYLAGRGETVLESSRSPRTERRLRGKDDALDAARTARAALASEALALPRNGERREALRLLLVARRSAVDVRREALGQLRGVIVTAPDRLREELRVLPTGRLLERCSRLRHSSTAGADELATRLVLRSLARRIDAATAEAAELEREILAHVRALAPALLDEPGVGPIVAAQLLVAWSHRGRLRSEAAFARLAGVAPLPASSGQTVRHRLSRGGDRQLNRALHTVVLHRRQHDPATKDYIARRIAEGKSRRDATRLLKRYLARHLYRLLQNQEPLLT

SEQ ID NO: 131183 - protein, 358 aa, unidentified
MKNLLIGIDFSKKKFDVAAILADNLSVCATETHDEFSNDKKGVRMLLSWAKGLQKKHKAAELLFCGENTGNYSRCAADNIYISGCDMWLANPLKIKRSNPLRRGKSDKADALMIAEYAMRHYDERRLYEPPSKSVSDLREMYGLRQFYVDRRKEVLVRNNEKQRTLESSASQKMMDELSKQEIAELDWKIRRVNQQIRELIRSDEEIRETHDIVTSVPGISTLTAVCLIVYTNNFKSFDYDARRLASYFGVAPFGKESGSSVRSAPHVSCYCDKRIKAALHEPALAAIRFNANMNTYYRRLTNRGKHHLVALNNVKSKLLHIVVALVRDKKKYDPNYQNPLVACVKDTSHEKSVDFAW

SEQ ID NO: 131184 - protein, 355 aa, unidentified
MDSKKYIGMDVHKEAIAIAVLNSSGKLVMECVIETKAITILDFLKGLRGSLHVTFEEGTWAAWLYDLIKPQVTELIVCNPRRNALLKEGSKSDRIDARKLAELLHSNMLRSVYHGEHGVRKLKELARSYLAISKDLGRVMSRVKAIYRSWGIPCAGKQVYAPRYRSEWLGKIQEAGVRRRAEFYYQQFDALRTLRQEVRRELLAEARKHEARRLLRGIPFIGPIRAALLIALVQTPHRFRTKRQLWTYSGFGIETHSSAEQRFINGELRRAKKPASIRGLNRNHNHDLKNLFKGAATVAAAKAGPFQEFYDALVAKGIRPEMARLTLARKIAAITLIVWKKGVRFDAKHLKPQTA

SEQ ID NO: 131185 - protein, 335 aa, unidentified
MKYIGMDAHSSNCVFSVMDSNGVELDNVNIATNGKQLINYIRSVEGKKKLTFEECELSQWLYELLKEEVEELIVCNPVANRGYKGAKTDRIDARRLAKLLRGNFLTSVYHDGSEREKFRSLVSGYQDLVEEAVRLKNRYKSLYRKEGQKKRGSALYNDESLLDGLERSDFKFVGQKIFKLLQEMESMREEYVKEIIKAGKGFKEIRRLKTLPGIGDIQAAKIVSQVIEPSRFLNKYKYYSYCGLVRHEQRSADKQYGSKKANGNKVLKCVYKMAAFSAIRGDNGLRKHYEHLLSSGVGEKSAYNAVCRKIAAISLSLWKHDRNYDDKLTNNDPLK

SEQ ID NO: 131186 - protein, 404 aa, unidentified
MWYVGLDWVDTHHDVEVLDEAGKRVGVRRFAHNHAGLHELQAFLLGIAPEVEQLACIVETNHGLLITFLLEAGIPVYPVNPKTANQLRKSAGAKTDQIDAHLLAKLGRLELAELRRLEPDSAIVQELKTLTRDQDALIQTQTRLVNQLTACLKEYYPAALHLFAKLQQRCALVFLQAYPTPQAAQAATLAEITATLHTGKHTNPRQAAPKIFEEVHRPQLVAKEVIVRAKQRLMLSLVKQLLVVIEDIATYDKEISTLFLTHKDQEIWRSLPRAGKRLAPRRLPEWGDDRARYADASSVQSLAGTAPVPFQSGNYAKAHKRFACVKPLRNVLHQFAWQSTRQEAWARDYYQRKRAQGKTHSMAVRALANVWVGIIYRMWVSKTSYQTATFEAARQAHAPQQHVA

SEQ ID NO: 131187 - protein, 340 aa, unidentified
MQVIRFGIDLAKNVFQVHGVDATGRVVVQRQLRRAQVEKFFAAQPPALIGMEACGSAHHWGRTLRALGHEVKLMPPAYVKPYVPRNKNDARDAHGCCEAVSRPDMRFVPIKTVEQQWARALHRTRDLLVRQRTQLANAMRGMLYEMGQTSAQGAAGLEALLQRVEAADEAIPEALLICLTPLAGQWRALDGEIGKLDKQILAQVRQQKAALRLTTIPSVGPIIAHATIAAIGDGRQFTSGRDFAAWLGLTRKSHDTGGKHKLTGHISRAGDRDLRRLLILGASSWLRQVRAKPDRGSPWIRGLLARRPVKVAVVAQAAKTARIIWAMLNSGQEYRAPTAA

SEQ ID NO: 131188 - protein, 423 aa, unidentified
MDVMFESVAGLDVHKAMIVACIRQMSGGKAERESRTFETTTSGLLDLLAWLTESRCSHVAMEATGVYWKPVWNILSDGDFELILANAAHIKNVPGRKTDVNDATWIADLMACGLIKASFVPEEEIQDLRSLLRCRKQLTREQTRYTQRIQKTLEEANIKLDSVISDIMGVSGRKMIEAMIAGVRNPSKLAALADRRLKASPKRLYDALHGRLTDHHRFMLKLYLSQYDALDAASIEIDQQVDAAIAHMDAEVEAGHATFRSLISLLSTMPGVSALSATTILSEIGTDMSRFAEAGQLVAWAGLCPGQNESAGKRKSSRLRKGAPWLKTMLVQCAWSAVKKKDSYYKAQFNRLRARGGAKKAICAVAASMLTAIYHMLKNGVEHHDLGGDHFDRRATDVKAKRLVSQLNKLGFDVALRPLQKAA

SEQ ID NO: 131189 - protein, 344 aa, unidentified
MNQIIRIGIDTSKYILVLHGVDAAEQVVLRKKLSRKQVLEFFAKLPPTVIGMEACGASQHWARELSKLGHEVKLMAPQLVKPYVMRNKNDGRDAEGLCEAMSRRSMRFVPVKTAEQQAALMLMGVRDGLIVRRTQLTNTIRGHAAEYGLIAPKGLDAIEPLLARIAQDETLPALARELFVVLGRERARLEGELKAVEAKLMAWHRGDATGRRLAEIPSVGPIVATALVMKTPDPHAFRSGRHFAAWLGLTPKDHSTAGRTRLGKITRAGDEDLRRLLVIGATAVIQQARRGRGHHSRWLLALIQRKPPKLAAVALANKVARIAWKLMATGESYDVARMNPIPAT

SEQ ID NO: 131190 - protein, 347 aa, unidentified
MRFSTTQHPLYGGIDLHARSMDGCIVSHEGEILLPRNLPAAPGPFLKAVAPYREGLVVAVECIFPWYGLAALCADEGIAFVLGHALSMKAIHGGTAKNDTIDSQKIALLLRGGMLPQAYVYPADMQATRALLRRHMHLRHKRSELLSHGQNPHRPYHLPELGKKIAYKAHREGVAARFRDPAVQQTIEVALALITYDDELLRALELPLLQTAKQHTAPPLSRLPPVPGIGKVLRLVWLYDIHRSDRFPSVQAFASYARLVKCSKESGGKRLGPSGKNIGNAHLTWAFSEAAVLFLRNTPQGQKLLARLETKHAQGKALTILAHKLARAVYGMLTRKMAFDMDLFLRA

SEQ ID NO: 131191 - protein, 346 aa, unidentified
MKKIFIGIDFSKEKFDATVIKAEGVEERAERQHEVFDNKVSGFRRLLRWVKAVADEQDTGLWLFCGENTGGYSKALCNYLYGSGYDMWLENALSIKRSSALQRTKSDKADAGIIAEYAMRNYDQMRLYKPLSKNLERLREVFLYRHNLVKLKASMMVRKGEKKLTQDKSDISRFMSMSSKHLISEFNKKIAECDKRIDDIICEDEELLRNFEIITSVPGMGRQNAVCLMVYTDNFGRFDFDSRKIACYYGVAPFGRQSGTSVNTPPHVSPFANKLIKALLTQAALASINFCAQMAVYYHRLVEAGKKKPVAINNVKNKLLHVITAMVRKGEKYDPDYDYHAAINAA

SEQ ID NO: 131192 - protein, 387 aa, unidentified
MPNAKEGAETLESLLVDVLSAHHEFNHVIIGLESTGFYGVHIANYLSASDLLAPFGTEVYCLNPKEVAKYKESFNALDKNDGIDSFVIADFARVGRISIKPWRGAQYLALQRLTRHRLHITECIAREKTYVLNNIFLKFSEFAMLKKEDHPFSNKYGATAEAILEQYVTNDDIIEASIEELVELIESKSRGRITDPEETVKILKAAANGSYRLDKVVAEPITLSISSSFNCIRAFEKELKAIEKAIEHTVQGLNPVEYQVLKSIPGIGHVYAAGILAEIGTIKAFTDNGALAKYCGIVWKENQSGNFRAEDTKMSKAGNRYLRYYVIEATGSVINNCPEYKDFYDKKFAETTTHQHKRALALTSRKFLRMLFGLLDKSQLYSLERSR

SEQ ID NO: 131193 - protein, 341 aa, unidentified
MKRLYYIGLDIHKKTISYCVKQVDGTIVQQGAIAAERKALFKWMESLPGSWLGAMEATLFTGWVYDFLKPYAVELKVAHPEMLKAITAAKKKNDRADAEKIADLLRVNLLPECHMLSEELRELRRILRYRNMIVRTATKMKNKISGLLMEVGATYSKEKLHRRKYFNNLLERVEDVPDSVKDMLKLSRSSLEMFEAVQKKLVHTLREDKLIHERVQRLMSIKGVGEVMALTWVLETGDSSRFHSARQAISYCGLCSAQRESAGKDQRGPISKKRNKHLQTILIETAKLAPRWNPQLAALHEKEVKQGHRNRATISVARKLVEYMLAVERQQKDFVPSELAA

SEQ ID NO: 131194 - protein, 395 aa, unidentified
MFYGLDVHKEFIQVCALNEDGKTRRDFRVGGTAAAIEEFARRLDRSDPVVLEATFHSWAIVQILRRYVDRVVVADPAQLKAIANARIKTDKVDAHILAQLLRLDFLPEVELPNQGTWALRQLMAHRRQLRRQSVATKNTIHGVLNRSLQRYPGKFLFTEKGFRWLAELELPAAERMVLDHQTGLLREVQAHLQGVDRALREQAQLYPEAHLLVTIPGVDVVVAMGFLAAIGSIERFPSPQKLAAYFGLVPKIRQSGSTTYYGHITKAGSRNARWLAIEAAHTIARSSSPLAASYHRLRRRKGHQIAVTALARKLVVVVWHILTTEQPYRYAAPERTRIKLRKLQKHERPPRGRAPRNLDEVYAEAGLALAPPAPGEKRAAKRSRAALTRMRNETS

SEQ ID NO: 131195 - protein, 314 aa, unidentified
MTNANRASGVNIGVDVGKFQLDIFILERDRHFTVTNDQQGIREALTIIQRYTVSRIVLEATGRYEMAFATAAFEKALPVCIVRPVLVRQFARAADQRAKTDRIDAQIIARFGAVMAPRPSRAKSKNLLLIKDLVTRRKQLIGMRTQELNRQKMLEGPVARSCGRVIRSLNKDIEWTEERLAKMVEQEATWAEKRKLLATVPGVGDTLIFTLLSELPELGELNQKEIASLAGLAPINRDSGRFRGKRRIQGGRSNVRTTLYMATLSATRCNPVIGGFYRHLVKQGKHKKVALTAAMRKFLVILNAMMRDNVAWAY

SEQ ID NO: 131196 - protein, 375 aa, unidentified
MTKHSEVFVAFDTSKLRNAVAIAEAGRAGEVRFLGEIENTAEATTKLVRKLEAKYERITFCYEAGPTGYELQRHIHGLGHECMVAAPSLIPKKPGDRVKTNRRDAVSLVKLLRAGELTAVWVPDRRHEAMRDLTRAREAAVIDLRAKRQRVSALLLRQGRCYPANKKTWTKVYMNWLASQRFEQPERGIVFAEMMFAIRQAQERVERLEQAIRTAVPEWSLAEMVTAFMAFRGIDLVSATCLLAELGDLTRFPTAPEVMGYVGLGCSEGSTGDRIKRGGITKSGNRRARRTLVECAWSYQHPPRVGIAKQAKVAAAPAKVREIAWKAQCRLNRRYRGLLRRGKLKTVAITAVARELAGFLWAAARELSSPQRVAK

SEQ ID NO: 131197 - protein, 368 aa, unidentified
MYLHSPVLFDRCPGSFWQGAHMDQVFIGVDTHKANHIAVALNAQGARLGTTTIAANEDGYRRLDAWANGLGRVTAFGIEGTGSYGAGLSRELQAKGHTVLDVIRPNRQLRYLHGKSDSLDAESAARSVLNGQATAIAKSQGGTSEMIRHLKVARDSAVKAKSQAMITLKTLIINAPAELRASLEHIRGPISLVRHLAALRPGEIISPTASAKTALRSIARRWLALHDEVQQHEAELERMAAEKAPDLMQAHGISTLTVAEMLILVGDNPERIRSEAALAKLCGVCPIPASSGKTVRMRLNRGGNRQANAALYRVAIVRMRDHTETKRYAARRMAEGKTRREIVRCIKRYIVREIFTALCRPKLPAVSA

SEQ ID NO: 131198 - protein, 414 aa, unidentified
MDILVERCAGLDVHRDTVVATVRVPPDSSGRKRRAQYTQTFATTTAGITKLGDWLAEHRVTRAGIESTGVYWKPVYYLLEDQLEVWLINAEHLHNVPGRKTDVADSAWIAQMVEHGLVRPSFVPPPPIRELRDLTRHRRTLVEERTRVVQRLEKVMQDAGIKLTSVASALLTKSGRAILEALLAGQDDPDALAELARGRLRAKIPALREALAGRFRVGHHGLLVAQMLAHVDFLDAAIAELDTTLERAATPFAATLKRVCTIPGVSVRTAIMLLAECGADMTVFRTPAHLASWAGICPGNNTSGGKSRSGRTRHGSVPLRTALTEAAHAAARTKNTYLAAHHAQIRGRRGLPKAIGATRHDLLIAYWHVVHDQVNYADLGPDWAQRRRSTEHRTRRLVHQLEQLGHTVTLEPSH

SEQ ID NO: 131199 - protein, 465 aa, unidentified
MNTLAVSNMLYVGIDIGKASHYAGFVSTNLLTRYRRFESCPNLSFAQSRTGFVQLVQRMQEYAPLDQCIVLLERTGHYHLLLKQYLQEQGVMLYEMHVQKRENRDKTDKRDSLSLANHLYNQLEKSVQFSESTKLARLVHPPTETAIFLRSLVKHREELIWESTQRKNKLTSICDELFPELTTIMKNPNSQTALNVREKYATAADVASATIDDLLACRVSYRLVDIHMEALRALAVSSIGTRDPGRLRSLTMQQRQMIAELRLLTTHIAEIEQEIIATLETSREGQILTSLPVIGPTQAAILLALIGNIHNFSRPAQLKSYCGWSPRHEQTGTSVNVVKLTPGGNPVLKRTMYLVAMNAVRLDTEWRDLYQRLVPVKCKFDERKGVYYGRMKVIGRVAGQIITLVYTLLKKDATLLASLAEGEQAPPPVLYDRVVHHAHRAGSYRRADTLPLGSPPPLVEKLHNE

SEQ ID NO: 131200 - protein, 349 aa, unidentified
MERFRVGIDISAKTVVIAHRGVKGRVERHEFSNDGAGRRALLHYLKKRAKLIRVVMESTGVYGLDLALLLNKNGIELMVANPRATAHFAKAILQRSKTDALDAEMLLLFAESMPFLPWTAPSATQLELRGISRRVQALLETVRAEKSRMHAAMYVEGTTIVRKSIQSTLKALDKQIVSLRSEAMKLIKSDSLLTRRFELLLTVKGIGKISAISIIAELSVLPPDMTDRQWVAHAGLDPRLFESGTSVEKVPRISKRGNSHLRAVLYLPARVASLFDPGARRFAARLKANGKKPLQIHVAVMRKLLHGIHAMFENNVPYDTNNLFPVAGAVGTSGIALSAISEVSTALPC

SEQ ID NO: 131201 - protein, 338 aa, unidentified
MTIGIDLAKNIFAVHGVDQNGKAVLIKPKVARDQLAALIAQLAPCLIGLEACSGAHHWARLFRGYGHSVKLMDPKRVTPFRLTGKRGKNDAADAAAICEAVARPNMRFVPIKEEHQQVILTLHRTRQGFVEERTATYNRMRGLMSEFGIVLPQKVACLRRSIGEHLEDLPGYANQCIGDLLSHADQLDGRIAEYDKLIAQAARDDARSKRLMQRPGIGPVTASALLASIGNGHDFKNGRQVAAWIGLVPGQYSSGGKARLGRITKAGDGYLRSLLVMGARAILSGLGDKQDGFSRWARSLVERRGYWKAVVAIAAKNATLAWAVLKYGEDFRLNASAV

SEQ ID NO: 131202 - protein, 356 aa, unidentified
MSVYVGIDVHRKRSQVAVIDQDGQVLANRNVPNGTETILRVIGGLPPGTPAAFEAAFGWGWLVELLEDYGFDPHLVHPLQCKAIASARLKNDKVDAAILAQLLRADLLPEAWIAPPPVRQLRALLRHRAQLVRLRTLLRNRIHAVLADHGHGRAGGCWSGPGRAWLASLPLPAVSREVVEDDLALIDALQVPIDRLDWEVRQRARAEPAVKVLTQLPGVGPFTALVILAEVGDISRFGSARKLAAWAGLTPTVRGSDRTVRHGHISKQGSAWLRWVLCEAAQTAKRHPDFATTYQAIARRRGKKIATTAIARRLLTRAYHLLTDAASGVTPTSREGSPAPGELANSHEPATPRSMT

SEQ ID NO: 131203 - protein, 382 aa, unidentified
MLYVGIDLHKKSITICVVNQERQKVEQKRFACSTPEIIVAFFKKLGVFQGVVEATASYEWLVRLLEPLAERIVLAHPKKLRVIAESTRKSDKIDARLLAEFLALDMIPQAYRPTPRQREHRVLVRQRCYLQRRITSIRNKIRRILSDYNADRPDLFTAAGLEYLAQVQLSTADRFAVKQLLAEFEFQQSSLEGLAVELKKFVAAAPAAEAEARALLQSIPGVGPVTTEVVLSELADPKRFRSAKCVVAYAGMAPGQRESAGKRKELHIERTGSKLLRWVLVEAAWQLVRRTGRWRVTFERLGARIGRKKAIIAIARRLLTVMMALLKSGQPYQHAYEPEPAEPPKEKPGEKPAAEKPVGKKAAQPKPTHVVTKAPKESKEHK

SEQ ID NO: 131204 - protein, 360 aa, unidentified
MNGHKYVALDVDSANIVAGVHDCKGEQVMQAHIRTNSSDIRQFFKAVNGTVHVTFEEGTQAAWLYDVIRPLVAEVVVCNPRYNKLLQAGSKADKIDVAKLAKLLLLGELQPVYHGDQTMEGLKHLARAYQNLVADKTRVTNRLKAIFRGRAVGCRGSVVFNEEQQEEWLGKLDIEGLQTRGGYLYEELKCLVKLKEKARKAMCLEASRHPAFKLISSRVPGLGPIRTAQIIAIVGSPHRFRTKRQFWSYCGLAVVTRSSADYEWVEGRTRRRKKAVQTRGLNKNFNRPLKAIFKGAAVSAIQKDEFKQYHQRMIDKKIRPEMALLTTARKIAAITLAVWKKGETFDPKRLNQAGQSTDNQ

SEQ ID NO: 131205 - protein, 387 aa, unidentified
MSVDHQPEQTAVRTHLGAIFVSLELSRATWLVTALLPGHGEKMSKHLVRGGDVVGLLAKFAELKAKAHLRTGRMFPIIAIQEAGLDGFWLHRVLEGEGVESHVVDPASIATSRRRRRAKTDKIDGEALIRALLAYKRGEPRVCAMVRAPAPEEEDRRRICRERKTLIAERVEHVNRIKGLLFAQGIRDYQPLGRRRRERLDELTTADGRALPAHLKAQISRELDRLELLLQQIEAVEAARDALLAQSAEQSSSAPAAMLMRVQGVGPEFAGIIWSEGLFRRFDNRRQIAAYAGLAPTPWQSGAVAREQGVSKAGNPRLRTTMIQLAWLWLRHQPCSGLSQWFHERVKRNGGRLKKPMIVALARKLLVALWRYVTAGVVIEGAALKVS

SEQ ID NO: 131206 - protein, 377 aa, unidentified
MQKEHNMESIIYVGMDVHKDSYSICCYKADEDRFYYEKKVNAESKRVLKYLESVNKEFGEDCLLMCGYEAGPTGFGLYRDLIKAGYICVVIAPTSLKHSSNHKIKNDKVDARFLAKTLFTKDYSSVHVTTEHEEAIKEYCRMRLSLKKELTRAKLVLQSFLLRHDKKFTEGNTWTLKYRDWLNKIHFEEDYLNEALNEYMISVNTYEARIKAVENRLKQISLDPAVKDKVDKLVCFCGIETVSAVTIVSKVGDFNRFEKAYHFSNYLGLTCGEKSSGQKEKHLGITKSGDRELRCLLSECAKSIKKTSIKGRKSKRLLDRQKEKDPKVIAYADKCRYRLRSKIAYLELRGKSANVATTAAARELACFIWGMMTDHIA

SEQ ID NO: 131207 - protein, 408 aa, unidentified
MERFYLGVDWADQFHQVWVSDFDGKKVVEKKVTQNIDGLAEFGRWLDEQRAKPIELWAAIEKPQGRIVDFLLDHGVEVYPVNPKALDRARDRFRMSRSKSDGFDAYVLAQFLRTDHGHLRALKPNSVQAQELKLLTGDQQRLGHQKTRLLNQLTATLKEYYSRPLEVFSDLETQIALDFLKQNPTPDDLSKLTRRQWNRFAKREHHLGAERAQELWEQLNQPQLTVPEHVVRAKAHLLRVLLGQLDPLRKAVKSYEERIKSFFGSMPAAELFKGLPGAKTGTIIATLWAELGDAKSRWESFRHLQAEAGVVPVTKTSGKSRVVQFRFSCNKIMRHAAYWLAFVSLNRSEWANHYYRDQRAKGHSHHQSLRALGAKWLKIIFVMWRDHKPYDENYHLANIARQKMRQAA

SEQ ID NO: 131208 - protein, 441 aa, unidentified
MYMKKRRDRVCGADVHKDLIVATITGDDVLPIQENFGTTKAELKRFRNWLVANKCEQVAFEATGVYWIPIYDALSQTIDTIVANPLQIKTIPNDKSDSKDSKRIATLCLNGQIKRSRVFTEEDRDLRMMTRARSGYVKTRTQFRNRVHKYLSSSGVKLSSCMDDIFCKSGRYILNGLAEEKPIEEILKGIPSGKIRKKRDLIKAALDGDLDATSRMLLRDNLDLLDYLEAKIEATSHEILKKINRRSKDLAIVMSIPGIGFISGAVILAEIGDYHDFKTPEQLAKWCGLNPGENESAGKKKKCGITKRGSKHIRLVLVQAAQTIANMGKTRLSRFFRRLIKKKERNVAIIAVARKLICLIYHLLINQELYQEDECRTRRPSKDKSCQAPSFQEEHLTDKVAAIVDAFYHLNAHGRKNALMREIGDISDIKVGQKRPSKGGG

SEQ ID NO: 131209 - protein, 369 aa, unidentified
MERMVYVGLDVHAETIAVATADDGRNGDVRFYGIIENNADAVLRVTKRLSATGARPVFCYEAGPCGYGLYRLLTKLGFDCAVVAPAMIPRRAGDRVKTDRRDAEMLARLWRAGELTPIWTPDEEQEAMRDLIRTRKQALEALKIAKQQLLSFLLRHGLRYERPTYWTKMHWRWINELRKFRYPHQQIAFEELKRAIRQIEERIRTLDLAIEDAVKPWRFAPVVDALRALRGVNTMIAATLAAEIGDISRFSNPRQLMAWLGLVPSEHSSGSTVRRGRITRTGNALARTMMVEANWSYRHPPRERHLHLNRSQHLPQEIRDIGWKAQTRLCKRYRDLSKTGKPQPRVLTAVARELAGFIWDIARKTPLSA

SEQ ID NO: 131210 - protein, 359 aa, unidentified
MTIKITTISFKGQNIYIGIDVHLKSWTVTIMVGEVAYKTFSQNPDAGLLFNYLQKHFPGGNYYSVYEAGFCGFSVHRQLMKYGINNIVVNPADIPTSDKDRKQKEDRRDSRRLSRSLKNGELEGIHILSKEIEELRSLVRYRKTIMKELCRHKNRVKSFLYLQGVSIPEELNIASKYWSAPFIVWLKTVETTTANGTLVLQETIDTAEHLRKKLLKVNGHLRSLNSDSHLSKYILLLRSIPGIGLIVALTFLSELETLDRFKTLDKLCSYIGLIPSTFSSGEKENVGNITRRANKPLRASIVEAAWVAIRHDPALTLKYNQLRSRMEANEAIIRIAKKLLNRIRYVLKNKQEYVCSVVQ

SEQ ID NO: 131211 - protein, 347 aa, unidentified
MKITRAGVDIAKSVFHVHAVDRQEQPRWQSKLKRGEWLDALCEQLAPNAQVGMEACASAHHWGRELQRRGFHVKLLAAQFDTPYVKSNKNDRVDAEAICEAMSRPGMRFVSVKTVAQQDIQAMHRIRSELVGQRTAKASQIRGLVGEYGIVAPKGIDQLRGALPGWLEDAENGLTERFRCLLADLYQDLRYLDERVARLDALIDQAVNDDPLAQRLLALRGIGPLTASALAGALGDGASFRKGRDFAASLGLTPRQHSTGGRDRLLGISKRGDPYLRKLLVHGARAVLRHAKGRDDALSQWLNALSRRKHANVVTVALANKTARVAWAIASSGTVYDPELVAAARAA

SEQ ID NO: 131212 - protein, 344 aa, unidentified
MNKLSRVGIDLAKNVFQLHGVDRHGKAAWRRRLTRDKWLRVLLGKVEPGCEIGMEACAGAHHWARELQAKGFTVKLIAPQFVKPYVKSNKNDANDAEAICEAMSRPNMRFVAVKTVEQQDIQAVHRIRSELISQRTAKANQLRGLVAEYGLVAPQQLARLRAAVPIWLEDAENGLTNRFRGLLSGLWDDLKTLDHRVAELDREINTIAQSDPVAMRLQQLRGVGPMVATALVATVGNAEQFANSRQMAASLGLTPKQHSSGGKDRLLSISKRGDAYLRSILIHGARSVIRTAKLKDDRLSQWVTSLAERRHPNVAAVALANKTTRIAWAMLRHGMDYEPDYVAA

SEQ ID NO: 131213 - protein, 422 aa, unidentified
MLEQTTDREEIIERVAALDIGKAELVCCVRVPGAEGKSRRVQEVTTYQTMTRALLGMVDRLTELGVARVVMEATSDYWKPPFYLLEAAGLETWLVNAKDVKHLPGRPKTDKLDAVWLCKLAERQMLRPSFVPPPPIRVLRDLTRYRADLIGVRTAEKQRVEKLLEDAQIKLSVVASDIFGVSGREMMAALIAGQRNPRVLAQFARGRMRAKVSQLEEAFTGRFTDHHGFLLAKMLTRIDQVDSDLADLDVRIGAEIAPFAQAAARLDQIPGIGPDTAYVILSEIGIDMTRFPTAAHLCSWARFAPGVKESAGRRKSNETTGHGNPYLARVLGEAAVSAGKTDTFLGERYRRIARRRGKKKAIVAVGRSILVIIWHLLSDDQARFHDLGADFYDTRAGTEHAKRNHIRQLQALGYRVTLEPAA

SEQ ID NO: 131214 - protein, 317 aa, unidentified
MKDSSSISVVGVDVSKDFLDLFFTQNGQQQKIPYQDDSLKLLAREIIKLKATVVMEATGGYEKKLVQFLQHQGIACAVVNPKLIRDFAKACGKLEKSDAIDARIIALFGQVIQPRTLGKIDQNREKLKSLTTRREQVQSMINQETNRRQQIEDRQIRALIQRAIQLYEKQLKKLDNEMLKVIEADQTMKQKSKILLSAKGVGPTTTANLIAGLPELGNLNRQQIAKLVGLAPLVRDSGKFKGQRRTYAGRSHIRRILYMATLVATRWNSRIKAFYLSLLERGKPKKLAITACMRKFLTILNSMMKNNQTWDQNLITS

SEQ ID NO: 131215 - protein, 370 aa, unidentified
MKKYSEAFVGFDTAKKKHALAVADDGRDGEVRYLGEIDSSPATVEKALVKLAARYSKLHVCYEAGPTGYGLYRQVKELGHDCTVVAPSLIPKKPGDRIKTNRRDAVTLARLHRAGELTSVWVPDVIHEAVRDLARAREAAMEDLRKKRQQLLAFLLRHGRIFPGLKHWTATHLRWLAKQSFEHPAQQIVFQDAINAIEDSVTRRRSLDQQLTAVVPSWSMAPVIAAYQAMRGVSFLVAVTFVAEIGDVRRFDNPRQLMSFLGLVPSERSTGETVRRAGLTLAGNRRARRVLIEGAWTYRYPARISETLRARMEKLPKAARDIAWKAQVRLCARYRRLTAAGKRTPVVIAAIAREMAAFLWAIGRQVAPTN

SEQ ID NO: 131216 - protein, 391 aa, unidentified
MSMYFIGIDISKYKHDCCIISAANQKVVSKVIIKNNKAGFNELLTIIHSLANPADIRIGFESTAHYALNLELFLENSLLTFMEVNPVLISEYKKSKTLRRTKTDSVDCESIARWLMTVEYKPHSKGFYHAYSLKSLTRLRDKLIRQRSFYLVKITNVLDHTFPEFKPFFNERLSKTAFYLLENYGSAEKMARMNSASYEKLRSLSRGKFSPQQFLKLKALAANTVGVNNSIFDVELNSLLSLYKSLAKEIDTIEKEINKLIEEVHPHYMSIPGIGSLSAAVIYSEYGDISNFSNPGQMLAFAGIEPGVNDSGTESHGGRMVKRGSSQLRYTLINCCLPLIRFDMTFATYYSKKRGEGKPHRVAITHVAKKLIRVIYALERLDIDFNTQKLH

SEQ ID NO: 131217 - protein, 544 aa, unidentified
MSRVPPQSRFMSSGRLRNIANQLLSPVAGAGVRGETAVLYKVNGGAEMTDYPLVRACASPQISVVRDSSATLVSTAMCIPFKRSSRIRRFPWHRRSSTMLEQAMAMRKRDQEVVFPNAAGIDVGASSHWVAVPKHLADEPVREFGVMTGDLNALADWLLACEVNTVALESTGVYWIPIYEVLEQRGLKVWLVDARQMKYVPGRKSDVQDCQWLQRLMSLGLLRAAWRPGDEVCVVRAVVRQRDVLLAEQGTWVQRMQKALVQMNIQLTEVLTDVMGMTGQAIIRDIVAGERDPFALVRHHNRRIKASKDDVTKALTGNWRDEHLFLLKQSLAIFDDLAKRVQECDAKIEALLAPLQRHAVKLKDSPKGKGKNNPTFDVRQAMANWAGVDLTRIDGLGVTVVMKLLSEIGTDLSRFATVKHFCSWLALCPGTKVSGGKVLSASTKRSANRARQALKMAAMSLSRSDSALGAFYRRLCSRMDKPRANTAVAHKLARMVYFMLTRGEEYVDQGRERYEELQRQRSIASLKRRAAALGFQVTPVVSAA

SEQ ID NO: 131218 - protein, 359 aa, unidentified
MKTTKNTDTIGIDLGDNSHETCTLNKDGAITATTTLLNCRPELEAFSIENKGATIILEAGTHSPWISRLFEELGHKVIVANPRKLSAIYKSDNKTDERDAEMLARMGRFDPKLLHAIQHSSLKHQRDRKVIDTREALVDARTNLINYVRSSLKSFGIFLPKGTSTASFAKKAREHLAEENYALFASVIETVADLTERIKAADKAIDALIEHSYPEALKLQQVDGVGPITSLTFVLTIGSPDRFEKARDVGPFLGLVPKRDQSGESDKALRITKAGDKQLRRLLVSCAQYALSDKGPDCALKRSGLKRAKSGGKTDKKKAVVKTARKIAVLLLAIWKDERGKYLRFPHQADDEAAEEKAA

SEQ ID NO: 131219 - protein, 502 aa, unidentified
MQDRRLVGIDLGITSAHTVRVLSGDGTIVCRRKAVPTLASLVEVEQAALVGAMPGVCLEVVVEPTGPSWLPIAVFFGARGHTVYRVSSAKAHDLRRVLSRHAKSNGIDADTLARLPLVDPAGLHPLQLPDAPRAALDRRVRACDRLTQAAACHKRRIKDLVRQLLPMTPLAGELGQADLAVLERYADPHTLLAAGRARLTRVIVKASRGQQGAARAEQWLGAARAALELYADHPAVAFQDLAAEVTTELRLLAATQAELDRHATQREFCYRWVDPAGLARSLPGLAEIGGPALVATMGPATRFATAAKFRSFTGLAPKASETGQTDRKGQPISKAGNRLLRTTLYRAADNARRVDPQLARIYYLQMVERGKDHLGAVCVVAARLAERAWVTLDRGMPYVICDTDGTPVTAEQAKAIIAERFTVPEEVRRRRRSKKGKAPQQVPQGHVTGAQAQRGDPPPHPPVLAGGPPPSSKPCHTLDTQASIGNQITPVLSPRTSRYPAE

SEQ ID NO: 131220 - protein, 399 aa, unidentified
MNAVGIDVSKGKSMVCVMRPFGEVVASPFEVAHTAGEFGKLVCLLKSLDGETKVIMECTGSYHLPVARTLHTAGFFVSALNPQLTHDFGNNTIRKRKNDKADSIKIANYGLSNWLELPKYIPEEEIRQSLKTFSRQYNKYSKIKTMLTNNLISLLDQTFPGLKELFTSPTRERDGHEKWIDFASRFWHCECVGNPSLNAFTETYRKWCKRSGYLCVNAAAIHATARQCAAVMPKNENTKALITCAARQVNAVAESLAAVAREMKRLAAMLPEYPVVLAFRGVGDILGPQLIAEIGDVRRFPKKSSLVCFAGLEPTDNQSGKFRGDEVISKQGSPYLRKTLFQVMDCLLKQSPDDDPVYQLLDRKRAEKKHYYSYMNAGAAKLLRIYYARVKEHLNSVED

SEQ ID NO: 131221 - protein, 391 aa, unidentified
MSMYFVGIDISKYKHDCCIISAVDQQIVSKFTITNDKDGFEQLLISLNSLSNPEDIKIGFESTAHYALNLELFLENANHSFMEVNPVLIKEYKKSTTLRRTKTDSVDCESIARWLMTVEYKPHSKGFYHAYSLKSLTRLRDRLIRQRSFYLVKITNVLDHTFPEFKPFFNERLSKTAIYLLENYGSAEKMAHMNSASYDKLRCISRGKFSIQQFLHLKELAANTVGVNNSIFDIELNSLLTLYNSLCKEIKNLEAEITRLIEEVHPHYMSIPGIGPISAAVIYAEYGDISNFSNPSQMLAFAGIEPGINDSGTESHGGRMVKHGSSQLRYVLLNACLPLIRFDITFATYYAKKRAEGKKHRVAITHVAKKLIRVIYALERQDVDFNAQKIR

SEQ ID NO: 131222 - protein, 412 aa, unidentified
MTAIDQFAAHVGLDWADRKHDVCVQFKNGERTFHVIKHTPEALDTWLNELHQKVRGRIAIALELKKGPVVYALQKYPFVTVFPVHALSLARYRQTFWPSGAKDDPQDAELALDLMLRYPQKIKAIEPDNADIRLLLQLVEQRRLLVEDKRRFVNRLINTLKQYYPQPLEWFSHRGSLLLCELIIRWPSLQKLKRARRDTVRHFLNAKGGRATALTEQRVASINNAIPLTADPSVIEANALMATALATQIKVVSEIIKTYDERIETLFDPLPDAELFKSLPGMGPCMGPRMLAALGDNRDRFNSAEEIQNYVGIAPVTERSGQKSWVHWRWQCAKFVRQTFIEWAAKTVNSSYWARLYYQGMREKGKSHQSAIRALAFKWIRIIYRCWKTRTRYDEAKYLLALEARKSPLLLP

SEQ ID NO: 131223 - protein, 333 aa, unidentified
MTEALQTGRVVIAVDPHKAPWTAAAVDAALQPVDVIRVDVGPEGYRRLRRFAQRWSDPGWAIEGAAGLGAPLTQRLHADGINVTDVPAKLAARVRVLSTGHGRMTDETDAISAGIAALTATRLHTASVDAAITALRAVVEHREDLVKTRTQTVNRLHVLLTHLTPSGAARGLTADRAADILRQIQPRETGLKTLRSLVADLVAEIRALDRRIAKAAGDIAAAVETSGTTLTELTGIGVLNAAKIIARVDTIDRFRSADAFATYTGTAPIAASSGDVSGGPRASTHGPRKESVTDPFLTPPEAFEKDRLDLYQPDRAPRSVTGGSLSRHQMATC

SEQ ID NO: 131224 - protein, 352 aa, unidentified
MIIIGVDFHPEFQQIASVDTDSGEFLEKRLAHREEAEKFYRALAGQKVRVGMEASGHARWFERLVGELQFELGIGDAAEIRTKRVRKQKTDRQDAQLILRLLLEDRFPRIWVPSWENRDLRQLLWHRHRMVQARTRIMNQLQAVALNEGLCCKKRLWRERGRQQLESFRLAPWASRRRRDLLELMDRLNPTIAELSQAIEQEVEKCPAAQRLATHPGVGPLTALAFVLIIGRAERFQCGKQVASYLGLVPLEESSGNRRRLGHITKQGSSMLRFLLVEAAQVTVRSLPDWRSKYLHLMMRRGRKTAKVAMARRLAVRLYWMMRQGWDYQQWNKFGSHAGQPGHRDGVQSNTE

SEQ ID NO: 131225 - protein, 428 aa, unidentified
MAIRESLSEVVAWIGLDWADERHETRLQAAGAERIESRTVEQKPEALHAWVAELRARFPQGRIALALEQSRGAVIYALMNYDFLWLYPVPPKGLARYRQAFFTSGAKSDVQDADLLLEMVRDHRERLRVWQPDDAQTRQLRLLVEHRRATVDDRTHLTNRLGALLKSYFPQALEWAGELREAAACEFLGTWPSLEAWQGAGRSTQRKFFRRHRRLSAEALEQLLDAIAQAQPLTRDRALVEASVLMTQALVEQLHAVHRALARLDAAQEKLYDQHPDQDLFRRLPGAGAALAPRLAAAFGTDRQRYQSAEEIQQFSGIAPVTEASGKQRWVHWRMACPKFLRQTFHEFADASRKKSLWAQAYYQQRRQKGASHHGAVRALTYKWIRILYRCWQSHTPYDEAVYLAALKRHRSPLWLAVASISIQEAQT

SEQ ID NO: 131226 - protein, 402 aa, unidentified
MTYDYVIGMDVGKYFHHACVLDIDGTQVLSKRINQNEKSLRALFSTFSAHDHKVLVVVDQPNNIGRLTVAVAQDLGIDVRYLPGLAMRQLSRIHAGNAKTDIRDAYIIAHAAKNLPESLRSVDRVEEAFLQLKVLNGIDEDLARSYTRLINQIRSALVGCYPQFEQALRGQIIHRKWVLHLLARYGGPTKVKRLGKTKAAAFARRYKARNPEPVLDAIFAAISEQTVTIAGAHYAEMGIAMSAKDALLKLEHRKQIEQEVIELINDIPHTQILLSMPGIGPKTAGQILMAAGDMSDFPTAGHLASYAGLSPRTNQSGTSIMSNALNRAGNKKLKNALWQSSFASIRFHERSRQFYERKRREGKRHNAAVVALARRRLNVLYAMMRNHECYRDPALQQEGIAA

SEQ ID NO: 131227 - protein, 389 aa, unidentified
MLLDHPSNGPTAIRTQFGAIFVSLELSRSNWLITSLSPGKGEKMSKHSVTAGDVAGLMRLCEELKRKAEVRTGQSYPIITIQEAGLDGFWLHRVLQQERIESHVVDPASIATPRRRRRAKTDRLDGETLLRALLAYKRGEPRVCAMVVAPSPEEEDRRRLCRERRTLIEERITHVNRIKGLLFAQGISGYAPMRRDRRARLEALRTGDGRELPSHLRAQIDRELDRIELLLGQIKAVEAAQDALLAAARKPASEEAAPDPVTMLLALKGMGANFAAVLWSEAFYRQFANRRQVAAYAGLAATPWQSGGIRHEQGVSKAGNPRLRTTMIQLAWLWIRHQPQSALTRWFKERSQQGRKRAIVALARKLLVALWKYVTQGVVIEGAVMKPAA

SEQ ID NO: 131228 - protein, 402 aa, unidentified
MKKCIAERASQQTAAALDVVRGWSRYGAFIGLDVHKETIAVAVALPGRDTPEYRGEIAHEPKAVRKWLERLSAEFAGVMLLFCYEAGPCGYGLYRQLIAAGHDCQVVAPSLIPKKAGERVKTDRRDALKLARLLRAGELTAVWVPDAEQEAMRDLTRARDDMKSQERKARQQLNAFVLRQGHHWPSGKKRWTRVHFNWLESIQFAQPWLQIVLQEYVDAVKAATRRVDDLTDQLLAVLPNWALAPVVDSLVALRGIDKLAATVLLAELGDISRFDSPKQLMAYLGLVPSEHSSGGRRRQGAITLTGNGHARRMLVECAWSYRFPARQTMHLKRKAQMASPEAKAIAWRAQKRLCGRYRQLTQAGKNVKLVCVAIARELVGFIWDIVRQEMPRLSPPQAVTAG

SEQ ID NO: 131229 - protein, 352 aa, unidentified
MTVHYIALDVHCGFSEMAVVTGAGKLVRRDQCDTRIPALREAIGQVRRPRRLTFEEGPLADWLSRELRGSVDELVVCEPRRNHWIARDGDKDDPIDARKLADLYRGGYLKAVHQSQSLGRSLLKQQVSLYHDRVRERVRQGNQLVALFRRHGVFVKATELLDDEAWCLQMSRLPKSPPLHQGLELVRQIYAQLSTQEDSLRDGLIGLAQNQEPIRRFVALPGMGWIRSVTFYAYIDTPDRFPSKAALWRYSGIGLERRHSGRGPVRTRLSHQGNRRLKNVLLGAAKAAIDQNENPFADKYHHWTQEEGISVPNARRNVARAIAATLWSLWKTGQTYDSQRVASWYTAGVEQS

SEQ ID NO: 131230 - protein, 452 aa, unidentified
MATKRKKRVQDLPVLHPDAAGIDVGANEVFVAVPVDRDAEPVRSFATFTRDLQALADWLQCCRIQSVAMESTSVYWIPLYQILESRGFEVYLVNAQHVKNVPGRKTDVSDCQWIQYLHSVGLLRASFRPPGVICAIRSLWRHRGSLIQMAAEHVLHMQKALDQMNLQVHRVLSDITGLSGLRILDAILAGARDPTTLAQLCHSRVRSSRETVAKSLEGDYRAEHVFALRQSLAGYRYYQGLIAEADQEIQRHLADLGTTAAPDSKPPKRTKKTAYQRRHYEPATFDLRGELYRILGVDLTDVPGISAATAHTILCEIGTDVSQFRNASAFASWLGLCPDRQISGGRVLYTKSRRVRNRLALALRMGANSLHHANNYLGEFFRRITRRLGKPQAITATAHKLARIVFHLLNTREPYNESVFQQCEHETLKRAELRLRKHAAQLGFLVIPATNT

SEQ ID NO: 131231 - protein, 342 aa, unidentified
MKEKRYMGVDLHRRVFTCCVRLESGRQFLSAWRLEQLPQFVKKLRATDEVAVEVTSNTRLFYEAVAPHVARVVVVDPNQFRVISQSVKKTDPNDARNLALYLAKGLLPEVRMKEKQHAQVASLTQTRDRLVKLRTALKNKVNNLLSARGIELEKEELSSEKGLTRVLTSEVEELPRFELRVIVEQIRSLNHSIAELEKVIAQEGQKLKGHKNLTSIKGIGSLGASILLSVIGDVRDFPDEGRLASYFGIVPRIHHSNETERSGRITKRGSKLGRTALVQCALIAKRYSPYLANYYERIRSRRGTGRAIIALARKFLGIIYRTLKNNWVFEDFPNFVLEEGTA

SEQ ID NO: 131232 - protein, 381 aa, unidentified
MKNCMRWVGLDVHAETIAVAVAEGNGEVCSLGTIANRREAIRALVKRLGRPETLRACYEAGPTGYVLYWQLIGLGVRCEVIAPTLVPKKVGDRVKTDRRDAEKLAKGYRSGDLTAVWVPDASHEALRDLVRAHEAAKADQLRARHRLQKFLLRHGRRAPAGVRTWTQKHQTWVKAQVHFEHAAQEAALVDYVSEVDHVAERIARLEKAIDLAILEAPEKMRAVIEGLQALRGVAKLTAVTIVSELGEISRFQRAPQLMGYTGLVPSEHSSGERTRRGAITKTGNAHLRRVLTEAAWSYRTRPSVGAALRRRQAGQSEAVKEIAWKAQHRLHTVYRRMLGKGKPSQKIVTAIGRELVGFIWAIGVIVERAQRESHLVRSAMA

SEQ ID NO: 131233 - protein, 323 aa, unidentified
MQGQKSPERSAEPGVYVGVDVCKDWLDVYLHPIGQKFRAANTPEGLKALKRRIADLPVELIVMEATGKFHRQAHRTLHAAGLAVAVVNPLRARLFAEAVGQLAKTDRLDARVLALMGQALEPSALAPAPEALEALQELARARAAAKADQTALSHRRGASQTAFLKAELGRRLKVLAGHIERLDAEIERRIGADPALKRRYDIVLTIPGVGPVAAVALVIGLPELGACSAKAASLLAGLAPLARDSGAKAGERHIWGGRAFVRTGLYFAAVSAATCNPQLREDYKRLRDAGKKAKVAITAIMRKLVVLANVLIKEDRPWRPVQP

SEQ ID NO: 131234 - protein, 337 aa, unidentified
MNYIGLDVHKDNTVACAISAGGKAVMSAEVRTSDVGLGELHARMNGSEYAVIMESSTYSYVVYRFFERLGIETHVVHARSLRMITDSDKKTDRRDAEWIGRCLRLWKNKEIELSMSYFPTEAEAELKDLCRYKEELSNKLGDEVRRIRSHMGRNCLELPSQFHDLSAKRSREFISTTYSNDYTLLKRVSGYAALLKESEQVAKEIERRGNDDRNVELLESIPGIGRQTAVQLMSMIVDVRRFVDPEKLCAYFGMAPRVRDSGGKEHHGRMTRSGDPMMRSIMERVTLSHIRYCDSTITAYFQRKTKEMGIKKALMSAARKMLAMIHAVLRRGTPFTA

SEQ ID NO: 131235 - protein, 343 aa, unidentified
MHYIGIDVSVKESALCILDGKGKIVRETKVPTDPEIIAGFIADTGLAIERIGLESGCTAAWLFAGLQRHGWPVICIDARHAAAALQAGFRNKNDRNDARGIADLMRVNKYRPVWVKSPQAQRQGRLLTARATLQSQLVALENTIRGLLRQEGIGLTDRRTAFEAAVREVIADDRLLQAAVLPLLETRTAVLQQRATLDRQILRIVRVDPVCRLLMTAPGVGVFVSLAFKVAVDDPRRFSRSRNVGAHFGLTPREYSSGQVSYRGRISKMGDREMRRLLYLAAARILRRDAALWCPLKVWAVRLAQRVGLSKARVALARKLAVVLHAMWSDGQVFQWRRSATSA

SEQ ID NO: 131236 - protein, 421 aa, unidentified
MKSQAPTAFAAFIGLDWADAKHDICLQAAGAERRECLVLEHRPEAIDAWVQTLRTRFHGQPVAVCLELNKGPIVSALRTYDFLVLFPVNPLTVAKYREAFTPSRAKDDPSDAELQVELLLKHRDKLTPLSPQSPTMRALAQLVEYRRRLVGDKVRLTNRLTSALKNYFPHVLQWFQDKDTAIFCDFLSRWPTLKAAQLARRTTLESFFRAHHVRSADVITTRIEAIKRAVALTTDAGVITPNVLLVQALVAQLRVTLQAIADFDTAIAQRAQEHPDFPLFDALPGAGAVFAPRLLVAFGEQRERYASAEELQKYAGIAPVTERSGKQSWVHWRLQCPTFLRQTFVEWAAESTRHSFWAQVYYQQQRDKGKAHQAAVRALAFKWIRILYRCWQTRTPYNEALYLQALKRRSAPLLHNLANVS

SEQ ID NO: 131237 - protein, 324 aa, unidentified
MIDGILGIDVSKNTLDASMSSCNKVRVKSFANSPDGWRHLLDWLIGQKIRRVHACLESTGLYSLGIACKLNEAGHVVSIVNPAQIRDFARTKLGRNKTDAVDASHIREYCELFKPAPWSPPSHVHRQLGELQTIRAGIVAGLTEWKNRKNSGMIDVVAQSLADATISHFTSQLGAVEKAIAQAIDNDTDLRRKRDLLLSISGVGETLASVVLAELPGPDVLRSSAEAVAYTGLNPRRHQSGTSIDRLTRISKIGNAVLRAALYMPAMSAMRYNPAIVALVTRLKARGRLNPKQIVVAAMRKLLVLCFGVLKTGKPFDPALAMGC

SEQ ID NO: 131238 - protein, 411 aa, unidentified
MELLRQAVPVSALVVAVDPGKASNRVWLTSGERGLIGEPVSLPVLREGVDTLAGLIGASGVAGPPVIGVEATGGLHRAWVAELERRFPGSVRLVAPSETKAARVQLGSRRFKTDDRDCAALVWLLRQGAGRPVAQDSVDALLGAVRHRRGLVADRKVLQQRLHDQLQALCPGLSAPAGHGRALALEDPTGQAVLACAAAFAGRPPTVRSLVARAPGRLTSTTARFWVDRWRRLLPPPADAELRAQRLGRDLTRHQALQVDIAAVEDQLTRLLAATAGQVLTTLPGVAVVRAASFAAHSLPIDRFPTADHLYAATGLAPATWQSASLTRRGRISRQGLPEHRDALMGIAWGLSRYSSSFRERDRELRGRGMRPIQARVALARHACRLCHALLTTQQPFDEARYCAARHSRGR

SEQ ID NO: 131239 - protein, 349 aa, unidentified
MLADELDYVIGVDTHRDEHVLAVLTTAAGAVVAGEALPANARGYRETLRFAGRYAAGRRAWAIEGTGSYGAGLARFLAGRGETVLEISRTPRAERRLRGKDDTLDAARTARAALASETLALPRTGERREALRLLLVARRSAVDVRREALTQLRGVIVTAPERLREELRGLPAGKLLDRCSRLRRSSAASVDELATKLVLRSLARRIEAATLEAAELERDLLGHVRALAPALLDEPGVGPIVAAQLIVAWSHRGRLRSEACFARLAGVAPVPASSGQTVRHRLSRGGDRQLNRALHTVVLHRRQHHQATKDYIAKRVTDGKSRRDATRLLKRYLARHLYRVLNNQTPLMT

SEQ ID NO: 131240 - protein, 375 aa, unidentified
MNKVRFVGLDVHAETIAVAVAEPDGEVRPLGIIRNRAEAIRRLVKKLGPAHQLRICYEAGPTGYGVYWQLAALGVSCEVVAPTLVPVKAGDRVKTDRRDALKLARSYRAGDLTPVWVPDPAHEALRDLVRARAAAKKDQLRARHRLGKFLLRQGRRPPTAMKAWTQSHLTWVKTVHFEHAAQEATLLDYLHEVEHARDRITRLDRAIDEAVQGAPTHLRAVITALQALRGIAQVSAVTIVAEVGELSRVATPRQLMGYSGAVASEHSSGERTQRGAITKTGNAHLRHIVVEAAWAYRHRPAITAPLRKRHALVDDDVKAIAWKAQHRLHARYRTLTARGKTSQQAVTAVGRELFGFIWAIGVAVETRRHDARSAA

SEQ ID NO: 131241 - protein, 315 aa, unidentified
MPEAGPVVGIDIAKAELAVAVHPSGAGWTSPHTEAGIGTLTARLQTLGPHLVVCEATGGLETALVGALAAAGLPLVVVNPRQVRDFARATGTLAKTDALDAAVLARFGAVVQPPVRPLPDAATQTLGALVTRRRQVVDMLTAERNRLGSAPRVLHRELRAHIAWLERRLTRLDTDVDAALRASPVWRTQDDLLRSVPGVGPILAATLLAELPELGALSRHAIAALVGVAPVARDSGAFRGRRRVWGGRAPVRAVLYMATLAAVRCNPVLRAFYRRLTAAGKLPKVALTACMRKLLTILNAMVKTQTRWAPRLAGG

SEQ ID NO: 131242 - protein, 342 aa, unidentified
MATIKYFVGVDIASSTFTACVGTTPWKVVLKAHPFENTENGYQTFLDWLTSQQIGAKESVVCMEATGVYSEGLAYFLFATGYPVAVQSPLEVKRTFKPYGPKTDAVDSLQIAEYACRHIDKLSFWQPRNELLEQVKALLATREQFVSQNVAHKNALQAIQRKPVRTLFAEQAHTQMIEQFKKHIQAIDHEIRRLIESDPTFKEMLLLLLSVPGVGLLLASHMLLLTQISLDHKELASYLGIAPNQHSSGTSVFKHATSRHFGPAAVRKLLYLASCSVRTHQTQFTSYFARKTREGKPPKLVLNNIANKLIKIICAVLLTKTAFIQNYHSVQPLVFQNTLTES

SEQ ID NO: 131243 - protein, 336 aa, unidentified
MSYLYHIGVDIGKDFFDVAIVDAKKVITKVNQKKYWKFSNTAEGYKEFSAEFSGIINESLVVMESTGGYGMALISALLQCNFSIHRADPLTAKHFIRSLHLRAKTDKLDAIALAKYGAERSESLRLFTPKDSSDEELSVLLSRRNDLVSMKTGEENRLQHPRFEAIRTSILTILKGLKAEIAEIEKRINTLIQASEVLQKKLEIVIAIKGIGEVTGNSLVTLMPELGKLTRREAASLAGCAPHPKDSGSIIGYRSIAGGRGDVRRSLFMAAMCARRFNPELKEFYERLVKEGKKKKVALIAVMRKLIIIANARIRDALYPELSPKIANPATQAAAV

SEQ ID NO: 131244 - protein, 431 aa, unidentified
MYDNHPKMRNLYVGVDCHKHTHTAAIINCFNEKLDILTFKNTQEDFNKLMDMVNSHATNGLTPIYGLEDTKHLGYKLATFLLNKNCEVKNVLSTLTYNERKKNPIISKDDEIDALCIAKVLLDNLDTLTTAQNDEIYWTLKQVVKMKRAITKDSVIAKNKLHAQLLHHYPNYKEFFSYFDCQTALELWEQYPSPDLLIKLSLEELQKFIWKASKGKVYQEQIQRIYNLVRIEDYEEVSYQEERNILITTLVRQIKTNKERITEIEKNIVSLYDKLDFKLHTVKGLSKTASAEILSEIGNINRFPTSDKLARYAGIAPINFSSGNSNKNIRNEFGNRQLNFYIHCLAVRSISPGKTRTSPQNAIFIEYYHRKISQGKNKQQSLTCVMRRLVNIIYKMLKNNTEFIMPPELTEKCKNIYLEKMKQEKDKEPQK

SEQ ID NO: 131245 - protein, 337 aa, unidentified
MQHDPSDPVISVPGSVAPGSVVVVVVVGIDVSKATLDCYLDPVGQRFRVPNDPDGITDLIARLRSFQIQLVVIEATGRLHRRLAGELLLAGIPVALVNPQRAREFARSTGRLEKTDRVDARVLAEFGRGVRHRTLERLPEKQADLDDLISRRRALVQMRVAEKNRLHDQLPTLARAQGRKLLRLIDQQVEDLDRAIARLIDGDDDWKRKSEIIASVPGVSQGTANQLIADLPELGKLSRQKIAKLAGVAPLAVDSGSRKGERHIRGGRGPVRNALYMAAFNAMRHCERFRRIAERLRESGKAFKVIVTACMRKLLVTLNQMVRTGTTYDPKLNVSVP

SEQ ID NO: 131246 - protein, 520 aa, unidentified
MRPLAKRSRPVKAIPFGRLVFEVRGPDRIGAFQSACMKTKKHSQSSRGPKASRQHKSKKQSLKVIHPNAAGIDIGATEHYVAVPPDAVPAGASNVKTFGCFTEDIDAMVEWLKACGVDTVAMQSTGVYWIVPFQKLEAAGIAPVLVNAQMLKLVPGRKSDVQESQWIQQLHAYGLLAASFRPNDATCRLRTLVRHRANLVSGGAEHILHMQKALTQMNIQLHQVVSHLTGETGLRILRAILSGERDPYKLVKLRDAQITRSTEAQMIKALRGDWRPELLFVLAQSLQAWEFYQEQMKACDLQIEEHLKQMPSAPPAAAKAAPAAADPLASSNLRPKAKQSRKRNDPEKDLGPELARICGTDLTAAHGLRLLTVLTIISETGVDMNKWRSAKAFASWLGLNPNNKVSGGRILSSRTRKVVNRVSTALRMGAVGVAETQTWLGSFHRRMRAKLGPASANTATARKIATVVYHLLKYKEPFVDRDLAAYEARVYRHKLARIKKQAKTLGYELVKTSEQQQLAE

SEQ ID NO: 131247 - protein, 345 aa, unidentified
MNIASIGIDLGKTTFHLVALGERNKILLRRKFSRSQLLAYTANLPASLIGLEACAGAHFMGAALREQGHQVRLIPAQFVKPYRKSNKNDFIDAEAIAEAVTKQNMRFVQIKTQEQLDWQAMHRVRDRLVPRRTALINEIRGFLLERGLTFAARPIYLRKNLPTVIEDAEQNLSSHLRWLLDRLWQEWKQTETEIEVITDEIERISNEDARCRQLRQIPGFGPLVSTATVAAIGNGSAFRRGRDFAAWVGVVPRQYSTGGKQKLYGISKRGNIYLRRMLIHGARAVLFRVKYDTGGFGQWVHRLAQRAPSNKVVVAIANKLARIAWAVLSSGKEYRHQPLPQRAAA

SEQ ID NO: 131248 - protein, 376 aa, unidentified
MDKDSRFVGLDVHAETIAVGVAEPGGEVRSLGTIPNTPEAVRRLVKKLGPPETLRVCYEAGPTGYVLYRQLSALGVPCAVIAPTLVPVKAGDRVKTDRRDAEKLARSYRSGDLTPVWVPDPGHEALRDLVRAREAAKKDQLRARHRLGKFLLRQGRRAPTGSKAWGVKHRAWLQTIRFAHAAQDATLLDYLTEIDHAADRIARLERAIATAADLTPAPVRAVIAGLQALRGIAKLSAVSIVTEVGALSRFAKPRQLMGYSGAVASEHSSGPHRRRGGITKTGNAHLRRIVIEAAWAYRHRPAIGGTLRTRQEGLSEEVKALAWKAQHRLHGRYVRLIAKGKAPTQVVTAIGRELLGFIWAIGVHIEQHTAGGAPAA

SEQ ID NO: 131249 - protein, 338 aa, unidentified
MRVYIGVDLHSNNSMIVVIDETGKVLYEKRLRNDLGLIVSELERYRKRCAGVVVESTFNWYWLVDGLMDAGYEVHLANTAAIQQYKGIKHTDDRSDARWLAEMLRIKVLPEGHIYPKEDRAVRDLFRKRHQLVRQKTSQMLSIEDIVSRNAGVGISGNDVKTITESGLDQLLPDPLVARAAKSNLRVYKCLAKEVIDLERTVLSRAKAVPGFEELLGVSGIGKTLGLTVLLEAGDMERFPGVGNFASYCRCAGSQKLSNGKRKGKGNTKNGNRYLAWAFVEAATFAIRYNPRVKRYYERKKAKTNGVVAVKAVANKLSRACYHVLKEGVPFQVERAFA

SEQ ID NO: 131250 - protein, 410 aa, unidentified
MALLGQAVSPDRLVVAIDPGKVESRVWLSTGERGLVCEPVSLPTSRAGLAELEQLVAGGGAGAPLIALEQTGALHRAWQTALEERWPGSLRVFAPSETQAARAQLGSRRMKTDDRDCAALTWLVRQGAGRPALPSPVEALQGAVRHRRQLVDARRPLRQRLHDQLNALCPGLSAPAGHGRELPLDSPTGLAVLACAAAFAGRPASVRSLKARAPGRLADSAAAFWAARWSSLLPPPADAEARAGRLGRDLERFRALQEDVSELDAQIAQLLAGTGGRVLTTLPGVATIRAATFAAFTLPVERFPSAEHLYAATGLAPATYQSSTVTKRGAIRRTGLPEHRDALMGIAWGLSQHSRAFAERDRELRARGKQPIEARVALARHACRLAFRLLSSQQPFDENRYLRSRRTRGR

SEQ ID NO: 131251 - protein, 387 aa, unidentified
MYFVGIDISKFKHDCAIVDEFGDVITPSWSFQNDREGFSLLKELLDALDGEKKIGLEATGHYGQNLKLFLENNDFSFMEFNPLLINRFVHSKSLRKTKTDSIDALMIAQYLMTVEYKPYPPSFYTFEKLKSLTRFRDSLIRQRSRQLVELTNILDKVFPEFKPFFKGRFSATALYILSHYASPEKISNMNSKSYEPLRHLSRGRFSMVDFVELKTLVRNTVGSTCDYLLQEMEITIDIYNQLQSKVEEIELQIHDCVLALAPPILTIPGIGAASAAVILSEFGDLSKFNNPSKLLSFAGMEPGYFQSGTSESTGKMVKHGSSHLRYAMMNCAQTVINNEPTFAAYYAKKRAEGKEHRVALTHVAKKLLRVIYTLQTKELSYNPDLVR

SEQ ID NO: 131252 - protein, 346 aa, unidentified
MTIVEAARAVTAGIDTHGEVHVAAALDEVGGLLGTRSFQADPGGYAELLGWLEAFGEVAKVGVEGTGSYGAGIARFLTKAGVHVVEIDRQNRQARRQSGKSDPLDALEAARAALSGRAHGVAKSRDGSVEAIRVLVVAKRSARGARVKALGQMRHLTFSAPDQLQSRLKGLPIAQFVAAAQGLRPTRSPDVVTAATKAALSSLAHRVADLEEEISDLDAMITPLLEETAPELLAVYGVGIDTAAALLVAAGDNSDRLHSEAAWAHLCGVSPLEASSGKVTRHRLNRGGDRQANRALWHIVITRLASDPRTQHYMERRVEDGRSKSEAIRMLKRYVAREVYHYLPRV

SEQ ID NO: 131253 - protein, 352 aa, unidentified
MKVVYPVCCGVDVHKSFFIATIITTTSDIQPNYSRKRFSTFSNDIVRFADWLSLNNCNDVCMESTGKYWIPVFNILESRNINVTIANPKWVKAVKGNKDDKKDSKWIGDLFRLGLVPGSFIPSKPIRVLREFTRYRYKLVSMKSSEKNRFQNAFTVCNISLDSVVSDMFGKSATLITDYLLSDDTFNPEFCVSLLQRSLKKKADSVLESIEGYQITKEQKLRMNTVRSHLTYIENSIKYLDDTIDSMVAPYESLIALMCTIPGIERKSAISVISEIGNDVSLFDSSKRLCSWAGLTLGSNESAGKKKSVRISRAGVYLKPTLVEIAHCAVKSTKSPYYKSKYEKLVKRRGKK

SEQ ID NO: 131254 - protein, 403 aa, unidentified
MPFTSSGRSCLRPRYAPLRVLARARLPEGIAGVTRLHALIGQFAGPDAEPGEVAVGIETDRGLWVTALRAAGYTVYAINPRQVARYRERHGTSGAKSDKGDAHTLADMVRTDSHQLRPVAGDSAEAEALKVAARAHQTLIWERSRHLLRLRAALREYFPAALEAFDDLAAPDALELLARAPDPASAARLTSGQITAALTRARRRGIPAKAAAIAAALRGEQMRQPQPLAEAYAATVRSLTVIIAALGGEIGRMEGQVTACFRRHPDAAIYLSQPGIGEILGARQLGEFGDDPHRYATAKARKNYAATSPVTRQSGKKKIVMARFIRNDRLADALHRQAQSALISSPGARAYYDEQRDRGLDHDAALRALSNRLVGILHGCLKTGALYDEATAWSHRVKLAGAA

SEQ ID NO: 131255 - protein, 410 aa, unidentified
MNAATLFVGDDRAEDHHDVELQDHTGRRLSKARLPEGVTGIAKLHQLIGEHAPHDMKPAQVLIGIETDRGPWVTALVAADYTIYAVNPRQVARFRERHAMAGPKSDAGDAHALAHMVRTDSHQLRPIAGDSPLAEGIKLLARAHQTLIWERQRHLMRLRAALRDYFPAALEAFPDLAGPDALELLERAPDPARAARLSKTRITTALRRANGRHAVARAEHIHTVLTSEQLQFPAELVTSYAALVQASCLIITAFNAQIRALHEHVEALFDQHSTAAIYRSQPGIGEILGARILGEFGDDQQRFNGARARKNYAGNSPITRASAKKRTVIARRVRNNRIADPLHQQAFSAPTASPGARAYYDTIRARGAGHHAALRQLSNRLVGILHGCLAAAQPYDETLAWSHHVAVPAD

SEQ ID NO: 131256 - protein, 376 aa, unidentified
MKQFNDIYVGLDVHKDTIAVAVVRGLRTKPSYFGEIPNTPTAITKLLKQLSPDGEVLNFCYEAGPCGYEVYHQVTQQGHACDVVAPSLIPKMPGVRIKTDRRDAMSLAKLHADGSLTAVWVPDKEQEGIRDLSRAREDFKQTETKARQRLGAFLLRNGKVFTGKSKWTVAHWRWMETLTFETPTQHIVMQEYVEALKEASRRVLGMEKQILLAVRGWSLEPVLNSLLAMRGVNTITAVTLLAELGDITRFDNPKQLMSYLGLVPSEYSSGSKRQQGSITKTGNGHVRRVLIEAAWNYRFPARKSRTIEMRAEKTSERVQAIAWEGQKRLCGRYQKLLTSGKLKQKVCTAVAREMVGFVWAIACEASGRVHGSRATA

SEQ ID NO: 131257 - protein, 367 aa, unidentified
MSDIIRIGVDTSKSVFQLHGVDAAERPVLRKKLRRRDFLSFFAQLPPTRVGLEACGGSHYWARELMALEHEPKLLPAQHVRPYVRRNKNDKQDADAVCEAMSRPRMSFVRIKSAEEQAAQMLMTTRQRLIDYRTQLINTIRGHAAEFGLTAAKGPAHVEPLLARLAKDVTVPALAKELFAIHGQEYDRLKIELREIEAKLKAWHRGNEMSRRLAEVDAIGPIGGCLLVIKAADPQTFHCARNFAAWIGLTPKDHSTAGKMRLGVITRAGDEALRRTLVVGATSVIKVRNGKAHPSPWLRDLVARKPPKLAAVALANKVARIAWKLMVSGERYDAARAGIVSPTARVAPCSRRQGRCAPPAAVACGQP

SEQ ID NO: 131258 - protein, 392 aa, unidentified
MVCVGIDVAKDKHDCFILSSEGEVLADVFTVSNNREGFETLLQRILSCTRPADKIKVGLEATGHYSYNILGFLLEKGLTTFLINPLHTNLYRKSLSLRQTKTDRIDARTIASMLLSDVDLKSYTDTAYHNEELKSLTRYRFDKVQERAKLKQSVSRLVNILFPELETLVPTLHMASIYAILSEFPGAKQIANSHLTHFKTILCDASKGRYDRGMAVEIREAARRSIGSAMPAKSLELQHTIRLIRELDKEIDEIEAAIKAIIDEMAPPILTIPGISYRMGAMILAEIGDFSRFNSPDKLLAYAGLSPSTYESGKLKATGAYAHMEKRGSRYLRYALFNAAKYVCHWEPSFATYLAKKRAEGKHYNVAISHATKKLVRLIFALQTSGKAYQPA

SEQ ID NO: 131259 - protein, 338 aa, unidentified
MTIVMGLDQHRAQITAEWVDTDTGEVMRTRITPAHRVGVRRFCERFDGQDLEVALEATTGWRFVADEFQRVGASVHLAEPAETAAMRGNKKRAKSDRADARHIRELLSGGRLPESWIPPEHILDLRARVRLRHTLSHQRGEWQQRIQAVLYHHGCPQHGNLITIEGRSWLAAQLLTTGAREQITIALGVIDALEVQIAPLDKELRSFARRQAGCKALMSQFGVGEMTAVTILAELGDARRFSSSRDAVRFAGLDITVHQSDQRRAPGHLSRQGPPALRWALFEATMCAARPSSPDYEYYSQAAERLGSNRARLSVARKILKRSFHLLRELGDEAIAPA

SEQ ID NO: 131260 - protein, 346 aa, unidentified
MTIVENARPVTGGVDTHLDVHVAAAVDANGGLLGVESFTTKPDGLEALQQWLCSFGPVAKVGVEGTGAYGAELARHLRRCGHEVIEVDRPNRQLRRRVGKSDSIDAVEAARAALSGRASGIAKSADGDVEAIRALLVARRSARDARITYLNQIRQLSFTAPGELRERFRTVGGQRLARTAAGLRPNSSTDPVMFATKIAMQSIGRRVVELDADCARLDALLDEFTQRRAPSLRAVYGVGVHAAAVLLVAAGDNPERLRNEAAFAALCGVSPLPTSSGKIIRYRLNPGGNRQANHVLWRIVFTRMAAEPRTRAYVERRLAEGKTKPEIMRILKRYVAREIFPHLATR

SEQ ID NO: 131261 - protein, 426 aa, unidentified
MEVLFPRCAGIDVHKRTVVACRIVLTDDGEWLRETRTYGTTTEDLLRLSDWLAAGDCTHVGLESTGEFWKPVFNILEGSFTVWLLNAQRVRAIPGRKTDVRDAEWIAELLRHGLVEPSFIPPRHQRELRELTRQRTNFVRGRATLVNRVQKVLEGTNLKLTAVVSNIVGVSGRAILAALLNGEEDVTLLADLAKGKLRKKRDELERALSGRLQPHHRFLLTELLAQIDGLDETIGRFDAEIARLCTVNEEEVVVALLDTIPGIGRAMGELLVAEIGIDMTKFPTAAHLAAWAGVAPGNNESAGRQRSGRTRKGNAWLKTALVQAAHGAARMKGSALAAKYQRVRARRGAKRAIMAVAHRLLIIAYHVIARREPYRELGADYLERRQPVAIVDRLVQRLRQLGVEVTVMAEGQSAPRPTQAMPAAVP

SEQ ID NO: 131262 - protein, 346 aa, unidentified
MTIVEAARTVTGGIDTHGETHVAAVLDQVGGLLGTESFEANLHGYSALFSWLAGFGKVGKVGVEGTGAYGAGLARFLARAGVEVIEVDRPNRQDRRRTGKSDPIDAVEAARAALSGRAHGHAKSRDGAVEAIRVLVVAKRSARQARVKALTQMRQLTFTAPDQLQCRIKGLSAPQFIAAAQGLRPTRSTDPVTAATKASLSSLAHRIGELEEEIAALDARITPILEAHAPELLGIYGVGIDTAATLLVTAGDNPKRLRSEAAWAHLCGVSPLEASSGKVTRHRLNRGGDRQANRALWIIVISRLASDPATQAYMERRVKEGRSKREIIRILKRYVAREVYRHLPRG

SEQ ID NO: 131263 - protein, 339 aa, unidentified
MMGKIVKQVAGIDVAQKELVVTLGHLLDDFSIELFAYKVFKNSDSGFKSLAEWTNKLTDNEVDVLYVMEATGVYHQKFAYFLTDNNYKLSIVLPNKISNYMRTLDLKTVTDKSCSQAIAQFGLERKLDKWSKPKVTYKELQQLTRERDQIVQERSIIKNQIHAEITEAEPNQRSLERMQARIRFLNSQEKEIKEDIDCIVKENQDIRQIIDRITTIPGVGELTAVIVLAETNGFELIRNKSQLSSYAGLDVKEKQSGTSVKGKPRISKKGNRALRKSMHLPALTAVKWDDNFKETYARLVSKHGIKMKALVAIQRKILQLIYILFKNETIYDKDYTIKK

SEQ ID NO: 131264 - protein, 340 aa, unidentified
MGEITTMGLDLAKQVFQVHGIDADGTTVLRKQLRRSQVLSFFSRLAPCLVGMEACATAHYWARELAALGHEVRLMPAQYVKAYIKRNKNDAADAEAICEAVVRPTMRFVPAKTAEQQAALLLHRGRERLVRQRTGLVNALRGHLAEFGVIAPQGLRNVGKLIAVVRDPSDARLPDLARQVLEVLATQIEQLEGAVAAVEKQLMAWHKSNPVSQRLATIPGIGPIIASAIAASVAEPGGFRSSREFAAWLGLVPRQNSTGGKHRLGGISKRGNQYLRRLLINGASANLLRSKATKADPWVIGLRRRRPSLVVAVALANKTARIAWAVMQRNENYQRMAAAA

SEQ ID NO: 131265 - protein, 341 aa, unidentified
MMIIGCDFHPRFQQIAYVDLETGEFFERRLSHPEEAERFYRSLAGTQVRIGLEATGNFGWFRRLINELGYEFLLGDPSAIRAASPRRQKTDKRDARHILQMLLEDRFPVVWQPSVENEELRQLLLHRCRLVRLRTRITNQLDSMGKNEGLLGSKSWSAERRRRIEALPLSGWYKRRRTDLLDLLDELEKRIEPLEKAVVEAAEKNQQACLLMTHPGVGPIVSLVYVLTIGDWKRFPRSKELASYLGLIPAEDSSADKRRLGHISKQGNTLLRWLLVQAAMGAQRSDSSWHRLYLRLSLNKHHGVAKVAIAHKLAVRLYWMLRSGQNYKQVMERGSHLGQPV

SEQ ID NO: 131266 - protein, 349 aa, unidentified
MRYIGVDQHKKFSYIAVMDERGRVVKEGKVVNEREGLKKFLGSCKDGKAEAVLEAGPNWVFMYDWLEGEVDRVKLAHPLKVKAIADAKVKTDKIDAKILAHLLRADLIPEAYVPKAETRKVKDILRQRMFFIRMQTMVKNKIQAVLDRHPEVSSEFLGTDLFGKQGMEYLAHIKLPYPDRYIISDSIKFLLVLREHIKRTDRIVEKLSKGDRRVKRLETVPGIGKFFSVLIATEIDDIGRFSDARKLCSYAGLVPSTYSSGNKVFHGGITRSGNKFLRWAMIEAVWPAIKKDSSLRYYYHKIKEKKGANVAKVAVARRLLTIIYHILKEDRDYSINSPAAPYVSIVKAI

SEQ ID NO: 131267 - protein, 347 aa, unidentified
MRFYNRQHRHYCGIDLHVKTMYVCMLDGTGQVLVHRNVPSTPEALLDVVAPYRDDLVVAAECMFTWYWLADVCAAEGIAFVLGHALAMKAIHGGKAKNDKLDSFKIASLLRGGLLPQAYVYPAAMRATRDLIRRRLHLVRKRGQLLAHIQNTRAQYNLPAFGRRLAYPANRDGVREHFADPSVRKSIDVDLTLVAQYDALITDLELTIVSEAKRHDADAFHRLRSVPGIGKVLALTILYEIHDITRFDRVQEFASYARLVKCQKQSAGKTLGTSGAKMGNVHLKWAFSEAAVLFLRHTKDGKKLLARIEKKHGKGKALSILAHTIGRAVFYMLSRGTVFSTEKFRAA

SEQ ID NO: 131268 - protein, 314 aa, unidentified
MYHYIGIDVSKKVLNVFDGKKDLIFDNKENLSSLKKHLKKRYPDFSSLVILFEATGIYSYPLKAFCATHMIKAYIINPQTSHSFAKSLGTRSKTDTIDARTIWEYHKLIGDKDISIPRVEREIMTLGSYLASYRLTLKQRLALTNHLEGIKDKTLYRLLKKEQERLRILEQELLIQMDTYIKQYPKLKEDYQRLLSISGVGKKTAISLLILFHTYPNTNRNQITALIGLDPIQRQSGTSVKGRSRISKHGNQMIRKSLYMPTLSSIKHNQKVSVFYERLVSKHKPKKVAVIAAMRKLLLIAHAVYKNKTVYVPG

SEQ ID NO: 131269 - protein, 316 aa, unidentified
MEPQRPFVGIDVSVQRLDVGTMPASKTFFQPYTEDGIASLVLHLKPLNPQIVLLEATGGYEIPVAYALYEAGLPVVIINPKAVRQFAKAVGILAKTDKLDAQVLALYAQKIQPPVRPLKDQEQMELTHLMTRRHQLQGMIVMEENRRRTCTAKVRGNVEKSLAHLRQLLKDLDRDVQDFIRRSPLWHEKAATLQKVIGIGPVVSSELLAHLPELGFIDRKKIAALAGVAPMNRDSGQWRGQRRIQGGRPAVRRALYMAALVASRHNPVIRDFYQRLRQAGKPAKVALTACMRKLLVILNAMLKNYTLYNQPLPLAA

SEQ ID NO: 131270 - protein, 367 aa, unidentified
MKEQENKRNKITIGLDLGDRRHRFCVLGEKGEVLEEGSVGNNRAALSELGGRYPEALVVMEAGCHSPWVSRHLEQAGCEVVVSNPRKTRAIYQHERKSDRRDALMLARIARMEPALLYPVRHGSEEAQQDLLRIKLRDSLVRARVALINSLRFTLKSLGYSIANPSTERFHKVIQSALPQSVAQVIAPSVQALEELTLRIKLLEREISDQARSKYPDTAWLEQIPGVGPITALYFVLKIEDSARFKRARDVGAFLGLCPRRDQSGENDPQLRISKRGDAYLRRLLVSSAQYILGPFAPPSALRQYGLALASGATARAKKRAVVAVARKLAVLLLTLWKNKSSYQAFPQRSSREKMRTNDLERLRCIA

SEQ ID NO: 131271 - protein, 312 aa, unidentified
MGGGFVGIDVSKDRLDVAFRPGGEHLQVGNDPRGMARLVRMLERSQPQLVVLETSGGYEAALFERLSAKQLPVALLNPRHVRQFARASGRLAKTDAIDAKVLAHFAEVMKPEPRRMADAETRKLRVLVARRYQLIQMMTAELHRQSHSLAALREGFVATIRCFKKQIASIDKQLATLIQETPALREKAELLRTTPGIGVVASATLLARLPELGTLDRKKIAALVGVAPFNRDSGKLKGKRAIWGGRSDVRGVLYMSALVAVRRNPPLRDFYRRLRQAGKTPKMALTACMRKLIVILNALIKHRTPWALAVSC

SEQ ID NO: 131272 - protein, 393 aa, unidentified
MLYVGIDVASQKHDCCIIDSNGEVLNENFTFANTREGFNFLWDTITSFLPDKKVLDVRIGLESTGHYSNNLVSFLMSKNLNVTVFNPLHVNLYRKGQTLRKTKTDKTDARFLAVMLFSDDSKSYTPISYQITELKSLVRHRFRLISLRSKLKVSVSRLISILFPELSSAVWSIHQTSCYAMLLEYPTSKDISECHLTKLTNLLHNNSNGKYNRERAVLIRELASNSIGTSSISVGFELQQTIRLINNLKQEIDILDKHIKSVMKEINSPLLTIPGISFVLGSIILAEIGDISNFSSPAKLLAFAGLEPSTYQSGKFTASKTPMVKRGSTYLRWAFLNAARLVAMRDVNFKNYCSKKKSEGKHHFVAMSHVSKKLVRVVFQLLKTNTTFVSQTN

SEQ ID NO: 131273 - protein, 416 aa, unidentified
MNAAGIDVSSRKSTVAVLRPFGEVVKLPFDIVHSAEGFASLVRQLKSIEGETRIVMEHTGRYYEPVAQILHEAGFYVSAVNPLLIREYGGNSLRRVKTDKADAMKIARYALDNWSELRDYTPMDTIRYDLKTLNRQFQLASKQKTAASNNLIALLEQSFPGVRNCFDSPVRKDGTQKWVDFVHTFWHAGCVRKKSLNAFTERYRKWCKRHGYFFKQSNAAEVYELAKSVITLVPKSPVAKVLVQEAASQLISISRSVETYRAEMNRLASMLPEYPVVMGLYGVGESFGPQLMAEIGDVRRFERKQALVAFAGIDPMPNQSGEKNVRSNKSSKRGSPYLRKTLFSIMMCLLQTAPADEPVFQFLDRKRSEGKPYCVYMTAGANKFLRRYYAKVRDYLATLDDLPPVDMDSTGLPQTR

SEQ ID NO: 131274 - protein, 352 aa, unidentified
MDTQLTTHEPKLYIGIDIHKRSWKVHCSTELFSGKSFSMSPDPEQLKKYIDKHFTNHEISTAYEAGCCGYYAHRCFESYGWRSFVVNPADIHRKGKERYTKTDRIDAQLISRELKDGRLDSIVIPEKQREELRSLFRRRNDLVKDFRRVKSYIKMQLLYFGVKIPEEFDNDHWSHNFRHWLDNLSFEFPTAKATLESRMRFFRFVDQDLRLVSNQLRAYCRKHYKKDYYLLKSIPGIGGIVACGILCELGNLRRFKNIKHLAGYVGLAPGVYQSGANSKTMGITPRAHRLIRSYFVEASWQAIRTDPVMQSYYRKHIGKDVKKIIIKVARKLLSRTLAVIKTETPYQIGVIE

SEQ ID NO: 131275 - protein, 338 aa, unidentified
MLHSGIDLHKRTIAIATVTADGQPVRDTQLPTSRPAIRAYFASMPGPHRAVVESTSNWYWLHDLLVSAGVDLRLGHSKYIKAISYAKVKTDAVDAATLAQLLRSDLIPEAHMVSAEWREARDLLRARLQLVRQQIRVKNTVAGLLAQYNVTTPAALPPLVQLRTTLLTEQFTVLGTQGKRLAAALNPLLVPTPDVQRLLWIPGIGRIVAFTILLEVDGIARFPSARDFVSYCRLVPGAGNSGGKTRHKRTKDGNRYLKLAFSHAAVRAIQYYPEIQRFYRTMARRKPRIVARALVAKELARIVYYVLTKQEAFNGTFKGIALSRTKKPQWPRLASPSV

SEQ ID NO: 131276 - protein, 343 aa, unidentified
MKLSRVGIDLAKNVFQVHGVDRFGEVVWRRRLTRKRWLPALMEQADPGCEIGMEACASAHHWARELQSHGYTVRLIPPQFVKPYVKSNKNDANDAEAICEAMSRPNMRFVAVKSVAQQDIQATHRIRAELMRQRRAKANQIRGLVAEYGLVAPLTLHALRRTIPGWLEDAENGLTDYFRSLLNGLWSDLILLDDRVLEMDREIERLANSREVTRRLQQLRGVGPMVATALVATVGSAEQYPKGRQMAAALGLTPRQCSSGGKERLLGISKRGDAYLRTLLIHGARAVVSQAKHREDRLSRWVTDIAIRRHPNVAAVALANKTARMAWAMLRQGTYYDPDFVMS

SEQ ID NO: 131277 - protein, 349 aa, unidentified
MTRFAGLDVSVRETAVCVVDDAGKVLAERKVASEPDELIELLRSVGGEYGRIGLEAGPLSQWLVNGLAEAGLPVVCVETRHMKALVEAQKVNKSDRNDARGIAQMMRVGLFKPVHVKTLASQERRMLLTSRKLLQKKLLDVEADLRGTLRNFGLKVGVVSPRGFEARVRALVEGFPRLAAIVEPVLTVRQTLRQQFAVLQKMLLGLVRQDPVCRRLMTAPGVGPVVALAYRATVDQPQRFLHSKAVGAHAGLTPKRRQSGETDYDVGISKSGDVMLRTLLYEAAQSLLTHSRGKWSWLKAWGLRVAQRRGMRRAAVAVARRLAVILHRMWVDETDFRWTRANKEAVLAA

SEQ ID NO: 131278 - protein, 368 aa, unidentified
MKQVTTYVGVDAHKKDLFVAMLIGDQSAPVTWQLANEPQAVRRLVRKLEREAPGPVRVCYEAGPCGYALQRQMTTARVVCQVIAPALIPRKPGERIKTNRRDARKLAELHRAGLLTEVQAPTPEDEAVRDLCRARDDAREDLQRSRHRLGKLLLRRGLHFSGRNWTKAHRRWIESLAWAHAPERVVVDDYLLAIDHLEARLIELDARLTDLAQTDPYREPVGWLRCFRGIDTLTAMLILAELHDFRRFASAPALMAYLGLVPGEDSSGEKHRRGRITRTGNALVRRLLVETAWHYQHRPGVGVALARRRKGQPSRVVAIADKAQQRLCRRFRKLAAEQKPPPKIAVAIARELAGFLWAALQPASVVVK

SEQ ID NO: 131279 - protein, 315 aa, unidentified
MEEKLYIGIDISLDNLDMASYPTGQNWQYKNNKSGIAKTVAKLKAVKPELIVMEATGGLETLLRDALDDAGLTVAVVNPKRIRDHGRSMGILAKTDKLDARVIAHFAAKIEPPAQPARDKAERELDNLLTRRNQLNDMLTAERNRLKQQLEPDVQSDITEHVLWLEGRVKILDQEVKRKIQQNPIFKAKSDLYQSMKGVGDVFRSTLIAKLPELGRLNQREIAALVGLAPLNKDSGKLRGKRMIQGGRAMVRKVSYMSALSAIRYNPPIKDMYQRLVAKGKLHKVALVACMHKMITILNSMAKNNTPWRYANAVL

SEQ ID NO: 131280 - protein, 338 aa, unidentified
MIVIGVDVHKHSLTAVAVDEAGRMLDEKTVTAADGELFAWASGLAGERLWALEDCRQLTRALERQLLAVGEQLVRVPPKLMAPERRAGRARGKSDPIDALAVARAALREPRLSRPRPDEQPFRELKLLVDHRDDLVDERRRAQQRLRWHLHQLDPSFVVPARRLDRLTHLERVARWLARREQEAQVRVARELVARCRSLTRAIVELDRELEQRTAETAPALLELPGCAALTAAKLLAEVGPIGRFETDAQLARHSGVAPLEASSGRVQRHRLDRGGNRQLNCALYRIAITQARYHPAARAYLERKQAEGKSRREAIRCLKRQLVRVVFNTLKASPALT

SEQ ID NO: 131281 - protein, 395 aa, unidentified
MFIVGIDVAKRSHEVCMITSDGQTVQRPFSIRNNCTGYNLMLEKIRKHTNIKSQIVFAMESTAHYWLALFTRLRKDGYHVILLNPIQTSAMRDMFIRKIKTDAKDSFIIAELIRFGRYAESNVAQDRLLALKELCRNRFYLVDMAGDLKRKLIALIDRVFPEYEAQFDTIFCKSSVALLKKYPTPQKLSNAHLDKLTELLWNSSNGHFGEWKARELRELARNSFGVEDCDGAYSTLILLMLDQIQSLSGKADALEKEISRLFQSFDTTVTTIPGVGPIIGAVILSEVGDISRFSSADKLAAYIGVDPSVNQSGEFQAAHAHMSKRGSPYLRRCIWMASQVAVQRDPMFRAYYEKKTAEGLKYMTIIGHVTRKMTAVVFAILRDHKVYEPILPTAA

SEQ ID NO: 131282 - protein, 316 aa, unidentified
MESHCFYGVDVSQRTLDVADAQGGTVAKIEHTERVIRSWLKQLPQGARIAVESTGSLHRLLVRCAIAAGHTIYVLNPRDLSHYARALGRRAKTDRLDAALIARYLAKEHEQLHPYRLPTALQQRLDELISRRHKAVVMQGTLRQSFAGIKLSGLARVSRSVEALIVQIDQALASLIAQDEQLAPIAQRLQSVVGFGPLLSTAMAHALTRHPFNHADAFIAYVGYDPRPRDSGQRRGRRYLSKRGSAELRRLLFTAAMSACKTPLWRPFYLRYRDRGLSSTAALVILARKLARIAFSIVRHGTEFNPSMVRIACVRP

SEQ ID NO: 131283 - protein, 361 aa, unidentified
MTTATTDQPSLKAPRTTAVDVVLGVDTHKDVHVAAVLTVLGALLATRSFPATLAGYRDLLAWTRTFGVVHRAGVEGTGSYGISLCRYLLAEGVQVIEVNRPDRAARRQRGKTDVIDAEAAARAVLAGRARTCPKYTEGTVEGLWVAKMVKDSAVTARTQAINQLKAILVCADPGLRESLEPLRNPALFAACAQLNPEHSAVHQALQLLAVRIRHLSEQITTLKKQITLMIRALNPNLLKVFGVGPDSAAALLIAAGENHDRLTSEASFAALCGVSPVEHSSGKSRHRRLNRGGNRQGNAALYRIVLTRLRREERTRHYLERRTMEGKTKREVIRCLKRYVAREIYHCILATPLPQPRTRTG

SEQ ID NO: 131284 - protein, 344 aa, unidentified
MHIASVGIDLGKNTFHLVALGERSKILLRKKFSRAQLLAYTANLPSSLIGLEAGAGAHGLASVLREQGHQVRLIPAQFVKPYRKSNKNDFLDAEAIAEAVTKENMRFVPIKTEEQLDVQAMHRVRDRLVQRRTALINEIRGFLLERGITFAVRPIHLRKNLLAVIEDAEQNLSSRLRWLLERLWQEWKQLESDIQAISDGIERISEENALCRRLCQIPGFGPLVSTATVAAIGNGAAFRRGRDFAAWVGVVPRQYSTGGKQKLLGIGKRGNIYLRRMLIHGARAVLFRVKYDTGGFGQWVHRLMQRAPRNKVVVAIANKLARMAWAVLTSGKDYQHQGLQMNAA

SEQ ID NO: 131285 - protein, 316 aa, unidentified
MAEVINQTNVGIDVSKDWLDIVALPSGESWRTENKEAAIRELIKKLEQLKPERIVLEATGGYEQMLAVQLYLTGLPLCRINPKRSRYFARSLGQLAKTDKLDGKVLALFGERVKPPLTRLPSEKEQLLSALITRREQISIFLVAERNRLHTAPKKLHASLNEHITWLKHELKQLECAIDEFVNDDPDFKEKSDLLVEVQGVGKKTAAKLIADVPELGDCDRKQIAALVGVAPYNRDSGHKTGQRYISGGRPDVRSILYMATLTATRCNPVIRQMYQRLLKVGKKKKVAIVACMRKLLTILNAIIRDRSHWNLASSA

SEQ ID NO: 131286 - protein, 449 aa, unidentified
MSRPQVIDDEQHERVHDRVAAIDVAKDSGMVCTRTPHPSRPGARRSTVWTVQARTGAVRVLGRQLVKDGIEIVTLESTSDYWRIWFFVLEACGLAVQLVHAAQAKNLPGRPKTDKLDAQWLARLTEMGLLRPAFVPPKPIRDLRDYTRARTRLVRERTRCWQRLEKLLEGALVKVSSVASKLTTVSAQDMITAMIAGQRDPQVLAGLARGRMKAKHDDLVAALDGMFDDHHGELAALLLDQIAFLGERIAALAARAAQLTAAMPEAWGTDPDGTTGPDAGTAPDAPVLNAVARLAQIPGVSEDLARAIIAETGLDMTRFPTAGHLVSWAGLCPSARQSGPRTRAGTKGQGDTWLRGALGQAATGAARTATFLGERHHRIARRRGKAKAQVAVARSILLIIWHLLADPQARFTDLGPGYYQARTDTDRRLRNHIRQIQALGFEVTLTKAP

SEQ ID NO: 131287 - protein, 370 aa, unidentified
MIATEVETVIGGVDTHKHTHYAAVIDQHGRLLGHQQFPATDAGYHALLSWMRTHGSLEAIGVESTGSFGATLTRALTTAGERVIEVNRPNRIARRMDGKSDRLDAEQIARAVLGQTSTATPKSKCGMVEVIRTLRVTRSSAVKARTQTFNTLFGIMIGAPSPLRDELVTLTKRTLINRCLGLRPETTDFAHLRAQPERLLMASIKTALRDLARRWKALDGEIKALNKQIEVVVRAAAPDLVELFGVGVELAGQFLVTTGDNPERIHNEAAFAKLCGVAPQPASSGRTTGRHRLSRSGDRQANSALYIVTIVRLRHHEPTRAYVERRTNEGLTKREIIRCLKRYIAREIYANLPRPQATSTPAAEPHQTAA

SEQ ID NO: 131288 - protein, 352 aa, unidentified
MEIIALDAHKRYSQVCVQNKKGQFLCEKRIDHRKGTIKQFLSNWKQGAKVALETVGNYYWIVDEIEQAGMKPQLVHAHKAKLMLGSINKTDKLDARGLNRLQRAGTLPTVWIPPGDIRDNRELPRTRMVFANLRTRLKNRIHSVIDKYGLYTDFDGISDIFGRRGREQMALTIKQLPRETRYTLRCLLRELDMVVSQIQRIEERMKKVFSKTEMVKRLMSLPGIGFILAVAIANEIGDIARFATPQRLASYAGTVPRVHSSGGHTRYGKLRNDVNHYLKWAYSEAGNSTAVNHKRFPFRHASKLYKRIRERKGHAKAVGAVGRHLAEASFWVLTRNEDYKEPEVKSVSPTAV

SEQ ID NO: 131289 - protein, 409 aa, unidentified
MRYYIGVDWADEEHAVWVEGEQGQRVTAGMVAHSPVGFSEWGRQLDEWRAQGIVLWAAIERPEGRVVDFLLDHGVRVYPVNPKALDRARDRFRQSGAKDDLFDARVLAGFLRTDHAHLMGLEPSSEAAQELKLLTEDYQRQVRTQTRLVNQLTATLKAYYPRALEVAELTTALASAFLQAYPTPATLTALTERQWQRWAKAHHLSAARTTELWTRLPQPQLPVPLHVVRAKSRLMQALVTELAAVVAAVGSYRQAIDDFFATLPAAAQARTLPVGEHGVTVPTLWARLGDAPGRWESFRHLQAQAGMVPITVRSGKQVVVAFRFACDKQLRYAVDQLAWLSLQRSEWARAYYDQQRARGHRHRRALRALGAKWLKIIFIMWQRHVPYSEEHHLATMARQALRRPEKKIA

SEQ ID NO: 131290 - protein, 418 aa, unidentified
MFKILKNNCCGLDVHKTWIYACIGITDSNKRTEYKQARFSSFTKGLNELCDWLAKYNCNDVCMESTGKYWIPVFNILEKNNIWVTLSHPKYTKPQKGNKTDRKDAKWICDLYMCGMVKPSFIPPADIRELRDLVRYRFKLTCMITGEKNRAHNSLTVSNLKLDDVFSDVFGKSSRSITEQILQHPGETFDVAPFVDGRCKTPIEEIQAAVDGAISTEQAVKLKQCLNHIDELEMHKAEIEREIFRLSDKYESVLNLIRTVPGFDKNPLTAIQVLSEIGGDMSVFPTAKNLVSWAGCCPRNDQSNHKIKSTRISRAGSYFKPVLVQIANALIKSKKHPEFTTRYRRIKARRGHKKAIIAICRMILTAIWHILTDLKPYTPEGFLESRPVNKEKVLTISQALNLIKQRGYIIKDDVGPVT

SEQ ID NO: 131291 - protein, 316 aa, unidentified
MEHKYVGLDVHQSSTVAVVQDEKGKSVMESILATEAEAIRDFLKGLRGTIHVTFEEGTQAAWLYEIVKPVVAEVIVCNPRRNKLLAVGNKADRVDAQKLAELLRCGQLKPVYHGTPGVRLLKELVHSYDSLVSDTTRVMNRVKAIYRGRAIGCSGRDVYYQRNREQWLEKLTEPGVRQRARLLYQQLDTLRGLRREARKAMLKESRRHLAFPILKEIPVLGPIRIAQILAKVASPHRFRTKRQFWAYCGLAVMTRSSADYQFREGKAEKRKRAPMTRGLNPNFNHRLKYVFKSAALDGIHQTPASSRPPPKAAAGG

SEQ ID NO: 131292 - protein, 390 aa, unidentified
MFYIGIDIAKRSHEISILDDLQGIVEPSRKITSTSVGTEKLLALFEKHQVSPENCLIGMEATGHYWLVLYSFLISRGFLVKVINPIVTDAYRKMLIRRVKNDSIDAQVIAKVLMLGEYNESSVANEETLALRQLCRFRSYEVDVCSDLKRKSIALLDQVFPEYEHIFSDTFGVTSREVLSNFNTPEELSQINTRKLSNLLNKASRGRFGLEKAREVKAIASKSLGIKIATDAFSFQLTQLINQLEFIELQVKMLDEQITIYMERTNSFITTIPGIGAVLGAVITSELGDISRFSEAKKVVAYAGLDASVSQSGDFEGSRMHMSKRGSPYLRRAIFTAANVASRCDPSLSAYYQRLKARGKHHNVAVGAVARKLCYIIFAVLTENRPYEDR

SEQ ID NO: 131293 - protein, 351 aa, unidentified
MRVIGCDYHPSAQYIAWIDNETGECGDKPLRHNDGEAEKFYRDLKAKGANVRVGIEATGHARWFERLLAELKFELCVGDPAQIKASRVRKQKNDRQDAEHILKLMMENRFPRVWVPGPENRDLRQLLWHRHRLVQMRTRIMNQLQAVAMNEGVRRKKALWSQSGREQLESFRLAPWATRRRQDLLQLLDQLTPSIAELTAAIEHQADESADAQRLMTHPGVGPITALAYVLIIGSTERFRCGKQIGSYLGLIPCEDSSAGRQRLGHISKQGNTLLRFLLVEAAQAAVRGDADWRRQFLHLAMRRERKIAKVAMARKLAVRLYWMWRKRWDYQQLLKFGSHVGQPVTGHGVK

SEQ ID NO: 131294 - protein, 386 aa, unidentified
MQTVADRSEAPTAIRTDLGAIFVSLELSRSTWLITSLSPAGGEKMSKHVVRGGDVAGLLERFAQLREKTRARTGKVFPFVVIQEAGLDGFWIDRVLQNEAIESHVVDPASIATSRRRRRAKTDRIDGEALVRALLAYKRGEPRVCAMVKAPTPKEEDRRRLCRERKVLIAERVRHVNRVKGLLFSQGISGYEPLRRDRRERLDTLQTGDGRLLPDHLKAQVRRELDRLELLLDQIKAVEAERDVLLAAQQAPAPAAMLLDIKGIGPEFAAILWSEGLFRHFDNRRQVASYAGLAPTAWQSGSVDREQGVSKAGNPRLRTTLIQLAWLWLRHQPQSALALWFEERVRRNGGRLKKKTIVALARKLLIALWKYVTAGVLIEGAVMKAA

SEQ ID NO: 131295 - protein, 539 aa, unidentified
MRTSHCQRPRFHWCSEPEEETGLGCLQAPLAVAAGERLLEGQHVEKNLESLASCVKVQIDRKSQWHIKGRQDMEEIFEDCHDVEVVYQRCCGLDVHKKMIVACVIIVAADGKRRKQIRTFGTTTAALLELLDWLKAAGCTIVGMEATGVYWKPVYNLLEGHFELVVANARHIKAVPGHKTDVKDAQWIASLLQHGLLKASFVPSGEQRELRELTRYRTTLVEERARIVNRLQKTLEDTNLKLGDVVSDITGKSAQAILRGLLAGETDPAVLADLARGRLKAKRAELEAALVGTIKPHHHFLLTEHLDHLRQLDQSIERVGAEIEARMGPFLPPEPERDSSKQPQAVQAPSDEQPQAEPTASDELSEPATKAPLSLAQAVVLLCSIPGISQRAAEGILAEIGTNMDRFASAKHLASWAGMCPGNHESAGKRSSGKTTKGSPWLRKLLVQAALAAGRTKKTYLSAQYGRLAARRGKKRASIAVGHTILVIIFHVLREQKPYQELGGNFFDERERQAVEKRLVQRLEKLGYDVTLEPVAHAA

SEQ ID NO: 131296 - protein, 455 aa, unidentified
MPRRAVKTTKALPVLNPNAAGIDVGATTVYVAVPKDRDECPVRCFATFTHDLHALADWLHACSVHTVAMESTGVYWIPLFQILESRGLEVCLVNSRHVKNVPGRKSDVADCQWLQYLHAVGLLRASFRPPQTVCAVRSLLRHRDTLVTYAASHIQHMQKALTQMNLQLHHVISDLTGKTGLAILEAILAGERDPHKLAELRDFRIKASAETIAKALVGDWRDEHLFTLRQALSAYRHYQQLLAECDQEIERLLARFDSQVDPTQVPLPPPTTSHRQPQRNEIRCHHTDLRTELYRILGVDLTQVPGLQTPTIHTLFTELGPELSAFPTAKHFASWLGLCPDNRVSGGRVLSAKTRKVKSRAATALRLAAHSLHHSHSALGDFYRRMRARLGAPKAITATAHKLARLLYHLLTTGQAYDESVFARNEERYRQRRVKRLYREAAALGFTLAPNAVVS

SEQ ID NO: 131297 - protein, 311 aa, unidentified
MTKIVCGVDVSKRRLDAHVAPCGTFASFGNDAAGIAALADFCRRHKVQLVAMEATGGYERQAFLLLWEAGIACGLTNPKSVRRYAEAMGILEKTDRLDAGVIAGFAIAKDLKPTSPPTPTQQRLNALVARLRQVTEDLTVQKQRRSSAMNQEMVSSIDEVIALLKRQVRALAGEIGSLINDDPLWSKLDAALRTKGIADRTVARLLAELPEIGIYSNKAVVKLAGLAPLAHDSGARAGQRHIRGGRAGIRSILFLVADIVRRFDQSLAVFHRKLTAAGKPKMVVRIALARKLLVRLNAKAREAREQHAIAT

SEQ ID NO: 131298 - protein, 441 aa, unidentified
MVKPKNKISVVNNNTAGIDIGSRKIFIGIADKPAVSFGTFTDDFISAVTYLKENNITSVAMEATGVYWISLYDILDQSGFDVLLCKADQAKNIPGRKTDVADCQWIQQLHSFGLLRPSFIPPQHIRTLRTFVRQRRTNLFLASDHIRRAHKALELMNIKLQNVITQINGKSGLAVLNAIINGNHNPENLALLCDDSILKKKKEAVIKSLKGNFSKENIFLLKQAVDGYLFYMKQVNDCDKHIDNHLCLITQELPAPGKINKPKPIRHHKPNIDDLHLKIMKLTGGKDASQITGLTDSTLMQIISEVGNDLSRFPTEKHFTSWLGLAPNSHQSGLTNKKKKFKRHTSAGQIFRLAAQAIAQSKHLALTSFYHRIKSRKGALGAIKATARKIAVIFYNVMTKGIEFVEQGIKLYEQHIKERQIKYLQKQAKHFGLLLTPQLQT

SEQ ID NO: 131299 - protein, 316 aa, unidentified
MSKKTAPTIAIGIDVAKDHSDICFLDEKENINQQGQYPAEKYKSLVKKIAKAKPRIVILEATGGYERGLAAMLLTSKVPFRVVNPLRARQFAQAIGLLGKTDTIDAKMLALYALRNKIEPTVVPDDKTQEIRALLERRRQLVALRASEKTRQHLEPNKTAAKSIKAHLSFLTKEIESLDNALDEIIKDNDDFRRKEAILTSVPGVGEQTARSLIGSMPELGTINRGEAAALAGLAPFAHDSGKLRGRRMIRGGRSHVRTSLYMATVSAVRYNPRFREIYQRLIAAGKAKKLALTACMRKMLLLLNALLKKEEIFVP

SEQ ID NO: 131300 - protein, 344 aa, unidentified
MDHFAGLDVSVKETSVCIVDETGKVVREVKVASEPEALLSVLKNPAYRFKRIGLEAGPLSQWLFSALAEAELPVVCVETRHMQAVLKAQINKTDRNDARGIAQMMRVGLYRPVHVKTLRSQKLRMLLTHRKLLQSKAIAIENDLRGTLRNFGLKVGMAGTVKFETRIKELVGNSPELAALVEPLLVVRRVLREQLVILHRRLLAIVRDDEVCQRLMTTPGVGPVVALTYRATVDVPARFRKSKSVGAVFGLTCSKYQSGEIDRSGRISRCGDEMMRVMLYEAAQSMLYSKKWSWLKAWAMQIARRRGMKKAIVALARRLAVIMHRIWVDGTEFRWTRGQTAAAA

SEQ ID NO: 131301 - protein, 409 aa, unidentified
MQVMHEVCCGLDVHKKSVTACVVWAAGRRRQTREFGTFTKELLELSDWLRSCGVTHVAMESTGVYWKPVWNLLEGQFEVLLVNAQHIKAVPGRKTDQKDSEWIADLLQHGLLRASFVPPTPIRELRDLTRYRASLAQEINRISNRIQKVLEDANIKLASVATNALGASGRSMLEAIVHGEQESQKLAEMSRGLLRNKIPELQQAMQGRVTAHHRFLLRELLDHLYFVESKMRRIGQEVEEQLRPFQSEVARLCTIPGVDRVTAWSLLAEIGLDMKQFPDAQHLASWAGLCPGSHESAGKRKSGKIRKGSLWLRRCLCQAAWAVSTKKNNYLSARYRRLAARRGGKRATIAVAHDLLVIAYYILRDQACYRDLGPDYFDRLNPGPLRRRLTKRLEGLGFKVTLEPLSQVA

SEQ ID NO: 131302 - protein, 452 aa, unidentified
MTKKSKRRCDTLLVLHPDAAGIDVGASELYVAVAADRDPQPVRSFPTFTRDLHVLADWLEQCGIRSVAMESTSVYWNPVYQILEARGLEVCLVNAQHVKNVPGRKTDVSDCQWLQYLHSVGLLRASFRPPGEICAIRSLWRHRSSLIQMAAEHVLHMQKSLDQMNLQIHRVLNDITGVSGLKILDAVLTGQRDPLSLARLCHGGVKSSEDTIAKSLEGDYRAEHLFALRQSLTAFRYYQQLVVEVDREIEHHMGELQTAVTAEKEPPPRTKARHYQKCRYEPKMFDLRAELYRIFGVDLTNVPGISAVTAQTILCEVGTDVSRFRNASAFASWLGLCPEKKISGGKVLFTKSRRVRSRVATALRMGAQSLHHAKDYLGEFFRRIVRKLGKPQAITSTAHKLARIVYHVLSTKEPYNESVFHRSEEKTTRRAEMRLRKQAAYLGFHIVPTANG

SEQ ID NO: 131303 - protein, 363 aa, unidentified
MQTILALDLGKFKTASCLLTEDHSSVPVFKTIMTHPKTFEQFLVDVKPSLLVFESCGLSGWVVDLARKLGIEVLVAHPGGEAWQWGKVKRKTDKDDALKLAKMARNNEINSVHIPSPEHRQFQQLVRYRKKLQAQATATQNAIRSNLMAQGEECAAGKTAWSKSYIENDLGKLRKPFEKCTASEYWRGTLDVQLTHLVATLKLMRRIEKQLAIISKPDPRIEIVQSIPGVGVVGSQVIVAHIDDAKRFESARKVSSYAGLAPKKWQSGKMDRQNRISRRGPRLLRSVLTEVAWCAIRFNPHFKALYDRVRGGSKSRKKQAIIAVARKILVTAWAMLRDGAIWSPPQTKTMGQAAPQSTATNTA

SEQ ID NO: 131304 - protein, 359 aa, unidentified
MPFYNQAHQFYAGVDLHARSMFVHVLDRKGKTVFEQDLSAGPDEFLDAVKPFRKNLVVGCECMFAWYWLADLCEDQRIPFVLGHALAMKHIHGAKAKSDRIDAGKLAAMLRGGMFPLAYVYPKAKRQTRDLLRRRSFFVRQRSQLITHIQNTNSQFNLPPFPKKLSYAANRSAAIAERFADPSTRLSMQANLNLIDAYDEQIATIERHLLQSAKVDDPVTFGFLRSVPGIGPILGLILLYEIDRIDRFPEAGNFLSYSRLVRCAHESAGKVKGFGGKKIGNAHLKWAFSEAACLMLRSSAPVKAWLQRQEAKRGKRKALAVLEAKIGRTVYHLWRKQRAFDGQRFLKNGEPRAEEPRRK

SEQ ID NO: 131305 - protein, 314 aa, unidentified
MEVILGVDVSSQTLDACLQSPKHVKPMFKSVVYTPEGCKKLLAWAVRHKVTRCAMEATGGYELAIAQRVMQAGIKLYIANPNRIRHFAKGDGILAKTDKIDAFVIAEFARKSNLPAAFEASPMQIEFKQLVMRRIELKKNLQAEKCRMRLSTGSVLQSHENLIAALDAEVERIDRLIDDLEAQQPEIAEKIQVLSQQKGVGRVSAQALVALIPELGRIDRRKIASLVGLAPIANESGKMKGKRFISGGRSEARRCLYMPAWVATQYDPEICAFYQRLIANGKKPKVAITAVMRKLLVRLNARMRIHLMQSSKST

SEQ ID NO: 131306 - protein, 364 aa, unidentified
MPSMTHPTTTGQDDRSPDVILGVDTHKDIHVAAVISIHGVFLGSRSFPTTAEGYRELLDWATALGRVRQAGVEGTHSYGAALTRHLLGAGIGVIEVNQPGKAHRRRRGKTDAIDAEAAARAVLSGRATAVAKAGDGHVERIRLFKLAKASAIKSRAQAINQLKAILVGADPALRDSMTGLSNPKLVRRCAGLAPDQPDTPAAAAAYTLRLLARRIIELTCEVDDLNQRITDAINAHTPELLQRYGVGPDTAAALLLAAGDNPHRLTNEASFAALCGASPIEMSSAKTPRRRLNRGGDRQANSALYMIVIARLRWDPRTRAYIDRRVCEGKTRREAIRCLKRYVARELFNLIAQATQHTGLPAIA

SEQ ID NO: 131307 - protein, 351 aa, unidentified
MAVAEGGLRGEVRDYGRIANTPAALRRLAHQLGQDGLTLRFCYEAGPCGYGIQRQLSALGHECVVVAPSLIPKRAGDRVKTDRRDAASLARLHRAGELTAVWVPDPGHEAMRDLVRARLDAVRALRRARQQLSGFLLRQGCHYGRPAWTKLHRRWLAGLKFDQAVHHIVLEDYIAAVEAGEARRDRLTAQIEAMLPDWTLAPVVAALQTMRGMALVNAATLIAELGDLSRFANPRQLMAYLGLVPSEYSSGASIKRGSLTKAGNSAARRLLIEAAWTYRFPARVSRELRLRQEEQPRPIREIAWKAQLRLCARYHKLARSGKPANVVTAAIARELAGFIWAIARRVPPAAG

SEQ ID NO: 131308 - protein, 341 aa, unidentified
MWIIGCDFHPRFQQIAFVNTEGGECGQRRLEHRGEAEQFYRSLAGQAVRVGMETGGSSRWFERLLGELGQELWIGDAAKIRAAETRKQKTDARDAEHLRQLLCSGQFEKMRIWIPPAENRDLRQLLWHRHRLVQMRTRVKNQLRSLATSEGMERKPGLWSQAGQKQFQALELAPWAQRRRQDNLELLSELLHRTDPLDQEAAQQAAQHPEAVRLMTHPGVGPITALAFVLVIGDPARFPNSKKLASYLGLIPREDSSGGKQRLGHISKQGNALLRGLLVEAAHVAVRHEAHWKRDYRRLAMRKNRSIAAVAVARKLAVRLWWMWRRGVDYAQLSASGSHAG

SEQ ID NO: 131309 - protein, 339 aa, unidentified
MQLYSAIDLHSNNSHVAIIDDQQNRVFYRKLANDPKLIAKTFAPYRERLNGIVIESTLNWYWLADLLIEKGYSVHLANPCGIQKYSGLKHADDKHDAFWLAQMLALNILPEGYIYPKADRPLRDLLRKRAHLVKVRTSLILSLQNIVMRNHGIKIRSNELKKLTQDPVAELLKDQPELALAGSASKQSIDFLTRQIQRIETAVRSQALLKEPFSKLLTLPGVGDILGMTILLETGPIERFKAVGHYVSYCRKVSGRWTSNEKTKGKGNTKNGNRYLSWAFSEAADHARQTHGPSRNFYNRKLNQTNASVAHNALAHKLARAAYYIIRDHVEFMEDKMFR

SEQ ID NO: 131310 - protein, 316 aa, unidentified
MEAPQPFIGIDVSAQRLDVDMLPTSHPFSEPNTDDGISSLVLRLQALKPEIILLEATGGYEVHVAYALCEAGLPVVVMNPKALRHFAKAIGRLAKTDKLDAQVLALYAQSIRPPVRPLKEPEQLELANLMTRRRQLQGMIVMEENRRRTSTPKVRGNVERSLAHLRQLLKDLDRDTQDFIRRTPLWHDKAAKLKEVTGIGPVVSSELIAHLPELGTISHKKIAALAGVAPMNRDSGQWRGQRRIQGGRPAVRRALYMAALVASRHNPVIRAFYQRLRLAGKPAKVALTACMRKLLVILNAMLKHRTHWNQQLPLAA

SEQ ID NO: 131311 - protein, 355 aa, unidentified
MLYLGIDQHARQITISLRNDDGDVVQARQVSTHPEKIQAFFQQLTRDRLQTDDEFIAVLEVCGFNDWLIRMLQDYRCHRVILIQPDDRKKRKTDRRDAAALSELLWVNRDRLLAGKPVRGLRQVDIAASTDQANRRLTTLRKEVREARTRLINKIRHILRRHNLQWQMPTKTFPTKPAIAWLKNLVLPEIDRLEMNHLLADLDHVQQRCQELEKVIGERCGASQEAVLLSSMPGVAQFTATALACRVGRVERFPRSHSLANYWGLTPGCRNSGENNQRLGSITKAGSRMARWLLAQVAHQALRKDARLREWFKQIKRRRGATIARVAVMRKLATIIWHMLKKRKTYAECREFATA

SEQ ID NO: 131312 - protein, 272 aa, unidentified
MQITTIGLDIAKNVFQVHGIDAAEKVVVRKQLRRSQVLGFFKALPPCLIGLEACATAHYWARELTKLGHQVRLMPAKDVKAYVKRNKNDAADAEAICEAVRRPTMRFVQIKSAEQQGRLMLHRTRDLLMRQRTQVINALRAHLAELGTTSAQGREGLKELLKIVASDADERLPADAHASLVVLAAELQAMQTLIGLIEKRIVTQHRENKASKRLLTIPGIRIIGATAIADTVTDPKAFRSGRDFAAWIGLVPRQDSTGGKQKLGPISKQGDR

SEQ ID NO: 131313 - protein, 320 aa, unidentified
MKPLMENLIGFTQTVKVGCGLDIHQNLIVATVSPGQNQYETKEFEAFTSSLKELSIWLVEKGVTHVAMESTGIYWKPVFNILEENFEIILVNARHIKNVPGHKTDKKDSKWISKLLLAGLLKGSFIPKQDIRELRDLFRYKKKLTAQNSSEKNRMIKVLEDANMKISTVLTDVHGISGTNIINDVIDGYCDVDSLMKHIHFRVKANRDSIRKALEGKITNHHRFMLKVMRKSIQDRDVLISEIETQIEIATAKYTLEIELLQTIDGVGREGAIGIISETGANMNQFPNEHHLSSWAGLSPGNNESAGKKKAPRLSRVTAT

SEQ ID NO: 131314 - protein, 337 aa, unidentified
MRYLGVDLHTNCFTVCIRNESGKEKLVTYRMSELKRFLKTLKDTDKLAVEATGNTRFFIDMVEPHIKEAVAVNPGKFEVIKASIKKTDKNDAKLLALFLSKDMLPEARLKNKQQAQISSLVGTRDKLVKLRTTLINKIHNILNHHGIKSKKEAFCSEKALDGVLAMDFDTIVKIELKVLVEQIRSLTDGIRKLDEQIKEVGTKMKGHDSLTSIKGIGDKSATVLLSVIGNIKDFADADKLASYFGIVPRVANSNETEHHGRITKRGSKIGRTTLVQCTLIAKRYNPYLRKFYERIQRRRGTGKAIIATARKFLGIIYETLKNGWIFEDFPNFVIANS

SEQ ID NO: 131315 - protein, 353 aa, unidentified
MRNLDYIGFDVHKKIINFCAKASDGQILDEGTIAARRVDLNAWAKARSRPWMGAMEATLFTGWIYDLLLPQAQALKVAHPAMLRAITAAKKKNDRVDARKIADLLRCNLLPECYMAPSQTRELRRILRYRNLVVREATRRKNRISGLLMETGTQYNKGKLHGKTYFAELLGTLQETPVSVRDLLRLSRGQLDLFESIQSRLVKELVGNPELVERVERLRSINGVGAILALTWILEIGEVKRFASIRQAQSYCGLTSAQHNSAGIERRGPISKQRNKHLQTMLIEAAKLAPRFNERLAAVHLREMGHGNRNRATLAVARKLVAYLMAVDKSGPPFQTRTGEASVVVHQESESAA

SEQ ID NO: 131316 - protein, 351 aa, unidentified
MKVSKLNAAHNSIFLGIDVHKKTYHITITNLEGERLESQSIPACPETLVKFLKKKYRNYDIHSAYEAGFSGFELQRTLKSNGINSIVFNPASLPIASNDRVKTDKLDSLKIARSLLLGVLNPIHIPSRRQEASRTLSRTRKQLVETRTSLANQIKAKLYEFGFIEASDDSVFSLKWLENILCSQSAQPALKISIKALAGVYKSVSSQITELEKQMALDLEKHHKDDATIVQSVPGVGPVSASVILNEIGNIGRFTSVKKVYSFTGLTPSEYSSGDKQRFGNISRKGNARLRGCLTEVAWRAIQKDKGLRAIYERLKKKAGAKKAILAVARRLMGRIRACLINNEMYNFSEV

SEQ ID NO: 131317 - protein, 397 aa, unidentified
MYIVGIDIAKRKHEAAVIDGEGTVIIKPFSFTNNCSGYNRLLAMLAKAKLPLDEVSFAMEATGHYWLALFTRLQKEGFRVQVINPVQTNSIRSFYIRQAKTDPRDALLIAEVIRFGHFSESTLHPENIYELRELCRGRHAIVSMQADVKRKVVALLDQVFPEYETAFTNMFSDTSMAILQTCPTPKELSEMRLEELCHLIEVSSHKRFRMAKARELQELARNSFGFAMAGDVFSTMIRLYAKHLVFLKQQVQEMDRKIAEIMDTLDTPITTITGIGPTLGAYILSEIGDINRFSSAAKLAAYAGIDPTMRQSGEYNGVRNRMSKRGSPYLRHAIWLAASSAVLHDPALKLYFQKKRDEGKPYMASVGHACRKMVSIIYAVMRDNKAYTPYIPNEISA

SEQ ID NO: 131318 - protein, 348 aa, unidentified
MLHAGLDLSRRKLDVCLLSDVGELVDEFAVPPDADGLAGLVRRVGPPAPQAVIESMTGARFVHDRLEELGWDVRIADAAKVKGIGSLAAKTDKIDARVLAILSQRDLVPEIWLPSLEIRQERELARFRLHLVKHRSMLKHRVHATLVSFGKPCPVSDLFGVAGRRMLAELNVPEPWRSTLQASVLAIDQLEAQIDQCNEQLRALRPDHKYLPTLMSAPGIGWVLGYTIAAEIGEIERFATADKLVGYTGLCPRVIQSGDSDRRGPLTKSGPKFLRWAMLEATMHALRHEAYAERYQRTKRRLGKQRGAKVAQIDIARRLTKSLWHMLTYDTPFSPKTAAAGAAFRLAA

SEQ ID NO: 131319 - protein, 338 aa, unidentified
MRKFIGIDLHSNNSVVVITDEEDRVVYQKRLPNDPEVIEAALAPHREEAVGVVVESTYNWYWLIDGLMDRGYQVHLAHTTAIKKYEGLKYSGDFADAAYLAQLLRLGLLPEGYIYPREQRAARDLARKRMQLVRQCTAQVLAIEGILMRQTGARKSSNAIKRLSAEQVEELALVPDAALAVQANRAVSEVLQQQIEVLEQRLKERVSLSPEHRLLRTVPGIGEVLATVIMLEAGPVARFAEVGNFASYCRCVDTQRESNGKKKGEGNGKNGNKYLAWAFVEAANFALRYCPQAKSFYERKKRKTNGVVAIKALAHKLARACYHMLREQKPFEVNRCFT

SEQ ID NO: 131320 - protein, 426 aa, unidentified
MTACQLHYLGCDRSDAHLDFTLLGADLAVPESVRLPARAANVETWLGQWRRRFPKHQLCICFEQPAGNLIVMFSRFEFVRLYPINPAILKSYREAFVVSRAKDDKTDGYWLADLVRTHRDQLPSWAPLSPEVRKLTALVEGRRDLVDEGTAWSNKLISLLKDYFPEALDLIGEHATSPIAVAFLRRWPTLQQLQAAGWPAVERFYREQHCGRATALTRRRDVIKQARPLTDDPALLEPAILRLEAILGQIEPLMAAIERYDQQIAAVFAAHPDHIIIASLPGVGPVLGPRLLAALGDDRSRLPDARALQCFSGIAPILIRSGMSTIVSRRHACPRFIRQSFHEHASESIRHCHWARAYYQLQKDRGKKHHTITRALAFKWQRILLRCWHDHNPYDDALYMRSLKDRNPVLYQLALTTKLPREQKAA

SEQ ID NO: 131321 - protein, 330 aa, unidentified
MSSNIPEILERCAGIDIHKKTAVVCIMVGFAKKMKREIRTFGTMTDELRDVAKWLKDNKIQDCVIESTGPYWLPVFNVLDGEFEINVILANPNQVKNVPNRKSDVKDAEIIGNVFGATGFKVIRLIAAGERDSNVLAKCFTRKIKASKESIKKALTGTLDDEDKILISFLVRHIDEQMSIIKDLESKIDDLSTKFKKAVTLLQDIPGISDTTAKTIIAEAGVDMNAFPSSQQFASWTGLVPRTDESAGKRRNTSISGGNRYIRNALVGAAWSAVITKNSYWRAEFQRLRPRLGSKKAIVAIARKLAECVYSILRTKKNIENLELMRLTID

SEQ ID NO: 131322 - protein, 373 aa, unidentified
MNHHSGAYVGIDTSKLRNAVAVAEEGRGGDIRYLGEIDTTEAATRKLVTKLAAKYRQLTFCYEAGPTGYGLYRLIRKLGHDCIVAAPSLIPKKPGDRVKTNRRDAVGLAKVLRAGELTAVWVPDERHEAMRDLSRAREAARKDLKGKRQQVSSFMLRLGRHFPGKKTWGPAHMNWLMLQKIEHREQRIVLEELLGAVRQESERVERLEQAIRDAVPEWSLAEVVTALQAMRGIDLVSAVTVLAEIGDLSRFQNPRELMGYLGLVPSESSTGDTVNRGGITKAGNGRARRILVESAWSYRYPPRVSREKQMKVAAAPGAVREIAWKAQMRLCGRFRSLTRKGKRPTIVATAIARELAAFIWAINREVMAHATAS

SEQ ID NO: 131323 - protein, 342 aa, unidentified
MDHFAGLDVSVKETSICIVDDTGRIVREVKVASEPEALLKVLGNPTYHFKRIGLEAGPLSQWLFSALAGAELPVICVETRHMQAVLKAQINKTDRNDARGIAQMIRVGLYRPVHVKTLRSQKLRMLLTHRKLLQSKAIAIENDLRGTLRNFGLKVGMVGKVRFEARIEELVENFPDLAVLVEPLLIVRRALREQIVILHRRLLAIVRDDEVCRRLMTTPGVGPVVALTYRATVDVPARFRKSKSVGAVFGLTCSKYQSGEIDWSGRISRCGDEMMRVMLYEAAQSMLRSKKWSWLKAWAMQIARRRGMKKAIVALARRLAVIMHRIWVDGTEFRWTRETVAA

SEQ ID NO: 131324 - protein, 346 aa, unidentified
MEQFVGLDVSQDITHVCVIGSDGKIVWQGTCPSTPEGISNAVRAKASNAIRIGLESGPLSTWHWHALKAEGFPVICLDARHAKAALNMQMNKTDKNDAHGLAQIVKAGWYREVGVKSLDSHTIRSMLGARAQLIAMRVEVSNQIRGMLKTFGIVLRRHDGLSFEALVSEACERDIGRVSHTVRTLLAVYIGLKAQILCLDRELARYARGSALCRRLMTIPGVGLLSAIAFITAIDDPVRFAKSSSVGAYLGLTPRRYQSGEMDHNGKISKCGDPLVRAYLFEAATTLLTRVGRWSALKAWGLRIAKRSGMKKAAVAVARKMAVIMHRVWTTGETFRWTSTPELEAS

SEQ ID NO: 131325 - protein, 420 aa, unidentified
MRTSTDTEFAAFVGIDWADRKHDVCLQAAGSSKRELSVVPHRPEAIAQWAEGLRQRFGGRPIAVCLEIAKGPLVYALQRYPFLVLFPVNPTTLAKYRETFCVSGAKDDPTDAQLALELLVTHPDKLSRLNPESGPMRILQQLVEQRRTLVDEVRRLTNRITDALKQYFPQALEWFPDKDTLVFCDFLTNWPTLKQAQRARKARLSAFFREHNVRYPHLVEQRIQAILAATALTSDNAVIAPNRLLVETLVQQLRVLLQAVARFDREIAALARTLPDYAVFASFPGAGPVFAPRLLAAFGEQRSRYQLADEVQKYTGIAPVTERSGNKCWVHWRLQCPKFLRQTFVEWAALSIPHCYWAKAYYEQQRGRGSTHQAALRALAFKWIRIVYRCWQNRTPYDEARYLNALKRHGSPLLACVQKP

SEQ ID NO: 131326 - protein, 343 aa, unidentified
MQSISTIGLDIAKSVFQVHGVDAAGQAILRRQLRRRHVLAFFQKLSPCLVGIEACASSHHWSRELQALGHTVRLMPPAYVKPYVKRQKNDTTDAEAICEAVTRPNMRFVSTKTVEQQSCLMLHRVRHLFIRQQTAVINSIRAHLAEFGIVAPVGRRGVEQLLEVVADTADRRLPEVARACLAALGSQLRALKAQILEFDRRIMVWHRSNATSKRLDAIPGVGPALATALVASIAEPGAFRSGRDFSAWVGLVPKQNSSGGKDKLGSISKQGDRYLRSLFTAGALAVIRYAKIHGTRHRPWLTGLLARRPTKVVAIALANKLARMAWAMMARNERYEEPAALAA

SEQ ID NO: 131327 - protein, 315 aa, unidentified
MYQNFIGIDISKYDFSVAVLGEKKTTRYTNDTDGFNAFVSSYQDQLKNGLVVLETTGGYELSLIYYLQQHQCAVHRANARNVKYFIRSLGTLAKTDAIDALGLALYAKERQATLELYKANSQEKLLKLVQRRIDLNQMLVQEKNRRQAPHQHVLKKSFDAVIKMLNAQIKEIENEIEVLFKADPLLAEKKKVLKEVNGIGDIVSIQLLALLPEIGTIDRKKIANLGGLAPLANDSGKRAGYRSTRGGRPGIKSLLFMAALTAARSQSYLGEFYNRLVKAGKKKMVALTALMRKILVIANAKLRDFLHAKLISQHG

SEQ ID NO: 131328 - protein, 304 aa, unidentified
MVACVRHMVDGAVKREVRTFKTTTKDLMALSEWLSAEGCTDVAMEATGIYWKPVWHILADGDFKPMLANAAHVKNVPGRKTDVNDATWLADLMAHGLIRGSFVPDEPTQEMRNFLRTRKQFVRERTSHVQRIQKTLEDANIKLDSVITDIMGLSGRRMIEALIAGETDPFALAALAHRRIKASQAELEAALRGRVSDHHRFMLRLLLQHIDAIDAAIGQIDQEVDAHVEPFRTAIQILSSIPGISDLSAEVIVSEIGIDMNRFPTEGHLISWAGLCPRNDESAGKRRSTRMAKRRRTKRNQQSF

SEQ ID NO: 131329 - protein, 310 aa, unidentified
MDAIVVGIDVSKDRLDVAVRPAGEHFVVSRDPQGLRELNARLKPLAVTAIGLEATGGYEAIVAGSLTAAGLPVVVVNPAQVRDFAKALGKRAKTDPIDAGVIAHFVETTKPPIRPLPDADTQRLADLIARRGQIIDMMVAERQRRKRLTEKRIVKSIVRLLAALQKELSAVETDIDDAVRGSPAWREKEDLLVSAGGIGKTIARTLIAELPELGTLDRRRIAALSGIAPWTRQSGQWKGKSMIGGGRARVRRVLFIAAMVAARHNPVLKAFRDRLVAAGKPKLVALIATARKLLTMLNAMLRDGKPWQEA

SEQ ID NO: 131330 - protein, 523 aa, unidentified
MSPTATRRRPRRHAPSAVHKPRGTLHPRVQAAGPEHFGIAAVDCAKMRFKWMLADFYGRILIPPTTVPHRRPALDQAVEQLRQAAREHGLKDLVVAVERTGRYHHTPRRAFADAGFETRLIHPYATKNLRQPADPGNKTDDTDLAAIHRAAVTGFALAEPPLDEPWVTFRLLARHRRDLVVKAATLRIQIREHLDAALPGFAACFADFYSSDCALYVARHFATPADILAAGLPELRRRLQDADVHPHRDTLETILAWAAEAPPPDRGAAAHHRCALALEEDRQQKMRQIQALERDLAAHLCRTPYVLLLSCPGVNVVSAADFAAEMGPVEHYASARTITGRAGLCPSRYQSDQVDNSHGPLVPCGNRRLRGAILRVADNLIKCNHHFNVLAHTWQSQGKDPRQAHVKVGLRFCRIAYQIVAGRQVFRHPALQGRHYVLDKLVAFHREHDTGVAEQMRDLQAAVDQVPVREHAAEAVPLHEELEKIHQGRRRGPQMLADILPIVLARLGVGGLESRESEGSDRR

SEQ ID NO: 131331 - protein, 345 aa, unidentified
MKITTTGIDLAKALFQVHGVDKHGKVGLRKQLKRKDVLSFFANLEPCLIGMEACGSAHYWARKLSELGHTVRLMAPQFVKPYVKTNKSDRNDAEAICEAVGRPNMRFVPVKTAPMQAVLALHRARQGFVKARTAQANQIRGLLAEFGIVIPKGIGHIAKRLPEILEDGENALPGMMRELLQRLGGNLQDMDKQVRELERQIILWHRENEASRKLEAIAGIGALGASAMVATLGDAKSFKNARQVPAWLGMVPRHEGTGGNVKLGGISKRGDVYLRTLLIHGARAVIAHIERKPDHADAWLKKLIARRNKNIAAVALAAKNARIAWALLAHERSYQHDYVATRKAA

SEQ ID NO: 131332 - protein, 346 aa, unidentified
MKIIGCDFHPSFQQIAMLDLETGELVRRRLMHASGEAEQFYRGLRGERVKVGIEASGNPRWFERLLGELGHELVMGDAARIRAMVVRRQKTDARDAEHLLQLLEREQFPQIWIPSAVERDLRQLVLHRQKLVQMRTRVKNQLQHVALNEGLQKKRQLWTGKGRRWLEDLSLPQWTERRRADLLKLLDELNATIAELSQAVEERAHQDERVRLLMTHPGVGPITGLAFVLVVGNVNRFERSKKLASYLGLIPSEESSGSRRRLGAISKQGNTLLRTLLVEAGQSASRCDPELRRAYQRLCHKKQNTGIGKVMVARKLAVRLYWMLKNQQPYQPARMQSSPSHSVSAA

SEQ ID NO: 131333 - protein, 344 aa, unidentified
MDNHTQYSGFAGVDLAKKVMQIHFVTEDGEITDKSTKRAEFLDFFRNRGKCLIGMEACGSSQDWARKLEAMGHGVHLMSPKAVKPFVSGQKNDHNDAIGIYKAMFNGVRRVPVKSTEIRDLQTLRRIRSQVTKDKVKEINHVRGLLAEYGIVMGKSLKAFNKDISSALESLKERGDVSPLVAEELRTTVEAIKTKIKRQKKLDQEIEQLARGCKSYENFLKTPGVGPVTAAMLCVLLCDPSIFANCRQFAAYIGLAPRSRGSGGKNYVIGIPSKFNCDCESRAVFVECAQAIARCKNKSPWVEGILRRKPKKVALIAIATKLARQVWAMANKGESFKQMAILTA

SEQ ID NO: 131334 - protein, 425 aa, unidentified
MNQDNQSFAAFIGLDKSDQKINVTLQRCSTARSERSIIQGSAQALHAWVAALCARFPHQRVAICVEQPAAGLIHALMGYDFVVLFPINPVTLARYREAFTPSRAKDDPTDADLLCELVAQHREQLKVWQPDDICTRKLGHLTQARRSSVNMRTRLSNQLKALLKGYFSQALELCGEDLTTPLACAFLQKWSSLQQLKKARPETIRRFYYAQNARRGDVIEKRLTLIAQAIALTNDPALIESSIVTLQALTLGLRAVHTAIARFDREIARTFTQHPDASLFAALPGSGTVYSARLLAAFGSRRERFESAEALLNFSGIAPVLKRSGQTTIVHRRYARPIFLHQSFIEYANESIRHSLWARAFYQMHKAAQQSHWVIIRALAYKWIRILFRCWQQRTPYDELRYLKSLQKSRSPLLQYLAQPNAQTV

SEQ ID NO: 131335 - protein, 338 aa, unidentified
MKVYAGIDLHSTNNYLGVIDQTDRRLFDDKLPNCPKTILAALKPFKKKLVGIVVESTFNWYWLVDVLNENGYKVHLANPAAIKQYEGLKHSDDQRDSFWLAHMLRLGILPEGYIYPKAQRPLRDLLSRRGLLVRHRTAQILSLQSMISRNRGRELTGDDVKALLPGIMEHIFDQKHLILAGETSLATILFLSEQIRILEKEIRASARPRREFKISQTMPGLGTILALTIMLEVGDIARFPSVGDYSSYCRCVKSERFSNGKKKGSGNRKNGNKYLGWAYVELANFAVRYCPHAKRFYQRKKAKTKAVVATKALSNKLARASYYMMKDNVAYDPEKLFS

SEQ ID NO: 131336 - protein, 312 aa, unidentified
MDAIYVGIDVSKDRLDVAVRPTGQSFAVARDGAGIDELIGRLKAISPRLVAIEATGGFETVVAAGLGGASLPVVIVNPAQVRFFANAVGKRAKTDPIDAMVIAHFAEATKPQLRQLPDEMTRLLADLVARRRQIVEMIAAESQRARRVSNPRLKKSIARLRKALEKELAELDDDIRDHVQGTPAWAEKEDLLASVPGIGPTIARSLIAELPELGTLDRRQIAALAGLAPWTRQSGQWRGKSFIGGGRASVRGVLFMGAMVAARFNPTLKLFRDKLVAAGKPKLVAIIAVARKLLTILNAILRDKTPWQPKNA

SEQ ID NO: 131337 - protein, 375 aa, unidentified
MYQYSKYVGLDVHKEKIMVAVAETSRRGPVYYGEIANTAEAVAKAIKKIAGQENVVFCYEAGPCGYGLYRQITAMGYQCDVVAPSLIPKKSGNRVKTDRRDSISLAGLLRAGELTRVWVPDREQEAMRDLTRAREDMKMMERHSRQRLGGFLLRHGKVYPGRSKWTKAHFRWLEGIRFETATQQIVFQEYVDMVKHTEGRVAAMEEEMRKAVDSWKLKEVVEGLMALRGVNLIAAMTIIAELGDISRFSSPRQLMAHLGLVPSEHSSGEKRKRGGITKTGNSHARRVLVEASWSYRLPARKTAHLQRKAAKASKTVQEIAWKAQKRLCKRYWYLINKGKLPVESCTAVARELVGFIWAIVCEVMGKGTVSAAVNG

SEQ ID NO: 131338 - protein, 334 aa, unidentified
MKKDHYIGVDISKKTIDVAIFVKDTHRSTSLPHDSFQNSEEGFKDMKRWLRKQNVALSKSLVCMEATGTYTYELCLFLERQSVSYSVQSPLHLKRSFGLTHGKNDKVDAARIAYYAYLHRDDIKLSKLAAESIRRLKSLIAERKSLVVEIARCKTQLKEAGEHAPSLGTIKRTESLQKFLEEQVGAIEEEMDQTIETDESMNTNYHLLLSVDGIGTVNAINTIIATHNFEMFDNARQYASYIGVAPFEHTSGTSVRGRTHVEPGAKMLKADMTGAVRTCINHDKEIKHYYERKMAEGKAFGVVANAIKFKLLLRMFAVIKRQTPFVRKPDFIFN

SEQ ID NO: 131339 - protein, 344 aa, unidentified
MEHFAGLDVSVKDTSVCIVDDTGRIVREVKVASEPEALLAVLENPAYHFKRIGLEAGPLSQWLFSALVEAGLPVICVETRHMRAVLKAQINKTDRNDARGMAQMMRVGLYRPVHVKTLRSQKLRMLLTHRKLLQSKAIAIDNDLRGTLRNFGLKVGMVGKVKFEARIRELVENLPDLAVLVEPLLIVRRTLREQFCILHRRLLAIVRDDEVCQRLMTTPGVGPVVSLTYRATVDVPARFRKSKSVGAVFGLTCAKYQSGEVDWDGRISRCGDEMMRTMLYEAAQAMMRSKKWSWLKAWAMQIARRRGMKKAIVALARRLAVIMHRIWVDGTEFRWTRGLAAAAV

SEQ ID NO: 131340 - protein, 322 aa, unidentified
MIATASFGNDGPGHAALAAWAAALGPVAAFGIEGTGSWGKALTTALTDAGATVIEVNSYVASGRRARGKSDALDAESAAWAVLGGRSTTVPKSADGPAEAVRALSIARNGAVKARTEAGNALQALLAEDLDLARACKAQGARAIADRLARLRPPRSADPAAARRRALRSIARRWLALDAEAADLEALIKNLTETAAPDLVAAFGISHLTAATILAAVGDNPERIRSEAAFAKLAGACPIPAGSGQTDGHHRLYRGGNRQLNKALHTIALCRMGHDERTKRYVAKRIQTGKTKREIIRMLKRAIAREIFHLLNPATHHTPTPA

SEQ ID NO: 131341 - protein, 348 aa, unidentified
MLADQLDYVVGVDPHRDSHALAVVHVVSGAVVFESTVVASSDGHAQALQLVDRHAPGRRAFAVEGTASFGAGLTRFLTGRGERVLEVGRLRRERRSGGKTDALDAVRAARSVLTQQRPATPRAGGERQALQALVAAREGAVNAKRAGLCQLRDLLITTPEPLRSELRPLTRARLLQRLAATRPGGGREPELRGSMLALRSIARRLLQLTAEERELACEIEAITRKLAPQLLDQPGVGPHAAAQLVLSWSHQGRITSEAAFARLAGAAPIPSSSGQTIRYRLDRSGDRKLNRALHMILVTRKRSHPATIAYIERRIQEGKTRREATRCLKRYLARSLYRLLEHGAPLAT

SEQ ID NO: 131342 - protein, 410 aa, unidentified
MVKTLHVGIDLSQKVNATQFMDQDGQVVHKPFGFPNNLDGLEAFVAKLIPIITSHGFSRVKIGMEATGYYWWHLREYLDEHPTLNNMAEIELFVINPSLVKAFKKAYPTLPKTDFVDAWVIADRLRFGRLKPITEKDLRYQPLQRLTRLRYTLVRNATGEKNRALGLLFLKFPEYTTVAGHRTFAKGPISLISEFTLDEILDKPVEELAQFVVEQGNARFSNPELFIEELKKAARRSYRLNDKMQNSVDVALSMTLENIQFLKGQVKKLDRVIAKEVEAIPNTLRSVPGIGPVLAAGIISEVGDITRFYSDAALARFAGLTWTRYQSGEFEAEDTSLTKAGNFYLRYYLVEAANSLRLHNPEYAAFYKRKHSEVPKHQHKRALVLTARKFVRLVFALLSKGQIYKGRRES

SEQ ID NO: 131343 - protein, 346 aa, unidentified
MPIVGGLDIHRKQITFDYPGTETGQVQRGQISPADRLHLRAWLARFNGREDVAFAVEGCAGWRYVVEELAAAGIAAHLAEPADTAARRGRKRHAKTDKTDARHLRMLLAEGRLPECWIPPGHILECRALLELYNDLRREHTAWVQRIHAVLFHQGAPALGEGTLRTGQGVAALRAAAAAHLSPAGQLQVATALEVIDGLEARLHAVRHQLLAAARHLTGAKVLAARLYGVGPVTGLAITCWLAGEGRFSSSRQAVRFAGLDITVRSSDRKGPPGRLSRQGPPVLRWAVYEAGKTHARTSAPDHRYYAQVKDRKNSKRACLSEARKILRQAHHILAELGDDALAPAA

SEQ ID NO: 131344 - protein, 327 aa, unidentified
MTASVASHNQIFVGIDVGGLSFEAAWHRGGSTQYQNRPDAIAAFVARLSVEKQIIRIAVEPTGGHEKALVKALRGAGLPVEMVHTSRFAAYRKLIGAKAKSDTSDARLLAAYAAAPEEVRGRKAGHVVLPQDDVREQLAELAARRDQLKHMIHAETCRLSTVRSPSIRDEITAHLQALRQADRKTHDAMMLLVRQRDELRNAKRLLQTIKGIGDKTALTSIAAVPELGLISNKAAAALVGVAPFVRKSGTMTAPAHIHGGRALVRNAFYMAAVTASRHNPVLAPFYARLIAAGKPVKVALVAVMRRLVVYANAVLRSGQPWKGAEIG

SEQ ID NO: 131345 - protein, 411 aa, unidentified
METILACCAGLDLHKKSVEATVRRREANDHFHKETRHWGTMTRDIRAMADWMAAQGVTQVAMESTGVYWKPIYNILEGRFTVLLVNARHLKQVPGRKSDLRDSEWIAQLLQHGLLKGSFIPPRWQRELRDLTRHRIELVEEKGRTVNRMHKLLEDTNIKLASVATDILGASGRAMLQALIDGQEDPVKLAELARRSLRGKIPELEKALDGHLTDHHRFLLRLLWKQLQQQEEVIAEVETRIEELTRPFAEQIQRLDAVPGVDRRVAEVWLAEVGPHLDPFPTDGNLASWAGMCPGNEESAGKRKRRRITPGNRWLKRTLTQAAWAASHTKNSYLASQYRRLAGRRGKKRALIAVGHSMLVIFYHMLKQGTTYQDLGAHFLDRLEPERMTRYYVKCLERLGHKVTLETRVTA

SEQ ID NO: 131346 - protein, 392 aa, unidentified
MDTTKVLENQEFVNVGVDLAKNVFQVAYKEPRTNTFVNQQMNRTQFVKFLKDSKIKFKVVMEACSTCHFWGRECMKYGHLPMIIPAEITNSINIGSKDDKNDARAIWQASFLPDIKTINVRSEENQTEGHLLKTRDFVLKLDTQMNNKLKAILTEYGCECSTIGYEKTKAVAQAFLDKAFQDNQPWASKLKIILDAIDKIREKMQEAEKQLHEKIVETAKNNELAQRLMTIPHVGPITSLAFVNVMAEPTLFKNGRQFADYCGETPYHTGSGGKIIVLGVNRKGNSVLKRSLYEAASGLYNRVKTGIESKTCHYYQSDWILNLVRSKPRKVAICAIANKMCRIAWAVAATENGRYDRTKTSLVSVLMKSPEQIEQQKAAKAQAKAQAAAKAA

SEQ ID NO: 131347 - protein, 387 aa, unidentified
MAQVNDLSRSLTAFDPISTLVVVVEMSKASWLVSGVVPGVERQPLKKLAPDATALLRLIERWRSEAIRAGRPINRIALAYEAGRDGFWLARWLIARGIEAHVIHSASVAVSRERKRAKTDRLDAAMLMRVFLGWLRGERGHCGMVVIPTMEEEAARRPSRERENLVNERSRITNRMKSALARLGIRGFKPHLRKAPERLAGLRTAEGTGLPANVIEEFRRDMARLALVREQIGSIEKTRAERLERAPDTGPHAMVRLLARVIGIGIETADMLVREILSRKLRDRRAVARYAGLTGSPDESGLKRREKGLAKAGNARVRRGLIQLAWRFLMFQKDSALAQWYRSRTEGPSGARKTTMIVALARKLLIALWRLVTTGEIPDGVELRPAA

SEQ ID NO: 131348 - protein, 314 aa, unidentified
MTGEAEIFVGIDVSKAWLDIALHESDACWRAKNDDQGIGTLVEKLKQLAPALVLLEATGGFEMLLVAELANAGLPVVVSNPRRVRAFARSTGRLAKTDKLDAKLLAHFAAAVRPPLRTLPSAEEQQLTGLLTRRRQIVDMLTVEKNRLHTVRPALQSDIEEHISWLKEKLSKLDDDIDLFIQATPLWKEKDTILRSVPGVGRVTSSTLLAMLPELGKLNRQQIAALVGVAPVNKDSGRKQGKRRVYGGRADVRSVLYMAALAAKRYNPVIRKFYERLVKQGKEKKVALTACMRKLIVILNAMLRTNQPWRTLPA

SEQ ID NO: 131349 - protein, 312 aa, unidentified
MTQIICGVDVSSKTLDARIGREGAVGRFACTAEGVAALAAFCKAHGVKLVAMEATGGYEKMPFALLWTHGVPAAIVNPRSVRRFAESMGFFEKTDRIDAGVIAWYAEVKHIVAQEPTSEAHQRLEALVTRLRQLTELRTAQTNQRRLVSEAAVLSTFDELLALLKRQTRSLERQIAALVDSDPLWQKLDPAFRSIKGVADRTVARLMAEMPEIGTLSNKAISKLAGLAPFARDSGKFKGKRAVRGGRTHVRSILFVVAELVRRYNPDFAAFHKRLKDAGKPLKVIRIALAHKLLVRLNAKARDVREQIAYAA

SEQ ID NO: 131350 - protein, 355 aa, unidentified
MNSEKYIGMDVHQATISVAVMDNSGKLIMECILETKAATILEFIDGLRGTLSVTFEEGTSAAWLHDLLKPHVSHLVVCDPRRNALLKDGSKSDRIDARKLAELLHANKLHAVYHGEHGVRTLKELGRSYLTITKDLTRVMSRIKALYRSWAIPCSGTTVYAVRHRAEWLAKIPEPGVRLRAERLYQQLDLLQPVRQGARRDLTVESHKHHAVKLLRQIPSIGPIRAALLVALLQTPHRFRTKRQLWAYSGFAVETHDSGEYRVVRGKLRRNRERITVRGLNPNHNHDLKNLFKGAALSASTRPGPLCDFYVALVEKGMRPTMARLTLARKMAAITLTIWKKGVGFDAKQLNRQAA

SEQ ID NO: 131351 - protein, 330 aa, unidentified
MAHIGIDVSKNKLDCMWVRDLEAGKVKPKVFPNRRDQYPELLHWLERNTGEPPEALHVYLEATGIYHEPLAYWLHEHGVRVHLLNPAQVRFHAQGMGVRNKTDRKDSMMLARYGIERAPAPWQPEPPEVRELKRLLGRLEALEQDIRREENRLEKAQFNEDALAQESIGNVLEALREEHRRLQQQIDDHFNAHDHLKRDRALLESIPGIGRVLSASMTATLRSRAFRSARQAAAFHGLVPVQQESGTSIQRQPRLAKTGSSGLRRKLYMAAIAAAHHNADVRDQYQRLLRRGKAKMAAIGAAMRKLLHIAFGVLKSQQPYQPRCSTGCNQ

SEQ ID NO: 131352 - protein, 343 aa, unidentified
MKITTIGLDIAKRAFQAHGVDASGRAVLRRKLGRSEVLGFFRALPPCLVGIEACGSAHHWAREIRALGHEVRLIPAAYVKPYVKRGKTDAADAEAICEAVTRPTMRFVPIKTPEQQALLVLHRTRDLLVRQRTMLVNSLRGHLAEFGIVARQGTGGMGELLGILRDAAETRVPALARTALLRLADAIEAIETQVAEVEAAILAWHKASEASRRLAKVPGIGPITATAILASVGDIANFRSARHLAAWIGLVPKQDSTGGKPRQVGISKAGDRYLRKLLVLGATTVIRHNKNKAQEGWLAGLLARRPTMVAAIAQANKTARIVWALLTRGGTYDPTLGRQAAAA

SEQ ID NO: 131353 - protein, 353 aa, unidentified
MHTHQNSSHPVATIGVDIGKNTFHLVGLDKRGAIALRTKVSRSQLERRLANVPCCLVGMEAGCGSHHIARQIRALGHDVRLIPAQYVKAFLKGHKNDYRDAEAIAEAVQRPTMNFVAIKTPEQSDLLSLHRVRSRLVGQRTAVMNQIRGFLIERGLTVRQGPAPLRKALPEILSSPPEVLSPRLVRLISDLSQDWRRLDERIETVSAEIETLAENDGSCQRLMTVPGIGPIISSAVVAAIGNGSGFRQGRDFGAWLGLVPKQESTGDRTKLGKISKRGNKYLRTLFVQAAHVVLIRRPAAAMRGLWPWIERAAKRLAHRNLLAIALANKLARIAWAVLARGRDYEPRITTNAA

SEQ ID NO: 131354 - protein, 317 aa, unidentified
MKRIKFVGLDVHAETIAVAVAEQDGDVRSLGVIPNREESIRKLVKKLGPVEQLRFCYEAGPTGYVVYWQLTALGAKCEVVAPTLVPVKSGERVKTDRRDALKLARTYRAGELTPVWVPDAAHEALRDLVRAREAAKKDQLRAKHRLGKFLLRHGRRPPTGVKPWTLNYLSWVKHEVHFEQMAQEATLLDYLNEVEHAELRIARLNLAIEEAVKLTPPKMRAVIQALQALRGIAQVAAVSIVAEVGEVSRFTRARQLMGYGGITASEHSSGEGSWRGGITTASRLVCSTRRIVAPVQICGSRGFLGHAGSTSPCVFAR

SEQ ID NO: 131355 - protein, 352 aa, unidentified
MIIGCDFHPSFQQIAYVNQETGEYGERRLNHREEAAGFYGSLAGRKVVVGLEATGNDRWFRKLVVESGHELMVGDASAIHASAPREQRTDKRDARHILRLLVENRFPAVWQPSVANEQQRQLLMHRCRLVRMRTRIKNQLDSIAKSEGLTGSRSWSGQRRGQIEALPLAGWYSQRRADLLQLLDGLELRIKPLDRAVEAAARQDAEARLLMSHPGVGPVVSLAYVLVVGDWRRFPRGKQVGSYLGLIPSEASSGKRQQQMGHITKQGNTLLRWLLVEAATTAQRYDASWHRQYVRLSMSKHHGVAKVAIAHKLAVRLYWMLRSGQDYGQMMERGSHARQSECPVGRSRRPIE

SEQ ID NO: 131356 - protein, 426 aa, unidentified
MKVLYERVAGIDVHKDMIKVGIRSPGDKPWTRRSEVLQYRTFYGVLQQMAADLRKRGVTHVVMEASGVYTEPVYYALAERDFDEVAVINPAHAKALKGHKTDARDCLRVAELFECGLLRGSYIPPAELKEVRDLTRYRMKTVQARTSEIQRLGKALESAGIKLGSVASELTGKSATAMIEALIDGERRGRVLADLAIGRMRTAGKLADLSQALTGRFTEHHALLSRLHLDRIAVFDTAVAGLEDTIARRAARWQREQDLLRTVPGFGDAVAQAWLGEIGPAPHTYFGSHEKLASWVTLCPGNHISAGKRKHGRTGDAGTYIKPMLVQAAWAAIRVRGRLQARYSRLVRRFGGEKNPAAKKKAITAIAHTLLKIAYQVLRSGKPYEDLGADFYTRRESPQQRQAHLMRQLQKLNPGCTITITPAEAA

SEQ ID NO: 131357 - protein, 417 aa, unidentified
MEVVHPRCAGIDVSKRDAKVCIRIQGSSGRKTSSTVTTWGSMTNQILALRDHLAAQQVTVVIMESTSDYWRPFYYLLEADFEVLLVNAREVKNVPGRKSDVSDAAWLADLGAHGLLRASFVPPEPIRQLRDLTRTRTHITAERTREVQRLEKLLESAGIKLSSVATDITGVSGRLMLQALIDSQGTAEPARIADLAKRRMRSKIPLLTEALNGRFTAHHAFMTRLFLDRIDAHTRDIELLSQRIDGLMEPFLPARDLLESIPGFSQTVAEVFIAETGGQMRQFPTPEQLASWAGVSPGSNESAGRVKSTKTRPGNRYLKGALGVAALNQARSKSQKTYFSAKFRHLAPTRGPMKAIVAVEHAMLVAAWHMLQNSEFYRDPGADYYTRRDPARTKARALKQLQALGYDVTLQPLPQAG

SEQ ID NO: 131358 - protein, 316 aa, unidentified
MRKHNMVCAGIDTGKRKLDAAVEGCSEQLRVDNSADGHRALSDWLRRRRVVRVGIEASGGHEQAIVGVLRRDGLVVIVFQPAQVRAYAKFHLQRAKNDKLDAALIAACTAAAKKIHAPPDPRLAPFAEHLTLVEQITEDIAHCKTRRETCRDPRIRRFWDEEIVRLKQVLRSEIKGLVAAIREYRDLAERLDLIASIDGLGLRTAVAILVRMPEIGRITREQAAALAGLAPYDDDSGDQVGVRHIDGGRERLRKALYTAALPAVFYWNPQLNSIYRRLASAGKPHKVALVACARKLLIYANTVVERGTPWTKSVPA

SEQ ID NO: 131359 - protein, 428 aa, unidentified
MDQVNRNRLEEFRQLRQEVRHSGEYLIVGIDIAKDRHHAFLGTATGKTLLRRLVFSNDHEGFRKLLDHAEALRAQHGLKKVVYGMEPTANYHKPLGEYLITLGRTVVLVSGVTVKRNRESLDGRWDKHDVKDSANVADLISQGKCLYYEHPSVELRGLRGLLSLKRRLKKQEHGYKVRIRNHLIAQYFPEMDRDYEQLGAEGLSIVRWCFPASQIVQLDVDPFIERVRSRRIRVEKRRRLEAIWEKAGESIGCDGVPGVEHEAKVMVEGLRQIQELIKQTEEKILGLCKQFPEYSYILTIPGFGPDVSAKVLGAIGDPDRFQNGKQVLKMGGLDLSADRSGKDSDKATPEISKRGEADLRYALYQAALIASVQNRDVMIYYTNKIRGREREKGIHTKMRVKLAAKLLVIAWTLMKKKEAFNPAYLNAE

SEQ ID NO: 131360 - protein, 315 aa, unidentified
MVTGIDCSKDYFDISVQSGEKEVFKGRFRNDQAGFVEALGHMHGSHIAMEATGPYYFRLARFLWERDERVSVINPLVIRRFSQMTLARTKTDRKDAQLIAKFTSMTEPAQWRLPEEHVLRIRNLEGYIKGQKECRNLLGNQLHAYEYAGTLDPSLRKTMEEGIKVFDENINEHERQIQQIIMENYGELNANLRSIPGIGPRSAALLIILTDGFSRFEGHRQLISYFGLAPRIFESGTSVKGKGHICKMGMGQVRKVLYMAAISAIRSNTACSELYGRLMEKGKPYKVAIIAVVNKLIKQAFAIAKSGKGYIAKAA

SEQ ID NO: 131361 - protein, 377 aa, unidentified
MNNVRFVGLDVHAETIAVAVAEVNGEVRSLGIIPNRPESVRRLIGKLGRPASLRVCYEAGPTGYVLYWQLSELGVACQVVAPTLVPVKAGDRVKTDRRDAAKLAKCYRAGDLTPVWVPDRAHEALRDLVRARLAARRDQLRARHRLSKFLLRHGRRPPEEIGAWTLKHLEWIRSKVRFEEPAQNATLLDYLHEVEHMAARITRLEQAIDAALPALPATMRAVIDGLQSLRGVAKVSAVTLIAELGQLSRFDHPRQLMGYAGIVSREHSSGERIRRGAISKTGNAHLRRIVVEAAWSYRHRPAVGAILAVRQKNAPAAVTALAWKAQHRLHARYVRLMGRGKSKQQTVTAVGRELLGFIWAIGVEIEQRSATPLRRAA

SEQ ID NO: 131362 - protein, 394 aa, unidentified
MDRMFVGVDVSKDSFSAAGLDAEEKECFSESYSMDSNGFGKFLEIVTTHCSDRQKVLVGMESTGCYHINLFSFLTLQGIQALVINPLLIANFAKRSLRKTKTDKKDARTIAKFLMENRGEVSQLSISPDLQDLRDLARERESVSHLITATKAEIKRVLRTTFPELESVGDIFTRSMIRFLKEYPSARRVKMARPKDLAKVLNQPQVGNKLSFSVEDILRAAHNSIATVSPAKEVILQGKISTLVHLQERLDELTKLLTEVCKATRVEDWKILRSIKGVGPKTAVPFLAEMGSIENFSSPKKLIAFAGLDPSVCQSGKFVGKSKLSKRGNRHLRRAIYLMASAVVSQNAFFKVYFVRRKKEGLTPQRALLATAHKLIRVIFAMLSHRTYFQPKMA

SEQ ID NO: 131363 - protein, 464 aa, unidentified
MSWEKSKKKQRQKRVGQGGAVPSLSCIEPSAAGIDVGATEIFVAIPQDRDPSPVRSFETFTEDLHRLKDWLLQHGIKTAAMESTGVYWIPLFQILERAGIEVCLVNAQHVKHVPGRKSDVIDCQWLQYLHSVGLLRASFRPEDRVCVIRSLLRHRDNLVQMAAAHVQHMQKALTQMNVQIHHVLSDITGQSGLAILDAMVKGERNPVVLAQLRDRRVKSSEEVIVKSLVGDYRREHLFTLRQSLEAFRYYQDLMAACDQEIEEQLQNFDRQPPSDAPPLPPNPHAHRRRKNEFHFDMRGELYGIWGVDVTAVPAIQALTGYTLLAELGTDWSAKFRSVEAFASWACFCPHNKKSGGKILSAKTRKSANRVNRALRLAAQSLERDKSYLGGYYRKMCARLGRPAGITAAAHKLARILFHMITTKQAYDETVFAAEEQRQRKRMENKLKRNAHQLGYALVPLAQTA

SEQ ID NO: 131364 - protein, 373 aa, unidentified
MKNFDAYVGLDVHKDAIAVAVAEGERSGEVRSLGAIPHETTAINRMVKKLAVRFEAISFAYEAGPCGYGLHRHLIGLGHVCDVVAPSRTPVQPGKRRVKNDTIDALNLARLHRAGELTYIWTPDATHEAMQDLVKARRISSHQVRKARQRISCFLLKHGRRYERKKWGHRHRVWLADLQFGHVATQFALQSYINEEGQAVDRRTQIDGQIENLMSDWILAPIVRELTALRGLDIVIASAVVAEVGDFARFENPRHLMSYFGLVPGEFSSGASIRPRGITKAGSSDVRALLFEAAWLYRLKPKVGQWSLVRQKALSQAAKDIAWKAQLRLYGRYQRLTQIRHKRSQVAVTAVARELVGFIWAIARNAEDSLVVR

SEQ ID NO: 131365 - protein, 391 aa, unidentified
MRVPGAKGRRTQEVRTFGTTTPDLLALQDWLAAHQVTHVAMESTGVFWKPVYYVLEARFTMLLVNAAHIKQVPGRKTDVRDCQWIAELLEHGLLRGSFVPPPVIRDLRELTRYRRTQIQERTRVANRLHKVLQDANVKLSNVTHHVLGVSGRAMLDALVAGTTDPDVLADLARGQLRKKLPALRHALTGRFRAHHAFLLGQILAHLDYLEEAIAAVSAHVEEQLRPFAPQVERLMTIPGVQRRTAETILAEIGTDMAVFPTAGHLASWAGMCPGNDESAGKRRSGKTRKGSKWLRTSLIEAANAAARTKATALGARYRRIHPHRGHRKAIVAVGRHILEISHHLLRTDRTYQELGPDYFDRRHAERLQRRCIRQLEQLGLQVTITPAPAAA

SEQ ID NO: 131366 - protein, 338 aa, unidentified
MKAYAGIDLHSTNNYLGIIDETDRRLFKKKLPNCPKTILSALKPFKKKLVGIVVESTFNWYWLVDTLNENGYKIHLANPAAIKQYEGLKHTDDQRDSFWLAHMLRLGILPEGYIYPKSQRPLRDLLRRRGLLVRQRTAQILSLQSMISRNRGLTLTGNEIKALLPRLMKDLFDHKHLVLAGETSLATIEFLGERIRVIEKEALSLARRCRAFTILQTMPGLGTILALTIMLEAGNIRRFPSVGDYSSYCRCVKSERFSNGKKKGTGNRKNGNKYLGWAYIELANFTIRHCPHANRFYQRKKANTNGIVARKALSNKLARASYYMMRDNVAYDPNKLFS

SEQ ID NO: 131367 - protein, 350 aa, unidentified
MIIIGADYHPGFQQIAFVDTDTGEFQERRLQHREEAEKFYRDLAAQGIQVRVGMEASGQARWFERLLSELHFELWIGDAAEIRTKRVRKQKTDRQDAQLILQLMLEDRFPKIWVPSWENRDLRQLLWHRHRMVQARTRIMNQLQAVALNEGLRCKKRLWRERGRQQLESFPLGPWASRRRRDLLELLDRLTPTIAELSKAIEQEVEKCPEAQRLMTHPGVGSLTALAFVLIIGEANRFQCGKQVASYLGLVPLEDSSGNRRRLGHITKQGSSMLRFLLVEAAQVTARSLPQWRSKYLHLMMRRGRKTAKVAMARRLAVRLYWMMRQQWDYQQWVKFGSHAGQPGNRHGVQ

SEQ ID NO: 131368 - protein, 330 aa, unidentified
MKPYNHFFGVDVSKKTVDITYAYRQDLSHHQFTNDDEGMELLMKWLKELNPGFESTLFCMEATGLYCFTLTRFLAANSIDVWIEHGLQIKKATALARGKNDKIDSQRIAIYATKYLDRLRLWKPVDATLEKIRHLASLRDRLVETKKKLETPLKEFEETGNKAMAKLLRKTIKSSLTAIDKDLKNVEVRIIEVVNEDDNLRILYKLITSVVGIGFVTAINLIVHTNGFTILKDTRKLACYCGVAPFEFSSGSSVRGKTRVHYMANKKLKCNLHMASLSAVKLDPDLKTYYERKVAEGKNKMSVLNAVKNKLLARVIAVVNKQQEYVKRSA

SEQ ID NO: 131369 - protein, 331 aa, unidentified
MHSENIAAYIGLDVHKETLAVAIAAPERLGEVRYYGTINNEAQAVRRLFQKLQGLYGNILSCYEAGPCGFGLYHQLTAMNIKCQVIAPSRIPKSPTDRIKNDHRDAISLARLLRAGELTPVWIPDLTHEAMRDLIRARAAAKRDSRVARQRILSMLLRTDKRYAGKHWTGKHRTWLANQSFSQPSQQIAFQHYCQSLEQIEDRILQLDQEISRLLPEWSLCNLVCQLQALKGVGQLIAITLVAELGDFSRFSNPKQLMAFLGLVPGEYSSGNSIRPRGITKVGNSELRRLLYEAAWSYRTPAKVGAWLIYYRPDSVTQYSKDIAWKAQQRL

SEQ ID NO: 131370 - protein, 412 aa, unidentified
MLFVGDDWAEGHHDIEIVDDEGKVLVRRRLPEGLEGVTRLHALVAEQLPDDWIDRDPEQAAALVKVGIETDRGSWVGSLVAAGYEVFAINPLSVARYRERHSTSGAKSDAADAHLLAEIVRLDRAHHRPVAEDTDLGEAIKLTARTHQSLIWDRSRHVARLRSTLREYFPAALLAFEDLDAPDALELLARAPDPDQAARLSAAAIAASLNHAHRRRVEDRTKRLRSILHAPELQQPPVLQNAYAAVVTSEVAIITALNAQIDRLGAVVGEHFGRHRDAEIYASLPGLGVILAARILGEFGDAPGQYADAKARKNYAGTSPVTRASGTKKIVLARYARNRRLGRPAAMGVLCSMRGSPGAKAYYQQLRARKIGHQAALRQLANRLVGILHGCLKTHTTYDEHTAWAHILTATA

SEQ ID NO: 131371 - protein, 346 aa, unidentified
MLYAGLDLSRQRLDVHVLDEDGQTIEVTAVRPDADALRTLAAHVLRHGQEVSAAIESMTGARFVHDTLEFAGWDVEIADAAKVKGIAPLAAKTDKIDARVLAELARRELVPAIWLPDPTIRAERERARFRLHLVRHRTALKNRIHATLITFGHPVPVADLFGVAGRELLAGLALPEPWTGTLATSLRMVDELDRRIDACEAELRALGADHPSIPLLLTVPGVGWVLAYTIASEIGDIGRFASAKKLTGYTGLCPLVRQSGNRDVRGPLAKNGPKYLRWALIEAATHAARDAHYRERYERTKQRLGRQRGPKVARVDIARQLAEAIWHVLTKNEPFAPAGSTIVLVA

SEQ ID NO: 131372 - protein, 398 aa, unidentified
MTESSDYESVLVFIGVDVGKDTHHAVAINRSGKRLFDKALPNDENKLRSLISDLKQHGQILLVVDQPATIGALPVAVARSEGVLVGYLPGLAMRRIADLHAGEAKTDARDAAIIAEAARTLPHALRTLKLADEQIAELSMLCGFDDDLAAQTTQASNRIRGLLTQIHPAPERVLGPRLEHPAVLDLLQRYPSPEKLASLGEKKLAAQLCKLAPRLGKRLAADIAQALAEQTVVVPGTNAAAVVLPRLALQLITLRKQRDEVALEVEQRVLAHPLYPVLTSMPGVGVRTAARLLTEVACRAFASAAHLAAYAGLAPVTRRSGSSIRGEHPSRRGNKALKRALFLSAFAALRDPLSRAYYTRKMSQGKRHNQALIALARRRCDVLFAMMRDGTFYTPQGS

SEQ ID NO: 131373 - protein, 358 aa, unidentified
MRVIGVDLHARQQTIAMLDTDTGELVEKTLEHEGEKVREFYAALPDPVLVGIEATGSMQWFLKLMEELKIECRVGHPAKIRAAEPRKQKHDRRDANLLLKLLAENRFPSIWLPSTEQRDLRTLLRHRHQWVRMRTRVQNTLQGMALSNGLRRGHGLWSQAGQQALKALPLAPHTNQRRAALLTLHPRLQELIDELDRQVSEQARQRPQARRLMTHPGVGPVTALATEVFLGDPTRFADGKAVASYIGMIPSEHSSGRRQRLGALSKQGNPLLRYLWCEAAIHAVGQDPELQRFYRRKLVQKGLGKARIAAARKLGIRLWIMLRDQIDYKEFRRRGQTRQKSCGAHAGMPGSYSGPAVS

SEQ ID NO: 131374 - protein, 337 aa, unidentified
MKVTLIGIDLAKSIFQVCGVNRAGKCVFNRQVRRARLMEFLIQHSDATMAMEACSGSNYWGRELQKRGIKVMLIPPQHVKPFVKGNKNDRNDAFAITEAARRPHLKCVQPRTTTQTDMIQIHRVLDRLTRQRTALTNQIRGFLNEYGLVVARGKEKLLAAVPDLLEDAENGLTPSSRALYQELYEQWRQINETISRIDKRLKLQARADEAAQRLMQIKGVAEKISTATIAHAGNGHGYKNGRHFSANLGLVPKEHSSGGKQRLGGITKRGNQYLRRLLIQGAWSVVRNADKSDDRMSRWATQLIERRGKHKAVVAVANKMARIMWSMLYHQTEFRAN

SEQ ID NO: 131375 - protein, 357 aa, unidentified
MKYVGIDVHKKMCQAAILEEDGALLDEQRFPNTAEGIEEFAAKLTTFRDEVKAVVESTGNLWIQIHDRLETHGFDVALSNPGKTRLIAEAKVKTDKVDARTLAQLLRADMIPTCYVPGEELRSRRELLRHRLNLVKNRTMVKNRIHGLLDKHGLRMPEAAPFSRGNIEWLRGLSLNFMDDAILRSDLALLETVGEQVDAIEEKIAAIAAEERQARLLMTMTGVGYFTAMLILSEVGDIARFRSDKAFASWMGLTPSVRQSGERTRIGGVGPGNKRLRWALVECAQAAVRFDTRFRGLHERVSRRRGAGCATVAVAHEMARIMYFMLCRDEPYRGADGGLVERKLKGMSRRAMSGLRN

SEQ ID NO: 131376 - protein, 469 aa, unidentified
MPNMEVQDIHHRGEPWIVTSSTRVKILTNPVLPEMAPGPGTRPDRSSVVREGVCVVEVLHERCAGLDVSKTDVKVSVRVPSTRAGRYRHEIRTFGSMTADVLELRAYLIEQQVSQVVMESTGEYWKPFYYLLEDGPFEVLLVNPRHVKNLPGRKTDVSDAQWLSDLAAHGLVRGSFVPPPPIRVLRDLTRTQADLTRDRTRELNRLQGVLEDAGIKLTSVASDVNGVSSRLMLTAMVEGERDPVVLAELAQKRLRNKREQLARALVGRFTEHHEFLVGLHLRVIDQLTAAIDELTGKIEVQIEPFRRQAELLETISGVSHGVAVVIIAETGGDMTKFPTAHHLASWAGVCPGHNQSAKRVKHAKTRPGNSYLKGALGTAALSVARTKNTFMHSRFQRIKSHGSGLKAIVAVEHGILRSVWNVLTTDTEYQELGADYHQRRNPQAALRSITRQANNLGFTVRFDLIGSTN

SEQ ID NO: 131377 - protein, 475 aa, unidentified
MPADRDPRAALFYPPVKAWEVTAVSKAKPQVIDDEERERVHERVAAVDVAKDSGMVCTRLPHPSRPGARQSTVWTVRARMGAIRALGRQLARDGVEVVTLESTSDYWRIWFFVLEACGLAVQLVNAAQAKSLPGRPKTDKLDAVWLARLTEMGLLRASFVPPKAVRDLRDYTRMRTRLVQERTRCFQRLEKLLESALVKVSSVASKLTTVSAQDMIKAMIAGQRDPKVLASLARTAMKAKREELAEALDGMFDDHHGELAGMLLDHIGFLDQRIAALTARAAALAAAMPAAWGVDGDGTTGPGAGAGPDAAVLPAAARLAEIPGVSGDLARAIIAEIGLDMSRFPTAAHLVSWAGLCPSARQSGPRTRAGKKGQGNTWLRGTLGQAANGAARTQTFLGERYHRIARRRGKTKAQVAVARSILVIIWHLLKEPAARYTELGHGYYQARTDKDKKIKNHIRQIEALLGHPITVTEAG

SEQ ID NO: 131378 - protein, 356 aa, unidentified
MQNNFQSPESVILGVDTHLDIHVGAVISQAGKLLGTRIIQTNQIGYQELFDWAKSFGVLERAGIEGTGTYGAALTRFLIKNGIYVVEVNRPDRSKRRLEGKSDPLDAENAARTVLSGSSKAIPKMQSGACEALRIISVARRSAVKARTQAINQLRSLLVSAPQDVRDKLWKSKPHECVAACINCEVSEYSPLRIALYSTLRSLAKRWGALTEELNELDESLDKLTRKYASTLRSQFGVGPQTAATLLAVAGDNPERLKNEAALASLCGVNPLPASSGKTVRHRLNRGGSREANNALWAIALVRMRSDPRTRIYVDRRTGEGLSTKEILRCLKRYIVRELYPLILSDLTYANRPLLT

SEQ ID NO: 131379 - protein, 370 aa, unidentified
MGNRSMFVGLDVHKETIDVSIAEGQRDGEVRHYGVIASDLEPLDKVVRALRAPDRQLHFVYEAGPCGFGIYRHLTKRGEHCVVVSPSMIPKRSGDRVKTDRRDSLMLARLHRAGELRAIYVPDDTDEAMRDLVRAREDAVGVGTQAKYRLTAFLLRQGRRYPGREGWTLPYRRWLADLSFPSAAQHISLQEYRDAIDETERRIDRLTEQLRQLAPTWRWAPVVAALQALRGVSFVTAVALVAELGDLTRFRHPRELMAYLGLVPSEHSSGPSVRRGGMTKAGNPHVRRLLAEAAWAYQGIPRIGRQHAYRQEGLPKIVCDIAWKAQLRLTARFKRLVARGKAKPKVATAIARELTGFIWAIAREVAPAPR

SEQ ID NO: 131380 - protein, 407 aa, unidentified
MPDYDWYVGVDWGGERHQVAILDATGARVAEHQVAHSGAGRESLVEHLARLGADPGRVAVAIEVPRGPVVDTLLMRGYHVFALNPKQLDRFRDRYSVAGAKDDRREALVAASALRTDQLAFRQLQPDDPQVIRLRELSRTYDELLGEERRLANQLREQLWRYYPQALPHCPGADESWLWELLHEAPTPAHAQRFTRPALRALLARYRLRRITGDMLYETLQARSVTLTPGAAEAAAEHVELLLPRLRLVHEQRQQWERRMDALLDALGPPVEGRQEHRDVTILRSLPGVGRVVAATMLAEAWGLLAARDYQSLRAQNGVAPITQQSGKQRLVLMRRSCNHRLRTAVFHWARNSVRLDPRCRAQYQRLRQRHSQARALRSVADRLLSVLVAMLCSGTTYDVTRCPNAA

SEQ ID NO: 131381 - protein, 320 aa, unidentified
MMAQNDRVVVGIDVAKDKVDACIRTLSQLRTFESSAEGRRQLVAWLRRHKVGKAAMEASGGYERDWAKALREAGLEVRIVDPKRVRSFARSAGRLAKNDAIDAEMIAWFAETFGEAPAQAYDAARDKLVQIVNARQALLDVQTELQNRGEHAAPEVVQKMQARLLKKIALEVAKLEAAIAAMIKTTAHFTELSEIIESVPGLGRGTSAGLIAAMPELGQVSNKAAAALLGVAPYDDDSGKRRGERQIKGGRRKVRNLFYMACLGAATQHNPVLKAFYRRLIAKGKEKKVALVACMRKLIVILNIMIARGEKWDASRYAVS

SEQ ID NO: 131382 - protein, 352 aa, unidentified
MQHIIGCDVHTRNQVVAWIDEQTGEIKKRRLEPAGKEGREFYTQFPRGTVVGIEATFPAYWFERLLGELGHELWVGDAARIRASEVRYQKTDPGDAEGILDLLRTGRFPRIWVPSLQERDLRQWLVHRMKQVRARTQVKNQLQALAIRQGVCRGRQLWSAKGRAELEKLALLPWAARRRQELLDLLDRLDEQVRELDRAVEEAGREREEVALRRTHPGVGMVGALAFVLSVGPIERFLNSRKRVSYGGLNPRESSRGGRRRLGSISKQGNTMMRWLLVEAAQTAARLDPQLRRIYQRLKKQKGSGVAKVAIARRLAVRLFWMLRTRHNYAQLVHMSGSPSSAVVPPQGGPKL

SEQ ID NO: 131383 - protein, 375 aa, unidentified
MKNKTGTVSDNKQVQARVRSQSKARVKLGLDMHYRQVTVAMQEEDGAIKALGKMSHDGFSNWVEQKLQAGFELYSCYEAGASGYWLHRDLEGLGVKNLVVAPKAMGQDRRQKTDRRDSAELVDALDRYLRGNGKALNPVAIPSVEVEEKRALIRYHRQIMADRNRCEARGKGLLCAQGIEVRGKWWQSQSWQELKTHPRLKSWMQAQLEGWRKKRLALETEQQSLRRQIEALAPALLPKGVGAYSAVALEYELKGLARFQRARALSSYTGLCPGIHSSDGRGREGSINRCGNAAVRWNLVEMVWRLLKWQPQYEPVRQLARGLLKSKRARKRLAVKAARQLAIDLWRLHTGRVTAKELGLIMQPTTQKPTSKAQY

SEQ ID NO: 131384 - protein, 347 aa, unidentified
MNFYNNTHPHYCGIDLHARVLYVCIIDQEGNTCVHQEIPTDPDKLRQLLEPYIGNIVVGVECMHCWYWVSDFCEDIGVDFILGHALYMKAIHGGKAKNDRIDSYKIANLMRGGNFPLAYVYPKAMRATRDLLRRRMKIVRHGGDLKGHVANTTSQYNLPPNKVNLKNKDAREQLKTTFPDEVVQRNIDLDMAILDCYAKELSKIEWYIQQQAKQHKPVHFHLLKSVWGIGPILALTIIYEIGDINRFESVQKFASYARLVKCKAESAGKSYGTQGNKIGNAHLKWAFSEAAVLYLRGNKKAQNYLLKLQKRMSKAKALSTLAHKLGRCVYFMLKNETVFDESKFIKG

SEQ ID NO: 131385 - protein, 457 aa, unidentified
MKRKISKISSKKEVVMPVVNPHAAGIDVGSRSHFVAIGQGTDDVREFGVYTDSLHSLCQYLQGEGITSVALESTGGYWQRLFLMLQSYGLNPILVSGKFTQNVQGKKTDVQDCQWIQRMHMLGLLPNSYQPNYFTEQVRQYARHRQGLLENGASYILKMQQALRHMNIRLDVAIADVVGQSGQAIIKAILAGQQDAKYLASLANFRIRKSKEELERALTGIFRPEYIFELKQCFEMYEFLHQKIAECDAQIAALIDQHLEERECEDGVQRKQYDKKPPKRNKNDPRMPIQQFAFQLSDGVDLSEIDGVSASTLMTLISEIGLDVSQFPSAKHFASWLRLSPNNKVSGGKVISSHTKKRKNRLGQALQRVANVIGSNYKEGALHQFFMRIKFKKGHQQAIVATARKVAVIIWNMLSNKEAFNYETDQSYADKIKQQTIKNMQRKIKKMGIRAEDLISN

SEQ ID NO: 131386 - protein, 353 aa, unidentified
MRKMQDFVVKGKRVFVGLEDSKRTWKLCVRCEGMIVHETSMPTEYDNLRGYFSKRYPGCEIRVIYEAGFGGFWLHDLLESDGIDCIVTPAHMVTQEKVNKVKTDKIDARRLAVNLENGDYASCHVPDRERREDRQISRTLNQIQRDIVRTKNRIRRFLDFHGLNGDLPAGVWRPSHYLILKELELNEPLQGCLDIYLELLDKFVAVRLRLLAQMKSLCDKERYQQAVSLKQSCPGVGWLSAIRFTLEWGMLSRFPDGKHLASYTGLTSGEYSTGETIHRGRITGQGNAQVRAWLIQCAWRAVRHDPVLLDKFNRVWRNSGSKKKAIVAVARKLAVRMRALELASHQYCVGVIE

SEQ ID NO: 131387 - protein, 398 aa, unidentified
MLYGGIAMLICGIDIGKNHHEASVIDQEGRLLAKSLRFANTTSGAESLLEYIVRCNADKDVVVIGMEATGHYWLSVYCFLFDAGFQVNVINPIQSDAIRNLFLRKTKNDAKDSFLIAETIRIGRYSKTEMADEDILSMRQLCRHRMDLVDYIADQKRKIIGVMDRVFPEYQYFFSDMFGKTSTELLSKAVTPEELLEIPTEELCTLLKSNSRGRFGEAKVEELRQAAKTSFGITVGTAAFTMQLRQLLEMIELLENQLVELEAEIEQYLMKLNTPITTCPGVGKVLGAVILGEIGDISRFSEPKKLVAFVGIDPSVKQSGEFTGTQNKMSKRGSPHLRRAIWLAANVAAFHDPVLSAFYQKKRTEGKHHYTAVGAVARKLTFIIFAVLRDNKPYVPNC

SEQ ID NO: 131388 - protein, 331 aa, unidentified
MFHYIGIDVSKQTLHLFDGQREHSFPNEPQLAAFDHFLTTHQPTDGEWVIIFEPTGAYSSYLRSYCARKGLKTHILHPLQSSYFAKAQGYRSKTDPIDARMLYATHRMLEPSGFQVPQVSVKVRQLGAWLSTYALLVKTEIQWRNHQQAGHREESADLALLGFLEEQEQVLKEKKASLLKTILQWLRQDEDLVQAMDHLCSIPGVGTITALHLLHLFMKYPVSDRNQLTALAGLDPVVKSSGTSLHQQASISKRGSHLLRRVLYCAAMTGVQHHPAWKLKYQGMVERGKVKNIGIVTIMRKILLHAYAVYREQRYYEDRSQAHSQKENAMA

SEQ ID NO: 131389 - protein, 342 aa, unidentified
MEKDKQILKQNVGVDLDKDKFEAAFFVIHADMDTSVVATRKFENREKGIADFIAWQKKHSCGSLPIHVTMEATGVYYELLAYRLVEGQFPVHVMLPNKAKKFAQSLDVKSKTDKLDAKALGKMGVERKLREWKPASESLRELRFLTRERESLINEKTRAINTLHALEHSHEAPGRSIARYEAQIDFFKDRIKEVETDIHSLIQEDEALGPKVQRIVTTPGLNINTVAVLVAETNGFAAIKNIKQLVSFAGYDPRIQESGQWKGHSKISKQGNSHIRRALYFPALSLKQHSNWHGKFYERLKARKEKGMVAAVALQRKLLILAYVLWKNDDVFHPQHAEGLPQ

SEQ ID NO: 131390 - protein, 458 aa, unidentified
MGPEVLEIDADGDGEQVVERVAAVDVAKASGMLCTRVPHASVAGRRVTRVWEVRSTTNAIIALADQLVRERIERVVVESTSDYWRPFVYLFEARGLCVWLVNARDVKQVPGRPKTDKLDAVWLAKLNERGMLRRSFVPPAEIRRLRDYTRLRIDLVEDRSRQVQRLEKLLEDALIKLSTVATDIMGVSGRAMIDALIAGERDPHVLAGLARGRMRVKRAALVEALTGRFDDHHAELASMLLDQIDALTAKSEALTLRIDQLIAEIASAQAPVVDPASGSGRDGGGPSDPAGVSLSAVARLDEITGVGLHAAHVIIAEVGLDMSQFPTAGHLASWAKVCPRTIQSGPKRRSGRTGKGNPYLKRVLGEAAAAAAKTDTFLGERYRRLVRRRGKLTALVAVERSILVIVWHLLADPTARYADLGADFYASRINKDRKTRNLVYQLQALGHHVTLQPIAMAA

SEQ ID NO: 131391 - protein, 430 aa, unidentified
MEVIYPKACGVDVHKSFIVAVICDSTSVKPQYLRKRFSTFNNSLIEFRNWLLANDCQNVCMESTGKYYVPVYNALEGHISNVVVANPKWVRCIKGEKDDNKDAKWIADLFKLGIVRSSFIPNKDIRILRELTRYLYKLTNMRTSEKNRFTNALTVGNCKLDMVFSDIFGKTSSAIINTILSQNEYNDEDILKNIDKHCKSSNEVILNSICGISWEASQKQRMNVIQEHIDYLDKSIKTIREIIDSIVAPYESDINLLCSIPGIDRKSAITIISEIGTDMSQFSSHYRLASWAGLAPGCNESAGKKKSVKISRAGVYLKPALVEVAHCAVKDKSNDYYAKKFNLISKRRGKKRAYIAIARKILVAIYHMLSTGELFNPSDASKVETTDKDKIKFTKNNFIQSTKQLLSLGLTIDELQEFITSKISESTPVI

SEQ ID NO: 131392 - protein, 341 aa, unidentified
MEEYIGLDVSMKETAVSIRRAGERIWRGKCASDPSIVAELIRKRAPSVKRVVFETGPLSVWFYHSLRIEGLPAICIDARHAKAALDMATNKTDANDADGLAQLAEVGFFREVRVKGFDSMLTRTLVAARTRLVRITTELSNQIRGVMKTFGLLVPAGKGSTFEKNVRNLLADRDRLASIVLPMLEAWRGIRIRAAELGRQLVRDARQSRACRILMTIPGIGAITATSFTTAIEEPDNFRKSRSVGAWIGLTTRRYQSGEVDYDGHISRRGDRPLRGLLYEAAAVILTRCSTHSTLRTWGLQLRERIGFKRAAVAVARKLAVIMHTMLKTGQLFNPNAGAAA

SEQ ID NO: 131393 - protein, 331 aa, unidentified
MGQPTAAASVGIDVAKATLDACLLLPGGQARAAAFANDPAGHAALIAWADRHAGGLPAHFCLEATGPYSDPPATALSDAGRLVSVANPARVKAHATAAGQGNKTDPADARAVAEFARDRRPPAWRPPAPEVRELQALVRRRDDLREMAAREKARLDSPVLTRAARKSVERAVKFLGREADRVQAAADDLIAAAPALKADRDLLASIPGVGAQTASTVLAELPPVERLPSAQAAAAYAGLAPREFRSGVSVRRRTRLSKAGNARLRKALYLPTQTAVRFNPLLKGFFERLVKAGKPKMAAVGACMRKLVMLCYGVLKNRAPFDPAWASKKAP

SEQ ID NO: 131394 - protein, 353 aa, unidentified
MTSLTDLREVVDVVIGVDTHVHTHCAAVVDTATGGVLDEITVEATAEGYAELVEFANNHATLRAWAIEGTGGHGAGLSRHLLGMSEIVVELDRPKRAARRNGAKSDPLDAIRAAREAMARPRLGTPRRGGERQALSVLLAARRSAINASTEAQQQVFSLVIAAPEPIRARFRGQKLAVMLNTAASLRVHSSWDVETTSTVVALRTLARRAHAMLKEARELQKAILAIIRSWRPDLLEEFGVGPIVAATVLCAWSHPGRIHSEAAFAMLAGVAPIPANSGQVTTRYRLNRYGDRNLNTALHTVVQVRIQYQQATRDYIGRRTAEGKTSREIKRCLARYVARDLYRLLESGAATA

SEQ ID NO: 131395 - protein, 320 aa, unidentified
MNEHGEVVRNSFSFTNDREGFNTLLNVLNNLDPSQEKRIGFESTGHYGSNLKLFLETNGYSFMEFNPLLVNRFFKSESLRKTKTDKVDAQKIALYLYSRDYKPNPNSSYHLQCLKSLTRLRESLVDERSLQLVRITNIMDKMFPEFKPLFGKQGLKAATAMYLLENYASPSRMANLTLASYHKMVSKLKRTISYAKFCKIKELAKSTVGNENEILSFELEVCLELFKELNLKVLQLDNKITFELSLLNTHIPSIKGIGDVLAAGILAEYESIDKFDNPAQLAAFAGIEPSENQSGTHEGGGRMVKHGSPPSQKISHSGCE

SEQ ID NO: 131396 - protein, 374 aa, unidentified
MIYVGIDVAKDKHDCFITNSNGEVLYKPFTISNNREGFDTLFQRIESVSDDFTKVKVGLEATGHYSYNLLGFLLDKGLPTYVINPLHTNLYRKSLSLRKTKTDKVDSRTIATMIMSDMNLKSYSDISYYNEELKSLTRYRFDKVKERAKLKTSVSRLVNILFPELEKLVPSLHLSSVYALLSEFPGAAQIAASHLTKLSNLLSQASKGRYGKETAILFRETARSSIGSVMPAKSLELKHTIKLIQELTAEIDEIEAAIKQIMDEEIHSPILTIPGISYRMGAMILAEIGDFNRFDSADQILAYAGMSPSTYQSGQLNNCYSHMEKRGSRYLRYALYNATKYVCQWDESFSAYLAKKRSEGKHYNVALSLSLIHI

SEQ ID NO: 131397 - protein, 401 aa, unidentified
MTKVLYVGLDVHKESIVAATAVAGDNPAELYGKIGGTLEALDKLIKKLSKPDLELRFVYEAGPCGYVIYRHLTNREYHCQVIAPSLIPTKASDRVKTDRRDAQQLARLFRAGELTAIYVPDEEDEAVRDLVRARDRAMMDQCKGRLRLKAFLLRLGHRYLGKGNWSDAHLRYLSSLRFAHAGQQIAFQEYLEAVTVASERLERLSKAMEAALPSWKREAVVRALMSMRGVALLSAMTLVAEAGDMTRFDSPTQLMSYFGLTPSEYSSGEKRHQGGITKAGNGACRRALVEAAHHYRVAPRVTPAIQKRQEGQSHEVRAIALKAQQRLNGRFRLLTGRRKKSVVIIAALARELCGFVWAIACQVNAPERLKTQAAAPSAAASQKAPAKARVYVLDHSKNYKN

SEQ ID NO: 131398 - protein, 318 aa, unidentified
MQISGCVIGVDVGKFELQVAGHEKSIVSGVLPNNRSSIVGWLKRLPAGSVIGMEATGGYQELLARLAHERGFVVYVLNPTHVHHYAISLGNRGKTDRLDAEVIAQYIAQRYTKLHPYEPISPELQQVRALQALRTTVVRVSTSLRLSAQRHGCASVHQKKALAGLSSWAEQLERELIAKIKAQSEWAKIYGLLTGICGIGPINGVALTALFTRVHFTSSDAVVAFCGLDPRPKESGRKVGRRRLSKQGDKAARSLLYNAASSAVRTPHFKDYYAALRARGLASTAALVVIARKLLRIAYGVWRTGRAFDPDRLNLKTA

SEQ ID NO: 131399 - protein, 356 aa, unidentified
MSKYIGFDIDCKKVVACVVEKGKRDIYETMGPDVGSMRKFLLAQKQSGERVELAFEISGQAGFIYDSLLDCVDEVKVVNPSKMTWIYRTAKKNDRIDARKMAVLMSIGELPCVYMPSKEVRQWRQTILHRRTIVNKVVQAKNRIRASLKSQGHSKPEHGGGWWKKANRFWMRSLCQGSLDVDGLWRLGLCNLLDELQLLEVQLKRVSYYLDGYLSGKPGGKLLMSIRGVGPRTAEAVLAYTDDVSRFGNYKQYCSYFGVTPKLDESGLTRRLGHISKQGPSVVRWLICEASWKAIRYSKGLRSFYERVMAGQKGRKKIAIVAVSRKLLSIMRAMLLTGELFNEDMINRCDDLTSAA

SEQ ID NO: 131400 - protein, 374 aa, unidentified
MLSARPAGACRPPPDQQKELAITTIAHPERPRVTVGVDTHLDVHVAHAKDQLGRRMETVSIPTTPAGYQDLLAWARGLGEVEAWGVEGTGCYGAALTRFLGDQGQVVLEVNRPDRQARRRRGKSDPVDAEAAARAVQAGEVTTLPKAGTATVEMIRSLRVARQTAIKARTQAINALKALLVTAPAQLREQLRGRSAAMLVRQAAALEPGPLVTPTAAAKLALRCLACRYQALHAEVATLDAELARLVAKAAPGLVARFGVGPDSAGALLVAAGDNPGRLRSDACFSMLCGSSPIEASSGKTRRHRLNRGGDRQANAALYRIVVVRLRWHQPTKDYMARRLTEGKTTKEIIRCLKRYVAREMFTVLNQTVPTPAT

SEQ ID NO: 131401 - protein, 343 aa, unidentified
MNSFIKAGLGIDIGSETNFARLYLTDAKTGHPKRVGKRKFPNTSKGHLDLFNWAKKKTPTGVKLTITMEATGVYHKPLAYFLTESEMPVSIVLPNKIKSFSASFNEHSKTDWIDADMIARYAHDRQPKAWSPSAPSMREVKKLSRERQQVIDDITIAKNRLHAERSSGKPMNSILERYRKHIELLEAHEMEVMREIDRLCQADEKLGKMVLLLNTIYGVNTVTSVSILAETDGFRLFTKRSQLVKYAGYDIVEKESGTSVRGKTRISKRGNSHIRKVLHFPAMTAIRQEGIFLEIYERVFKQSKCKMKALVAVQRKLLITMYALVKNGSEYQVNYHKERQLVA

SEQ ID NO: 131402 - protein, 323 aa, unidentified
MQGKVSFQEDAMPVVYAGVDVSKEWLDVHLHPLGESRRFSNDKTGIGQLKRLLARYRPERIVMEATGKFHRPAHRSLWHDGFAVAVIDPLRARMFARACGYLAKTDRLDARFLALLAESLRPPADAPPSPHIEALQELVNARSAAKGDLAAQQNRSKTATTAFLRSELNRLVRKLEQHIDRLDKEIERYVGKDPQLRRKAEILTSIPGIGRVTALALMAGMDELGSCSGKQAAMLAGLAPIANDSGARTGRRSIRAGGPAPRRALYMAALSACRYNPALARFAETLKAAGKPAKVVLVAIMRKLLVLANCLLSQDRLWAPNPP

SEQ ID NO: 131403 - protein, 491 aa, unidentified
MPQLNRDTQLNHPARPMGTASHPPQKKKKSLRLIRRKDPTEGLTITHPNAAGIDVGGDTHWVALPPDRAPQTVRTFGCFTSQLEELADWLIQHGIDTVVMESTGVYWVVLYEVLEARGLKVYLINARLAKKLLSRKTDHLDCQWLQRLHAYGLLNNSFRAPEEIRVLRSYLRLRERATTAASQAVQHMQKALVEMNVQLATVISDITGETGLRIIDAILVGQRDPVALAQLKDPRIKASRDTIAQSLQGHWKQEHLLALEQARITWDHFQEQSAQCQERVEQHLRQLNAAKQPQAQTNPPESESSTNPQATARQLPTPAQPFDLRAQLKQLAGVDLCQINGIKERTAQVVLSEIGTDMSAWATEKHFSSWLALCPEHEISGGKILKRGRKRQVHQRASQALRMAVYGLERSDSAHGAKYRRLKRKLGAPKAIVAMAHHLARLVYRMLKYGQEYVDKGAAWYEARYQAQQRKWLEKKAAEMNLKLVPIEEVA

SEQ ID NO: 131404 - protein, 320 aa, unidentified
MLSFGGIDVSKDRLDITVLPDEQCSSVSNDAAGWAELIEQLRGSSITAIGVEASGGYERGVVRALLAAGMSVRQINPFKLRQFAKASGILAKNDRLDARMIASFVAIMPTRPAQQQAPMIELLAAMLTVRRQLSDHKVAAENVSRLLEGAMLQRLSRRRIAGLTADIDLLDQRLVEIVTADPALAHRFRLLTSMPGVGAVLACTLIALLPELGQMSRKQVAALVGLAPYDFDSGKLKGRRCIWGGRARVRHVLYMAAMSASNWNPGLKAFHDRLEVAGKKPKVTIVAVMRKMITTLNAMVRDNVVWADRLSSRHSVPTAR

SEQ ID NO: 131405 - protein, 415 aa, unidentified
MSKDEEFVALMSLDWADKGHRGCIQTRDLVEVEDFQLEQKASAIQEWAGQLRSRFRGGKIAVAVEQKRGPLIYALMKYEMFVIFPLNTTAVKNYRKALRASGAKDDPSDARLQLLFLRNHLDQLRRIEPDSTMTRKLRMLVEGRRKMVDASTALSNQITALLKEYYPTALELIGQLKTPLACDLLSKWPCLQAIKSVKAEDLKDFYYKRNCRNKQAVELRVKLVSEALPLIDEKGIAATYSFVLRSLVTQLQVLLKQVKKYDCRIQKTFNHHRDASLYRSLPAAGPALEPRLAVVFGEDRNKFDNAAAIANLMGVSPVTISSGKYRFVAFRMSAPKFARQSLVEFAELSIRQSTWALAYYQKCRNEGKSHNAAVRALAYKWIRIIYRCWKNRLPYDESIYLAALKRKNVPWLQAS

SEQ ID NO: 131406 - protein, 366 aa, unidentified
MVSVSHLAPIHLGLDVHKDTISVGVLRPDQQVPDVDRIAHDEASVRRLLARFPDRARLRACYEAGPTGFELARLLHRMDVRCEVIAPSLIPRAPGDKVKTDRRDCRRLARLHRAGELVAIRIPTVGEEAVRDLCRTRADMVEDLTRARNRLGKFLLRHGRPWRGGSTRTHAYQAWLRSQRFDQPAMTQTFHHYLAVVEVRNQALDAVEADLVGWCGRPPFDWQVVRLAAYRGITRLGALTLAAEVADWRRFAHASQFMGFCGLVPSEYSSGASVHRGRLTKAGNAHLRAQLVESAWSYQHRPSVGREIARRQQGLDPAVIARAWAAQQRLCARFRTLAARKHTKSIVAAAIARELAGFLWAEMTAA

SEQ ID NO: 131407 - protein, 309 aa, unidentified
MMISSDVIGIDVSKHDLDVFDGANSQGGRLANDAEAIGPWVSRLEGRFVVFEATGAYDEALRRALAAAGVRYARVNPTKARSFAKAAGFLAKTDQVDARMLAAMGSALRPRPAEPTSPALPRLVRLHKRHDQLVADRKRERTRRREATDAEQLADFDRHLAFLEDEIADVETRIDGLIAAEPDLKRTAKLLVSIPGVGKRTAACLLALLPELGQRSPKTIAALAGLAPINQDSGLKRGQRSIRGGRKRVRDGLYMAALCLTRLKKTTLGNTYQHLRNLGKPAKLAQIAVARKLLTIANAVVRDQLPYAA

SEQ ID NO: 131408 - protein, 344 aa, unidentified
MWIIGCDFHPSWQQVAWCNSETGETGEQRLEHSNGEAERWYGQLPVGSRIGLEATGNSQWFVELLQRLGHEVWIGDAAQIRASYVRKQKTDKRDAAHILKLLLEGRFPRLWRPSPEQRDIRQLLIHRHKLVEIRTRVKNGLQHLAMNRGMQKKRQLWSEAGQRALRELAMPGWAGCRRQDLLETLAYLDRKIAPLDRAAEETAQRDKMALLLKTQPGVGPITALAFVVTIGEASRFPRGKQVASYLGLIPREHSSGGKQRLGGISKQGNRFLRQLLVEAAQSAVRYDDSLRRPYLYRCHRKPKGVAKVAAARQLAVRLYWMLRTMTPYPEIVRKRTVVAVWTEV

SEQ ID NO: 131409 - protein, 438 aa, unidentified
MEMKVKNLHAAGIDVGSKSHFVAVGQGDDEIKEFGVSHSSHQEIICYLRYFGIETVAMESTGNYWQCLSLALTQAGFKVLLVPGTQTKAFRKTDVKDARQLQLLHSLGGLSSCYIPDEFTSKVRELTRHRKSMIQECSKHINKMQKCLRLMNIRLDVVLSDVVGVSGLKIIQAILQGERDPHKLAALANRRVRKTKEQIADALVGNFSQEHLYELKDCFEIYEFIQTKIQDVDNELSRYYTEYQGEIQTNEEVQLAKKQLKGKNQPKFSVQQIAYKMYGVDISAINGVSVNTILTFMSEVGTSIYKFPDAKSFTSWLCLCPNNKISGGKKLSGRTPKGKNTLALALRDAANVIGNQKQGYLSSFFKKIGLKKGRFTAITATARKLAVIIYNMITKKEEYSEQKNEMYRNNLREKQLAKAIKMLKNNNFQVVDFEGVVV

SEQ ID NO: 131410 - protein, 425 aa, unidentified
MLKDTDDQEEIITRVAALDIGKAELVACVRVPSDTMPGKRMQEVSTHTTMTRSLLALADHLRCLGVTRVVMEATSDYWKPPFYLFEAAGFETWLVNAKDVKHLPGRPKTDKLDAVWLCKVAERQMLRPSFVPPPQIRRLRDLTRYRVDLVNACTAEKNRAEKLLEDACIKLSSVASELFSVSGRDMMRALTGGQRDPKVLAQLARSRMRGKISLLEEAFVGHFSDHHGFLLNKMLTRVEAIEADITDVETHIEAQIAPFARAVERLDEIPGVGRATAHTIIAEIGLDMSRFPTPAHLASWASFTPIAKESAGKKKGKNSTGHGNSYLARSLGEAAVAASKTRTFLGERYRRIARRRGAKKAIVAVGRSILVIVWHLLSDPDARYRDLGADFYDNRINPERSKRNHVRQLEALGYTVTLNPIPAAA

SEQ ID NO: 131411 - protein, 408 aa, unidentified
MTVVGIDVSKGKSMVAAMKPGGELVAAPYEVRHSDIELSHLALDVLCMEPDTRVVMEATGRYHEPVAALLHSEGIFVSILNPLLIKQSGAGSLRKVKSDPKDALKIAKYGLDNWSTLREYTPMEAIRQQLKLCARQCDLYNKNIVMLTNNLISLSDKTFPGVNELFSSPEKADGHLKWVDFYRSFWHCDCINRMSPDAFEERYKKWCKRKGYHFSTDAADALYAASCGLYTTLPRDNNAKLLVTVATDQLIALRENRSKLETEMLNLCKQLPEYETVMDMYGVGKSTGPHLMAELGDIRRFPHRSSIVAFAGVDPGVVGSGKMQLSSVATSKRGSPQLRKALFQVVSTYVKCKPENEAVYQFYAKKRDEGKPFFVCTTAAANKFLRIYYARVKECLNAAESATQVEEG

SEQ ID NO: 131412 - protein, 421 aa, unidentified
MPNIEIGVDSMVKENFIYVGIDLHKETHTAVMIDCYNQKLGEITFPNRPAAFPKLVTKVKKCNTDGKEVVYGLENAYGYGRALAVWLIDKGYLVKDVNTAISHRQAKHRGAMYRKSDSDDAKAIALATLNMLDKLPDACPNDAYWSLGQLVHRRDNIMKQRTRLVNQLHEQLCIAYPSYKQFFNDISRPTALYFWEHYPSRKYLKGKSVEDLRAELVPVSHNKCSTKTREKILDAVASDKVKNIDYQDARDMVTLSIVSDLQHYDSQLAEVDKMLEQMYKMLGCTLTTIPGVNVITAVKILAEIGDIKRFANANKLAQFAGIAPLHLSFSGKGKDVATKQGNRRLQATIYFLAIQMVQVSSKGTPRNPVVRAYYEKRKAEGKTSQQALICISRRLISIIYGMLKHGTEYRMPVVESAGENR

SEQ ID NO: 131413 - protein, 453 aa, unidentified
MFKTSQQITRIHGCVLERVWENVPTRVLASAHIGPGYNMTAQRNKVCGVDIHKKFLIATILTRDGTKLQKRFETDIDNLLNFRDWVIEENCDCVAIESTGVYWYPVHAVLENKVELILANAHQIKHTPGRKTDALDSEWIAEVALNNQIDPSRILPKEDRELRRLTRTRESLVKIRSQMKNQVHQGLESCSIKLSSVLSDSFGKSGRYILDGLIKGNNIDEVIAGIPSKRGRNNGDQIRAAIKTGLDQIQVFLIRSHLDTIDCLTQKLDEIDLEIKQRISGRKEDLKIAMSVPGIGFTAATTILAEIGNYRDFSSPDKLAAWCGIVPSVYQSADKLINGSITKQGSKHIRWILVQVAQAATKKKGSKLRKFFLRVKARKGHNVAVVALARKILCILYHLLMNQEMYQEGGVEKSRTPRLDWSSSTTNKMSLKTMIEIIAKAGYEVTKIERDGG

SEQ ID NO: 131414 - protein, 323 aa, unidentified
MDAEGTIRSNDRIPSTVEDLDAFLDGFEDASFVLESTGIWEFVYETIERHGFEAVLAHPLKVRAIAEAKVKTDKVDARILAHLLRADLVPRSYIPSKDMRDLRQLVRQRAYLVQRSTSFKNRIHAELLRRGIRRPKELVKPFTQKSTHWMRSLAIPTVNSSLDCLEAIQTQVEQLNEQLLQEFDRRREAQLIATIPGIGFYGALLIWVEIADVHRFPDPEHLCSYAGLTPTVSQSASKSHYGGVSKEGSKHLRWILTESALIHVWNCPDSRLSRFHARVARRRGKQKATSATARKLLHIIYWMLIKDEEYHGQGFNPELKPAA

SEQ ID NO: 131415 - protein, 339 aa, unidentified
MGFYSAFDLHSNNAYLGIIDEDGKRVFRRKLQNDEGLMVKMLNPFKKDIEGIVVESTFNWYWAVDLLMEEGYKVHLANPSKIQKYSGLKYVDDEDDAFWLAEMLRLGILPEGYIYPKADRPIRDLLRKRGHLVKLRTSLIVSLQNIISRSLGGKMKTSDIKVLAEDRVTPLLAYNEDLALAGKVSKETIDALTRQIKAIEGAVEKKIDLSKPYHHLLSMPGVGRILALTIMLETGPIGRFQEVGNYASYCRKVPSSWRSNDKKKGKGNKKNGNKYLAWAYSEASELARRFDDHARTYFDRKRKRTNTPIAHSALAHKLARAAYYIMRDGVPFMPEKTFG

SEQ ID NO: 131416 - protein, 423 aa, unidentified
MNYKQNEKINQVKESTLVVGIDIGSTTQYARAFDWRGIELGKVFTFSNSREGFESFKAWMQHLQDKYRKSDVIVGIEPTGHYWFDLGAYLEDEGILLVMVNPYAVKQTKELDDNSQSKNDRKDPKVIAKLVTEGRYSAPYTPDGVYADLRIMVANRKRLIREMTQIKNRFARWFAIYFPEYTDVFGDYEAQSSMLLLKKTCTPEAIVELGAEKINQIWRDAKLRAVGMKRATTLCETAKRSIGLKKGSSAAQYEMKLLLEDYEYKKAQLDAVMEEIEKLCRKIPESEQMLAIKGIGVITVAGFLAEVGDVRRFESPRQIQKLAGLSLRENSSGKHKGQTTISKRGRSKLRAVLFNAAIPLIAKNPEFKSLHEYYTTRANNPLKKKQSVIAISCKLIRVFYAILAKGVTYDAQKLISDIHRQPQ

SEQ ID NO: 131417 - protein, 411 aa, unidentified
MHNRQNYLYVGVDLHKEHHTAVIINCWQEKLGEIQFDNKPSAFSKFLLEVETYVSDGLSVVFGLEDVGGYGRALAKYLVDHEQVVKEVNTALSFLERKSQVMIHKNDSWDAECVARILINKFNQLPDAKPNDLLWSIQQLVSRRNALVKAQSSLKNQLHIQLNHHYPSYKKFFSELDGKTALAFWEQYPSPSCLEGANIKQLTAFLLDVSNNTCSVKKASEILKLVKEDGQTMKEYQETRDFLVRSIVRDIEFKKKEMKYIERELKQLVNLLDYQLETMPGIELVTASALIAEIGDVRRFPNANKLARFAGIAPVYFGSGGKGKTHKSKQGNRALHALFYNLAVQQVQVAKGSKTPRNPVFHAYYQKKLKEGKTKGQALVCIMRRLVNIIYGMMKYKTAYELPVVEGKEVV

SEQ ID NO: 131418 - protein, 410 aa, unidentified
MEVLVSRGCGLDVHQATVVACLLTGAPGALPRKQVKTFSAMTGALIELRDWLKSEDCTTVAMEATGVYWKPVYNILEGHFELIVANARHIKAVPGRKTDIKDAAWIADLLRHGLLQPSYVPPPELRELRSLLRYRVKLVNARSAERNRVSKLLESANIKLSSVASDVFGVSGRLMLDALKRGQATPEEMAELAKGRLRSKLPELKLALDGRFEAHHRQLLSIQLDRLDRFDRDLKQMDAKLEAKLKPYARQMELLDGIPGIDWVVAATVIAEMGIKMSQWPTVGHLASWAGLCPGQNQSAGKRGKSKIRPGNPYLRSALVEAALAVTREKDCYFREKYYRLKARRGHKRAIVAVAHKILIAIYYVLSSDTPYQELGCDYLDRLEPERLKLNLVRRLERLGFQVKLEPKRA

SEQ ID NO: 131419 - protein, 394 aa, unidentified
MKLVGIDVGKNSHHFCVMDKETGEFNVAPSSFSNNKEGFDFLINSLKPYSKKSILIGMEDTGHYHVALLKFLLSNGYTVALINPKTTDLTRKMEGGITKNDKLDTITICDVLDTPERKKQYRITKVDRFDLYEQRQLTRHHHNLKEELNVYCNRLQKSIDLVFPEFNTLFSSKYGIVYMNLLKTFGSAEAIASTDIRTIRKFFEIKGKGNRISLTPEKLKECAKNSIGISSEVETIQIKHLVSQITLIKEQIAEIDKKIEEFSIPNNSPILSIPGISHFSGTSILAELGDIGNYSKPSQIIKFAGVAPYHYESSQYNAQHTAITKKGSKYLRKTLYQIILTVINNNPVFKKYYLLKISQGKGHRCAQGHCIRKLLRIIYHLLETGQSFDPALLR

SEQ ID NO: 131420 - protein, 445 aa, unidentified
MRRCIGLDVHREFAQVAIWEAGVVRQAGRIQTTPEALREFAESLCATDEVVLEATGNTYAIARLLERQVGRVVISNPQKTRAIAEAKVKTDKVDAAVLAQLLAAGFLPSVWLPDEATFALRRQVTRRAHIVRQRTRLKNQVQSILHRNLVPRCPAADLFGRKGRAWLADQDLPRDEQQAVGALLRQLDFHGQELRIVDAELGRVGLEREEVRRLLTIPGVDATVALAIVAAVGDFGRFSSPQRLVSYLGLNPRVRQSGGHPAQHGRITKQGRAHARGMLVEAAWAAAKTPGPLRAFYERVRGRRGMQVAVVATARKLATLCWHLVTTGQDYAFARPSLTDKKLRSLELRAGLPARRGQKGNAAAYSLKEVRRRERTLAEQAELAYRQLVAGWQPKPPAKQPPGRGVAATTGARRSSPQGGKAARQGFQPQDPALRSGVDHAPHRA

SEQ ID NO: 131421 - protein, 350 aa, unidentified
MNVNQYIGFDVHKKSVSYCVKIADGAIVEEGKLRATHEALRRWAEERREPWRGAMEATLFSGWIYDALKPYAAELQMGHPAMMKAIGASKKKNDKLDARKIADLVRCDLLPACYVAPAEIRELRRLLRYRNLVVRQAVRMKNRMSGLLMEVGAEYNKQQLHGKQYFMELLDIVEEVPESVKDMLRLSRGAMEMFETTQQQLLVRLKKDQLLSKRVTLLESIRGVGEVTALTWALEVGDPRRFSSVAHAVSYCGLTSALVSSADKQQRGPISKQRNAHLQTVLIEAAKLAPRWNPQLAAVHEREVQRGNRNRATLAVARKLAAYLLAVDKSGQAFQVRNQPAAAMAEEKVA

SEQ ID NO: 131422 - protein, 342 aa, unidentified
MDEIKLVGVDIGKTAFHVVAVDASGAVQLKRRCSRAQLLALMGKLTECVVAMEACCGAHHLARQIMPLGHDVRLIAPQFVKPFLKSNKNDYLDAEAIAEAAQRPTMRFVPVKTVEQLDLQALHRVRERLVGKRTAVINQLRSFMLERGIVFRQGRRHLAGQMPALFADERSPLSPRMQAIAQGLWREWQQLEREINDVSTEIDSVAKTDPACRRLMAVPGVGPIVATALVAAVGDGSAFQRGRDLAAWLGLVPRQHSTGGKPKLLGISKRGNSHLRRLFIHGARSVAMHSDRKRGLGLWLTGLEQRAHKNVAVVALANKIVRISWAVLARGEDYRVPALATA

SEQ ID NO: 131423 - protein, 355 aa, unidentified
MPSKADTAVARTIGIDTGKNTLHIIGLDERGAIVLREKISRARIAARFVNLPPCLVGIEAGMASHYVARELVALGHEVKQVPPAYSKPFRHGHKNDFRDAHAVAEAVERPSTRCVPIKTDGQLDLQALHRVRSRLIGNRTAVINQIRGFLLEHGIPVRQGHHFLRKQLPLILATRTDVLSPRMIRIIGDLMADWKYLDERIERVTDEIEALAHADEGCQQLITVPGIGPIISSAMVAAIGNGAAFCKGRDFAAWLGLVPKQMSTGDRTVLGRITKLGNRYLRMLFIQGARAVLLRPASWVKHSFGSWLTAATRRLHRNVLAVALANKLAQIAWTVLAQGRRYEARVEPRVEPAAA

SEQ ID NO: 131424 - protein, 419 aa, unidentified
MSKSNTSKPLAQVRPGTLHAGVDLVLEKNVVVVINDQAQQLDQFSFSQDRSGYDYFLQRLEGLRQKHQASEVTVAMEPTNYFWKLLARELEQKKIPYHLVNSYTVKRHREGDQLDRSKDDRRDAKQIAELSRTGHYTQTRLQQGAYEDLRQYGRLYDQLNQSVRREKQVLWGLVGQVFPELSQVFKNLEGDTSQALLAACTPAALIHQMTIETFITKVRSVYTGKRLLISKLARLHRLSSGSIGVTEGLPAIQLAIQVHLKSLQTLQKELEQVTSAMTDSLVSLPEAPYLLSIKSLGLVSAATFLADVGDPKRYQAAAQWVKLAGIQPVPRTSGKKQRSPTPMSHQGRPRLRTMLYFTCLRMVQQDQHFAQLYAHLQKRKKNPLTKMQALGVLMNKLLHILWALIHNQSFYNPAFSQSA

SEQ ID NO: 131425 - protein, 410 aa, unidentified
MDLVNAELPAKTLVVAIDPGKVTNRVLLANGEQGLIGEPVSLPTLREGVERLFELIESQAAPETVIAIEATGSLHLPWVSEIERRLPGSTRLFAPSETQAARTQLGSRRFKDDDRDCAALVSLARQGRGRPAQSGTLDALLDAVRHRRRLIAQRKVARQHLHHQLNALCPGLSAPAGHGRVLGLETPTGQAALACAVDFAGRAPAARSLTARAPGRLSRAGATYWSERWRGCLPPPADAELRAERLGRDVKRWRALEADVLAVEDQVSMLLAETPGQVLTTLPGVAATRAAALAVHALPIERFPTAEHLYSFTGLAPARYESATIRKARGISRQAPGERRDALMGIAWGLSQHSAAFRQRDRELRGRGMRPIEARVALARHACRLCHRMLQSQQPFDEERYARTRHRRGR

SEQ ID NO: 131426 - protein, 337 aa, unidentified
MKFCGIDLHSNNSVVVITDETDRVLLSRRCPNDLVKITMLLEPHRAELAGVVVESTYNWYWLVDGLKGAGFEVKLANTVAMKRYDGLKHSDDQDDAAFLAHLLRLGILPTGYIHPPQERALRDLARKRIQLVRSRTQHVLAVENIMARQLGCRLNSGAVKRLSATSVDRLGLPPDVALAMKANVAIIEAFNSQIECLEARLLQGARLRPEFALLKSMPGIGEVLATVIMLETGDIERFADVGNFASYARCVDSAHYSNGKKKSEGNAKNGNAYLIWAFIEAANFARRFSEDAKRFFEKKKAKTNNVVATKALAHKLARASYHILKEKQPFDAKRCFA

SEQ ID NO: 131427 - protein, 336 aa, unidentified
MKQVTTLAIDLAKAVFQLHGVDEHGVAVLRRQVRRAQLLALIARLPPCLIAMEACASAHYWGREFSRLGHRVKLIPPQYVKPFVKGNKTDRNDAAGICEAALRPDMPQVAVKSEEQQSVLALHRVRELLEKQRKQLSNQIRGLLGEFGIVMGRSTKALREALPEAKASVPALLRPTLEQAHERLLELERQCAAHTKQIEACAQHNALCRRLMRERGIGPISASAFVATLGDPGHYRNGRQVAASLGLVPRQHSSGGKTVLLGITKRGDKYLRMMLIHGARSVLRYAKGKSDPLSQWLNELARRRGANRAAVALANKNARRLWAIWRDEGQELAAAS

SEQ ID NO: 131428 - protein, 347 aa, unidentified
MRPKLLMENDYILRQCVGIDVSKETLVVTMCMFSFAEEAHNSDVKTFKNNKTGFNQLVKWSRKEAYTNKPLRYVMEATGVYHEELANHLVKIGCTVIIMMPNKAREFAIWEGMISKNDTIDSRVLALVGCVKRSMRPWQPSKEIYHELRAMTRFAQDTKKLRLALKNHLEALEHSHQAEKSVVKHYEAMVSYLDKRLKMNLKNMKEKVASDEALNKKVENIITAPPLGFTSLITVIAETNGFALIQNRKQLTSYAGFDVKDNQSGNVEGTSRISKKGNSRIRAILYMPAVQAQLRSKHLKEAYDRIVQKHPDKKMIAVTAMERRLLLLIYALWKSDKPYDEDHKKKK

SEQ ID NO: 131429 - protein, 329 aa, unidentified
MSNLLKKVIGVDVGSKFLTLSFLDDEKGEQVLNLPNNERSILSFLSKISPSDYCFVIEATGNYSSRLLHLSIGKGFESSLINCMSVKHFARMKNIITKTDAEDAKLIRNYGEMFRPEFYIPKTQDIEYLDQEIKLLNDLEEEKRRYAVKLKALRFHPVVNPSTEKHYEKRLKQLEKEIKEVEARLPQLQDEEFTETKNLLQSVSGIGEKTSLQLMTATSGFRNFHSSKSLVKYFGLAPRIYQSGKKSYSPGKCRTSKTYIRSILYVCSWTAIKHNQNCKELYLRLLEKGKAKKLALIAVCNKLLRICFSVVKNKTPFQQDFQNKLKIST

SEQ ID NO: 131430 - protein, 325 aa, unidentified
MNEGTKFFGVDVSMETFDVSTADQKHVQFSNNQEGFGKFLNLLDSESHCVMEATGAYHQKLASWLFSHGSKVSVVNPIVIKRFAQMRLRLAKTDKADASMIRQYAEAENPEVWSPPQEYITQACEINGLISLLIRQRTALKNKLHSVNHKEGAFSMILKTIQKQIKNLDQEIKQLETSMEKLIQEHEREMLTTLCSIPGIGKKTAMFLIVITDAFRSFENSKQLCAYLGLAPTIKVSGKSVRGQSRISKTGNSTIRNLLFMCSFTACERNKACRELYTRMVNKGKSKKVALIAVANKLLKQSLAIAKSGTTYEEGYQSMRPACIQ

SEQ ID NO: 131431 - protein, 347 aa, unidentified
MEHYVGLDVSLKLTSICIVDRIGKVEREGVVASDPEAIATFIKLHAPHVVRIGLETGATSTWLWTELNRIGLPVICIDARHAKAVLKMQINKSDRNDAMGIARIMQCGWYKEVCVKDLDSHATKALLVSRALLVKIKRDIENQIRGLLKNLGLVIGRAKMNMFAVRAAQLTEDRSELFAAVDPLLKAREAVEQQILDLDRKVLRLARNDAQVRRFMTVPGIGPVTALCFLATIDDPARFKRSRSVGAYAGLTTRRYASGEIDWTGRISKCGDKMLRSYLYEAANVLLTRVAKWSALKAWGVRLAKRSGLRKAKVAVARKLAVILHRMWIEGTEFKWSSNEAADLHKG

SEQ ID NO: 131432 - protein, 357 aa, unidentified
MRQFISFDSHKRYTLVEMEDVETGRTRQFRVNHSRGAIRDCLAGCGEGTPVAVEATGNWYWIVDEIEKAGLEPQLVHPRKAKLMMGLINKTDKLDVHGLNRLQRNKTLPTVWIPPKDLRDLREMTRTRMVLTAQRTRLKNRVLATLNKYGFTLSEFSDAFGRKARIELERCVDTLPPQTAYVTRVMLGQLDTLDEAILGMEKRIRELARATPAMTRLMTLPGIGFILSVAIALEVGDMARFPSAPHLASYAGTTARVHQSADKVRYGRLRPDVNRYLKWAFIEAAHSVCLNQARYPERHATQLYRRIKARRNHPKAIGAVARHLAEAAYHVWTKEESYRDPVLNKGLSTGGVSAMSS

SEQ ID NO: 131433 - protein, 331 aa, unidentified
MVAGTIGSLHKAGSTKMTQTNMTTAGIDTSKVKLDIAVHGRAERWQVANALPGWRALAAKLAKAGVTRVGIEATGGYERGVVEHLRMAGIIVLVLQPRQVKAFGQVHLRRAKNDALDAVLIAACAAAMDQSRTTPDPRLADLAGYLTFLEQIEEDIARYKTRLEHIDEPGLRRIVNGDIARLKLRRTAQIRHIAKQLRAHHDLAGRLDLVLSIPGIGERTALALIIRMPELGRVSREEAAALAGLAPFDDDSGQRRGQRHIAGGRGRLRRSLYAAALPAAFRWNKALVALYARITAAGKSHKLALIACARKLLIYANTVVHRGTPWTEKAA

SEQ ID NO: 131434 - protein, 344 aa, unidentified
MTYYAGIDVSLRTVNICVVDDKGEQVAETKLSSDVQEIISYFDELEYSLEVVGLEAGTLAQYLTYGLQAADFDVVCMEAQQVKAALSAMRNKTDKHDARGIAQLLRSGWYSQVHIKSMESHHIRMLLTSRRTVLDKCIDLENEIRGLFKIFGIKLPPKLGHGSFDKTVRAVIEADEKLSHALLPMLDARLVLYETFRVLDNRTRHLAWGDEICERLMTAPGVGYVTALTFKSGVDDPTRFKRSRTVAAHFGLTPRRSQSGEFDFDGHISKAGDAEVRRTLYVAANSVLTRSSRWSSLKAWGMKLKKNRGHKKAVVAVARKLAVILHRLWIDETQFQWGMERVRS

SEQ ID NO: 131435 - protein, 353 aa, unidentified
MQCIAFDSHKHYTWASVQNEAGDVLREQRIDHARGALRGFLEEFEQGSPVAVETIGNWYWITDEIEAAGMVPRLVNARKAKLMSGSINKTDKLDARGINRLQRSGTLPTVWIPPKPLRDARELPRTRMVLVRQRTQLKNRVHANLAKYGLSTAEVTDLFGVRGRRILAQCLEQLPPQTRYATQSLLEELDQLHARIEDLEGRMAKLFGETKELELIQTLPGVGFILGVVILTEVGDVSRFPSASHLASYAGMTPRVHASGGHVRYGRTRADVNHYLKWAYAEGANVGMMHRRRHPQRHVSRLYERVKRQRGHPKAIGAVGRHLAEATYWMLKNQEPYRDPATDRAQGESKREA

SEQ ID NO: 131436 - protein, 345 aa, unidentified
MNQIIRIGMDTSKYIFQLHGVDAQERPVLRKRLSRSAMLEFFAKLPATTIVIEACGAAHYWARELTKLGHEVKLIAPQLVKPYVARNKNDGRDADGLCEAGGRPRMRFVPAKTAEQQAALMLLGIRERLIARRTQLGNMIRGHAAEFGLVAAKGMDKLPALLAAIAEDTSLPDLARDLFAGLEREYEQSQIELKAVEAKLKAWHRADATSRRLAQVPGIGLVTAAALVMKAPDPHAFRSGRLFAAWLGLTPKDHSTGGKLRLGKITRAGDELLRSLLVVGATSVVKVAKGAKGRGPRWLIELLRRKSPKLAAVALANKMARVAWKLMTTGEKYDSTRLNAAPQAA

SEQ ID NO: 131437 - protein, 323 aa, unidentified
MSKVTGIDISKQTFDVSFLKENGKWEHNVYHNNKTGFMKLWEETGKDFTFVMEASGPYYMKLADFLHSKKAFVSVVNPLVIRRYSQMKMLRAKTDKKDAQTIASYGMSQDLKQWNPSSDAIYMLQQIDTLIGGYQKQLTMLNNQLGAFTSTGKMPSSVKESIAKTIENLNEEVKKLEAESKKIAEEGYKETMELLQSIPGIGVKTAIMLIVITDNFTKFENYKQLIAYIGFSPRIYQSGTSVKGKGHISKMGNPKARKMLYMCSWVAKKYNKQAIEMYERLKQVGKPEKVIKVAIANKLIKQVFAIANSGQKYNADFASTRPV

SEQ ID NO: 131438 - protein, 412 aa, unidentified
MMERVALSAGRCGSECVEYSGKSDYQAFKDLNVKYTGSRSIKHNKEGFDEIVNLVREMEKKLETEVCVVYEATGVYHRVLKKVLEDNNIKQFIINPLLSAKTRKNDSLRSPKTDKLDPKSIAKTYYSHSLHNSHKQETIYHELRELSRYYEDILVHIRKDKVAFRAQLDIVFPGYDTLYDDLYGPVALAIIEKYPHPEMLQKKKINTVSKVIQNKTCHRQAVSDTMADKAIEYSKTIYSGCDKDDIEVLILQRFIKKLNEDMAEAERTIGEMIKLAQELPDFNIIKSIPGIGDNLAARIIAELGDMTRFKKKNELVAFAGLDPRISESGQNDGDHMHITKKGNKRLRCLLYLAVTCSIRLKRDDNSIKDFYIKKKQQSNPMCSKAAKTACASKLVRIIYSMCKTGELYQYNK

SEQ ID NO: 131439 - protein, 412 aa, unidentified
MDLVYARCAGLDVHKKTVVAGGRVPAPQGGQRRGEVQTFPTTMSGLKALADWLVAHEVTHVAMESTGVYWRPVYAVLEGLMTVLLVNPRHVKMVPGRKTDVKDCEWLAQLLECGLLRSSFVPPRPIRDLRDLTRLRKTLIRERGHHVNRIAKTLELANIKLGSVVTDLMGNTGRAILEALSLGIDDPDKLAACAQGLLRKKQAALREALVGRLTPHYAFLLQQHLSLIDALDAHIATLDARIAEAMAPFADAAALAQTMPGVATRAAQAILAETGVDMAAFPTADNFASWARLCPGNNESAGKRRSATTGQGATWLRATLQEVAWAAAKTKKSYYRALFHRLKARSDSKTAIVAVQHAMLVALWHMLKHRVPHQDLGADYFTRRDTERTRRHHVRRLEKLGYQVLLVKEEAA

SEQ ID NO: 131440 - protein, 341 aa, unidentified
MESVTLIGIDLGKHSFHLHGQDRRGKAVFCKKVSRRQLYEFFAKFHACTVVMESCAGAHYLARKLADFGHQVKLISPQFVRPFVKSNKNDFVDAEAICEAASRPSMRFVTPKTESQQTLSVLHRLRESLVHDRTKAINQMHGFLLEFGISLPTGLAIIKRLPAVLAEHALPPYLVSTLERLHAHFKYLDGQIGEIEKEIRQQLADDELGQRLLSIPGVGPITASVLAAEMGDGQQYGCSRDFAASVGLAPRQYSTGGRANLLGISKRGDKNLRRLLVQCARAYMQRLDRQTGRLADWVRSLLTRRHSNVVACALANKLARTAWALATHGTTFETEGSGMPA

SEQ ID NO: 131441 - protein, 327 aa, unidentified
MSSLTLGIDISKDKFDVALLDDERYQMGTFDNSKKGYHSLAKWLKKRQAKSAHVCIEASGRYGDAVATFLHESGYAVSVVNPARIKGYGESRLKRIKTDPEDAKDIAHFCATQKPRLWTPPPPEIQELQALTRRLDSLKADRTRELNRKKSGISSQAVLQNIEEHITFLDEQIAALEQQIDGLIKRHPDLRQKHGLLTTIKGVGNITAAKFLAEVPDISHFGSAPELASYAGLTPRIHRSGSSVHRRARLSKTGNRQLRTAFFMPALSAMRYNPIVRALAQRLEERGKERMTIVIAAMRKLVHLAFGVLKTGLPFDPNYLVNVRETV

SEQ ID NO: 131442 - protein, 387 aa, unidentified
MAQVNDLSRSLTAFDPISTLVVVVEMSKASWLVSGAVPGVERQPLKKLEPDATALLRLIERWRNEAVRAGRPISRIALAYEAGRDGFWLARWLIARGIEAHVIHSASVAVSRERKRAKTDRLDAAMLMRVFLGWLRGERGHCGMVAIPTMEEEDARRPSRERESLVNERSRITNRMKSALARLGVRGFKPHLRKAPERLADLRTAEGTGLPANIIEEFRRDMARLALVREQISSIEKTRAERLERAPDTGPHAMVRLLARVIGIGIETADMLVREILSRKLRDRRAVARYAGLTGSPDESGLKRREKGLAKAGNARVRRGLIQLAWRFLVFQKDSALARWYRMRTEGPSGARKTTMIVALARKLLIALWRLVTTGEVPDGVELRPAA

SEQ ID NO: 131443 - protein, 340 aa, unidentified
MTITTVGIDLAKNVFAVHGVDQNGKTVLVKPKVSRAALPELIAGLPPCVIGMEACSGAHYWARLFRQYGHEPRLMAAKFVSPYRMAGKSGKNDAADAQAICEAVRRPHMRFVPVKDENQQAMQCLHRTRQGFIEEKTATYNRLRGLISEFGVIAPQSTDALHHMVSEQKNSLPLQVQQCVDDLLEHVDRIEANIAEYDQILSRMAKADHRSQRLMELKGVGPTTACALVASIGNAHDFKNGRQLAAWLGLTPSQYSSGGKSKLGRITKAGDSYLRTLLVQGARSVLIGADKRTDSFSRWVCSLVERRGYWRAVVAIAAKNARLCWASLHYGDDFRLYSAS

SEQ ID NO: 131444 - protein, 329 aa, unidentified
MTPPSSQSVSSQPVCGIFFGIDVAKDHLDLARSDTGKLMAVSNDQPGIRRIVELLKTAAPRCIVVESTGGLERPALEAMLEAHLPVALVNPARVRHLAIGLGILAKTDPIDAAVLMQFGRLAEPRLAQKRTANQVELDDLITCRRQLTTARTAQANARITTRSKDAQHSIDAVLKTLDKQIESLDQKIRKLIDSDDDFKHLDRLLQSVPGVGPVLSSTLLAELRELGATDRREIGALVGVAPFNRDSGTFRGKRSIRGGRVSVRCVLYMATLAAIRFNPVLRTFAERLGKAGKSAKVIIVACMRKLLTLVNAMVRDNLMWSELSVVKNA

SEQ ID NO: 131445 - protein, 427 aa, unidentified
METDLSRIERFRQFKQEIRGNERYLIVGIDVAKDRHHAFLGTANGRTVLRRLAVENSRNGFEHLGAHVQFQMSKHGLDDVVFGVEPTSVYHKPLAEYLIEKQFLVVYVTNAAIKQNRQLLDGRWDKHDAKDAANVADLVARGKCHYYDLPNEVIQDVRTLLGVRRRLKRQLHSARMRIRNNLVAQYFPELDKFWNNAEEENLAIVRWCLDPQGIRQLNFTEFFHRVTSRSKGTRQHRRLMGIWEAAPSSIGCRVGKALDVETRILVDDVKQTRERIAEVEQAIRARLSGLPSYEVLLSIPGFGPYICAVVLAAVGNPHRFENRSQLLRLAGLDLSANRSGKRGATAVPVISKSGKADLRYALYQAALVASSFNHHVMAYYRNLLKGREREPGIGTKMRVKLAAKLLIIAWTLMKNKEPFNPERLKTD

SEQ ID NO: 131446 - protein, 410 aa, unidentified
MEVLYPKCAGLDVHKKTVVACVRIQQGAAVEQEVRTFDTTTSGLLALSAWLSEKGCTLAAMEATGVYWKPVWHILADGEFELLLANAAHVKNVPGRKTDVNDATWLSELAAHGLIRGSFVPDRPTQELRSLLRTRKQLVRERSSHTQRLQKTLEDANIKLDSIISDILGVSGRRMIEAMIAGQTDPAVLAGLADRRIKATKEELREALRGRPTAHHRFLLQLHLDQVDALDRAIARIDEEVKSDLDSFRQAIEMVKTVPGFDDLSAQAVLSEIGVDMSRFPSDNHLVSWACICPRNDESAGKRRSTRMRKGSRWLKATLFSCAWAAVRTKGSYFQAQFHRIKARRGAKKAIGAVAASLLRTIYHMLKDGTLYQDLGADHFDKRHKTASTRRLVQRLQNLGFAVQLTPVPA

SEQ ID NO: 131447 - protein, 406 aa, unidentified
MIYPQLFVGIDIGKFKHVVAIITEAQQVLVKGFEVLETQSGYQQLLVKLEQLQSQYQTQEFRIGMEATGDYWKNLFHFLARRSPTFLVTVINPVQTKRFAQSELRRAKTDAVNALDIAGFMAEKKPRPTVSRTEIFDNIKDLDRQVHAVHKQQTMTLNKLRIELAKVAPEIEHHLALARHQQVLVLLKQYPTAAAIAQASRDELRRLRYGKKQWRLSNPFITKIQTLAQNSIAHKTGPGAGLVVQALVEQLRQQQQMVTTLKAHITALYQGVKEQPSLLTTIPGIGPETAIALEAYIGDIARFPAAKQLVAYFGMNPTVNLSGIVTKRAGPLQKKGSAIVRHKLFMAVLSMISNYVEPFYGYYQRLVAAGKPKLVAIGATMRKLVVVIYTMLKKQQPFLTNKNLSS

SEQ ID NO: 131448 - protein, 418 aa, unidentified
MDAIIETCCGLDVHQATVVACLLTGKANAKPRKQVRTFRTVTRDLTALCDWLRKAGCTHIAMESTGVYWKPVYAVLEAGFEIVVGNAHHIRNVPGRKTDVKDSEWLADLLRHGLIRKSFVPPKPMRELRDLLRYRRKLVESAAAERNRLLAVLETANIKLANVASDVFGVSGRQMLEAIIDGTASPVQMAALAKGKLRKKVTELQLALEGSVQPHHRFLLAMQLGRIKSADNDLAKIDKLIDEKLEPYRTQHKRLMTIPGVSWVVAAVLIAEIGIDMSVFPTVRHLAAWAGVSPGNHESAGKRKRGKARRGNVYLKTALVTAATSAAKTKRGYLKDKYFRLKARRGGLRAAVAIAHKILTAAFHILSEGVAYHDLGDAYLDNIDRTRTAKNLVRRLARLGFAVDIKPANSQENATAFS

SEQ ID NO: 131449 - protein, 353 aa, unidentified
MTQFIGCDAHKKFSVFASINESGEYGPAIRVGHEREEFRQYLRELPAGSEIALETSGCYYWIVEEMEQAGHRPRLAHALTAKRRMQGRHKTNERDARGLAMLLRNGTLPEVWIPPAWLRDEREMLRWRMWLSRSRARVKNRIHAVLQRYNVAIDFTDLFGDGGRAELLRRITELPPHSAESVIEQLQTVDWLETQVGECEQKLEQILYPNVARDVLDSLPCVGKVLSAVLALEIGDVRRFAGPCALASYAGVVPVARESAEWKRQEGCRRDCNLYLKWAYVEAANLISIHRKRWAGRHVAQLYERVKQSTRMHGKAAMAVARHLAEASYWMLSKQQVYREPHFPQQVLSSTHG

SEQ ID NO: 131450 - protein, 343 aa, unidentified
MKLMRIGVDLAKNVFQIHGVDCHEKPVWRQRLPRDRWLQTVLEKVEPGCEIGMESCGGAHHWARQLEARGFRVKLIAPQFVKPYVKSNKNDANDAEAICEAMSRPSMRFVAIKTIEQQDIQATHRIRAGLIEQRTAKANQIRGLVAEYGLIAPKELLMLRRAIPCWLEDADNGLTARFRRLLDGLWDDLRALDGRVRKLDGEITAIATNEPSAVRLQQLRGVGPMIATALVVALGDARQFANGRQFAASLGLTPRQHSSGGKGRLLGISKRGDVYLRTLMVHGARSALRTAKSKEDRLSQWAVRLAERSHPNVAAIALANKTARMAWAMLRHDTDYQPNHAAA

SEQ ID NO: 131451 - protein, 352 aa, unidentified
MERYIGLDAHSATCTFAVMGATGRRLKEQVLETNGKVLVEFLKTIAGDRYLCLEEGTQSEWLYELLEPHVKELVVVQAQWRPGTKSDSSDAWELADSYRTGRFRRSVFKAPRVYTGLRQAVRGYQATTQDVVRTKGRLKAVFRSRGVAVGNAVYDPTEMKGLLRLLPAAQRPLAQLYSTQLEAAREVRDRSQQWLLEEIEKVDVVKRLATVPGIGTVRAAQIVAIVINPTRFRTKRQFWSYCGFGVVAHTSSDYVRGPDGKWQRKPVQQTRGLNRNRNPTLKAVFNGAAMTVIQHLPNHPLHQDYQRALEANIKPPHARLALARRIAAATLAIWKHNEEYDPEKHRSKAHST

SEQ ID NO: 131452 - protein, 322 aa, unidentified
MNPKNYGGIDVAKKNFVIGIYGQDKTKTEANMPKGHAKAVEYLQKHNVDLVVLKSTGGLEVPLANALHAADIRVVIANPQRTHQYAASFSLGKTDHLDAKMLADYAQALDSRKMADDMCYAPPSEEALALEALVKRRSQLVEMRKMEKNRLEQTHASQKASVVAMIKHLGELIAALDKEIDQSNRGGFNGKGEILSEMKGVGRITCATLLSMLPELGKVPHKRAALLVGVVPPPRQSGEKERKSGCVGGRMVVRNALYMAALTATRSEPKIKAFYEKLMSRGKAFKVALNACMHKLLRILNARMRDYLASLKETEESELQGA

SEQ ID NO: 131453 - protein, 340 aa, unidentified
MIVIIGIDPHKASHTAVAIGCDERQLGQIKVRATCQQTARLLAWAEPLGERTWAVESAGGLGYLLSQQLVGAGERVLDVPATLASRVRVLGTGRSDKNDPNDALSVAIAALRSPGLRSVEPANHREVLRLLAKRNHELGRMRNMVVSRLHAALANLSPGGISKELNASDAVRLLGDFDPVTPVQQTRYDLALELLDDVKRLDVQLKESHKRITTAVKASGTSLTELYGVGPILACALIGYTGDVRRFTTRDQFASYAGVAPIEHSSGGRIVHRLSRRGNRQLNHAIHMVAICQIRQTDSEGRVYFERKVAEGKTKREAIRSLKRHVSNAVYSQLLIDTQK

SEQ ID NO: 131454 - protein, 317 aa, unidentified
MSLTFIGIDVSKDTLDAYVRPADLRRRFANTAAGIAELVAWVRPHTPERILFESTGPYHKAAVGALLAEGLPAVVVNARQVRDFAKALGRLAKTDVIDATVIAHFGEVVATTVRPLDTQDRSELRELYDRRGQLVRMLAAEKNHRHAATGSSAPVRKNIDKHIDYLEGQIHTLEDRMDKIVETSAAFRAQDEILQSITGIGPQVSRTLLAFLPELGQRTRQSIAALVGLAPFNDDSGQERGARHIRGGRGKVRLGLYQAAVAAIRHCPQMKAFYAALKARGKASKVALVAVARKILVLANALIRDMTCYQAPANSVC

SEQ ID NO: 131455 - protein, 428 aa, unidentified
MSNSDISRVKRFRQFKNEIRGSDRYLIVGLDIGKSMHHAFLGTATGKTVKRGLRVENSASGFEHLLTMLQFYMDRDGFTNVVFGLEPTSVYHKPLAEFLITQDHLVVYVTNEAIKKNRALIDGRWDKNDTKDAANAADLVSQGKCQFYDFPDIQLRDLRALLSLRRRLKKQLHSSRVRIRNNLVAQYFPELDKCWTQAQQENLAIVRWCLSPHKISELSFEDFFKIVTTGNKGLRQYNRLIKIWEIAPYSIGCQSGIAMEIEAQILVENIKSIQTHIATVEETIEDICLGFQEYQYLLSIPGFGPYVSAVVLAAIGTAQRFDNTHQVLRFAGFDLNANRSGKKSQSAVPVISKRGKAALRYAVYQAALIASSLNTQFRGYYHHLLQGREREKGIRTKMRVKLAAKLLVIAWTLMKKKQPFDPSYLNTQ

SEQ ID NO: 131456 - protein, 344 aa, unidentified
MKRSLGIDLHTNSFTCCYLQADGSETIRTWPLQGGGLEQFLTSVHAEDDVALEATGNAAHFCKMVEPHVSRVVVIAPWQFEVIRRSVKKMDKHDARAIALFLSKDMLPEARIKSEAHVQLASLITTRDQLVKLRVSLLGKVHGLFVRHGLKVRREVLTSQTGFTREVAGHNWSPLERAELAVINDQMQSLHRNIKRLEKEIAAFAKTLPGYDNLISIKGIGPLSVAVMLTHIGAIEDFKNTGKLAAYFGIVPRVSQSNETSNSGHITKRGNKLARTTLVQCTLIAIRYSPYLRGFYANIKNRRGTGKAIIATARKLLNTIFHTLKNKWVFTDFPNFKLLPCNQS

SEQ ID NO: 131457 - protein, 340 aa, unidentified
MKRYYYVGLDIHKKMIAYCVKRADGTVVDEGKVRATRAGLTAWLATVKRPWVGAMEATLFTGWVYDFLRPHAAELKVGHPLKLRAIVAGKKKSDHLDARTLADLLRCDLFPQCYMAPEKMRELRRVLRYRNLLVHEAIRMKNKTAGLLMEVGMEYNKRRLRGKRYFGELLERLEAPRSVLRLLRLSREAQQLFENNQQWLIGQLRAHPEIRERVERLMSIRGVGEVTALTWVLEVAEPQRFPSIKHAVSYCGLSSGYHESAGKVQREPLSKQRNKHLQTILIEAAKLAPRWNPQLAAVYERERSRGANANQATLTVARKLVAYLLYVDKTGRAFEMREAA

SEQ ID NO: 131458 - protein, 284 aa, unidentified
MDYVGINLHKTSSQICTLSEGGEITERRIKSTRASFDEVFAGRSPTRILVEASTESEWVACHLETLGDEVIVADPNFALMYATRDKKIKTDKRDARALCEACRLGAYRHAHRTSEKQRRIREQILVRSTLVRTRSKYISLIGALARREGCRIATGGSTNFGARVEAANLPAHVLAAIAPLLESLKMLNRQISEADAELEKIVKEDEVVRRLCTIPGVGPVTATTFAATIDDAGRFGAAKQVRSYLGLVPREYSSGERQHRGRISKAGGSRARTLLVEAAWALLR

SEQ ID NO: 131459 - protein, 394 aa, unidentified
MKLVGIDVGKNSHHFCVMDKETGEFNVTPTSFSNNKEGFDFLINSLKPYSKKSILLGMEDTGHYHVALLKFLLSNGYTVALINPKTTDLTRKMEGGITKNDKLDTITICDVLDTPERKKQYRITKVDRFDFYEQRQLTRHHHDLKEELNVYCNRLQKSIDLVFPEFNTLFGSKYGVVYMNLLKTFGNAEIIASTDIRTIRKCFEIKGRGNRISLTPEKLKECAKNSIGISSEVETIQIKHLVSQIMLIKEQIAEIDKKIEEFSITNNSPILSIPGISHFSGTSILAELGDIGNYSKPSQIIKFAGVAPYHYESSQYNAQHTGITKKGSKYLRKTLYQIILPVIKYNPVFKKYYLLKISQGKGHRCAQGHCIRKLLRIIYHLLETGQSFDPALLR

SEQ ID NO: 131460 - protein, 342 aa, unidentified
MEVTTIGLDIAKNVFQVHGIDASEKVVVRKQLRRGQMLAFFEALPPLLVGMEACATAHYWARELTRLGHQVRLMPAKDVKAYVKRNKNDAADAEAICEAVRRPTMRFVQVKSTEQQSQLMLHRTRDLLMRQRTQVINALRAHLGELGITAAQGKAGLTQLLAIIAGSADERLPAEAHASLIVLAAELQAMRTLIASIEKRIIAHHRSDEASKRLRSIPGIGLVGATAIVATITDPKAFRSGRDMAAWIGLVPRQDSTGGKQKLGPISKQGDRYLRRILVVGAHAVLKLARQKPEKYPWLTQLLARKPFKVVAVALANKMARIAWALLVKGGPYRARALVAAV

SEQ ID NO: 131461 - protein, 429 aa, unidentified
MKNSVANKLKQVPVGYLVTGIDPHKKKHAAVIMTRDFTTHSKFKFNNSKEGFEMALERIRMEMVRTGSRGAIFAIETGGHYWRNLAYFLDERGIPFRFINQFTLKRRREGKDLNRRKNDYRDSEVAAQLLCTGEFTDTKLSHGVYAELRAAHNAYRRLVKERTRIINLVKGLLDGLFPEFTQVFKDPCGLTALSVLSISPVPEGIAAMTEDEFVNTIRTGHRGLLMRKKLCALHYAAQTSIGVKADAQSVSYELSFLVEKLQLIKRHICRIDETLVRLVNETEEGKYLLSIIGLNYISVAGLLAELGSFEQYRSAKQLIKMAGSNPTESESGGKRSAHTPMSKKGRPVLRYCAWTAVIPMLRFNPDFRAWTKKLRERPVHANPLKGREVVGAALNRLLRLAFVLVKNQTFYQVPEIESMPEPELLLVAS

SEQ ID NO: 131462 - protein, 344 aa, unidentified
MEEYVGFDVSKEETAFCVMDKAGKILSQGKALSDPRSLFEALRENTLCPDRIVLETGTMSAWLARELRGLGLAVDVIDARQAHAVMKLQHNKTDANDAVLLAEIARTGFCRPVSVNSEAAQVQRMLIKARTHLVRQRRDTENAIRGFLRALGIRFAKGSGKLAGRVREALEERPDLKVMIEPLLASVEALKTQIKRLDEDVVLKARGSPACRLLMTVGGVGPITALAFAATIDDAARFAKSRAVGAYLGLTSRRFQSGEMDYSGRISKHGDAMLRSLLYEAANSMLTVVRRAHPLKDWARRIRKRSSHKKACVALARKLAVIMHRMLVTGEPFRWPQIEAAATA

SEQ ID NO: 131463 - protein, 417 aa, unidentified
MSIAPDCADAPIVVRITAGLDWAKDDHAVCVVGDQGQVIDRFTVAHDAAGLKRMTARLLRAGVDQVGIERGDGPVVDALLGAGLTVFVIPPGQVKNLRSRYGSAGNKDDRFDSYVLADVVRTDARRLHPMVFDSEQTTALRSATRTRKDLVTHRVAAANQLRAHLQIVFPAAATLFADIDSAISLSFLERFTTQDAADWLTAARLAAWLKKVHYSGGIEPAVLHARLLAAPAGKTGPHARLHAGTTRALVALLRVLNTQVHALAVSIGEQLDAHPDKKIFTSLPRSGTVRAARLLAEIGDARGRFPTRDSLTCLAGVAPSTRQSGKVTSVSFRWGANKQLRDALCDFAGDSRHANPWAAALYAKAIARGCDHPHAVRILARAWGHIIWRCWQENHPYDPAAHGALQTILNQDQPAAA

SEQ ID NO: 131464 - protein, 412 aa, unidentified
MEGETVIAGVDTHKDVHVLCLLDGLGRKIWSGSFGADPEGYDRLAEAIGDPGSCMVVGVEGTASYGAGLTRRLVELGYNVVEVLRPKRDKARPGEGKSDPLDAERAARKAASGRGCSVPKSQDGWVEAVRQLYVARRLAVATSTSCVACAKSMLTTAPSALRERFRGRERPKDLMPLLARGRKAGDALEESVLASLRSVAAVWKEARSQVESLDERIRALLEANAPALLGIEGCGTTTAAALVVAAGDNPGRLKGEAAFSMLCGASPIPASSGKTERHRLNRGGNRQANWALYEIAIKRMAYDERTKRYVAKRTSEGKSRREAIRCLKRYIAREVYRVLMDPNPDGAAPEGPELAKMRKAMRVTQKQAAAGLGMSAASLGHLEHGRRRSTKLERRYYELLCELKGALPQTAY

SEQ ID NO: 131465 - protein, 415 aa, unidentified
MSRLHVGIDPAPGKCVACLVDDAGRTVGKALSFAPDRSGVAGLLRQVREKAPDAECHFFVEASGSFWYGPSAWLRAQGQAVSLINPTYTKTQRKATSRYAKSDAKDAEAIARAPLNMGEKAYHPADIPEGPRLNLRLLCRHRHTLQEDATAIKLRVLAWLGFSTPGLTAILGTDLSAMDREFIRRYPVVARVQKLGPARLQRFLERRSDGDLDPALVDDLFALTQEAYQPQDFDDRTFALQIGMELDRLALLEKQIATLDDEIARLYPVCDPAGLAKSLPGFGKVIAPILVAEAGTDVSRFPTVDRFASWTGLVARASGSAGKQQEGLPMTKAGRSIVKWALHMAANVAIHHDPEMGALYDRLKAKGRHHNAAMTAVAHKLARCYWAVMHEQRPYVKRAPETDADPVPKPDPDCA

SEQ ID NO: 131466 - protein, 346 aa, unidentified
MDQIIRIGMDTSKHIFQLHGVDAAERPVLRKRLGRRQMVAFFAKLPATVIGIEACGAAHYWARVLGEFGHEVKLIAPQHVKPYVKRNKNDRRDAEGLCEATGRPTMRFVSVKTAEQQAALMLAGLREQMVARRTQLSNAIRGYAAEFGITAAKGLDKIEPLLADIAQDESVPALARGSFAVQGREYAQLQSELKAIEARLRAWHRANADSRRLAKIPGVGPIGASALVMKTPDPSAFPSGRHFAAWLGLTPKDHSTAGKTRLGKITRAGDERLRSVLVAGATAVIQQAKHGRGHPSPWLLALLKRKPPKLAAVALANKIARIAWKLMTTGESYDGARMSGASALAA

SEQ ID NO: 131467 - protein, 416 aa, unidentified
MNAVGIDVSSRKSTVAVLRPLGEVVCLPFDVTHDIAGLASLVEKLKALDGETRVVMEHTGRYYEAVEKALHEAGLFVCAVNPLLIKEYGANSLRRVKTDKADAVKIARYALDNWADLRDFTPMDAIRYDLKTLNRQFQLASKQRTASANNLIALLEQSFPGIRKCFDSPVRSDGTQKWVDFAHSFWHVDCVRKQPFAAFCERYRKWCKRHAYLFKLSNAEEVYALAKRAVVLTPKSKVVKVLVQEAANQLSSISRSVEVYRAEMDRLAAMLPEYPVVMAMYGVGKSYGPQLMAEIGDVRRFERKQALVAFAGIDPMPNQSGDKNVRSNKSSKRGSPYLRKTLFNVIRTYLQCAPQDEPVFQFLNRKRAEGKPFYVYMLAAANKFLRRYYAKLRDFFASLDTLQPVAPIPTILKATL

SEQ ID NO: 131468 - protein, 346 aa, unidentified
MSQKFNTAIAVIGIDIGKNSFHAVGQDERGAIVLRQKWSRGQVAARFANMPPCLIGMEACVGAHHLSRRLKALGHDARLMPAKYVRPYSKGQKNDFRDAEAIAEAVQRPTMKFVATKTAEQLDLQALHRVRERLVSQRTGIINQIRAFLLERGVPVRQGLRFLRAELPGILATPPDVLSPRMVRVIEDLAGDWRRLDERIDSLSGEIEAIARQDAGCERLMSVPGIGPIISSAMVAAIGNGEAFSKGRDFAAWLGLVPRQMSTGGRTILGRISKRGNRYLRVLFVQAAWVVLIRPKSWERHGLKSWIEAAKKRAPQRARDCTRQQAGPHRLGRSGSWSGLRSEENQ

SEQ ID NO: 131469 - protein, 411 aa, unidentified
MENVFACCAGLDIHQKSVEACVRRLEPTGQLHHQTRHWGTMTRDLLAMADWMAAQGVTHVAMESTGVYWKPIYNILESRFTVLLVNARHLKQVPGHKSDVRDCQWIAQLLQHGLLKGSFIPPRTQRELRDLTRHRTQLVEEKTRTVNRLHKVLEDGNIKLASVATDILGVSGRAMLEALMEGQEDPVQLADLAQRQMRGKIPELEKALEGHLTEHHRFLLRLLWKELAQQEELIAELDRKIEEHTRPFANEIERLDAVPGVDRRVAEVVLAEVGSDVKPFPTHFHVASWAGMSPGNEESAGKRRRGRITPGNRWLKRTLVQAAWAASHTKNTYLASQYRRLAGRRGKKRALVAVGHSMLVIFYHMLKERTTYKNLGGDFFDRLEPERLTRYYVKRLKDLGHKVTLEPGVAA

SEQ ID NO: 131470 - protein, 387 aa, unidentified
MPQPNDLSRSLVALDQDSTIIAVVEMSQSSWLVAGVLPGIERQPRKKLEPSPERLLGLLLRWRDEAVRAGKKITRIALAFEAGRDGFWLARWLSARGVEAHVIHPSSVAVSREHRRAKTDRLDTELLKRAFLGWLRGERGHCSMARVPTMAEEDAKRPNRERGCLVGERTRIVNRMKATLARLGIRNFKPTLRKAAERLATLHTPEGMPLPPNGLAELQRDMARLDFVVSQIREIEEARQKRLEQETVTGPHAMVQLLARVVGVGIETADMLVHEVLSRPMRDRKAVARYAGLTGSPDESGAKRREQGLARAGNARVRRGMIQLAWRFLRFQKESALAQWYQARTADSRVGTRKTMIVALARKLLIALWRFVTTGETLEGVILRPAG

SEQ ID NO: 131471 - protein, 310 aa, unidentified
MDVIIDKGCGLDVHKETVVACVVGEGIKKEIRTFSTMTEDLFRLKSWLSEKGITHVAMESTGPYWKPVFNVLEDSFEVILANARHIKNVPGRKTDVKDSEWICKLLRSGLLAASFVPPKAIRELRDLTRYRRKLTQAISSEKNRVQKVLEDANVKISSVVSDTFGVSASRMIDALMAGTLDAESISDLAVGKLKGKKEELKKALVGNFQEHHRFMIQASLDHIESLEKIIAGLDQEIDRKLADYHQEYKLLQSIPGVKEQGAASIIAEIGADMGRFPSEGHLSSWAGMSPGNNESAGKKKAERRPTAIRI

SEQ ID NO: 131472 - protein, 425 aa, unidentified
MSEKIVVGIDVSKSFSDICILSPNNDIIKRMKISNDVIGMQSLISVLEKVENEYEDRAVIIMEATAHYHQILANFFRKHNYEVIVINPIQSGALKNINIRKIKSDKTDAYNIALLYRIKNYNETITHSDTVNSIKKLCRQHKELTDEIVEHINRLIAFLDISFPDYKKVFPDLQGKTPLSLLEKYPTVQDVLSPENKQDMIQLIKENSHKSYSYAEAKYEKLLQAAEKSIEVCIVNLSSAVLIQTTVSVIFSLQEALKAINDEIKRLSLLDEKFHKEIVLLQSIPGVGEYTACVVLSELGDVSNFSKPKELVAFFGLDPGVSQSGTYNRKNNKISKRGSPHVRLILHMLAKSNVYPNRNREYLNPVMRAYFEKKIAEKPYKVVMCAIMRKMVQIIFAVLRNQKSFELRTPEEHQKLIRKNSKLAA

SEQ ID NO: 131473 - protein, 410 aa, unidentified
MEIVYPRSCGVDVHKSFIVAVICISESVKPKYIKKRFSTFNNQLIQFRDWLIENNCQNVCMESTGKYYIPVYNALEGHISNVVVANPKWVKAIKGEKDDNKDAKWIADLFKFGIVRSSYIPEKDIRILREFTRYQYKLVNMRSSEKNRFQNALTTGNCKLDIVFSDIFGKSASAIVDTILSNNPYTSEDILSKVHAGCKASHEDILSAVEGIQLNQFQKARIRIVQKHMEYLDSLLDEIQHHIDLMVANYEEYIQLLCTIPGINRKSAITIISEIGTDMSQWSSHRKLAAWAGLAPGCNESAGKKKSVKISKAGVYLKPCLVQVAHAAVKDKNCDYYADKFNKISKRRGKKRAIIAIARKILIAVYHLLKTGEVFNPTDIADVETTKKQRIEYVKQFTKCLQSAQPHWLV

SEQ ID NO: 131474 - protein, 371 aa, unidentified
MDESSKTLYVGLDVHKDSIAVAYAPEDRGAEVLSLGAIGTRQCDIDTLIRKLQTKGAPLVFVYEAGPCGYWLYRYLTGKRLACHVVAPSLIPRKAGDRVKTDRRDAMTLARLLRSGDLSSIYVPGIEDEALRDLSRGRDDAMQDLKRSKRRLKSFLLRQDIRYEGRATWNAAHLRWLSEVVCPTPPQQIVFQEYLRAVSEQHERVQRVEHELHEAVQGWRLYPVVEAIQALRGVELTGAVVLMTELGDLTRFENPRQLMSYLGLTPSEYSSGARRHQGGITKAGNSHARRALVEGAWAYRYPAKVSRHLQLRLEKLPAEVQAISWKAQVRLCRRYRQLTARGKHVNQVVVAIAREMAAFAWAIARLVPLAA

SEQ ID NO: 131475 - protein, 432 aa, unidentified
MAPSGTPPGTSFAELTHYAGFDWSKSEHQLAVVDRAGQLVLELRFEDTAAGWAALREKLRAFPQLGVAIETRCGPAVERLLHAGWSVYPLNPKAAQRYRDRKAPSGGKSDRLDARSFADALRTDGHGWRRLQPQDALTQELRLLCRDEIGLIEQRTALVNRLQEALHEYYPTALQAFDDWTAPGAWAFVVAFPTPQELARAGQRKWEKFLHTQKLYRPQTAGPRLELFAHAGAFVSPSPAVTRAKSFLAVALAKQLRLLENQLHEYRQRIAQLFADHPDHDVFGSLPGAGEKLAPRLLAELGRNREEFDSPQALQCYAGAAPVSFQSGKTQRVHLRRACNHWLRAAVHLWADQSRKWCAWAQAYYQQKKQQGMAHAAALRCLGQRWLKILWRMWQDGVPYDEALHLRNQVAHGSWVIALVSPTARDSTPGHG

SEQ ID NO: 131476 - protein, 316 aa, unidentified
MKNYIGIDISKSSIDVYDGKKSYKFKNNEDGFKKVVSLSENIKETVFIFEPTGVYSYPLTEFCDKKSINCVIVSPKVSRDFARSLKVRSKTDKIDAKVLYKYQSHVENNMIKVPKINHHAIHIQEMINSYELLKSNIQQFKNQLESISVDNKSLVRLTTKMIKLNEEEADKLFAKIEKLLLKDEATKRKYKAMLTIPSIGKKSALYLISFFLKYPSANAKELTALMGLDPVMRDSGTYRGKQRISKHGGQQLRNLLFLPTLSALRWNDRIIEFYTRLTSKAKPKKLAVIAAMRKLILMAFSIFKSEQNYEPLVVQN

SEQ ID NO: 131477 - protein, 360 aa, unidentified
MFGERTSVGLDVHARSVAAAAIDGQTGEVIKARLAPAHAQVLEWVSRLPGPVAVAYEAGPTGFGLARALSGAGVRCVVAASSKLQRPAGDRIKTDARDALHLARLLRLDEVVSVRVPPPAEEAARDLVRAREAARQDLMRCRHRLSKLLLRHGIVYDDGKAWSELHDRWLRHQRFDAPATQAAFDDAYETVLLAKARRDRLDEKITAIAGDSEFTALARRLACLRGISTLTGFALAVEIGDWQRFTGASIGAYLGLVPSEHSSGQSRSQGPITKTGNTHVRRLLIEAAWHHRTPYRPSVVLQRRWDQADAVARARGHAGNQRLHSRWVTYNLRKKRGVVANVAIARELSGWCWSLAVLPD

SEQ ID NO: 131478 - protein, 479 aa, unidentified
MTTHARRLVGIDLGIASAHTVRVLDEAGHTIAKRKAWPTVSSLTDVETTALVGAPEGIRLEVVVEPTGPAWLPIAVFFTRRGHLVHRVSSAKAADLRRFLSRHTKTNGIDADTLARLPLFDPAGLQPLVLPGAEQAALDRRVRATDRLTQAGADHKRRIKDLVRQLLPMSPLTADLGVADLAVLERYADPNALLRFGSKRLTTFIAKASHSHQGSDRAQQWIDAANASLDLYAGHPAAAFADLAAEIATEVRLLRAVQTELVAHAEHREIRYRRVDPAGLARSLPGVADIGGPALVAAIGDPTRFATGKAFRSYTGLTPKASETGDTDRKGQPMSKAGSRLLRTTLIRAADNARHQDPQLARIYYVQMVERGKDHLGALCVVAANLAERFWAVMNRGHPYLVCDTNNTPVDPVQAKAIIAAHWQVPAEVRARRRSKKGKAPQTVRTGQPKPPAQRESRRGDLPRPAWSATPPDEVNRSA

SEQ ID NO: 131479 - protein, 409 aa, unidentified
MEVMFDRVAGLDVGKGSVTVCVRTPGSRGRRSETRTFKTTTGSLHLMRDWLVEAGVSIAAMESTSTYWKPAFYCLEEVMEVWLLNAAHMKAVPGRKSDVRDAEWIAQLLEHGLLRPSFVPPPEIRRLRMLTRYRTQLMGDRAREIVRLELMLEDASIKLSSVVSSLKTVSARAMLTAMIEGEQDPLRLADMAKGRLRRKIPDLAQALTGHFDANHARLARSMLQRLDLVEQALAELDAVIAEACQPWAHQIELLETIPGVGPKVAQVIVAETGADMSRFPSAAHLAAWAGLAPAMHESAGKQTPAGKRHGNKWLTAMLVEAAGSVGRMHGKNYLAAQHARLLKRRGMGRAQVAVAHSMLVSAYWMLKRGQPYHDLGADWHRRRNDEAHTRRLVAQLEHLGHQVTLSPAA

SEQ ID NO: 131480 - protein, 419 aa, unidentified
MTRKDDSRIIRIVHPICCGLDVHKESVSACVIFPDSNGEEQHEIKVFGTFTDDLKQLRQWLLDHECPVVAMESTGVYWRPVHNVLEQTVQVVLANARNMKNVSGRKTDIGDSRWIAGLLRHGLLKASFIPPMTVRQWRELTRLRKKYVQSVGDYRKRTHKLFESANIKIDSVVSDLFGVTGRNLMKLLIEDRELTLTDIEACIRGKLKGKEVELFRSIQGFFMGHHRFILKTLLGTIANLEGQIEALDQQIRSLVMDQSELLERMKKAPGISDVSACDILAEIGPTLDSFPTDTALVSWSGLCPGNNESAGKRKSGRSPVRKHHLKTIMIEVAWAAIKKKGSYFKDKYYRLKARRGAKKAIVAIAHRILLGVYHVIKDGAEFRDLGEDYLTLRNKEKKVLYLQKQALALGFNLIPQTIQ

SEQ ID NO: 131481 - protein, 372 aa, unidentified
MKTKNKTNHTPSVVSTSTAPVHAGGFTIGLDLGDRSHYVCVLDAQGQIIHEGPMLNERVALALLLTKYPGATVALEAGTHSPWISRYLTGLGATVIVANPRKLHAITRHERKCDRRDAVMLARLARADVALLHPLQHGSAQAQHDLLGLKLRDSLVRTRVNLINTVRFTLKSLGHAVSNPSSESFHKNMVTAVPADCLPVVAPVLAVLALITEQIKTLERDLVARSKRDYPVTQRLQQIAGVGPLTALCFVLKIGEPTRFGRSRDVGPYLGLCPGRDQSGGTDKQLRISKCGDGLLRRLLVSAAHYILGPFGPACALRAYGQHLIGTSTREKKRAVVAVARKLAVLLLSLWKHGTDYEPRVPATPTLVMIPA

SEQ ID NO: 131482 - protein, 326 aa, unidentified
MDGRYNAFESFVGIDVAKENFEVFFMATETGLNLSYDAAGIQTLLEHLKPLPLSLIVMEATGGLERRLAAELMDAGFAVAVVNPRLPFHFAQGIGRIAQTDRIDARTLARFAHDVKPRPLEKTPEKALELEQLVVRRRQLITMRTMETNRRSSCHSKTARKSIDKVLDCFKRQIDLLDDEIQRLIRYDDDWRRKDEILQSVPGIGPATSAAILAELPELGKLNRQQIAALVGVAPFNRDSGKYQGKRSIFGGRAGVRSAIYLAAFNLVHHYRIKPTRIRQFADRLESSGKKTKVVLTAATRKLVVTLNTMLKNNSPWNPKFVPVSS

SEQ ID NO: 131483 - protein, 378 aa, unidentified
MKQAPPAAGGKLAALFDRRLRGGAMETIYIGVDFHARQQTICYLKTETGELVTCELKHEDKAAVGAFYAQFRGQVIVGLEASGYSPWFERLLEELGCEVWLGHATEIRRRARWRQKNDRRDAELILELMLHDEFPRLHRPAVQSREVMRMLRYRQKLIKIRTMSKNSLQALALQAGVARRSHLFTREGQQELTAALMSPAMQWQREHWLQLLQPLNQQVLEAMVWLKAQSKGDVCVARLRTHPGIGLLTSLCLVHTLQPIDRFRNSRKVAAYAGFDPVERSSAEHKRFLGISKAGSRLLRHLMVEAANVAVRRDEDLKRFYQRLADRRGRPKAKVAAARKLLIRAYIMLRDEIDYAEFRHRAVAARLARLGHGPKCPG

SEQ ID NO: 131484 - protein, 387 aa, unidentified
MIEEAASPDAVLGLDVGKSSHWARLVTRAGEVLVNRPVANREPDLDALMSRVPAGTLAVVDQARNIGSLAPRRARLAGLPVAYPPGSAAHGAARLFAGEAKTDERDAAVIAKTALGIPDALLPAPEPDGRLEAARSLASQRDHMVTCATRDKNRLRSVLLESCPAFEALADLSDDRWLAALEALGGPWGILDAGKRALGAATRGGDRAAFDAAWAAAEPSTRPSEYMVAAENPQVEVLARRIHEASAEARRLDGEIAALLREDGTCGCLPTAPGIGPRTASELVIAIRIEDFPDHGRLASYCGVAPRNRRSGTSVSSVTASRQGNRRLKNLLIFSCNSLARSGGRFGEYYRSCRGRGMCRGEALKATARKRMKVIYAIMRDKVPYAA

SEQ ID NO: 131485 - protein, 388 aa, unidentified
MAKIIRIGIDTSKSVFQLHGVDEAERPVLRKKLRRSQMLEFFSKLEPTKVGMEACGASHYWARELTALGHQVVLIPPQYAKAYVKRNKNDPADAEAVCEAMSRPTMRFVPVKTAEQQAALMLVGTRETLIRRRTQLTNSIRGYAAEFGLVAAKGLDKIEPLLARIAKDEKLPALAKEMFATHGKEYERLKEEIAAIEAKQMAWHKENECSRRLVEVPAIGPITASVMVMKVPDAAAFRCGRNFSAWIGLTPKDHSTAGKKKLGVITRAGDEYLRRLLVAGATSVIKQVLAGKCRASPWLAALLKRKPVKLAAVALASKNARVAWKLMVSGERYDRTRYDAGGAPEFAAREVHAAAVTGASASRTSLAPRSKPQESRSKSHQRKQMTNA

SEQ ID NO: 131486 - protein, 382 aa, unidentified
MKSKLSTNTKCSKRTTIKGKAFIGVDLHDSSTCFHTIDSDGGSRTQSRIPTCESLLIDQVNRIDADEIHVAIEETALTHWAVTALRPFCTSVISCDPKENHWISRNSNKADEPDSERLARLHRMGELKEVYHTDDPDRYQFKVSVQHYLDLVDEVIRAKNKVKMFLQRMGRPGFSGDMIYSPKNRAEVLDLMPNADAARCIDRYLRHVDYLIEEVKQARKEYEALGKKYAEIQRFLKMPGVGSVTAHTFSGIIVDPNRFQIAESLNRFAGLGITSKSSDGKALGYERLDKSSGNPIIKQVTYRIFLGAVSAENEIKEYYEQAIRFNGGNKKRARLTTQRKILETLWVIWTKCVEYDPKRFVHGGETQKPSLNNRRARRAKRR

SEQ ID NO: 131487 - protein, 384 aa, unidentified
MQKPNDLNQSRIALKQDSTLIAVIEMSLSSWLVAGIVPGVERQPLKKLAVDESALLKLLNRWREEAEKAGRRIERITVAFEAGRDGFWLARWLRARGIEAHVIHASSVAVSREHRRAKTDRLDTELLKRAFLGWLRGERDHCKMVAIPTTKDEDAKRPNRERQSLVGEQTRIVNRMKAALIRLGIRGFNPKLKKAARRLEDLRTPEGEPIPPNTLAELHRDMERRRLVSDQIRQIEKARLERMEQAPGDGPHAMVRLIARVIGVGIETADMLVHEVLSRKLRDRRAVARYAGLTGAPDESGSKRREKGLAKAGNARVRVGMIQLAWRFLLFQKDSALAQWYRTRTEGGRNRKTMIVALARKLLIALWRLVTTGEVPAGVVLRAA

SEQ ID NO: 131488 - protein, 567 aa, unidentified
MIPRSSPGLLQAGPRPSHNPSPESPPADVQVLRPYGVGIDTHSRFIQVCVMYQFTTADGPVVVRQREAEFKTHWQELVDAKRWVLKILGPLAEPDALRYCIESTGTYHLPVLKAWQGIPSVVNPLLAGASHRKTDVLDARTLAHHSITGLWKASFIPTEQAQVLRVIWARRREMARRATRAANQINNIVLRFGFTFGADVPMRSMQGESILSDLVEGVPVSIDGAPPEGLPAAVRPVIGALVADLRNTIAEARKATVSTENYIKARDWPIGTGTMQGTELLGILRTVPGVGELTALHWLAEITDPRRFENAKQVAAFAGCDPSLKVSAGKVTSYVRRQGNLRLHQALLYAASGLLRRRDDPLGQWGRSIAGRNKKGGHKKACGAVARRIACALWEVHRRGVPFSYEQYRLAQTIFCPPTPLSRIVPARAVQTLRDVGIRNSDQLVIAYNKGLLAAINGLGERSIALIKEWIAKEGRFERDLRKEISGPAGSGARRAKTYFLAPALAFKKQEANGKESNAETEQTSTQGAPGQDAQAPAARPAGTRRAASAERTRARRTGKGAARRAE

SEQ ID NO: 131489 - protein, 461 aa, unidentified
MAKQLGKRKKDGAKADATEGLPPLNLHAAGIDVGSAEHYVAVPPDRDAEPVRKFGSFTADLHRMARWLKDCRIKTVVMQSTGVYWMALYDVLESHGLEVNVANARHTKTLPGRKTDVQECQWLQKLHTFGLLNNSFRPPDEIRVLRGYLRQRENLVAAAATCIQHMQKALTEMNIQLANVISDISGTTGLAILYDIVRGERDPYKLAMHKHSRIRASRQEIARSLQGTWRQELLFVLEPSLDLYQTYQQKIQTCDERIDGQLRSMEPRIDPLSEPIPEPRRGKDARGHQSGFDLRGQLYRIAGVDLTRIAGIEVQTAQTIISEVGVDMSRWKTEKHFASWLGLCPDNRISGGKVLKRGTRHVVNRASTALRLAASALLRSQSALGAKFRRLRSKLGAPKAITAMAHMLARLLYRMLKFGHDYVDRGIAFYENKSREQQLKRIAKQAAALRMQLVPLAEVVS

SEQ ID NO: 131490 - protein, 336 aa, unidentified
MNIKRIGLDLAKQVFQLHAVDHQERVVLRKTLHRARMLTFFTRLEPCLIGIEACGSSHYWARELTRLGHTVRIIPPQFVKPYLKGNKNDANDAEAICEAVSRPGMRYVAIKSEAQQSMQAEHRVRARLIHDRTALSNEIRGILGEFGFVLPAGLSALRKALPEILSQQEKWDNRFIRLLSELTEELQALDERLNRYDRRLKQLAQEDERIRRLQEISGIGPVTASALVAAVGDAKQFKSGREMAAWLGLVPRQHSSGGKTKMGHISKRGDSYLRTLLIHGARAVLNACDHKEDRRSRWLQSVAERRNRNIATVAMANKNARIAWSVLSRGEEYRVM

SEQ ID NO: 131491 - protein, 343 aa, unidentified
MGHYAGIDVSLELSSVCVVDGTGRIVREAKVASEPEALVAWFRGLRLEVARVGLEAGPLSQWLFAAMRAAGLAVELLETRHVRDALRAMPVKTDRKDARGIAQLMRLGWSRPVHCKSASAQETRSLLTARELLRSKGHDTEMSLRGVLRGFGLKVGPTTARSFAGRVRELVAGHPTLTAVAEALLAAREVLGEQLRGLEKRLRDQAREDERVRLLMTTPGVGVIVALTFVAAVDDPARFRSSRSVGAHFGLTPRRYQSGETDVTGRISKVGGAGARTMLYEAANVILTKPVKGSALKSWATRLAARAGMRKAKVALARKLAVVLHRMLADDTPFAAERAAAAA

SEQ ID NO: 131492 - protein, 353 aa, unidentified
MEGMFYVGVDLHKTQFTICILISGAVLEEGTKFEMNKNGYQAFISLMRGLSSSDTYDDIILAIESTANSRFFRDMMIGCGFKVVVVNTLRFKVVNLSTKKTDKNDARTLAEFLSKDILPVSHLCSAESESLRRILKSRNLMVQDIVALKNQAHAVLLAYGHITKTAQFQSKRERNKILEKLPTQIARTVGIIFETIDVVENQKKVLEGKLRTLTAKDPTVNLLMTIPGIGIVNACTIRAYIDDIDRFESYKHFSAYCGLVPWVQTSNESIYYGRITKRGPQELRTALVQCVVAMVRMEDKTSNYKMMHQYQELKNDKSSGKAIIATARKLSRIIYIMLKTNTPFDSRKLTEKN

SEQ ID NO: 131493 - protein, 358 aa, unidentified
MQSNKINFKGQNIFIGIDVHLNSWSVTTITPSGYKRQTSHRADAVELYAYLTKNFPGGIYHAVYESGFCGYSCCYELRELGIDCVIVHAADVPSTQKSRLSKTDSNDSMRLAMSLSNGELNTIYIPPKEVLGDRDILRYRSIVQKGMSRTRSRIKHLLHTNGVSYPREFREPYRHWTRRFIKWLREDVRLLSGKRLELDFLLEDLEHQRSQLLKATGKVRELSRTSRYAEDYGNLISIPGVGLITAMTMLTEVTDIHRFSSQKKFMSYVGLIPVMKDSGETIRQNEMTPRGNQRIRRMLIESAWSAVRYDAQMAAAFGTFCRRMKKNRAIVRIARILASRTYHILKTRTMYHTALCTA

SEQ ID NO: 131494 - protein, 353 aa, unidentified
MNAAGIDVSSRKSTVAVLRPFGEVVRLPFDVAHNTEGLASLAEQLKALDGETRVVLEHTGRYYEPVAKALHEAGLYVSAVNPLLIKEYGANSLRRVKTDKADAVKIARYALDNWADLRDYTPMDTIRYDLKTLNRQFQLASKQRTASANNLIALLEQSFPGIRKCFDSPVRSDGTQKWVGFVHTFWHVECVRKQSLNAFSERYRKWCKRHGYIFKQGNAVEVYSLAKNAVVLVPKSEVTKVLVQEAANQLTSISRSVETYRAEMERLASTLPEYPVVMAMYGVGKSFGPQLMAEIGDVRRFERKQSLVAFAGIDPMPNQSGDKNVRSNKSSKRGSPYLRKTLFNIMGILVCGA

SEQ ID NO: 131495 - protein, 323 aa, unidentified
MGTLDFLGIDIAKKTFDVALLRNDKFRNKKFPNNLEGFKQLDSWLAKQGTIRVHACLEATGSYSEALAVHLHQAGHTVSLVNPARIKAFGQSELQRNKTDRADSKLIARFCLKQSPAPWTPAPPEIRELQALVRHLDDLIHTRSQLENRLSDGQQIESVLESLRSLIKTLNAEIKLTRKKIRQHMNRHPGLKADHDLLVTIPGIAEQTATKLLAEIQHLHQYKHARQAAAYAGLSPMNMDSGTSLKRSRLSKTGNGRVRKALYMPAIVATRYNPVLREFSQRLSRRGKSKMVIIGAVMRKLLHLAFGVLKTRKPFDPNHAIAG

SEQ ID NO: 131496 - protein, 338 aa, unidentified
MNKFSGIDLHSNNSVVVVSDEADRIVYQRRLPNDPVQIRAALAPHREDLVGVVIEATFNWYWLVDDLMKEGYVVHLANPAAIRQYDGLKYSGDFADAAYLAQLLRLGLLPEGYIYPPQGRQVRDLSRKRMQLVQCRTAQILAIENLFSRQTGGQMQGERVKRLDEAQVSGFGFAPDVTLAMQANLAVMQTLQEEIGIIEKRLMERVKLHPDYALLNSVPGIGPVLATTIMLETGTISRFAEVGNFSSYCRCVDSRRESNSRKKGEGNTKNGNKYLAWAFVEAANFAIRTCPEARRFYERKKRARNRIVAIKALAHKLARACYHMLREHKPFEIARCFG

SEQ ID NO: 131497 - protein, 351 aa, unidentified
MLSQAMPPKQEADMELYAAIDLHSNNSVVVVTDASDHVVMAKRFRNDLESIVTALRSCAGEVRAVAVESTYNWYWLVDGLRSAGFEVRLVNTAAVKQYDGLKHGDDFSDGKHLAQLLRLGILPQGYICPPELRALRDLMRKRAQLVRQRTANILSIHNLLARNLAKSVRGDDIKRLGDAEIDGLALLEDQKRAIKANAAVLRCLEEQIQLLERAILAKGRLREEFHGLKTVSGIGDVLALTIALETGDIQRFASVGKFASYARMVNSRRESNGKNKGIGNRKCGNKHLSWAFIEAAHHAVRYDPSIRRFYERKRAKTLAVVAIKAVAHKLARACYYIMREGLPYDGSRAFA

SEQ ID NO: 131498 - protein, 344 aa, unidentified
MDHFAGLDVSVKETSICIVDDTGRIVQEVKVASEPDALLKVLGSQAYCFKRIGLEAGPLSQWLFSALGEAELPVVCVETRHMQAVLKAQINKTDRNDARGIAQMMRVGLYRPVHVKTLRSQKLRMLLTHRKLLQSKAIAIENDLRGTLRNFGLKVGMVGTVNFEARIKELVENFSDLAVLVEPLLIVRRALREQIIILHRRLLAIVRDDEVCRRLMTTPGVGPVVALTYRATVDVPARFRKSKAVGAVFGLTCSRYQSGEIDWSGRISRCGDEMMRVMLYEAAQSMLRSKKWSWLKAWAMQIARRRGMKKAIVALARRLAVIMHRIWVDGTEFRWTREQAVAAT

SEQ ID NO: 131499 - protein, 346 aa, unidentified
MKINRVGVDLAKNVFQLHGVDRKGKTVWKRRLSRGKWLAVLCETAEPGTEIGMEACAGAHHWARQLMQRGYPVKIIPPQFVKPFIKSNKNDANDAEAICEAMGRPNMYPVKVKTVEQQDLQAMHRIRDEIKSHRIAKANQIRGLVTEYGLVAPQQLPALRRAIPEWLEDAENGLSFLFRQLLQGLWGDLYALDQRMAELDKQIAVIAQEDPTARRLQQLRGVGPLIATALVATVGDARQYRKGRDMAAALGLTPRQHSSGGKDRLLGISKRGDAYLRCLLVHGARSAMRTAKDKDDRLSRWIINLQTRRHSNVVAVALANKMARMAWVMMTKGVDYDSDLAAASVR

SEQ ID NO: 131500 - protein, 401 aa, unidentified
MNAVGIDVSKGKSMVCVMRPFGEVVLEPFEVLHTAQSLNDLAGKLKALDGETRVVMEATGNYHKPVAFVLHDAGLFVSVVNPVLIHDYDNNSLRRVKTDRKDAVKIANYTLDKWTRLRQYLPEDDTRLALKNCYRQYQQAVAVRTMLKNNLISSLDLTFPDANKLFSSPAKSNGCEKWVDFIGDFWHSECVSSLSSDAFAKKYLKWCQKHGYNFTRSKSDTIYACAVNAASLPKSPTSKLLIQQQVAQLKAVSQSVAAFQQEMLRLSQQLPEFDTVMEMYGVGPSLGPQLMAEIGDIRRFSSKKLLIAFAGIEPQPNDSGKIVGNDSGISKVGSAVLRRTLFLIMTVVLKTQPQDEPVFQFMNKKRSEGKPYKVYMMASANKFLRIYYARVKAVMDSKHSK

SEQ ID NO: 131501 - protein, 341 aa, unidentified
MQVTTIGLDIAKNVFQVHGIDATEKVVVRKQLRRGQLIKFFEALAPCLIGMEACATAHYWARELTKLGHQVRLMPAKAVKAYVKRNKNDAADAEAICEAVRRPTMRFVAVKSAEQQGRLMQHRVRDLLMRQRTQLINALRAHLAELGIAAAQGREGIKGLLAIVAQDWDSRLPVDAHAGLIVLAAQLQAVQTMIGSIEKRVVGQHRSNEESKRLESIPGIGVIGATAIAAVVPDPKVFRSGRDFAAWIGRVPRQDSTGGKQKLGVISKQGDRYLRRILVVGACSVLRRARQQPEKYPWLTQLLARRPFKVVAVALANKMARVAWALLAKGGTYRAPRLMAA

SEQ ID NO: 131502 - protein, 261 aa, unidentified
MKNYKEAVGIDVSKKTLDAYCYQGEVHKAFVNDISGYKSLLKWVLKVTKASEVFYCFENTGYYSLKLALYLHSQGIYVEESPLKIKRSSGIVKEKTDRLDACLIARYAWFYREELQPSTVKSTSHLELGRLLALRDQLVRNNAGLKGTLKEMQVLLSSPTTDAGCIGLTRSIAYLQKQIKGIEVRITDIIAADVSMSKNYQLLSSLKGVGLVVACQLIYHTGNFTRFNSWRAFSSYCGTAPFEHRSGTSIHRRKQCQAIEK

SEQ ID NO: 131503 - protein, 348 aa, unidentified
MLLHALGIDIAKLKFDVCLMSAEGKLKHKVFPNTTSGFEQVAAWLARQNVLHPHACMEATGTYGERLALFLREAGYIISVVNPAAVKAFAASRLSRTKTDKVDAELIARFCAAQQPLAWTPPALEVRELQALVRRLASLIEMRVAEENRLEAGSAVVAVRASVEEHIAYLCAEIKRTEALIREHIESHPDLRQQSELLDSIPGIGETTAAVLLAELVDVTQYRSARQVAAFAGLVPRERRSGSSVRGRTRLSKIGNARLRKALYFPAITALRCSPFFKEWAQGLRERGKCKMSVIGAAMRKLIHLAYGVLKTGRPFDPEWARKGKNSLTLNTVSNRARRTADTSKSRG

SEQ ID NO: 131504 - protein, 385 aa, unidentified
MDKTNISTAGMGTAFGIDSHSRTTTICALVLETGEMQVRTFRGNPYAEMKAWMAQERFPKPAIGVYEAGCTGFVPARLLSTEDVEVVPIATSKMPTSADSRTRKNDRNDSMRLARHARAGELSRVWVPTEEVEGLRDAVHALEDLKQQQTSARQRVLALLCRHGIVWEERTPGGKMKKPWGGDFWKWLRAIDLGNPGSQAALLACIRAAESADEQYAAMLERVHSLASSCTLAPAIEALQCLKGVGFICAFAFCAGMGDFSRFCSGRKVTSWLGFAPSESSSADSRRLGGISRCGSRLLRTMLTECAWSAVRSRPASSKRCPASVDPHIRERARLLSERLCTRRRLLLERGVAPCKANAATAAELGRFMLFLGQEAQERASAAAA

SEQ ID NO: 131505 - protein, 344 aa, unidentified
MDNHTQYSGFAGVDLAKKVMQIHFVSGDGEITDKQVKRAEFLDFFRNRSKCLIGMEACGASQDWARKLEAMGHEVHLMSPKAVKPFVSGQKNDHNDAIGIYKAMFNGVRRVPVKSTEIRDLQTLRRIRSQVTKDRVKEINHVRGLLAEYGIVMGKSITAFNKGISSALESLKERGDVSPLVAEELQTTVESIKTKIERQKRLDREIEQLARGCKNYENFLKTPGVGPFTAAMLCVLLCDPDIFANGRQFAAYIGLAPRSRGSGGKNYVTGIPSKFNCDSESRAVFVECAQALARYKNKSPWVDGILRRKPKKVAVIAIANKLARQVWAMANKGESFKQMTILTA

SEQ ID NO: 131506 - protein, 392 aa, unidentified
MFYLGIDIGKNTHVASLMNEKSKLIFKAHSFSNTSAGAATLLAKLTPYTAELEIGMEATGHYWLSLYSFLIEHHFIVHVINPIQTDGWRKGTDIRKRKTDIIDSVLIADFIRYGDFLETSLTDEDTMSLRNLSRFRNYLVSSIGDLKRKTICVLDQIFPEYHHAFSDVFGKTSKELLLYLNSPGDYEDITSEQLEELLSQVTCKGFAAKKFQEVSSLARTSFGITFCVDSFSFQLKLLIEQIDFIEKQVSDVESQMSELLEKIKTPITTIPGIGDVTAATILGEVGDIHRFSNGAKLVAYAGIDASVSQSGEYECNNNHMSKRGSPYLRKALFRAAFVASNTDPVFRAYYQKKRMEGKHHNVAVGAVARKLCHTIYAVLKSNVPYEVQAPRD

SEQ ID NO: 131507 - protein, 357 aa, unidentified
MRFYTKQHQFYCGIDLHARTMYVCILSQGGEIVLHRNMPSRPEALLKAIAPYRDDIVIAVECIFTWYWLADLCAQEGLPFVLGHALYMKAIHGGKAKNDKIDSQKIAVLLRGGMLPQAYVYPGAMRATRDLLRRRMHLRRKRAALLAHIQNTNSQYNLPEIGKKLAYKGNRDGVAARFLDPAVQKSVEVDLALIDHYDRLLSDVELTVVRTAKQHNAQALYRLQSVPGIGKILSLVLLYEIHDITRFPRVQDFVSYCRLVKCAKESAGKRYGTSGKKIGNAYLKWAFSEAASLFLRNNAQGQKFLARLENKHGKGKALTILAHKLARAVYYMLTRDTVFEMDTFLNGYGSRAGEPAA

SEQ ID NO: 131508 - protein, 384 aa, unidentified
MNTAATRTGKYSVEGPVLYLAFELGNMEWKLGFSVGFGQRPRVRTIPARDVEGLQREIDLAKTRFGLPATARVMSCYEAGRDGFWLHRYLVEAGVENLVVDSSSIEVNRRFRRAKTDRMDVAKLVDQLMRFERGEKKVWHVVRVPGAEAEDRRHLHRELEDLKAERTQHINRMKGLLAGQGVRLEEIGSGFPDQLNAIRLWDGRPIPEGLKARLEKEYERLQFIQGQIRELEAQRVEAIRRSADPEVEMVRQLLRLKGIGLNSAWVDTMEFFAWRDFHNGKEVGGLAGLTPTPYQSGDSSRERGMSKAGNRHVRALAIEIAWGWLRYQPESELSQWYQRRFGDGSSRVRRIGIVALARKLLVALWRYLETGLIPQGAVLKARLI

SEQ ID NO: 131509 - protein, 473 aa, unidentified
MGKGSGVSRSDRRRNARRERLRGLLPRDGAVVGIDLGDVKQALCVVDHDVRVVWRRTARVPAHRLGDALDEAAAAARAAGFPRVTVACEPTGPRWMQVQRLCAERGLALVCVQPLVSHIAREQEDLTAHKRDESDSVLIARLAAELHCYVPEELDEAWAHLRQLGRRREQLVRASTASVLRVRDFLSSAWPSAASACAQPFDSVTWLAALQVVVSRCGADPARMGAMGEGEFAALVGAAVPGWGGKRADARVARGVLAVLDDPDAVGWSRRGLFRRIADELGDLQRARAQLKAVQADMARVLGQELGLGRLGGIPGLTLMGAAVILAEAGDPNRYETSSSLVKHAGLSPADNSSGAFEGGSRISRRGRPALRTAAWRMIFPLLLHNPVMAAKYRALVAAAEEAARAAAARARPGSAQAAQASRAVRSARAKARVACAASLLRWIYYMAVHGADWDPAAASGGRLGAAPQAEAA

SEQ ID NO: 131510 - protein, 318 aa, unidentified
MQAQAATVYVGIDISKSSVDVDSYPVAQPACFTNDEPGRAAAASFLRGLQPSLIVVEATGGLEAPLVGQLATAGLSVAVVNPRQARDFAKAIGVLAKTDRVDAQMLARFGQAVKPAVRPLKPEETLALEAVLTRRRQIIEMITAESNRLSSAAPRIAKQIRQHIAWLEKRLDEADQDLDGMLRQSPVWQHQAQLMTSVPGVGRVTAVTLLAELPELGTLPRREISALVGVCPYSRDSGKYRGRRSIWGGRAVVRAALYMAAIVASRHNPVIRAFYQKLVAAGKLKKVALVACMRKLLVILNAMLKHDTPWHHQPQLAA

SEQ ID NO: 131511 - protein, 435 aa, unidentified
MNSADDIRQEQFLQLKKEIRGSDQYLIVGIDVAKEKHNAFFGTARGKTLVKSLVFDNTIEGFEKLDAHIERVKVQYSLSKAVFGIEPTANYHKPLAEHLIKCGRMVVLVGGVAVRNNRQLLDGRWDKHDVKDAANVADLISQGKCLFYEYPLMTLRNVRILISLKRRLKKREHGLSVCIRNNLIAQYFPELDQHYGPLETLAVVRECLAPSEIAGMEYDEFCRTVSPGKMTLAKSRRVGTIWRAAVNSIGCTMGEAASVEAQVMVDSLKQIRQTIKSVEDKLEDACMEFPEYTYLLSIPGFGPDVSSKVLGAIGEPHRFTSAKQVLKMAGLDLCASRSGKTSSSATPVISKQGKADLRYALYQSALIASLKNKDFIAYFTHKLHGRAKEQGIGTKMRVKLAAKLLIIAWTLMKKKEFFDPNKLKQEEHAEQKKAA

SEQ ID NO: 131512 - protein, 425 aa, unidentified
MPAKTLTHYIGLDVHKDSIAVAIAVENGELRFYGKIGGKAADLDKLIKKLAHPEVELRFCYEAGPTGYVIYRHLKKLGYDCRVVAPSLIPRKASDRVKTDRRDSQTLARLFRAGELTFVHVPLEEDEAVRDLVRARLAAVKDQRRARQRVKGFLLRNGFVYEGKGSWGPSHLNYLARMKMPTAAQQIAFEEYKDAVTVTTDRVQRLSEALEKQLETWRWKNVVLALMTLRGIQTISAMTLIAELGDLSRFDNPNQLMSYLGLVPSEDTTGDSRKLSGITKAGNESSRRALIEAAHHYRLPARLTRTLQERQHNQTQEVRAIAWKAQGRLHGRYCNLASKGKKTQIIVTAIARELVGFVWAIACTAMGRPPLPKADPPVKRSENSNSKTANKVYRLNPNTKYQPAKNQPGSATNPKPQSEEVCVVK

SEQ ID NO: 131513 - protein, 349 aa, unidentified
MGHATRIFIDTSKNLFQLHGVDADEQVVVRKRLRRGQVLEYFARLSAPVTVGLEACGGAHYWARQLVKLGHEAKLIAPQHVKAYVKRGKNDARDAEAGCEAMSRPTMRFVPIKDEARQAAQMLSGVRQRLLRERTRLTNEIRGYASEFGLVAAKGLDKIEPLLASLAAAEGLPALAKEQFAELGKELAGLETQIEKAERRFLAHQRQDELSRRLETIPGVGPVGAMMLSTKTPDPHLFKCGRDFAAWMGLTPKDHSTAGKVRLGVITRAGDEDLRAVLVSGAMSVIQHAQAGRSPPTPWLAELLRHKKPKEAAIALANKTARIAWKLMVSGQAYQAELHAQATPLPAVA

SEQ ID NO: 131514 - protein, 353 aa, unidentified
MVYAPNEYDIFIGIDVDQKSFSFTVKNHDTLSNSYKIPSSPENLYQHIRNRYNTKRVICAYEVGVTGYYLHDYLTSKNIRCLMVPPPSVPKASNDRTKNNRLDSERISQHLKNGDMMPIRVPDYDCRELRQLLRSREEYVNMRKVAKQRIKSLLLFSHLHILLKDTAQYWSYSHIKRLKELPCSPATRQRLDLLLKDLDYARAQTVIILKELKKLSERNVVFNRNIHYLRSIPGIGFITAITILASIGDPQQLRNPRELSAFTGLVPSEYSTGERISRGRITHLGSSVLRSLLVEAAWANIAKDARLRQFYDRIRARHHPQIGARKAIVAVARKLTLIIYRVLKEQREYIANI

SEQ ID NO: 131515 - protein, 427 aa, unidentified
MGFTKPIEHFNLQRKKVITMNTLYVGIDVSSKSNVVYLMLPNGDKHNNFSVANSHEGSTQLVKRILSALTSHSLDTVLIGLEATSVYGDNLVYFLREDATLAPFNRKIHVLNPKQVKKFHDAYNDLPKNDYVDSFVIADCLRFGRINKEVYMGDYRYKALQNLTRARFFAVQNLVKEKQRFMNVLFKKYSTMTQEKVFSDTFSTTALAVYDEFESAEALANMDLHELTDFIIEKGKNRFPDPDAVAKAIQKAARNSYRLPKTVNDSVNQVLSISITSMKALESQIKEFDKAIKAQMELLPNVLISIPGIGPVYSAGIMAEIGDINRFNSQAALAKYAGLAWKQHQSGGFESEVTRLIPSGNRFLKYYLCEAAFSLVRCDKEYSDFYHLKYKEVNRCQHKRALALTARKFVRLVFRLLKDNRLYCPAK

SEQ ID NO: 131516 - protein, 347 aa, unidentified
MEKASQAEVQVFAGIDVSARELSVAVQCGIKEGIAITTFPNKAAGHQALLAYLLRAKGRARVCLEASGNYSLDLAFTLQAHPQVEISVVNPRRARRFAESLGERSKTDPVDARVLCEYALRMPWVPWVPPSLAALRLRSITRAIEDLVAMQAQEKNRQHALLASDALPALLIRELEQHLRYLKLRITRLRREALRLIARNPELNRRFHLMLTTPGLGETSSLQILGELVVLPETLDARQWVAFSGLDPKQFSSGTSVEKKPRISRGGNRHLRRALYMPALVATRHEPFLPDFYQRLLRRGKAPLQGVVAVMRKLLHALFAMFRRDEAYDGSKLCPAEFARHTAVVCV

SEQ ID NO: 131517 - protein, 444 aa, unidentified
MKYQKVLTMLESIPYLSVGLDVGADFTWMSIMLPNGSLTGKPFKILHSDPASRDLAVTKIKEAQEMYSLESRCFLESTGIYHIPLLYFLRDKGFDCSVINPIITKNSTNMNIRKLHNDKFDSKKAAKVGLDASLKTSIVPDDSVIDLRNLVRDYYYFKDLQSAVVLKLNAELKVSFPAYLKVFSKITTQCSLKLLEAYPLAADMLAAKDEIVETIKSTARFGEKYALSKYDAIYAAAEDAAVFGRALKSNAVRIRLYISIYKEYQKHLDDLLVALHESVDKLQGTSVYGRIDLLQSLRGVGFLSAVVLIAEMGNFDLFSSPKKLYAYFGLDPAVKQSGKFNGDKVHMSKRGSSLARRILHMVSLNNLKVDKGTKAPVNPVIYDYYTDKCKSKKKNVAVGAVMHKICNIIFAILRDNKPFEIITQQEHCKRYAAKHPDKAGMNAA

SEQ ID NO: 131518 - protein, 347 aa, unidentified
MRFYTQQHPHYCGIDLHARTMYLCILNQAGAIVFHRNMPADPDSFLQAIAPFRENIVVAVECIFTWYWLADLCAREKIAFVLGHALYMKAIHGGKAKNDKIDAHKIAVLLRGGMIPTAYVYPAEMRATRDLLRRRMHMMRQRAELLAHIQITNHQYNLPDIGKKIAYRSNREGVAERFADPSVQSNVTFDLKRIGFYDDLLNQIELQILRHAKKHDANTFHLLDSVPGVGKILGLVLLYEIHDISRFPSVQDFASYCRLVKSKKESAGKVYGSSGNKIGNAHLKWAFSEAGVGFLRNNPQGQAYLARLEKKHGKAKALTALAHKLARAVYHMLRRKEAFDMKRFLNR

SEQ ID NO: 131519 - protein, 335 aa, unidentified
MHYLYYVGLDVSKETFDASLVAFEDANEMAHRKFANSRKGICSCLHWVEKRHGIRLDDVIFCAEDMGELHIREAVCASDRTLNFNFSLISPLVIKYSMGIARGKTDRVDARRIAEYAITHYRKIALYLPAEKELCQLRTWLILRAHLAKQRVAKLVLLEKLDYKEKFADVSIQRSMLQEEIAYAETHMKTIEREMKELIAADSNICRNYKLLTSIKGVGPITAIVMLCSTLNFTKITDHRKFACYCGLAPFEHSSGTSVRGGCHTSSMANRDIKVQLNRSALIAIRCDPQLKAYYERKVAEGKHKFSVLNAVRAKIAARCFAVVRRGTPYVALQI

SEQ ID NO: 131520 - protein, 311 aa, unidentified
MQHTIGIDVSKDALDIHRRADDATIQLGNDTPGFRRLLKWIGPDEAPLIVFEATGAYHRSLEKFLTAHDLPFVKVNPKQARRFAQAIGKLAKTDRVDAEMLSRMGSALDLQRQAPLDESQHDLKEMLTARRALIKDQSAAKARLATATVPLIRRQLRQRLAQIERDVAQIDREMADQTGSDTDRTERMGILTSIPGVGLLTAITLLVDMPELGTLDGKEVAALAGLAPITQRSGTWQGAARIQGGRASVRRALYMPTLVAARFNPDLKAKYTQLIGAGKKQKVALTAIMRKLIVMANALLRGRRKWVEINH

SEQ ID NO: 131521 - protein, 346 aa, unidentified
MMIIGCDFHPSWQQVSWLNTETGECGEKKLVHALGEAKEFYQQLAAPVLIGTEATGNSQWFIELVQDMGHEIWIGDAAQIRASYVRKQKTDKRDAAHILKLVVEGRFPKLWTPDREQRDLRQLVLHRHKLVEIRSRVKNELQHLSLNKGMQRQAKLWSAAGQKLLRELPLKPWAGCRREDLLGLLGMLNEQVGKLDQAVQQAAEKHAQARLLMTQPGVGPNTALAYVLSIGDVSRFPRGKQVASYLGLIPREESSGGRQKLGAITKQGNRLVRSLLVEAAQIAVRFDLGMKKQYLHRCHQKPKGVAKVAAARRLAVRLYWMLRTEKPYPEIVRIESSPRVPLVGAS

SEQ ID NO: 131522 - protein, 328 aa, unidentified
MKIKNNQTAFLGIDVAKKDVKVALKVGSDYVQNSFDNNASGFKKCRKWLNQFGRPHQIHACMEATGIHHLALALDLNGYLKTVSVVNPRCPKAFADSQLRRSKGDSVDSRIIADFCEAMKPQAWIAPTQKELEIKELARRVQGLTEMISAEKNRLKDAICENLTQSIERNIAFLQQEKAQVSKLLISIIEADPVLCSRMELIDSIPGVGKATAAQLVAELGNTDWCETARDLAAFAGITPRHRQSGTSLNSKGKISKVGSSRLRAQLYMPALVAIKHNPIMKAFANRLRENGKSKKAVVVAVMRKLLHCVFGILKNQKPFNPNISCSI

SEQ ID NO: 131523 - protein, 451 aa, unidentified
MNHYSLFVGIDVAMRKHDCCIMDKDSKILLKKFTFSNTLPGYQKLVDKLTAITTDKACISLGMEVTGIYGDNLYERLKMDGFNVIMIQPESVNSYRKYKKLPKNDKLDARCISEILVRNEAVPVSPQKKEYAELKSLTRRNACLKKTLTQEKNRFLARINVYFPDLLNVFKTGFTTMKAVFSSYSTPYSIINADQEELLTLIKSASKNRYGEEKMKELVEAAQNSIAVRTHISDEERFHILSLMDSVHYLESQIHELERLIDAKASHFPAYRMLLSFTGCGKPTAATIIAELGDLSRFHKASQIVSFAGLFGYNSDSGDSVNKRGKLSKKGSRELRHALYMVAEFARRNNPILKDYFTRKKNGDRKKHILAVNTVANKLCTILFSIMRNESLYVIKYRDLAKLPELTRNEFFHNIETDFSATTRKKKYFYEDALGEVHEFVYRSTSMLSIE

SEQ ID NO: 131524 - protein, 338 aa, unidentified
MTIVMGLDQHRAQVTADWLNTETGEVGRARVTPAHRDGVRRFLGRFAGQDLEVALEATTGWRFVVEELQAIGADVHLAEPAETSSLRGNKKRAKTDRADARHLRELLMVGRLPEAWIAPGHLLDLRARVRLRHTLVDQRGEWQQRIQAVLYHHGVAQRRDLLTADKRRWLEDLELPAAAREQVTVALAVIDALDAQSEPLTRELRAYGRRQPGCRALMRHYGIGALTAVTILAELGDARRFSSSRHAVRYAGLDITVHQSDQRRAPGHLSRQGPPALRWALFEAAQCARRPGSPDHAYYQQAAERLGGNRVCLAVARKVLKRSYHTLRELGDEALQPA

SEQ ID NO: 131525 - protein, 310 aa, unidentified
MEPLFVGIDVAKDELAIHIHPKAEAFSVPYDDGGLARLLARLHELAPMLIVCEATGGYEIPLAAALASADLPLAIVNPRQVRDLARALGQLAKTDTVDAKIIALFAQKVRPTARPLADETARRLGELVTRRRQLLEILAGESNRRPLVRDRAVRRRLDAHIAWLRREIRDLETDLGSIIRGSAVWRETDDLLRSVPGVGPITSASLIAELPELGQLGRRQIAALAGLAPINRDSGQWRGRRCIGGGRRVVRSALYMATVVAVRYNPVLATFYARLRAAGRPPKVALTASMRKLLTILNAMLRDRRSWQPA

SEQ ID NO: 131526 - protein, 425 aa, unidentified
MIKINYMSTLFVGIDVSSKSNVVYAMDFDENKYIDASFGNNQPGADELAGKIAACIQKHPHLNTIIVALESTSVYSIHIANFLSSCELLMPYKPYVYCLNPKTTANYRKSYVGMDKTDHMDAFLISDFARVGRTKKCEPWRGSQYLALKRLTRHRLHLAECITREKTYMVSNLYLKFSELQLLDNDSQPFSNIYGATSSAVLTEFMSLQEIIDSPEEELLQFLASKSRNRIADISRTSELLKKAARDSYRLDKCMYEPLNVSLASSFNCIQTYQKEIKLIDQAIEKCINGMNPNAFIILKSIPGIGPVWAAGILSEIGDITAFHSSDALAKYAGLTWLKNDSGDFVSEDNCVSKAGNTYLRYYFGEAANSVRRYVPEYAEVTKHQHKRALALTSRKFVRLVFGLLVKNQLYTGEKLDAELNTESE

SEQ ID NO: 131527 - protein, 323 aa, unidentified
MNHKVGKDNTVARFIGIDVSKQWLDVACLPERETRRYGNDCAGLEQLCTWIVPLAPELIVMEATGGFETNAATALAAGGLALAVVNPKHVRDFARAFGILAKTDRIDALVLAAFAQKVHPPVRPLPDEERRELIDLVDRRRQLVTMRAEEKTRLTQATPAARQDIKEHIEWLNERLRRLDIDLTAKLRSSSLWKTKEQILTSAPGVGRVTVATLVARLPELGTLNRRAIAALTGVAPFARDSGQHRGRRMIWGGRADVRNVLYMATVTAARINPVIRSFYLRLKQAGKPPKVALTACMQKLLTILNTMVRTNQPWQTPPTQTI

SEQ ID NO: 131528 - protein, 341 aa, unidentified
MTVIIGIDPHKATHMAVAIDSSEYPIGRLEVRADGSQARRLLAWAVPLGEERMWAIESAGGLGKLLAQQLLTAGEHVVDVPPTLSARVRLLGATKTGKNDGNDALSTAIAGLRHCGLRAVRGDDHSTVLRLLVGRYDDLVSLRTQATCRLHAVLRELVAGGAPLRLSADRAAKLLRSVRPEGLAGLERRKLAADLLNDVCRLDRDLTAIKSRIRDAVDASATTLVELHGVGPIVAGLLLAYVGDPGRFPTAARFASYNGTAPIEASSGPRKRHRLNPRGNRKLNHAMHLIAVTQIRHDTPGRVYYNRKLAEGKTKKEALRALKRRISDAVWRQLQVDRAAR

SEQ ID NO: 131529 - protein, 349 aa, unidentified
MVIIGIDAHKRTHTAVAINEAGRKLGEKTTRATTTEANLELVRWADGFGPSRRFAVEDCRHLSRRLEADLLAAGEQLVRVPPKLMAHARDAARTYGKSDPIDALAVARAVLREPELPTARLDGPSRELRLLVDHREDLVRDRTGQINRLRWHLHELDPSWDPAPRALVRFKHLDELAARLDSLEGTVAWVSRDLVARIRELTVAANELERRIVQEISRLAPALLGLAGVGALTAAKIVAEVADVRRFRSKEAFARHNGTAPLPVWSANRTRHRLSRTGNRQLNAAIHRIAVTQIRIHEDAKAYLERRLSVGNTKTEAIRALKRKLSDVVYRKLLVDAGALSQASFGEAA

SEQ ID NO: 131530 - protein, 483 aa, unidentified
MVRKPASRPDLKAFPMLLNESLYVGVDIGKYQHVAGFVSRTLLERHERFEACPALEFPQSREGFRSLIDRIASLAALSQVYVLLEHTGHYHRPLVQYLQEFAIPVYIMPVQQRPVGLLKSDKRDALNLANHLYNQLELGAQLTDKTHLVRQLLPATETALQLKGWMRHRYELIREATQRKNKLTAICDELFPEFTQVVKNPNGPTALALRERFPTPAALATAPFADLAQVRGKQSKPSNKQLAELQRLALQTIGTKDLVRQRGLLLEQQQLIRELKVLQEHIEQLDTAILELVKQSREGQILTSIPVIGPIQAAAIIATVGNILNFKKGSELKAYFGWAPRKEQSGTSLDRAALAHTGTRMMKQMLFFIVANAVQKKDCEWAKLYERLVPRMCRYDERKRAHRGKLKVMVRIAGQITEMIYALLKQDAEILSKVPPGQEPPPPILYNPEVHRQHRNGQYRPLKNTLRQRKVIQLPQNVPARDR

SEQ ID NO: 131531 - protein, 359 aa, unidentified
MVMLAEHYDFVIGGDPDRDTIDLAILEAGAGRVRGQTVDRTDGPAYSRLLAWARQHAPGRRVWALEGTSSFAAGFVTMLAEAGEDIVEIPGQKRSRRAKNDRIDAVQAARTALAQTEQAAPRERGLREALRQVLVTRQGVLVSRTKAINELKSLIVVAPEHLRSQLRSLPLAKQLDRIERLTSPVGASVEHRVTISTLRSIAARIRFLITQTADLDAELATLLPQHAAGPALLAEPGVGPVVAAQFLVSWSHRGRVRSEAAFASLAGVAPLEASSGQRTRHRLSRAGDRDLNRALHTVAITRLRCHDESRAYETKRAAQGKTHRDIRRSLKRALARRLYRRIQAATRPAAAFNGLAHAA

SEQ ID NO: 131532 - protein, 375 aa, unidentified
MYIVGIDIGKNHHEASIVSPEGKQIGRSLRFATTHKGADSLMSFIFKNIGNSPCVFGMEATGHYWYPIYSFLKAKGYTIYVINPIQSDSLRKMYIRQTKNDSIDSFLIAEVIRFGQFGTTSMADENILAMRQLCRYRDSVISSRTEIKLRIGTIMEQIFPEYEKQFSSLWVSTSMGILEKYLTPENIENAPIDELFEIIKDKSHNRLTRAKAISIKEAAADTFGIKIAQDAFSFQLKQLIDRMNFLDKQIEALDCQILEYYEKFDCYLHTIPGIGMIAAATILAEIGDINRFKSSSALVAFAGIDPTVRQSGEFSSTHNHMSKRGSPYLRHAIFLAATTCSFHNSPLNAYYKKKRDQGKHHLTATGAVALSLIHI

SEQ ID NO: 131533 - protein, 439 aa, unidentified
MNRRRDRVCGADVHKDLIVATITGDDVLPIQENFGTTKAELKRFRNWLVANKCEQVAFEATGVYWMPIYDALSKTIDTIVANPLQIKTIPNDKSDSKDSNRIATLCLNGQIKRSRVFTDEDRDLRMMTRARSGYVKTRTQFRNRIHKYLSSSGITLSSTMDDMFCKSGRYILDGLAKEKPLEEILKGIPSGKIRKKKDEIRAALENTLNDTNRMLLTDALEILDNLESKMEKLSLEVLKKVQQKSKDLAIVMSIPGIGFVSGSVILSEIGNYRDFQTPDQLAKWCGLNPGENESAGKKKKCGITKRGSKHIRVVLVQAAQTISNMNKTAMSRFFQRLIKKKERNVAIVAVARKLICLIYHLLINQELYQEDDGRKKRSSQDKSCQAPSFKEEHLTDRVAAIVDAFYHLKESSRKNALMREIADISGIKVGQKRPSKGGG

SEQ ID NO: 131534 - protein, 294 aa, unidentified
MVIYFLGQTYSIENTPQAIRAWLKGLPAHCEIAIEATGTYHMDAIELAHRKGHHIYVIDGSRLHHYRKGTGGRAKTDASDAQLLARHLQHEKEALRRWSPPPKAYRTLQILLRRRAALVKARTIIQQSLGAEPLLKAGLKRLISQINTLDAQIQKHLRDAVREAGLCDQVKRCKALEGVGDLTAYALVMAFLRGDFRNSDAFVAFLGMDVHVKDSGTKTGKRKLTKKGDSETRRLLYCAAMAARRSKRWAGVYQAYLDRGLATTQALVILARKLVRIAFALMKNGTDYQPAPAS

SEQ ID NO: 131535 - protein, 337 aa, unidentified
MKYSGIDLHSNNAVVAVIDDQDRVLYCKRLANDLSSIIAVLARFHEDLQGVVVESTYNWYWLVDGLMAAGFAVHLANTAAIKQYEGLKYAGDERDAVFLAHIFRLGLLPEGYIYPPEERGLRDLARKRMQLVQQSTLNTLSIENILARQMNLRFNAEQVRHLDSAAVTSLGLPPHIEIALAANLAVVYTLQAQIRVIESTLHREAKLRPEFAILKTAPGIGVTLATTIMLETGTISRFRTVGQFSSYCRCVESRRVSNGRKKGEGNAKNGNKYLSWAFIEAAAVAMRSCPQARRFYERKKARRLPVVAMKALAHKLARAAFYMLRDGKPFEVTKCFG

SEQ ID NO: 131536 - protein, 434 aa, unidentified
MTTDSAAVRATKGKLMKPWIEITHYAGFDWARDHHDVVIVDRQGQIAADFHIEHSLAGWQEFRDKVKPYPALAVAIETNQGAAVDQLLLLDCALYPVNPLSAKSYRERKAPSGHKTDRLDAWSLAEALRLEGQQWKGLQPLDPLTQQLQLLCRDEIGLIEQRTALINQLQQALVEYYPAALQAFDDWTQPFCWDFVIQFLTPEKLATAGRRRWEKFLHAQKLWRPETAPKRMEIFQNARQFRGSEAVTSAKSLLALSLAKLLNALQLQLDQYRQQITALFNQHPDHDLFGSLPGAAQILAPRLLGEIGGTLQRFEDTEALQCVAGTAPVSFQSGQIHRVHVRYQCNKVLRHTVHLWAQCSLRVCPWADVYYRQKRAEGKSHACALRCLGQRLLKILWRMIQTRQPYDADLHARNQKQHGSWVLALSKPAPQTSQ

SEQ ID NO: 131537 - protein, 344 aa, unidentified
MEHLGIDVHKVESQICILTESGEVVERRIRTQRERFAAVLGERPRAKVLIEASTESEWVARCLEELGHEVVVADPNFAARYATRSRKVKTDLRDARTLAEACKLGAYRAAHRTSDRQRHVRTQLSVREALVQTRARYISLIGAVLRREGLRVASGSAASFVRRVAKLALPGQLKSEIAPLLAVFVSVDRQLVWIDTRLEHLARTDETVERLCTAPSVGPVTAAAFSSTVDDPRRFKSAHQVEAYLGLTPSEWSSGEKQSKGHITKAGNTRMRKLLVQVAVSILRLRSPRTEALRKWATGIAVRRGKKIAIVALARRMAGVLFAMMRDRTCYLQPALLAPAAQVA

SEQ ID NO: 131538 - protein, 346 aa, unidentified
MVIVGCDFHPSWQQVAIFDAATGEIEERKLMNGNGEAEQFYRSLPAASLVGMESCGNSQWFVELLERLGHEVWIGDAAQIRASYVRRQKTDRRDAGHILKLLLEGRFPRLWRPDAEVRDLRQLLIHRHRLVQIRARVKNGLQHLAMNRGMQKKSKLWSAAGQRAFLALPLPGWAGCRRQDLLALWAKLDEQIKPLDAAVEQVALAHPQARLLMTQPGVGPITALAFVVTIGDASRFPRGKQVASYLGLIPREHSSSGKQRLGSISKQGNSFLRMLLVESAQSVTRLDAGFRKQYQHRCHRKPKGVAKVAAARKLAIRLYWMLRSNTAYPEIVHNESSSRCPMASAS

SEQ ID NO: 131539 - protein, 393 aa, unidentified
MICVGIDVAKDKHDCFILNSEGEVLADVFTIPNNAEGFDQLLQTIRRCARPEDKMKVGLEATGHYSYNILGFLLNEGLPTYLINPLHTNLYRKSLSLRKTKTDRIDARTIAAMLMSDVDLKPYTDTAYHNEELKSLTRYRFDKVCERAKLKQSVSRLVTILFPELEKLVPTLHMASVYALLSEFPGAKQVAGAHLTHLKAVLYDASRGRYGRDMATTLREAARCSVGSVMPAKSLELQHTIRLIRELDAEIEDIETAIQSMMDEIQSPITTIPGIGVRMGAMILAEIGDFSRFDSPDKILAYAGMSPSTYQSGQLSLSGTYSHMEKRGSRYLRYALYNATKYVCLWNPTFAAYLAKKRAEGKHYNVALSHAAKKLVRLIYAIEKSQKPYCSAA

SEQ ID NO: 131540 - protein, 374 aa, unidentified
MDDHSVAYVALDTSKLRNAVATAEAGRDGEIRYLGEIDNAPAATAKLARRLAKKHAVLTFAYEAGPTGYGLYRQIKSLGHDCIVEAPSLIPQKPGDRVKTNRRDALSLARQLRAGDLTAVWVPDPHHEAVRDLTRARGAAVRDQRAKRQQVSALLLRLGLHYPGKTTWGKAHMAWLAGQKLAHLEQRIALEEMLHAVRQAGDRIARLEHAIHTAVPDWSLAASATALMALRGIEFIAATTLLAEIGDLTRFRTPRELMAWLGMVPSEHSTGERIRRGGITKTGNRRARSVLVECAWSYRHPPRVSRDKLARLEAAPPAVRDIAWKAQSRLTARYRALRRAGKLDVVAITAVARELAAFIWAVGLAVGSGRTPEV

SEQ ID NO: 131541 - protein, 387 aa, unidentified
MTSKRIHIGVDVSKDKLDYFAPGARRAKTVANRPSAIRSLVALAGQNGWAVCCEATAIYALALIEGCHTAGVPVAVANPWRVRHYAQGKGILEKTDAIDARVIAQYADENQPRPASEPTGDERLLRELTDGREFYLRQIQEVSGRLEQCPRGSAIRKDLERTLRQHRATLERLEERRARTIASNPYLAHRLERFTRVQGIGRTVAMNVMAAMPELGNLSDKAAAKLAGLAPIPEESGKERKKRKIAQGRLDVRNSLYMAALVAARHNPVLSAFYEGLVAKGKPGKLVLTAVMRKLIVLLNRIARDEAFLPLPGGGKTKKHPSQDRQTKRTHPRHAPVPKPRARKTEPSHPKFPDGGGLASEESRELQDDGTQPTRPISDVNQNGKIV

SEQ ID NO: 131542 - protein, 415 aa, unidentified
MTENHPMPEAMTLVAIDIAKSYHDVLVEPPSPARRRRFRVANTLLEYQRLAMYLRQLATRVLVGFEATSNYHRTLAYFLHRQGFDLRLIPTLALARTREAMHNSWDKNDPKDAQVILHLLKTGLSQTWHDPLLNGTNDAQELSKTYHQVTLARTRVGHSLRNHYFPLYFPEIEGFIRSNHSDWLIQLLLLFPTPGAVTALPREEFIAQAWSIIGRKVHKADLLANIYAAAQRSVGLPVTTDSPAVSMFRLMLEQYLTLGRLREQITVHAEAALAGDPDCRRLMTAPGIGPTTALTILAEAGDLRRFMHYRQFLKFCGMSLSTQQSGHFRGRSRLSKYGNARLRTAFWMAAKVAVRMRENSLRRKFDRYVRANPLDADLQRKAYSAVAAKLARIVYGLIKNETDYRPFFEEAIPGG

SEQ ID NO: 131543 - protein, 382 aa, unidentified
MMYAGIDLHKQFCQCYVEDEHGQQVRSAKVKSEVKEVITFFDYLPDKVSIAVEACGIKDNLIDELRNKGHKVVVSNPAKNRLIAEARIKTDKIDAKILADLLRADMLATSYYPPQEIRQLRTLVRQRAYYVKRRTACKNKIHRTLLRNGTKIPYDKPFSKKGITFLRTNNYPDAIFIQQLLHSIDQDTAVINALEQQIQETGSTIKQISLLRTTYGIDWINAATIWSEIGDITRFKNHKKLVGLTGLIPRIHQSGQTSYTGSITKQGSPILRYALVQATHTCIKQKNHIKSFYLHLVRAKGKKKAIVAAARKLSISIYYMLKNNQPFIPYCHNMTRQGRGKPDQQLVLKTRFCDWDTATNCRNVTSVTPSRMNTDGRMCQSP

SEQ ID NO: 131544 - protein, 419 aa, unidentified
MAFKILRKNCCGLDIHKTWIFACIGITDSNGRTEYKQARFSSFSNGLRDLADWLAKYSCSDVCMESTGKYWIPVFNILEKTCWVTFAHPKYTKPQKGNKTDRKDAKWICDLYMCGMVKPSFIPPPDIRQLRDLMRYRVKLTNMLTGEKNRAQNCLTVSNLKLDDVFSDVFGKSSRSIIQYILEHPGEQFDVTPFIHRRCKHPVEEIQAAVDGVVSREQAAKLKECLLHIDQLNAHRERIEAEILRLAEPYPYQLELIRTVPGFAAAPLTAVALISEIGVDMSVFPSAKHLASWAGCCPRNDQSNKKVKSTRISRAGCYLKPLLVQIANAVIKSDRHPECRERYRRIKARRGHKKAIIAVCRMLLTAIWNVLSKLEPYSAKGYLADKLTEHSVVISKAEGLALLRKRGYIFKDELAVESG

SEQ ID NO: 131545 - protein, 352 aa, unidentified
MEEYKISGQEGKIVFVGVDLHRFKWHVTVRTEDQELFSGTLPGHWEALRRLLDRYRGDSIHVVYEAGYFGFWLHDRVVAYGAHCIVTPPSLLPQEYGNRVKTDRRDSRKLAYLLSKGMLKRVWVPSLQERYHRQVIRRRRQLIGDRVRTQNRIKAELRFYGIELVEPRGPWPRSYVERLWCIRFGNRWMQESFERLLEQYEFLTEQIAKQTQLLRELSETPCYRERVEILRSVPGIGLIAAMELLVELQDVGRFRRAEKLAAYVGLTPSQYSSAEKIRMGRITGAGKNGLRAILVEASWKLITKDEVMRDKYERIRARSGAKRAIVAIARTLLLRSRRMLLEGRPYALGLIR

SEQ ID NO: 131546 - protein, 361 aa, unidentified
MIMSFTKPIEHANLITKEGNLMNPLYVGIDVSIVHFMLPNGDKHSNFSVANSHDGSTQLVKRICSALTSESLDTVSIGLEATSVYGDNLVYFLREDASLASFNRKIHVLNPKQVNKFKESYNDLPKNDWIDSFVIADCLRFGRINKEVYIGGYRYKALQNLTRARYFAVCNLTKEEQRFMNVLFKKYSTMTQEKVFSDTFSTTALAVYDEFESTEALAYMDLQELTAFIIKKGKNRFPDPDAVAKAIQKAARSSYRLPKTVNDSVNQVLSISITSMKALESQIKEFDKAIATQMELLPNVLISIPGIGPVYSAGIMAEIGDINRFNNQAALAKYAGLAWTQHQSGGFEAQNTRLIHSGNRF

SEQ ID NO: 131547 - protein, 345 aa, unidentified
MKNTVAGVDLAKEVIQVCLCTNNKVHSNIEMPHHEFLTWLFKSKPISIIFEACGTSNYWKQRAIEAGHDAQLISAKLVASIRQNQKTDKNDALAIVQASQLTDIQFVKGKSVEQQQLQSMMRLRELAIKQKTASSNQIKALLLEFNIRVSLKHGGLKGVVESLLEDAENGFSFEFRRALNAAWGLYLGLLDSIRVYDRCLEATIDEHEDCKRLLKLEGVGPLNAINLYIALGCADLGVFNKGKDASACIGLTPLQHSSGGVTKLGHIRKNARSSTLRSQLITGAMAVVNQIVKRTAVTKKEAWVQGLVARRGKKCAAVALANKTVRTAYVMLTQGTEYKAELVAV

SEQ ID NO: 131548 - protein, 369 aa, unidentified
MRKSISYVGLDVHKETMAVAVAETGLRGEAREHGKIPNTPVAVKSLAMKLASAGRELRFCYEAGPCGYGVQRQLTGLGHECAVVAPSLIPRKSGERIKTDRRDAINLARLHRAGELTPVWVPDQVHEAIRDLVRARQAAVRTLRQARQQLSGFLLRHGHHYHRPAWTLMHRRWLASLKFEQAVHHIVLEDYIAVVEAATARRDRLEAHIEAALPTWSLAPVVQALQALRGVGLVAAATLVAELGDITRFTNPRQLMAYLGLVPSEHSSGGTRRQGGITKAGNGAARRMLIEAAWSYRFPARISREQLLRQESLAKPIREIAWKAQERLCRRYRKLARAGKLPTVITAAIGRELAGFIWAIAEQAQPTAS

SEQ ID NO: 131549 - protein, 310 aa, unidentified
MEQTFVGIDVSKDRLDVHVRPSGESFAVSRDGTGLEELVDRLRKLTPMLIAIEATGGFETIVAAAIGGARLPLVVINPAQVRHFAQAVGQRAKTDPIDAEMIARFAEAVKPAPRPVPDEAARLLGELVARRRQIIEMLVAERQREKRAGNMRVRKSLARHIKVLERELQELTDEIGGLIRGSPAWRETEDLLISVPGVANRTSSSLLAEVPELGRLTRRRIASLVGVAPYTRQSGRWKGKSMIAGGRAAARSAVFMAALTASQHNPLLKAFYRRLLAAGKPKMVALIAVARKLLVILNAMIRDKKPWQYA

SEQ ID NO: 131550 - protein, 345 aa, unidentified
MKKLFIGIDFSKEKIDATIILASGLEVLSARVHESFVTTVSGYNKFVKWVRKNSCDMEESAWLFCGENTGDYSKPLCNYLYGRGYDVWLENAKCIKDASGLRRLKSDKADSAMIAEYAMRNYDRAVLYIPLNESLSQLRELFLFRQMLVRQKHGFQVRRGEKNRTMEKSSVKTAISQIGRHMVNECNKQIEKVERRIKDIIDGDEELKRTYELITTIPGIGTQNAVCLLTFTNNFTRFGYNARKIACYYGIAPFGRDSGTSVHSDPHVHYMANRMLKSMLTQAALASIRCCAPIAHYYHRLIALGKKKQVALNNVKNKLIHIITAMVKNNLSFNPGYTNINKFIA

SEQ ID NO: 131551 - protein, 414 aa, unidentified
MALKRWVGRAVGLDVHRDFCVVAICEDGVVRSGGRVPSTPEGLGALTESLLATDRVALEVTGSCWEVARILEPHVERVVVVSPDDTGISSARAKTDKLDSRTLAGLLWRGELDAVWMPDERCQVLRRRLARREQLVRARTRSKNEIQATLQRRLVAKPPFADLFGVSGRRWLADLELPVEERESVDAGLRHVAFMDSEIAAVDRLIARQALSWPEIRRLMTVPGVNLICAATFLAAIGEPSRFLASRKLVAYLGLDPKVRQSGEAPARSGRISKRGSASARWALVESAWSVVKQPGPLRAFYERTRARRGHGKAIVATARKLAVLFWCMLTRSEDYAHQRPALTKKKLRQLELTAGAPARTKQAAGIWSTNRAILHAERALAMQAEISYQQMVKDQQAGAPARKVGASATPERA

SEQ ID NO: 131552 - protein, 359 aa, unidentified
MNQNSMYFIGLDLGDKLSYLTILDQEGELIEETRLSTTKASFHRKFSTIQSCRVAMEVGAHSRWASHLLEELGHEVLVANARKLRAIYHNPRKGDRADAEILARLARLDPKLLSPIHHRSPQAQADLAVLRSRDAIVRSRTLLINHARSIVKSTGERLPSCSADSFAHKVASDIPEPLLPAPAPILDTIASLTQQIKSYDRKADELCSQPYPETKLLRRISGVGPLTSLAFILTLENPDRFRRSREVGPVLGLVPRRDQSGDQDPQLRITKTGDAHLRRLLVSSAQYILGPFGPDCDLRRWGLMLAERGGKNAKKRAVVGVARKLAVLLHHLWKTGEVYDPLYLAKQHDQASEAIPAAA

SEQ ID NO: 131553 - protein, 373 aa, unidentified
MNYSTVYVGMDVHKENFSLCCYTNEKEKAEYVQKVEGHYSKVLNYLEAMRFHYGNDALFVCGYEAGCLGFTLYRDLTAHNVKCVILAPTTMAVPAGKKRIKTDKRDAALIARCLAHHDYNEVHVPTEKDEQIKEFIRMRDDHKLALKKVKQQILSFCLRHGIQYDGTKSHWTQTHINWLRSLKLDGVDQETLDEYLLSYDYLTKKLERIDNRIKELAEDKDYKENVHKLECFLGVKTITALSVIVETGDFKRFAGAPQYAAYLGLVPGEDSSGGDQNRLPITKAGNRHLRMLLVEAAQCYGRGQIGFKSKTLAARQNGNPSAAIEYADKANERLRRKYYRMTLKNGKKGNVAKTAAARELACFLWGMMTENYT

SEQ ID NO: 131554 - protein, 296 aa, unidentified
MNTVKFIGLDVHKKTITIAIADSGRQNKPRVYGAIANDLDAVDKFCRKMVSTASRLYFVYEAGPCGYGLYRHLTAKGFDCMVAAPSLIPKKSGDRVKTDRRDAAKLAQLHRAGELTAVYVPDPQDEAMRDLSRARHDAVSATQKAKQRLKAFLLRNRIVYSGRCAWSKAYFRWLADIAMAYPAQQVTLQEYIDAVHEGLQRVDRLTDQIRQLVPGWRLAPVVSALQAARGVSVVVAVTLLSELGDLSRFQRPSQLMAHLGLVPSEHSSGESTKRGGITKTGNRHARRVLVEAAWAY

SEQ ID NO: 131555 - protein, 413 aa, unidentified
MGYKIAGIDVHKKVLMVVLIDATSPVEKPERRRFTTLPSDLRRLSSWLREQGVREAVMESTAQYWRTVWLELEPHMLLHLAHAFSNRAPRGRKHDFKDAERLGRRLIADELILSFVPNGEQRIWRSMTRMKVQLTRDRVRLQSQIESLLEEMRIKLSSVVSDLLGVSGLRILRALAAGETEATRLAALGDNRLRCTEEQLLDALTGSSQPMHRAMLALQLERLHLIDTQIAELSNLIAQAMKPHQEAVIRLAEVPGLGVGSAQQIIAEVGAQAGTFSSAAELTSWVGTCPGKNESAEQNHTSRSAKGNKYLRRVLNQAAHAAVKKKGSHFQTVFRRLLPRLGYQSAIWAIAHRLCRVVWKILHEGARFIEQGSEPDAHTKKKRARVLVQALRRLGYDVAITAKHLANQNAMQV

SEQ ID NO: 131556 - protein, 351 aa, unidentified
MPRTSTVHAVTTIGMDMGKNTLHMIGLDKRGAIVLREKVSRGRIASRLANMPSCLIGIEAGLATHYVARELAALGHDVKQVPPTYAKPFRQGHKNDFRDAYSVAEAVQRPTTRFVPAKTDEQLDLQALHRVRSRLVSERTAVINQIRGFLLEHGIIVRQGLRFLRQALPDILAKRTDVLSPLMVRIVADLASDWRQLDERIEPVTDEIETLAKSDDSCRRVMTVPGIGPIISSAMVAAIGNGAAFARGRDFSAWIGLVPKQMSTGDRTILGRITKRGNGYLRTLFVQAARVILLRPASWPKHSFGVWLARAAQRLHRNVLAAALANKLARIAWTVLAQGRGYEARITKAAV

SEQ ID NO: 131557 - protein, 383 aa, unidentified
MNSSNKNKKRTGQTVTPSVVGDRAKARVVPSLLPKSSNSCLGYPSPHVTQGRATLEPVQIIKEDCILEVSLIFVGIDVSKAQLDVAIRPTAQTLSVTNDKAGIKILVKHLEKLEPTLVVLESTGGLERQVMLALIGTEIPVVMANLHQIRDFAKATGQLAKTDRIDAAVLAHYAEAIRPKPRPLPDELTLELRALTVRRRQIIDMIVAEKNHLATASKAIKKRITAHITYLEQELDRADQDLDRFIQKNPTWKDNQEILCSTPSIGPVSSRTLVAELPELGTLGRKQISALVGVAPFPRDSGTLKGRRTIWGGRASVRSALFMATLSATRFNSVIRDFYKRLKAKGKPSKVALVACMHKLLTILNAMIKNKTRWSETFSHQTT

SEQ ID NO: 131558 - protein, 343 aa, unidentified
MAKVFVGLDMGSTSFHQVALDKEKAVLRDRQLPTSEANLIKAFEDVEGEVHVHVEAAELAGWVRRVLKGRVEKIIVGHPKSSAWIAKDPLKRDRLDAYKLADLLRNGQVHEVYYADEDHRTVFKQIVQHYDDVTVQQAGLKNKIKAAFREQGVIARGITVYSAAGRKEFLSRVPSAAARESIEQLYGLFDLAEKTQKAAQKLMRRESRRYPEINRFEEAPGLGLVTACRFSAYIQTPHRFGSKRKLWRYCRLGITDRRSDGKPLGRKTLDWNGNGKLKDMTRTAFLGAMSTQDDNLFKRTYRQTLQRTHDKTHARLTTQRKILAVLWAMWKGGTEYQDNKDKG

SEQ ID NO: 131559 - protein, 381 aa, unidentified
MRNVCGLDVHKDNVFVCIDKENGEKIQFKTGILTKELDALRDTLVANDVTEIAMESTSVYWMPIWRILENDFKLYLVNPYAIKQLPGRKSDIKDAEWIATCLRKELIRGSYVPSSEIQQLRQYNRRIFDINKQSVYIQNKIDAALQRCNIRIGNYISNVRAKSYCEIVDMLSEGKTSPELLIVKVHKRTINKWGRETILAALEGVVNKTDCRILKQLKEELDMLRRHKVECLVMLRDICMENYKEQIPDIQTIPGIGEQGAMQIIAETGVDMKAFMTAAMLVGWAGLKPRNDESNGKFKSRSTTHGNKYLRKILIECAWGASRTQGCFFNKFSYHQTMVRKKNRQKVQVAIARKILVVIWNILEKGVVYSDVLEKDKTKDN

SEQ ID NO: 131560 - protein, 400 aa, unidentified
MDERKGFSWFLGIDISKETFDACFISGQGEKHFSISTSMDRKGFEDLIKQLSSQSVPQESVLIGIESTACYHVNLYSFLISKGYTVSVINPLLISNFVKLQLRKTKTDKKDAYVIAQFLLLNRDSLGRTVGSSDFTDIRDLSRQRESLVDQMTSNKIEIKRLLTMTFPELEHIACIFTKSMLRLLCQYPSAASIRQAKRSKIARILIPGSYGKQTDASVERIVKAAETSIGTASPAKEIILKQKVSLLMQLEQHLQELTDILTEQCKGKMRRDMDVLTSMKGIGKKTAMNFLIEVGRDVKEFESHKKVIAMAGLDPALNQSGKIDRKGKITKRGNRHLRRVIWVMTTKVIQFNARFKQYYLKRINDGLPYKMAVLATAHKLIRIMFAMLTNETQFNENMN

SEQ ID NO: 131561 - protein, 451 aa, unidentified
MNHYSLFVGIDVAMRKHDCCIMDKDSKILLKKFTFSNTLPGYQKLVDKLTAITTDKACISLGMEVTGIYGDNLYERLKMDGFNVIMIQPESVNSYRKYKKLPKNDKLDARCISEILVRNEAVPVSPQKKEYAELKSLTRRNACLKKTLTQEKNRFLARINVYFPDLLNVFKTGFTTMKAVFSSYSTPYSIINADQEELLTLIKSASKNRYGEEKMKELVEAAQNSIAVRTHISDEERFHILSLMDFVHYLESQIHELERLIDAKASHFPAYRMLLSFTGCGKPTAATIIAELGDLSRFHKASQIVSFAGLFGYNSDSGDSVNKRGKLSKKGSRELRHALYMVAEFARRNNPILKDYFTRKKNGDRKKHILAVNTVANKLCTILFSIMRNESLYVIKYRDLAKLPELTRNEFFHNIETDFSATTRKKKYFYEDALGEVHEFVYRSTSMLSIE

SEQ ID NO: 131562 - protein, 356 aa, unidentified
MAVYVGIDVHKHYCQAALMNHQGQVTHELRFDNTAKGASDLVCLAKTVDPQIKAVVEPSANFWIRIYEQLEQEGVEVKLSNPLRTKAIAEARIKTDRIDARTLALLLRGDLVAESYVPTRKNRDRRALIRHRISLIRMRVEIKNRIHSLLDKHELQHGYTDLFGKQSLEWLHNLQLPTPDQQILQSSLQVVETLTEQIQSMDIQIAKDATSEEKAKLLMTMPGVDYYAAMVLLSEIGDVHRFSSDEKLVSWVGLSPQVHQSGETNWTGHITRKGSKRARWILGQCAQSARQHDPRMREFYERIERKHGSQKAIVAVARKMLAIMYVMLIRNEPYHGENHELTERKHKRLDTLANSA

SEQ ID NO: 131563 - protein, 346 aa, unidentified
MEHFAGLDVSVKETSVCIVDETGKIVREVRVASEPDALLEVLKSHAYRFKRIGLEAGPLSQWLFSALAEVGVPVVCVETRHMRAVLKAQINKTDRNDARGIAQMMRAGLYRPVHVKTLRSQKLRMLLTHRKLLQSKAIAIENDLRGTLRNFGLKVGMVGTVKFEARIGELVENVPDLAALVEPLLVVRRAIREQIAILHRRLLAIVRDDEVCRRLMTIPGVGPVVALTYRSTVDVPARFRNSKAVGAVFGLTPAQYQSGEIDRTGAISRCGDEMMRVMLYEAAHIMLVRSTKWSWLKAWAMQIARRRGMKKAIVALARRLAVIMHRIWVDGTEFRWTREQPAAADA

SEQ ID NO: 131564 - protein, 319 aa, unidentified
MHCIGVDVSKQELVTYDGVSERVFPNTPGLAAFRRFVGSASEAIIVFEPTSTYSRRLETFCREGRIACCQLNPRVVPHYRQVGKGRSKTDKTDAELLYRYGLERGQEEAEQLTSDALAQAVAAHLACYRVVQKARIAYQGLLEALEHDPATGKSLLSGLRREIEAFKTRETRRIAQAQAIVVKDEDAARRLDALLSIPGIGPITALTLVALFRKYPNVNRQQLVALSGLDPIQVQSGTSVHGKSRISRRGNREVRKRLYEATLSAARYNPNIQAIYRRLKDQGKPEKVVRTAAARKLLLLAHAIYESGESFRTPAKEVT

SEQ ID NO: 131565 - protein, 392 aa, unidentified
METMTDRPVEPTAIRTDLGAIFVSLELSRSSWVVTALLPGGGEKMSRHAVPGGELAGLLARLAQLRDKAQARTGRIFPIIVIQEAGLDGFWIHRALENEGIESHVVDPASIATSRRRRRAKTDRLDGETLVRTLLAFKRGEPRVCAMVRAPHPEDEDRRRITRERKALIAERVEHVNRIKGLLLAQGIRGYEPLHRNRRVRLEDLRTGDGRDLPPHLKAQILREIDRLELLLDQIKAVEVERDAALADQPQDRETPAAAKMLLDIRGIGPEVASVLWSEGLFRHFDNRRQVAAYAGLAPTPWQSGAVSREQGVSKAGNPRLRSTMIQLAWLWLGHQPQSALTRWFRERVEQNGGRQRKTAIVALARKLLVALWKYVTSGVVIEGAKMKPEAA

SEQ ID NO: 131566 - protein, 425 aa, unidentified
MNDKVVYAAFVGIDWADRQHAVCLFGNDAARPRCETLDQSPEAIDQWAQDLARRFGGKPIAVALEQSRGPLVFALMKYAHLVLFLINPKQLARYREAVSPSGSKNDPADARLLCEFLFKHCARLRPWKPDDEATRSIRLLAEDRRKCVGERTKLTNHLQQTLKECFPQALRLVGAVLYATAFLKLLAKYPTLKEMQRASPKTFQRLLPRRRKQRGLADAGDAGDPRLAAIRQAVPLVTDKAVLLANRLTIKRLVVQIATLNKAIAQYDHELEQLMRQHPDAELFESLPGAGRALAPRLLAAMGADREQFNKPAEVQQASGIAPVTTQSGKTRLVRRRRACPRFLKQTFQEFAEHSLKSSPWARAYYQMLRQRNARHQAAVRSLAFKWIRVIHRCWKDRCPYNEQRYQQALRKTNSPLLAYLQSDG

SEQ ID NO: 131567 - protein, 348 aa, unidentified
MAGSTLPHRWSVGIDLHKDTLTACVYCSCCGEIRFQKIACRCRKQIAEFFGSLPRPHVVAIEAVGFYRWLWEMLEPLVERLVLADATQARALAGRRMKTDREDAQNVAELLACNRLPLAYAPPFEVQVLRDCSRQRNALSRQHAHVLHRVKSVMNANNRPGPARMASSGLIRYLEAFQSKLPERHGRYLWLCVDQLALIERQRAQLERELERLLAQPLFAETSAILNSFPGVGLVTCATVLAEIGDFGRFSYRKSISRYGGFDPRTFDSAGKQRTGHISKRGPSNLRWVLVQAAWAALRLDPQVKRIWLRISRKAGKKAATVAVARRLLVWMWKAVRTGRPYRAPVAA

SEQ ID NO: 131568 - protein, 594 aa, unidentified
MANYAGVDWAADKHDVLVANQAGKELLAATFAHDEQGLRALCRALVRHKVLLVAIERPDGLLVERLLDAGLRVLALHPNQVAACRARFRVSGGKSDRFDAFVLCELARTDHHRFRVLEPDGDQTKALQALTRAREDLVHARVALSNQLHAELERFWPGPIGLFSDLDSPISLAFLERYPSPADARALGPKRMQAFLAGQHYSGGQKPEQLLAKLRQAPEGRVGEQEHAARRALVLALVAVIAPIVAQIKALDGRISTALREHPDGEIFRSLFKGAETTAASLLAEIGDCRGRYPHRDALAGDAGQAAVAIESGKRKTASFRWGCNKRLRAAFCKLADSTRHWHPWAQARYQAAIARGHDHPRALRTLGRAWCRIVWRCWQDRVPYNPSPPPRPPTTDHRRDPDRHRPRRRPRRHPTHGCRACRQRRHSRDGSQRGDREALARHLHSARLTCTQVHTATPRISQLHLHSCRLLLPLTVSAARRRWGGRRMPFCAGRAAGRALTPAVCAARHLREGVARGLPGDVPPDRIPPTDNQFHRRLDTGRLLCGCPCDHVTLAALGRGVLRGRHHQEPKSANCPSRSLAKKPSLRPGWISE

SEQ ID NO: 131569 - protein, 307 aa, unidentified
MELLYPHCAGLDLHKETVVACIRHMVNHTVTTLVKTFKTTTQELMALSDWLSEEGVTHIAMEATGVYWKPVWHILSDGNFSLVLANAAHVKNVPGRKTDVNDATWLADLMAHGLIRASFVPEEPTQQMRDLLRTRKQFVRERSSHTQRIQKTLEDANIKLDSVISNVAGVSGRRMIEALIAGQTDPEALAALADGRIRATAAELEAALRGRVTAHHRFMLRLHLDHLDAVDAAIFRIDKEVEGNLEPFRVACEMLTTMPGVGALAAEVIVSEIGIDMSRFKTEGHLISWAGLCPRNDEARASAVRIA

SEQ ID NO: 131570 - protein, 355 aa, unidentified
MNKIKTNFAGQIVYSGMDIHKGSWNLGIFLNDMFVKNVHQKPNPTIMVNYLKQHYPGARYIAAYEAGKFGFWIQRQLTALGIECLVVNPADIPKSQKDTLQKNDPRDARNLGLRLQSGVLHGIHIPDEQQEADRVFFRHRKRIWKDLTRCKNRIKGMLAFSGIDIPEQYDNASWSHNFINWLKEIDCKQQSRRSALNYMISQMEFLRKELLSISNAIRKMMREQRYKTNYYLLRTIPGIGPLTAASILVEIGDVKRFETFYHLNSFVGLLPMEHSSGQSENKLSLTVRKHRQLRSDLVESAWTARRTDPAMALYFQEQIKRKDSKIVIIKIARKLLNRIRYVLINQQPYEMGIVK

SEQ ID NO: 131571 - protein, 430 aa, unidentified
MTTVHPTASNDEPAWFVGFDWGSEKHRIALFDRTGNLIGRRDVAHSAAAYAELGDWLLRTTQASPAEIAVAIETTHGPVVDALIDRGFRVYAINPKQLDRFRDRYSVAGAKDDTRDADTLGRSLRTDPEAFRALSPDNPLIVQLREASRTAAELTRDLGRLTNQLRDLLWRYYPQMLALDDNLAAPWLLELWQHAPTPAKGARLHKETIARILKTHRIRRLDADQVRTVLREPPLPSAPGVTEAATGHIRLLLPRIRLLNSQIKAVHTEIDALCQQLAGPQTIEPGESVPGQSIEQRDVAILHSVPGVGRIVGATLLAEASEPLRRRDYHAIRTLAGQAPVTKRSGKSCFVQRRLACNKRLANAMYHWARVAVMCDPRSKQRYAALRARGCSHGRTLRSVADRLLKLLCTLLQRQVSFDPNHNAKEAAAG

SEQ ID NO: 131572 - protein, 346 aa, unidentified
MLYVGLDLSRKRVDFDSLLDGGERYRRGEVPADRDGLHGLVRRLGDAGEPVLAVIESMSGARFVHDELELAGWDVRIADAYKAKGLAPLACKTDKIDCWVLAELARRDLVPEIWLPDPEVRAERERARFRLHLVKHRRSLKNRVHAILFQHGVPNPTSDLFGAGGRRLLARLRLPEPWASTVTGSLALIDTLTQQIDACERELRQLGADHPYIPLLTTCPGIAWILGYTIAAEIGDIRRFPSPRKLVGYTGLTPRVEQSGERDRRGPLRKNGPHHLRWALIEAAHTAGRDPRYRPIVERMRARHGNKRGSKIAAIEIGRRLSEAIWHMLTHERPFAPAGATTPLAA

SEQ ID NO: 131573 - protein, 316 aa, unidentified
MAETTVTVGIDVSKDYLDVGVRPSGTTTRYPYDNDGLTRLVEALKTLTPHIIVLEASGGYEQRLLAVLATAPLPFALVNPRHTRRFAQGMGYLAKTDRLDALMLAHYAASKQPTPQTLPDTVQQDLIALVTRRSQVVTMLSMERNRRGLAAARVQPGLTAHIEYLQTLIADLEAEIEQLIATHTQLRADDERLQSVPGIGPVVSATLLATLPELGSLSRQAIAALAGVAPFHDDSGKRRGERHIQGGRPTVRAMLYMAAMSGVQCNPTLKAFYQRLREAGKLKKVALVAVMRKLLTILNAMLRTKTAWQPQSSENA

SEQ ID NO: 131574 - protein, 350 aa, unidentified
MTHPVYYSGIDLHKKTAVIHTIDAEGKLVKEGTLKNHPALLAAYFAEPAGLHRSVVETTSGWYWLSDLLAELGVEMKLAHAADLKAICHAKVKTDRIDARMLAQLLRIDMIPEAHQIEPTLRAQRDLLRARLRLVQRKTSCLNSIARLFEKYNVEGIGALPELYRQQAHCHRDQAALLDRHIKEIERTLRPRLRRDLDLYRLGCLPGFGEIVAATVRLETGDVHRFASHRQYHSYARQVPGAANSAEHRRNRPGHKAGNVHLKLAYSHAAVRAIQHYPEIRAVFQKKRRKKAPKVARAFIAKELARIAYYVLKDGKDFDGCFRGQLLKRQKTPTWPRPAGPDYCLAGDEG

SEQ ID NO: 131575 - protein, 371 aa, unidentified
MIIGCDYHPGFQQIAMLDTETGELGERRLAHREEAEAFYRDLGAHGVSVRLGMEASGQARWFERLLSELHFELWIGDAAEIRTKRVRKQKTDRQDAQLILRLLLEDRFPRIWVPSGENRDLRQLLWHRHRMVQARTRIMNQLQAVALNEGLRCKKRLWRDAGREQLESFRLAPWASRRRRDLLKLLDRLTPTIAELTQAVEQEAEKCSEAQRLRTPPGVGALTALAFVLIIGRVERFPCGKQLASYLGLVPLEESSGQRRRLGHITKQGNSLLRFLLVEAAQVTVRSDPAWRSKYFHLAMRRGRKIAKVAMARRLAVRMYWMWRKGWEYEQMIAAVKAAEGKRLMYRDPVAEREYIKTREQKEEGEQLEPF

SEQ ID NO: 131576 - protein, 405 aa, unidentified
MPRNMQYERAFGLDLSKKTFHGCILDGPDLGSRHFFTGEMGPQGKAKLAGRLCKGDLVLMEAGTASFSLARFLLENTEAEVVVLNPAKLYNIFNSTLKTDKADSEKIVRIARNMPRDEWPTVSIPTREEQAERSAVSLEVFLAQEITMLVNRLYALFNSMGHPFIKKSELKTEESRLTLANRLLCEDGLAIEQAIMLSDQIGNVTDQLEQCKQRLRDICLSHPREALSLFSIPGIGLMTAASQIAFLGDGSRFNSPDSYVNYVGLSERRFDSGTKVSKGHISHMGNKCIRRNIIQAAWVASTKTKSNPLSEKYEYLRLRGKSKPVAAVAVAKKMIQLSYILVKSNGIYEFTKQQGLAAFRRRLQYHKLAGLLEYLPDSTRKQMEEIDRTKRKEAAATTSNPKKFA

SEQ ID NO: 131577 - protein, 394 aa, unidentified
MKLVGIDVGKNSHHFCVMDKETGEFNVTPSSFPNNKEGFDFLINSLKPYSKKSILLGMEDTGHYHVALLKFLLSNGYTVALINPKTTDLTRKMEGGITKNDKLDTITICDVLDTPERKKQYRITKVDRFDLYEQRQLTRHHHNLKEELNVYCNRLQKSIDLVFPEFNTLFSSKYGIVYMNLLKTFGSAEAIASTDIRTIRKCFEIKGRGNRISLTPEKLKECAKNSIGISSEVETIQIKHLVSQITLIKEQIAEIDKKIEEFSITNNSPILSIPGISHFSGTSILAELGDIGNYSKPSQIIKFAGVAPYHYESSQYNAQHTAITKKGSKYLRKTLYQVILPVINNNPVFKKYYRLKISQGKGHRCAQGHCIRKLLRVIYHLLETGQSFDPALLR

SEQ ID NO: 131578 - protein, 378 aa, unidentified
MGWTSPHPNFRGVYAPEWEVQTDHSENEEKPEMKINRVGVDIAKSVFHVYAVDRHEQPQLQTKLKRGAWVDTLCAQLAPNAEVGMEACASAHHWGRELQRRGFRVKLLAAQFVKPYVKSNKNDRVDAEAICEAMSRPNMRFVSVKTVKQQDIQAIHRIRSELVGERTAKVNQIRGLVGEYGIVAPRGIHQLRRAVPCWLEDAENGLSDLFRGLLAGLREDLQRLDERVAKLDVSIAQSIDDDPLAQRLLALRGVGPLTASALAGALGDGTSFRKGRDFAASLGLTPRQQSTGGRERLLGISKRGDPYLRKLLVHGARAVLQYAKRRDDALSKWVNALSGRKHANVVAVALANKTARIAWALAAGNTTYDSELVAASPV

SEQ ID NO: 131579 - protein, 346 aa, unidentified
MYQDNLFCLDLAKTTIQGCLLDKSHQARFNRTFSRKKLTEWLSRQQPMTVAMEACSTAHYWSRVIERLGHRPLLVPTRTANRYREGHKTNATDALAVGVAARQPTTRFVAPKTIEQQEMQSVERIREHISDDLTATSNMMRALIAEFGLEIAKGKAAFKRRVVELLEDAENDIPLVLRTELINEWMHYRQLELRLKEVEHTRDLLCKQHESCQRLIQLGGVGPVNAIGLYLALGERGSSFKNGREAAACIGTTPKQYSTGDEVTMLGISKKCANKRLRSNLIQGARSVIKALKRREPKNAQEAWLKSLIERRGEGRAAVAFASKTIRVAWAMLHHGDDFKLHPSLA

SEQ ID NO: 131580 - protein, 351 aa, unidentified
MIIIGVDYQPSDQYIAFVDTETGEYGERQLSHSEGEAEKFYRELAARGVSVRVGMEATGYSRWFERLLAELGIEVWIGDAAEIKTKRVRKQKTDREDARLLLRLLRENNFPRIWVPSPENRDLRQLLWHRHRMVQMRTRIMNQLQALAMNEGQRRKKKLWSEAGRAQLEKLPLAPWASRRRKDLLELLDRMNPTIEGLTATIEQEARKRAEVLRLMTHPGVGPITALAFVLIIGTPERFKCGKQIGSYVGLIPCEDSSAGHQRLGHITKQGSSLLRFLLGEAAQAAARWDADWRRRYMHLALRRQRNIAKVAMARRLAVRMYWMWRNSWEYSEWVKFGSHAGQLGLRHGVN

SEQ ID NO: 131581 - protein, 348 aa, unidentified
MNDIATVVGLDIAKAVFVAVGMNDRGKVLWRKKLARDEVLPYFATLAIAKVGIEACAGAHYWARRLNAQGHDTRLIAAQHVKPFVNGSKNDWNDAQAIAEVRSREETKYVPINTEAQQDMQMLHRARQALLVERKGVICRIRAFAGEYGKVFPVGVGKFRKGVEHWLGDADNGLSGQAVETLRELLEQLDEKEERQAGYDARIARAASEDERARRLMQVPGIGKLTATAVVAAVADPRHFPSSRDLADNLGLVPRQHSSGGKDRLFGITKRGDGYLRALLIHCARSALRCAGEKPDHMLRWAVQVQQRRGSKVAVVALANKLARIVWALLANGGDYQPVPQRRASVSV

SEQ ID NO: 131582 - protein, 343 aa, unidentified
MSVVILGIDLGKNVCSVVGVDAAGAVIVRRSMRRQTLIDYVAKLPACVVAMEACCGAHYLGRLFAAQGHEIRLMSPEYVRPYVKAQKNDDRDAEGIAEAASRPTMRFVELKSEEQLDIQTLHRVRSRLVNERKNLINQMRAILLERGTTFPVGRRKFEQGIDAMLAGEDTTLSPRLRQLMEQLRAEWRELDARIEALNGEFVELARNDAAARRLTSIPGVGVLNATALIAAVGNASSFAKARDLGAWLGLVPRQHTTGGKPRLLGISKRGNTYLRTLLIHGARAALPSLARSETPLGRWLTGMIERGVHRNAIVVALANKLARIAWAALRKEATFERGYPVAA

SEQ ID NO: 131583 - protein, 370 aa, unidentified
MSNATTFVGLDVHARSVKACAFVPETGETIRKSFGYEPGEIASWVSSLPQPARCVYESGVTGFHLCRELNAMGVACVIGAVSKMHKPAADRGRKTDRRDAQFLAVQLALGVVTEVHVPDAECEGARDLARALADARDDAVRAKQRLSKFLLRHGLVYDERNAAGQRRNRWTGDFWAWVGRIDLGDAAAMATLDHYCERVREADAAKAALEAKVKSLAQQPRWKPTCDALKCLKGIDAVTAASIACEADGFARFATASGFAAWVGLVPSEHSSGESRFRGGITKAGNKHLRKLLVEAAWHYKGASRSPKDLAKGQIVDEATRRHANAGVRRLVDRRRSMDDAGKQSSVANVAVARELACWCWAVGRMAEGA

SEQ ID NO: 131584 - protein, 309 aa, unidentified
MVFVGVDVSACRLDVAIGSEVRQFPNPEGIPDLLRQLPPGAVVGLEATGVYGRPLAFALYRSGFRVYLLNPLAVKSYARSLLRRAKTDRADARLIARFLAERHADLEPYEPTEDVLYQVGLLVRFARGLVAQRVAVLNRLHAWEYAWPEGLGLVRRVPEVLASLRREVEAMALSLLKTDPEAWRHFQALQSLPGVGPSVALTILAYSGDLRRFRSARAYAAYTGLTPRLYQSGQLPERASISRMGPSALRAAFWMAALSASRVEPYASLVARLVQSGKPKKLAITAVANRLARAAWAVVVKAGLDKWEL

SEQ ID NO: 131585 - protein, 410 aa, unidentified
MAERFVGIDVALREHRIAVLDRDGEAVGPSFTIVASQDGVTTLLRTLAARGATAAPTLIGLEASGHLWENLEAALVGAGYRVLVLNPLQTRRYRDVVRRKAKTDDIDAHLIAGLLRSGVAQASYVPDEQIQSLRELARLRARLLADRQDYLRQLIAQLDVVLPEHRAVLGDLLTARARGILAQFPTAQHLATASPRAIRRAAEDAGARGFSLDDATSVRDHARRSLYSGKAAAARAHVVRTLVSQLERLTTAMDEVDRAATTLLPPSEPGTGPSDAELLQTIPGIGPHTAATLIGELGALSRFTDARALVAYVGFYPVISESGDHAVPPRMSRIGPRIARHSLYLAAVNAVRLSGEWRTIYLRKKAQGKTAKQALVVVAVKLLHAVYAMLKHRQPYNPSRLLVAPATIRG

SEQ ID NO: 131586 - protein, 384 aa, unidentified
MNKNSILFIGLDTHKDFFEVAYFSPDHHSAVEHYGRISSAKVALTKFIQSMQRKYPNATIHVVYEAGPCGYWVYRHLTKLGHLCFIVAPSLIPKKPGDRVKTDKRDAILLCTLLKNGDANPIYVPEPEDEAVRDLSRARERAMHDLNDARYQLKALLLRNNINYDGLANWSAKHLRWLTEIVLPHTSQQFVLQEMIVTIHERKDRLERLDNELNHHVHAWRYYPVVKAIQAMKGVRILVSTGLIAELGDLTRFDHPRKLMNYLGLVPSEHSSGGKRRLGAITKCGNTHARRLLIESASSYRYSANVSTELQMRLEGLPKQVVDIAWAAQVRLCRRYQRLMARGKNANVVKVAIAREMIAYIWAISREVVLPKIDVSKRIARVPA

SEQ ID NO: 131587 - protein, 387 aa, unidentified
MPQLNDLSRSLVALDQDSTIIAVVELSQSSWLVAGVLPGIERQPQKKLEPSAERLLGLLHRWRDEAVRAGKKITRIALAFEAGRDGFWLARWLNARGVEAHVIHPSSVAVSREHRRAKTDRLDTEMLKRGFLGWLRGERGHCTMARVPTIAEEDAKRPNRERECLVGERTRIVNRIKSTLARLGIRNFKPTLRKAAERLATVHTPEGMPLPPNTLAELQRDMARLGFVVSQIREIEQARQKRLEQETETGPHAMVRQVARVIGIGIETADMLVHEVLSRPMRDRKAVARYAGLTGSPDESGARRREQGLARAGNARVRRGMIQLAWRFLRFQKQSALAQWYRARTADSRLGMRKTMIVALARKLLIALWRFVTTGEILEGVILRPAG

SEQ ID NO: 131588 - protein, 354 aa, unidentified
MIIIGVDYHPSFQQIAFCNQDTGECGERRLNHSDGEAKRFYRDLQQPGIRVRVGMETTGYSRWFEQLLAELGFEVWIGNAAEIKTQRVRKQKTDRNDAQLLLKLMREDRFPRIWVPSPENRDLRQLLWHRHRLVQMRTRILNQLQALAMNEGRHWKMKLWSEQGRAELEKLALAPWASRRRRELLELLDRLHPTIEDLTAAVEQEARKRPEVLRLMTHPGVGALTALAYVVIVGTPERFRRGKQVGGYVGMIPKEDSSGGKQRLGHISKQGNSLLRFLLVEAAQAAARINSEWRRRYVHLAMRRHRSIAKVALGRRLGIRLYWMWRNGCEYSASLEFGSHAGQLGTGHGVTAAP

SEQ ID NO: 131589 - protein, 347 aa, unidentified
MSKRFHPLQNQLSNSQPPTVFCGVDVSAATLAVAIQQDEHAVEQREFPNTESGHKALIACLHKRKAWARVSLEATGIYSLNLALALDAADEVEVAVLNPKVVNRFAQTLRRSKTDSADAQVLAEYSRRMDFVAWRAPSRKGLQLRTISRHIDGLTVEHTREHNRLHAAQGSTATPGCVVQDLKRSLASLERRIVRLRREAMALIASDAVLAQRFELMISIPGIAEISALQVLGELSTLSPEMSVRQWVAHSGLDPVHEDSGTSVHRPSRISRAGSRHLRRALYMPALVAAQRDPHLRAFYELLQGRHKAKLQALIAVARKLLHAIYGIFRSQKPYDGHKLFPALIPG

SEQ ID NO: 131590 - protein, 350 aa, unidentified
MIIIGCDYHPGFQQMAFVDTDTGELNERKLGHREEAEHFYRELKVSGKQVRVGMEASGHARWFERLLSELQFELWIGEAAKIRTKRVRKQKTDRQDAQLLLTLLLEDRFPRIWIPNPENRNLRQLLWHRHRLVQMRTRVMNQLHVIALNEGVRLKKALWRPAGRAQLESLELACWSRRRRQDLLEILDQLTPKIQELTRALEVEVEKRPVARRLMTHPGVGPLTALAFELVIGTPERFGCVKQIASYVGLVPSEESSGDRRRLGHISKQGNSLLRFLLVEAAQVTVRTNPDWRRHFLHLAMRRDRRIAKVAMARKLAVRLYWMWRKQWDYQQMRKFGSHVGEPGNRQGVS

SEQ ID NO: 131591 - protein, 349 aa, unidentified
MDEVSVIGVDLAKHVFQLEAMTASGEVVWQKRLKREAFKRFMAEEAPRCLIGFEASGGAHYWGRWLLAQGFQVKMMAPKSVKAYREGVHKNDERDAHAAAEAASRARVRAVRVKSEAAQAVQLLVRWRSLEIKQQGQTGNQLRGMLNEFGFVMPKGRRRLLEAVERLASDAGYLQLPESLRQAVKCLCDQLVEQTARVKQATELLAVAVKDDETCTLLRTAPGIGPINVASLSVVLEAPHAYANARAFAASLRLVPRQSQSADRKKLLGIGAEAANQTRSNLVLAGQSLITKVKRMKQPPQDKFLLWVWRLYPRKHRNVATVAIAAKLARIAWAMASRRECYRPRLASA

SEQ ID NO: 131592 - protein, 346 aa, unidentified
MPIVGGLDIHRKQITFDYLDTETGQVRRGQVSPADRAHLRAWLARFADREDVAFAVEGCAGWRYVAEELAAAGVTAHLAEPADTAFARGRKRHAKTDKTDARHLRMLLAEGRLPECWIPPGHILECRALLETYHDLRREHTAWVQRIHAVLFHQGAPALGAGTLRTGQGVAALRAAAAGCLSPAGQLQVATALEVLEALEARMHVVRHQLLDAARHLTGAKVLAARLYGVGPFAALAMTCWLAGADRFSSSRKAVRFAGLDITVSSSDRKGPPGRLSRQGPPVLRWTLYEAGKTHARSSAPDHRYYATVKDRKNSKRAALSEARKIVRQACHILAELGDDALAPVA

SEQ ID NO: 131593 - protein, 356 aa, unidentified
MSRDIKYIGMDVHKEATVIAVVNGSGKLVMESIVETKASSILQFIHGLRGELHVTWEEGTWAAWLYDLLQPQATQVLVCDPRRNALLKEGNKSDKIDARKLADLLRTGMLRPVYHGEHGLRTLRELGRSYQTLSQDLNRVMNRIKALYRGWSIPCAGTQVYAPRYREEWLGKIEHVGVRRRAELLYQQLDGLQGLRRTLRPELLAESRKHKAAKLLRQIPCIGPIRAARLIALMQTPHRFRSKRQLWTYSGLGIETRDSAQYRYVHGQLQRTKKPQQIRGLNRNHNHEMKDIFKGAATRASCGVGPLRDFYVALLAKGMKPEMARLTLARKIAAIALILWKKEEHFDAEQLKLQAA

SEQ ID NO: 131594 - protein, 407 aa, unidentified
MGAATRGELSSLLQKEPMELAMKCNDLSRSLVAFDQNSTLVAVVELSLNSWVAAGVVPGLGRDPVKKQSADCNALLKLLHRWRDEAIKAGGEIKRMVVAFEAGRDGFWLARWLRDQGIEVYVIHPTSVAVSREPRRAKSDRLDTQMLKRAVLGWLRGEPKHCSMVEIPTLAQEDAKRPNREHEHLVGERTRIVNRMKATMARHGIRGFKLNLRKARKQFAELRMPEGEPLPPNTLAELERDLARLQQVRDQINTIEKQRLKRLRQAPQEGPHPMILLLAKVLGVGIETADMLVNEALWRNLRDDRAIGRYAGMTGSPDESGSKRREKGLARAGNARVRRGMVQLAWRWLMFQKESALTKWFRARTAGGPRDVRKTMIVALARKLLIALWRYVTTGEVPAGAKLRPAV

SEQ ID NO: 131595 - protein, 364 aa, unidentified
MDFKQNQKINQVTEKTLVVGIDIAKRTHYACFVDDRGRVLQKSFSVSQSGDGFERFYQRVLAAMKENEKTEVMIGIEPTGHDWLNLAYFLDERGIPLVMTNPMHVKRSKELDDNLPTKHDRKDALVIARLVKDGRFSYPRILKGMEAELRAGSTFRSKLTEELGAVKNMMIRWLDRYFPEFTQVFPSFGKMAMAVLECTPFPNDLNQKQPEEVLALYREVEGLKSPQRPKAIRLIEVASSTIGVTEGREMARIEIATLVRRYHQLEKDIENISNHLVELVRTSVEYEWLSTVPGLGDTTIVDLLAEIGSFSHYDHPRQLIKLAGLTLRENSSGLHKGQKHLSKRGRRKLRALLFRVMMPMFSTQ

SEQ ID NO: 131596 - protein, 409 aa, unidentified
MIFVNKLFVGIDVSTQNNVSYLMESDGTKYSSFSVQNNLGGAKLLTEKIVSAMETLKLSDVVIGMESTSIYGNHLVHSLREDGTLGRYQRKIHVLNPKQVNRFKESYPDLPKNDWVDAFVIADCLRFGRIRSEVYMDDYRYEALKTLTRARFYAVQNLAREKQRFANLLFLKCSGLAQSADIKNTSSTVLSLMEEYETVDDLANADLEDLTAFVTAAGRGRFADPENTAKTLQAAARGSYRLPKTINDSVNQAMSVSIATMRSMKEQIKALEKAIEQQFEIIPNTLTSIPGIGKVYSAGIIAEIGDINRFQSQASVAKYAGLVWTQHQSGNFEAENTRMIKSGNRFLRYYLLEAANSVRGCDPEFQRYYDLKYHEVNRGQHKRALALTARKLVRLVFRLLKDNRLYNRW
